United States Patent Application Publication US 2018/0126003 A1 - sequence listing, part 97

SEQ ID NO: 175820 - DNA, 2670 bp, Artificial Sequence
  derived and/or modified sequence
atggaggagggcgccccccggcagcccggccccagccagtggcccccagaagatgaaaaagaggtcattcgccgcgctatccagaaagagctgaaaataaaggagggtgtggaaaatctcagacgcgtggccaccgataggaggcatctgggacacgtgcagcagcttttgcggtcttcgaatcgtcggttggagcaattacacggggaactgagggagcttcatgcacgtattctcttaccgggacccggtcccggtccggccgagccagtggcaagcggaccacgtccatgggccgagcaactcagagcacgacatctcgaggctctgaggcgtcagctgcacgttgaattgaaagtgaaacaaggagctgagaatatgacgcatacatgtgcgtcaggaactcctaaggagcgcaaactccttgctgcagcacagcagatgcttagggattctcagttgaaagtagccctactccggatgaaaataagctcactggaagcatccggatcaccagaaccaggtccagaattactggctgaggagctgcagcatcgccttcacgtcgaggctgctgttgccgaaggagcaaagaatgtggttaaattgttatcttctagaagaacacaggatagaaaagcacttgcagaagcacaagcacagctccaggagtcctctcaaaagctggacctcctccgcctggccctcgaacagctacttgaacagctgccccccgcgcatcctttgcgctctagagtcactcgggaactgagggcagccgtgcccggctaccctcagccctctgggactccagtgaagccgactgccctgaccggcaccctgcaggtaaggctcctgggctgtgagcagctgctgaccgccgtgcctgggcgttcgcccgctgctgctctggcctcctctccttcagaaggatggctgagaacgaaagccaagcaccagaggggccgcggcgagttagcatcagaggtgttggctgtgctgaaggtcgataaccgtgtggtgggacagactggctgggggcaggttgccgaacagtcctgggatcaaacgtttgtgattcccctggaaagggcgagagaactcgaaataggagttcactggagagattggagacagctctgtggggtagctttcttgcgtttggaggatttcctggacaacgcatgccatcagctcagcctgagtttagtgccccagggacttctgttcgcccaggtaacgttctgcgatccagtcattgagcgtagacccagactgcaacggcaggagcggatctttagcaagaggcggggtcaggacttcctgcgcgcttcccagatgaacctgggaatggccgcttggggaaggctggtgatgaatctgctcccaccgtgttcctccccaagcaccatttctcctcccaaaggctgcccacgcacacctacgactcttcgggaagccagtgatccggccaccccttccaactttttgcccaagaagacccctttgggagaagagatgactcccccgcccaagccccctcgcctgtatctcccgcaggaaccaacaagcgaggagacccctcgtacaaaaagaccgcacatggagcctcgtacgaggagaggccccagcccacccgcatcacccacccggaaaccccccaggctccaagatttccggtgccttgccgtgcttggtaggggtcattttggaaaggttttacttgtccaatttaaaggaaccggcaagtactatgctatcaaagccttgaaaaaacaggaggtgttatcgagggatgagatagagtctttatactgtgagaaaagaatcctggaggctgtgggttgtacgggccacccttttctgctttctctcctggcgtgctttcagactagttcccatgcctgcttcgtgaccgagtttgtaccaggtggcgatctcatgatgcagatccacgaggacgtatttcccgagccccaggcgagattctatgtagcatgcgtcgtgctggggctgcagttcctgcatgaaaaaaaaatcatttaccgcgatctgaagctggataacctgctgctcgatgcacaagggtttttgaagatcgcagactttggactgtgcaaggaaggcatcggattcggtgaccggacttcgaccttctgcggcaccccagagtttctggctcccgaggtgcttactcaggaggcctacactagggccgtagattggtggggactgggcgtgctcctgtacgaaatgctcgtgggcgaatgtccttttccaggagacacagaggaagaggtgtttgattgtatcgtgaatatggacgcaccttatccaggctttttgtcagtgcaggggctagaattcattcagaagctgctgcagaagtgccctgagaagcgactgggcgctggtgaacaggatgccgaagagatcaaggttcagcccttcttccgcaccaccaattggcaggctttgctagctcgtacaatccagcctccgtttgtgcccacactctgcggccctgctgatctgagatactttgaaggagagtttactgggttgcctcccgctttgacccctcccgctccccactccttgctgacggctagacagcaagccgcgtttcgagacttcgattttgtgagtgagcggtttctggagccctag

SEQ ID NO: 175821 - DNA, 2670 bp, Artificial Sequence
  derived and/or modified sequence
atggaggaaggagcaccgcgacaaccagggcctagccagtggcctcccgaggatgagaaagaggtcattcgccgagctattcagaaagaacttaaaatcaaagaaggcgtcgagaatctgagacgcgtggcaacagatcggagacacttggggcacgttcagcagctgctgcgctcttccaacagacggcttgagcagctgcacggagaattgagggagctgcacgcacggatcctgctgcccggacctggacctggacctgctgagcccgtagcctccggcccacgcccttgggctgaacaactccgcgctcgtcacttggaagcactcagaagacagctgcacgttgagctcaaggtgaaacaaggcgctgagaacatgactcatacttgcgcaagcgggacaccaaaagagaggaaactcctcgctgctgcccagcaaatgctgagagactctcaattgaaagtggcgttgctgaggatgaagatctccagcctggaggcatcaggcagtcccgagccaggcccagaactgttggctgaggaactgcaacatcgcctccatgttgaggccgctgtggctgaaggagcaaagaacgtagtcaaattgctgtcctctagaagaacccaggatcgcaaggctttagctgaagctcaagcacaactccaggaatcctcccaaaagttggacctgttacggttggcgctggaacagctcctcgaacagttgccccctgcgcaccctctgcggagtcgggtaactcgggaactgcgcgctgcggttccagggtatccccaaccttcaggcactcccgtaaagcctaccgccctgactggcactctgcaggtccgtcttttggggtgtgagcagctattaactgccgtccccggaaggtcacccgctgcagccttggcttcttcaccatcggagggttggctgcgcaccaaggccaaacatcaacggggacgtggagagctcgccagcgaggtcctcgccgtacttaaggtggacaaccgggtggtaggccagactgggtggggtcaggtggccgaacaatcctgggaccagacctttgtcattcctctcgagagggcccgtgagttggaaatcggcgttcactggcgagactggcgccagctttgcggggtggcttttctgaggctggaggatttcctggacaacgcctgtcaccagttatctttatctctggtcccacagggtctgctttttgctcaagtgacgttttgcgacccagttattgaacgtcggcctagactgcagaggcaagagaggattttttccaaacggcgtgggcaggattttttaagagcaagccagatgaacctggggatggctgcgtggggcagactggtgatgaacttgctccctccttgctcctcaccatccactatttcccctcccaaaggatgtccgagaaccccaacaacactgcgcgaagcttccgatccggctacaccgtcgaactttctccccaagaaaactccgctgggcgaagagatgactcccccacccaagcctcccaggctgtaccttccacaggagcctactagtgaggaaacgccgcgtacaaaacggccacatatggaacctcgcacccggcgagggccaagtccgcctgcatctcccacgcgcaaaccaccacgcctgcaggatttcagatgtctggccgtgctgggacgtggtcactttggcaaggttctcctggtgcagttcaaagggacgggtaagtactacgccattaaagccctgaaaaagcaagaggtcctgagtcgtgacgagattgaaagtttgtattgcgagaaacggatattggaagccgtaggttgcacaggccacccattcctgcttagcctattagcctgctttcagacgtcctctcacgcctgttttgtcaccgagtttgtgcccggaggagatctgatgatgcagatccacgaggatgtgttccctgaacctcaggctcgcttttatgtagcatgtgtggttctgggccttcagttcctccacgagaagaagattatttatcgtgacctaaaactagacaacctcttattggatgctcaggggttcctgaaaattgccgactttggcctgtgtaaagagggtatcggtttcggcgacaggacgtccactttttgcggtacccccgagtttttggcccctgaggtgcttacccaggaagcatacacccgagccgtggactggtggggcctcggcgtgctgctgtacgagatgctcgtaggagagtgtcccttcccaggagatacagaggaggaagtcttcgattgcattgttaatatggacgccccttatccaggcttcttatctgtgcaagggctggaatttatacagaaactgctccagaagtgtccagaaaagaggctgggcgctggagaacaggatgcagaagaaatcaaggtccagcccttcttccgtacaaccaactggcaggccctcctggcaaggactattcagcctcccttcgtgccaaccctctgcggccctgcagacctgcgctatttcgaaggcgagttcacaggcctgccaccagccctgactccgcctgcccctcattcactgttgaccgcgagacagcaggccgctttccgagactttgacttcgtcagcgaacgctttctggagccatag

SEQ ID NO: 175822 - DNA, 3375 bp, Artificial Sequence
  derived and/or modified sequence
ggctcccgcgggcgcgcggcggggaaggccagaggacctgggcgcgggcgatgtgcctcctgagcgtccaaaccgggggtgaggcgcggtcacgcccagcgggaaccgcaggcgccgaagcccgggtactgggcccagaatcccgcggaattttggatccgagggaggcgctggggcgcgggacctcgggcgtggggtcccgggcgctggatcggcgcggacgggaggcggcgctggtcccgcgggccagcgggtctcgggagggggcgcccgatcccgcgtctccggcgccgcttcccgggaagtttcaagtttgaaagtcctggcggagggtctgcggcttccgggaccggagtggctgagagaagggccccaagcggccggagcggcgccatggaggagggggcgccgcggcagcctgggccgagccagtggcccccagaggatgagaaggaggtgatccgccgggccatccagaaagagctgaagatcaaggagggggtggagaacctgcggcgcgtggccacagaccgccgccacttgggccatgtgcagcagctgctgcggtcctccaaccgccgcctggagcagctgcatggcgagctgcgggagctgcacgcccgaatcctgctgcccggccctgggcctggcccagctgagcctgtggcctcaggaccccggccgtgggcagagcagctcagggctcggcacctagaggctctccggaggcagctgcatgtggagctgaaggtgaagcagggggctgagaacatgacccacacgtgcgccagtggcacccccaaggagaggaagctcctggcagctgcccagcagatgctgcgggacagccagctgaaggtggccctgctgcggatgaagatcagcagcctggaggccagtgggtccccggagccagggcctgagctgctggcggaggagctacagcatcgactgcacgttgaggcagctgtggctgagggcgccaagaacgtggtgaaactgcttagtagccggagaacacaggaccgcaaggcactggctgaggcccaggcccagctacaggagtcctctcagaaactggacctcctgcgcctggccttggagcagctgctggagcaactgcctcctgcccaccctttgcgcagcagagtgacccgagagttgcgggctgcggtgcctggatacccccagccttcagggacacctgtgaagcccaccgccctaacagggacactgcaggtccgcctcctgggctgtgaacagttgctgacagccgtgcctgggcgctccccagcggccgcactggccagcagcccctccgagggctggcttcggaccaaggccaagcaccagcgtggccgaggcgagcttgccagcgaggtgctggctgtgctaaaggtggacaaccgtgttgtggggcagacgggctgggggcaggtggccgaacagtcctgggaccagacctttgtcatcccactggagcgagcccgtgagctggagattggggtacactggcgggactggcggcagctatgtggcgtggccttcctgagacttgaggacttcctggacaatgcctgtcaccaactgtccctcagcctggtaccgcagggactgctttttgcccaggtgaccttctgcgatcctgtcattgagaggcggccccggctgcagaggcaggaacgcatcttctctaaacgcagaggccaggacttcctgagggcttcgcagatgaacctcggcatggcggcctgggggcgcctcgtcatgaacctgctgcccccctgcagctccccgagcacaatcagcccccctaaaggatgccctcggaccccaacaacactgcgagaggcctctgaccctgccactcccagtaatttcctgcccaagaagacccccttgggtgaagagatgacacccccacccaagcccccacgcctctacctcccccaggagccaacatccgaggagactccgcgcaccaaacgtccccatatggagcctaggactcgacgtgggccatctccaccagcctcccccaccaggaaaccccctcggcttcaggacttccgctgcttagctgtgctgggccggggacactttgggaaggtcctcctggtccagttcaaggggacagggaaatactacgccatcaaagcactgaagaagcaggaggtgctcagccgggacgagatagagagcctgtactgcgagaagcggatcctggaggctgtgggctgcacagggcaccctttcctgctctccctccttgcctgcttccagacctccagccatgcctgctttgtgactgagtttgtgcctggtggtgacctcatgatgcagatccacgaggatgtcttccccgagccccaggcccgcttctacgtggcttgtgttgtcctggggctgcagttcttacacgagaagaagatcatttacagggacctgaagttggataaccttctgctggatgcccagggattcctgaagatcgcagactttggactctgcaaggaagggatcggcttcggggaccggactagcaccttctgtggcaccccggagttcctggctcccgaggtgctgacccaggaggcatacacacgggctgtggactggtgggggctgggtgtgctgctctacgagatgctggtgggtgagtgcccgttcccaggggacacagaggaagaggtgtttgactgcatcgtcaacatggacgccccctaccccggctttctgtcggtgcaagggcttgagttcattcagaagctcctccagaagtgcccggagaagcgcctcggggcaggtgagcaggatgccgaggagatcaaggtccagccattcttcaggaccaccaactggcaagccctgctcgcccgcaccatccagccccccttcgtgcctaccctgtgtggccctgcggacctgcgctactttgagggcgagttcacagggctgccgcctgccctgaccccacctgcaccccacagcctcctcactgcccgccaacaggccgccttccgggacttcgactttgtgtcagagcgattcctggaaccctgagggcatctcctggcacctctgtccccttcccccacagactgttagagcctctgctcgttcacccgtgcgccctgcctggaggtccaggccttgctgggtacttctgagcccttgggattcaaagtggcagccatggggccactgttgtgggctttgctcagtgtcactgggcaaagtgtgtcccttccccctccagctcgccctcttctacctcccagcgagacctggcccagaaagggtgccgcagcaaggagtgatatggtttgtctttttaagactggacttgctttatattaaatttgtaaaagtgtg

SEQ ID NO: 175823 - DNA, 2670 bp, Artificial Sequence
  derived and/or modified sequence
atggaggagggcgcccccagacagcccggccccagccagtggccccccgaggacgagaaggaggtgatcagaagagccatccagaaggagctgaagatcaaggagggcgtggagaacctgagaagagtggccaccgacagaagacacctgggccacgtgcagcagctgctgagaagcagcaacagaagactggagcagctgcacggcgagctgagagagctgcacgccagaatcctgctgcccggccccggccccggccccgccgagcccgtggccagcggccccagaccctgggccgagcagctgagagccagacacctggaggccctgagaagacagctgcacgtggagctgaaggtgaagcagggcgccgagaacatgacccacacctgcgccagcggcacccccaaggagagaaagctgctggccgccgcccagcagatgctgagagacagccagctgaaggtggccctgctgagaatgaagatcagcagcctggaggccagcggcagccccgagcccggccccgagctgctggccgaggagctgcagcacagactgcacgtggaggccgccgtggccgagggcgccaagaacgtggtgaagctgctgagcagcagaagaacccaggacagaaaggccctggccgaggcccaggcccagctgcaggagagcagccagaagctggacctgctgagactggccctggagcagctgctggagcagctgccccccgcccaccccctgagaagcagagtgaccagagagctgagagccgccgtgcccggctacccccagcccagcggcacccccgtgaagcccaccgccctgaccggcaccctgcaggtgagactgctgggctgcgagcagctgctgaccgccgtgcccggcagaagccccgccgccgccctggccagcagccccagcgagggctggctgagaaccaaggccaagcaccagagaggcagaggcgagctggccagcgaggtgctggccgtgctgaaggtggacaacagagtggtgggccagaccggctggggccaggtggccgagcagagctgggaccagaccttcgtgatccccctggagagagccagagagctggagatcggcgtgcactggagagactggagacagctgtgcggcgtggccttcctgagactggaggacttcctggacaacgcctgccaccagctgagcctgagcctggtgccccagggcctgctgttcgcccaggtgaccttctgcgaccccgtgatcgagagaagacccagactgcagagacaggagagaatcttcagcaagagaagaggccaggacttcctgagagccagccagatgaacctgggcatggccgcctggggcagactggtgatgaacctgctgcccccctgcagcagccccagcaccatcagcccccccaagggctgccccagaacccccaccaccctgagagaggccagcgaccccgccacccccagcaacttcctgcccaagaagacccccctgggcgaggagatgacccccccccccaagccccccagactgtacctgccccaggagcccaccagcgaggagacccccagaaccaagagaccccacatggagcccagaaccagaagaggccccagcccccccgccagccccaccagaaagccccccagactgcaggacttcagatgcctggccgtgctgggcagaggccacttcggcaaggtgctgctggtgcagttcaagggcaccggcaagtactacgccatcaaggccctgaagaagcaggaggtgctgagcagagacgagatcgagagcctgtactgcgagaagagaatcctggaggccgtgggctgcaccggccaccccttcctgctgagcctgctggcctgcttccagaccagcagccacgcctgcttcgtgaccgagttcgtgcccggcggcgacctgatgatgcagatccacgaggacgtgttccccgagccccaggccagattctacgtggcctgcgtggtgctgggcctgcagttcctgcacgagaagaagatcatctacagagacctgaagctggacaacctgctgctggacgcccagggcttcctgaagatcgccgacttcggcctgtgcaaggagggcatcggcttcggcgacagaaccagcaccttctgcggcacccccgagttcctggcccccgaggtgctgacccaggaggcctacaccagagccgtggactggtggggcctgggcgtgctgctgtacgagatgctggtgggcgagtgccccttccccggcgacaccgaggaggaggtgttcgactgcatcgtgaacatggacgccccctaccccggcttcctgagcgtgcagggcctggagttcatccagaagctgctgcagaagtgccccgagaagagactgggcgccggcgagcaggacgccgaggagatcaaggtgcagcccttcttcagaaccaccaactggcaggccctgctggccagaaccatccagccccccttcgtgcccaccctgtgcggccccgccgacctgagatacttcgagggcgagttcaccggcctgccccccgccctgaccccccccgccccccacagcctgctgaccgccagacagcaggccgccttcagagacttcgacttcgtgagcgagagattcctggagccctag

SEQ ID NO: 175824 - protein, 504 aa, Artificial Sequence
  derived and/or modified sequence
MGAGGPRRGEGPPDGGWGWVVLGACFVVTGFAYGFPKAVSVFFRALMRDFDAGYSDTAWVSSIMLAMLYGTGPVSSILVTRFGCRPVMLAGGLLASAGMILASFATRLLELYLTAGVLTGLGLALNFQPSLIMLGLYFERRRPLANGLAAAGSPVFLSALSPLGQQLLERFGWRGGFLLLGGLLLHCCACGAVMRPPPGPGPRPRRDSAGDRAGDAPGEAEADGAGLQLREASPRVRPRRRLLDLAVCTDRAFAVYAVTKFLMALGLFVPAILLVNYAKDAGVPDTDAAFLLSIVGFVDIVARPACGALAGLARLRPHVPYLFSLALLANGLTDLSSARARSYGALVAFCVAFGLSYGMVGALQFEVLMAAVGAPRFPSALGLVLLVEAAAVLIGPPSAGRLVDVLKNYEIIFYLAGSEVALAGVFMAVATNCCLRCAKAAPSGPGTEGGASDTEDAEAEGDSEPLPVVAEEPGNLEALEVLSARGEPTEPEIEARPRLAAESV

SEQ ID NO: 175825 - protein, 97 aa, Artificial Sequence
  derived and/or modified sequence
MGAGGPRRGEGPPDGGWGWVVLGACFVVTGFAYGFPKAVSVFFRALMRDFDAGYSDTAWVSSIMLAMLYGTGPVSSILVTRFGCRPVMLAGGLLASA

SEQ ID NO: 175826 - DNA, 1515 bp, Artificial Sequence
  derived and/or modified sequence
atgggcgccggcggccccagaagaggcgagggcccccccgacggcggctggggctgggtggtgctgggcgcctgcttcgtggtgaccggcttcgcctacggcttccccaaggccgtgagcgtgttcttcagagccctgatgagagacttcgacgccggctacagcgacaccgcctgggtgagcagcatcatgctggccatgctgtacggcaccggccccgtgagcagcatcctggtgaccagattcggctgcagacccgtgatgctggccggcggcctgctggccagcgccggcatgatcctggccagcttcgccaccagactgctggagctgtacctgaccgccggcgtgctgaccggcctgggcctggccctgaacttccagcccagcctgatcatgctgggcctgtacttcgagagaagaagacccctggccaacggcctggccgccgccggcagccccgtgttcctgagcgccctgagccccctgggccagcagctgctggagagattcggctggagaggcggcttcctgctgctgggcggcctgctgctgcactgctgcgcctgcggcgccgtgatgagacccccccccggccccggccccagacccagaagagacagcgccggcgacagagccggcgacgcccccggcgaggccgaggccgacggcgccggcctgcagctgagagaggccagccccagagtgagacccagaagaagactgctggacctggccgtgtgcaccgacagagccttcgccgtgtacgccgtgaccaagttcctgatggccctgggcctgttcgtgcccgccatcctgctggtgaactacgccaaggacgccggcgtgcccgacaccgacgccgccttcctgctgagcatcgtgggcttcgtggacatcgtggccagacccgcctgcggcgccctggccggcctggccagactgagaccccacgtgccctacctgttcagcctggccctgctggccaacggcctgaccgacctgagcagcgccagagccagaagctacggcgccctggtggccttctgcgtggccttcggcctgagctacggcatggtgggcgccctgcagttcgaggtgctgatggccgccgtgggcgcccccagattccccagcgccctgggcctggtgctgctggtggaggccgccgccgtgctgatcggcccccccagcgccggcagactggtggacgtgctgaagaactacgagatcatcttctacctggccggcagcgaggtggccctggccggcgtgttcatggccgtggccaccaactgctgcctgagatgcgccaaggccgcccccagcggccccggcaccgagggcggcgccagcgacaccgaggacgccgaggccgagggcgacagcgagcccctgcccgtggtggccgaggagcccggcaacctggaggccctggaggtgctgagcgccagaggcgagcccaccgagcccgagatcgaggccagacccagactggccgccgagagcgtgtag

SEQ ID NO: 175827 - DNA, 294 bp, Artificial Sequence
  derived and/or modified sequence
atgggcgccggcggccccagaagaggcgagggcccccccgacggcggctggggctgggtggtgctgggcgcctgcttcgtggtgaccggcttcgcctacggcttccccaaggccgtgagcgtgttcttcagagccctgatgagagacttcgacgccggctacagcgacaccgcctgggtgagcagcatcatgctggccatgctgtacggcaccggccccgtgagcagcatcctggtgaccagattcggctgcagacccgtgatgctggccggcggcctgctggccagcgcctag

SEQ ID NO: 175828 - DNA, 1515 bp, Artificial Sequence
  derived and/or modified sequence
atgggggcaggcggccctaggcgcggggagggccctccagacgggggctggggctgggttgtcctgggagcatgctttgtcgtgaccggcttcgcgtacggctttcctaaagccgtgtccgtgtttttccgtgctcttatgagagacttcgatgctgggtacagcgacactgcttgggttagttctatcatgttagctatgttgtacggcacaggcccagtgagctctatcctcgtcactaggttcggatgccggcccgtcatgctggctggaggactgttagcatccgctgggatgattctggcctccttcgcaactcgtctcctggagctttacttgaccgcaggcgtgcttaccggcctcggactggccctgaattttcagcccagcttaataatgctgggactgtactttgagcgcaggagacccctggctaatggcctcgccgccgccggatcccctgtgtttctgagtgctctttcccccctaggtcagcagcttcttgagaggtttggatggcgtggcggtttccttcttttgggtggactgctgcttcactgctgtgcctgcggagccgtgatgaggccaccaccaggccctggaccacggcctaggagagattcagccggagatagagccggcgatgctcctggagaagcagaagccgacggggcaggccttcagttgcgagaagcctctccgcgggtacgacccaggcgccgactgctggacttggcggtgtgcaccgaccgggcctttgctgtctatgctgtgacaaagttcctgatggcacttggtttgtttgtgcccgctatactgttggttaactatgctaaggacgccggcgttcccgatactgatgcagccttcctcctgtcgatcgttggatttgtggacatcgtggcaaggcccgcatgcggcgctttggccggcttggccagactccggccccacgttccttacctgttctccctggccctgcttgccaatgggctcaccgacctctcaagcgccagagcacgatcctacggtgctcttgtggctttttgcgttgcttttggactcagctatgggatggtgggagcccttcagtttgaagtgttaatggccgcagtcggcgccccacgtttcccaagcgccctgggtctggttttgctggtggaggccgccgccgtgctgataggcccaccttctgcaggacgattagttgatgtgctgaaaaattatgagattatcttttacttggctggcagcgaagttgccctcgccggagtgttcatggcagtcgctacaaattgttgtttgaggtgtgccaaagcagccccgagcgggcccgggactgaaggcggcgcgtcagatacggaggacgccgaggcagaaggagatagcgagcccctacccgtcgtcgccgaggagccagggaacctagaagcgttagaagttctttccgcccgaggcgaaccaacagagccagaaatcgaggctcggcctcgtctggctgcggaatctgtatag

SEQ ID NO: 175829 - DNA, 294 bp, Artificial Sequence
  derived and/or modified sequence
atgggcgctggaggaccccggagaggagagggtccacccgacggcgggtggggatgggttgtactgggggcctgtttcgtggttacaggatttgcatacggcttccctaaagctgtgtcagtgttttttcgcgccctgatgagggacttcgatgcaggctactccgacactgcatgggtctccagcattatgttggctatgctttacggcacaggtcctgtctcctcaattctggtgacccggtttggctgtcggcctgtgatgctggctggaggcctactggccagtgcatag

SEQ ID NO: 175830 - DNA, 1515 bp, Artificial Sequence
  derived and/or modified sequence
atgggcgccggcggccccaggagaggagagggccccccagatggcggctggggctgggtggtgctgggcgcctgctttgtggtgactggatttgcctacggcttccccaaggctgtgtctgtgttcttccgggccctgatgagggactttgatgctggctacagcgacacagcctgggtgagcagcatcatgctggccatgctgtatggaactggacctgtgagcagcatcctggtgacccgcttcggctgcaggcctgtgatgctggccggcggcctgctggccagcgctggcatgatcctggccagctttgccacccggctgctggagctgtacctgacagctggggtgctgaccggcctgggcctggccctgaacttccagcccagcctcatcatgctgggcctgtactttgagaggagaagacccctggccaacggcctggccgctgctggcagccctgtgttcctgagcgccctgagccccctgggccagcagctgctggagagatttggctggaggggcggcttcctgctgctgggcggcctgctgctgcactgctgtgcctgtggggctgtgatgaggcctcctcctggccctggcccccggccccggcgggacagcgctggggacagagctggagatgcccctggagaggccgaggctgatggagctggcctgcagctgcgggaggccagcccccgggtgcggccccggcggcggctgctggacctggccgtgtgcacagaccgggcctttgctgtgtatgctgtgaccaagttcctgatggccctgggcctgtttgtgcctgccatcctgctggtgaactatgccaaggatgctggggtgcctgacacagatgctgccttcctgctgagcatcgtgggctttgtggacatcgtggcccggcctgcctgtggggccctggccggcctggcccggctgcggccccacgtgccctacctgttcagcctggccctgctggccaacggcctgacagacctgagcagcgcccgggcccggagctatggagccctggtggccttctgtgtggccttcggcctgtcctatggcatggtgggcgccctgcagtttgaggtgctgatggctgctgtgggcgccccccgcttccccagcgccctgggcctggtgctgctggtggaggccgctgctgtgctgattggcccccccagcgctggccgcctggtggatgtgctgaagaactatgagatcatcttctacctggccggcagcgaggtggccctggccggggtcttcatggctgtggccaccaactgctgcctgcgctgtgccaaggccgcccccagcggccctggaacagaaggaggagccagtgacacagaagatgctgaggccgagggggacagcgagcccctgcctgtggtggccgaggagcccggcaacctggaggccctggaggtgctgagcgcccggggggagcccacagagcctgagattgaggcccggccccggctggccgctgagagcgtgtag

SEQ ID NO: 175831 - DNA, 294 bp, Artificial Sequence
  derived and/or modified sequence
atgggcgccggcggccccaggagaggagagggccccccagatggcggctggggctgggtggtgctgggcgcctgctttgtggtgactggatttgcctacggcttccccaaggctgtgtctgtgttcttccgggccctgatgagggactttgatgctggctacagcgacacagcctgggtgagcagcatcatgctggccatgctgtatggaactggacctgtgagcagcatcctggtgacccgcttcggctgcaggcctgtgatgctggccggcggcctgctggccagcgcctag

SEQ ID NO: 175832 - DNA, 1515 bp, Artificial Sequence
  derived and/or modified sequence
atgggcgccggcggcccccggcggggcgagggcccccccgacggcggatggggttgggtggtactcggcgcttgcttcgtggtgaccggtttcgcatatgggttccctaaagctgttagtgtgttttttcgcgcactcatgagagattttgacgctggctatagcgatacggcctgggtttcatccatcatgctggctatgctatatggaacaggcccggtgtcatctatcctagtcacacgcttcggatgtcggcctgtgatgctcgctggggggctattggctagcgcaggaatgatcttggctagtttcgctacccgtctgctggagctgtacctcaccgccggagtactgactggcctggggctggctctcaattttcagcccagtctgatcatgttagggttgtacttcgaacgtcgccgaccacttgcaaatggcttagccgctgcaggatctcccgtctttctctccgcgctgtctccgctgggacagcaactgctagagcgttttggatggcgaggtgggttcttgttgctaggaggtcttctgctccactgctgcgcatgcggggcagtcatgcggcccccaccaggtccgggacctcggccacggagggattctgccggagatagggcgggggacgcaccaggagaggccgaggctgatggggccggattgcagctgagggaggcctcccccagagtgagaccaagacggagactgctggacctagccgtttgcacagatagggccttcgccgtttatgctgtgaccaagtttctgatggccttagggctgtttgtgcccgctattcttctcgtcaactatgccaaggatgcgggggtccccgacactgatgccgcctttttgttatcgatcgtcgggttcgttgacatcgtggcacggccggcctgcggggcgttagcaggtctggcgagattgcgccctcacgttccttacctattctcacttgctttactagctaatggtctcacggacctcagtagtgcccgagctcggtcatatggagccctggtagccttttgcgtggcctttggtctgagctatggcatggtgggcgccttgcagtttgaggttctgatggcagcggtcggcgcaccacggttcccatcagccttgggcctagtgctgcttgtagaagccgcggcagtcctcatcggtcccccaagtgcaggccgtttagtagacgtgctcaagaattacgagattatcttctacctcgctggatccgaagttgcattggctggcgtcttcatggctgttgccacaaactgctgcctgagatgcgctaaagccgccccctcaggccctggcaccgagggaggtgcaagtgataccgaggatgccgaggccgaaggagactcggagccccttccagtggtggccgaagagcccggaaatttagaggctcttgaagtgctgagcgcacgaggcgagccaactgaacccgaaattgaggcccggccccgtttggctgcagagtctgtatag

SEQ ID NO: 175833 - DNA, 294 bp, Artificial Sequence
  derived and/or modified sequence
atgggcgccggcggcccccggcggggcgagggcccccccgacggcggttggggctgggttgtcctgggcgcatgtttcgtggtcacaggttttgcctacggttttccaaaagctgtatccgtgttcttcagagcgctgatgcgagatttcgacgcaggttattcggataccgcatgggtgtctagcattatgctcgccatgctgtacgggactgggcctgtctcttccatcctcgttacaaggttcggctgccgaccagtcatgctcgcgggcggtctgttggcgtctgcctag

SEQ ID NO: 175834 - DNA, 1515 bp, Artificial Sequence
  derived and/or modified sequence
atgggcgcagggggaccaaggcggggagagggcccacctgacggaggatgggggtgggtcgtcctgggagcttgcttcgtggtgacaggctttgcctacggctttcctaaggcagtgtccgtctttttcagggccctgatgcgggatttcgatgctgggtatagtgataccgcttgggtttcatctataatgctggccatgctctacggtacggggccagtatccagcattcttgttacccggttcggatgtcgccctgtgatgctggccggagggctgctggcttccgccggtatgattctggcctcgtttgccacacggttgttggagctgtacctgaccgcgggagtcctcaccggcctgggacttgcccttaactttcaacctagtctcattatgctgggactctacttcgaacggagaagaccactggctaatggactggccgctgcgggatcgcctgtgtttctgagcgcgttgtcacccctcggtcagcagctactagagcggtttggctggagaggcggatttctgctgctaggcggactgctcttgcattgctgcgcctgtggcgcagtcatgaggccaccacctgggccaggccctagaccacggagagactctgccggagatcgtgcaggagatgcccctggcgaagcagaagccgacggtgccggacttcagttgcgagaagcaagtcctagagtccgtccccgtaggcgcttgctggacctggctgtctgcaccgacagagccttcgccgtgtacgccgtcactaaattcctgatggcgctggggctgtttgtccctgcgatccttcttgtcaactacgccaaggacgcgggagtgccagataccgatgccgctttcctgctctcaatcgtcggttttgtcgacatcgtcgcacgccctgcttgcggtgcactggcgggtctggccagactacgtccccacgtaccatatcttttttctctggcactcctcgccaatggattaactgatttgtcttctgcgcgtgcccgatcatatggtgcactggtggctttttgcgtggccttcggcttaagttacggcatggtcggagcccttcagttcgaggtgctgatggccgctgtgggcgctccaaggttcccaagtgctttaggtttggtgttgctggtagaggccgctgctgtactgattggccctccttctgcagggaggctggtggacgtcttaaaaaattatgaaattatcttttacttagccggttctgaggtggccctcgccggtgtattcatggcggtggcaacgaactgctgcctaaggtgcgctaaggcagctccttccggacccggaaccgagggcggagcctctgacaccgaagacgctgaggctgagggagactccgagcccctccctgtggtggcagaagaacccggtaacctcgaagctctggaagttctttcggcccgtggcgaaccaacagagcccgagatagaggccagacctaggctggctgcagagtcagtctag

SEQ ID NO: 175835 - DNA, 294 bp, Artificial Sequence
  derived and/or modified sequence
atgggcgcagggggacccagaagaggagaaggtccacctgacggcggatgggggtgggttgtcctgggcgcatgttttgtggtgaccggcttcgcatatggattccctaaagccgtgagtgtatttttcagggcacttatgagagactttgatgctggttattctgataccgcctgggtgagcagtattatgctggcaatgctttacgggaccggccctgtgagctccatcctggtcacccgttttggctgtagacccgtaatgctagcagggggacttctcgctagcgcatag

SEQ ID NO: 175836 - DNA, 1878 bp, Artificial Sequence
  derived and/or modified sequence
cagttgtccttcagagggagcctgcagaggtgcagagtcaggtgggacccgtcgtcctcccctcgtccttcagcgccctttgcaggagaaggagacttgggaggcagcgatgggcgctggcggcccccggcggggcgagggccccccagacggcggctggggctgggtggtgctgggcgcctgctttgtggtcaccggcttcgcctacggcttccccaaagccgtgagcgtcttcttccgcgcgctcatgcgcgacttcgacgccggctacagcgacacggcctgggtgtcctccatcatgctagccatgctctacggcacgggccccgtgtccagcatcctcgtgacccgctttggctgtcgcccggtgatgctggcgggtgggctgctggcttccgcgggcatgatcctagcttcctttgccacgcgcctcctggagctctacctgaccgctggggtgctcacaggcctgggcctggccctcaacttccagccgtcgctcatcatgctggggctgtacttcgagcggcggcggcctctggccaacgggctggcggcggcgggcagccccgtgttcctgtccgcgctgtcgccgctcggccagcagctgctggagcgcttcggctggcgcggcggcttcctgctgctcggcgggctcctgctgcactgctgcgcctgcggggctgtcatgaggccgccgcccgggccgggcccgcgaccgcgcagggacagcgccggcgaccgcgccggggacgctccgggcgaggcggaggctgacggtgcggggctgcagctgcgcgaggcatcccccagggtccggccccgccggcgcctgctggacttggcagtgtgcaccgaccgcgccttcgccgtgtacgccgtcaccaagttcctgatggcgctcgggctcttcgtccccgccatcctgctggtgaactacgccaaggacgcgggcgtgcccgacaccgacgccgccttcctgctgtccatcgtgggcttcgtggacatcgtggcgcgcccggcgtgcggcgccctggcgggcctggcgcgtctgcggccgcacgtcccgtatctgttcagcctggccctgctggccaatgggctcacagacctgagcagcgcacgcgcgcgctcctacggcgccctcgtcgccttctgcgtcgccttcggcctctcctacggcatggtgggcgcgctgcagttcgaggtgctcatggcggctgtgggcgcgccccgcttccccagtgcgctgggcctggtgttgctcgtggaggccgcggctgtgctcatcggaccgccctctgccggccgcctggtggatgtgttgaagaactatgagatcatcttctacctggccggctctgaggtggccctggctggggtcttcatggctgtcgccaccaactgctgcctgcgttgtgctaaagctgccccgtcaggcccaggcactgagggcggagccagtgacactgaggacgctgaggctgaaggggactctgagcccctgcctgttgttgcagaggaacccggcaacctggaggccctggaggtgctcagcgcccggggcgagcccacagaaccagaaatagaggcgaggccgaggctggctgccgagtctgtataactcagggtgctctgggtggggtggcccagtgacttgggaacacagcttcttgtctcagagagcctggtacgctgggaggctggtctggggtggtcactcccggggtccacgtctgggctccagttgatcccctgggtgtctgggaactgcctccctcatctgtgccccaagttccgccaggccctgccccatcgccagtgaagctgctatggagcaacaggaaactggtgataaagctcagctgaacgacagaa

SEQ ID NO: 175837 - DNA, 726 bp, Artificial Sequence
  derived and/or modified sequence
gcagcccccatccgggtaagcttcaccgggagctgcggcggcggcccctccctgcaggcctcaggagatgtgaggctggacccccaaacccacgaggcaggctcagtcatttgtgatcactgagaaacattaggaacatggcggaaggctaaagaggaaaatcacgcacagcggccctttgcagccggcatctgcccctctgctgtttgttctgttgtcccgagaccctcacgcgtacggggcgactttggtgctggacgcccacctccaggcacatacctgctccacttcccgacgccttccacctgaggccctgaggggccagcagttgtccttcagagggagcctgcagaggtgcagagtcaggtgggacccgtcgtcctcccctcgtccttcagcgccctttgcaggagaaggagacttgggaggcagcgatgggcgctggcggcccccggcggggcgagggccccccagacggcggctggggctgggtggtgctgggcgcctgctttgtggtcaccggcttcgcctacggcttccccaaagccgtgagcgtcttcttccgcgcgctcatgcgcgacttcgacgccggctacagcgacacggcctgggtgtcctccatcatgctagccatgctctacggcacgggccccgtgtccagcatcctcgtgacccgctttggctgtcgcccggtgatgctggcgggtgggctgctggcttccgcgg

SEQ ID NO: 175838 - protein, 415 aa, Artificial Sequence
  derived and/or modified sequence
MRGANAWAPLCLLLAAATQLSRQQSPERPVFTCGGILTGESGFIGSEGFPGVYPPNSKCTWKITVPEGKVVVLNFRFIDLESDNLCRYDFVDVYNGHANGQRIGRFCGTFRPGALVSSGNKMMVQMISDANTAGNGFMAMFSAAEPNERGDQYCGGLLDRPSGSFKTPNWPDRDYPAGVTCVWHIVAPKNQLIELKFEKFDVERDNYCRYDYVAVFNGGEVNDARRIGKYCGDSPPAPIVSERNELLIQFLSDLSLTADGFIGHYIFRPKKLPTTTEQPVTTTFPVTTGLKPTVALCQQKCRRTGTLEGNYCSSDFVLAGTVITTITRDGSLHATVSIINIYKEGNLAIQQAGKNMSARLTVVCKQCPLLRRGLNYIIMGQVGEDGRGKIMPNSFIMMFKTKNQKLLDALKNKQC

SEQ ID NO: 175839 - DNA, 1248 bp, Artificial Sequence
  derived and/or modified sequence
atgagaggtgcgaatgcctgggcccctctgtgtctgctgttagcagctgcgactcagctctctcgtcagcagtctcctgagcggccagtattcacttgtggcggtatcctgaccggtgaatcaggcttcatcgggagcgagggatttcccggagtgtatccccctaattctaagtgcacttggaagatcactgtgccagagggcaaggtggtggttctgaacttcagattcatcgacctggaaagcgataatctctgccgctacgattttgtggacgtttacaatggccacgcaaacgggcagaggatcggtaggttctgtggaacgtttcggcctggggcccttgtgagctctggaaataagatgatggtgcaaatgatcagcgacgcaaacacggccggtaacggctttatggctatgttctccgccgccgaacctaatgaaagaggggaccagtactgcggagggctgttagatcgcccttccggctccttcaagaccccgaactggcctgaccgcgattaccctgcaggggttacttgcgtatggcacatcgtcgcgcccaagaatcagttgattgagctgaagttcgagaaatttgacgtggagcgggacaattactgccgctacgattacgtcgccgtgttcaacggcggcgaggtcaatgatgcccggcgcattggcaaatactgcggagacagcccccctgctcccatcgtgtcagagcggaacgagctcttgattcagtttctgagcgatttatcacttactgccgacggatttattggccactacatattccgccccaaaaagctacctacgacaacagagcaacccgtcacaaccacatttccagttacaaccggcctgaaaccaacggtcgcgctgtgccagcagaaatgtaggagaacaggaacactggaggggaattattgctccagcgattttgtcctcgcgggcacggtcatcaccactattaccagagatggcagcttacacgccacagtatcaatcatcaacatctataaagaaggaaatcttgctatacagcaggccggaaagaacatgtccgccaggctgactgtagtttgcaaacagtgtcctttgcttcggagggggctgaactatataattatgggccaggtgggcgaagacggcaggggaaagataatgcccaacagttttatcatgatgtttaagactaagaaccagaaactactggacgcgctaaagaacaaacagtgttag

SEQ ID NO: 175840 - DNA, 1248 bp, Artificial Sequence
  derived and/or modified sequence
atgagaggagccaatgcctgggcccccctgtgcctgctgctggccgccgccacccagctgagccggcagcagagccctgagaggcctgtgttcacctgtggcggcatcctgaccggggagagcggcttcatcggcagcgagggcttccctggggtgtacccacccaacagcaagtgcacctggaagatcaccgtgcctgagggcaaggtggtggtgctgaacttccgcttcatcgacctggagagtgacaacctgtgccgctatgactttgtggatgtgtacaatggacatgccaacggccagagaattggccgcttctgtggcaccttccggcctggggccctggtgagcagcggcaacaagatgatggtgcagatgatcagtgatgccaacacagctggaaatggcttcatggccatgttttctgctgctgagcccaatgaaagaggagaccagtactgcggcggcctgctggaccggcccagcggcagcttcaagacccccaactggccagaccgggactacccagctggggtgacctgtgtgtggcacatcgtggcccccaagaaccagctgattgagctgaagtttgagaagtttgatgtggagcgggacaactactgccgctatgactatgtggccgtgttcaatggaggagaggtgaatgatgccaggagaattggcaagtactgtggggacagccccccagcccccatcgtgtctgaaagaaatgagctgctgatccagttcctgagtgacctgagcctgacagcagatggcttcatcggccactacatcttccggcccaagaagctgcccaccaccacagagcagcctgtgaccaccaccttccctgtgaccaccggcctgaagcccaccgtggccctgtgccagcagaagtgcagaagaacaggcaccctggagggcaactactgcagcagtgactttgtgctggccggcaccgtcatcaccaccatcaccagagatggcagcctgcacgccaccgtgtccatcatcaacatctacaaggagggcaacctggccatccagcaggccggcaagaacatgtctgcccggctgactgtggtgtgcaagcagtgccccctgctgcggcggggcctgaactacatcatcatgggccaggtgggggaggatggccggggcaagatcatgcccaacagcttcatcatgatgttcaagaccaagaaccagaagctgctggatgccctgaagaacaagcagtgctag

SEQ ID NO: 175841 - DNA, 1248 bp, Artificial Sequence
  derived and/or modified sequence
atgcggggcgccaacgcctgggcccccctgtgcctgctgctggccgcagccactcagttatcccggcagcagagtcctgagaggccagtattcacatgtgggggcattctgacaggggagagcggtttcatcgggtctgaggggttccctggcgtgtaccctccaaattccaagtgcacttggaagattaccgtgcctgaaggcaaggtagtggtgctgaatttcaggtttattgatttggagtcagacaacctttgccggtacgacttcgttgacgtgtataacggccatgccaacgggcagcgtatcggtagattctgcgggacgttccgccccggggctctggtgtcttccggcaacaagatgatggtccagatgatctccgacgcaaatactgcagggaatgggtttatggctatgttttccgcagcagaacccaatgagaggggcgaccaatattgcgggggcctgcttgaccgcccctctggaagcttcaaaacacccaactggcccgacagggactatcccgctggcgtgacttgcgtctggcatattgtcgcccctaagaatcaacttattgagctgaaattcgagaaattcgatgtggaacgcgataactattgtcgctacgactacgtggcagtattcaatggaggtgaggtcaacgatgcccggcgtatcggtaagtactgtggcgactcaccgccggcccctattgtgtccgaaagaaacgaattattgattcagttcctgtccgacctgagcttgaccgcagatggattcatcggacattacatcttccgtcccaagaagcttcccacaacaacagaacaaccagtgacaacaacgttcccagtgacaacaggattgaaacccaccgttgctctctgtcaacagaaatgtcggcgcactggcacgctggagggaaactactgtagttccgatttcgtgctcgcaggcaccgtgattactacgatcactcgcgacggaagtctccacgctaccgtctctatcattaacatctataaggagggtaacttggctatccagcaggcggggaaaaatatgagtgctcgccttacagttgtttgcaaacaatgtcccctcctgcgccggggcttgaactacatcattatggggcaagtgggggaggatgggcggggaaagatcatgcccaattctttcattatgatgtttaagactaaaaaccaaaagttgctggacgctctgaaaaacaagcagtgttag

SEQ ID NO: 175842 - DNA, 1248 bp, Artificial Sequence
  derived and/or modified sequence
atgcgtggggcaaacgcctgggcccctctatgcctgttgttggcggctgccacccagctgagcagacagcagagcccagaaagacccgtcttcacgtgcgggggaatccttacaggcgagagcggctttatcgggagtgaggggttccctggggtatacccgccaaattcaaagtgtacctggaagataaccgttcctgagggcaaggtcgtcgtgctgaattttagattcatcgatctggagtcagacaatctgtgccgttacgacttcgtggatgtctataacgggcacgccaatgggcagcggatcggcagattttgtgggacctttaggcccggagcccttgtcagtagtggaaataagatgatggtgcagatgatctccgatgccaataccgctggtaatggctttatggccatgtttagcgccgcagaaccaaacgagaggggcgatcagtattgcggtgggctgctggacagaccctccggatcattcaagacgcccaactggcctgatcgcgactaccctgcgggagtcacatgcgtgtggcacattgtcgcccctaaaaaccagttgattgagctgaaatttgagaaattcgacgtagaaagagacaactattgccgatatgactacgtcgctgtgtttaatggcggagaggtgaatgatgcgaggaggattggtaagtactgtggtgacagcccacctgccccaatcgtgagcgagaggaatgagctgttgatccagtttctctctgacctgtcactgactgctgatggcttcatcggccactatattttcaggcctaaaaagctaccaacaactaccgagcaaccagtgacaacaacgtttccagtgaccaccggcctgaaacctacggtagcgctctgtcagcagaaatgccgtcggactggaactctggagggcaattattgttcaagtgactttgtactggcgggaaccgtgatcactacaattactagggacggatctttgcacgccacagtgtccatcataaatatctacaaggaagggaatctcgctatacagcaggccggtaaaaacatgagtgctcgactcaccgttgtctgcaagcaatgccccctccttcgacgcggactcaattacataattatgggacaggtcggcgaagacggaaggggcaaaattatgccgaattcgttcattatgatgtttaagactaaaaaccagaagctgctggatgcactgaagaataagcagtgctag

SEQ ID NO: 175843 - DNA, 2021 bp, Artificial Sequence
  derived and/or modified sequence
gaacaaacgggatattcagcagtggcctgtggctgccagagcagctcctcaggggaaactaagcgtcgagtcagacggcaccataatcgcctttaaaagtgcctccgccctgccggccgcgtatcccccggctacctgggccgccccgcggcggtgcgcgcgtgagagggagcgcgcgggcagccgagcgccggtgtgagccagcgctgctgccagtgtgagcggcggtgtgagcgcggtgggtgcggaggggcgtgtgtgccggcgcgcgcgccgtggggtgcaaaccccgagcgtctacgctgccatgaggggcgcgaacgcctgggcgccactctgcctgctgctggctgccgccacccagctctcgcggcagcagtccccagagagacctgttttcacatgtggtggcattcttactggagagtctggatttattggcagtgaaggttttcctggagtgtaccctccaaatagcaaatgtacttggaaaatcacagttcccgaaggaaaagtagtcgttctcaatttccgattcatagacctcgagagtgacaacctgtgccgctatgactttgtggatgtgtacaatggccatgccaatggccagcgcattggccgcttctgtggcactttccggcctggagcccttgtgtccagtggcaacaagatgatggtgcagatgatttctgatgccaacacagctggcaatggcttcatggccatgttctccgctgctgaaccaaacgaaagaggggatcagtattgtggaggactccttgacagaccttccggctcttttaaaacccccaactggccagaccgggattaccctgcaggagtcacttgtgtgtggcacattgtagccccaaagaatcagcttatagaattaaagtttgagaagtttgatgtggagcgagataactactgccgatatgattatgtggctgtgtttaatggcggggaagtcaacgatgctagaagaattggaaagtattgtggtgatagtccacctgcgccaattgtgtctgagagaaatgaacttcttattcagtttttatcagacttaagtttaactgcagatgggtttattggtcactacatattcaggccaaaaaaactgcctacaactacagaacagcctgtcaccaccacattccctgtaaccacgggtttaaaacccaccgtggccttgtgtcaacaaaagtgtagacggacggggactctggagggcaattattgttcaagtgactttgtattagccggcactgttatcacaaccatcactcgcgatgggagtttgcacgccacagtctcgatcatcaacatctacaaagagggaaatttggcgattcagcaggcgggcaagaacatgagtgccaggctgactgtcgtctgcaagcagtgccctctcctcagaagaggtctaaattacattattatgggccaagtaggtgaagatgggcgaggcaaaatcatgccaaacagctttatcatgatgttcaagaccaagaatcagaagctcctggatgccttaaaaaataagcaatgttaacagtgaactgtgtccatttaagctgtattctgccattgcctttgaaagatctatgttctctcagtagaaaaaaaaatacttataaaattacatattctgaaagaggattccgaaagatgggactggttgactcttcacatgatggaggtatgaggcctccgagatagctgagggaagttctttgcctgctgtcagaggagcagctatctgattggaaacctgccgacttagtgcggtgataggaagctaaaagtgtcaagcgttgacagcttggaagcgtttatttatacatctctgtaaaaggatattttagaattgagttgtgtgaagatgtcaaaaaaagattttagaagtgcaatatttatagtgttatttgtttcaccttcaagcctttgccctgaggtgttacaatcttgtcttgcgttttctaaatcaatgcttaataaaatatttttaaaggattaca

SEQ ID NO: 175844 - DNA, 1248 bp, Artificial Sequence
  derived and/or modified sequence
atgagaggcgccaacgcctgggcccccctgtgcctgctgctggccgccgccacccagctgagcagacagcagagccccgagagacccgtgttcacctgcggcggcatcctgaccggcgagagcggcttcatcggcagcgagggcttccccggcgtgtacccccccaacagcaagtgcacctggaagatcaccgtgcccgagggcaaggtggtggtgctgaacttcagattcatcgacctggagagcgacaacctgtgcagatacgacttcgtggacgtgtacaacggccacgccaacggccagagaatcggcagattctgcggcaccttcagacccggcgccctggtgagcagcggcaacaagatgatggtgcagatgatcagcgacgccaacaccgccggcaacggcttcatggccatgttcagcgccgccgagcccaacgagagaggcgaccagtactgcggcggcctgctggacagacccagcggcagcttcaagacccccaactggcccgacagagactaccccgccggcgtgacctgcgtgtggcacatcgtggcccccaagaaccagctgatcgagctgaagttcgagaagttcgacgtggagagagacaactactgcagatacgactacgtggccgtgttcaacggcggcgaggtgaacgacgccagaagaatcggcaagtactgcggcgacagcccccccgcccccatcgtgagcgagagaaacgagctgctgatccagttcctgagcgacctgagcctgaccgccgacggcttcatcggccactacatcttcagacccaagaagctgcccaccaccaccgagcagcccgtgaccaccaccttccccgtgaccaccggcctgaagcccaccgtggccctgtgccagcagaagtgcagaagaaccggcaccctggagggcaactactgcagcagcgacttcgtgctggccggcaccgtgatcaccaccatcaccagagacggcagcctgcacgccaccgtgagcatcatcaacatctacaaggagggcaacctggccatccagcaggccggcaagaacatgagcgccagactgaccgtggtgtgcaagcagtgccccctgctgagaagaggcctgaactacatcatcatgggccaggtgggcgaggacggcagaggcaagatcatgcccaacagcttcatcatgatgttcaagaccaagaaccagaagctgctggacgccctgaagaacaagcagtgctag

SEQ ID NO: 175845 - protein, 606 aa, Artificial Sequence
  derived and/or modified sequence
MEPAMEPETLEARINRATNPLNKELDWASINGFCEQLNEDFEGPPLATRLLAHKIQSPQEWEAIQALTYLGSRTSEKVKNKILELLYSWTVGLPEEVKIAEAYQMLKKQGIVKSDPKLPDDTTFPLPPPRPKNVIFEDEEKSKMLARLLKSSHPEDLRAANKLIKEMVQEDQKRMEKISKRVNAIEEVNNNVKLLTEMVMSHSQGGAAAGSSEDLMKELYQRCERMRPTLFRLASDTEDNDEALAEILQANDNLTQVINLYKQLVRGEEVNGDATAGSIPGSTSALLDLSGLDLPPAGTTYPAMPTRPGEQASPEQPSASVSLLDDELMSLGLSDPTPPSGPSLDGTGWNSFQSSDATEPPAPALAQAPSMESRPPAQTSLPASSGLDDLDLLGKTLLQQSLPPESQQVRWEKQQPTPRLTLRDLQNKSSSCSSPSSSATSLLHTVSPEPPRPPQQPVPTELSLASITVPLESIKPSNILPVTVYDQHGFRILFHFARDPLPGRSDVLVVVVSMLSTAPQPIRNIVFQSAVPKVMKVKLQPPSGTELPAFNPIVHPSAITQVLLLANPQKEKVRLRYKLTFTMGDQTYNEMGDVDQFPPPETWGSL

SEQ ID NO: 175846 - protein, 639 aa, Artificial Sequence
  derived and/or modified sequence
MEPAMEPETLEARINRATNPLNKELDWASINGFCEQLNEDFEGPPLATRLLAHKIQSPQEWEAIQALTVLETCMKSCGKRFHDEVGKFRFLNELIKVVSPKYLGSRTSEKVKNKILELLYSWTVGLPEEVKIAEAYQMLKKQGIVKSDPKLPDDTTFPLPPPRPKNVIFEDEEKSKMLARLLKSSHPEDLRAANKLIKEMVQEDQKRMEKISKRVNAIEEVNNNVKLLTEMVMSHSQGGAAAGSSEDLMKELYQRCERMRPTLFRLASDTEDNDEALAEILQANDNLTQVINLYKQLVRGEEVNGDATAGSIPGSTSALLDLSGLDLPPAGTTYPAMPTRPGEQASPEQPSASVSLLDDELMSLGLSDPTPPSGPSLDGTGWNSFQSSDATEPPAPALAQAPSMESRPPAQTSLPASSGLDDLDLLGKTLLQQSLPPESQQVRWEKQQPTPRLTLRDLQNKSSSCSSPSSSATSLLHTVSPEPPRPPQQPVPTELSLASITVPLESIKPSNILPVTVYDQHGFRILFHFARDPLPGRSDVLVVVVSMLSTAPQPIRNIVFQSAVPKVMKVKLQPPSGTELPAFNPIVHPSAITQVLLLANPQKEKVRLRYKLTFTMGDQTYNEMGDVDQFPPPETWGSL

SEQ ID NO: 175847 - DNA, 1821 bp, Artificial Sequence
  derived and/or modified sequence
atggagcctgcgatggagcccgagacccttgaagcccgcataaatcgggctacgaaccccctcaacaaagagcttgactgggcttcaattaatggcttttgcgaacagttgaatgaggacttcgaaggccccccactggcaactaggctgctcgcccacaagatacagtccccccaggaatgggaggccatccaggcccttacatacttgggctccaggacatccgagaaagtaaaaaacaaaatactggagctcctttactcctggacagtcggattgccagaggaggttaaaattgctgaagcctatcaaatgcttaagaaacaggggatagtaaaatccgatccaaaactgcccgacgatacaacttttcctctgccaccaccacgaccaaaaaacgttatctttgaagatgaagagaagtccaagatgttggcaagattgcttaagtcttcccaccccgaggacttaagggcggcaaacaaactaatcaaagaaatggtgcaggaagatcaaaagagaatggagaaaatatcaaaaagggttaatgccattgaagaagtgaataacaacgtaaaactgctgaccgagatggtcatgtcacactcccagggcggagctgccgcaggatcttccgaagacctgatgaaggaactttaccagcgatgcgagagaatgcgacctaccttgtttaggctggcaagcgacacagaagataacgatgaggcactggcagagattcttcaggcgaatgataatctgacacaagtgattaacctgtataagcaactggttcggggcgaagaagtgaatggcgatgcaaccgctggcagcattcctggaagtacatctgcgctcctggacctgtccggcctcgacctgcctcctgccggcaccacataccctgcgatgcctacacgccctggcgaacaggcttctcccgagcagccatcggcaagtgtgtccttattggatgatgaacttatgagcctcggacttagcgaccctacacctccttccgggcctagcctggacggaactggttggaactccttccagtcttccgatgccaccgagcccccggcccccgcgctcgcgcaggcgccatctatggaaagccgcccccccgcgcaaacaagtttgcctgcttccagcggattagatgatctggacctgcttgggaagacactcctccagcagtctctgccccccgaatcacagcaggtccgatgggagaaacagcagccgacccccagactaacactccgggatcttcagaacaagtcaagcagttgttcgtccccatcaagtagcgctacatcgttgctgcacaccgtatccccggaacctccaaggccaccacagcagcccgtgcctacagagctctctctggcttcaataacagtaccgctggagtctattaaacccagtaatattctgccagtgacagtttacgatcagcacggattcaggattctgttccacttcgctcgtgatcctctcccagggcggagcgacgtgttggtggtcgtggtgtctatgctgtccaccgctccacagcctattagaaatatcgtgttccagtctgctgtaccaaaggtaatgaaggtgaagctccagccaccatccggtacagagctgcctgcttttaaccccatcgtgcacccgtccgccatcacccaagtgcttctgcttgccaaccctcaaaaagagaaggtgagattgcggtacaaactgacctttaccatgggtgaccagacatataatgaaatgggagacgtggaccagttccctcccccagaaacgtgggggagtctgtag

SEQ ID NO: 175848 - DNA, 1920 bp, Artificial Sequence
  derived and/or modified sequence
atggagcctgcaatggagcccgagaccttggaggcgagaattaacagagccaccaatccactcaataaggaactagactgggctagcatcaatggcttctgcgagcaactaaacgaggacttcgaaggccctcctctggcgactaggctactggcccacaaaatacagtctccacaggagtgggaggctatccaggcactgaccgtcctggagacatgtatgaagtcttgcggaaagcgcttccatgatgaggtcgggaaatttcgctttctaaatgagctgatcaaggtggtttctccaaagtatttgggttcccggacaagcgagaaagtcaagaacaagatactcgagctgctttatagctggaccgtgggcttgccagaggaagtaaaaatcgccgaagcctatcaaatgctgaaaaagcagggcatagtaaaatctgatcctaagctcccggacgacaccacatttccactgccccctcccagaccaaagaacgtaatttttgaagacgaggaaaaaagcaagatgttggctaggctcctcaagagcagccaccccgaagatctccgggccgccaataagctcattaaggaaatggtacaagaggaccaaaaaaggatggagaaaatcagcaagcgtgtgaatgctatcgaggaggttaataacaatgtgaaattgcttacagaaatggtcatgagtcactcacaaggaggtgccgcagccgggagctctgaagatttgatgaaggaactctatcagagatgtgaacgcatgcgcccgaccctattcagactcgcctcagacaccgaagacaatgacgaggccttggcagagattttgcaggcaaatgataatctgacccaagtaattaatctctataagcagctggtcaggggggaggaggtgaacggagatgcaactgctggtagcataccaggctccacctccgccctgcttgatctttccggtcttgacctgccccctgcagggactacttaccccgcaatgcctactaggccgggcgagcaggcatcaccagaacagcctagcgcaagtgtgtctctgctagacgatgagctgatgagcttgggcttatcggatcctaccccaccatcaggccccagcctggacggaaccggatggaactccttccaatcatctgatgcaactgaaccccccgcccccgcccttgcccaagctcctagcatggagtctcgtccccctgcacagacctccctgccagcgtcctcaggactagacgaccttgatttgctggggaagaccctgctgcagcagagcctacccccggaatcccagcaagtcagatgggagaagcagcagccaaccccccgcctgacactgagggacctgcagaacaaaagcagttcttgcagtagtccctcatcctccgctacctctctgctccacactgtgtccccagaaccacctcgtccacctcaacagcctgttccaacagagctgtccctagcctctattaccgtccccttggaaagcatcaaaccttctaatatcctgcccgtaacagtctacgatcagcacggtttcagaatcctgttccattttgcacgtgaccctctgccggggaggtcagatgttctcgtggtagttgtgtccatgctgagcaccgccccgcagcccatccgcaacatcgtgtttcagtctgctgtccccaaggttatgaaggtaaagctgcagccaccgagcggcacagaattaccagcattcaatcctatcgtacacccgtctgctataacacaggtgctgttgctagcaaacccccagaaggagaaggtgaggttgaggtacaaactgacctttacaatgggcgatcagacgtataatgagatgggcgacgtggatcagttcccccctccagaaacgtggggttccctctag

SEQ ID NO: 175849 - DNA, 2688 bp, Artificial Sequence
  derived and/or modified sequence
gggggccggtggcggatggagcccgcgatggagccggagactctggaggcgcgaatcaatagagccacgaaccccctgaacaaggagctcgactgggccagcatcaacggcttctgcgagcagctcaacgaggactttgaggggcctccactcgccacccggctgctggcccacaagatccagtccccacaggagtgggaggcgatccaggccttgacgtatctgggctctcggacatcggagaaggtgaagaacaagatcttggagctcctctacagctggacagtgggcctgcccgaggaggtgaaaatcgcagaggcctaccagatgctaaagaagcaggggattgtaaagtccgaccccaagcttccagatgacactacctttccccttcctcctccacggccgaagaatgtgatctttgaagatgaggagaaatccaagatgctggcccgcctgctgaagagctcccatcccgaagacctccgcgcagccaataagctcatcaaagagatggtgcaggaggaccagaagcggatggagaagatctcgaagagggtgaatgccatcgaggaggtgaacaacaatgtgaaactgctcacggagatggtgatgagccacagccagggcggcgcagcagctggcagcagcgaggacctcatgaaggaactgtaccagcgctgtgagcggatgcggcccacgctcttccgactggcgagtgacacagaggacaatgatgaggccttagcggagatcctgcaggccaatgacaacctcacccaggtgatcaacctgtataagcagctggtgcggggtgaggaggtcaacggtgatgccacagccggctccatccctgggagcacctcggccctgctggatctctcaggcctggatctcccgcctgcgggcaccacctacccagctatgcccacccgccctggcgagcaggccagccctgagcagcccagtgcctcagtttccctgcttgacgacgagctcatgtctctgggcctcagtgaccccacacccccttcaggcccaagcctggatggtaccggatggaacagcttccagtcgtcggatgccactgagcccccagcccctgctctggcccaggcccccagtatggaaagccgacccccagcgcagacatccctgccagcaagcagcggtctggacgacctagacctcctggggaagaccctcctgcagcagtcgctgcccccggaatcccagcaagtgcggtgggagaagcagcagccaaccccccggctcacactccgggacctgcagaataagagcagcagctgcagctcccccagctccagcgccaccagccttctccacaccgtgtccccagagccccccaggcctccgcagcagcccgtaccaaccgagctctcactggccagcatcactgtgcccctggagtccatcaaacccagcaacatcctgcccgtgactgtgtatgaccagcacggcttccgcatcctcttccattttgcccgggacccactgccagggcgctccgacgtgctggtggtggtggtttccatgctgagcaccgccccccagcccatccgcaacatcgtgttccagtcagctgtccccaaggttatgaaggtgaagctgcagccaccctcgggcacggagctgccagcttttaaccccatcgtccacccctcagcaatcacccaggtcctgctgcttgccaacccccagaaggagaaggttcgcctccgctacaagctcaccttcaccatgggtgaccagacctacaacgagatgggggatgtggaccagttccccccacctgaaacctggggtagcctctagaacagaggggctggggagaggaaggggcagagggaccggtcactgtccagcctggagggaggcattggtggccaaggacaccctttgttgcccatggccattcacccccaggcctggtgcttctccccacacccctgtaggcctcaagtgactcttccccctcctgctccggccccgcccctgctgagccaaacccagtaggaggctgggcctgggtttgtgccgctggggtctccatcaccgggacctggagagggaggggctgtgtagccttggaagaacttgggtcatggggaggaagcacagctgttggggaagggccaggacctcaggcccagccccaaccccagctggggtggggtcttccccacctgtctcttatgccttatgggaaggcccagccataactcgggggccatgctggagctggggaccagcttaggcctcctccataggaacccagtgactggggggtgacgcctacacccccagctatttgcactctggtgtgtggtttgactctgcttttcttccggattggccctgtggtcacagcctcagggggccaggctgggggaacctcacctggcccgtactcctgggggtttccctttgccattgggccccctgagggactgtgggggctcaagggtaatgccagaggcccatggccccagcgaggggctgtggggcacctagagttctcggtgtgtctccttcattcattggcctctgctggggcctcctatgggtgtcttacgtctgtccatccatctgtccgtggtcagaagtggggtcagtgtgtgagtgagagcaggagtatttatgaaaataaaacgtcgtttttcctgg

SEQ ID NO: 175850 - DNA, 3159 bp, Artificial Sequence
  derived and/or modified sequence
gaagtggcctcagagcccctcagcaacatgcccgcagagaattcttccggaggcggtcacagacatctccgtgacgcagaacgagttagagcgtcccttggggtttccatggtgctgcccttagcctgcagtatctccacttcctctcccgcctgagcgccgggaacggaaaagcaggcggccggtcccagctgcgacgtagacgccgcgtgggggtggggttgggcgagtaggtgacgctctaggcgagctcgttggcctctctatggtgccgagcgcgcccgttcggacgttgcccctttaatcggcagagggcggtgcccaggaggtcccgcgagagctgcggggggcgggggggcggtgccgaggctgggggccggtggcggatggagcccgcgatggagccggagactctggaggcgcgaatcaatagagccacgaaccccctgaacaaggagctcgactgggccagcatcaacggcttctgcgagcagctcaacgaggactttgaggggcctccactcgccacccggctgctggcccacaagatccagtccccacaggagtgggaggcgatccaggccttgacggtgctggaaacatgcatgaagagctgcggcaagcggttccacgacgaagtgggcaagttccgctttctcaacgagctcatcaaggtcgtgtctcccaagtatctgggctctcggacatcggagaaggtgaagaacaagatcttggagctcctctacagctggacagtgggcctgcccgaggaggtgaaaatcgcagaggcctaccagatgctaaagaagcaggggattgtaaagtccgaccccaagcttccagatgacactacctttccccttcctcctccacggccgaagaatgtgatctttgaagatgaggagaaatccaagatgctggcccgcctgctgaagagctcccatcccgaagacctccgcgcagccaataagctcatcaaagagatggtgcaggaggaccagaagcggatggagaagatctcgaagagggtgaatgccatcgaggaggtgaacaacaatgtgaaactgctcacggagatggtgatgagccacagccagggcggcgcagcagctggcagcagcgaggacctcatgaaggaactgtaccagcgctgtgagcggatgcggcccacgctcttccgactggcgagtgacacagaggacaatgatgaggccttagcggagatcctgcaggccaatgacaacctcacccaggtgatcaacctgtataagcagctggtgcggggtgaggaggtcaacggtgatgccacagccggctccatccctgggagcacctcggccctgctggatctctcaggcctggatctcccgcctgcgggcaccacctacccagctatgcccacccgccctggcgagcaggccagccctgagcagcccagtgcctcagtttccctgcttgacgacgagctcatgtctctgggcctcagtgaccccacacccccttcaggcccaagcctggatggtaccggatggaacagcttccagtcgtcggatgccactgagcccccagcccctgctctggcccaggcccccagtatggaaagccgacccccagcgcagacatccctgccagcaagcagcggtctggacgacctagacctcctggggaagaccctcctgcagcagtcgctgcccccggaatcccagcaagtgcggtgggagaagcagcagccaaccccccggctcacactccgggacctgcagaataagagcagcagctgcagctcccccagctccagcgccaccagccttctccacaccgtgtccccagagccccccaggcctccgcagcagcccgtaccaaccgagctctcactggccagcatcactgtgcccctggagtccatcaaacccagcaacatcctgcccgtgactgtgtatgaccagcacggcttccgcatcctcttccattttgcccgggacccactgccagggcgctccgacgtgctggtggtggtggtttccatgctgagcaccgccccccagcccatccgcaacatcgtgttccagtcagctgtccccaaggttatgaaggtgaagctgcagccaccctcgggcacggagctgccagcttttaaccccatcgtccacccctcagcaatcacccaggtcctgctgcttgccaacccccagaaggagaaggttcgcctccgctacaagctcaccttcaccatgggtgaccagacctacaacgagatgggggatgtggaccagttccccccacctgaaacctggggtagcctctagaacagaggggctggggagaggaaggggcagagggaccggtcactgtccagcctggagggaggcattggtggccaaggacaccctttgttgcccatggccattcacccccaggcctggtgcttctccccacacccctgtaggcctcaagtgactcttccccctcctgctccggccccgcccctgctgagccaaacccagtaggaggctgggcctgggtttgtgccgctggggtctccatcaccgggacctggagagggaggggctgtgtagccttggaagaacttgggtcatggggaggaagcacagctgttggggaagggccaggacctcaggcccagccccaaccccagctggggtggggtcttccccacctgtctcttatgccttatgggaaggcccagccataactcgggggccatgctggagctggggaccagcttaggcctcctccataggaacccagtgactggggggtgacgcctacacccccagctatttgcactctggtgtgtggtttgactctgcttttcttccggattggccctgtggtcacagcctcagggggccaggctgggggaacctcacctggcccgtactcctgggggtttccctttgccattgggccccctgagggactgtgggggctcaagggtaatgccagaggcccatggccccagcgaggggctgtggggcacctagagttctcggtgtgtctccttcattcattggcctctgctggggcctcctatgggtgtcttacgtctgtccatccatctgtccgtggtcagaagtggggtcagtgtgtgagtgagagcaggagtatttatgaaaataaaacgtcgtttttcctgga

SEQ ID NO: 175851 - DNA, 1821 bp, Artificial Sequence
  derived and/or modified sequence
atggagcccgccatggagcctgagaccctggaggcccgcatcaacagagccaccaaccccctgaacaaggagctggactgggccagcatcaatggcttctgtgagcagctgaatgaagattttgagggcccccccctggccacccggctgctggcccacaagatccagagcccccaggagtgggaggccatccaggccctgacctacctgggcagcaggaccagcgagaaggtgaagaacaagatcctggagctgctgtacagctggacagtgggcctgcctgaggaggtgaagattgctgaggcctaccagatgctgaagaagcagggcatcgtgaagagtgaccccaagctgcctgatgacaccaccttccccctgcccccaccccggcccaagaatgtcatctttgaagatgaggagaagagcaagatgctggcccggctgctgaagagcagccaccctgaggacctgcgggccgccaacaagctgatcaaggagatggtgcaggaggaccagaagaggatggagaagatcagcaagagggtgaatgccatcgaggaggtgaacaacaacgtgaagctgctgacagagatggtgatgagccacagccagggcggcgctgctgctggcagcagcgaggacctgatgaaggagctgtaccagagatgtgagaggatgaggcccaccctcttccggctggccagtgacacagaggacaatgatgaggccctggccgagatcctgcaggccaatgacaacctgacccaggtgatcaacctgtacaagcagctggtgcggggggaggaggtgaatggagatgccacagctggcagcatccctggcagcaccagcgccctgctggacctgagcggcctggacctgcccccagctggcaccacctacccagccatgcccaccaggcctggagagcaggccagccctgagcagcccagcgcctctgtgtccctgctggatgatgagctgatgagcctgggcctgagtgaccccaccccacccagcggccccagcctggatggcaccggctggaacagcttccagagcagtgatgccacagagcccccagccccagccctggcccaggcccccagcatggagagccggcccccagcccagaccagcctgcctgccagcagcggcctggatgacctggacctgctgggcaagaccctgctgcagcagagcctgcccccagagagccagcaggtgcgctgggagaagcagcagcccaccccccggctgaccctgcgggacctgcagaacaagagcagcagctgcagcagccccagcagcagcgccaccagcctgctgcacacagtgtccccagagccccccaggcctccccagcagcctgtgcccacagagctgagcctggccagcatcaccgtgcccctggagagcatcaagcccagcaacatcctgcctgtgacagtgtatgaccagcacggcttccgcatcctcttccactttgcccgggaccccctgcccggccgcagtgatgtgctggtggtggtggtgtccatgctgagcacagccccccagcccatcagaaatattgtgttccagagcgctgtgcccaaggtgatgaaggtgaagctgcagcccccatctggaacagagctgcctgccttcaaccccatcgtgcaccccagcgccatcacccaggtgctgctgctggccaacccccagaaggagaaggtgcggctgcgctacaagctgaccttcaccatgggagaccagacctacaatgagatgggagatgtggaccagttccccccacctgagacctggggcagcctgtag

SEQ ID NO: 175852 - DNA, 1920 bp, Artificial Sequence
  derived and/or modified sequence
atggagcccgccatggagcctgagaccctggaggcccgcatcaacagagccaccaaccccctgaacaaggagctggactgggccagcatcaatggcttctgtgagcagctgaatgaagattttgagggcccccccctggccacccggctgctggcccacaagatccagagcccccaggagtgggaggccatccaggccctgactgtgctggagacctgcatgaagagctgtgggaagcgcttccatgatgaggtgggcaagttccgcttcctgaatgagctgatcaaggtggtgagccccaagtacctgggcagcaggaccagcgagaaggtgaagaacaagatcctggagctgctgtacagctggacagtgggcctgcctgaggaggtgaagattgctgaggcctaccagatgctgaagaagcagggcatcgtgaagagtgaccccaagctgcctgatgacaccaccttccccctgcccccaccccggcccaagaatgtcatctttgaagatgaggagaagagcaagatgctggcccggctgctgaagagcagccaccctgaggacctgcgggccgccaacaagctgatcaaggagatggtgcaggaggaccagaagaggatggagaagatcagcaagagggtgaatgccatcgaggaggtgaacaacaacgtgaagctgctgacagagatggtgatgagccacagccagggcggcgctgctgctggcagcagcgaggacctgatgaaggagctgtaccagagatgtgagaggatgaggcccaccctcttccggctggccagtgacacagaagataatgatgaggccctggccgagatcctgcaggccaatgacaacctgacccaggtgatcaacctgtacaagcagctggtgcggggggaggaggtgaatggagatgccacagctggcagcatccctggcagcaccagcgccctgctggacctgagcggcctggacctgcccccagctggcaccacctacccagccatgcccaccaggcctggagagcaggccagccctgagcagcccagcgcctctgtgtccctgctggatgatgagctgatgagcctgggcctgagtgaccccaccccaccttctggccccagcctggatggcaccggctggaacagcttccagagcagtgatgccacagagcccccagccccagccctggcccaggcccccagcatggagagccggcccccagcccagaccagcctgcctgccagcagcggcctggatgacctggacctgctgggcaagaccctgctgcagcagagcctgcccccagagagccagcaggtgcgctgggagaagcagcagcccaccccccggctgaccctgcgggacctgcagaacaagagcagcagctgcagcagccccagcagcagcgccaccagcctgctgcacacagtgtccccagagcccccccggcccccccagcagcctgtgcccacagagctgagcctggccagcatcaccgtgcccctggagagcatcaagcccagcaacatcctgcctgtgacagtgtatgaccagcacggcttccgcatcctcttccactttgcccgggaccccctgcccggccgcagtgatgtgctggtggtggtggtgtccatgctgagcacagccccccagcccatccggaacatcgtgttccagagcgctgtgcccaaggtgatgaaggtgaagctgcagccccccagcggcacagagctgcctgccttcaaccccatcgtgcaccccagcgccatcacccaggtgctgctgctggccaacccccagaaggagaaggtgcggctgcgctacaagctgaccttcaccatgggagaccagacctacaatgagatgggagatgtggaccagtttcctcctcctgagacctggggcagcctgtag

SEQ ID NO: 175853 - DNA, 1821 bp, Artificial Sequence
  derived and/or modified sequence
atggagcccgccatggagcccgagaccctggaggcccggatcaacagagcaaccaaccctctcaacaaagaactagattgggccagcataaatggattctgtgaacagctgaacgaagacttcgaggggccccccctagcaaccaggttgttggcccacaagattcagtcgccgcaggaatgggaggcgattcaggcactgacttacctggggtctagaaccagtgaaaaagtgaagaacaaaattctcgagctgctgtattcatggacggtcgggttacctgaggaggtgaagatcgctgaagcataccagatgcttaaaaaacagggtatcgttaagtctgatcctaaacttccagatgacaccacatttcccctccctccgccgagaccaaagaacgtgatttttgaagacgaggaaaaatctaagatgctcgcgagattgctaaagtccagccatccggaggatcttagggctgcaaataaacttattaaagaaatggtgcaggaagaccagaagcgcatggagaaaatttccaagagggtcaacgcgatcgaagaggtgaataataatgtgaaattgctcacggaaatggtgatgagccacagtcaggggggcgctgccgctggcagctccgaagatctgatgaaagagctctaccaaaggtgcgagaggatgcgcccaacattgttccggctggccagcgacactgaggataatgatgaggcgttggcagagattttgcaagccaatgataacctcacgcaggtgatcaatctgtacaaacagctggtcaggggtgaggaggtgaacggggatgctactgccggttcgattccgggatccacgtccgctcttcttgacttatcggggctggacctgccccccgccggcacaacctatccagctatgcccactcgaccaggcgagcaagccagccctgaacaacctagcgcatctgtgagtctgttggacgatgaacttatgtcactcggactctccgatcccacaccaccttccgggcccagccttgatggaacaggatggaattccttccagtcatccgacgccacggaaccaccagctcctgccttggcccaggccccaagtatggaatcacgtccacccgcgcaaacctcactgcccgcttccagtggcttggatgatctcgacttactcggtaagacccttctacagcagtcgttgccacctgaatcccagcaggttagatgggagaaacaacagccaacaccccgacttactttgagggatcttcagaacaagagcagcagctgcagcagcccaagttctagtgccacgtctttgctccatacagtcagcccggaacccccacgccccccccagcagccagtgcctaccgagttaagtttggcctccataaccgtcccactcgaatcaatcaagccaagtaatattcttccagtaacagtatatgatcagcacggttttcgcatcctcttccatttcgctcgtgacccactgcctggccgtagtgacgtgctggttgtggttgttagcatgctttccactgctccccaacccatccggaacatcgtgtttcagagtgccgtcccaaaggtgatgaaggttaaactgcaaccaccctccgggaccgagttacctgcttttaaccctatcgtgcacccaagcgccattactcaggttttactgctggctaacccacaaaaggagaaagtccggctccgttataaactgacgttcactatgggcgatcagacctataatgagatgggagacgtggaccaattcccaccacccgagacctgggggagtctgtag

SEQ ID NO: 175854 - DNA, 1920 bp, Artificial Sequence
  derived and/or modified sequence
atggagcccgccatggagcccgagaccctggaggcccggatcaacagggctaccaatcctctgaacaaagaactcgactgggctagcatcaacggcttttgtgagcaattgaacgaggattttgaggggccacccctggctactcgactgctggcccataaaatccaaagcccccaagagtgggaggccatacaagccctgaccgtcctggaaacctgtatgaagtcctgcggcaaaagatttcacgacgaagtaggcaagtttagattccttaatgagctgattaaggtagtgtccccaaaatacctggggtcgagaacaagcgaaaaggtgaagaacaaaattctggaactgctttattcctggactgtgggtctgccagaagaggtcaaaatcgccgaagcctaccaaatgttaaaaaagcagggcattgttaaatctgatcctaaactgcctgacgatacaaccttccctctgccccctcctcgccccaagaacgtgatattcgaagatgaagagaaatcgaagatgctggctcggctgcttaagtccagtcaccccgaggacctgcgagcagccaataagctaatcaaggaaatggtgcaggaagaccagaagaggatggagaaaatcagtaagcgcgtgaatgccatagaggaggtaaacaacaatgtgaagctcctgactgagatggtgatgagccactctcagggcggtgccgcggccggaagcagtgaggatcttatgaaggagctctaccagcgctgcgaacgtatgagaccaactctgtttaggctcgcttctgatactgaagataacgacgaagctctggccgagatcctgcaggccaatgacaatttaacacaggtgataaatctgtataagcagctggtcaggggcgaggaagtcaacggtgacgccacagctgggtcgattccaggctctacgtcagcactgctagatctgtctggcctagacctccccccagcagggacgacctacccagctatgcctacgaggccaggggaacaggcgagtccggagcaaccttcagcttctgtctccttgcttgatgacgaactcatgtctctcgggctgtctgatccaactcctccttcgggccccagcttggatggcaccggctggaactctttccagtcatcagacgcaacagaacccccagctccagcacttgcccaggctccgagtatggagagtcgtcctccggcccagacctctttgccggcctcctcaggcttggatgatctcgatctgctgggcaaaaccctgctacagcagtctctgccacccgaatctcagcaggttaggtgggaaaagcagcagcctacgccacgcttgacactccgcgatcttcagaataaatcctcttcctgtagcagtcccagttcgtctgcgaccagtttactccacaccgtttcccctgagccacctagacccccacagcagcctgttcccacagagctaagcctcgcaagcataacagttccattagaaagcatcaagcccagcaatatactgcccgtgactgtatatgaccagcacggctttcgcatcctttttcactttgccagggaccctctgcctggaagaagcgatgtgctggttgtggtggtgagcatgctgtccacagcaccacaaccaatacggaacatagtgttccagtcggccgtgccaaaagtgatgaaggtcaaactgcagcctccctcaggcacggaattgccggcatttaatcctattgtgcacccttccgcgattacgcaggtgctcttgctcgctaacccacagaaggaaaaggttcgacttcgctacaaattgaccttcaccatgggcgaccagacctacaatgagatgggagacgtcgaccagtttccccctcccgagacctgggggagcctttag

SEQ ID NO: 175855 - DNA, 1821 bp, Artificial Sequence
  derived and/or modified sequence
atggagcctgctatggagcccgagacccttgaggccagaatcaatagagcgacaaacccactgaacaaggaactggactgggcctccattaatgggttctgcgaacaattaaatgaggacttcgagggccctcccctcgcaacccgtctgctggcgcataagatccagtcccctcaagaatgggaagcgatccaggccctcacttatctggggagtcgaaccagcgagaaagtgaagaacaaaattctcgagctactctatagctggacggtggggcttcctgaagaggtgaagattgccgaggcctaccagatgctcaaaaaacagggaatcgtgaaatccgatcccaaactgcccgacgacacaaccttccccttgccccctcctcggccaaagaatgtgatttttgaggatgaagagaagtctaagatgctggcgaggctgttgaagagtagtcatcctgaggacttgagggccgcaaacaaactaatcaaagaaatggtccaagaagaccagaagcggatggagaaaattagcaaacgggtgaatgcaatcgaagaagtgaacaataatgtaaaactgctcacggaaatggtgatgtcccactctcaggggggtgccgctgcaggaagttccgaggacctgatgaaagagctgtaccagaggtgtgagcggatgcgcccaacactattccggctggcctccgacactgaagacaatgacgaggctctcgccgaaatactgcaggcgaacgataacctaacgcaggtcattaacctgtataagcagctcgtcaggggggaggaggtgaatggcgatgccactgccggatccatccccggaagtacatccgccctcctggacctgagcgggctcgacttgccaccagccggaaccacctaccccgctatgccaaccaggcctggggaacaggcttcacccgagcaacccagcgcgtctgtgagcctgctggatgatgagctgatgtcgctagggctgagtgatccaacaccaccttcaggaccttcacttgatggcactggatggaattcattccagtcttcagatgctactgaacctcctgctccagctcttgcccaggcgccatcaatggaatcccggcctccggcacagacaagcctgccagcaagttccggtttggacgaccttgatctgctcggtaagactctcttacagcagtccctgccaccggagagccaacaagtgcgttgggagaagcaacagccgaccccgcgactgacactacgtgatctccaaaacaagtcaagctcttgttcttctccgtcgtcctctgcgacctccctgctgcacacagtaagcccggagccacctcgacctccccagcagccagttccaaccgagctgtcactcgccagcattacagtgccgcttgaaagtataaagcctagtaatattctgcctgtgaccgtttatgaccagcatgggtttcggattctgttccactttgcacgtgatccactacctggacgatccgacgtgcttgttgtagtagtatcaatgttatcaactgctccacagcccatacgaaatatcgtgtttcagagtgcagtgccaaaagtgatgaaggtgaagctccagccaccatctggcaccgaactgcctgcttttaatcccatcgtacacccttccgccatcacacaggtcctgctgctcgcaaaccctcagaaagagaaggtgcgtcttcggtataaactgacatttacaatgggggaccagacatacaacgagatgggcgacgtggaccagttccctcccccagaaacatggggaagtttgtag

SEQ ID NO: 175856 - DNA, 1920 bp, Artificial Sequence
  derived and/or modified sequence
atggagccagctatggagccggaaacactagaggcacggatcaatcgcgctacaaaccctctcaataaggagctcgactgggcttctataaacggattctgtgagcagcttaatgaggactttgaggggcctccgctggctactcgcctattggctcacaaaattcagtcaccacaggaatgggaggccatacaggcgctgactgtgttggaaacctgtatgaaatcctgcggcaagcggttccacgacgaagtgggaaagtttaggtttctgaacgagctgatcaaagtagtcagcccaaaatatctgggttccaggacctccgaaaaagtgaaaaataagattctagaactcttatatagttggacggtgggattgccggaggaagtgaaaattgccgaggcctaccaaatgttgaaaaaacagggaatcgtcaaatcagacccgaagctgccagatgataccacgtttccgctccccccaccgagacctaaaaacgtgatctttgaggacgaagaaaaaagtaaaatgctggccagactgctaaagtcatctcatccggaagacctacgtgccgcaaacaagctgatcaaggagatggtgcaggaggatcagaagcggatggaaaagattagcaaaagggtaaatgctattgaggaagtgaataacaatgttaaactgttgacagagatggtgatgtctcattcccagggaggcgctgccgctggctcgtcagaggacctcatgaaagaactctaccaacggtgcgagaggatgcggccaaccctattcaggctcgctagtgacactgaagacaacgatgaagcacttgccgagattcttcaggccaacgacaacttgacgcaagtcattaatctttacaaacagttagtcaggggggaagaggtgaacggcgacgcaactgctggaagtatccctgggtccacgagcgcactgctcgacctgagtggtctggacctgccgccagccggtaccacctatccggcaatgcccactagacctggcgagcaggctagcccagagcagccttcagcctcagtgagcttgctggatgatgaactcatgagtctgggtctgagtgatcccaccccaccttccggaccgtctttggacggcacaggatggaacagcttccaatcctctgatgcaactgaacctcccgctccagctctggcacaggcgcctagtatggagtctcgaccccctgcacagacttccctgcctgcgagctcgggcctcgatgacttggacctcctgggcaaaacactgcttcaacagtcgctaccacccgaaagccagcaggtcaggtgggagaagcaacagccaactccaagactcaccctgagggatcttcagaacaaatcatcctcctgcagctcaccttcgtcttctgccacttcccttcttcacacggtgagcccagaacctcccagacctccccagcaacccgtcccaacagaactttctcttgccagtatcaccgttccactcgaaagtatcaaaccctctaatatattgcctgtcactgtgtacgatcaacatgggtttcgcatcctttttcattttgcccgagacccgctgcccggaagatcagacgtcttagttgtggtcgtatcgatgctctcaactgctccccagccaattagaaacatcgtcttccaatctgccgtccccaaggtgatgaaggtaaaactgcagccaccttccggtaccgagttgcccgcatttaatcctatcgtccaccccagcgcaataacccaggtgctgcttttggccaatcctcagaaggaaaaagtcagactgagatacaagcttacattcaccatgggcgatcagacctataacgagatgggggatgtggatcaatttcctccaccagagacctggggctctctctag

SEQ ID NO: 175857 - DNA, 1821 bp, Artificial Sequence
  derived and/or modified sequence
atggagcccgccatggagcccgagaccctggaggccagaatcaacagagccaccaaccccctgaacaaggagctggactgggccagcatcaacggcttctgcgagcagctgaacgaggacttcgagggcccccccctggccaccagactgctggcccacaagatccagagcccccaggagtgggaggccatccaggccctgacctacctgggcagcagaaccagcgagaaggtgaagaacaagatcctggagctgctgtacagctggaccgtgggcctgcccgaggaggtgaagatcgccgaggcctaccagatgctgaagaagcagggcatcgtgaagagcgaccccaagctgcccgacgacaccaccttccccctgcccccccccagacccaagaacgtgatcttcgaggacgaggagaagagcaagatgctggccagactgctgaagagcagccaccccgaggacctgagagccgccaacaagctgatcaaggagatggtgcaggaggaccagaagagaatggagaagatcagcaagagagtgaacgccatcgaggaggtgaacaacaacgtgaagctgctgaccgagatggtgatgagccacagccagggcggcgccgccgccggcagcagcgaggacctgatgaaggagctgtaccagagatgcgagagaatgagacccaccctgttcagactggccagcgacaccgaggacaacgacgaggccctggccgagatcctgcaggccaacgacaacctgacccaggtgatcaacctgtacaagcagctggtgagaggcgaggaggtgaacggcgacgccaccgccggcagcatccccggcagcaccagcgccctgctggacctgagcggcctggacctgccccccgccggcaccacctaccccgccatgcccaccagacccggcgagcaggccagccccgagcagcccagcgccagcgtgagcctgctggacgacgagctgatgagcctgggcctgagcgaccccaccccccccagcggccccagcctggacggcaccggctggaacagcttccagagcagcgacgccaccgagccccccgcccccgccctggcccaggcccccagcatggagagcagaccccccgcccagaccagcctgcccgccagcagcggcctggacgacctggacctgctgggcaagaccctgctgcagcagagcctgccccccgagagccagcaggtgagatgggagaagcagcagcccacccccagactgaccctgagagacctgcagaacaagagcagcagctgcagcagccccagcagcagcgccaccagcctgctgcacaccgtgagccccgagccccccagacccccccagcagcccgtgcccaccgagctgagcctggccagcatcaccgtgcccctggagagcatcaagcccagcaacatcctgcccgtgaccgtgtacgaccagcacggcttcagaatcctgttccacttcgccagagaccccctgcccggcagaagcgacgtgctggtggtggtggtgagcatgctgagcaccgccccccagcccatcagaaacatcgtgttccagagcgccgtgcccaaggtgatgaaggtgaagctgcagccccccagcggcaccgagctgcccgccttcaaccccatcgtgcaccccagcgccatcacccaggtgctgctgctggccaacccccagaaggagaaggtgagactgagatacaagctgaccttcaccatgggcgaccagacctacaacgagatgggcgacgtggaccagttccccccccccgagacctggggcagcctgtag

SEQ ID NO: 175858 - DNA, 1920 bp, Artificial Sequence
  derived and/or modified sequence
atggagcccgccatggagcccgagaccctggaggccagaatcaacagagccaccaaccccctgaacaaggagctggactgggccagcatcaacggcttctgcgagcagctgaacgaggacttcgagggcccccccctggccaccagactgctggcccacaagatccagagcccccaggagtgggaggccatccaggccctgaccgtgctggagacctgcatgaagagctgcggcaagagattccacgacgaggtgggcaagttcagattcctgaacgagctgatcaaggtggtgagccccaagtacctgggcagcagaaccagcgagaaggtgaagaacaagatcctggagctgctgtacagctggaccgtgggcctgcccgaggaggtgaagatcgccgaggcctaccagatgctgaagaagcagggcatcgtgaagagcgaccccaagctgcccgacgacaccaccttccccctgcccccccccagacccaagaacgtgatcttcgaggacgaggagaagagcaagatgctggccagactgctgaagagcagccaccccgaggacctgagagccgccaacaagctgatcaaggagatggtgcaggaggaccagaagagaatggagaagatcagcaagagagtgaacgccatcgaggaggtgaacaacaacgtgaagctgctgaccgagatggtgatgagccacagccagggcggcgccgccgccggcagcagcgaggacctgatgaaggagctgtaccagagatgcgagagaatgagacccaccctgttcagactggccagcgacaccgaggacaacgacgaggccctggccgagatcctgcaggccaacgacaacctgacccaggtgatcaacctgtacaagcagctggtgagaggcgaggaggtgaacggcgacgccaccgccggcagcatccccggcagcaccagcgccctgctggacctgagcggcctggacctgccccccgccggcaccacctaccccgccatgcccaccagacccggcgagcaggccagccccgagcagcccagcgccagcgtgagcctgctggacgacgagctgatgagcctgggcctgagcgaccccaccccccccagcggccccagcctggacggcaccggctggaacagcttccagagcagcgacgccaccgagccccccgcccccgccctggcccaggcccccagcatggagagcagaccccccgcccagaccagcctgcccgccagcagcggcctggacgacctggacctgctgggcaagaccctgctgcagcagagcctgccccccgagagccagcaggtgagatgggagaagcagcagcccacccccagactgaccctgagagacctgcagaacaagagcagcagctgcagcagccccagcagcagcgccaccagcctgctgcacaccgtgagccccgagccccccagacccccccagcagcccgtgcccaccgagctgagcctggccagcatcaccgtgcccctggagagcatcaagcccagcaacatcctgcccgtgaccgtgtacgaccagcacggcttcagaatcctgttccacttcgccagagaccccctgcccggcagaagcgacgtgctggtggtggtggtgagcatgctgagcaccgccccccagcccatcagaaacatcgtgttccagagcgccgtgcccaaggtgatgaaggtgaagctgcagccccccagcggcaccgagctgcccgccttcaaccccatcgtgcaccccagcgccatcacccaggtgctgctgctggccaacccccagaaggagaaggtgagactgagatacaagctgaccttcaccatgggcgaccagacctacaacgagatgggcgacgtggaccagttccccccccccgagacctggggcagcctgtag

SEQ ID NO: 175859 - protein, 822 aa, Artificial Sequence
  derived and/or modified sequence
MAAAVVVAEGDSDSRPGQELLVAWNTVSTGLVPPAALGLVSSRTSGAVPPKEEELRAAVEVLRGHGLHSVLEEWFVEVLQNDLQANISPEFWNAISQCENSADEPQCLLLLLDAFGLLESRLDPYLRSLELLEKWTRLGLLMGTGAQGLREEVHTMLRGVLFFSTPRTFQEMIQRLYGCFLRVYMQSKRKGEGGTDPELEGELDSRYARRRYYRLLQSPLCAGCSSDKQQCWCRQALEQFHQLSQVLHRLSLLERVSAEAVTTTLHQVTRERMEDRCRGEYERSFLREFHKWIERVVGWLGKVFLQDGPARPASPEAGNTLRRWRCHVQRFFYRIYASLRIEELFSIVRDFPDSRPAIEDLKYCLERTDQRQQLLVSLKAALETRLLHPGVNTCDIITLYISAIKALRVLDPSMVILEVACEPIRRYLRTREDTVRQIVAGLTGDSDGTGDLAVELSKTDPASLETGQDSEDDSGEPEDWVPDPVDADPGKSSSKRRSSDIISLLVSIYGSKDLFINEYRSLLADRLLHQFSFSPEREIRNVELLKLRFGEAPMHFCEVMLKDMADSRRINANIREEDEKRPAEEQPPFGVYAVILSSEFWPPFKDEKLEVPEDIRAALEAYCKKYEQLKAMRTLSWKHTLGLVTMDVELADRTLSVAVTPVQAVILLYFQDQASWTLEELSKAVKMPVALLRRRMSVWLQQGVLREEPPGTFSVIEEERPQDRDNMVLIDSDDESDSGMASQADQKEEELLLFWTYIQAMLTNLESLSLDRIYNMLRMFVVTGPALAEIDLQELQGYLQKKVRDQQLVYSAGVYRLPKNCS

SEQ ID NO: 175860 - DNA, 2469 bp, Artificial Sequence
  derived and/or modified sequence
atggccgctgcggtggtggtagcggaaggagacagtgattctagaccaggccaggagctcttggtggcatggaataccgttagcacaggtttagtccctccagccgccctgggactagtgtcttctcggacatccggtgccgtgccacccaaggaagaggagctgcgggccgctgttgaggttctgcgcggccacggcctgcacagcgttttagaggagtggtttgtggaagtgctgcagaatgacctgcaggcaaatatttcccccgaattctggaacgccatctctcagtgtgagaactcagctgatgagcctcaatgtctgcttcttctgcttgacgccttcggcctgcttgaatcacgtctggatccataccttaggagcttggagctgctggagaagtggacgcgactaggactgctcatgggcacaggtgcccagggtcttcgcgaggaggtgcacactatgctgcgaggggtgttatttttcagcacacctaggacctttcaggaaatgatccagcggctatatgggtgttttctcagagtctacatgcaatccaagcggaagggagagggtggtacagacccagagcttgagggagaactcgattcaagatacgcccgacgtcgctactaccggctgctccaaagtcctctgtgtgctggttgttccagcgacaagcagcaatgctggtgtcggcaggctctggagcagtttcatcaactgtcccaggttcttcaccgactgtctcttttggaaagagtgtctgctgaagccgtcactactactttacatcaagtcacccgagagcggatggaggacagatgcaggggcgagtacgagcgcagttttctcagggagttccacaaatggattgagcgagtcgttggatggttaggaaaggtctttctgcaggacggccccgctcggccagcttcgccagaggcgggaaatacattaaggaggtggaggtgccacgtgcagaggttcttttatcgcatatacgctagcctcagaatcgaggagctcttctccatcgtgcgtgatttcccagacagccggccagcgatcgaggaccttaaatattgcttagagcgtaccgatcagcgtcagcaattacttgtctccctcaaggcggcccttgagacccgtttgctgcatcctggcgtgaacacctgcgacattatcaccctgtatatctctgctattaaagctctgcgggtgctcgatcccagtatggtcatccttgaagtcgcctgcgagcccatcagacgctaccttcgtactagggaggacacggtgcgtcagattgtggctggacttacgggggactcggacggcactggcgacttggctgtcgagctttcaaaaacagatccagctagcctggaaactggacaagattccgaagacgatagtggggaacccgaggattgggtacctgacccagtagatgccgaccctggtaaaagctcgtccaaaagaagatcctctgatataataagcctgctcgtgtccatttatggttctaaggacctcttcatcaacgagtaccgtagccttctcgctgaccgattactgcaccagttctcgttcagcccggaacgtgaaattcgtaatgtggaactgcttaagcttaggttcggcgaggcccccatgcatttctgcgaggttatgctcaaagatatggctgatagtcgccgaatcaacgcaaatatccgcgaggaggacgagaagagaccagccgaagagcagcccccgttcggggtctacgcggtaattctgagcagcgagttctggcctccattcaaagacgagaaactggaagtgccagaggacatacgagcagccttggaggcatattgcaagaaatatgagcaactgaaagctatgcgcactctctcttggaagcataccctgggattagtgaccatggacgtcgaactggctgacagaaccctcagtgtggccgtgaccccagtccaagccgtgattttgctgtactttcaggatcaggcctcttggaccctggaggagctgagtaaagccgttaaaatgcccgtggctctccttcgccgtcggatgtccgtttggctgcagcaaggggttttgagggaggaaccaccaggcacctttagcgtcatagaggaggagcgcccccaagatcgcgacaatatggtccttattgacagcgatgatgagagcgattccggcatggctagccaggctgatcagaaagaggaggagctgctgttattctggacgtatattcaggccatgctgacgaacctggagagcctctcactggatcgcatttataacatgctgaggatgtttgttgtgaccggaccggctttggccgagattgacctgcaggagctgcaaggctacctccagaaaaaggtgcgagaccagcagctggtgtactccgccggagtataccggctcccaaagaactgctcctag

SEQ ID NO: 175861 - DNA, 2469 bp, Artificial Sequence
  derived and/or modified sequence
atggctgctgctgtggtggtggccgagggggacagcgacagccggcccggccaggagctgctggtggcctggaacacagtgtccacaggcctggtgcccccagctgccctgggcctggtgagcagcaggaccagcggggctgtgccccccaaggaggaggagctgcgggctgctgtggaggtgctgcggggccacggcctgcacagcgtgctggaggagtggtttgtggaggtgctgcagaatgacctgcaggccaacatcagccctgagttctggaatgccatcagccagtgtgaaaattctgcagatgagccccagtgcctgctgctgctgctggatgccttcggcctgctggagagccggctggacccctacctgcggagcctggagctgctggagaagtggacccggctgggcctgctgatgggcaccggggcccagggcctgcgggaggaggtgcacaccatgctgcggggcgtgctcttcttcagcacccccaggaccttccaggagatgatccagaggctgtatggctgcttcctgcgggtgtacatgcagagcaagaggaagggggagggcggcacagatcctgagctggagggggagctggacagccgctatgcccggcggcgctactaccgcctgctgcagagccccctgtgtgccggctgcagcagtgacaagcagcagtgctggtgccggcaggccctggagcagttccaccagctgagccaggtgctgcaccggctgagcctgctggagcgggtgtctgctgaggccgtgaccaccaccctgcaccaggtgacccgggagaggatggaggaccgctgccgcggggagtatgaaagaagcttcctgcgggagttccacaagtggattgagcgggtggtgggctggctgggcaaggtgttcctgcaggacggccctgcccggcctgccagccctgaggccggcaacaccctgcggcgctggcgctgccacgtgcagcgcttcttctaccgcatctatgccagcctgagaattgaggagctgttcagcatcgtgcgggacttcccagacagcaggcctgccatcgaggacctgaagtactgcctggagaggacagaccagaggcagcagctgctggtgtccctgaaggccgccctggagacccggctgctgcaccctggggtgaacacctgtgacatcatcaccctgtacatcagcgccatcaaggccctgcgggtgctggaccccagcatggtgatcctggaggtggcctgtgagcccatccgccgctacctgcggacccgggaggacacagtgcggcagatcgtggccggcctgactggagacagtgatggcactggagacctggccgtggagctgagcaagacagatcctgccagcctggagaccggccaggacagtgaagatgacagcggggagcctgaggactgggtgcctgaccctgtggatgctgaccccgggaagagcagcagcaagaggaggagcagtgacatcatcagcctgctggtgtccatctacggcagcaaggacctcttcatcaatgagtaccgcagcctgctggccgaccggctgctgcaccagttctccttcagccctgagcgggagatcagaaatgtggagctgctgaagctgcgctttggagaggcccccatgcacttctgtgaggtgatgctgaaggacatggctgacagccgccgcatcaatgccaacatccgggaggaggatgagaagaggcctgctgaggagcagcccccatttggagtgtatgctgtgatcctgagcagcgagttctggccacccttcaaggatgagaagctggaggtgcctgaggacatccgggccgccctggaggcctactgcaagaagtatgagcagctgaaggccatgaggaccctgtcctggaagcacaccctgggcctggtgaccatggatgtggagctggccgacaggaccctgtctgtggccgtgacccctgtgcaggccgtcatcctgctgtacttccaggaccaggcctcctggaccctggaggagctgagcaaggctgtgaagatgcctgtggccctgctgcggcggaggatgtctgtgtggctgcagcagggcgtgctgcgggaggagcccccaggcaccttcagcgtcatcgaggaggagcggccccaggaccgggacaacatggtgctgattgacagtgatgatgaaagtgacagcggcatggccagccaggccgaccagaaggaggaggagctgctgctcttctggacctacatccaggccatgctgaccaacctggagagcctgagcctggaccgcatctacaacatgctgaggatgtttgtggtgactggacctgccctggccgagattgacctgcaggagctgcagggctacctgcagaagaaggtgcgggaccagcagctggtgtacagcgctggggtgtaccgcctgcccaagaactgcagctag

SEQ ID NO: 175862 - DNA, 2469 bp, Artificial Sequence
  derived and/or modified sequence
atggccgccgccgtggtggtggccgagggcgacagcgacagccggccgggccaggagctgttggtggcttggaacaccgtctccaccggcctcgtgccccctgctgctcttgggttggtgtcttcaaggacctctggtgccgttccgcccaaagaagaggagctccgcgccgccgtggaggttctgcggggtcatggtctgcactctgtgttagaagagtggtttgtggaggtcttacagaacgacctgcaagcgaacatatcacccgagttttggaacgcaatttcacagtgcgagaatagtgcggacgaaccccaatgtctcctgttgctgctggacgcattcggactgcttgaatcgcggctggacccctaccttcgttctctcgaactgctggagaaatggactcgcctgggactgctgatgggtaccggcgctcagggcttacgcgaagaggtccatacgatgctgagaggggttctgttcttctctacgccacgcacatttcaagagatgattcagcgcctctacggatgtttcctgcgagtgtatatgcagagtaagaggaaaggagagggcggaacagacccagaactggaaggtgaactggatagtcgctacgctcggcggagatactacagactgctgcaatcaccactttgtgctggttgctcgagcgacaagcagcaatgctggtgccgccaagccctcgagcagttccatcagttatcccaagtgttacaccggttgtctttacttgagagagtatctgcagaagccgtgacaactaccctgcatcaggtgacacgggagagaatggaggaccggtgccgaggcgaatacgaacgtagttttcttcgggagttccataaatggatagagcgggttgttggctggctaggcaaggtcttcttacaggatggcccagcaaggccggcctcccctgaggcgggcaatacactgcgaagatggcgatgccatgtgcagagattcttttatcgtatatacgcctccttgagaatagaagaactgttcagtattgtgagagatttcccagattcaaggccagcaatcgaggacctcaagtactgcctggaacggactgatcaacgacagcagctcctggtctccctaaaggccgctctcgagaccaggctgctccatccaggcgttaacacttgtgacattattaccttatacatttcagccattaaggccctgagggtgttggacccgagtatggtgatactggaagtcgcttgcgagccgatccgtcgctacctgcgaaccagggaggataccgtcaggcagattgtagccggattgactggggatagcgacggcacaggagacctagcagtggagctttctaagactgatcccgcctctcttgagacaggtcaggatagtgaagatgactctggtgaaccggaggactgggtgcctgaccctgtagacgctgatccagggaagagctcaagtaaaagacgctcaagcgacatcatctctctgctggtgtctatatatggatcaaaggacctgtttattaatgaatacagaagtctgttggctgacagactgctacaccagttcagtttctctcctgagcgagagatccgcaacgtggaacttcttaagctgagatttggggaggctcccatgcacttttgcgaagtcatgctcaaggacatggcagacagtcgacggatcaacgcgaacataagggaagaagacgaaaagcggccagcagaggagcagccaccttttggtgtttacgccgttattctgtcaagcgagttctggcctccttttaaagatgagaaactggaggtcccggaggatataagggctgctctagaggcatactgtaagaaatatgaacagttaaaagcaatgagaacactatcctggaagcacaccttgggcctcgtgacgatggacgtcgagctcgccgaccgtaccctctctgtggccgttacccccgtgcaggccgtgatattgctgtatttccaggaccaggcaagctggactttagaggaactgtccaaggccgtgaagatgcctgttgctctgctgcgtcgccgcatgagtgtgtggctccagcagggtgtgttgcgggaagaaccgcctggtacgtttagcgttatcgaagaagaacgtccacaggatagggataacatggtgcttatcgacagtgacgatgaatctgatagtgggatggccagccaagctgatcagaaagaggaagagctcctgcttttctggacatatattcaagctatgctaacgaacttggaatcactctctctggaccgcatttacaacatgctaaggatgttcgtggtgaccgggccagctttagccgagatcgacctccaggagctccaggggtacctccaaaagaaggtgagggaccaacagcttgtatattcagccggcgtatatcgtttgcctaagaactgctcttag

SEQ ID NO: 175863 - DNA, 2469 bp, Artificial Sequence
  derived and/or modified sequence
atggcagccgctgtggttgttgccgaaggcgacagcgactcacgaccaggacaagagttgctggtggcgtggaacaccgtttccactggactggttcccccagcagctctggggctggtgagcagccggacttctggcgctgtgccccctaaggaggaggaactgagagcggcagtggaagtgctccgcggtcacggcttgcatagtgtcctcgaggaatggtttgtcgaagtcttacagaatgacctgcaagcaaatattagccccgaattttggaatgcaatatcacagtgtgaaaactcagccgatgaaccacagtgtctattgctgcttctggacgccttcggacttctggaatctcgcctggacccctatctccgcagtctcgagctccttgaaaagtggacccggcttggcttgctcatgggaaccggagcccagggcctgcgcgaggaagtgcacacgatgctccgcggagtgttatttttctccactcctcgtacgtttcaggagatgattcaaaggctatacggttgcttcctgcgagtgtacatgcagtctaaacgcaagggtgagggagggactgaccctgagctcgagggagaactggatagccggtatgcaaggcgtcgctattatcggctgcttcaatcccccttatgtgcaggatgtagcagcgacaagcaacagtgctggtgccgacaggcgctggagcagttccaccagctgagtcaagtgctgcaccgcttatccttactcgaacgggtgtctgccgaagccgtgaccacaactctgcatcaggtgactagagagaggatggaagacaggtgccgaggcgagtacgagcgcagcttcctaagggagtttcacaagtggatagagcgcgttgtcggctggctcggcaaggtcttcctgcaagacgggccagctaggccagcaagccccgaagccggtaacacgcttcgccgatggagatgtcacgttcaacgattcttttatcgcatttacgccagcctgagaattgaggagttgttcagcatcgttagagacttccctgactcccgaccagcgatcgaagatctgaaatactgtctcgaacgtacggatcagcgccagcaattacttgtaagcctcaaggccgcattagaaacgaggctgctgcaccctggcgtgaacacatgcgacataataacattatatatttcagctatcaaggctttgagggtcttggacccctccatggtaatcctggaagtggcgtgtgagcccattagacggtacttgcggactcgagaggacaccgttcggcaaatcgtcgctggacttaccggcgatagtgatggcacgggggatctggcagtggaactctccaagacagacccagcaagcttggagacaggccaggacagcgaagacgactccggcgagcccgaggattgggtgccggaccctgttgatgccgaccctgggaagtcaagttccaaacgcagatcctccgatatcatttccctgctagtcagcatctacggttcgaaggacttattcatcaatgaatatcgtagtctcttggccgacaggttgctgcatcagtttagtttttcccccgaacgtgaaattcggaacgtcgagcttctgaagctcaggttcggagaagctccaatgcacttctgtgaagtgatgcttaaagacatggccgacagcaggcgcatcaacgccaacattcgagaagaggacgagaagcgccctgccgaggagcagcctccctttggtgtgtacgcggtgattctgtctagcgagttttggcccccttttaaggatgagaagttagaggttcctgaggatattagagccgcactcgaagcatactgcaaaaaatacgagcagttaaaagctatgcgaacattatcttggaaacacacactcggcctggtcaccatggacgtcgagttagcagaccgtactctctcggttgctgtcaccccagtccaggcggtgatactgctatattttcaggatcaggcgagctggaccctggaggagctgtccaaagctgtgaaaatgcccgttgctctcctgagacgtagaatgagcgtttggttgcaacagggagtcctgagggaggagccgccagggaccttcagcgttatcgaggaggaacggccacaggacagagacaatatggttcttatcgattccgacgatgagagtgacagtggcatggcctcacaggctgaccaaaaggaagaggagctcctgctcttttggacgtatattcaagctatgttgacaaatctggaaagcctgtcgcttgacagaatctacaatatgttgcgcatgttcgtggtgacaggtccagccctcgccgagattgatctccaggagcttcagggctatctgcagaaaaaggtccgcgaccagcagctggtctactctgctggggtttataggttgccgaagaattgttcatag

SEQ ID NO: 175864 - DNA, 2632 bp, Artificial Sequence
  derived and/or modified sequence
tgcagatggcggcggcagttgtggtggcggagggggacagcgactcccggcccggacaggagttgttagtggcctggaacaccgtgagcaccggcctggtgccgccggctgcgctggggctggtgtcttcccggaccagcggtgcagtcccgccaaaggaagaggagctccgggcggcggtggaggttctgaggggccacgggctacactcggtcctggaggagtggttcgtggaggtgctgcagaacgatctgcaggccaacatctcccctgagttctggaatgccatctcccaatgcgagaactctgcggatgagccccagtgccttttgctactccttgacgcttttggcctgctggagagccgcctggatccctacctgcgtagcctagagctgctggagaaatggactcgcctgggcttgctgatgggcactggtgctcaggggctgcgagaagaagtccacactatgttgcgcggagtcttgttctttagcacccccagaaccttccaagagatgatccagcgtctgtatgggtgcttcttgagagtctatatgcagagtaagaggaagggggaagggggcacagacccggaactggaaggggagctggacagccggtatgcccgtcgccggtactaccggctcctgcagagcccgctgtgtgcagggtgcagcagtgacaagcaacagtgctggtgtcgccaggctctggagcagttccatcagctcagccaggtcttacacaggctcagtctgctggagcgggtcagtgccgaggctgtgaccaccaccctgcaccaggtgacccgggagaggatggaggaccgttgccggggcgagtacgagcgctccttcctgcgtgagttccacaagtggatcgagcgggtggtcggctggctcggcaaggtgttcctgcaggacggccccgccaggcccgcatctcccgaggccggcaacaccctgcgccgctggcgctgccacgtgcaaaggttcttctaccgcatctacgccagcctgcgcatcgaggagctcttcagcatcgtccgagacttcccagactcccggccagccatcgaggacctcaagtactgcctggagaggacggaccagaggcagcagctgctcgtgtccctcaaggctgccctggagactcggctcctgcatccaggcgtcaacacgtgtgacatcatcaccctctatatctctgccatcaaggcgctgcgcgtgctggacccttccatggtcatcctggaggtggcctgtgagcctatccgccgctacctgaggacgcgggaggacacagtgcggcagattgtggctgggctgacgggggactcggacgggacaggggacctggctgttgagctgtccaagaccgacccggcgagcctggagacaggccaggacagtgaggatgactcaggcgagccagaggactgggtcccggaccctgtggatgccgatccagggaagtcgagctccaagcggcgttcatcggacatcatcagcctgctggtcagcatctacggcagcaaggacctcttcatcaatgagtaccgctcgctgctggccgaccgcctgctgcaccagttcagcttcagccccgagcgggagatccgcaacgtggagctgctgaagctgcgctttggcgaggccccaatgcacttctgtgaagtcatgctgaaggacatggcggactcccgccgcatcaatgccaacatccgggaggaggatgagaagcggccagcagaggagcagccaccgttcggggtctacgctgtcatcctgtccagtgagttctggccgcccttcaaggacgagaagctggaggtccccgaggatatcagggcagccctggaggcttactgcaagaagtatgagcagctcaaggccatgcggaccctcagttggaagcacaccctgggcctggtgaccatggacgtggagctggccgaccgcacgctgtctgtggcggtcaccccagtacaggcggtgatcttgctgtattttcaggaccaagccagctggaccctggaggaactgagcaaggcggtgaagatgcccgtggcgctgctgcggcggcggatgtccgtgtggctgcagcagggtgtgctgcgtgaggagccccccggcaccttctctgtcattgaggaggagcggcctcaggaccgggacaacatggtgctcattgacagtgacgacgagagcgactccggcatggcctcccaggccgaccagaaggaggaggagctgctgctcttctggacgtacatccaggccatgctgaccaacctggagagcctctcactggatcgtatctacaacatgctccgcatgtttgtggtgactgggcctgcactggccgagattgacctgcaggagctgcagggctacctgcagaagaaggtgcgggaccagcagctcgtctactcggccggcgtctaccgcctgcccaagaactgcagctgacacatcgcccgcccgcccgcccgcccgccaggcgctgccctgcaggtgctctcgtcctcccgtgccagcccccgcccgcccgtgtcccagaatgcactgctgaggagcatgcccacccccacccccgcagtgtgcagattaaagcaagtcagatcatc

SEQ ID NO: 175865 - DNA, 2469 bp, Artificial Sequence
  derived and/or modified sequence
atggccgccgccgtggtggtggccgagggcgacagcgacagcagacccggccaggagctgctggtggcctggaacaccgtgagcaccggcctggtgccccccgccgccctgggcctggtgagcagcagaaccagcggcgccgtgccccccaaggaggaggagctgagagccgccgtggaggtgctgagaggccacggcctgcacagcgtgctggaggagtggttcgtggaggtgctgcagaacgacctgcaggccaacatcagccccgagttctggaacgccatcagccagtgcgagaacagcgccgacgagccccagtgcctgctgctgctgctggacgccttcggcctgctggagagcagactggacccctacctgagaagcctggagctgctggagaagtggaccagactgggcctgctgatgggcaccggcgcccagggcctgagagaggaggtgcacaccatgctgagaggcgtgctgttcttcagcacccccagaaccttccaggagatgatccagagactgtacggctgcttcctgagagtgtacatgcagagcaagagaaagggcgagggcggcaccgaccccgagctggagggcgagctggacagcagatacgccagaagaagatactacagactgctgcagagccccctgtgcgccggctgcagcagcgacaagcagcagtgctggtgcagacaggccctggagcagttccaccagctgagccaggtgctgcacagactgagcctgctggagagagtgagcgccgaggccgtgaccaccaccctgcaccaggtgaccagagagagaatggaggacagatgcagaggcgagtacgagagaagcttcctgagagagttccacaagtggatcgagagagtggtgggctggctgggcaaggtgttcctgcaggacggccccgccagacccgccagccccgaggccggcaacaccctgagaagatggagatgccacgtgcagagattcttctacagaatctacgccagcctgagaatcgaggagctgttcagcatcgtgagagacttccccgacagcagacccgccatcgaggacctgaagtactgcctggagagaaccgaccagagacagcagctgctggtgagcctgaaggccgccctggagaccagactgctgcaccccggcgtgaacacctgcgacatcatcaccctgtacatcagcgccatcaaggccctgagagtgctggaccccagcatggtgatcctggaggtggcctgcgagcccatcagaagatacctgagaaccagagaggacaccgtgagacagatcgtggccggcctgaccggcgacagcgacggcaccggcgacctggccgtggagctgagcaagaccgaccccgccagcctggagaccggccaggacagcgaggacgacagcggcgagcccgaggactgggtgcccgaccccgtggacgccgaccccggcaagagcagcagcaagagaagaagcagcgacatcatcagcctgctggtgagcatctacggcagcaaggacctgttcatcaacgagtacagaagcctgctggccgacagactgctgcaccagttcagcttcagccccgagagagagatcagaaacgtggagctgctgaagctgagattcggcgaggcccccatgcacttctgcgaggtgatgctgaaggacatggccgacagcagaagaatcaacgccaacatcagagaggaggacgagaagagacccgccgaggagcagccccccttcggcgtgtacgccgtgatcctgagcagcgagttctggccccccttcaaggacgagaagctggaggtgcccgaggacatcagagccgccctggaggcctactgcaagaagtacgagcagctgaaggccatgagaaccctgagctggaagcacaccctgggcctggtgaccatggacgtggagctggccgacagaaccctgagcgtggccgtgacccccgtgcaggccgtgatcctgctgtacttccaggaccaggccagctggaccctggaggagctgagcaaggccgtgaagatgcccgtggccctgctgagaagaagaatgagcgtgtggctgcagcagggcgtgctgagagaggagccccccggcaccttcagcgtgatcgaggaggagagaccccaggacagagacaacatggtgctgatcgacagcgacgacgagagcgacagcggcatggccagccaggccgaccagaaggaggaggagctgctgctgttctggacctacatccaggccatgctgaccaacctggagagcctgagcctggacagaatctacaacatgctgagaatgttcgtggtgaccggccccgccctggccgagatcgacctgcaggagctgcagggctacctgcagaagaaggtgagagaccagcagctggtgtacagcgccggcgtgtacagactgcccaagaactgcagctag

SEQ ID NO: 175866 - protein, 808 aa, Artificial Sequence
  derived and/or modified sequence
MLRFPTCFPSFRVVGEKQLPQEIIFLVWSPKRDLIALANTAGEVLLHRLASFHRVWSFPPNENTGKEVTCLAWRPDGKLLAFALADTKKIVLCDVEKPESLHSFSVEAPVSCMHWMEVTVESSVLTSFYNAEDESNLLLPKLPTLPKNYSNTSKIFSEENSDEIIKLLGDVRLNILVLGGSSGFIELYAYGMFKIARVTGIAGTCLALCLSSDLKSLSVVTEVSTNGASEVSYFQLETNLLYSFLPEVTRMARKFTHISALLQYINLSLTCMCEAWEEILMQMDSRLTKFVQEKNTTTSVQDEFMHLLLWGKASAELQTLLMNQLTVKGLKKLGQSIESSYSSIQKLVISHLQSGSESLLYHLSELKGMASWKQKYEPLGLDAAGIEEAITAVGSFILKANELLQVIDSSMKNFKAFFRWLYVAMLRMTEDHVLPELNKMTQKDITFVAEFLTEHFNEAPDLYNRKGKYFNVERVGQYLKDEDDDLVSPPNTEGNQWYDFLQNSSHLKESPLLFPYYPRKSLHFVKRRMENIIDQCLQKPADVIGKSMNQAICIPLYRDTRSEDSTRRLFKFPFLWNNKTSNLHYLLFTILEDSLYKMCILRRHTDISQSVSNGLIAIKFGSFTYATTEKVRRSIYSCLDAQFYDDETVTVVLKDTVGREGRDRLLVQLPLSLVYNSEDSAEYQFTGTYSTRLDEQCSAIPTRTMHFEKHWRLLESMKAQYVAGNGFRKVSCVLSSNLRHVRVFEMDIDDEWELDESSDEEEEASNKPVKIKEEVLSESEAENQQAGAAALAPEIVIKVEKLDPELDS

SEQ ID NO: 175867 - DNA, 2427 bp, Artificial Sequence
  derived and/or modified sequence
atgctgagattcccaacatgcttcccaagcttccgggtggtaggggaaaagcaactgccccaggaaattatctttttggtgtggtcccccaagcgcgatctaattgcccttgcaaacactgccggcgaggtgttgctgcatcgcctggcttcgtttcaccgggtgtggtctttccccccaaatgagaacaccggcaaagaggtcacttgtcttgcctggagaccggacggtaaactgttagctttcgcgttggccgataccaagaaaatagtcctctgtgacgtagaaaagccagaatccctgcactccttctctgtggaggcgcctgtgagttgcatgcattggatggaggtcaccgtggaatcctctgtcctgacgtctttctataatgctgaggatgagtctaacctgctccttcccaaactgccgactctccctaaaaactactctaacacctctaaaattttttctgaggagaatagcgatgagatcataaagctgctcggcgacgttcgtctgaatatactggtgttaggagggtcttcaggattcatagagttatacgcctatgggatgttcaaaatcgctcgggtcactggcattgcgggtacttgtctggcgctttgcctttctagtgacctgaagtccctcagcgtagttacagaagtttccaccaatggtgccagtgaagtaagttactttcagctggagaccaatctgctatactccttcctccccgaagttactcggatggcgaggaaattcactcacattagtgcccttctccagtacattaacctaagcctgacctgtatgtgcgaagcttgggaggagatcctcatgcaaatggattcccgcctaacgaaattcgttcaggagaagaatacaaccacaagtgtccaagatgagtttatgcatctgcttctctggggcaaagcatctgccgagctgcagacattgttgatgaatcagctcacagttaagggtctgaagaagttaggtcaatccatcgaatcttcctactccagtattcaaaagcttgtgatatctcatctccaatcaggaagcgaatcactcttgtaccatttatccgagctgaaaggtatggcgtcctggaagcagaagtacgagcctctgggtttggacgccgccggtattgaggaggctataacagcagtgggctctttcatcttgaaagctaatgagctcttacaggtcatcgattcctcaatgaaaaatttcaaggcatttttccggtggctatacgtggcgatgctccgcatgactgaagaccacgtactgccggaattgaataaaatgacccaaaaggacatcacttttgtggccgagtttcttaccgagcatttcaatgaggcacccgatctctacaataggaagggcaagtacttcaacgtcgagcgggttggccagtacttaaaggacgaggatgatgaccttgtaagtccacctaacacagaaggtaaccagtggtacgattttttgcagaattctagccatctgaaggaaagccccttactgttcccctactaccctcggaaaagcctgcatttcgtaaagaggagaatggaaaacataatcgaccagtgcctccagaaacctgccgatgtcatcgggaagagcatgaatcaagcaatttgcattccgctgtacagagatacacgatctgaagattccactaggcgtctattcaaatttccgttcctttggaacaataagacatctaatctgcactatctactgtttaccatcctggaagatagcttatacaagatgtgtattctaaggagacacacagatatcagccagtccgtgtctaatggcctgatcgcgattaaattcggtagcttcacctatgctactactgagaaagtccgtcgctcgatctacagctgtttggatgctcagttttatgacgatgaaaccgtcaccgtggtactgaaggatacagttggccgagagggaagggaccgcctgctggtgcagctgccgttgtcactagtgtacaatagcgaggactccgcggagtaccaattcacgggcacatactccacgaggctggacgagcagtgtagcgcaatccccacccgcaccatgcactttgaaaaacattggaggttgttggaatctatgaaagctcagtatgtggccgggaatggctttcgaaaagtgtcatgtgttttgagctctaacctgaggcacgtgagagtgttcgaaatggatattgacgacgagtgggagcttgacgagtcaagtgacgaggaagaagaggcttccaacaagccggtgaagataaaggaagaagtgttgagcgagtctgaggctgagaatcagcaagccggagccgctgcactggctcccgaaatcgtcatcaaagtggagaaattagatccagagttagactcatag

SEQ ID NO: 175868 - DNA, 2427 bp, Artificial Sequence
  derived and/or modified sequence
atgctgcgcttccccacctgcttccccagcttccgggtggtgggggagaagcagctgccccaggagatcatcttcctggtgtggagccccaagagggacctgattgccctggccaacacagctggggaggtgctgctgcaccggctggccagcttccaccgggtgtggagcttccccccaaatgaaaatacaggcaaggaggtgacctgcctggcctggaggccagatggcaagctgctggcctttgccctggccgacaccaagaagatcgtgctgtgtgatgtggagaagccagagagcctgcacagcttctctgtggaggcccctgtgtcctgcatgcactggatggaggtgacagtggagagctctgtgctgaccagcttctacaatgcagaagatgagagcaacctgctgctgcccaagctgcccaccctgcccaagaactacagcaacaccagcaagatcttctctgaagaaaattctgatgagatcatcaagctgctgggagatgtgcggctgaacatcctggtgctgggcggcagcagcggcttcatcgagctgtatgcctacggcatgttcaagatcgcccgggtgactggaattgctggcacctgcctggccctgtgcctgagcagtgacctgaagagcctgtctgtggtgacagaggtgtccaccaacggggccagcgaggtgtcctacttccagctggagaccaacctgctgtacagcttcctgcctgaggtgaccaggatggccaggaagttcacccacatcagcgccctgctgcagtacatcaacctgagcctgacctgcatgtgtgaggcctgggaggagatcctgatgcagatggacagccggctgaccaagtttgtgcaggagaagaacaccaccacctctgtgcaggatgagttcatgcacctgctgctgtggggcaaggccagcgctgagctgcagaccctgctgatgaaccagctgactgtgaagggcctgaagaagctgggccagagcattgagagcagctacagcagcatccagaagctggtgatcagccacctgcagagcggcagcgagagcctgctgtaccacctgtctgagctgaagggcatggcctcctggaagcagaagtatgagcccctgggcctggatgctgctggcatcgaggaggccatcacagctgtgggcagcttcatcctgaaggccaatgagctgctgcaggtgattgacagctccatgaagaacttcaaggccttcttccgctggctgtatgtggccatgctgaggatgacagaggaccacgtgctgcctgagctgaacaagatgacccagaaggacatcacctttgtggccgagttcctgacagagcacttcaatgaggccccagacctgtacaacaggaagggcaagtacttcaacgtggagcgggtgggccagtacctgaaggatgaagatgatgacctggtgtccccacccaacacagagggcaaccagtggtatgacttcctgcagaacagcagccacctgaaggagagccccctgctcttcccctactaccccaggaagagcctgcactttgtgaagaggaggatggagaacatcatcgaccagtgcctgcagaagccagcagatgtgattggcaagtccatgaaccaggccatctgcatccccctgtacagagacaccaggtctgaggacagcaccaggaggctcttcaagttccccttcctgtggaacaacaagaccagcaacctgcactacctgctcttcaccatcctggaggacagcctgtacaagatgtgcatcctgcggcggcacacagacatcagccagagcgtgtccaatggcctcatcgccatcaagtttggcagcttcacctacgccaccacagagaaggtgcggcgcagcatctacagctgcctggatgcccagttctatgatgatgagaccgtgacagtggtgctgaaggacacagtgggccgggagggccgggaccggctgctggtgcagctgcccctgagcctggtgtacaacagcgaggacagcgctgagtaccagttcaccggcacctacagcacccggctggatgagcagtgcagcgccatccccaccaggaccatgcactttgagaagcactggaggctgctggagagcatgaaggcccagtatgtggccggaaatggcttcaggaaggtgtcctgtgtgctgagcagcaacctgcggcacgtgcgggtgtttgagatggacattgatgatgagtgggagctggatgagagcagtgatgaggaggaggaggccagcaacaagcctgtgaagatcaaggaggaggtgctgtctgagagcgaggccgagaaccagcaggccggggctgctgccctggcccctgagatcgtcatcaaggtggagaagctggaccctgagctggacagctag

SEQ ID NO: 175869 - DNA, 2427 bp, Artificial Sequence
  derived and/or modified sequence
atgctgcggttccccacctgcttccccagcttccgggtggtgggcgagaaacagcttccccaggagatcatctttctcgtatggtctccaaaacgggatcttattgctcttgcaaatacggccggggaagtgctgttgcatcggctggcgagtttccaccgagtttggtcattccccccaaatgaaaatacgggaaaagaggttacctgcctggcctggagacctgatggcaagttactcgctttcgcgctcgcagatacaaagaagattgtgctatgcgacgtggagaaaccggaaagtctgcactccttctcagtggaagcccctgtgagctgcatgcactggatggaggtgacagtcgaaagcagtgtgctcacttcattttataacgccgaagacgagagtaacctgttgctgccaaagctccccacactgcctaagaattactccaacaccagtaagatctttagcgaggaaaactccgacgaaattatcaaactgcttggggatgtaaggctgaatatcttagttctcgggggcagcagcgggtttatcgagctgtacgcctacggcatgtttaagatcgctagagtcacaggcattgctggcacttgtctggctctgtgcctgtcgtctgatttgaaaagtttatcagtggtcactgaggtgagcaccaatggcgccagtgaagtgtcctactttcagttggaaaccaatttgctttattcattcttaccagaagtcacaaggatggccaggaagtttacccacatctcagcactgctgcagtatattaacctatcccttacgtgcatgtgcgaagcctgggaagaaatactcatgcagatggatagccgcttgactaaatttgtgcaagagaagaatacaactacatccgtccaggatgagtttatgcacctcctgctctggggcaaggcctccgccgagctgcaaacactattgatgaatcaactgaccgtgaaaggactgaagaagcttgggcagtctatcgagtcttcctatagttctatccagaagctagtgatctcccatttgcagtcaggatctgagtctttactttatcacctgtccgagctgaagggaatggcttcgtggaaacagaagtacgaacctctcggtctggacgctgccggcatcgaggaagcaattacagctgtgggctcctttatcttgaaggccaacgagttgctccaggtgattgatagctccatgaagaatttcaaagcattctttagatggttgtacgtcgctatgctgcgcatgactgaagatcatgttcttccagagttgaataagatgacacagaaagatatcaccttcgttgccgaatttcttactgaacatttcaacgaggctccagacctgtataacagaaagggtaagtacttcaatgtcgagcgcgtcgggcagtatctgaaggatgaggatgatgacctggtctctccccctaatactgagggcaatcaatggtatgacttcctgcagaacagtagccatttgaaagaatcgccccttctgtttccttattacccgagaaaaagcctgcacttcgtgaagagacggatggagaacattatcgaccagtgtctgcagaagcccgccgatgtcattgggaagtctatgaaccaggcaatatgtattcccctgtacagagatacacgttccgaagactctacccgtagacttttcaagttcccatttctttggaacaacaaaacttccaacctccattacctgctgtttacaatcctggaggatagcttgtacaagatgtgtatactgagacgccacacagatatctcccagagcgtctcaaatggactcatcgctataaagttcggatccttcacatacgcaactaccgaaaaagtgcgacggtccatttactcgtgcttggacgctcagttttatgacgatgagactgtcaccgttgtgcttaaggacactgtggggagagaaggacgtgataggctcctcgtgcaactaccactgagcctcgtgtacaactccgaagattccgctgagtatcaattcacagggacatatagcacgaggctcgacgagcagtgctccgctattcctaccagaacaatgcatttcgagaaacattggaggctgctggaatctatgaaagcccaatatgttgccggcaacggcttccgcaaggttagctgcgtgctctcctcaaacttacgacacgttcgcgtgtttgaaatggatatcgacgacgagtgggagcttgacgaatcttccgacgaagaagaggaagccagtaacaagcccgtcaaaatcaaggaagaggtgttgtctgagagcgaggccgagaatcagcaggccggtgccgccgctctggcccccgaaattgtcattaaagtggaaaagctggaccccgagcttgactcatag

SEQ ID NO: 175870 - DNA, 2685 bp, Artificial Sequence
  derived and/or modified sequence
cccgacgccggaagtgcctggagcgcgcgacagcggcggggcggggcggcctggaggctgtggcgcgcggccggcagagggaggggagaggccactggggccgtgttagtctgccggtggggactcttgcagggccgtccccatgttgcgttttccgacctgtttcccatccttccgggtggtgggagagaagcagctcccgcaggagattattttcctggtctggtcgcccaagcgggatctcattgctttggccaacacagctggcgaggttttacttcatcgactggcaagttttcatcgagtttggagttttccaccaaatgaaaatacaggaaaggaggtgacgtgtctggcatggagaccagatggcaaacttttggcctttgctcttgctgataccaagaaaattgttttgtgtgatgtagaaaaacctgagagcttacactctttttctgtggaggctccagtttcctgtatgcattggatggaagtgacagtagaaagcagtgttctcacatcattttataatgctgaggatgaatcaaatcttctcttacctaaactacctacactgccaaaaaactatagcaacacctcaaaaatatttagtgaagaaaattctgatgaaattattaagctcttgggagacgtcaggcttaatattctcgtccttggaggaagctctggatttattgagctttatgcttatggaatgtttaaaattgctcgagtcacagggattgctggtacttgtcttgcattatgtttatcaagtgatttgaaatcattatcagtggtcacagaagtctctaccaatggtgcttcagaagtttcatactttcagcttgaaactaatctgttgtactctttcttacctgaagtaactcggatggccagaaagtttactcatatttcagctctgttacagtatataaatttgtcactaacatgtatgtgtgaagcatgggaagaaatactaatgcagatggattctcgtctcaccaagtttgtgcaggaaaagaacacaaccacatcagtgcaagatgagttcatgcacttgctattatgggggaaagcaagtgctgaacttcagactctcttgatgaatcagttaacagtaaagggcttgaaaaagcttggccagtctatagagtcatcatactccagtatacaaaaattggtcataagtcatttacagagtggctcggagtctttattataccatttgagtgaattgaaaggaatggcttcatggaagcaaaaatatgaacctcttggactagatgctgcaggaatcgaagaagctataactgctgtgggttcttttatactcaaggcaaatgaacttcttcaagttatagatagtagtatgaaaaacttcaaagcattttttcggtggctttatgtggcaatgttgagaatgacagaagaccatgtgcttcccgagctgaataagatgactcagaaagatatcacatttgttgctgaatttcttactgaacatttcaatgaggctccagacctttataatcgaaaaggaaaatactttaacgttgaaagagttggtcagtacttgaaagatgaagatgatgatcttgtgtcaccccctaacacagaaggaaaccagtggtatgactttcttcaaaatagcagccaccttaaagaaagtcctttgctgtttccttattatcctcgaaaatcattgcattttgtgaaaaggcggatggagaatattattgatcagtgtttgcaaaagccagcagatgtaattggaaaatcgatgaatcaagcaatctgtattccattgtatagagataccagaagtgaggattctacacgtagattgttcaaatttccttttctgtggaataataaaacttcaaatctacattatcttctttttactattctagaagattcactttataaaatgtgcatcttaaggagacatactgatatttctcaatctgtgagtaatggactaattgctattaaatttgggagctttacatatgccacaacagaaaaagtcagaagaagcatctacagttgtttagatgcacagttttatgatgatgaaactgtaacagtagttcttaaagacactgtaggacgtgaaggaagagatagactcttggtccagctgcctttgtctttagtatataacagtgaagattctgcagaatatcagttcactgggacttattctacaaggctagatgaacagtgtagtgctattcccacccgtaccatgcattttgagaagcactggagattactggaaagtatgaaagcacagtatgttgctgggaatggttttcgaaaagtgtcctgtgtgttaagctcaaatcttcgtcatgtgagagtatttgaaatggacatagatgatgaatgggagctcgatgagtcttcagatgaagaggaggaggccagtaataagcctgtaaaaataaaggaagaagtgttgtcggagtcagaggcagagaaccaacaagctggtgctgccgctttagctccagagatagtcattaaagtggaaaaacttgaccctgagctagactcctaatctagcttgccattattgtgtgtgtaattatggccaaaaggacataggagatggactaagatgtcttggaccacctttgtgtaacaaagaaataaacagtaaattttattttttca

SEQ ID NO: 175871 - DNA, 2427 bp, Artificial Sequence
  derived and/or modified sequence
atgctgcggttcccaacttgtttcccaagcttcagggtggttggcgagaaacagctgccccaggagatcatctttctggtttggtcccctaaaagagatctcattgccctggcgaacacagccggagaggtcttgctgcataggctcgccagctttcatagagtatggtccttcccccctaatgagaacaccggaaaagaggtcacttgtctcgcgtggcggccagacgggaaactgctagcctttgcattagcggacacgaagaagatcgttctctgcgatgtcgaaaagccagagtcgcttcactcgttttctgtggaggcaccggtttcgtgcatgcactggatggaagtgactgtggagagttcagtgctgacatccttttataacgctgaggacgagtccaatttactgctgcccaaactgccaactctccctaagaactattccaatactagcaagattttttcagaggagaatagcgatgagattattaaactcctgggggacgttagattgaacatcttagtgctggggggatccagcggatttattgagctgtacgcttacgggatgtttaaaatagctcgcgtgacagggatcgcaggcacttgcttagccctttgcctgtccagcgatcttaaatctctgtctgtagtaactgaagtgtccacgaatggggcttcagaggtctcatacttccagctagagaccaatctcttgtattcatttcttcccgaagtgacgcgcatggcaagaaaatttacacacatatccgctttgctgcagtacatcaatttatcactgacttgtatgtgtgaggcctgggaagagattctgatgcaaatggattcgcgtttgactaaatttgtgcaggaaaaaaatacaaccaccagtgttcaggatgagtttatgcacctcttactctgggggaaggcgtcggctgaactgcaaacgctgctgatgaaccagctgactgtgaaaggtctgaagaagcttgggcagagtattgaaagttcatacagtagtatacagaaacttgtgatatctcaccttcagagcggcagcgagtctctcttgtaccacctgtccgaacttaagggtatggcatcttggaagcagaaatacgagcctttgggattggacgctgcgggaatcgaggaggcgattacagccgtgggaagctttattctcaaggcaaatgaactgctgcaggttatagatagctcaatgaaaaattttaaggctttttttagatggctgtatgttgctatgcttcgtatgacagaggaccatgtgctcccggaactcaacaagatgacacagaaggacatcacgttcgttgcagaatttctgaccgagcatttcaatgaagcgcctgacctgtacaatcgtaaaggcaagtacttcaatgtggaacgagttggccagtatttgaaagatgaggacgacgacctcgtgagccccccaaacacggaggggaaccaatggtatgattttctgcaaaatagcagtcatctcaaagagtcacctctgctgttcccttactatccccgaaagagcctgcactttgtcaaaaggaggatggagaatatcatcgatcagtgcttgcagaagccagccgatgtcataggaaagagcatgaaccaggccatctgcatacccctgtatagggatactagatctgaagatagcacgaggcggttgttcaagtttcctttcctttggaataataagacgtcaaatctccactacttactgttcactatattggaggatagtctctacaaaatgtgcatactgcgcaggcacaccgatatatctcaatcagtcagtaatggattgattgccattaagtttggttcttttacctatgccaccacagagaaggtccgacggtctatatatagttgtctggatgcccagttctatgacgacgagacagtgactgttgttctgaaggacaccgtggggagggaaggacgcgaccgtttgttggtgcagttgcccctgtctctggtgtacaactctgaagactcagccgagtaccagttcaccgggacatattctactagactggatgaacagtgttcggccatcccaaccagaaccatgcatttcgagaaacactggcgcctcttggagagcatgaaggcccagtatgtagcgggaaatggcttccggaaagtctcttgtgtcctgagctctaatctaaggcatgtgagagtcttcgaaatggatatcgacgacgaatgggagctggacgaatcgagcgatgaagaggaagaggcctcaaataagcctgtgaaaataaaagaagaggtgctcagcgaatccgaggctgagaatcagcaagccggagctgctgctctcgctcctgagattgttataaaagtggaaaagctagaccccgagctcgactcctag

SEQ ID NO: 175872 - DNA, 2427 bp, Artificial Sequence
  derived and/or modified sequence
atgctgagattccccacctgcttccccagcttcagagtggtgggcgagaagcagctgccccaggagatcatcttcctggtgtggagccccaagagagacctgatcgccctggccaacaccgccggcgaggtgctgctgcacagactggccagcttccacagagtgtggagcttcccccccaacgagaacaccggcaaggaggtgacctgcctggcctggagacccgacggcaagctgctggccttcgccctggccgacaccaagaagatcgtgctgtgcgacgtggagaagcccgagagcctgcacagcttcagcgtggaggcccccgtgagctgcatgcactggatggaggtgaccgtggagagcagcgtgctgaccagcttctacaacgccgaggacgagagcaacctgctgctgcccaagctgcccaccctgcccaagaactacagcaacaccagcaagatcttcagcgaggagaacagcgacgagatcatcaagctgctgggcgacgtgagactgaacatcctggtgctgggcggcagcagcggcttcatcgagctgtacgcctacggcatgttcaagatcgccagagtgaccggcatcgccggcacctgcctggccctgtgcctgagcagcgacctgaagagcctgagcgtggtgaccgaggtgagcaccaacggcgccagcgaggtgagctacttccagctggagaccaacctgctgtacagcttcctgcccgaggtgaccagaatggccagaaagttcacccacatcagcgccctgctgcagtacatcaacctgagcctgacctgcatgtgcgaggcctgggaggagatcctgatgcagatggacagcagactgaccaagttcgtgcaggagaagaacaccaccaccagcgtgcaggacgagttcatgcacctgctgctgtggggcaaggccagcgccgagctgcagaccctgctgatgaaccagctgaccgtgaagggcctgaagaagctgggccagagcatcgagagcagctacagcagcatccagaagctggtgatcagccacctgcagagcggcagcgagagcctgctgtaccacctgagcgagctgaagggcatggccagctggaagcagaagtacgagcccctgggcctggacgccgccggcatcgaggaggccatcaccgccgtgggcagcttcatcctgaaggccaacgagctgctgcaggtgatcgacagcagcatgaagaacttcaaggccttcttcagatggctgtacgtggccatgctgagaatgaccgaggaccacgtgctgcccgagctgaacaagatgacccagaaggacatcaccttcgtggccgagttcctgaccgagcacttcaacgaggcccccgacctgtacaacagaaagggcaagtacttcaacgtggagagagtgggccagtacctgaaggacgaggacgacgacctggtgagcccccccaacaccgagggcaaccagtggtacgacttcctgcagaacagcagccacctgaaggagagccccctgctgttcccctactaccccagaaagagcctgcacttcgtgaagagaagaatggagaacatcatcgaccagtgcctgcagaagcccgccgacgtgatcggcaagagcatgaaccaggccatctgcatccccctgtacagagacaccagaagcgaggacagcaccagaagactgttcaagttccccttcctgtggaacaacaagaccagcaacctgcactacctgctgttcaccatcctggaggacagcctgtacaagatgtgcatcctgagaagacacaccgacatcagccagagcgtgagcaacggcctgatcgccatcaagttcggcagcttcacctacgccaccaccgagaaggtgagaagaagcatctacagctgcctggacgcccagttctacgacgacgagaccgtgaccgtggtgctgaaggacaccgtgggcagagagggcagagacagactgctggtgcagctgcccctgagcctggtgtacaacagcgaggacagcgccgagtaccagttcaccggcacctacagcaccagactggacgagcagtgcagcgccatccccaccagaaccatgcacttcgagaagcactggagactgctggagagcatgaaggcccagtacgtggccggcaacggcttcagaaaggtgagctgcgtgctgagcagcaacctgagacacgtgagagtgttcgagatggacatcgacgacgagtgggagctggacgagagcagcgacgaggaggaggaggccagcaacaagcccgtgaagatcaaggaggaggtgctgagcgagagcgaggccgagaaccagcaggccggcgccgccgccctggcccccgagatcgtgatcaaggtggagaagctggaccccgagctggacagctag

SEQ ID NO: 175873 - protein, 177 aa, Artificial Sequence
  derived and/or modified sequence
MKLQCVSLWLLGTILILCSVDNHGLRRCLISTDMHHIEESFQEIKRAIQAKDTFPNVTILSTLETLQIIKPLDVCCVTKNLLAFYVDRVFKDHQEPNPKILRKISSIANSFLYMQKTLRQCQEQRQCHCRQEATNATRVIHDNYDQLEVHAAAIKSLGELDVFLAWINKNHEVMFSA

SEQ ID NO: 175874 - DNA, 534 bp, Artificial Sequence
  derived and/or modified sequence
atgaaattacaatgtgtgagcttatggctgttgggcaccatactgatcttgtgctccgtggataatcacgggctccgaagatgtctgatctccacggacatgcaccacatcgaggaaagcttccaggagattaaacgagcaatccaggcaaaagataccttcccgaacgtgacaatcttgagcacactcgagaccctgcagataatcaagcctctggatgtttgctgcgtaacaaagaatctattagccttttacgtggatcgcgtgttcaaggaccaccaagagcccaatccaaaaattctccgcaagattagcagtattgcaaacagctttttgtatatgcagaaaaccctccgtcaatgccaggaacagcggcagtgccattgtcgccaggaagccacaaacgctaccagggtgattcacgataattatgaccagttagaagttcacgctgccgccattaagagtctcggtgaactagacgtttttctagcgtggataaataagaaccacgaggttatgttttcagcttag

SEQ ID NO: 175875 - DNA, 534 bp, Artificial Sequence
  derived and/or modified sequence
atgaagctgcagtgtgtgtccctgtggctgctgggcaccatcctgatcctgtgcagcgtggacaaccacggcctgcggcgctgcctgatcagcacagacatgcaccacatcgaggagagcttccaggagatcaagagggccatccaggccaaggacaccttccccaacgtgaccatcctgagcaccctggagaccctgcagatcatcaagcccctggatgtgtgctgcgtgaccaagaacctgctggccttctacgtggacagagtcttcaaggaccaccaggagcccaaccccaagatcctgaggaagatcagcagcatcgccaacagcttcctgtacatgcagaagaccctgcggcagtgccaggagcagaggcagtgccactgccggcaggaggccaccaatgccaccagggtcatccatgacaactatgaccagctggaggtgcatgctgctgccatcaagagcctgggggagctggatgtgttcctggcctggatcaacaagaaccacgaggtgatgttcagcgcctag

SEQ ID NO: 175876 - DNA, 534 bp, Artificial Sequence
  derived and/or modified sequence
atgaagctgcagtgcgtgagcctgtggctgctgggcaccatcctgatcctttgctctgtagacaatcacggtctgcgccggtgtctgatctccaccgatatgcaccatatagaagaatcatttcaggagatcaagcgcgccatccaagcgaaagatactttccccaatgttactatcctgtcgactctcgagacactgcaaattattaaaccactcgatgtttgttgtgtgacgaagaatctgctggccttctacgtcgatcgcgtttttaaagaccatcaggagcccaacccaaaaatcctgcggaagatatcaagtatcgccaacagctttctgtatatgcagaaaaccctgaggcaatgtcaggaacagaggcaatgtcactgtcgccaagaggctaccaacgcaacccgcgtcattcacgacaattacgaccaactggaagtgcacgcagccgctatcaagagcttaggtgagctcgacgtgttccttgcttggatcaacaagaatcacgaggtgatgttctccgcctag

SEQ ID NO: 175877 - DNA, 534 bp, Artificial Sequence
  derived and/or modified sequence
atgaagctccagtgcgtcagcctctggttacttgggactattctgatcctgtgtagcgtggataaccatggccttcgcagatgtttaataagtacggacatgcatcatatcgaggaatctttccaggagattaaacgtgccattcaggcaaaggatacgttcccaaatgtaacaatcctatcaactctcgaaacactgcagatcataaaacctctggacgtgtgttgtgtaacaaagaatttgctggcgttttacgtggacagagtgtttaaggatcaccaggagcccaatcccaagatattgagaaagatatcatcgatagcaaactcttttctctacatgcaaaaaaccctcaggcagtgtcaggaacagagacagtgccactgtcgtcaggaggccaccaatgcgacacgcgtaatacacgacaactatgaccagcttgaggtccacgctgctgcaataaagagccttggggaactcgatgtgtttttggcatggataaataagaaccatgaagtgatgttctctgcgtag

SEQ ID NO: 175878 - DNA, 534 bp, Artificial Sequence
  derived and/or modified sequence
atgaagctgcagtgcgtgagcctgtggctgctgggcaccatcctgatcctgtgcagcgtggacaaccacggcctgagaagatgcctgatcagcaccgacatgcaccacatcgaggagagcttccaggagatcaagagagccatccaggccaaggacaccttccccaacgtgaccatcctgagcaccctggagaccctgcagatcatcaagcccctggacgtgtgctgcgtgaccaagaacctgctggccttctacgtggacagagtgttcaaggaccaccaggagcccaaccccaagatcctgagaaagatcagcagcatcgccaacagcttcctgtacatgcagaagaccctgagacagtgccaggagcagagacagtgccactgcagacaggaggccaccaacgccaccagagtgatccacgacaactacgaccagctggaggtgcacgccgccgccatcaagagcctgggcgagctggacgtgttcctggcctggatcaacaagaaccacgaggtgatgttcagcgcctag

SEQ ID NO: 175879 - protein, 184 aa, Artificial Sequence
  derived and/or modified sequence
MSRTAYTVGALLLLLGTLLPAAEGKKKGSQGAIPPPDKAQHNDSEQTQSPQQPGSRNRGRGQGRGTAMPGEEVLESSQEALHVTERKYLKRDWCKTQPLKQTIHEEGCNSRTIINRFCYGQCNSFYIPRHIRKEEGSFQSCSFCKPKKFTTMMVTLNCPELQPPTKKKRVTRVKQCRCISIDLD

SEQ ID NO: 175880 - DNA, 555 bp, Artificial Sequence
  derived and/or modified sequence
atgagcagaaccgcctacaccgtgggcgccctgctgctgctgctgggcaccctgctgcccgccgccgagggcaagaagaagggcagccagggcgccatccccccccccgacaaggcccagcacaacgacagcgagcagacccagagcccccagcagcccggcagcagaaacagaggcagaggccagggcagaggcaccgccatgcccggcgaggaggtgctggagagcagccaggaggccctgcacgtgaccgagagaaagtacctgaagagagactggtgcaagacccagcccctgaagcagaccatccacgaggagggctgcaacagcagaaccatcatcaacagattctgctacggccagtgcaacagcttctacatccccagacacatcagaaaggaggagggcagcttccagagctgcagcttctgcaagcccaagaagttcaccaccatgatggtgaccctgaactgccccgagctgcagccccccaccaagaagaagagagtgaccagagtgaagcagtgcagatgcatcagcatcgacctggactag

SEQ ID NO: 175881 - DNA, 555 bp, Artificial Sequence
  derived and/or modified sequence
atgagtagaaccgcctatacagtgggcgctctactgctcctactgggaaccctgctgccagcagccgaggggaagaagaaaggcagccaaggagcaattccacctcccgataaggctcagcacaacgattccgaacagacccaatccccccagcaacccggatctagaaatcgagggcgaggtcagggacggggcacggcaatgcctggcgaggaggtgctggagagctcccaggaggcactccatgttacggagaggaagtacctgaaacgggactggtgcaaaactcagcctctcaaacagaccatccacgaggagggatgcaatagtcgcaccatcatcaaccggttctgttatggacagtgcaactcattttacattccgcgacatatccgaaaagaggaagggtcctttcagtcatgtagcttttgcaaaccgaagaaattcacgactatgatggttacgctgaattgtcccgagctgcagccccctaccaaaaagaagagagttactagagtaaaacagtgccgatgcatttctatcgacttggactag

SEQ ID NO: 175882 - DNA, 555 bp, Artificial Sequence
  derived and/or modified sequence
atgagcaggacagcctacacagtgggcgccctgctgctgctgctgggcaccctgctgcctgctgctgagggcaagaagaagggcagccagggcgccatccccccaccagacaaggcccagcacaatgacagcgagcagacccagagcccccagcagcccggcagcaggaacagaggccggggccagggccggggcacagccatgcctggagaggaggtgctggagagcagccaggaggccctgcacgtgacagagaggaagtacctgaagagggactggtgcaagacccagcccctgaagcagaccatccacgaggagggctgcaacagcaggaccatcatcaaccgcttctgctacggccagtgcaacagcttctacatccccaggcacatcaggaaggaggagggcagcttccagagctgcagcttctgcaagcccaagaagttcaccaccatgatggtgaccctgaactgcccagagctgcagccccccaccaagaagaagagggtgaccagggtgaagcagtgccgctgcatcagcattgacctggactag

SEQ ID NO: 175883 - DNA, 555 bp, Artificial Sequence
  derived and/or modified sequence
atgagccggaccgcctacaccgtgggcgccctgctgctgctgctggggacgctgctacctgctgccgaggggaaaaaaaagggaagccagggtgccataccccctcccgataaagcacaacacaacgatagcgagcagacccagtcaccccagcagcccggatcgcggaaccggggaagagggcagggcagagggactgctatgcctggagaggaggtccttgaatcatcacaggaagctttgcatgttacagagcgtaagtacctcaagagagattggtgcaaaacacagccactgaagcagacgatacacgaagagggctgtaatagtcgtaccattattaatcgattttgctacggacaatgtaattcattttatattccgaggcatatcagaaaagaggagggtagcttccagtcatgttccttctgcaagccaaaaaagttcactacgatgatggttacgcttaattgcccagaactccaacctcccactaaaaaaaagagagtgacgcgtgtgaaacagtgccgctgcatcagcattgacctagactag

SEQ ID NO: 175884 - DNA, 555 bp, Artificial Sequence
  derived and/or modified sequence
atgagtagaaccgcttataccgttggcgctctcttacttctattgggtacactcctacctgccgctgagggcaagaaaaagggctcccaaggggcaatcccccctccagacaaagcacagcacaacgattccgaacagacccagtccccccaacagcctggctcacggaatagagggcgtggccaaggaaggggtacagcaatgcctggcgaggaagtcctcgaaagctcacaggaggctctgcacgttacagagcgtaaatatctcaagcgtgattggtgcaaaacacagcccctcaagcagacgatccacgaggaaggctgcaattctcggaccattatcaatagattctgctacggacagtgtaattctttttacatccccaggcacatcaggaaggaagaggggagtttccagtcctgcagcttctgtaagcctaaaaaatttacaaccatgatggtcacgctgaattgtcccgagcttcagccacccacaaaaaagaagagggtcactcgagtcaagcagtgtcggtgtattagcattgatctggactag

SEQ ID NO: 175885 - DNA, 555 bp, Artificial Sequence
  derived and/or modified sequence
atgtcccggaccgcatacaccgtaggggcgttgctgctcctgctgggaactttactgcccgccgcagagggcaaaaagaaagggagccagggtgccatcccccctccagacaaggcacagcataatgactcagagcagacccagtcacctcagcagcccggaagccgtaacaggggacggggacagggcaggggcaccgcaatgccaggggaggaggtactagaatcatctcaggaagctctgcatgtaaccgaacgtaagtacttgaagcgcgactggtgtaaaacccagccactaaagcaaactattcacgaagaggggtgcaattctcgaactatcataaatagattttgttacggacaatgtaattccttttatattccaagacacattcgaaaggaagaaggcagcttccaatcttgctcgttctgtaaaccaaaaaagttcaccacgatgatggtgacattaaattgccctgaactgcagccaccaacaaagaagaaaagggtcacaagagtcaagcagtgcaggtgcatcagcatcgacttagattag

SEQ ID NO: 175886 - DNA, 555 bp, Artificial Sequence
  derived and/or modified sequence
atgagcagaacagcctatacagtgggagcacttcttttactcctgggaacactgttgccagccgccgaaggcaaaaaaaaaggtagtcagggggccatcccaccacccgacaaagctcagcacaatgactccgaacaaacccagagcccccaacagcctggatccagaaatcgagggagaggacagggacggggaacagcaatgccaggggaagaggtcctggaatccagtcaggaagccttgcatgttactgagcgcaaatatttaaagcgtgactggtgcaaaacacagcctttgaagcaaaccatccatgaggagggctgtaatagccgaaccataattaaccgcttttgctatggacaatgcaattccttttacattccacgacatatccggaaagaagaagggtcgtttcagtcttgcagcttttgtaaaccaaaaaagtttaccactatgatggtgactctgaactgccccgagcttcaaccaccaactaagaagaagcgagtgacccgcgtaaagcagtgccgatgtatttcgatagacctggactag

SEQ ID NO: 175887 - RNA, 555 nt, Artificial Sequence
  derived and/or modified sequence
augucccggaccgcauacaccguaggggcguugcugcuccugcugggaacuuuacugcccgccgcagagggcaaaaagaaagggagccagggugccauccccccuccagacaaggcacagcauaaugacucagagcagacccagucaccucagcagcccggaagccguaacaggggacggggacagggcaggggcaccgcaaugccaggggaggagguacuagaaucaucucaggaagcucugcauguaaccgaacguaaguacuugaagcgcgacugguguaaaacccagccacuaaagcaaacuauucacgaagaggggugcaauucucgaacuaucauaaauagauuuuguuacggacaauguaauuccuuuuauauuccaagacacauucgaaaggaagaaggcagcuuccaaucuugcucguucuguaaaccaaaaaaguucaccacgaugauggugacauuaaauugcccugaacugcagccaccaacaaagaagaaaagggucacaagagucaagcagugcaggugcaucagcaucgacuuagauuag

SEQ ID NO: 175888 - RNA, 555 nt, Artificial Sequence
  derived and/or modified sequence
augagcagaacagccuauacagugggagcacuucuuuuacuccugggaacacuguugccagccgccgaaggcaaaaaaaaagguagucagggggccaucccaccacccgacaaagcucagcacaaugacuccgaacaaacccagagcccccaacagccuggauccagaaaucgagggagaggacagggacggggaacagcaaugccaggggaagagguccuggaauccagucaggaagccuugcauguuacugagcgcaaauauuuaaagcgugacuggugcaaaacacagccuuugaagcaaaccauccaugaggagggcuguaauagccgaaccauaauuaaccgcuuuugcuauggacaaugcaauuccuuuuacauuccacgacauauccggaaagaagaagggucguuucagucuugcagcuuuuguaaaccaaaaaaguuuaccacuaugauggugacucugaacugccccgagcuucaaccaccaacuaagaagaagcgagugacccgcguaaagcagugccgauguauuucgauagaccuggacuag

SEQ ID NO: 175889 - protein, 673 aa, Artificial Sequence
  derived and/or modified sequence
MPRSPGTRLKPAKYIPVATAAALLVGSSTLFFVFTCPWLTRAVSPAVPVYNGIIFLFVLANFSMATFMDPGVFPRADEDEDKEDDFRAPLYKNVDVRGIQVRMKWCATCHFYRPPRCSHCSVCDNCVEVTGKFRGGVNPFTRGCCGNVEHVLCSPLAPRYVVEPPRLPLAVSLKPPFLRPELLDRAAPLKVKLSDNGLKAGLGRSKSKGSLDRLDEKPLDLGPPLPPKIEAGTFSSDLQTPRPGSAESALSVQRTSPPTPAMYKFRPAFPTGPKVPFCGPGEQVPGPDSLTLGDDSIRSLDFVSEPSLDLPDYGPGGLHAAYPPSPPLSASDAFSGALRSLSLKASSRRGGDHVALQPLRSEGGPPTPHRSIFAPHALPNRNGSLSYDSLLNPGSPGGHACPAHPAVGVAGYHSPYLHPGATGDPPRPLPRSFSPVLGPRPREPSPVRYDNLSRTIMASIQERKDREERERLLRSQADSLFGDSGVYDAPSSYSLQQASVLSEGPRGPALRYGSRDDLVAGPGFGGARNPALQTSLSSLSSSVSRAPRTSSSSLQADQASSNAPGPRPSSGSHRSPARQGLPSPPGTPHSPSYAGPKAVAFIHTDLPEPPPSLTVQRDHPQLKTPPSKLNGQSPGLARLGPATGPPGPSASPTRHTLVKKVSGVGGTTYEISV

SEQ ID NO: 175890 - protein, 765 aa, Artificial Sequence
  derived and/or modified sequence
MPRSPGTRLKPAKYIPVATAAALLVGSSTLFFVFTCPWLTRAVSPAVPVYNGIIFLFVLANFSMATFMDPGVFPRADEDEDKEDDFRAPLYKNVDVRGIQVRMKWCATCHFYRPPRCSHCSVCDNCVEDFDHHCPWVNNCIGRRNYRYFFLFLLSLSAHMVGVVAFGLVYVLNHAEGLGAAHTTITMAVMCVAGLFFIPVIGLTGFHVVLVTRGRTTNEQVTGKFRGGVNPFTRGCCGNVEHVLCSPLAPRYVVEPPRLPLAVSLKPPFLRPELLDRAAPLKVKLSDNGLKAGLGRSKSKGSLDRLDEKPLDLGPPLPPKIEAGTFSSDLQTPRPGSAESALSVQRTSPPTPAMYKFRPAFPTGPKVPFCGPGEQVPGPDSLTLGDDSIRSLDFVSEPSLDLPDYGPGGLHAAYPPSPPLSASDAFSGALRSLSLKASSRRGGDHVALQPLRSEGGPPTPHRSIFAPHALPNRNGSLSYDSLLNPGSPGGHACPAHPAVGVAGYHSPYLHPGATGDPPRPLPRSFSPVLGPRPREPSPVRYDNLSRTIMASIQERKDREERERLLRSQADSLFGDSGVYDAPSSYSLQQASVLSEGPRGPALRYGSRDDLVAGPGFGGARNPALQTSLSSLSSSVSRAPRTSSSSLQADQASSNAPGPRPSSGSHRSPARQGLPSPPGTPHSPSYAGPKAVAFIHTDLPEPPPSLTVQRDHPQLKTPPSKLNGQSPGLARLGPATGPPGPSASPTRHTLVKKVSGVGGTTYEISV

SEQ ID NO: 175891 - DNA, 2022 bp, Artificial Sequence
  derived and/or modified sequence
atgcccagaagccccggcaccagactgaagcccgccaagtacatccccgtggccaccgccgccgccctgctggtgggcagcagcaccctgttcttcgtgttcacctgcccctggctgaccagagccgtgagccccgccgtgcccgtgtacaacggcatcatcttcctgttcgtgctggccaacttcagcatggccaccttcatggaccccggcgtgttccccagagccgacgaggacgaggacaaggaggacgacttcagagcccccctgtacaagaacgtggacgtgagaggcatccaggtgagaatgaagtggtgcgccacctgccacttctacagaccccccagatgcagccactgcagcgtgtgcgacaactgcgtggaggtgaccggcaagttcagaggcggcgtgaaccccttcaccagaggctgctgcggcaacgtggagcacgtgctgtgcagccccctggcccccagatacgtggtggagccccccagactgcccctggccgtgagcctgaagccccccttcctgagacccgagctgctggacagagccgcccccctgaaggtgaagctgagcgacaacggcctgaaggccggcctgggcagaagcaagagcaagggcagcctggacagactggacgagaagcccctggacctgggcccccccctgccccccaagatcgaggccggcaccttcagcagcgacctgcagacccccagacccggcagcgccgagagcgccctgagcgtgcagagaaccagcccccccacccccgccatgtacaagttcagacccgccttccccaccggccccaaggtgcccttctgcggccccggcgagcaggtgcccggccccgacagcctgaccctgggcgacgacagcatcagaagcctggacttcgtgagcgagcccagcctggacctgcccgactacggccccggcggcctgcacgccgcctacccccccagcccccccctgagcgccagcgacgccttcagcggcgccctgagaagcctgagcctgaaggccagcagcagaagaggcggcgaccacgtggccctgcagcccctgagaagcgagggcggcccccccaccccccacagaagcatcttcgccccccacgccctgcccaacagaaacggcagcctgagctacgacagcctgctgaaccccggcagccccggcggccacgcctgccccgcccaccccgccgtgggcgtggccggctaccacagcccctacctgcaccccggcgccaccggcgacccccccagacccctgcccagaagcttcagccccgtgctgggccccagacccagagagcccagccccgtgagatacgacaacctgagcagaaccatcatggccagcatccaggagagaaaggacagagaggagagagagagactgctgagaagccaggccgacagcctgttcggcgacagcggcgtgtacgacgcccccagcagctacagcctgcagcaggccagcgtgctgagcgagggccccagaggccccgccctgagatacggcagcagagacgacctggtggccggccccggcttcggcggcgccagaaaccccgccctgcagaccagcctgagcagcctgagcagcagcgtgagcagagcccccagaaccagcagcagcagcctgcaggccgaccaggccagcagcaacgcccccggccccagacccagcagcggcagccacagaagccccgccagacagggcctgcccagcccccccggcaccccccacagccccagctacgccggccccaaggccgtggccttcatccacaccgacctgcccgagcccccccccagcctgaccgtgcagagagaccacccccagctgaagaccccccccagcaagctgaacggccagagccccggcctggccagactgggccccgccaccggcccccccggccccagcgccagccccaccagacacaccctggtgaagaaggtgagcggcgtgggcggcaccacctacgagatcagcgtgtag

SEQ ID NO: 175892 - DNA, 2298 bp, Artificial Sequence
  derived and/or modified sequence
atgcccagaagccccggcaccagactgaagcccgccaagtacatccccgtggccaccgccgccgccctgctggtgggcagcagcaccctgttcttcgtgttcacctgcccctggctgaccagagccgtgagccccgccgtgcccgtgtacaacggcatcatcttcctgttcgtgctggccaacttcagcatggccaccttcatggaccccggcgtgttccccagagccgacgaggacgaggacaaggaggacgacttcagagcccccctgtacaagaacgtggacgtgagaggcatccaggtgagaatgaagtggtgcgccacctgccacttctacagaccccccagatgcagccactgcagcgtgtgcgacaactgcgtggaggacttcgaccaccactgcccctgggtgaacaactgcatcggcagaagaaactacagatacttcttcctgttcctgctgagcctgagcgcccacatggtgggcgtggtggccttcggcctggtgtacgtgctgaaccacgccgagggcctgggcgccgcccacaccaccatcaccatggccgtgatgtgcgtggccggcctgttcttcatccccgtgatcggcctgaccggcttccacgtggtgctggtgaccagaggcagaaccaccaacgagcaggtgaccggcaagttcagaggcggcgtgaaccccttcaccagaggctgctgcggcaacgtggagcacgtgctgtgcagccccctggcccccagatacgtggtggagccccccagactgcccctggccgtgagcctgaagccccccttcctgagacccgagctgctggacagagccgcccccctgaaggtgaagctgagcgacaacggcctgaaggccggcctgggcagaagcaagagcaagggcagcctggacagactggacgagaagcccctggacctgggcccccccctgccccccaagatcgaggccggcaccttcagcagcgacctgcagacccccagacccggcagcgccgagagcgccctgagcgtgcagagaaccagcccccccacccccgccatgtacaagttcagacccgccttccccaccggccccaaggtgcccttctgcggccccggcgagcaggtgcccggccccgacagcctgaccctgggcgacgacagcatcagaagcctggacttcgtgagcgagcccagcctggacctgcccgactacggccccggcggcctgcacgccgcctacccccccagcccccccctgagcgccagcgacgccttcagcggcgccctgagaagcctgagcctgaaggccagcagcagaagaggcggcgaccacgtggccctgcagcccctgagaagcgagggcggcccccccaccccccacagaagcatcttcgccccccacgccctgcccaacagaaacggcagcctgagctacgacagcctgctgaaccccggcagccccggcggccacgcctgccccgcccaccccgccgtgggcgtggccggctaccacagcccctacctgcaccccggcgccaccggcgacccccccagacccctgcccagaagcttcagccccgtgctgggccccagacccagagagcccagccccgtgagatacgacaacctgagcagaaccatcatggccagcatccaggagagaaaggacagagaggagagagagagactgctgagaagccaggccgacagcctgttcggcgacagcggcgtgtacgacgcccccagcagctacagcctgcagcaggccagcgtgctgagcgagggccccagaggccccgccctgagatacggcagcagagacgacctggtggccggccccggcttcggcggcgccagaaaccccgccctgcagaccagcctgagcagcctgagcagcagcgtgagcagagcccccagaaccagcagcagcagcctgcaggccgaccaggccagcagcaacgcccccggccccagacccagcagcggcagccacagaagccccgccagacagggcctgcccagcccccccggcaccccccacagccccagctacgccggccccaaggccgtggccttcatccacaccgacctgcccgagcccccccccagcctgaccgtgcagagagaccacccccagctgaagaccccccccagcaagctgaacggccagagccccggcctggccagactgggccccgccaccggcccccccggccccagcgccagccccaccagacacaccctggtgaagaaggtgagcggcgtgggcggcaccacctacgagatcagcgtgtag

SEQ ID NO: 175893 - DNA, 2022 bp, Artificial Sequence
  derived and/or modified sequence
atgccccgctcacccggcaccaggctgaagcctgccaaatatattccagttgctactgcagcggccctgctcgtgggctcttctacattgttctttgtcttcacgtgtccttggctcacaagggctgttagtcctgcggttccagtgtacaacggcattatcttcttattcgtgctcgccaattttagtatggccacgttcatggatcccggggtgttccccagagccgatgaggacgaggataaggaagacgacttccgcgctccactgtataaaaacgtagacgtcagaggcatccaggtgcgcatgaagtggtgtgctacatgtcatttctatcgcccgccacgttgctcacactgctcagtctgtgacaactgcgtggaggtgaccggcaaattccgaggcggtgtaaatccttttacacgcggctgctgtggaaacgtagaacatgtgctgtgttctccgctcgcaccccgatacgtggtggagccaccccggctccccctggccgtatccctcaagcctccgtttctgcggccagaacttctggaccgcgcagctccattgaaagtgaagctgtcggataatggactgaaggccggcctggggcgctcaaaatccaaggggagtctggacaggcttgacgaaaaaccccttgacctgggtccacctttaccacctaaaattgaggcaggaacgttcagctcagacttgcagacccctcgccccggatctgcagaaagcgccctctcagtgcagcgcacgagccctccaacacctgccatgtataagttccgacccgcgttccctaccggcccaaaggttccgttttgcgggcccggggagcaagtgccagggccagactcactcaccctgggtgacgacagtattcgctccctggacttcgtctcggagccttccttggaccttcccgactatggccctggtgggctacacgcagcttaccccccttcaccaccgctgtccgcttcggatgcttttagtggggctttacgtagcctgagcttaaaagccagcagtaggcgggggggagaccatgtggcgcttcagcccctccgctcagaaggtgggccccccacgccccaccggtccatcttcgccccacacgccctgcctaaccggaatgggagtctcagttacgattctctgctcaatcctggatcaccaggaggccacgcttgcccagctcaccccgcagttggagtggccggctatcactctccttatctgcaccccggtgcaacgggggaccccccccggcctctccctcgtagctttagcccagtgctagggccaaggccccgcgagccttcaccagttcgttatgataacttgagtcggactatcatggcgtcaatccaggagcggaaggatcgtgaagagcgagagagactcttgcggtctcaggccgattctctgttcggtgactccggcgtttacgatgccccctcctcttacagtctccaacaagcatctgttctcagcgaaggtccaagggggccagccttaaggtacggaagtcgggacgatctagtggccgggccgggatttggcggtgcaaggaacccagctcttcagacttctctcagtagtctgagttcatccgtttctagggctccaaggacctcttcatctagcctgcaggccgaccaagctagctcgaatgctcctgggcctcgccccagttctggctcacacaggtcccctgctaggcaggggctgcccagtccgccagggactcctcattccccaagctatgccggacctaaggctgttgccttcatccatactgatcttccagagcccccccccagcctcaccgttcagcgtgatcacccccagctaaaaacaccgcccagcaaactgaacggccaaagtcctggtcttgccaggctgggaccggccacaggacctccaggccctagcgcgagtccgactcgccatactttggtaaagaaggtgtctggtgtggggggaactacgtatgagatctccgtgtag

SEQ ID NO: 175894 - DNA, 2298 bp, Artificial Sequence
  derived and/or modified sequence
atgcctaggtccccagggacccggttaaagccagccaagtatatccctgtcgcgaccgccgccgccctactcgttggttcttcgacactgttcttcgtgtttacctgtccgtggctaacccgtgctgtgtctccagcagtgccagtttacaacggcatcattttcttatttgtcctggccaatttcagtatggcaacttttatggatccgggggtgtttccccgagccgacgaggatgaagataaggaggatgattttcgggccccattgtacaagaacgttgatgttcgaggcatccaggtccggatgaaatggtgtgcgacatgccacttttaccgtccaccccggtgctcacactgctctgtgtgcgataactgcgttgaggattttgaccatcactgtccttgggtgaataattgcattggccgaaggaattaccggtacttctttctgtttctgctcagcctttcggctcacatggtcggagtggtggccttcgggctggtgtatgtgctgaaccacgcggagggcttgggggcagcccacacgacaataactatggccgtcatgtgcgtggctggcctgtttttcataccagtgatcgggttgaccggcttccatgttgtgctggtgactagaggccggacgactaacgagcaggtcactggcaaattccgcggcggagtgaatccgtttacccggggttgctgtgggaatgtagaacacgtcttgtgtagtcctttggctcccagatatgtggtggagcccccacggctacctcttgccgtgtcccttaaaccccccttcctccggccggaactcttagaccgcgctgcaccacttaaggtgaaactctccgacaatggcctcaaggcagggctgggacgctcgaaaagtaagggttccctggacaggctcgacgaaaagcccctggatctgggccctcccctacctcccaaaattgaagccggcacattctcctcggatctccaaactccacgcccaggcagcgccgaaagcgcactgagtgtacagcggactagcccccctacgcctgccatgtataaattccggcctgccttcccaaccgggcccaaagtaccattctgtggacctggtgaacaggtgcctggacctgatagcctgactctgggggatgactcgatcaggtcattggacttcgtctctgaacctagtctggatcttcctgactatggaccaggcggactccatgcagcatatcccccatcaccccccctcagtgcgagtgacgccttttccggtgcactgcggtccctcagtctaaaggcgtcctcccggcgagggggcgatcatgtcgctctgcagcccttgcgcagcgaaggtggcccaccaacacctcatagatcaatttttgccccacatgcactgcctaaccgcaatgggagcctgtcctatgactctctcctgaaccctggttctccaggtgggcatgcttgtccagcacacccagctgttggcgtggccggctaccactcaccgtatctgcatcccggggccacgggagacccacccagacccctccctagatccttctctccagtcctaggaccccgtccacgagagccttctcccgtccggtatgacaatttaagcagaactatcatggcctctattcaagaacgtaaagacagggaagagcgggaacggttactgcgctcgcaggcagattctctgttcggagactctggggtctatgacgcaccttcatcttattctctgcagcaggcttctgtgctgtcagaagggcctcgcggtcctgccttaaggtacgggagcagagatgatcttgtcgcggggcccggcttcggcggagctaggaaccctgccttgcagaccagcctgtccagtctctcgtccagtgtttcacgcgccccccgtacctccagcagttctctgcaagcagatcaagccagttctaatgctcccggcccgcggccatcctcagggagccaccgttctccagccaggcagggcctgccaagcccgcccggcacacctcattctccctcctatgccgggcccaaggccgtagccttcatacatactgacctacctgaaccacctccgtccctcactgtgcaaagggatcacccccaactgaaaacaccaccttctaaactcaacggccaaagccctggactggccaggctcgggcctgctaccggccctccaggcccttctgctagtccaacaagacatacccttgttaagaaagtcagtggcgttggaggaacaacttacgagatatcagtctag

SEQ ID NO: 175895 - DNA, 2022 bp, Artificial Sequence
  derived and/or modified sequence
atgcccaggagccctggcacccggctgaagccagccaagtacatccctgtggccacagctgctgccctgctggtgggcagcagcaccctcttctttgtgttcacctgcccctggctgaccagggctgtgtccccagctgtgcctgtgtacaacggcatcatcttcctgtttgtgctggccaacttctccatggccaccttcatggaccccggggtcttccccagggcagatgaagatgaggacaaggaggatgacttccgggcccccctgtacaagaatgtggatgtgcggggcatccaggtgaggatgaagtggtgtgccacctgccacttctaccggcccccacgctgcagccactgcagcgtgtgtgacaactgtgtggaggtgacaggcaagttccggggcggcgtgaaccccttcacccggggctgctgcggaaatgtggagcacgtgctgtgcagccccctggccccccgctacgtggtggagcccccccggctgcccctggccgtgtccctgaagccacccttcctgcggcctgagctgctggaccgggccgcccccctgaaggtgaagctgagtgacaatggcctgaaggccggcctgggccgcagcaagagcaagggcagcctggaccggctggatgagaagcccctggacctgggcccccccctgccccccaagattgaagctggcaccttcagcagtgacctgcagacccccaggcctggcagcgctgagagcgccctgtctgtgcagaggaccagcccccccaccccagccatgtacaagttccggcctgccttccccaccggccccaaggtgcccttctgtggccctggagagcaggtgcccggccctgacagcctgaccctgggagatgacagcatccgcagcctggactttgtgtctgagcccagcctggacctgcctgactatggccctgggggcctgcacgccgcctacccacccagcccccccctgagcgccagtgatgccttcagcggggccctgcggagcctgagcctgaaggccagcagccggcggggcggggaccacgtggccctgcagcccctgcggtctgagggcggcccccccaccccccacaggagcatctttgccccccacgccctgcccaacagaaatggcagcctgtcctatgacagcctgctgaaccctggcagccctgggggccacgcctgcccagcccaccctgctgtgggcgtggccggctaccacagcccctacctgcaccctggggccaccggggaccccccccggcccctgcccaggagcttcagccctgtgctgggcccccggccccgggagcccagccctgtgcgctatgacaacctgagcaggaccatcatggccagcatccaggagaggaaggaccgggaggagcgggagcggctgctgcggagccaggccgacagcctgtttggagacagcggcgtgtatgatgcccccagcagctacagcctgcagcaggcctctgtgctgtctgagggcccccggggccctgccctgcgctatggcagcagagatgacctggtggccggccctggctttggaggagccaggaacccagccctgcagaccagcctgagcagcctgagcagctctgtgtcccgggcccccaggaccagcagcagcagcctgcaggccgaccaggccagcagcaatgcccctggcccccggcccagcagcggcagccacaggagccctgcccggcagggcctgcccagccccccaggcaccccccacagccccagctatgccggccccaaggctgtggccttcatccacacagacctgcctgagcccccacccagcctgactgtgcagagggaccacccccagctgaagaccccacccagcaagctgaatggccagagccctggcctggcccggctgggccctgccactggacctcctggccccagcgccagccccaccaggcacaccctggtgaagaaggtgtctggagtgggcggcaccacctatgagatctctgtgtag

SEQ ID NO: 175896 - DNA, 2298 bp, Artificial Sequence
  derived and/or modified sequence
atgcccaggagccctggcacccggctgaagccagccaagtacatccctgtggccacagctgctgccctgctggtgggcagcagcaccctcttctttgtgttcacctgcccctggctgaccagggctgtgtccccagctgtgcctgtgtacaacggcatcatcttcctgtttgtgctggccaacttctccatggccaccttcatggaccccggggtcttccccagggcagatgaagatgaggacaaggaggatgacttccgggcccccctgtacaagaatgtggatgtgcggggcatccaggtgaggatgaagtggtgtgccacctgccacttctaccggcccccacgctgcagccactgcagcgtgtgtgacaactgtgtggaggactttgaccaccactgcccctgggtgaacaactgcattggaagaagaaactaccgctacttcttcctgttcctgctgagcctgagcgcccacatggtgggcgtggtggccttcggcctggtgtatgtgctgaaccacgccgagggcctgggcgccgcccacaccaccatcaccatggctgtgatgtgtgtggccggcctcttcttcatccctgtgattggcctgaccggcttccacgtggtgctggtgacccggggccgcaccaccaatgagcaggtgacaggcaagttccggggcggcgtgaaccccttcacccggggctgctgcggaaatgtggagcacgtgctgtgcagccccctggccccccgctacgtggtggagcccccccggctgcccctggccgtgtccctgaagccacccttcctgcggcctgagctgctggaccgggccgcccccctgaaggtgaagctgagtgacaatggcctgaaggccggcctgggccgcagcaagagcaagggcagcctggaccggctggatgagaagcccctggacctgggcccccccctgccccccaagattgaagctggcaccttcagcagtgacctgcagacccccaggcctggcagcgctgagagcgccctgtctgtgcagaggaccagcccccccaccccagccatgtacaagttccggcctgccttccccaccggccccaaggtgcccttctgtggccctggagagcaggtgcccggccctgacagcctgaccctgggagatgacagcatccgcagcctggactttgtgtctgagcccagcctggacctgcctgactatggccctgggggcctgcacgccgcctacccacccagcccccccctgagcgccagtgatgccttcagcggggccctgcggagcctgagcctgaaggccagcagccggcggggcggggaccacgtggccctgcagcccctgcggtctgagggcggcccccccaccccccacaggagcatctttgccccccacgccctgcccaacagaaatggcagcctgtcctatgacagcctgctgaaccctggcagccctgggggccacgcctgcccagcccaccctgctgtgggcgtggccggctaccacagcccctacctgcaccctggggccaccggggaccccccccggcccctgcccaggagcttcagccctgtgctgggcccccggccccgggagcccagccctgtgcgctatgacaacctgagcaggaccatcatggccagcatccaggagaggaaggaccgggaggagcgggagcggctgctgcggagccaggccgacagcctgtttggagacagcggcgtgtatgatgcccccagcagctacagcctgcagcaggcctctgtgctgtctgagggcccccggggccctgccctgcgctatggcagcagagatgacctggtggccggccctggctttggaggagccaggaacccagccctgcagaccagcctgagcagcctgagcagctctgtgtcccgggcccccaggaccagcagcagcagcctgcaggccgaccaggccagcagcaatgcccctggcccccggcccagcagcggcagccacaggagccctgcccggcagggcctgcccagccccccaggcaccccccacagccccagctatgccggccccaaggctgtggccttcatccacacagacctgcctgagcccccacccagcctgactgtgcagagggaccacccccagctgaagaccccacccagcaagctgaatggccagagccctggcctggcccggctgggccctgccactggacctcctggccccagcgccagccccaccaggcacaccctggtgaagaaggtgtctggagtgggcggcaccacctatgagatctctgtgtag

SEQ ID NO: 175897 - DNA, 2022 bp, Artificial Sequence
  derived and/or modified sequence
atgccccggagccccggcacccggctgaagcccgccaagtacatcccagtcgcgactgccgccgcattgctggtgggttcgtcgaccctcttctttgtatttacttgtccctggctgactcgagccgtcagtccagctgtgccggtgtacaacggcattatatttctgttcgtcttggcaaacttttccatggcaacatttatggacccaggagtgtttcctagggctgacgaagacgaggacaaggaggatgactttagagctcccctgtacaagaacgtggatgtgcggggcatacaagtgagaatgaagtggtgcgcgacctgccacttttaccgtcccccaagatgttcacactgttccgtctgtgacaactgtgtagaagttactggcaaattccgggggggtgtcaacccatttactcgcggctgttgtgggaacgttgagcatgtgttgtgctcacccctggcccctcggtatgtggttgagcctccccgactgcctcttgccgtttctttgaaaccgccatttctgcgcccagaactgctggatagggcagctcccctaaaggtgaaactctctgataacggattgaaggctggactgggccgcagcaagtcaaaaggttctctggatagactcgacgagaagcctctggacctcggcccacctctgccacccaagatagaggccggcactttttccagtgacttgcagacacctcgacctgggtcggctgagagcgcactctccgtgcaaagaacaagtcctcccacaccagccatgtataaattccgcccagctttccccaccggacccaaggtgcccttctgcggtcccggagagcaggtccccggtccagacagtctgacgcttggcgatgactcaattcggagcctggacttcgtgtccgaaccttctctggatctcccagattatggcccaggaggcctccacgcagcatatccaccatctccaccactttcagcgtctgatgcattctctggcgcactaaggtctctcagccttaaggcatcatcgagaaggggcggagatcatgtcgcactccagcccttgagatccgaaggggggccgcctaccccccaccgcagtatcttcgcgccacacgccctaccaaatagaaatggcagcctgtcctatgattccttgcttaatcccggatcaccgggtggccatgcgtgccccgcccaccctgccgtgggtgtggcaggctatcactccccttaccttcatccaggagctactggagaccccccacgaccgttgccccgaagctttagtcccgttttagggccccgcccccgggaaccatcccccgtcagatatgataatttgtctcggacgatcatggcatctatccaggagcggaaagaccgcgaggagagggagcgtctgctgcggtcccaggccgactcacttttcggcgacagtggcgtctacgatgctcccagttcctactccctccagcaggccagcgtattgtccgagggcccccgaggtcctgctcttaggtacgggtcacgcgatgacctggttgctggacccggattcgggggtgccaggaatccggcactccaaacaagtctctcatccctgagctcaagcgtttcccgagctccccgtacctcttcgagctctctgcaggccgaccaggcttcatctaacgctcctggcccgcgccccagctctgggagccaccgatcgccagccaggcagggtctcccaagtcctcccggtactccccactcacctagctacgccgggcctaaggccgtcgcctttattcacactgacctgccggaaccacctcccagcctgactgtgcagcgcgaccatcctcagctgaaaacaccgccatccaaactcaatggtcaatctccaggccttgcaaggctgggcccagctaccggcccaccagggcccagtgcatctccaactagacacaccctggttaaaaaagtgagcggcgtgggcggaaccacttacgagatcagcgtttag

SEQ ID NO: 175898 - DNA, 2298 bp, Artificial Sequence
  derived and/or modified sequence
atgccccggagccccggcacccggctgaagcccgccaagtacatccctgtcgccaccgcagccgccctgctggttggctcatcaacccttttcttcgtgtttacatgcccttggttaacccgagccgtatctccagctgtgcccgtgtacaacgggattatcttccttttcgtactcgctaacttctcaatggccaccttcatggatccgggagtgtttccacgagccgatgaggacgaggacaaagaagatgacttcagggcgcctttatacaaaaacgttgatgtcagaggcatacaggtgaggatgaaatggtgcgcaacatgccacttctaccgccctcctagatgtagtcactgctctgtgtgcgataattgcgtggaggactttgaccaccattgtccttgggtgaacaactgtattgggcgtagaaactacagatatttctttttattccttctttccctcagtgctcacatggtcggagtggtggcgttcggccttgtgtacgtccttaaccatgccgaaggcctgggggctgcccacacaacaatcactatggcggtgatgtgtgtcgccggcttgtttttcatccccgtaattggattgaccggcttccatgtagtgctcgtaactaggggtagaaccacaaatgagcaagtcaccggtaagtttcgcggcggagtgaatccctttaccaggggctgctgcggcaacgtcgagcatgtgttgtgctccccgctggcaccaagatacgttgttgaacccccacgcctcccactcgcagtctcattaaaacccccttttctccgcccagagcttcttgacagagccgcacccctcaaagtgaaactcagtgataatggactgaaagcagggctgggtcgctccaaatcaaaaggttctctggatcgactggacgagaaaccacttgatctggggccacctttgcctccaaaaatagaggcagggacattttcttctgatctccagaccccacgtcccggatcagccgaaagtgcccttagtgtgcagcgcactagtccccctacacccgcaatgtacaagttccggcctgcctttccaaccggcccaaaagtgccattttgtggccccggcgagcaagtacccggcccagactctctgaccctaggagacgacagcattagaagcctggacttcgtcagcgagccttcccttgacctcccggattacgggccaggcggcctgcacgctgcttaccctccaagcccccctctgtcagcctcagatgccttttccggagcactacgctccttgagcctcaaagcttcttcccgccgcggcggtgatcatgttgccttacagcctctgcggtctgagggtggacctcccacaccacaccggtcaattttcgcgcctcacgctctgccgaatagaaatgggtcactatcctacgatagccttctgaacccaggaagcccgggaggtcacgcttgcccagctcacccagcagtgggcgtagctggataccattcgccttacttgcacccaggagctacaggcgatccacctcgacccctaccccggtcttttagccctgttctgggaccccgtccgcgcgaacctagtccggtgcggtacgataatctatcacgaacaatcatggcctccatccaggagcgaaaggatcgggaagaacgggaacgccttctgaggtctcaggccgacagccttttcggagactctggagtatatgatgccccaagttcttactccctgcagcaagccagtgtgctctcagaggggccccgggggcccgccctccgctatggcagtcgggacgacctggtggccggacccgggtttggcggggcccgcaatccagcattgcagacttccttaagttctctctcaagttctgtatcgcgcgcgccgcgcacgtcctcttctagcctgcaggcagatcaggcctcttctaacgctcccgggcctagaccatctagtggctcgcatcggagccctgctcggcaaggattgccctccccacctggcacacctcattccccctcatacgctgggcccaaggcagtggcattcatccatacagacttacccgagcccccgccatctctcaccgtgcagcgggatcaccctcagctcaaaacacccccctcgaaactaaacggtcagtcacctgggttggctagactgggccccgctacggggccacccggacctagcgcctctccgacccgacacacccttgtgaagaaggtgtctggggtgggaggaactacatacgaaatctcagtgtag

SEQ ID NO: 175899 - DNA, 2022 bp, Artificial Sequence
  derived and/or modified sequence
atgcctaggtctcccggaacacgactcaagcctgcgaaatatattcccgtcgcaacggccgcagcattgttagtgggcagttccacactgttctttgttttcacctgcccttggctgacgagagccgtctctcccgctgtccctgtttataatggaattatttttctctttgtcctggcgaatttctccatggctacctttatggatcccggagtcttccccagggccgatgaagatgaggacaaggaagatgatttcagagcacccctgtataaaaatgtggatgtgcggggaatccaggttcgcatgaagtggtgcgccacttgtcatttctatcgccctccccgatgtagtcactgtagtgtgtgcgataactgtgtggaagtcaccgggaagttccggggtggggtgaaccctttcaccaggggatgttgtggcaatgttgagcacgtgttatgttccccccttgcccctagatatgtagtggagccccctagactcccactcgccgttagcttgaagccacctttcctgcgaccagaactgcttgatagagccgcaccactgaaagtgaaacttagcgacaacggtctgaaagccggattgggccgaagcaaaagcaagggttccttggaccggttggatgagaagcccctcgacctgggaccgcctctgccaccaaagatagaagcgggtacattttctagcgatcttcagacaccacgcccagggtctgccgaatcagctctgtccgttcaaaggacatctccgcctaccccagccatgtataaattccgccctgcattcccgaccgggcctaaggtcccattttgtgggccaggagaacaggtgccaggcccagatagtttaacactaggcgatgactccataaggtctctagatttcgtcagcgaaccctcactggatctcccagattacggacctggaggactgcacgcagcctaccctcccagcccccctctcagcgcatccgatgctttttcaggcgctctgcgatccctatctctgaaggcatctagtcgccgaggtggcgatcatgtagccctccaaccgctcagaagtgagggtgggcctccgacaccccacaggtctatctttgcccctcacgccttgcctaatcggaatgggtccctgtcatacgacagtctgctaaatcctggctcccctggcggtcacgcctgtccagcacaccccgcagttggggtagctgggtaccattcaccatacctgcatcctggtgccaccggggatcctcccagaccactgcccaggagcttttcaccagtactggggcctcgtccccgtgagccttcaccagtgcggtacgacaatttatcaagaacaattatggctagcatacaggagaggaaggatcgtgaggagagagaacgcctcttaaggtcccaagcagattcactgttcggagactccggcgtgtacgatgccccatcctcatattctctgcagcaggcctcggtgctgagcgagggcccaagaggccctgcgcttcgctacggatctcgcgacgacctcgtcgccggacctgggtttgggggtgccagaaatcccgctctgcaaacatcattatctagcctctcttctagtgtgtctagagctcctcgtacctcctcaagctcattacaagccgatcaggctagctcgaatgcacctggaccacggccaagttccggatcccacagatcacctgcgagacaggggttgccttctcctcccggaaccccccacagtcccagctatgccggaccgaaagctgtggcgttcatacacacagacttgccagaaccacccccaagcttgactgtacaaagggaccatccccagctgaaaaccccacccagcaagcttaatgggcaatcacctgggctggccaggctgggccctgccaccggtcccccaggacccagcgcatcgcccacacggcacacattagtgaaaaaagtgagtggcgtgggtggcaccacctacgaaatatcagtttag

SEQ ID NO: 175900 - DNA, 2298 bp, Artificial Sequence
  derived and/or modified sequence
atgcctagatcccccggtacgcgcctaaagcccgctaagtacatccccgtggctacggccgctgccttattggtggggagttctaccctgttttttgtatttacttgcccctggctgacccgcgctgtttcccctgcggtccctgtgtataacggcatcatatttctgtttgtgctggcgaatttttcaatggctactttcatggatcccggagtatttccacgggcagacgaggacgaggataaggaggatgactttcgcgctccactctacaaaaatgtcgacgtcaggggcattcaggttagaatgaaatggtgcgccacatgccacttttaccggccaccgagatgttcccattgttctgtgtgcgataactgtgtggaggactttgatcaccattgcccctgggtcaataactgtatcggcaggcgcaactaccggtattttttcttattcctcctgagtctatcagcccacatggttggcgtagtggcgttcggcctggtttatgtgctgaatcacgcagaaggcctcggagccgctcataccacaatcacaatggcagtgatgtgcgtggctgggctgttttttattcctgtgataggtctcaccgggttccatgtggtgctggtgacgaggggtagaaccacaaatgagcaggtgacaggtaaatttcggggaggagttaacccattcactcggggttgctgcggtaacgtagaacacgtcctctgcagtcctctcgctcctcgctacgtggtcgaacctcccaggttgcctctggcggtcagcctgaaacctccgttcttaagacctgagctgctggatagagcggctccactgaaagttaagctctccgataatggactgaaggcaggcctcgggcgttctaagtccaaagggtcattggaccgccttgatgagaagcctttggacctgggcccaccactcccacctaagatagaggctggcacatttagtagcgatctgcagaccccccgtccaggtagcgctgagagtgccctcagtgtgcagcggacgagcccaccaacaccagccatgtacaaatttcgcccagcgtttcccaccggccctaaagtcccattctgcggcccaggggaacaagtccccggtcctgactcactgactttgggtgatgattctattcggtccttggatttcgtcagcgaaccctctcttgacctgcccgattacgggcctgggggacttcacgccgcataccccccttctccccctctgtctgctagcgatgcatttagcggggctctgaggtcacttagtctaaaggcttcatctaggcgaggcggtgaccacgtcgccctacagcctctgaggagcgaggggggacctccgactccacaccgtagtatcttcgctccacacgcacttccgaatcgcaatggaagtctgtcctatgactccctgttaaaccccggatctcctggaggacatgcttgtcccgcacatccagccgtgggggtcgccggttatcatagtccctatttgcaccctggagcgaccggagaccccccacgcccactcccacgctcattttcgcctgtgctcgggcctagaccccgagagccctcccccgtgcgttacgacaacctgtccagaactattatggcgagtatccaggagcggaaggatagagaagagagagaaaggctacttcgttcacaggctgattccctgttcggagactccggggtgtacgacgcacccagttcctatagtctgcaacaagcatctgtactctccgaaggacctcgaggtcctgctttacggtacggctctcgggatgatttggtggcaggcccaggattcggaggcgctcgcaatccagcactgcagacctccctctcatccctgtcaagttcggtctcccgcgcacccagaacttccagctcctccctacaagccgaccaggcctctagtaatgcaccaggcccaagaccgtcctccggcagccataggtcccccgctcgacaggggctcccttcccccccaggcacgccacactctcctagctatgctgggcctaaggccgttgcattcattcatacagacctgcccgagccacctccgtcgctgactgtacagagagaccatcctcagctgaaaacccccccatccaagctcaatggtcagtcccccggtttagcgaggctgggccctgcgactgggccacccggtcctagcgcttctcccaccagacacactctggtcaagaaggtgagtggcgttgggggaaccacttacgaaattagcgtgtag

SEQ ID NO: 175901 - DNA, 3072 bp, Artificial Sequence
  derived and/or modified sequence
atgccccgcagccccgggacgcgcctcaaacccgccaagtacatcccggtggccacggccgccgcgctgctggtcggctccagcaccctcttcttcgtgttcacgtgcccgtggttgacacgagctgtgtccccagctgttcccgtctacaatggcatcatcttcctctttgtcctggccaacttcagcatggccactttcatggaccctggtgttttcccccgagcggatgaggatgaggacaaggaggacgacttccgggctccgctgtacaagaacgtggatgtgcgaggtatccaggtccgcatgaagtggtgtgccacgtgccacttctaccgcccgccgcgctgctcccactgcagcgtctgtgacaactgtgtagaggtgactgggaagttccgcgggggtgtgaaccctttcacccgaggctgctgtgggaatgtggagcacgtgctgtgtagccccctggcgccccggtacgtggtggagccaccccggctgccgctcgcggtgagtttgaagccgcctttccttaggcctgaactcctggaccgagctgcaccgctcaaggtcaagcttagtgacaacgggctgaaggctggcctgggccgtagcaagtccaagggcagcctggaccggctggatgagaagccactggacttggggccaccactgccccccaagatagaggctggcacgttcagcagtgacctgcagaccccgcgcccaggcagtgctgagagtgccctgtcggtgcagaggaccagccccccgacacctgccatgtacaagtttaggccggctttccccacgggtcccaaggtgcccttctgtggaccaggcgagcaggttccaggccctgattccctgaccctgggggacgacagcatccgtagcctggactttgtgtccgagccgagcctggacctccctgactatgggccagggggcctgcatgcagcctacccgccatccccaccgctcagcgcctctgatgccttctcgggcgctttgcgctccctgagcctcaaggcctcgagccggcggggcggggatcatgtggccctgcagcccctgcgctctgagggggggccccccacgccccaccgtagcatttttgccccccatgcactgcccaaccgcaacggcagcctgtcctatgacagcctgctcaatcctggctcgcctggtggccacgcctgccctgcccacccagcagttggcgtggccggataccactcaccctacctgcatcctggggcaacgggcgacccgccacggcccctaccccgcagcttcagccccgtgctgggcccccgcccccgggagccctcgcctgtgcgctacgacaacctgtccaggaccatcatggcatccatccaggagcgcaaggacagggaggagcgtgagcgcctgctgcgctcccaggccgactcactcttcggcgactcaggcgtctatgacgctcccagctcctacagcctgcagcaggccagtgtgctgtccgagggcccccgaggtcccgcgctgcgctatggctccagagacgaccttgtggctgggcccggcttcggtggcgcccgcaaccctgccctgcagacgtcactgtcctcgctgtccagctccgtgagccgtgcaccgcggacgtcgtcctcctccctgcaggctgatcaggccagcagcaacgccccggggccccggcccagcagtggctcacacaggtcacctgcacgccagggcctgccctccccgcccggcactccccactcaccatcctacgcgggccccaaagctgtcgccttcatccacacggacctcccagagccaccgccctcgctgaccgtgcagagggaccaccctcagctgaagactcccccaagtaagcttaatgggcagtccccgggcctggcccggctgggacctgccaccggccccccagggccctctgccagccctacacggcacacgctggttaagaaggtgtccggcgtgggtgggaccacctacgagatctcggtgtgaggactgactgccacacatccgccatggtgccacggggaccaggaccccacagcgcaccccccctccccaccaacttctctgccccagggacccgaggccaccccagcctggtgtggacccatcggcgggagagagtgccacgcctccacagcttgccccaagcgctctgcctgcccgtccactcatctgcccatggggaagtcggctcactgggacaagggccactgggctggtctgtgtctgggcctgtcccatggctggggcagtgagggggcccagtcagcctctttggggcaccctctctcagccaggcttggcccactgccatcacccagcaccccagatcaccgccaggccagcccccaatggtccccttacggacaggtcccagagatggacagaggcacccagggcccccaccgtccttctgacacagcctgtgggctcccggaccgagtgtcccccgccaggctactcctaactaacgcgttgcctttcacggaccccgctggaagcttgtagcttggcaaggctgatgcttctgccctggcctgctctgggtggtggtggataggtggacagacggccagccagccagctgtggccgggggcccggctccatgtgtcccgtgtctgtgtgctgtgctgccgcgccgtgtctgatgtgtcagtgctccggccgccgctgtccctttcatcaaagccttaacctttgctttatgctcttgtgggaggcgacgggggggcaggcgggagcaggcacgggggtgatgctgccacagggggctggtgacacccagagccccctccccagccctcaggccctccctgccaaactggagaaccccaccccaaggcatgccacgtccgcagccccggcctggctgcggtgctcgcgccgtgggaaagcacactggggaggggtcagtgcttcccttggtgtcagggacctgagagtaagcacatgacagcgtctgcttgcgttgtgtctgttttatgtttttatatctacatctatatatctataattttattaaaaaaaagaaaaag

SEQ ID NO: 175902 - DNA, 5046 bp, Artificial Sequence
  derived and/or modified sequence
gggtgggatttcctccgccgccgccgccgccgccgccgcgggtcctgcgccgcgtccagcccgcccgcccgaccccggcccgaccccggccggccctgcccgcccggccccggggagggatgcggcggcgcggcgcccaggatgccccgcagccccgggacgcgcctcaaacccgccaagtacatcccggtggccacggccgccgcgctgctggtcggctccagcaccctcttcttcgtgttcacgtgcccgtggttgacacgagctgtgtccccagctgttcccgtctacaatggcatcatcttcctctttgtcctggccaacttcagcatggccactttcatggaccctggtgttttcccccgagcggatgaggatgaggacaaggaggacgacttccgggctccgctgtacaagaacgtggatgtgcgaggtatccaggtccgcatgaagtggtgtgccacgtgccacttctaccgcccgccgcgctgctcccactgcagcgtctgtgacaactgtgtagaggactttgaccaccactgcccctgggtcaacaactgcatcgggcgtcgaaactatcgctacttcttcctgttcctgctgtcactcagtgcacacatggtgggcgtcgtggccttcggcctggtctacgtgctgaaccacgctgaggggctgggagccgcgcacaccaccatcaccatggctgtcatgtgtgtggccggcctcttcttcatccctgtcattggcctcactggcttccatgtggtgctggtcactcgggggcgcaccaccaacgagcaggtgactgggaagttccgcgggggtgtgaaccctttcacccgaggctgctgtgggaatgtggagcacgtgctgtgtagccccctggcgccccggtacgtggtggagccaccccggctgccgctcgcggtgagtttgaagccgcctttccttaggcctgaactcctggaccgagctgcaccgctcaaggtcaagcttagtgacaacgggctgaaggctggcctgggccgtagcaagtccaagggcagcctggaccggctggatgagaagccactggacttggggccaccactgccccccaagatagaggctggcacgttcagcagtgacctgcagaccccgcgcccaggcagtgctgagagtgccctgtcggtgcagaggaccagccccccgacacctgccatgtacaagtttaggccggctttccccacgggtcccaaggtgcccttctgtggaccaggcgagcaggttccaggccctgattccctgaccctgggggacgacagcatccgtagcctggactttgtgtccgagccgagcctggacctccctgactatgggccagggggcctgcatgcagcctacccgccatccccaccgctcagcgcctctgatgccttctcgggcgctttgcgctccctgagcctcaaggcctcgagccggcggggcggggatcatgtggccctgcagcccctgcgctctgagggggggccccccacgccccaccgtagcatttttgccccccatgcactgcccaaccgcaacggcagcctgtcctatgacagcctgctcaatcctggctcgcctggtggccacgcctgccctgcccacccagcagttggcgtggccggataccactcaccctacctgcatcctggggcaacgggcgacccgccacggcccctaccccgcagcttcagccccgtgctgggcccccgcccccgggagccctcgcctgtgcgctacgacaacctgtccaggaccatcatggcatccatccaggagcgcaaggacagggaggagcgtgagcgcctgctgcgctcccaggccgactcactcttcggcgactcaggcgtctatgacgctcccagctcctacagcctgcagcaggccagtgtgctgtccgagggcccccgaggtcccgcgctgcgctatggctccagagacgaccttgtggctgggcccggcttcggtggcgcccgcaaccctgccctgcagacgtcactgtcctcgctgtccagctccgtgagccgtgcaccgcggacgtcgtcctcctccctgcaggctgatcaggccagcagcaacgccccggggccccggcccagcagtggctcacacaggtcacctgcacgccagggcctgccctccccgcccggcactccccactcaccatcctacgcgggccccaaagctgtcgccttcatccacacggacctcccagagccaccgccctcgctgaccgtgcagagggaccaccctcagctgaagactcccccaagtaagcttaatgggcagtccccgggcctggcccggctgggacctgccaccggccccccagggccctctgccagccctacacggcacacgctggttaagaaggtgtccggcgtgggtgggaccacctacgagatctcggtgtgaggactgactgccacacatccgccatggtgccacggggaccaggaccccacagcgcaccccccctccccaccaacttctctgccccagggacccgaggccaccccagcctggtgtggacccatcggcgggagagagtgccacgcctccacagcttgccccaagcgctctgcctgcccgtccactcatctgcccatggggaagtcggctcactgggacaagggccactgggctggtctgtgtctgggcctgtcccatggctggggcagtgagggggcccagtcagcctctttggggcaccctctctcagccaggcttggcccactgccatcacccagcaccccagatcaccgccaggccagcccccaatggtccccttacggacaggtcccagagatggacagaggcacccagggcccccaccgtccttctgacacagcctgtgggctcccggaccgagtgtcccccgccaggctactcctaactaacgcgttgcctttcacggaccccgctggaagcttgtagcttggcaaggctgatgcttctgccctggcctgctctgggtggtggtggataggtggacagacggccagccagccagctgtggccgggggcccggctccatgtgtcccgtgtctgtgtgctgtgctgccgcgccgtgtctgatgtgtcagtgctccggccgccgctgtccctttcatcaaagccttaacctttgctttatgctcttgtgggaggcgacgggggggcaggcgggagcaggcacgggggtgatgctgccacagggggctggtgacacccagagccccctccccagccctcaggccctccctgccaaactggagaaccccaccccaaggcatgccacgtccgcagccccggcctggctgcggtgctcgcgccgtgggaaagcacactggggaggggtcagtgcttcccttggtgtcagggacctgagagtaagcacatgacagcgtctgcttgcgttgtgtctgttttatgtttttatatctacatctatatatctataattttattaaaaaaaagaaaaagagttattttgattctttccttgggcaaggccagggctattgctgcaggatcccgagttaggggagggcaggggccgggccccagaagagggagtggctgctgtctggtgtgcaggggtcggtgggttcctcaggggcatttctgccgacttgggctgagtcagaggcttgggaagagggggcggccgatggtctgtggctgggaagtgtgagggtctctcgccttgggtctgtgtcagttctggcagtgacagggtgtttgggggaaagacttgggtctgccgctacccacaggggactctcaggaacccgagagcttggggagatgaaatgggggtgcataggggccacctgttggctcagggccctgtgggggccgctgaacctgctggaactctcctgcctgccacatgccaggggcagggctgagggagtgtgagggatgcacagctgttcagggctgagacattctgggctggggctgtcccagcgtgggaggcgtgcgggctgtagggccccgaagctgacctccacctttctgcttctctctcacggacgccgcggcccgcagggggcggattggcacctgcacccgtggatgggggcggcgtggccagccttgggtgcctcctgggctgcacctgtgccaccttggccgcccggaggaccgcccaccactgcgggccccctggagccaggccgccggggcacccccacgcggggccatgtgccgcctgcacttggctgcctccagtcttttccccagcctctcggggccctagcaggatgacaagtaggcggctctggggcccaggacagcccagctggggacccaggaggtcagactgcagtggaccctggggcagggctgggggtgggctgggctctctgctccaccagccacagcttgacagattcccagcctgccagggcctgagaccctgtgtccacatgacctcagggagtcccccacctgctgcagggggtccagcaccccacaggggggcagtcccagagctgtggggaccggcacgacctttgcccagcctccctacccaaccaagcactttagactaagccacttcctcctcggggagcccaggcctccgtgggttgggctgggtggggggggggtctcaggttgcccctgaaggtctctgcactcctcctgcccttcccctgacacatgaacagatgccttaacttcctggagccaccagcctggtgagccattggcctctgcctgccaccaaggtcctgtggtcttggccagctccgcctgggccccactggggctgcctgcacccagagacgatgccggcgggatctcagagggcctgaggcccaagccctgtgtcctccagcagtggtacggcctgcggcagggtggcactccggccagcccttctccgtcacagggtccctgtccctgggtccaccctgggctgtggctctacatctcccatttggggacgagaaagccacaaaaccattctctattgttcttaagggtacccctgctaattaattccccaaataaaatttttggtgttgatca

SEQ ID NO: 175903 - protein, 868 aa, Artificial Sequence
  derived and/or modified sequence
MATFISVQLKKTSEVDLAKPLVKFIQQTYPSGGEEQAQYCRAAEELSKLRRAAVGRPLDKHEGALETLLRYYDQICSIEPKFPFSENQICLTFTWKDAFDKGSLFGGSVKLALASLGYEKSCVLFNCAALASQIAAEQNLDNDEGLKIAAKHYQFASGAFLHIKETVLSALSREPTVDISPDTVGTLSLIMLAQAQEVFFLKATRDKMKDAIIAKLANQAADYFGDAFKQCQYKDTLPKEVFPVLAAKHCIMQANAEYHQSILAKQQKKFGEEIARLQHAAELIKTVASRYDEYVNVKDFSDKINRALAAAKKDNDFIYHDRVPDLKDLDPIGKATLVKSTPVNVPISQKFTDLFEKMVPVSVQQSLAAYNQRKADLVNRSIAQMREATTLANGVLASLNLPAAIEDVSGDTVPQSILTKSRSVIEQGGIQTVDQLIKELPELLQRNREILDESLRLLDEEEATDNDLRAKFKERWQRTPSNELYKPLRAEGTNFRTVLDKAVQADGQVKECYQSHRDTIVLLCKPEPELNAAIPSANPAKTMQGSEVVNVLKSLLSNLDEVKKEREGLENDLKSVNFDMTSKFLTALAQDGVINEEALSVTELDRVYGGLTTKVQESLKKQEGLLKNIQVSHQEFSKMKQSNNEANLREEVLKNLATAYDNFVELVANLKEGTKFYNELTEILVRFQNKCSDIVFARKTERDELLKDLQQSIAREPSAPSIPTPAYQSSPAGGHAPTPPTPAPRTMPPTKPQPPARPPPPVLPANRAPSATAPSPVGAGTAAPAPSQTPGSAPPPQAQGPPYPTYPGYPGYCQMPMPMGYNPYAYGQYNMPYPPVYHQSPGQAPYPGPQQPSYPFPQPPQQSYYPQQ

SEQ ID NO: 175904 - DNA, 2607 bp, Artificial Sequence
  derived and/or modified sequence
atggccacttttatttccgtgcagctgaaaaaaacgagcgaggttgacttggccaagcctctggtgaaatttatccagcagacctatccatcaggtggcgaagaacaggcccaatattgcagggcagctgaggagctcagcaagctcagaagagctgcagtgggtaggcctttagataagcatgagggggcacttgaaacactgttaaggtattacgatcagatctgtagcatcgaaccaaagttccccttcagtgagaaccagatatgcctaaccttcacttggaaggacgccttcgataagggatctctctttggaggctccgtgaagctggccctggcatccctaggttacgaaaagtcttgtgtgttatttaactgcgccgccttggcaagtcagattgcggctgagcagaatctcgacaacgacgaagggctcaagatagccgcaaagcattaccaatttgcctcaggagcttttctccatataaaagagaccgtcctgtctgctcttagtcgcgaacctaccgtggacatatccccagataccgtggggacacttagtttgattatgctcgctcaggcgcaggaagtgttcttcttgaaagcaacaagggataaaatgaaagacgcaattattgcaaagttggccaaccaggccgctgattactttggggacgccttcaaacagtgccagtataaagatacactgccaaaggaggtctttccagtgctcgccgcaaagcattgcataatgcaggcgaatgcagagtatcaccagtccattctggccaaacaacagaagaagtttggtgaggagatcgcccgcctccagcacgctgccgagctgatcaaaacagtggccagccgatacgatgagtacgtaaacgttaaagacttcagcgacaaaatcaaccgcgccctagcagcggctaaaaaagataatgacttcatatatcacgacagggtaccagacctgaaagacctggatccaatcgggaaggctacacttgttaagtcaacccccgtcaacgttcccatctcccagaagttcaccgacctcttcgagaagatggtccccgtctctgtacaacagtccttggctgcttataatcagagaaaggcagatctcgtgaacagatccatagcccagatgagggaggcaacgacacttgcaaacggtgtcttagcgtctttaaatctcccagcagcgatcgaagacgtttcaggagataccgtgccccaatccattctgactaaatcacggagtgtgattgagcagggaggaatccaaaccgtggatcagctgatcaaggaattgcctgaactgctccagagaaacagggaaatcctggacgagagcctgaggctcttggacgaggaagaagccactgataacgacctgagagctaaatttaaagagcggtggcaaagaacaccctctaacgagctctacaaaccattaagagctgagggcaccaactttcggacagttctcgacaaagcagtccaagctgacggtcaagttaaggagtgttatcagtcccaccgcgacacaatagtgctcctttgtaaaccggagcctgagctgaatgcagccataccttcagctaacccggcaaagaccatgcagggatccgaagttgtcaacgtgctgaagagtctcctctccaatctggacgaagtcaaaaaggaaagagagggcttggaaaatgacctcaaaagcgtgaatttcgatatgacctcaaaatttctgacggctctggctcaggatggcgtcattaatgaggaggcactgtccgtgaccgagttggatcgggtttacggcggactgacaacaaaagttcaggaatcccttaagaagcaggagggccttctgaaaaacatccaagtttctcatcaggagtttagtaagatgaagcagagcaataatgaagccaatctgagggaggaggtgctaaaaaaccttgctactgcatacgacaattttgttgaattggtggcaaatctgaaggagggaaccaagttctataacgagctaaccgagatcctggtgcgcttccagaataagtgcagcgacatcgtcttcgctcgaaaaacggagcgagacgaactgctgaaggacctgcaacagtcgatcgctcgggagccttctgccccatccattccaacccccgcctaccagagttctcccgccgggggccatgcgcctacacctcctacacccgcgccccgtactatgcctcccacgaaaccacagcctcctgcccgcccaccgcctcctgttcttcccgccaaccgagctccctcagcaacagcgccttcacctgtcggagccgggacagctgctccagcccccagccagaccccgggaagcgctccgcccccacaagcgcagggtccgccataccctacatatccaggatatcccggatattgccagatgcctatgcctatgggttataacccctacgcctacggtcagtacaacatgccttacccccctgtgtatcaccagagtccggggcaggctccgtacccgggaccccaacagcccagctatccgttccctcagcccccgcagcagagctactatccccaacagtag

SEQ ID NO: 175905 - DNA, 2607 bp, Artificial Sequence
  derived and/or modified sequence
atggccaccttcatctctgtgcagctgaagaagaccagcgaggtggacctggccaagcccctggtgaagttcatccagcagacctaccccagcggcggggaggagcaggcccagtactgcagagctgctgaggagctgagcaagctgcggcgggctgctgtgggccggcccctggacaagcatgaaggagccctggagaccctgctgcgctactatgaccagatctgcagcattgagcccaagttccccttcagcgagaaccagatctgcctgaccttcacctggaaggatgcctttgataaaggcagcctgtttggaggctctgtgaagctggccctggccagcctgggctatgagaagagctgtgtgctcttcaactgtgccgccctggccagccagattgctgctgagcagaacctggacaatgatgagggcctgaagattgctgccaagcactaccagtttgccagcggggccttcctgcacatcaaggagaccgtgctgagcgccctgagccgggagcccaccgtggacatcagcccagacacagtgggcaccctgagcctcatcatgctggcccaggcccaggaggtgttcttcctgaaggccacccgggacaagatgaaggatgccatcatcgccaagctggccaaccaggccgctgactactttggagatgccttcaagcagtgccagtacaaggacaccctgcccaaggaggtgtttcctgtgctggccgccaagcactgcatcatgcaggccaatgctgagtaccaccagagcatcctggccaagcagcagaagaagtttggagaggagatcgcccggctgcagcacgccgctgagctgatcaagacagtggccagccgctatgatgaatatgtgaatgtgaaggacttcagtgacaagatcaacagagccctggccgccgccaagaaggacaatgacttcatctaccatgacagagtgcctgacctgaaggacctggaccccatcggcaaggccaccctggtgaagagcacccctgtgaatgtgcccatcagccagaagttcacagacctgtttgagaagatggtgcctgtgtctgtgcagcagagcctggccgcctacaaccagaggaaggctgacctggtgaacagaagcatcgcccagatgagggaggccaccaccctggccaatggagtgctggccagcctgaacctgcctgctgccattgaagatgtgtctggggacacagtgccccagagcatcctgaccaagagccgctctgtgattgagcagggcggcatccagacagtggaccagctgatcaaggagctgcctgagctgctgcagaggaaccgggagatcctggatgagagcctgcggctgctggatgaggaggaggccacagacaatgacctgcgggccaagttcaaggagcgctggcagaggacccccagcaatgagctgtacaagcccctgcgggcagagggcaccaacttcagaacagtgctggacaaggctgtgcaggctgatggccaggtgaaggagtgctaccagagccaccgggacaccatcgtgctgctgtgcaagccagagcctgagctgaatgctgccatccccagcgccaacccagccaagaccatgcagggcagcgaggtggtgaatgtgctgaagagcctgctgagcaacctggatgaggtgaagaaggagcgggagggcctggagaatgacctgaagtctgtgaactttgacatgaccagcaagttcctgacagccctggcccaggatggagtcatcaatgaggaggccctgtctgtgacagagctggacagagtgtatggaggcctgaccaccaaggtgcaggagagcctgaagaagcaggagggcctgctgaagaacatccaggtgagccaccaggagttcagcaagatgaagcagagcaacaatgaggccaacctgcgggaggaggtgctgaagaacctggccacagcctatgacaactttgtggagctggtggccaacctgaaggagggcaccaagttctacaatgagctgacagagatcctggtgcgcttccagaacaagtgcagcgacatcgtgtttgccaggaagacagaaagagatgagctgctgaaggacctgcagcagagcatcgcccgggagcccagcgcccccagcatccccaccccagcctaccagagcagccctgctgggggccacgcccccaccccacccaccccagcccccaggaccatgccacccaccaagccccagcccccagcccggcccccacctcctgtgctgcctgccaacagagcccccagcgccacagcccccagccctgtgggcgccggcacagctgccccagcccccagccagaccccaggcagcgcccccccaccccaggcccagggccccccctaccccacctacccaggctacccaggctactgccagatgcccatgcccatgggctacaacccctatgcctacggccagtacaacatgccctacccacctgtgtaccaccagagccctggccaggccccctacccaggcccccagcagcccagctaccccttcccccagcccccccagcagagctactacccccagcagtag

SEQ ID NO: 175906 - DNA, 2607 bp, Artificial Sequence
  derived and/or modified sequence
atggccaccttcatcagcgtgcagctgaagaagaccagcgaggtggatctcgctaaaccactggtcaagttcattcagcaaacctatccaagtgggggcgaggaacaagcgcagtattgtcgcgccgctgaggaactgtccaagctcaggcgggctgccgtggggcgacccctggataagcacgagggagccctggagacactgctgaggtattacgaccagatctgctctattgagcctaaattccctttcagtgaaaatcaaatctgcctgactttcacctggaaagacgcattcgacaagggaagcctatttggcggaagcgtaaagttggccctggctagtcttggatacgaaaaaagttgtgtcctctttaattgcgctgcactcgcctcacagatcgcagctgagcagaatctggataacgatgagggattaaaaattgctgccaaacactatcagttcgcctctggtgctttcctgcacattaaggagaccgtgttgtccgccctgagccgggagcccaccgtggacattagcccggatactgttgggaccctgtctctcattatgctggctcaggcccaggaagtcttcttcctcaaagccacaagggacaaaatgaaggatgcgatcatcgccaagttagccaatcaggcagccgattacttcggcgacgcgttcaaacagtgtcagtataaggacaccctccccaaggaagttttcccagttcttgccgcgaagcactgtatcatgcaagctaatgccgagtaccaccagtccatactggcaaaacagcaaaaaaagttcggtgaagagatcgctagactgcaacatgccgctgagcttatcaagaccgttgcatctcgatacgatgagtacgttaacgtgaaagacttcagcgataagatcaatagggccttggccgcggccaagaaagacaatgattttatctatcacgatagagtgcctgacctgaaggatctggaccccattggcaaagcaacactggtgaagagtacgcccgtcaacgtaccaatttcccaaaagttcacagatttgtttgaaaagatggtgcctgtaagcgtacagcagtcactggcagcctataaccaaagaaaggcagacctagtcaatcgctcaattgcacaaatgcgcgaagcaacaaccctagctaatggcgtactggcatcactaaaccttccagcggccatcgaagatgtcagcggcgatacagttcctcaatccattctgaccaagtctcgctcggtcatagaacagggcgggatccagacagttgatcagctgatcaaagagctccctgaactgttgcagagaaaccgagagatcctcgatgagtcgctccgactgctcgacgaggaggaagccaccgataacgatctgcgcgccaagtttaaggagcgctggcagcgaactccatcgaatgaactgtataagcccttgagagccgaaggaacaaactttcgcacagtgctcgataaggccgtacaggctgacgggcaggtcaaagaatgctatcaaagtcaccgcgacaccatagtgctcctgtgtaaacccgaacccgaactcaacgccgccattccatcggccaatcctgcaaagaccatgcaaggttcggaagtggtgaatgtgctcaagagtctgctgtcaaacctcgatgaggtgaagaaagaacgtgaaggccttgaaaatgatttgaagtccgtgaattttgacatgacttcaaagtttttgactgctctggctcaagatggcgtcatcaatgaggaagctctgagcgtaactgaactggatcgggtctacggtggactgactacgaaagtgcaggaaagcttaaagaaacaggagggcttgctgaagaacatacaggtgagccatcaagagtttagcaaaatgaagcagtctaataacgaggcaaacctgcgggaggaggttctcaagaacttggctactgcatacgataatttcgtggaactggtggcaaacttgaaggaaggtacaaagttctacaatgaactgacagagattcttgtcagattccaaaacaaatgttccgacatagtctttgcacgcaagactgagcgggatgaactgcttaaggacctgcagcagagcatagcaagagagccctccgctccaagtatcccaactcccgcctatcagtcgagcccagccggcggtcacgcgccaacaccacccacaccagcacctcggaccatgcctccgaccaagcctcagccgccagctcggccccccccaccagtgttaccagctaatcgggccccctctgcgacagctccctctccagtgggggctggaacagctgccccagctcctagccagactcccgggtcagccccccctccacaagcgcagggaccaccttacccaacatatcccgggtacccggggtattgccagatgcctatgcccatgggctataacccctacgcctatgggcagtacaatatgccgtaccccccggtctaccatcagagccctggtcaagccccttatcccggcccacagcaaccctcatatccctttcctcaaccgcctcagcagtcttactacccccagcagtag

SEQ ID NO: 175907 - DNA, 2607 bp, Artificial Sequence
  derived and/or modified sequence
atggccaccttcatttcagtgcagcttaaaaaaacgtccgaagtcgatttagcgaaaccactggttaaatttattcagcagacttacccatcagggggagaggagcaggcccagtattgtcgcgcagcagaggaactgtctaaacttcgtagggcagctgtcggcaggcccctggataaacacgagggcgcactcgaaactttgctgcgttattatgaccaaatctgcagtatcgagcccaagtttcctttcagcgagaaccagatctgtttaacatttacgtggaaggatgccttcgataaaggttccttgtttggagggagcgtcaaactggctctggcaagcttaggctatgagaaatcctgcgtgttgtttaactgcgctgctctggccagtcagatagccgctgagcagaatctcgataatgacgagggactgaagattgcagccaagcattaccaattcgcaagcggcgctttcctgcacattaaagaaactgtgctttcggccctttctcgggaaccaactgtggatattagtcccgacactgttggcacactttcactcattatgctggcccaggctcaggaggtgttcttcctgaaagccacacgcgataaaatgaaggacgcaataatagccaaactggccaatcaggctgccgactattttggggatgcgttcaagcaatgccagtataaggacacactccctaaggaggtgttccccgtcctcgcggctaagcactgtataatgcaggctaacgccgagtaccaccagtcgattctggcaaagcagcagaagaaatttggggaggagatcgctaggcttcaacacgcagccgagctgatcaaaaccgttgccagccggtacgatgagtatgtgaacgtgaaagatttttctgacaagataaatagagccctagcggctgctaagaaggataatgattttatataccacgacagagtgccagatctgaaagacctcgatccgataggcaaagccacactggtcaagagcacaccagtgaacgtgcctattagccagaaatttaccgacctgtttgagaaaatggttcctgtgtctgtgcaacagtctctcgcagcgtacaaccagcgtaaggctgatctagtgaatcggagcatcgctcagatgagggaggccacgaccttggccaatggcgtgctcgcgagcctgaacctgccagccgcaatcgaggacgtgagtggcgacaccgttccccaaagtattctgaccaagtccagaagcgttattgagcagggaggaattcagaccgtcgaccagcttataaaggaacttcctgagctgcttcagcgcaatcgagaaatacttgatgaatctttgaggctgctggatgaagaagaagctacggacaatgatttgcgcgcaaaatttaaggaaaggtggcagagaacaccatccaacgaattgtacaagccattgagagctgaaggaaccaatttccgcaccgttctggacaaagcagtccaagctgacggtcaggttaaggaatgctaccaatctcaccgcgatactattgtgctcctatgcaaaccagagcccgagctcaacgctgccattccctctgccaaccctgccaagactatgcaaggctctgaggtggtaaatgtgctgaaatcactgctttcgaatctcgacgaagtgaagaaagagcgtgagggtctggagaatgatctcaagagcgtaaacttcgatatgactagcaaatttctgactgcactcgcacaggatggcgtaattaatgaggaggctctgtccgtgacagaactcgaccgagtctatggtggattgaccacgaaggtgcaggaatctctcaaaaaacaggaagggttgttaaagaatattcaggtctcacatcaggaattctcgaaaatgaaacagagcaataacgaagcgaatctgcgcgaggaggtactcaagaatttggcaacagcgtacgacaattttgtcgaacttgtggcaaatctcaaggagggcacaaagttttataatgaattaaccgagatattagttaggttccagaataaatgtagtgatatagtgtttgccagaaagactgagcgggatgagcttctgaaagatctgcagcagtcgatcgcacgcgagccaagtgctccgtcgattcccacccccgcttatcagtcctcaccagcaggaggccacgcaccaactcccccaactccggcacctcgtactatgccaccaaccaaacctcaacccccagctagaccccctccgcctgtgttgcccgcaaaccgcgctccgtcagccaccgctccttcaccggtgggggctggcacagcagcgccagcgcctagccagacaccaggcagcgccccaccaccacaggcgcaggggcctccttacccaacataccccggatatcccggatattgtcagatgccaatgcccatgggatataatccctacgcttacgggcagtacaacatgccgtatccccctgtttatcaccagagccctgggcaagctccataccccggtccccagcagccttcatacccttttccccagcctccacagcagtcctactatccacagcagtag

SEQ ID NO: 175908 - DNA, 6161 bp, Artificial Sequence
  derived and/or modified sequence
agtacttctccggggggttgttcgagtggaggaatactcttacgtgaaagtgctcagtacaccactgcggcaggaaggaggaagggaagaattccagatggggagaaagtaatattttgcagcacagtacagggtaaactgggtccaggtgggcgtagccgccgcgacaccttcacgtgaccgcggacagcttaaggaccccgcatccagtgcgcctgcgctggagctcccggaagttgccggacccggaacgcaggcggagcgcaagtctgtcagccagtcagtccgccagtccgccagcccagtacctctctctcctcggccctcgtaagctgtccgcggtctgtttggcccgaacggcggcggaggcgctgatcatggcgacattcatctcggtgcagctgaaaaagacctcagaggtggacctggccaagccgctggtgaagttcatccagcagacttacccaagcggcggggaagagcaggcccagtactgccgcgcggcggaggagctcagcaagctgcgccgcgccgcagtcggtcgtccgctggacaagcacgagggcgcgctcgagacgctcctgagatattatgatcagatttgttctattgaacccaaattcccattttctgaaaatcagatctgcttgacatttacctggaaggatgctttcgataaaggttcactttttggaggctctgtaaaactggctcttgcaagcttaggatatgaaaagagctgtgtgttgttcaattgtgcagccttagctagccaaattgcagcagaacagaacctggataatgatgaaggattgaaaatcgctgctaaacattaccagtttgctagtggtgcctttttacatattaaagagacggttttatctgccttaagtcgagagccgaccgtggacatatctccagatactgttgggaccctcagtcttattatgctggcacaggctcaagaagtattttttttaaaagccacaagagataaaatgaaagatgccatcatagctaaattggctaatcaggctgcagattattttggtgatgctttcaaacagtgtcaatacaaagatactctccccaaggaggtgttccctgtcttggctgcaaagcactgtatcatgcaggccaatgctgagtaccatcagtctatcctggcaaaacagcagaagaaatttggagaagaaattgcaaggttacagcatgcagcagaactgattaaaacagtggcatctcgctatgatgaatatgttaatgtgaaggatttttctgacaaaatcaatcgtgcccttgctgcagcaaagaaggataatgacttcatttatcatgatcgagttccagaccttaaagatctagatcctattggcaaagccacacttgtgaaatctaccccggtcaatgtacccatcagtcagaaatttactgatctgtttgagaagatggttcccgtgtcagtacagcagtctttggctgcctataatcagaggaaagccgatttggttaacagatcaattgctcagatgagagaagccaccactttggcaaatggggtgctagcttcccttaatcttccagcagcaattgaagatgtgtctggagacactgtacctcagtctatattgactaaatccagatctgtgattgaacagggaggcatccagactgttgatcagttgattaaagaactgcctgaattactgcaacgaaatagagaaatcctagatgagtcattaaggttgttggatgaagaagaagcaaccgataatgatttaagagcaaaatttaaggaacgttggcaaaggacaccatccaatgaactgtataagcctttaagagcagagggaaccaacttcagaacagttttagataaagctgtgcaggcagatggacaagtgaaagaatgttaccagtctcatcgtgacaccatcgtgcttttgtgtaagccagagcctgagctgaatgctgccatcccttctgctaatccagcaaagaccatgcagggcagtgaggttgtaaatgtcttaaaatccttattgtcaaatcttgatgaagtaaagaaggaaagagagggtctggagaatgacttgaaatctgtgaattttgacatgacaagcaagtttttgacagccctggctcaagatggtgtgataaatgaagaagctctttctgttactgaactagatcgagtctatggaggtcttacaactaaagtccaagaatctctaaagaaacaggagggacttcttaaaaatattcaggtctcacatcaggaattttcaaaaatgaaacaatctaataatgaagctaacttaagagaagaagttttgaagaatttagctactgcatatgacaactttgttgaacttgtagctaatttgaaggaaggcacaaagttttacaatgagttgactgaaatcctggtcaggttccagaacaaatgcagtgatatagtttttgcacggaagacagaaagagatgaactcttaaaggacttgcaacaaagcattgccagagaacctagtgctccttcaattcctacacctgcgtatcagtcctcaccagcaggaggacatgcaccaactcctccaactccagcgccaagaaccatgccgcctactaagccccagcccccagccaggcctccaccacctgtgcttccagcaaatcgagctccttctgctactgctccatctccagtgggggctgggactgctgcgccagctccatcacaaacgcctggctcagctcctcctccacaggcgcagggaccaccctatcccacctatccaggatatcctgggtattgccaaatgcccatgcccatgggctataatccttatgcgtatggccagtataatatgccatatccaccagtgtatcaccagagtcctggacaggctccatacccgggaccccagcagccttcataccccttccctcagcccccacagcagtcttactatccacagcagtaatatgtctgctcagcagctcagctgattcagatcagagggaaagaaataccaaccctgcaataagtgtactaaactctacgctctggttaatgtaatgtactctcctggactgaatgcagtgtataatttctgtctacagctagaagctgtgccccagttccacatttgattacacatgtgagatttgctgctgttgcagtataaacactaggtataataggatttgaaattgcattacagttcataaaaattgaaaatgagaaattaaacctgcaagtgaaacatttgaaacgattatactttctacataagacatggttgggacatcagatacttacaaagatggtttaagtatggatactagagaaaattaagttttctttctctttggtttattgatttggtttaatttccattatgctattttgcataatcaaggcactgtaaatcttataattttaaaataaattacttaagaacagttgtcattgttatgttttgttattgattctcattactgtctaattttttttctggtattagtctcattttgtatgtatataagttaaacagatactgtttttaagtgcatgaatagtacaagttattatcaaggatgttttacagggaaatcaaaagaatattatcatactttatctttcgtatgctgattagtaaacgatttttgacatttattttagaaagtcctataatgtggaagaaacaaacagttgctaccaaagattcttcaaataaacatacaaataaatgtgtatatttaatgttttattgttagcttctccagaaaattgatgcaaattctggtaataattcttgcattttttccccataacctggttaaaataaatacgccattggcaatacttcataatgtaatggaattgtttggggaacacttactgtaccctctcatcctttttccaccttactgtgttaacttagtgacatttaatgcccaatatgtatgaatagatctaagccatttaattttttttccttaaagattggagtattttataattcaaggagcatacaaaacaatggttgggaacatatgccaattatggaataggctatgtatttaatattaatctctgccattaggatatctactcactgtataaacctcagtaaaaatagtgaagacatgcatcatggaatgagaaaatgagaaaggaatgagttgtctaacatcacagtgggatctgttttttgtgaggttcatttctgaacacattaggcatatgagcagatttccagtgaatctatttatgtttattttctgagtttcaacgctgaccttttcttgcattattgtttcattttaatgatagtgttacttgtcccactgttgttttcattgagtttggatttatattttaaatgttcgaatgaaagtatgattgtaaaagggagtgaattggtttaaaaatatatgtatattttaaactttgttgtgtgtaggaaacatgaaggcatgttaattcaatataaatgacctttgatttcatggaatattaaagttggtttaaagtccaatagttaaaccttagcaaaaatagctttttacttcatcagttgctaagatttaatactttggattcatcaaagtgtgacatgggcttgtttgacttctgtaagtggcatttaagttccacattcttattacttgaggtactttatactaacataagacagtgagagttagaggtattacaagttgctagtttataatgtcttactaatgcagaaacaaggaaaaaagcaaaattggcctgaatattctcttggggaaagagggcaccaaagaaaagggtaagtgcatctgagggccaaaagagatgtataagccttttagcccattccccatgctgggcctgctcacagagccacaggaagatcattcagaaactaggaaaggaggcccccacagctgatcctgccacagcacacctgactcactcggctctgttagtgtaaccttttaaatgtagcaacacaaaccctttccctcttgtcagttcactcatcctttggtttctttttaatcacctgtgtctgggcacagacaatcacaataaatgcagccctttattactgttaaggatcatactgttggtttggagttggaagggtactactctgtgattcaggtgtgttgtacccatatttataattaggctttattatcttcctaaatcaaggaaaggaaatcatccccagaccatttatgctgagctttggaatactattttaaactggattgtacttaaataatgaagctctgcatagaggaactagtcagaagtggggaaaacactgtctaatttttatcagtctggtataaagtattgatctaagagaactctccctgtgccccttggtctttattctcaattaagaaaaacagtcacatgtcacgacaaaccaatcaatctttatgagatattcctgtatccataccccagcttgtttgcaatttataaacctccccttcaaaactaaggagttgcagaaaaaaatggatttcacagagccttgtgtccctaaagttctgtcccagtcagcagtctttatagtccaaacagattataaaaaatgttttccatttgaactttacagtttgcaaaagtgcttttatacattttctaatttcagaaacaggataatttgttaagtgggtttcagtttgctaatagggattttttgtgttttgttttttaattttcagcatctcttgaagaatcttgctacagccaaatggcatctcactttttaaagacgtttgcaattattagttgattcacagtacagaacaaggtataaaggaaaaaaccctgctaggtagtgttataattgctagattaaaaatagactagaacaggttcattttaagatttacttggaagagcaaagaaggaaaaattatatttttaaagaaagagaatattcaggctttatttctggtatgaagtttatattttttaaaaaaatcctatattatcacaccagagattttagattcttttctggttagaaacattgctggtagttggattatatttttattgtattcatttatcttagggggaacattgtaaagaaacaaaaaggtccagatgaatgtatgctagaaataaaagttgaaagattctt

SEQ ID NO: 175909 - DNA, 2607 bp, Artificial Sequence
  derived and/or modified sequence
atggccaccttcatcagcgtgcagctgaagaagaccagcgaggtggacctggccaagcccctggtgaagttcatccagcagacctaccccagcggcggcgaggagcaggcccagtactgcagagccgccgaggagctgagcaagctgagaagagccgccgtgggcagacccctggacaagcacgagggcgccctggagaccctgctgagatactacgaccagatctgcagcatcgagcccaagttccccttcagcgagaaccagatctgcctgaccttcacctggaaggacgccttcgacaagggcagcctgttcggcggcagcgtgaagctggccctggccagcctgggctacgagaagagctgcgtgctgttcaactgcgccgccctggccagccagatcgccgccgagcagaacctggacaacgacgagggcctgaagatcgccgccaagcactaccagttcgccagcggcgccttcctgcacatcaaggagaccgtgctgagcgccctgagcagagagcccaccgtggacatcagccccgacaccgtgggcaccctgagcctgatcatgctggcccaggcccaggaggtgttcttcctgaaggccaccagagacaagatgaaggacgccatcatcgccaagctggccaaccaggccgccgactacttcggcgacgccttcaagcagtgccagtacaaggacaccctgcccaaggaggtgttccccgtgctggccgccaagcactgcatcatgcaggccaacgccgagtaccaccagagcatcctggccaagcagcagaagaagttcggcgaggagatcgccagactgcagcacgccgccgagctgatcaagaccgtggccagcagatacgacgagtacgtgaacgtgaaggacttcagcgacaagatcaacagagccctggccgccgccaagaaggacaacgacttcatctaccacgacagagtgcccgacctgaaggacctggaccccatcggcaaggccaccctggtgaagagcacccccgtgaacgtgcccatcagccagaagttcaccgacctgttcgagaagatggtgcccgtgagcgtgcagcagagcctggccgcctacaaccagagaaaggccgacctggtgaacagaagcatcgcccagatgagagaggccaccaccctggccaacggcgtgctggccagcctgaacctgcccgccgccatcgaggacgtgagcggcgacaccgtgccccagagcatcctgaccaagagcagaagcgtgatcgagcagggcggcatccagaccgtggaccagctgatcaaggagctgcccgagctgctgcagagaaacagagagatcctggacgagagcctgagactgctggacgaggaggaggccaccgacaacgacctgagagccaagttcaaggagagatggcagagaacccccagcaacgagctgtacaagcccctgagagccgagggcaccaacttcagaaccgtgctggacaaggccgtgcaggccgacggccaggtgaaggagtgctaccagagccacagagacaccatcgtgctgctgtgcaagcccgagcccgagctgaacgccgccatccccagcgccaaccccgccaagaccatgcagggcagcgaggtggtgaacgtgctgaagagcctgctgagcaacctggacgaggtgaagaaggagagagagggcctggagaacgacctgaagagcgtgaacttcgacatgaccagcaagttcctgaccgccctggcccaggacggcgtgatcaacgaggaggccctgagcgtgaccgagctggacagagtgtacggcggcctgaccaccaaggtgcaggagagcctgaagaagcaggagggcctgctgaagaacatccaggtgagccaccaggagttcagcaagatgaagcagagcaacaacgaggccaacctgagagaggaggtgctgaagaacctggccaccgcctacgacaacttcgtggagctggtggccaacctgaaggagggcaccaagttctacaacgagctgaccgagatcctggtgagattccagaacaagtgcagcgacatcgtgttcgccagaaagaccgagagagacgagctgctgaaggacctgcagcagagcatcgccagagagcccagcgcccccagcatccccacccccgcctaccagagcagccccgccggcggccacgcccccaccccccccacccccgcccccagaaccatgccccccaccaagccccagccccccgccagaccccccccccccgtgctgcccgccaacagagcccccagcgccaccgcccccagccccgtgggcgccggcaccgccgcccccgcccccagccagacccccggcagcgccccccccccccaggcccagggccccccctaccccacctaccccggctaccccggctactgccagatgcccatgcccatgggctacaacccctacgcctacggccagtacaacatgccctacccccccgtgtaccaccagagccccggccaggccccctaccccggcccccagcagcccagctaccccttcccccagcccccccagcagagctactacccccagcagtag

SEQ ID NO: 175910 - protein, 272 aa, Artificial Sequence
  derived and/or modified sequence
MEAEESEKAATEQEPLEGTEQTLDAEEEQEESEEAACGSKKRVVPGIVYLGHIPPRFRPLHVRNLLSAYGEVGRVFFQAEDRFVRRKKKAAAAAGGKKRSYTKDYTEGWVEFRDKRIAKRVAASLHNTPMGARRRSPFRYDLWNLKYLHRFTWSHLSEHLAFERQVRRQRLRAEVAQAKRETDFYLQSVERGQRFLAADGDPARPDGSWTFAQRPTEQELRARKAARPGGRERARLATAQDKARSNKGLLARIFGAPPPSESMEGPSLVRDS

SEQ ID NO: 175911 - DNA, 2255 bp, Artificial Sequence
  derived and/or modified sequence
tacggccgtcgtgccgctcgtgtcagtcaacatggaggcagaggaatcggagaaggccgcaacggagcaagagccgctggaagggacagaacagacactagatgcggaggaggagcaggaggaatccgaagaagcggcctgtggcagcaagaagcgggtagtgccaggtattgtgtacctgggccatatcccgccgcgcttccggcccctgcacgtccgcaaccttctcagcgcctatggcgaggtcggacgcgtcttctttcaggctgaggaccggttcgtgagacgcaagaagaaggcagcagcagctgccggaggaaaaaagcggtcctacaccaaggactacaccgagggatgggtggagttccgtgacaagcgcatagccaagcgcgtggcggccagtctacacaacacgcctatgggtgcccgcaggcgcagccccttccgttatgatctttggaacctcaagtacttgcaccgtttcacctggtcccacctcagcgagcacctcgcctttgagcgccaggtgcgcaggcagcgcttgagagcggaggttgctcaagccaagcgtgagaccgacttctatcttcaaagtgtggaacggggacaacgctttcttgcggccgatggggaccctgctcgcccagatggctcctggacatttgcccagcgtcctactgagcaggaactgagggcccgtaaagcagcacggccagggggacgtgaacgggctcgcctggcaactgcccaggacaaggcccgctccaacaaagggctcctggccaggatctttggagccccgccaccctcagagagcatggagggaccttcccttgtcagggactcctgagggcctgggtggccccttccatttcctggccctgctctgcttcctgtctacctcatactagaatgatcgtgactacccgggcagacattttactgtgtttctcagaccaagtgtctactgatggcccaaacatggagttttgtgggcttccactgtccccactccgaactcctgtatgtgcctggctgagtcacctaattcatactgtcatactagcataattatgactattgcatatgcttgttttgtttgactcttggctgcctacgtctgtagggtcccctgaaaatcccacttcctgcccccagaaagggcctttatttccaactaggaggataatgcctagtccaggcaatctttctctgtttagcagtcacaggtgagggtggtattagcatcttttttatgtagaaaaaattgagttaatggggtggactgggttgggaagaaatacatttcctaatgtatttatagaaaataaaaatatttttatgtgcctttttatttttgttggtggggaggtcattggacaagttccaactttcatcttgtgttcccttcaccttcatatcctgatcttagagcccccctccccctgccacccaccttactgtttaacctggatttttttttctatttaatttttgtctaatatcttagcccagtttatcaatcagttatcttaagtcagcattttctaagccattgtttgaggaaacagtgacaataggtaataacacatcttagtattaagagttttacaggccactagtataagataggcatcgtggtagatgcatataaagggtggaatgggagccatggcaggtcatagagtcctctcaatgggaacctgattgatgatcacagtcttcagtggtgagtcagtcctcaccaagttttccagatcattcctacaaagtaaactgggagaataataagtctgaaagagtgtggagtgctcccacaattacaaagaatgcttcctgggtggagtgttgagttggaaccattgtaaaggtgggcaaagcctagtagagaaccagtgcacctcaggtgcacttacatatggtggggctgaggcaaagcagccctgtaggcttcaaagaatcagtgtaagccactaaaaggaactgaaaacctaggtgtcacaataaacagtctacacagtctcacgtagaccaaaattctgatcattttccaggctgttgcatgaagtgatagagtatgattataatttctgtttgcttgtgctgtttgtttttgtttttcatctgtcaatgtgatgatctgtgttttatagggtagagtggatttgtctactttggctgtaaaataccctaatcacattatgatcttgacaggtgcactttactggggagaataaaaaggaccatacggtaaa

SEQ ID NO: 175912 - DNA, 819 bp, Artificial Sequence
  derived and/or modified sequence
atggaggccgaagagtcagagaaggctgcaacagaacaggaacccctggagggcacagagcaaaccctggatgcagaggaggagcaggaggaatctgaagaggccgcatgtgggtcaaagaagcgcgtagtacccggtatagtatacttggggcacatcccccctcggttccggccactacatgtgagaaatttgttgagcgcttacggcgaagtgggacgggtgtttttccaggccgaggacaggtttgtaagacggaaaaagaaggcagccgctgctgcaggcggaaaaaaaagatcgtatacaaaggactataccgagggatgggttgagttcagagataagcgtatcgcgaagagagtggcggccagtctacacaatacccccatgggtgcccggcgccggagccccttccgttacgacttatggaacttgaaatatctgcaccgatttacttggtcacatttaagcgaacacctagccttcgagaggcaagtccggcgccagagacttcgggccgaagtggcccaagcaaaaagggaaaccgacttctatttgcaatccgtagagcgcgggcagagatttctagctgcggatggagaccctgcacgacctgacggtagttggacattcgcccagcgcccgaccgaacaggaattgagagccagaaaagcagctcggccgggaggcagagaacgcgcccgcctggccactgcgcaggataaagcccggagcaataagggccttcttgcaaggatctttggggctcctccaccaagtgagagcatggaaggcccgagtctggtgcgggatagctag

SEQ ID NO: 175913 - DNA, 819 bp, Artificial Sequence
  derived and/or modified sequence
atggaggccgaggagagcgagaaggccgccacagagcaggagcccctggagggcacagagcagaccctggatgctgaggaggagcaggaggagagcgaggaggccgcctgtggcagcaagaagagggtggtgcccggcatcgtgtacctgggccacatccccccacgcttccggcccctgcacgtgaggaacctgctgagcgcctatggagaggtgggccgggtcttcttccaggccgaggacagatttgtgcggaggaagaagaaggctgctgctgctgctgggggcaagaagaggagctacaccaaggactacacagagggctgggtggagttccgggacaagagaattgccaagagggtggccgccagcctgcacaacacccccatgggcgcccggcggcgcagccccttccgctatgacctgtggaacctgaagtacctgcaccgcttcacctggagccacctgtctgagcacctggcctttgagcggcaggtgcggcggcagaggctgcgggcagaggtggcccaggccaagcgggagacagacttctacctgcagagcgtggagcggggccagcgcttcctggccgcagatggagaccctgcccggccagatggctcctggacctttgcccagaggcccacagagcaggagctgcgggccaggaaggccgcccggcctgggggccgggagcgggcccggctggccacagcccaggacaaggcccggagcaacaagggcctgctggcccgcatctttggagcccccccacccagcgagagcatggagggccccagcctggtgcgggacagctag

SEQ ID NO: 175914 - DNA, 2255 bp, Artificial Sequence
  derived and/or modified sequence
tacggccgtcgtgccgctcgtgtcagtcaacatggaggcagaggaatcggagaaggccgcaacggagcaagagccgctggaagggacagaacagacactagatgcggaggaggagcaggaggaatccgaagaagcggcctgtggcagcaagaaacgggtagtgccaggtattgtgtacctgggccatatcccgccgcgcttccggcccctgcacgtccgcaaccttctcagcgcctatggcgaggtcggacgcgtcttctttcaggctgaggaccggttcgtgagacgcaagaagaaggcagcagcagctgccggaggaaaaaagcggtcctacaccaaggactacaccgagggatgggtggagttccgtgacaagcgcatagccaagcgcgtggcggccagtctacacaacacgcctatgggtgcccgcaggcgcagccccttccgttatgatctttggaacctcaagtacttgcaccgtttcacctggtcccacctcagcgagcacctcgcctttgagcgccaggtgcgcaggcagcgcttgagagcggaggttgctcaagccaagcgtgagaccgacttctatcttcaaagtgtggaacggggacaacgctttcttgcggccgatggggaccctgctcgcccagatggctcctggacatttgcccagcgtcctactgagcaggaactgagggcccgtaaagcagcacggccagggggacgtgaacgggctcgcctggcaactgcccaggacaaggcccgctccaacaaagggctcctggccaggatctttggagccccgccaccctcagagagcatggagggaccttcccttgtcagggactcctgagggcctgggtggccccttccatttcctggccctgctctgcttcctgtctacctcatactagaatgatcgtgactacccgggcagacattttactgtgtttctcagaccaagtgtctactgatggcccaaacatggagttttgtgggcttccactgtccccactccgaactcctgtatgtgcctggctgagtcacctaattcatactgtcatactagcataattatgactattgcatatgcttgttttgtttgactcttggctgcctacgtctgtagggtcccctgaaaatcccacttcctgcccccagaaagggcctttatttccaactaggaggataatgcctagtccaggcaatctttctctgtttagcagtcacaggtgagggtggtattagcatcttttttatgtagaaaaaattgagttaatggggtggactgggttgggaagaaatacatttcctaatgtatttatagaaaataaaaatatttttatgtgcctttttatttttgttggtggggaggtcattggacaagttccaactttcatcttgtgttcccttcaccttcatatcctgatcttagagcccccctccccctgccacccaccttactgtttaacctggatttttttttctatttaatttttgtctaatatcttagcccagtttatcaatcagttatcttaagtcagcattttctaagccattgtttgaggaaacagtgacaataggtaataacacatcttagtattaagagttttacaggccactagtataagataggcatcgtggtagatgcatataaagggtggaatgggagccatggcaggtcatagagtcctctcaatgggaacctgattgatgatcacagtcttcagtggtgagtcagtcctcaccaagttttccagatcattcctacaaagtaaactgggagaataataagtctgaaagagtgtggagtgctcccacaattacaaagaatgcttcctgggtggagtgttgagttggaaccattgtaaaggtgggcaaagcctagtagagaaccagtgcacctcaggtgcacttacatatggtggggctgaggcaaagcagccctgtaggcttcaaagaatcagtgtaagccactaaaaggaactgaaaacctaggtgtcacaataaacagtctacacagtctcacgtagaccaaaattctgatcattttccaggctgttgcatgaagtgatagagtatgattataatttctgtttgcttgtgctgtttgtttttgtttttcatctgtcaatgtgatgatctgtgttttatagggtagagtggatttgtctactttggctgtaaaataccctaatcacattatgatcttgacaggtgcactttactggggagaataaaaaggaccatacggtaaa

SEQ ID NO: 175915 - DNA, 819 bp, Artificial Sequence
  derived and/or modified sequence
atggaggccgaggagagcgagaaggccgccaccgagcaggagcccctggagggcaccgagcaaacactcgacgccgaggaagagcaggaagagtctgaagaagccgcctgcgggtctaagaaaagggtggttccaggtatcgtttatttggggcatatcccccctagattcagaccgctccacgtccgtaatcttttatccgcgtacggggaggtcggcagggtatttttccaggcggaggaccgctttgttcgtcggaaaaaaaaagccgcagcagctgcaggtggaaagaagcggagctataccaaggactatactgagggctgggtcgaatttagggataagagaatagcaaaaagggttgccgccagcctgcacaacactcccatgggtgctaggcgacggagcccttttcgatacgacctttggaacctgaaatatctgcaccggttcacatggtctcacctgagtgagcacttggctttcgaacgccaggtccgacgccagcggctgagagctgaggtggctcaggcaaagcgggaaacagacttttacctgcagtccgtggaacgaggtcagcgttttttggctgcagatggggatccagccaggccagacggctcttggactttcgcacagagacctactgaacaggagttacgggccagaaaagcagcacggcctgggggacgcgaacgggcgcgcctggctaccgcacaggataaagcgcgtagtaacaagggtcttctcgcgcgtattttcggggcaccccccccatctgagagcatggaggggccgtccctcgtgcgcgacagctag

SEQ ID NO: 175916 - DNA, 819 bp, Artificial Sequence
  derived and/or modified sequence
atggaggccgaagaaagtgagaaagcagctaccgaacaggagcctcttgagggcacggaacagactctcgatgccgaggaggaacaggaggagtccgaggaggccgcttgtgggagcaagaaacgggtggtgcctggaattgtctacttggggcacatccccccacgctttaggccactgcatgtgcgcaatctcctgtccgcctatggtgaagtggggcgagtgttttttcaagcggaggaccgttttgtgagaagaaagaaaaaagctgctgcagcagcaggtggcaagaagaggtcctacactaaggactataccgagggatgggtggagtttcgggataagcgaattgctaagcgggtggcagcgagccttcacaacacaccaatgggagccagacgacggtctccatttcggtatgacctctggaatttgaaatatcttcacaggttcacttggtcccatctttctgaacatctcgcatttgagcgccaggtccgcaggcagcggctccgcgcagaagtggcccaggcaaaacgtgagaccgatttttacttacagtcagtggaacggggacagagattcttggctgcagatggagatcccgctaggcctgacggtagctggacgtttgctcagaggcccacagaacaggagctcagggcaagaaaagcggcacggccaggcggacgggagcgggcacgattggccaccgcacaggacaaagccaggtctaacaaaggtctcctagctcgcatctttggggcaccccctccctccgagtcaatggagggtccttctctggtaagggacagctag

SEQ ID NO: 175917 - DNA, 819 bp, Artificial Sequence
  derived and/or modified sequence
atggaggccgaggagagcgagaaggccgccaccgagcaggagcccctggagggcaccgagcagaccctggacgccgaggaggagcaggaggagagcgaggaggccgcctgcggcagcaagaagagagtggtgcccggcatcgtgtacctgggccacatcccccccagattcagacccctgcacgtgagaaacctgctgagcgcctacggcgaggtgggcagagtgttcttccaggccgaggacagattcgtgagaagaaagaagaaggccgccgccgccgccggcggcaagaagagaagctacaccaaggactacaccgagggctgggtggagttcagagacaagagaatcgccaagagagtggccgccagcctgcacaacacccccatgggcgccagaagaagaagccccttcagatacgacctgtggaacctgaagtacctgcacagattcacctggagccacctgagcgagcacctggccttcgagagacaggtgagaagacagagactgagagccgaggtggcccaggccaagagagagaccgacttctacctgcagagcgtggagagaggccagagattcctggccgccgacggcgaccccgccagacccgacggcagctggaccttcgcccagagacccaccgagcaggagctgagagccagaaaggccgccagacccggcggcagagagagagccagactggccaccgcccaggacaaggccagaagcaacaagggcctgctggccagaatcttcggcgcccccccccccagcgagagcatggagggccccagcctggtgagagacagctag

SEQ ID NO: 175918 - DNA, 297 bp, Artificial Sequence
  derived and/or modified sequence
atgctgagaagcaccttcaccgtgcactggaccaccatcctgggcatctgcagacccatcaagcccatctacaagagccaggcctgccccctgagcgagaagagaaacgccgacaaccacctggtgagcgaggacaacaccttcaaggagcccgagagatacatcagcagcagctgcgtgctgaccagcatcctgtacctgggcgagaagaccttcagcttcagaaccctgatcagccccagaggcatgaagctggtggagatcctgcagcagcccagcctgaccatggtggcctag

SEQ ID NO: 175919 - protein, 236 aa, Artificial Sequence [sequence omitted]

SEQ ID NO: 175920 - DNA, 711 bp, Artificial Sequence
  derived and/or modified sequence
atgctgagcaagggcctgaagagaaagagagaggaggaggaggagaaggagcccctggccgtggacagctggtggctggaccccggccacaccgccgtggcccaggccccccccgccgtggccagcagcagcctgttcgacctgagcgtgctgaagctgcaccacagcctgcagcagagcgagcccgacctgagacacctggtgctggtggtgaacaccctgagaagaatccaggccagcatggcccccgccgccgccctgccccccgtgcccagcccccccgccgcccccagcgtggccgacaacctgctggccagcagcgacgccgccctgagcgccagcatggccagcctgctggaggacctgagccacatcgagggcctgagccaggccccccagcccctggccgacgagggcccccccggcagaagcatcggcggcgccgcccccagcctgggcgccctggacctgctgggccccgccaccggctgcctgctggacgacggcctggagggcctgttcgaggacatcgacaccagcatgtacgacaacgagctgtgggcccccgccagcgagggcctgaagcccggccccgaggacggccccggcaaggaggaggcccccgagctggacgaggccgagctggactacctgatggacgtgctggtgggcacccaggccctggagagaccccccggccccggcagatag

SEQ ID NO: 175921 - DNA, 711 bp, Artificial Sequence
  derived and/or modified sequence
atgctctccaaaggtctgaagcgaaagagagaggaggaggaggagaaagagcccctggcagttgattcttggtggctagaccctgggcacactgcagtagcacaggctccgcctgctgttgccagcagctccctgttcgacctctccgtcctgaagctgcaccacagccttcagcaaagcgagcctgaccttcgtcatctcgtgctagtggtcaacacacttagaaggattcaggctagtatggcccccgctgccgcattgccaccggtccctagcccacctgcagccccgtcagtggcagacaatctgctggcgagctccgacgcagccctgagtgccagtatggctagcctgttggaagacctctcacatattgagggactgagtcaggccccacagcccttggccgacgagggaccccctggccgatccatcggtggcgctgccccctccctgggcgccctggacctcctggggcctgcaacgggctgcctcctggacgatgggcttgagggattgtttgaggatatcgacactagtatgtatgataatgaactgtgggcacctgcttccgaagggctcaagcctgggcccgaagatgggccaggaaaagaagaggcccctgaactggacgaagctgagctggattatctgatggacgtgctcgttggtacgcaagccctagaaaggcctccggggcctggccggtag

SEQ ID NO: 175922 - DNA, 711 bp, Artificial Sequence
  derived and/or modified sequence
atgctgagcaagggcctgaagaggaagcgggaggaggaggaggagaaggagcccctggccgtggacagctggtggctggaccccggccacacagctgtggcccaggcccctcctgctgtggccagcagcagcctgtttgacctgtctgtgctgaagctgcaccacagcctgcagcagagcgagccagacctgcggcacctggtgctggtggtgaacaccctgcggcgcatccaggcctccatggccccagctgctgccctgccccctgtgcccagccccccagctgcccccagcgtggccgacaacctgctggccagcagtgatgctgccctgagcgcctccatggccagcctgctggaggacctgagccacatcgagggcctgagccaggccccccagcccctggctgatgagggccccccaggccgcagcattggaggagctgcccccagcctgggcgccctggacctgctgggccctgccaccggctgcctgctggatgatggcctggagggcctgtttgaagatattgacacctccatgtatgacaatgagctgtgggccccagccagcgagggcctgaagccaggcccagaagatggccctgggaaggaggaggcccctgagctggatgaagctgagctggactacctgatggatgtgctggtgggcacccaggccctggagaggcctcctggccctggccgctag

SEQ ID NO: 175923 - DNA, 711 bp, Artificial Sequence
  derived and/or modified sequence
atgctgagcaagggcctgaagcggaagcgggaggaggaggaggagaaagaaccactggctgtggattcttggtggctagatccagggcatactgcagtcgcacaggcgcctccagcagtggcaagtagttcactgtttgatctgtcagtgcttaaattgcaccactctctgcagcagtctgaacctgacctcagacatctggtgctggtcgtgaacaccttgcgccgaatccaggctagcatggcccctgctgcagccctgccgcccgtcccatcaccacccgctgccccatcagtggccgacaaccttctcgctagctccgacgctgccctgagtgcaagcatggccagcctgttggaagacttgagccacatcgaaggattgtctcaggccccccagccccttgcagatgaaggcccccccgggcggtctataggtggcgccgccccaagcctgggagccttagacctgctggggcccgccaccggttgtttacttgacgacggcctggagggcctttttgaagatatagataccagcatgtacgataacgaattatgggcacccgctagtgaagggcttaagcccggccccgaagatgggcccggcaaggaggaggctcctgagcttgacgaggccgaacttgattacctcatggatgtcctcgtgggcacacaggccctggagcgccccccagggccaggccgctag

SEQ ID NO: 175924 - DNA, 711 bp, Artificial Sequence
  derived and/or modified sequence
atgctttccaagggcctgaaaaggaagcgggaggaggaggaggagaaagaaccccttgcggttgattcctggtggctggacccgggacataccgccgtggcccaggcgccaccagctgtagcttcatcatccctgttcgatctcagtgttctgaagctacaccacagcttgcagcagagtgagccggatcttcgccacctggtgctggtcgtcaatacccttcggcgaattcaagcaagcatggctccagccgctgccctgcctcccgtcccttctcctccggcagccccatcagtggcggacaacttactggcctcctccgacgctgcgctgtctgcgagcatggcatcactgctggaagacctcagtcacattgaaggcctgtcacaagcccctcagccactggcagatgagggacccccaggaagatcaatcggaggggcagccccatcattgggtgcactggatttacttgggcctgccaccggttgtttgctggacgacgggctggaaggtctgttcgaggacattgacactagcatgtacgacaacgagctgtgggcccctgcaagtgagggcctgaagcccggtccagaggacgggccagggaaggaggaggctccagaactggatgaggctgagttggactatttgatggacgtgctcgtgggtacccaggctctcgaacggccaccgggacccggtcgttag

SEQ ID NO: 175925 - DNA, 2114 bp, Artificial Sequence
  derived and/or modified sequence
gtagttaggagtctggagtcgtgagccggagtcagaactgcgtctcgcgacccaggcgcgggtttccagaggacagccaacaagcgatgctgccgccgccgtttcctgattggttgtgggtggctacctcttcgttctgattggccgctagtgagcaagatgctgagcaagggtctgaagcggaaacgggaggaggaggaggagaaggaacctctggcagtcgactcctggtggctagatcctggccacacagcggtggcacaggcacccccggccgtggcctctagctccctctttgacctctcagtgctcaagctccaccacagcctgcagcagagtgagccggacctgcggcacctggtgctggtcgtgaacactctgcggcgcatccaggcgtccatggcacccgcggctgccctgccacctgtgcctagcccacctgcagcccccagtgtggctgacaacttactggcaagctcggacgctgccctttcagcctccatggccagcctcctggaggacctcagccacattgagggcctgagtcaggctccccaacccttggcagacgaggggccaccaggccgtagcatcgggggagcagcgcccagcctgggtgccttggacctgctgggcccagccactggctgtctactggacgatgggcttgagggcctgtttgaggatattgacacctctatgtatgacaatgaactttgggcaccagcctctgagggcctcaaaccaggccctgaggatgggccgggcaaggaggaagctccggagctggacgaggccgaattggactacctcatggatgtgctggtgggcacacaggcactggagcgaccgccggggccagggcgctgagccctcgtgctggaatggttgtctggtatctgaactgagcctgctggctggaccaactgtcctcgaaaagacacagctggcttccctagtacagagaacagggcttgggccactttggagagacagaatctagtcctgggcaacttcacatccgtcctcctgtctcagggctggcagggggagcctggaattaccccctagtgatggaatgacagggtctggtggggactgaattccctggccctggggtcatagcttgggctgttccttctctgatacgggaagagaccccaatcagatttttcaaattaaagccagtcctgggaaatctcaaatccgtgtgctgctttgtctctgggcaaatgtgaaggcgagataaaaacatcaaacattttattgggcgtaggctgtgtacgaggcacagtttctaagcacgtcactgtgttaactcatttaatcctataacagccctacaagatcggtagtattatcatccctattttacaggtgagaaaaccaaggttccaagattatcacttgaggtgggttttaaattatgaacttttttttttttttttttgagatagggtctcgctctgtcacccaggttgaagtacagtggtctgatcatggctcactacagcctcaaactcctgggctcaagcgatcctcctaccaggccactttttttttttctttcttttttttttaagacagattcttactctgtcgcccaggctggagtgcagtggcgtgacttcggctcactgcaacctccacctcccaggttcaaacgattctcctgcctcggcctcccaattagctgggaccgactaattttttatattttttgtagagacagggtttcaccgtgttagccaggatggtcttcatcttctgacctcgtgatctgcctgcctcagcctcccaaagtgctgggattacaggcgtgagccactgtgcctggcctttttttttttttcttaaattttatttcttttctttgctagcaggaagtcaaggcaactttttaaaaatgaaagcaagtcctcgcctggagtctacctgtatttattgaggagcgaaggggagattgctttcagaatggtcccgaaataaaaacacaaaacctggaccctggacagatcctctccaaggagccctgagagtcggctctccaggaaaatgggggaggaaagggggacaacagcccatttttaaaaataaaattcactcctggtctt

SEQ ID NO: 175926 - protein, 776 aa, Artificial Sequence
  derived and/or modified sequence
MSGKRQFFLKPLALLTCWPSTVNGKDLSKATHEEAVEAFRNAKEPIVVQVLRRTPLSRPAYGMASEVQLMNASTQTDITFEHIMALAKLRPPTPPVPDICPFLLSDSCHSLHPMEHEFYEDNEYISSLPADADRTEDFEYEEVELCRVSSQEKLGLTVCYRTDDEEDTGIYVSEVDPNSIAAKDGRIREGDRILQINGEDVQNREEAVALLSNDECKRIVLLVARPEIQLDEGWLEDERNEFLEELNLEMLEEEHNEAMQPTANEVEQPKKQEEEEGTTDTATSSSNNHEKDSGVGRTDESLRNDESSEQENAAEDPNSTSLKSKRDLGQSQDTLGSVELQYNESLVSGEYIDSDCIGNPDEDCERFRQLLELKCKIRNHGEYDLYYSSSTIECNQGEQEGVEHELQLLNEELRNIELECQNIMQAHRLQKVTDQYGDIWTLHDGGFRNYNTSIDMQRGKLDDIMEHPEKSDKDSSSAYNTAESCRSTPLTVDRSPDSSLPRVINLTNKKNLRSTMAATQSSSGQSSKESTSTKAKTTEQGCSAESKEKVLEGSKLPDQEKAVSEHIPYLSPYHSSSYRYANIPAHARHYQSYMQLIQQKSAVEYAQSQLSLVSMCKESQKCSEPKMEWKVKIRSDGTRYITKRPVRDRILKERALKIKEERSGMTTDDDTMSEMKMGRYWSKEERKQHLVRAKEQRRRREFMMRSRLECLKESPQSGSEGKKEINIIELSHKKMMKKRNKKILDNWMTIQELMTHGAKSPDGTRVHNAFLSVTTV

SEQ ID NO: 175927 - protein, 778 aa, Artificial Sequence
  derived and/or modified sequence
MGCNLCTFQKREEHYKLLYEVSQVNGKDLSKATHEEAVEAFRNAKEPIVVQVLRRTPLSRPAYGMASEVQLMNASTQTDITFEHIMALAKLRPPTPPVPDICPFLLSDSCHSLHPMEHEFYEDNEYISSLPADADRTEDFEYEEVELCRVSSQEKLGLTVCYRTDDEEDTGIYVSEVDPNSIAAKDGRIREGDRILQINGEDVQNREEAVALLSNDECKRIVLLVARPEIQLDEGWLEDERNEFLEELNLEMLEEEHNEAMQPTANEVEQPKKQEEEEGTTDTATSSSNNHEKDSGVGRTDESLRNDESSEQENAAEDPNSTSLKSKRDLGQSQDTLGSVELQYNESLVSGEYIDSDCIGNPDEDCERFRQLLELKCKIRNHGEYDLYYSSSTIECNQGEQEGVEHELQLLNEELRNIELECQNIMQAHRLQKVTDQYGDIWTLHDGGFRNYNTSIDMQRGKLDDIMEHPEKSDKDSSSAYNTAESCRSTPLTVDRSPDSSLPRVINLTNKKNLRSTMAATQSSSGQSSKESTSTKAKTTEQGCSAESKEKVLEGSKLPDQEKAVSEHIPYLSPYHSSSYRYANIPAHARHYQSYMQLIQQKSAVEYAQSQLSLVSMCKESQKCSEPKMEWKVKIRSDGTRYITKRPVRDRILKERALKIKEERSGMTTDDDTMSEMKMGRYWSKEERKQHLVRAKEQRRRREFMMRSRLECLKESPQSGSEGKKEINIIELSHKKMMKKRNKKILDNWMTIQELMTHGAKSPDGTRVHNAFLSVTTV

SEQ ID NO: 175928 - DNA, 2331 bp, Artificial Sequence
  derived and/or modified sequence
atgtctggaaagcgccagttttttctcaaaccactggcactgctcacgtgctggccctccacagtgaatgggaaagacctctctaaagccactcacgaggaagcagtggaagcgttccggaatgcgaaggagcccatcgtggtccaggttcttcggcgaacacccttgtcccgaccggcttacggcatggcttcagaggtacaattgatgaatgcttctactcagaccgatatcactttcgagcacatcatggcgctggcaaaattgcggcctccgaccccccccgtgcccgacatttgtccatttctgctatccgacagctgccacagcctgcatcctatggaacacgaattctacgaagataatgaatatatcagctcactccccgcggacgcggatagaaccgaagattttgaatatgaggaagtggagctgtgccgcgtgagtagtcaggagaagctggggctgaccgtgtgttatcgtacagacgatgaggaagacacaggcatctacgtgtctgaggtcgacccaaattccatcgctgctaaggacggaaggattagagaaggtgaccgcatcctgcaaatcaatggcgaggatgtacagaacagggaggaagccgtggctttactgtcaaatgatgaatgcaaaaggatcgtgttgcttgttgcccggccagagatacagttggacgaggggtggttggaagatgaacgcaatgaatttctcgaagagctgaacctcgagatgctggaggaagagcacaacgaagcaatgcagccaaccgcgaatgaggtcgaacagcctaaaaagcaggaggaggaagaaggtacaaccgataccgcaacgagctcgtctaacaaccacgagaaggacagcggcgttgggcgcaccgatgaatccttgaggaacgatgaaagctctgagcaagagaacgcagctgaagatcctaatagcacttctctcaaaagtaaacgtgatttaggtcaatctcaggataccctgggatccgtagagctccagtataatgaaagcttggtcagtggagagtatatcgatagtgattgcattggaaatcccgacgaggattgtgagaggtttagacaactactagagctcaaatgcaagatcagaaatcacggtgaatacgacctttactattccagtagcaccatcgaatgcaaccagggagagcaggaaggagtcgagcacgagctgcagttgctcaatgaagagcttaggaacattgagctggaatgccagaacattatgcaagcccaccgtctccagaaggtgaccgaccagtacggcgatatctggactttacacgatggcggattccgcaattataatacttccattgacatgcagcgcggtaagcttgacgatatcatggaacaccccgagaagtccgataaggattcttctagcgcgtacaataccgctgagtcctgccgtagcacccctctcaccgtagacaggtctcctgacagctctctgcccagggtcatcaatctcaccaataagaagaacctgcgatcaaccatggcagcgacccaaagttctagcggtcagagcagcaaggaaagtacgagtaccaaggccaaaacaactgaacaaggctgtagcgctgagagcaaggaaaaggtgctggaggggtcaaagctgcctgatcaagagaaggctgttagcgagcacatcccatacctgtccccttaccactctagttcctataggtacgcgaatatacccgcccacgctcgacactatcaatcatacatgcagctgatccagcaaaagtctgcagtcgagtacgcacaaagccagctgagcttggtcagcatgtgcaaggagtcccagaaatgtagcgagccaaagatggaatggaaagtgaaaatccggtcagatggcacccgatatatcacgaaacgacctgtgcgcgatagaatattaaaggaacgggcgctcaaaattaaggaggaacggtccggtatgacgacagatgacgatacaatgagcgagatgaagatgggaagatactggtcaaaagaggagcggaaacaacatctcgtgcgagcgaaagagcaacgacgccgccgcgaatttatgatgcggtctaggcttgaatgtttgaaagagtcgccccaatcagggagcgagggcaagaaagagataaacataatcgagttgtctcataagaagatgatgaagaaaaggaacaagaagattctagacaattggatgactatacaagaactgatgactcatggagctaaatctcctgatggcactagggttcataatgcttttctttctgtaacaacagtatag

SEQ ID NO: 175929 - DNA, 2337 bp, Artificial Sequence
  derived and/or modified sequence
atggggtgtaatttatgtacattccagaagcgggaggagcactacaagctgttatacgaggtgtctcaggttaatggaaaggacctgagcaaggctacacatgaagaagctgtggaggcattccgtaacgcaaaggaacctattgtggtgcaggttctgcgtagaactcctttgagccggccagcttacggcatggcgtctgaggtccagcttatgaatgcttccacacaaacggatattactttcgagcatattatggcactagcgaaactgcgcccacccacgcccccggtgccggatatttgcccctttcttctctccgactcctgtcactcactccacccaatggagcatgagttttacgaggataatgagtacataagcagcctacctgctgatgcagataggactgaggactttgagtacgaggaggtggagctttgcagggtctcttctcaggagaagctgggactcacagtgtgctacaggaccgacgatgaagaggacactggaatctacgtgtctgaggtagatcctaacagtatcgcggccaaggatggacgcataagggagggtgaccggatccttcagattaatggcgaggatgtccagaatcgggaggaggcggttgcattgctctctaacgatgagtgtaaaaggatcgtgctcctcgtagcaaggcccgaaatccagttagatgagggatggcttgaagatgagcgaaacgagtttctcgaggaacttaacctggagatgctcgaagaagagcacaatgaggccatgcagcccaccgccaacgaggtcgaacagcctaagaagcaggaggaagaagagggtactacagataccgctacctcctctagtaacaaccatgaaaaggattccggtgtaggtagaacagatgagtctcttcggaacgatgagtcatcggagcaggagaacgcagctgaagatccaaattctaccagcctaaagtctaagcgtgatctgggacagtcccaagatacactgggttcagtcgaactgcagtataatgagtctttagtttcaggcgagtatatcgatagtgattgcatcggaaatcctgacgaggattgcgagaggtttcgacagctgctggaactgaaatgcaaaatccgcaaccatggggaatatgacttgtactattcttccagcacgattgaatgtaatcagggcgaacaggagggcgttgaacatgaactgcagctgttgaatgaggaactcagaaatatcgagttggagtgtcagaacatcatgcaggcacaccggctgcagaaagtgactgaccagtacggagatatatggacactccatgatggcggcttccgcaattacaatacttccatcgacatgcagcgtggtaagcttgatgatatcatggaacatccggaaaagtctgataaggacagctccagtgcttacaatactgctgaaagctgccggagtacgccgctcactgtggaccggagtcctgattcttcgctgccacgcgtgattaacttgacgaacaagaaaaatcttaggtccaccatggccgctacacaaagctccagtggccagagttctaaggagtcaactagcactaaagcaaagacaacagaacaagggtgcagcgccgagagcaaagagaaagtgttggaaggttccaaactccctgaccaggagaaagcagttagcgagcatattccatacctgagcccctaccatagcagttcctaccgctacgcaaacattcctgcccacgctagacattatcagagctatatgcagctgatccagcagaaaagcgcagtggagtatgcccaaagccagctgtctctggtgagtatgtgcaaggaatcccagaaatgctctgaacctaaaatggagtggaaagtcaaaatccgcagtgatggaacacgctatattacaaagcgacccgtgagggacagaattcttaaggagagagcactgaaaatcaaagaagaacgatccggcatgaccaccgacgacgacaccatgagcgaaatgaagatgggaaggtattggagcaaggaggagagaaaacagcatcttgtgcgggcgaaagaacagaggcgacgcagagagtttatgatgagaagccggcttgagtgtctgaaagagagcccccaaagcggatccgagggcaaaaaggagatcaacatcatcgagctgtcgcacaagaaaatgatgaagaaacgaaacaaaaagattctggataattggatgacaattcaggagttgatgactcatggtgcaaagtctcccgacggtacccgtgtccacaacgccttcctgagtgtgaccactgtgtag

SEQ ID NO: 175930 - DNA, 2331 bp, Artificial Sequence
  derived and/or modified sequence
atgtctgggaagaggcagttcttcctgaagcccctggccctgctgacctgctggcccagcacagtgaatggcaaggacctgagcaaggccacccatgaggaggccgtggaggccttcagaaatgccaaggagcccatcgtggtgcaggtgctgcggaggacccccctgagcaggcctgcctacggcatggccagcgaggtgcagctgatgaatgccagcacccagacagacatcacctttgagcacatcatggccctggccaagctgcggccccccaccccacctgtgcctgacatctgccccttcctgctgagtgacagctgccacagcctgcaccccatggagcacgagttctatgaggacaatgagtacatcagcagcctgcctgcagatgctgacagaacagaggactttgaatatgaggaggtggagctgtgccgggtgagcagccaggagaagctgggcctgactgtgtgctacagaacagatgatgaggaggacaccggcatctacgtgtctgaggtggaccccaacagcattgctgccaaggatggccgcatccgggagggggaccgcatcctgcagatcaatggagaagatgtgcagaaccgggaggaggccgtggccctgctgagcaatgatgagtgcaagagaattgtgctgctggtggcccggcctgagatccagctggatgagggctggctggaggatgaaagaaatgagttcctggaggagctgaacctggagatgctggaggaggagcacaatgaggccatgcagcccacagccaatgaggtggagcagcccaagaagcaggaggaggaggagggcaccacagacacagccaccagcagcagcaacaaccacgagaaggacagcggcgtgggccgcacagatgagagcctgagaaatgatgagagcagcgagcaggagaatgctgctgaggaccccaacagcaccagcctgaagagcaagagggacctgggccagagccaggacaccctgggctctgtggagctgcagtacaatgaaagcctggtgtctggagagtacatcgacagcgactgcatcggcaacccagatgaggactgtgagcgcttccggcagctgctggagctgaagtgcaagatccggaaccacggggagtatgacctgtactacagcagcagcaccatcgagtgcaaccagggcgagcaggagggcgtggagcacgagctgcagctgctgaatgaggagctgaggaacatcgagctggagtgccagaacatcatgcaggcccaccggctgcagaaggtgacagaccagtacggggacatctggaccctgcatgatggcggcttcaggaactacaacaccagcattgacatgcagaggggcaagctggatgacatcatggagcaccctgagaagagtgacaaggacagcagcagcgcctacaacacagctgagagctgccgcagcacccccctgactgtggacaggagcccagacagcagcctgcccagggtcatcaacctgaccaacaagaagaacctgcggagcaccatggccgccacccagagcagcagcggccagagcagcaaggagagcaccagcaccaaggccaagaccacagagcagggctgcagcgctgagagcaaggagaaggtgctggagggcagcaagctgcctgaccaggagaaggctgtgtctgagcacatcccctacctgagcccctaccacagcagcagctaccgctatgccaacatcccagcccacgcccggcactaccagagctacatgcagctgatccagcagaagtctgctgtggagtatgcccagagccagctgagcctggtgtccatgtgcaaggagagccagaagtgcagcgagcccaagatggagtggaaggtgaagatccgcagtgatggcacccgctacatcaccaagaggcctgtgcgggaccgcatcctgaaggagcgggccctgaagatcaaggaggagaggagcggcatgaccacagatgatgacaccatgtctgagatgaagatgggccgctactggagcaaggaggagaggaagcagcacctggtgcgggccaaggagcagaggagaagaagagagttcatgatgaggagccggctggagtgcctgaaggagagcccccagagcggcagcgagggcaagaaggagatcaacatcatcgagctgagccacaagaagatgatgaagaagaggaacaagaagatcctggacaactggatgaccatccaggagctgatgacccacggggccaagagcccagatggcaccagggtgcacaatgccttcctgtctgtgaccaccgtgtag

SEQ ID NO: 175931 - DNA, 2337 bp, Artificial Sequence
  derived and/or modified sequence
atgggctgcaacctgtgcaccttccagaagcgggaggagcactacaagctgctgtatgaggtgtcccaggtgaatggcaaggacctgagcaaggccacccatgaggaggccgtggaggccttcagaaatgccaaggagcccatcgtggtgcaggtgctgcggaggacccccctgagcaggcctgcctacggcatggccagcgaggtgcagctgatgaatgccagcacccagacagacatcacctttgagcacatcatggccctggccaagctgcggccccccaccccacctgtgcctgacatctgccccttcctgctgagtgacagctgccacagcctgcaccccatggagcacgagttctatgaggacaatgagtacatcagcagcctgcctgcagatgctgacagaacagaggactttgaatatgaggaggtggagctgtgccgggtgagcagccaggagaagctgggcctgactgtgtgctacagaacagatgatgaggaggacaccggcatctacgtgtctgaggtggaccccaacagcattgctgccaaggatggccgcatccgggagggggaccgcatcctgcagatcaatggagaagatgtgcagaaccgggaggaggccgtggccctgctgagcaatgatgagtgcaagagaattgtgctgctggtggcccggcctgagatccagctggatgagggctggctggaggatgaaagaaatgagttcctggaggagctgaacctggagatgctggaggaggagcacaatgaggccatgcagcccacagccaatgaggtggagcagcccaagaagcaggaggaggaggagggcaccacagacacagccaccagcagcagcaacaaccacgagaaggacagcggcgtgggccgcacagatgagagcctgagaaatgatgagagcagcgagcaggagaatgctgctgaggaccccaacagcaccagcctgaagagcaagagggacctgggccagagccaggacaccctgggctctgtggagctgcagtacaatgaaagcctggtgtctggagagtacatcgacagcgactgcatcggcaacccagatgaggactgtgagcgcttccggcagctgctggagctgaagtgcaagatccggaaccacggggagtatgacctgtactacagcagcagcaccatcgagtgcaaccagggcgagcaggagggcgtggagcacgagctgcagctgctgaatgaggagctgaggaacatcgagctggagtgccagaacatcatgcaggcccaccggctgcagaaggtgacagaccagtacggggacatctggaccctgcatgatggcggcttcaggaactacaacaccagcattgacatgcagaggggcaagctggatgacatcatggagcaccctgagaagagtgacaaggacagcagcagcgcctacaacacagctgagagctgccgcagcacccccctgactgtggacaggagcccagacagcagcctgcccagggtcatcaacctgaccaacaagaagaacctgcggagcaccatggccgccacccagagcagcagcggccagagcagcaaggagagcaccagcaccaaggccaagaccacagagcagggctgcagcgctgagagcaaggagaaggtgctggagggcagcaagctgcctgaccaggagaaggctgtgtctgagcacatcccctacctgagcccctaccacagcagcagctaccgctatgccaacatcccagcccacgcccggcactaccagagctacatgcagctgatccagcagaagtctgctgtggagtatgcccagagccagctgagcctggtgtccatgtgcaaggagagccagaagtgcagcgagcccaagatggagtggaaggtgaagatccgcagtgatggcacccgctacatcaccaagaggcctgtgcgggaccgcatcctgaaggagcgggccctgaagatcaaggaggagaggagcggcatgaccacagatgatgacaccatgtctgagatgaagatgggccgctactggagcaaggaggagaggaagcagcacctggtgcgggccaaggagcagaggagaagaagagagttcatgatgaggagccggctggagtgcctgaaggagagcccccagagcggcagcgagggcaagaaggagatcaacatcatcgagctgagccacaagaagatgatgaagaagaggaacaagaagatcctggacaactggatgaccatccaggagctgatgacccacggggccaagagcccagatggcaccagggtgcacaatgccttcctgtctgtgaccaccgtgtag

SEQ ID NO: 175932 - DNA, 2331 bp, Artificial Sequence
  derived and/or modified sequence
atgagcggcaagcggcagttcttcctgaagcccctggccctgctgacctgttggccaagtaccgtcaacggaaaagacctgtccaaagcgacccatgaagaagctgttgaggcctttcgaaatgccaaagagcccatcgttgtacaagttttgcgacgaacgcctctgtctcgacctgcatacggcatggcaagcgaggtgcaactcatgaatgctagcacccaaaccgatatcacattcgaacatataatggcccttgctaagctccggccgccgacaccccccgttccagacatatgcccgtttctgctgagcgactcttgccacagtttgcacccgatggaacacgaattctatgaagataacgaatatatctcctcactgcccgctgatgctgaccggaccgaggattttgagtacgaagaagtggaactgtgcagggtgagtagtcaggaaaaactgggcctgaccgtctgctatcggactgatgacgaggaggacacaggtatctatgtttccgaagtcgaccccaactccatagcagccaaagatgggcggatacgggagggcgacaggatcctccagattaacggagaggatgtgcagaatagagaagaggcagtggctcttctgagcaacgatgagtgcaagagaatcgtgctactcgtggcacggccggagatccaactggatgagggatggttggaggacgaacggaacgagttcctggaggagctgaatctggagatgctggaggaagaacataatgaagcgatgcagccaactgccaacgaggtggaacagcccaagaaacaggaggaagaggagggcaccaccgatacggccacatcttcaagtaataatcatgagaaggacagcggggtgggccggactgatgaatcactgcggaatgacgaaagcagcgagcaagagaatgccgctgaggacccaaattctacatccctcaaatctaagagggacttggggcagagccaggataccctgggatctgtggagttgcagtacaatgagtccctggtcagcggggagtatatagacagcgattgtattggtaatcccgatgaggactgcgagaggtttagacaactcctggagctcaagtgcaagattaggaatcatggagaatacgacctctattacagctcttccaccattgaatgtaaccagggcgaacaggagggggtggagcatgagctgcaattgctgaatgaagaattacgcaatattgagctggagtgtcaaaatatcatgcaggcccaccggctgcagaaggtcaccgatcagtacggagacatatggacacttcacgacggcggcttcagaaattacaacacatcaattgacatgcagcggggcaagttggacgatattatggagcaccctgaaaaaagtgacaaggattcctcatccgcatataatacagcggagagttgccgctctaccccactgacagtggatcgctctcctgatagttcactgccaagggtgattaacctcaccaacaaaaaaaatctgagaagcacgatggccgcgacacaatcttcaagcggccagtcaagcaaggagtcaacatcaacaaaggcgaagactaccgagcaaggatgtagcgctgaatctaaagagaaagtcctggaaggaagcaaactacccgaccaggagaaggccgtatccgagcacataccctacctgtctccctatcattccagctcttatagatatgccaatatccccgctcacgctcggcactaccagtcttatatgcagctcatccagcagaaatctgctgtcgaatacgcccagagccagctgtcccttgtgagtatgtgcaaagaaagccagaagtgttcagaaccaaagatggaatggaaagtcaagatccgaagcgacggcaccaggtacatcaccaaacggcctgtgcgggacagaattctgaaagagagggccctcaagatcaaggaagagcgctccgggatgacaacagatgatgataccatgtccgaaatgaagatgggcaggtactggagcaaagaagagaggaagcagcatcttgtgagagccaaggaacaaagaaggcggcgcgaattcatgatgcgttcgagacttgagtgtcttaaggaatccccccaatctggatctgagggcaaaaaagaaatcaacatcatcgaactgtcacataaaaagatgatgaaaaagcgaaataagaagattctggacaactggatgacaatccaggaactgatgacccatggcgcgaaatctcccgacggcacgagagtacacaatgcattcctatcagtcacaacagtgtag

SEQ ID NO: 175933 - DNA, 2337 bp, Artificial Sequence
  derived and/or modified sequence
atgggctgcaacctgtgcaccttccagaagcgggaggagcactacaaactgttgtatgaagtgtcccaggtgaacggaaaagatttatccaaagctacccacgaggaggcagtggaagcatttagaaacgctaaggagccaatcgtggtccaggtgctgcgacgcactcctctatcccggccagcctacgggatggcctctgaggtgcagttaatgaacgcaagcacccaaaccgacattacatttgagcatattatggccttggccaaacttagacctcccaccccccccgttcctgatatatgccctttcctgctcagcgactcttgccacagcctacacccaatggaacatgagttctacgaagacaacgaatacattagtagtctgccagcagacgccgatcgtactgaagattttgagtatgaagaggtcgagctttgtagagttagttctcaagagaagctcggattgacagtgtgttataggaccgacgatgaagaggacacaggcatatacgtttctgaagtcgatcctaatagcattgctgcaaaggacggccgcatccgcgagggggaccgaattctgcagatcaacggtgaagatgttcagaacagagaagaggcagttgcactactgtcaaacgacgagtgcaagaggatagtgctactagttgcacggcccgaaatccagcttgacgagggatggctggaggacgaacgcaatgaattccttgaagaactgaacttggagatgctggaggaggaacacaatgaggcgatgcagcctactgcaaatgaagtcgagcagcctaagaaacaggaagaagaagaaggaactacagacactgccacaagctcttccaataatcacgaaaaggactcgggcgtgggcagaacagatgagagtctgcggaatgatgaatctagcgagcaggagaacgcagccgaagaccctaactctacatcactgaaaagcaagcgtgacctgggtcagagtcaggacacattagggtccgtggaactgcagtataacgagtccttagtcagcggagaatatatcgattcggactgtataggaaatcccgatgaggattgtgagcggttcaggcagctgctggagttgaagtgcaaaattagaaaccatggcgaatatgacctgtattactcctccagcaccattgagtgtaatcaaggggaacaagagggagttgagcacgaacttcagttgttgaatgaggagcttaggaatatcgagctggaatgtcagaacatcatgcaggctcacagattacagaaggtgacggatcagtacggtgatatttggactctacacgacgggggcttcaggaattacaatacgtctatcgatatgcaacgcggaaagttagacgatatcatggaacatcccgagaaaagtgacaaagatagcagcagcgcctataacaccgccgaatcatgtcgctctacaccactgaccgtcgatcggtctccagatagctccctcccacgcgtcatcaacctgactaacaagaaaaatctgaggtccacaatggcagctacccaaagcagcagcggtcagtcctctaaggaaagcacttctactaaggctaagaccactgagcagggttgcagcgcggagtcgaaagagaaggtactggaggggagtaaattgccagaccaagaaaaggctgttagtgaacatatcccatatttatcgccttaccactccagctcatatcgatatgcaaatattccagcccatgcgagacattaccaaagctatatgcagctcatccagcagaagagcgccgtggaatacgctcagtctcaattaagtttagtctcgatgtgcaaagaatcccaaaagtgttccgagcctaagatggagtggaaggtgaagataagatccgacggaactcggtacattactaaacgacctgtgcgggaccgcatcctcaaggagcgagccctcaaaatcaaagaagaacggagcggcatgacaacagatgatgatactatgagtgaaatgaagatgggaaggtattggagcaaagaggaacgtaaacaacacctggtcagagccaaggaacagagaaggcgcagagagtttatgatgaggtcaagactggagtgtctgaaggagagtcctcagagtggttctgagggaaagaaagagatcaacatcatcgagctcagtcacaaaaaaatgatgaagaagaggaacaaaaagatccttgataattggatgaccatccaggaattgatgacacatggggctaagagccccgatggcacacgtgtgcataacgcttttcttagtgtgacaaccgtgtag

SEQ ID NO: 175934 - DNA, 3411 bp, Artificial Sequence
  derived and/or modified sequence
aagatacttagggaaagcgaagaagagcatgctgctacacaccactctggcttacgcttccagctaacagcggtttgtctgtgtttctggactgaagtgactgatgaaaaacagtagtcaagtctggagggtgattccctttcagttcacttgcctttcagttctggggaaattagaagatttgctctctctctctgcttcttagaatgggctgcaatttgtgcacttttcagaaaagagaggaacactacaaactgctgtatgaagtttcccaggagctgtgacttgaacaatgctattctgcatgaaattgagaaattgccagtgttcccaacctgatggagagtatgtgtgggatcttagttctgcttcattaagctccttgtgaatgagtggtaagagacaatttttccttaaacctttggcattgttgacatgttggccatccactgtcaatgggaaggatctttcaaaggccactcatgaagaggcagtggaagcttttcgcaatgccaaggagcccattgtggtgcaggtgttaaggcgaacacctcttagtagaccagcctatgggatggcttcagaagtgcagcttatgaatgccagcactcagacggacatcaccttcgaacacatcatggctctggccaagcttcgtccacctacccctccagtgccagacatctgtccattcctgctctcagacagctgccattctctacatccaatggagcatgaattttatgaggacaatgagtatatttccagcttgcctgctgatgcagacagaacagaagactttgaatatgaggaggtcgagttgtgtcgtgttagcagtcaagagaagctgggcctgacagtctgttaccgaacagatgatgaagaagacaccggcatttatgtcagcgaggttgacccaaatagcattgctgccaaagacggccggattcgagaaggggatcggattttgcaaataaatggggaagatgtccagaatcgagaagaagcagtggccttgctgtctaacgatgagtgtaagagaatcgtgctgcttgttgcaaggccagagattcagctggatgaaggctggctggaagatgaaaggaatgaattcttagaggagttaaacttggagatgttggaagaagagcataatgaagcaatgcagcccactgccaatgaggtggagcagccaaaaaagcaagaagaagaagaaggcacaacagacactgcaacatcctcatccaacaaccatgagaaggacagtggagtaggacgtacagatgaaagcttgcgaaatgatgagagctcagagcaggagaatgcagccgaggaccccaatagcacatctttgaagagcaagagagacctggggcagagccaagacactctgggaagtgttgaacttcagtacaatgagagcctcgtatctggtgaatacattgactcagactgcattggcaacccagatgaggactgtgaaagattcaggcagctcttggagctcaaatgcaagattcgaaatcatggagagtatgacctgtattactcaagcagcacaattgaatgcaatcaaggggagcaagagggagtggagcatgagctacagttgcttaatgaagaactgagaaacattgagcttgagtgtcagaatatcatgcaggctcacaggctccagaaagtgacagaccagtatggagacatctggacattgcatgatggaggattccggaattataacaccagcatagatatgcaaaggggaaagctagatgacatcatggagcatccagaaaagtctgacaaggacagttctagtgcttacaacacagctgagagctgcagaagtactccgctcactgtagaccgttcccctgacagttcccttccaagggtgatcaacctcaccaataagaaaaacctgagaagcacaatggcagccacccagtcctcttccggacagagcagtaaagagtcgacctccaccaaagccaaaaccactgagcaaggttgtagcgctgaaagcaaggagaaggttttagaaggcagcaagcttcctgatcaagagaaggcagtcagcgaacacatcccttacctctctccttaccacagctcctcatatagatatgcaaacatcccagcacacgcccggcattatcaaagctacatgcagttaattcaacagaaatctgcagtcgagtatgctcagagtcagctcagcttggtgagcatgtgcaaggagtctcagaagtgttcagagcccaagatggaatggaaggtgaaaattaggagcgacgggacacggtacatcacaaagagacccgtgcgagaccgaatcctgaaggaacgtgccttaaagatcaaggaagagcggagtggcatgaccacagacgatgacaccatgagcgagatgaaaatggggcgctactggagcaaagaggagagaaagcagcacctggttagggccaaagagcagcgccgtcgccgtgagttcatgatgcgaagcaggttagagtgtctcaaggagagccctcagagcggcagtgagggcaagaaggagatcaatatcattgaactgagtcacaaaaagatgatgaaaaagagaaacaagaaaattttggacaactggatgacaatccaagaactgatgacccatggggccaagtctccagatggcacgagagtccataatgccttcttgtcggtgaccactgtatgaccgaatgaatggaatgcatgcgactgattttaggaggatgctaccagtttcggtagagtatgattgcctcgttcaatgtggcgtttttatatatattttgtgactctttatagtttaaattttttgtaagcaaaaaatacctggtaatttttcatttgtttttcatatactggtaccttctttttggctgagatctttcttttacttgtgatatattcatattactcgtttataaaaaatcaaaaacaaaaggaaagaaaacaaaaaaaacttgcacaaaaatactgaggagccaattaatttcctacttcaatgtatctaatgtaagtgaaaatctggatttatttctctagtttacttattttctactttaataataactcaatgccaaaatatttctatgcttgtttcttggcataatacattttaaatcaaacctgttcgtaataaatcatgtgccacatcttgtcttacacataaaagccactgcttttaacatcccattgtacatttaacacataaatggtgttaacatcccattgtacatttaacacataaatggccattgtctttgtctcagtaaagtgtaggtggacaatcttcctgtgatatgtagtgacattggtcatgtagctagataattatggtaattgtgacaattaaagagaaataaattattgattatccttcag

SEQ ID NO: 175935 - DNA, 3041 bp, Artificial Sequence
  derived and/or modified sequence
acgggggagtgttgccatgaactgactggaaactctgtgtgtgtatccgtgagtgcaagatacttagggaaagcgaagaagagcatgctgctacacaccactctggcttacgcttccagctaacagcggtttgtctgtgtttctggactgaagtgactgatgaaaaacagtagtcaagtctggagggtgattccctttcagttcacttgcctttcagttctggggaaattagaagatttgctctctctctctgcttcttagaatgggctgcaatttgtgcacttttcagaaaagagaggaacactacaaactgctgtatgaagtttcccaggtcaatgggaaggatctttcaaaggccactcatgaagaggcagtggaagcttttcgcaatgccaaggagcccattgtggtgcaggtgttaaggcgaacacctcttagtagaccagcctatgggatggcttcagaagtgcagcttatgaatgccagcactcagacggacatcaccttcgaacacatcatggctctggccaagcttcgtccacctacccctccagtgccagacatctgtccattcctgctctcagacagctgccattctctacatccaatggagcatgaattttatgaggacaatgagtatatttccagcttgcctgctgatgcagacagaacagaagactttgaatatgaggaggtcgagttgtgtcgtgttagcagtcaagagaagctgggcctgacagtctgttaccgaacagatgatgaagaagacaccggcatttatgtcagcgaggttgacccaaatagcattgctgccaaagacggccggattcgagaaggggatcggattttgcaaataaatggggaagatgtccagaatcgagaagaagcagtggccttgctgtctaacgatgagtgtaagagaatcgtgctgcttgttgcaaggccagagattcagctggatgaaggctggctggaagatgaaaggaatgaattcttagaggagttaaacttggagatgttggaagaagagcataatgaagcaatgcagcccactgccaatgaggtggagcagccaaaaaagcaagaagaagaagaaggcacaacagacactgcaacatcctcatccaacaaccatgagaaggacagtggagtaggacgtacagatgaaagcttgcgaaatgatgagagctcagagcaggagaatgcagccgaggaccccaatagcacatctttgaagagcaagagagacctggggcagagccaagacactctgggaagtgttgaacttcagtacaatgagagcctcgtatctggtgaatacattgactcagactgcattggcaacccagatgaggactgtgaaagattcaggcagctcttggagctcaaatgcaagattcgaaatcatggagagtatgacctgtattactcaagcagcacaattgaatgcaatcaaggggagcaagagggagtggagcatgagctacagttgcttaatgaagaactgagaaacattgagcttgagtgtcagaatatcatgcaggctcacaggctccagaaagtgacagaccagtatggagacatctggacattgcatgatggaggattccggaattataacaccagcatagatatgcaaaggggaaagctagatgacatcatggagcatccagaaaagtctgacaaggacagttctagtgcttacaacacagctgagagctgcagaagtactccgctcactgtagaccgttcccctgacagttcccttccaagggtgatcaacctcaccaataagaaaaacctgagaagcacaatggcagccacccagtcctcttccggacagagcagtaaagagtcgacctccaccaaagccaaaaccactgagcaaggttgtagcgctgaaagcaaggagaaggttttagaaggcagcaagcttcctgatcaagagaaggcagtcagcgaacacatcccttacctctctccttaccacagctcctcatatagatatgcaaacatcccagcacacgcccggcattatcaaagctacatgcagttaattcaacagaaatctgcagtcgagtatgctcagagtcagctcagcttggtgagcatgtgcaaggagtctcagaagtgttcagagcccaagatggaatggaaggtgaaaattaggagcgacgggacacggtacatcacaaagagacccgtgcgagaccgaatcctgaaggaacgtgccttaaagatcaaggaagagcggagtggcatgaccacagacgatgacaccatgagcgagatgaaaatggggcgctactggagcaaagaggagagaaagcagcacctggttagggccaaagagcagcgccgtcgccgtgagttcatgatgcgaagcaggttagagtgtctcaaggagagccctcagagcggcagtgagggcaagaaggagatcaatatcattgaactgagtcacaaaaagatgatgaaaaagagaaacaagaaaattttggacaactggatgacaatccaagaactgatgacccatggggccaagtctccagatggcacgagagtccataatgccttcttgtcggtgaccactgtatgaccgaatgaatggaatgcatgcgactgattttaggaggatgctaccagtttcggtagagtatgattgcctcgttcaatgtggcgtttttatatatattttgtgactctttatagtttaaattttttgtaagcaaaaaatacctggtaatttttcatttgtttttcatatactggtaccttctttttggctgagatctttcttttacttgtgatatattcatattactcgtttataaaaaatcaaaaacaaaaggaaagaaaacaaaaaaaacttgcacaaaaatactgaggagccaattaatttcctacttcaatgtatctaatgtaagtgaaaatctggatttatttctctagtttacttattttctactttaataataactcaatgccaaaatatttctatgcttgtttcttggcataatacattttaaatcaaacctgtt

SEQ ID NO: 175936 - DNA, 2331 bp, Artificial Sequence
  derived and/or modified sequence
atgtccggaaagagacagttttttctcaagcctctcgctctgctcacttgttggccttccaccgtgaatggcaaagacctgtcgaaggccacacacgaagaggccgtcgaggcattcaggaatgctaaagagccaattgtggtccaggttctccggagaacccccttgtccaggccggcttatggaatggcatctgaagtgcaactcatgaatgcctccacacagacggacattacctttgagcatatcatggcgcttgccaagttacgccctccaactccccctgttcccgatatttgtccatttctgctcagcgatagctgccactcccttcaccctatggaacacgagttctatgaagataatgagtacatttcctctcttccagccgacgcagaccggaccgaggatttcgagtatgaggaagtcgagctctgccgggtgagctctcaggaaaagctcggtcttaccgtttgctaccgaaccgacgatgaagaagacaccgggatatacgttagtgaagtcgaccccaactcaatcgctgccaaagacggtaggatccgggagggagaccgtattctgcaaatcaatggggaagatgtgcagaatagagaggaggctgtcgcactgctgagcaacgacgaatgcaagaggattgtcctgctggtcgctcgcccagaaatccagctggatgaagggtggcttgaggatgagagaaacgaatttctcgaagagctgaatctggagatgctggaggaagagcacaacgaagccatgcagcctaccgcgaacgaagtcgagcagccaaagaagcaggaagaagaggagggcacaaccgatacagcaaccagcagcagtaataaccacgagaaggactccggggtgggccgtactgatgaatcgctgcgtaatgacgaatctagtgagcaggagaatgcggcagaggatcccaatagcaccagcttgaagagcaagcgggacctgggccagtcgcaggacactctggggtctgtggagctgcagtataacgaatctcttgttagcggagagtacatcgactccgattgcattgggaatcctgacgaggattgtgaaagattccgccaactgctggaacttaagtgcaagattcgcaatcacggagagtatgacctgtactactcatccagcacaatagagtgcaatcagggtgaacaggaaggtgttgagcacgagctgcagttgctgaatgaggagttaagaaatatagagctagaatgtcagaacattatgcaggcccataggctccagaaggtgactgatcagtatggagacatatggacattgcacgacgggggtttccgcaattataatacttctatagacatgcagcgtggaaaactggacgacattatggagcaccccgaaaagagtgataaggatagttcaagcgcctataacactgcagaatcttgccgttcaacgccactgaccgtggataggagcccggattcttcgctccctagagttattaatctcaccaataaaaaaaacctgaggtctacaatggctgcgacccagtcctcgtccgggcaatcctccaaggagtcaacaagtaccaaggctaagactacggagcaaggatgcagtgctgaatcgaaggagaaggtgctggagggtagtaaattgcctgaccaggaaaaggccgtgagcgagcacattccctacctgtccccctatcactcatccagttatcgttacgccaacattcctgcccatgcgaggcattaccagtcttacatgcaactaatccaacaaaaatcagctgtggaatacgctcaatcccagctgtccctagttagcatgtgcaaagaaagtcagaaatgcagcgaacccaaaatggagtggaaagtcaaaatccgctccgacggaacccggtacatcaccaagcgacctgttcgtgataggattcttaaggagagggcgcttaaaataaaagaggagaggtccggcatgacaacagacgacgatactatgtctgagatgaagatgggtcgatattggagtaaagaggaaaggaagcagcatctggtcagggccaaggagcagcggcgaagacgtgaattcatgatgagatcaagactggaatgtctaaaagaatcgccccagagcgggagcgaagggaagaaggagattaacattatcgaattgagtcataagaaaatgatgaagaagcgaaataaaaagatcttggataactggatgacaatacaagagctgatgactcatggcgctaagtcccccgacgggactcgagttcacaacgctttcctttcagtgactaccgtgtag

SEQ ID NO: 175937 - DNA, 2337 bp, Artificial Sequence
  derived and/or modified sequence
atgggatgcaatctgtgtacttttcagaaacgcgaggagcactacaagctgctttatgaggtctctcaggtgaatgggaaagatctcagcaaggccacccatgaggaggccgtcgaggcattcaggaacgccaaggaacctatagtggtgcaggtgctgcgccgtacacccctgagtaggcctgcttacgggatggccagcgaggtgcagttgatgaacgcgtcgacccagactgacattaccttcgagcatatcatggctcttgccaaactgaggcctcctactcccccagtgcccgacatttgtccattcctgttatcagatagctgtcactccctccatccgatggaacatgagttctacgaggataatgagtacatttcaagtctacccgcagatgcagaccgaaccgaggacttcgagtacgaagaagtcgaattgtgccgcgtgtcttcacaggagaaactggggctgaccgtgtgctacagaactgacgacgaggaggacacaggaatatacgtgtctgaggtcgacccaaattccattgcggctaaggacggcaggattagggagggtgatcggatactgcagatcaatggagaagatgtgcagaaccgggaggaggccgtcgcactcctgtcaaatgatgaatgtaaaaggatcgtgctactcgtagctcggccagaaatacaactcgacgagggctggctagaagacgaaaggaatgagttcctggaagaactgaacctggaaatgttagaggaggaacacaatgaggcaatgcagccgaccgctaatgaagtggagcagcctaaaaaacaagaggaagaggagggcactactgacacggccacctctagctcaaacaaccatgaaaaagatagcggggtgggcaggaccgacgaaagtcttcggaacgacgaatcctccgaacaggaaaatgccgctgaggaccccaacagcacgtccctcaagagtaaaagggacctcgggcagagccaggatacgctcggatcagtggagctgcaatataatgaaagcctggtgagtggcgagtacatcgacagtgattgtattgggaatcccgacgaggattgtgagagattcaggcagttactagagttgaagtgtaaaatccggaaccatggcgagtacgatctgtattatagcagttcaactatcgagtgcaatcagggtgagcaggaaggcgtggagcacgagcttcagctgctcaacgaggaactgcgcaacatcgaactcgagtgtcagaacatcatgcaggcccacagattgcaaaaagtgaccgatcagtatggtgacatttggactctccacgacggcggattcagaaactacaatacaagcatcgacatgcagcgtgggaagttggacgatattatggagcatccagaaaagtctgataaagactcctcgagtgcttataatactgcggagtcgtgtcgttcgacaccgctaaccgtggatcggagtcccgactctagtctgcccagggtaataaacctcaccaacaaaaaaaatctgcggagcacgatggcagcaacccaaagttccagtggacaatctagtaaagagtctactagtaccaaagcaaaaactacagagcaaggctgctctgccgagagcaaggagaaagtcttagagggcagtaaactgcccgaccaggaaaaagcagtcagcgagcacatcccttacctctccccttaccatagcagctcctaccgctatgctaacatcccagctcacgcccgtcattaccagagctacatgcagttaattcagcaaaagagcgcagtagaatatgcacagtctcagctgtctttggtgtcaatgtgcaaggaatcacagaagtgcagcgaaccaaaaatggaatggaaggtcaaaatcagaagtgacggaactaggtatataaccaagcgacccgttcgggataggatcctgaaggagcgagcacttaaaattaaggaagaaagatccggcatgactactgacgatgataccatgtcagagatgaaaatgggtcgatattggtctaaggaagaaaggaagcagcacctcgtccgagcaaaggagcagcgcagaagacgtgaatttatgatgagatcccgactggagtgcctgaaggagagcccgcagtcaggctccgagggcaagaaagagatcaatattatagagctgagccataaaaaaatgatgaaaaagcgaaataaaaagattctggacaattggatgacgatccaggagttgatgacgcatggggctaagtcccccgacggcacaagggtacacaacgccttcctgagcgttacaacagtatag

SEQ ID NO: 175938 - DNA, 2331 bp, Artificial Sequence
  derived and/or modified sequence
atgagcggcaagagacagttcttcctgaagcccctggccctgctgacctgctggcccagcaccgtgaacggcaaggacctgagcaaggccacccacgaggaggccgtggaggccttcagaaacgccaaggagcccatcgtggtgcaggtgctgagaagaacccccctgagcagacccgcctacggcatggccagcgaggtgcagctgatgaacgccagcacccagaccgacatcaccttcgagcacatcatggccctggccaagctgagaccccccaccccccccgtgcccgacatctgccccttcctgctgagcgacagctgccacagcctgcaccccatggagcacgagttctacgaggacaacgagtacatcagcagcctgcccgccgacgccgacagaaccgaggacttcgagtacgaggaggtggagctgtgcagagtgagcagccaggagaagctgggcctgaccgtgtgctacagaaccgacgacgaggaggacaccggcatctacgtgagcgaggtggaccccaacagcatcgccgccaaggacggcagaatcagagagggcgacagaatcctgcagatcaacggcgaggacgtgcagaacagagaggaggccgtggccctgctgagcaacgacgagtgcaagagaatcgtgctgctggtggccagacccgagatccagctggacgagggctggctggaggacgagagaaacgagttcctggaggagctgaacctggagatgctggaggaggagcacaacgaggccatgcagcccaccgccaacgaggtggagcagcccaagaagcaggaggaggaggagggcaccaccgacaccgccaccagcagcagcaacaaccacgagaaggacagcggcgtgggcagaaccgacgagagcctgagaaacgacgagagcagcgagcaggagaacgccgccgaggaccccaacagcaccagcctgaagagcaagagagacctgggccagagccaggacaccctgggcagcgtggagctgcagtacaacgagagcctggtgagcggcgagtacatcgacagcgactgcatcggcaaccccgacgaggactgcgagagattcagacagctgctggagctgaagtgcaagatcagaaaccacggcgagtacgacctgtactacagcagcagcaccatcgagtgcaaccagggcgagcaggagggcgtggagcacgagctgcagctgctgaacgaggagctgagaaacatcgagctggagtgccagaacatcatgcaggcccacagactgcagaaggtgaccgaccagtacggcgacatctggaccctgcacgacggcggcttcagaaactacaacaccagcatcgacatgcagagaggcaagctggacgacatcatggagcaccccgagaagagcgacaaggacagcagcagcgcctacaacaccgccgagagctgcagaagcacccccctgaccgtggacagaagccccgacagcagcctgcccagagtgatcaacctgaccaacaagaagaacctgagaagcaccatggccgccacccagagcagcagcggccagagcagcaaggagagcaccagcaccaaggccaagaccaccgagcagggctgcagcgccgagagcaaggagaaggtgctggagggcagcaagctgcccgaccaggagaaggccgtgagcgagcacatcccctacctgagcccctaccacagcagcagctacagatacgccaacatccccgcccacgccagacactaccagagctacatgcagctgatccagcagaagagcgccgtggagtacgcccagagccagctgagcctggtgagcatgtgcaaggagagccagaagtgcagcgagcccaagatggagtggaaggtgaagatcagaagcgacggcaccagatacatcaccaagagacccgtgagagacagaatcctgaaggagagagccctgaagatcaaggaggagagaagcggcatgaccaccgacgacgacaccatgagcgagatgaagatgggcagatactggagcaaggaggagagaaagcagcacctggtgagagccaaggagcagagaagaagaagagagttcatgatgagaagcagactggagtgcctgaaggagagcccccagagcggcagcgagggcaagaaggagatcaacatcatcgagctgagccacaagaagatgatgaagaagagaaacaagaagatcctggacaactggatgaccatccaggagctgatgacccacggcgccaagagccccgacggcaccagagtgcacaacgccttcctgagcgtgaccaccgtgtag

SEQ ID NO: 175939 - DNA, 2337 bp, Artificial Sequence
  derived and/or modified sequence
atgggctgcaacctgtgcaccttccagaagagagaggagcactacaagctgctgtacgaggtgagccaggtgaacggcaaggacctgagcaaggccacccacgaggaggccgtggaggccttcagaaacgccaaggagcccatcgtggtgcaggtgctgagaagaacccccctgagcagacccgcctacggcatggccagcgaggtgcagctgatgaacgccagcacccagaccgacatcaccttcgagcacatcatggccctggccaagctgagaccccccaccccccccgtgcccgacatctgccccttcctgctgagcgacagctgccacagcctgcaccccatggagcacgagttctacgaggacaacgagtacatcagcagcctgcccgccgacgccgacagaaccgaggacttcgagtacgaggaggtggagctgtgcagagtgagcagccaggagaagctgggcctgaccgtgtgctacagaaccgacgacgaggaggacaccggcatctacgtgagcgaggtggaccccaacagcatcgccgccaaggacggcagaatcagagagggcgacagaatcctgcagatcaacggcgaggacgtgcagaacagagaggaggccgtggccctgctgagcaacgacgagtgcaagagaatcgtgctgctggtggccagacccgagatccagctggacgagggctggctggaggacgagagaaacgagttcctggaggagctgaacctggagatgctggaggaggagcacaacgaggccatgcagcccaccgccaacgaggtggagcagcccaagaagcaggaggaggaggagggcaccaccgacaccgccaccagcagcagcaacaaccacgagaaggacagcggcgtgggcagaaccgacgagagcctgagaaacgacgagagcagcgagcaggagaacgccgccgaggaccccaacagcaccagcctgaagagcaagagagacctgggccagagccaggacaccctgggcagcgtggagctgcagtacaacgagagcctggtgagcggcgagtacatcgacagcgactgcatcggcaaccccgacgaggactgcgagagattcagacagctgctggagctgaagtgcaagatcagaaaccacggcgagtacgacctgtactacagcagcagcaccatcgagtgcaaccagggcgagcaggagggcgtggagcacgagctgcagctgctgaacgaggagctgagaaacatcgagctggagtgccagaacatcatgcaggcccacagactgcagaaggtgaccgaccagtacggcgacatctggaccctgcacgacggcggcttcagaaactacaacaccagcatcgacatgcagagaggcaagctggacgacatcatggagcaccccgagaagagcgacaaggacagcagcagcgcctacaacaccgccgagagctgcagaagcacccccctgaccgtggacagaagccccgacagcagcctgcccagagtgatcaacctgaccaacaagaagaacctgagaagcaccatggccgccacccagagcagcagcggccagagcagcaaggagagcaccagcaccaaggccaagaccaccgagcagggctgcagcgccgagagcaaggagaaggtgctggagggcagcaagctgcccgaccaggagaaggccgtgagcgagcacatcccctacctgagcccctaccacagcagcagctacagatacgccaacatccccgcccacgccagacactaccagagctacatgcagctgatccagcagaagagcgccgtggagtacgcccagagccagctgagcctggtgagcatgtgcaaggagagccagaagtgcagcgagcccaagatggagtggaaggtgaagatcagaagcgacggcaccagatacatcaccaagagacccgtgagagacagaatcctgaaggagagagccctgaagatcaaggaggagagaagcggcatgaccaccgacgacgacaccatgagcgagatgaagatgggcagatactggagcaaggaggagagaaagcagcacctggtgagagccaaggagcagagaagaagaagagagttcatgatgagaagcagactggagtgcctgaaggagagcccccagagcggcagcgagggcaagaaggagatcaacatcatcgagctgagccacaagaagatgatgaagaagagaaacaagaagatcctggacaactggatgaccatccaggagctgatgacccacggcgccaagagccccgacggcaccagagtgcacaacgccttcctgagcgtgaccaccgtgtag

SEQ ID NO: 175940 - protein, 123 aa, Artificial Sequence
  derived and/or modified sequence
MACRCLSFLLMGTFLSVSQTVLAQLDALLVFPGQVAQLSCTLSPQHVTIRDYGVSWYQQRAGSAPRYLLYYRSEEDHHRPADIPDRFSAAKDEAHNACVLTISPVQPEDDADYYCSVGYGFSP

SEQ ID NO: 175941 - DNA, 372 bp, Artificial Sequence
  derived and/or modified sequence
atggcttgtagatgcctctccttcctccttatggggacattcctgagcgtgagtcagacagtcctggcacaacttgacgccctgttagtgtttcccggacaggtcgcccagctatcctgtaccctgagtccccaacatgtcaccattcgcgattacggggtgagctggtaccagcagcgagccggaagtgcaccgcggtatctgctgtactaccgttcagaagaggaccatcacagaccggctgatattcccgacagattcagcgcagctaaggatgaagcccacaacgcatgtgtgttgaccattagtcccgtccagccagaagacgatgcagattattactgctctgtgggctatgggtttagcccctag

SEQ ID NO: 175942 - DNA, 372 bp, Artificial Sequence
  derived and/or modified sequence
atggcctgccgctgcctgtccttcctgctgatgggcaccttcctgtctgtgtcccagacagtgctggcccagctggatgccctgctggtgtttcctggccaggtggcccagctgagctgcaccctgagcccccagcacgtgaccatccgggactatggagtgtcctggtaccagcagagagctggcagcgccccccgctacctgctgtactacagaagtgaggaggaccaccacaggcctgctgacatcccagaccgcttctctgctgccaaggatgaggcccacaatgcctgtgtgctgaccatcagccctgtgcagccagaagatgatgctgactactactgcagcgtgggctacggcttcagcccctag

SEQ ID NO: 175943 - DNA, 372 bp, Artificial Sequence
  derived and/or modified sequence
atggcctgccggtgcctgagcttcctgctgatgggcaccttcctgagcgtgtcacaaacggtattagcccagctggacgcgctactggttttccccgggcaggtggcccagctgagttgtaccctgtccccccagcatgtgacgatacgggactatggggtgagctggtaccagcaacgggctggtagcgctccaagatatctcctttactaccgctccgaggaagaccaccaccggccagccgacatcccagatcgcttttcagctgctaaggacgaagcccacaacgcttgtgtgctgacaatctctccagtgcagccagaggacgatgccgactactattgctcagtcggttatggatttagtccttag

SEQ ID NO: 175944 - DNA, 610 bp, Artificial Sequence
  derived and/or modified sequence
gcatgctctgttgtggtccagtggccttcccagccctgtgccccaaagcacctggagcatatagccttgcagaacttctacttgcctgcctccctgcctctggccatggcctgccggtgcctcagcttccttctgatggggaccttcctgtcagtttcccagacagtcctggcccagctggatgcactgctggtcttcccaggccaagtggctcaactctcctgcacgctcagcccccagcacgtcaccatcagggactacggtgtgtcctggtaccagcagcgggcaggcagtgcccctcgatatctcctctactaccgctcggaggaggatcaccaccggcctgctgacatccccgatcgattctcggcagccaaggatgaggcccacaatgcctgtgtcctcaccattagtcccgtgcagcctgaagacgacgcggattactactgctctgttggctacggctttagtccctaggggtggggtgtgagatgggtgcctcccctctgcctcccatttctgcccctgaccttgggtcccttttaaactttctctgagccttgcttcccctctgtaaaatgggttaataatattcaacatgtcaacaaca

SEQ ID NO: 175945 - DNA, 372 bp, Artificial Sequence
  derived and/or modified sequence
atggcttgcaggtgtctgtcatttctgctgatgggcacattcttatccgtcagccagactgtattagctcagctggacgctctcctcgtgttccccggacaggtggcccagctttcatgcactctctccccccagcatgtgacaatcagagactacggtgtgagctggtaccagcagcgtgctggcagcgccccacgctatctgctttactataggtccgaggaggatcaccataggccagctgatatacctgatagattcagtgcagccaaagacgaagcccacaatgcctgtgtgctgaccatttcccctgtgcagcccgaggacgacgccgactattattgtagtgtaggctacggattctcgccatag

SEQ ID NO: 175946 - DNA, 372 bp, Artificial Sequence
  derived and/or modified sequence
atggcctgcagatgcctgagcttcctgctgatgggcaccttcctgagcgtgagccagaccgtgctggcccagctggacgccctgctggtgttccccggccaggtggcccagctgagctgcaccctgagcccccagcacgtgaccatcagagactacggcgtgagctggtaccagcagagagccggcagcgcccccagatacctgctgtactacagaagcgaggaggaccaccacagacccgccgacatccccgacagattcagcgccgccaaggacgaggcccacaacgcctgcgtgctgaccatcagccccgtgcagcccgaggacgacgccgactactactgcagcgtgggctacggcttcagcccctag

SEQ ID NO: 175947 - protein, 492 aa, Artificial Sequence [sequence omitted]

SEQ ID NO: 175948 - DNA, 1479 bp, Artificial Sequence
  derived and/or modified sequence
atgggaagtgccccttgggctcccgttctcctgttggcactcgggctccgcggactccaagctggtgcccgacgggctcccgaccccggatttcaagagcggttttttcagcaaagactggaccacttcaattttgagcggttcggaaataagacatttcctcagagatttttggtgtctgacaggttttgggtgcggggtgaaggacctatctttttctataccgggaatgagggcgacgtttgggccttcgcgaacaacagtgctttcgtcgctgaattggccgctgagcggggagcactcctagtgttcgccgaacatagatattacggcaaaagtttgccattcggtgcccaatccacccaacgcggacacaccgagctattaacagtcgaacaagccctggctgatttcgcagagctgcttagggctttaaggagggacctcggcgcacaggatgcacccgcaattgccttcggcggatcgtatggagggatgctgtccgcctacctgcgaatgaaatatcctcacttagtggctggcgcactcgccgcatccgccccagtcctggccgttgccggactaggcgattctaaccaatttttccgcgacgtcacagccgattttgagggtcagagccctaagtgcactcagggcgtaagagaagcatttcgacagattaaggatctcttcctgcagggagcctatgacacagtgcgatgggagtttggaacatgtcagcctctgtcagatgagaaggacctaacacaattattcatgtttgcgagaaacgctttcacagtcctcgcaatgatggactacccttaccccaccgattttctgggcccactccctgctaaccctgtgaaagtggggtgcgatcgcctgctgtcggaagcccagcggatcactggtctgagagcactggccggactggtgtataatgcgagcggttccgagcattgctatgatatttatcggctgtaccatagctgcgctgacccaacggggtgcggcactgggcctgacgcgagggcttgggattaccaggcgtgtacagagattaaccttacttttgccagcaacaacgtaactgatatgtttcctgacttgcctttcactgacgagctgcgccagcggtattgcctcgatacctggggtgtgtggcccaggcccgactggctgctgacatctttttgggggggagacctccgagccgcatcaaatataattttttccaatggtaatcttgatccttgggctggtgggggtatccgccgtaatttgtccgcttcggtaatcgctgtgaccattcagggaggggctcaccacttggatctacgggcaagccatccagaagatcctgcaagcgtcgtggaggctagaaagcttgaagcaaccatcatcggcgaatgggtcaaggcagctcgtagagagcagcaacctgcactgagaggcggtccccgtctgtccttatag

SEQ ID NO: 175949 - DNA, 1479 bp, Artificial Sequence
  derived and/or modified sequence
atgggttccgcaccttgggcccccgtcttgctgttagctctgggactgaggggcctgcaggctggggccagaagagcccccgacccaggattccaggagcgcttcttccagcagagactggaccattttaattttgaacggtttgggaacaaaacctttccacagagatttctcgtgtcggatcgtttttgggtgcggggagaggggcccatcttcttctacacaggaaatgaaggagacgtgtgggctttcgctaataattctgccttcgtcgcagaactcgcagcagaaagaggcgcgctgctcgttttcgccgaacatcgatattacggcaaatcattaccattcggtgctcaatctacccagcgcggccacactgagctcctgacggtagagcaggccctggccgactttgccgaactgcttcgcgcgcttaggagagacctgggggcccaggatgctcctgcgattgcattcggcgggtcatacggaggtatgctgagcgcttatttaagaatgaaatacccacatcttgtcgcgggagccctcgctgcatccgcccccgtcctagcagtcgccgggctgggagattctaatcagttctttcgagacgtaactgcagatttcgagggccagagccccaaatgtacccagggggtacgggaggcttttagacagattaaagaccttttcctccagggggcctatgataccgtgaggtgggaatttgggacgtgccagcccctgagcgatgaaaaagatctgacccagctatttatgttcgctcggaatgcctttacagttctcgcgatgatggactatccataccctaccgactttctgggacctctgcccgctaaccccgttaaggtcggttgcgatagattgttgtcagaggcgcaaagaatcacaggactgagggccttagccggcctggtgtataatgccagtggcagtgagcattgttatgacatttaccgcttataccattcatgtgctgacccgactggatgtggtactgggccagacgcgagggcctgggactatcaagcgtgcacagagatcaacctgacctttgcatccaacaacgtaacagacatgttccctgacctgcccttcacagatgagcttcgtcaacggtactgcctggacacatggggggtttggccgagacctgactggctattgacttccttttggggcggggaccttcgcgccgcatcaaacatcatcttctccaacgggaacctagacccgtgggctggcgggggaataagaaggaatctttccgcctccgtcatagctgttaccatccaaggcggcgcccaccacctcgatctgcgggcctcccatcccgaagacccggcctccgtggtggaagctcgcaagctggaagcgactataatcggtgaatgggttaaagccgctagaagggagcagcagcccgcgctgcgagggggaccccggttatccctgtag

SEQ ID NO: 175950 - DNA, 1050 bp, Artificial Sequence
  derived and/or modified sequence
gacatgggctccgctccctgggccccggtcctgctgctggcgctcgggctgcgcggcctccaggcggggggtgagtggcggcgccccccggcccattccccggtcccggccccgcctctgaggttcgcgtccccccacagcccgcagggccccggaccccggcttccaggagcgcttcttccagcagcgtctggaccacttcaacttcgagcgcttcggcaacaagaccttccctcagcgcttcctggtgtcggacaggttctgggtccggggcgaggggcccatcttcttctacactgggaacgagggcgacgtgtgggccttcgccaacaactcggccttcgtcgcggagctggcggccgagcggggggctctactggtcttcgcggagcaccgctactacgggaagtcgctgccgttcggtgcgcagtccacgcagcgcgggcacacggagctgctgacggtggagcaggccctggccgacttcgcagagctgctccgcgcgctacgacgcgacctcggggcccaggatgcccccgccatcgccttcggtggaagttatggggggatgctcagtgcctacctgaggatgaagtatccccacctggtggcgggggcgctggcggccagcgcgcccgttctagctgtggcaggcctcggcgactccaaccagttcttccgggacgtcacggcggcagcctacgacacggtccgctgggagttcggcacctgccagccgctgtcagacgagaaggacctgacccagctcttcatgttcgcccggaatgccttcaccgtgctggccatgatggactacccctaccccactgacttcctgggtcccctccctgccaaccccgtcaaggtgggctgtgatcggctgctgagtgaggcccagaggatcacggggctgcgagcactggcagggctggtctacaacgcctcgggctccgagcactgctacgacatctaccggctctaccacagctgtgctgaccccactggctgcggcaccggccccgacgccagggcctgggactaccaggtgtg

SEQ ID NO: 175951 - DNA, 1479 bp, Artificial Sequence
  derived and/or modified sequence
atgggcagcgctccctgggcacctgtattactgttggctctgggcctgcgaggactacaggcaggcgcccgacgggccccagacccaggatttcaagaaaggttctttcagcagcgtctggaccacttcaattttgagagatttgggaacaagactttccctcaacgatttttagtgagcgatagattttgggtcagaggggagggtccaatattcttctacaccggcaatgaaggggatgtttgggctttcgcaaataacagtgccttcgtcgctgagcttgccgcggagcggggtgcgctgctggtgttcgctgagcatagatactatggtaagtcacttccttttggcgcccagtcaacccagaggggacacactgaactactcactgtcgaacaggccctggcggactttgccgagcttttgagggccctaagacgagatttgggagctcaggatgcccccgcaattgctttcggcggatcatatggagggatgctttctgcctatctgcggatgaaatacccgcacttggtggcgggcgcattagcagcatccgcaccagttcttgcggtggccggtttgggcgactccaaccagttcttccgggatgtgactgccgatttcgaaggccagagccctaaatgcactcagggagtcagagaggctttccgccagataaaggacttgttcttgcagggcgcttacgataccgttcgatgggagttcgggacctgtcaacctctgagtgacgagaaagacctgactcaactatttatgtttgcccgtaatgctttcactgtgcttgccatgatggactacccttatcctactgacttccttggacctctgcccgccaatcccgtgaaagttggatgtgaccgcctgctctccgaggcccagcgtattaccggtttgcgcgctttggcaggactggtctacaacgccagtggaagcgagcactgctatgatatttataggctgtaccattcttgcgctgatcctacaggctgtggcacaggacccgatgcaagagcatgggactatcaggcttgcactgaaatcaatttgactttcgccagtaataatgtgaccgacatgtttccagatctgccgtttaccgacgagctccgacagcgatattgtttagatacttggggagtatggccaagacccgactggttgctgacaagtttttggggcggcgatctcagggcggcatcaaacattatcttctcaaacgggaacctagacccatgggctgggggaggaattcgcagaaacctgtcagctagcgtcattgcagtaactattcagggaggtgcacaccatctggatctacgagcctcccaccccgaggaccctgccagtgtcgtggaagcccggaaacttgaagctacaattataggagaatgggtgaaagctgcacgtcgggagcaacagcctgctcttcgcgggggacccagactgagtttatag

SEQ ID NO: 175952 - DNA, 1479 bp, Artificial Sequence
  derived and/or modified sequence
atgggcagcgccccctgggcccccgtgctgctgctggccctgggcctgagaggcctgcaggccggcgccagaagagcccccgaccccggcttccaggagagattcttccagcagagactggaccacttcaacttcgagagattcggcaacaagaccttcccccagagattcctggtgagcgacagattctgggtgagaggcgagggccccatcttcttctacaccggcaacgagggcgacgtgtgggccttcgccaacaacagcgccttcgtggccgagctggccgccgagagaggcgccctgctggtgttcgccgagcacagatactacggcaagagcctgcccttcggcgcccagagcacccagagaggccacaccgagctgctgaccgtggagcaggccctggccgacttcgccgagctgctgagagccctgagaagagacctgggcgcccaggacgcccccgccatcgccttcggcggcagctacggcggcatgctgagcgcctacctgagaatgaagtacccccacctggtggccggcgccctggccgccagcgcccccgtgctggccgtggccggcctgggcgacagcaaccagttcttcagagacgtgaccgccgacttcgagggccagagccccaagtgcacccagggcgtgagagaggccttcagacagatcaaggacctgttcctgcagggcgcctacgacaccgtgagatgggagttcggcacctgccagcccctgagcgacgagaaggacctgacccagctgttcatgttcgccagaaacgccttcaccgtgctggccatgatggactacccctaccccaccgacttcctgggccccctgcccgccaaccccgtgaaggtgggctgcgacagactgctgagcgaggcccagagaatcaccggcctgagagccctggccggcctggtgtacaacgccagcggcagcgagcactgctacgacatctacagactgtaccacagctgcgccgaccccaccggctgcggcaccggccccgacgccagagcctgggactaccaggcctgcaccgagatcaacctgaccttcgccagcaacaacgtgaccgacatgttccccgacctgcccttcaccgacgagctgagacagagatactgcctggacacctggggcgtgtggcccagacccgactggctgctgaccagcttctggggcggcgacctgagagccgccagcaacatcatcttcagcaacggcaacctggacccctgggccggcggcggcatcagaagaaacctgagcgccagcgtgatcgccgtgaccatccagggcggcgcccaccacctggacctgagagccagccaccccgaggaccccgccagcgtggtggaggccagaaagctggaggccaccatcatcggcgagtgggtgaaggccgccagaagagagcagcagcccgccctgagaggcggccccagactgagcctgtag

SEQ ID NO: 175953 - DNA, 1479 bp, Artificial Sequence
  derived and/or modified sequence
atgggatccgcaccttgggcccccgtccttctgttagctctgggcctgcggggcttgcaagctggcgcccgcagggctcctgacccaggttttcaggaaagattttttcagcaaagactggatcacttcaatttcgaacggtttggcaacaagacatttccccagaggtttctggtttccgacagattctgggtccgcggcgaggggccaattttcttttacacaggaaacgaaggcgacgtttgggccttcgctaataactctgcatttgtagccgagctggccgccgagagaggtgcactcctggtcttcgctgaacatagatactatggcaagtcactgcctttcggggcccagtctacccagagggggcacacagaactgctgactgttgaacaggctctggctgatttcgccgaacttctccgcgcgctgcggagagacttgggggctcaggacgcaccggcaatagcatttggcggatcttatgggggtatgttaagcgcctacctgaggatgaaatacccgcatctagtcgccggggccctggcagcctccgcacctgtgctcgccgtcgccggactaggcgacagtaaccagttctttcgtgatgttactgccgatttcgaaggccagtcaccgaagtgtactcagggcgttagagaagctttcagacagattaaggaccttttcctacagggcgcttatgacaccgtccgctgggaattcggaacatgtcaaccactgagtgacgagaaagacctgacccagttgtttatgtttgctcgtaacgcttttaccgttctcgctatgatggattacccataccccacagatttccttggacctctccctgctaatcctgtcaaggttggatgcgatcgccttctgtctgaggcacagcgaataactggattgcgtgctctggcgggcctggtgtataacgcatcaggctccgaacattgttatgacatataccggctataccacagctgtgcagatcctacagggtgcgggaccggcccagatgcacgggcgtgggattaccaagcctgtaccgaaattaacctgactttcgccagcaacaatgtgactgacatgtttccagacctcccctttactgatgaactgagacagcgctactgcctcgacacctggggcgtgtggccccgcccagattggctcctgacatccttttggggaggagacctgagggcagcctctaatattattttctctaatggaaatctggacccctgggcagggggaggcatacgcagaaacttatctgcaagcgtgattgctgtgacaatccagggcggggcccaccacctggaccttcgggcatcacacccggaagacccggcatcggtggtcgaggctaggaaattggaagccacaatcattggtgagtgggtcaaagctgcccgccgcgaacagcagcccgcactaaggggcggcccgaggctgtcactgtag

SEQ ID NO: 175954 - DNA, 1479 bp, Artificial Sequence
  derived and/or modified sequence
atgggcagcgccccctgggcccctgtgctgctgctggccctgggcctgcggggcctgcaggccggggcccggcgggccccagaccccggcttccaggagcgcttcttccagcagaggctggaccacttcaactttgagcgcttcggcaacaagaccttcccccagcgcttcctggtgtctgaccgcttctgggtgcggggggagggccccatcttcttctacacaggaaatgaaggagatgtgtgggcctttgccaacaacagcgcctttgtggccgagctggccgctgagcggggggccctgctggtgtttgctgagcaccgctactacggcaagagcctgccctttggagcccagagcacccagaggggccacacagagctgctgactgtggagcaggccctggccgactttgctgagctgctgcgggccctgcggcgggacctgggcgcccaggatgccccagccatcgcctttggaggcagctatggaggcatgctgagcgcctacctgaggatgaagtacccccacctggtggccggggccctggccgccagcgcccctgtgctggccgtggccggcctgggggacagcaaccagttcttcagagatgtgacagctgactttgagggccagagccccaagtgcacccagggcgtgcgggaggccttccggcagatcaaggacctcttcctgcagggcgcctatgacacagtgcgctgggagtttggcacctgccagcccctgagtgatgagaaggacctgacccagctgttcatgtttgccagaaatgccttcaccgtgctggccatgatggactacccctaccccacagacttcctgggccccctgcctgccaaccctgtgaaggtgggctgtgaccggctgctgtctgaggcccagaggatcaccggcctgcgggccctggccggcctggtgtacaatgccagcggcagcgagcactgctatgacatctaccgcctgtaccacagctgtgccgaccccaccggctgcggcaccggcccagatgcccgggcctgggactaccaggcctgcacagagatcaacctgacctttgccagcaacaacgtgacagacatgtttcctgacctgcccttcacagatgagctgcggcagcgctactgcctggacacctggggcgtgtggcccaggccagactggctgctgaccagcttctggggcggggacctgcgggccgccagcaacatcatcttcagcaatggaaacctggacccctgggccggcggcggcatcagaagaaacctgagcgcctctgtgattgctgtgaccatccagggcggggcccaccacctggacctgcgggccagccacccagaagatcctgcctctgtggtggaggccaggaagctggaggccaccatcattggagagtgggtgaaggccgcccggcgggagcagcagcctgccctgcggggcggcccccggctgagcctgtag

SEQ ID NO: 175955 - DNA, 1590 bp, Artificial Sequence
  derived and/or modified sequence
gcgacatgggctccgctccctgggccccggtcctgctgctggcgctcgggctgcgcggcctccaggcgggggcccgcagggccccggaccccggcttccaggagcgcttcttccagcagcgtctggaccacttcaacttcgagcgcttcggcaacaagaccttccctcagcgcttcctggtgtcggacaggttctgggtccggggcgaggggcccatcttcttctacactgggaacgagggcgacgtgtgggccttcgccaacaactcggccttcgtcgcggagctggcggccgagcggggggctctactggtcttcgcggagcaccgctactacgggaagtcgctgccgttcggtgcgcagtccacgcagcgcgggcacacggagctgctgacggtggagcaggccctggccgacttcgcagagctgctccgcgcgctacgacgcgacctcggggcccaggatgcccccgccatcgccttcggtggaagttatggggggatgctcagtgcctacctgaggatgaagtatccccacctggtggcgggggcgctggcggccagcgcgcccgttctagctgtggcaggcctcggcgactccaaccagttcttccgggacgtcacggcggactttgagggccagagtcccaaatgcacccagggtgtgcgggaagcgttccgacagatcaaggacttgttcctacagggagcctacgacacggtccgctgggagttcggcacctgccagccgctgtcagacgagaaggacctgacccagctcttcatgttcgcccggaatgccttcaccgtgctggccatgatggactacccctaccccactgacttcctgggtcccctccctgccaaccccgtcaaggtgggctgtgatcggctgctgagtgaggcccagaggatcacggggctgcgagcactggcagggctggtctacaacgcctcgggctccgagcactgctacgacatctaccggctctaccacagctgtgctgaccccactggctgcggcaccggccccgacgccagggcctgggactaccaggcctgcaccgagatcaacctgaccttcgccagcaacaatgtgaccgatatgttcccggacctgcccttcactgacgagctccgccagcggtactgcctggacacctggggcgtgtggccccggcccgactggctgctgaccagcttctgggggggtgatctcagagccgccagcaacatcatcttctccaacgggaacctggacccctgggcagggggcgggattcggaggaacctgagtgcctcagtcatcgccgtcaccatccaggggggagcgcaccacctcgacctcagagcctcccacccagaagatcctgcttccgtggttgaggcgcggaagctggaggccaccatcatcggcgagtgggtaaaggcagccaggcgtgagcagcagccagctctgcgtggggggcccagactcagcctctgagcacaggactggaggggtctcaaggctcctcatggagtgggggcttcactcaagcagctggcggcagagggaaggggctgaataaacgcctggaggcctggccatg

SEQ ID NO: 175956 - DNA, 1479 bp, Artificial Sequence
  derived and/or modified sequence
atgggcagcgccccctgggcccccgtgctgctgctggccctgggcctgcgggggttacaggctggagctcggcgggcacctgatcccggattccaggagcgatttttccagcaacgacttgaccatttcaactttgagaggtttgggaataaaactttccctcaaaggttcctggtcagcgatcgattttgggttagaggagaaggccctattttcttttatacaggaaatgagggcgatgtgtgggccttcgcaaataacagtgccttcgtggccgaattggcggctgagcgcggtgccctgctggtcttcgcagagcaccgctattacggaaagtccctgccatttggtgctcagagcacccagagaggccatactgagctgctcacagtggagcaggcgttagcagactttgccgaacttctccgagcgctgcgcagggaccttggcgcccaggatgcccccgcaatcgcgtttggcgggagctatggcgggatgctctccgcctatttgcgtatgaaatacccgcaccttgtggcaggcgccctagccgcctccgcacccgtgctcgccgtggccgggctaggcgatagtaatcagttttttcgagatgttaccgctgacttcgagggtcagtcccctaaatgtacacaaggtgtgagggaggctttcagacagattaaggatctgttcctgcagggcgcatacgataccgtgcgctgggagttcggtacttgccaaccccttagtgatgagaaggatctgactcagctgtttatgtttgcaaggaacgcctttaccgtgctggcaatgatggactatccttatccgacggatttcctgggacctctcccagcaaatcctgttaaagtaggctgcgatagactgctgagcgaggctcagcgcataaccggcctgcgtgccctcgctggcctggtctataacgcctccggttccgaacactgctatgacatctatcggctataccattcctgtgccgacccaacaggctgcgggactggccccgatgctcgagcttgggattatcaggcctgcaccgagatcaatctgacttttgcttcaaacaacgtgacagacatgtttccagatctgccctttaccgacgagctcagacagcgttattgtcttgatacctggggcgtttggccacgtcccgattggctgctaacatcattctggggcggcgatttgcgggcagcctcgaacattattttctccaacggtaacctggacccttgggctggcggtggcatcagacggaatctgtctgcaagcgtgattgctgttacaatacaggggggcgcacaccacttagatctgagggcatcccacccagaggatccagcaagtgtggtagaggctcggaagctggaggcgactatcataggggagtgggtgaaggccgctcgcagggagcaacagcccgccttgaggggaggtcctaggctgtcattgtag

SEQ ID NO: 175957 - RNA, 1479 nt, Artificial Sequence
  derived and/or modified sequence
auggguuccgcaccuugggcccccgucuugcuguuagcucugggacugaggggccugcaggcuggggccagaagagcccccgacccaggauuccaggagcgcuucuuccagcagagacuggaccauuuuaauuuugaacgguuugggaacaaaaccuuuccacagagauuucucgugucggaucguuuuugggugcggggagaggggcccaucuucuucuacacaggaaaugaaggagacgugugggcuuucgcuaauaauucugccuucgucgcagaacucgcagcagaaagaggcgcgcugcucguuuucgccgaacaucgauauuacggcaaaucauuaccauucggugcucaaucuacccagcgcggccacacugagcuccugacgguagagcaggcccuggccgacuuugccgaacugcuucgcgcgcuuaggagagaccugggggcccaggaugcuccugcgauugcauucggcgggucauacggagguaugcugagcgcuuauuuaagaaugaaauacccacaucuugucgcgggagcccucgcugcauccgcccccguccuagcagucgccgggcugggagauucuaaucaguucuuucgagacguaacugcagauuucgagggccagagccccaaauguacccaggggguacgggaggcuuuuagacagauuaaagaccuuuuccuccagggggccuaugauaccgugaggugggaauuugggacgugccagccccugagcgaugaaaaagaucugacccagcuauuuauguucgcucggaaugccuuuacaguucucgcgaugauggacuauccauacccuaccgacuuucugggaccucugcccgcuaaccccguuaaggucgguugcgauagauuguugucagaggcgcaaagaaucacaggacugagggccuuagccggccugguguauaaugccaguggcagugagcauuguuaugacauuuaccgcuuauaccauucaugugcugacccgacuggaugugguacugggccagacgcgagggccugggacuaucaagcgugcacagagaucaaccugaccuuugcauccaacaacguaacagacauguucccugaccugcccuucacagaugagcuucgucaacgguacugccuggacacaugggggguuuggccgagaccugacuggcuauugacuuccuuuuggggcggggaccuucgcgccgcaucaaacaucaucuucuccaacgggaaccuagacccgugggcuggcgggggaauaagaaggaaucuuuccgccuccgucauagcuguuaccauccaaggcggcgcccaccaccucgaucugcgggccucccaucccgaagacccggccuccgugguggaagcucgcaagcuggaagcgacuauaaucggugaauggguuaaagccgcuagaagggagcagcagcccgcgcugcgagggggaccccgguuaucccuguag

SEQ ID NO: 175958 - RNA, 1479 nt, Artificial Sequence
  derived and/or modified sequence
augggcagcgcucccugggcaccuguauuacuguuggcucugggccugcgaggacuacaggcaggcgcccgacgggccccagacccaggauuucaagaaagguucuuucagcagcgucuggaccacuucaauuuugagagauuugggaacaagacuuucccucaacgauuuuuagugagcgauagauuuugggucagaggggaggguccaauauucuucuacaccggcaaugaaggggauguuugggcuuucgcaaauaacagugccuucgucgcugagcuugccgcggagcggggugcgcugcugguguucgcugagcauagauacuaugguaagucacuuccuuuuggcgcccagucaacccagaggggacacacugaacuacucacugucgaacaggcccuggcggacuuugccgagcuuuugagggcccuaagacgagauuugggagcucaggaugcccccgcaauugcuuucggcggaucauauggagggaugcuuucugccuaucugcggaugaaauacccgcacuugguggcgggcgcauuagcagcauccgcaccaguucuugcgguggccgguuugggcgacuccaaccaguucuuccgggaugugacugccgauuucgaaggccagagcccuaaaugcacucagggagucagagaggcuuuccgccagauaaaggacuuguucuugcagggcgcuuacgauaccguucgaugggaguucgggaccugucaaccucugagugacgagaaagaccugacucaacuauuuauguuugcccguaaugcuuucacugugcuugccaugauggacuacccuuauccuacugacuuccuuggaccucugcccgccaaucccgugaaaguuggaugugaccgccugcucuccgaggcccagcguauuaccgguuugcgcgcuuuggcaggacuggucuacaacgccaguggaagcgagcacugcuaugauauuuauaggcuguaccauucuugcgcugauccuacaggcuguggcacaggacccgaugcaagagcaugggacuaucaggcuugcacugaaaucaauuugacuuucgccaguaauaaugugaccgacauguuuccagaucugccguuuaccgacgagcuccgacagcgauauuguuuagauacuuggggaguauggccaagacccgacugguugcugacaaguuuuuggggcggcgaucucagggcggcaucaaacauuaucuucucaaacgggaaccuagacccaugggcugggggaggaauucgcagaaaccugucagcuagcgucauugcaguaacuauucagggaggugcacaccaucuggaucuacgagccucccaccccgaggacccugccagugucguggaagcccggaaacuugaagcuacaauuauaggagaaugggugaaagcugcacgucgggagcaacagccugcucuucgcgggggacccagacugaguuuauag

SEQ ID NO: 175959 - protein, 1024 aa, Artificial Sequence
  derived and/or modified sequence
MGEDDAALRAGSRGLSDPWADSVGVRPRTTERHIAVHKRLVLAFAVSLVALLAVTMLAVLLSLRFDECGASATPGADGGPSGFPERGGNGSLPGSARRNHHAGGDSWQPEAGGVASPGTTSAQPPSEEEREPWEPWTQLRLSGHLKPLHYNLMLTAFMENFTFSGEVNVEIACRNATRYVVLHASRVAVEKVQLAEDRAFGAVPVAGFFLYPQTQVLVVVLNRTLDAQRNYNLKIIYNALIENELLGFFRSSYVLHGERRFLGVTQFSPTHARKAFPCFDEPIYKATFKISIKHQATYLSLSNMPVETSVFEEDGWVTDHFSQTPLMSTYYLAWAICNFTYRETTTKSGVVVRLYARPDAIRRGSGDYALHITKRLIEFYEDYFKVPYSLPKLDLLAVPKHPYAAMENWGLSIFVEQRILLDPSVSSISYLLDVTMVIVHEICHQWFGDLVTPVWWEDVWLKEGFAHYFEFVGTDYLYPGWNMEKQRFLTDVLHEVMLLDGLASSHPVSQEVLQATDIDRVFDWIAYKKGAALIRMLANFMGHSVFQRGLQDYLTIHKYGNAARNDLWNTLSEALKRNGKYVNIQEVMDQWTLQMGYPVITILGNTTAENRIIITQQHFIYDISAKTKALKLQNNSYLWQIPLTIVVGNRSHVSSEAIIWVSNKSEHHRITYLDKGSWLLGNINQTGYFRVNYDLRNWRLLIDQLIRNHEVLSVSNRAGLIDDAFSLARAGYLPQNIPLEIIRYLSEEKDFLPWHAASRALYPLDKLLDRMENYNIFNEYILKQVATTYIKLGWPKNNFNGSLVQASYQHEELRREVIMLACSFGNKHCHQQASTLISDWISSNRNRIPLNVRDIVYCTGVSLLDEDVWEFIWMKFHSTTAVSEKKILLEALTCSDDRNLLNRLLNLSLNSEVVLDQDAIDVIIHVARNPHGRDLAWKFFRDKWKILNTRYGEALFMNSKLISGVTEFLNTEGELKELKNFMKNYDGVAAASFSRAVETVEANVRWKMLYQDELFQWLGKALRH

SEQ ID NO: 175960 - DNA, 3075 bp, Artificial Sequence
  derived and/or modified sequence
atgggcgaggacgacgccgccctgagagccggcagcagaggcctgagcgacccctgggccgacagcgtgggcgtgagacccagaaccaccgagagacacatcgccgtgcacaagagactggtgctggccttcgccgtgagcctggtggccctgctggccgtgaccatgctggccgtgctgctgagcctgagattcgacgagtgcggcgccagcgccacccccggcgccgacggcggccccagcggcttccccgagagaggcggcaacggcagcctgcccggcagcgccagaagaaaccaccacgccggcggcgacagctggcagcccgaggccggcggcgtggccagccccggcaccaccagcgcccagccccccagcgaggaggagagagagccctgggagccctggacccagctgagactgagcggccacctgaagcccctgcactacaacctgatgctgaccgccttcatggagaacttcaccttcagcggcgaggtgaacgtggagatcgcctgcagaaacgccaccagatacgtggtgctgcacgccagcagagtggccgtggagaaggtgcagctggccgaggacagagccttcggcgccgtgcccgtggccggcttcttcctgtacccccagacccaggtgctggtggtggtgctgaacagaaccctggacgcccagagaaactacaacctgaagatcatctacaacgccctgatcgagaacgagctgctgggcttcttcagaagcagctacgtgctgcacggcgagagaagattcctgggcgtgacccagttcagccccacccacgccagaaaggccttcccctgcttcgacgagcccatctacaaggccaccttcaagatcagcatcaagcaccaggccacctacctgagcctgagcaacatgcccgtggagaccagcgtgttcgaggaggacggctgggtgaccgaccacttcagccagacccccctgatgagcacctactacctggcctgggccatctgcaacttcacctacagagagaccaccaccaagagcggcgtggtggtgagactgtacgccagacccgacgccatcagaagaggcagcggcgactacgccctgcacatcaccaagagactgatcgagttctacgaggactacttcaaggtgccctacagcctgcccaagctggacctgctggccgtgcccaagcacccctacgccgccatggagaactggggcctgagcatcttcgtggagcagagaatcctgctggaccccagcgtgagcagcatcagctacctgctggacgtgaccatggtgatcgtgcacgagatctgccaccagtggttcggcgacctggtgacccccgtgtggtgggaggacgtgtggctgaaggagggcttcgcccactacttcgagttcgtgggcaccgactacctgtaccccggctggaacatggagaagcagagattcctgaccgacgtgctgcacgaggtgatgctgctggacggcctggccagcagccaccccgtgagccaggaggtgctgcaggccaccgacatcgacagagtgttcgactggatcgcctacaagaagggcgccgccctgatcagaatgctggccaacttcatgggccacagcgtgttccagagaggcctgcaggactacctgaccatccacaagtacggcaacgccgccagaaacgacctgtggaacaccctgagcgaggccctgaagagaaacggcaagtacgtgaacatccaggaggtgatggaccagtggaccctgcagatgggctaccccgtgatcaccatcctgggcaacaccaccgccgagaacagaatcatcatcacccagcagcacttcatctacgacatcagcgccaagaccaaggccctgaagctgcagaacaacagctacctgtggcagatccccctgaccatcgtggtgggcaacagaagccacgtgagcagcgaggccatcatctgggtgagcaacaagagcgagcaccacagaatcacctacctggacaagggcagctggctgctgggcaacatcaaccagaccggctacttcagagtgaactacgacctgagaaactggagactgctgatcgaccagctgatcagaaaccacgaggtgctgagcgtgagcaacagagccggcctgatcgacgacgccttcagcctggccagagccggctacctgccccagaacatccccctggagatcatcagatacctgagcgaggagaaggacttcctgccctggcacgccgccagcagagccctgtaccccctggacaagctgctggacagaatggagaactacaacatcttcaacgagtacatcctgaagcaggtggccaccacctacatcaagctgggctggcccaagaacaacttcaacggcagcctggtgcaggccagctaccagcacgaggagctgagaagagaggtgatcatgctggcctgcagcttcggcaacaagcactgccaccagcaggccagcaccctgatcagcgactggatcagcagcaacagaaacagaatccccctgaacgtgagagacatcgtgtactgcaccggcgtgagcctgctggacgaggacgtgtgggagttcatctggatgaagttccacagcaccaccgccgtgagcgagaagaagatcctgctggaggccctgacctgcagcgacgacagaaacctgctgaacagactgctgaacctgagcctgaacagcgaggtggtgctggaccaggacgccatcgacgtgatcatccacgtggccagaaacccccacggcagagacctggcctggaagttcttcagagacaagtggaagatcctgaacaccagatacggcgaggccctgttcatgaacagcaagctgatcagcggcgtgaccgagttcctgaacaccgagggcgagctgaaggagctgaagaacttcatgaagaactacgacggcgtggccgccgccagcttcagcagagccgtggagaccgtggaggccaacgtgagatggaagatgctgtaccaggacgagctgttccagtggctgggcaaggccctgagacactag

SEQ ID NO: 175961 - DNA, 3075 bp, Artificial Sequence
  derived and/or modified sequence
atgggcgaggacgatgcagcgttgcgtgcagggtctcgcggtttgtctgatccatgggctgactcagtgggggtgaggccgaggaccactgagcgccacatcgccgttcataagcgtctggtgcttgccttcgcggtgagtctcgtggctctcctggctgtcactatgctggccgtactgcttagcctgaggttcgatgaatgtggggcttcagccacccctggagctgatggagggcctagtggttttcctgaaaggggtggtaatgggagcctgcccgggtcggcaaggaggaatcatcatgccggtggcgactcctggcagcccgaggctggcggcgtggcaagcccgggcactacatccgcgcaaccccccagcgaggaggagagggaaccgtgggagccatggacacagctcaggttgagtggccacctcaagcctttgcattataatctgatgctcacggcatttatggagaactttacattcagtggagaggtgaacgtggagatcgcttgccgcaacgcaacaaggtatgtggttctccacgcttccagagtggcggtggagaaagtgcagcttgccgaagatcgagcattcggggcagtcccggtggcaggcttctttctgtaccctcagactcaggtgctggttgtcgtcctgaatcgaacactggacgctcagcgtaattataacctcaagatcatctacaacgccctcatcgaaaatgaacttctgggttttttcagatcttcttatgtgcttcacggcgaacgacgtttcctgggtgttacgcagttctccccaactcatgcaagaaaggccttcccctgctttgacgaacccatttacaaagcgacttttaagatctccattaagcatcaggctacttacctttccctgtcgaacatgccagtggaaacttctgtttttgaggaggatgggtgggtcacagaccatttttctcagaccccccttatgtcaacatactacctggcttgggccatttgcaattttacgtatagagaaaccacaaccaaatctggcgtggttgtgagattgtacgccaggccggatgcaatccggagagggagcggggactatgccttacacatcactaagcggttaatcgaattctatgaagattattttaaggtgccatattccttgccgaaattggatctgctcgccgtgcctaaacacccgtacgccgcaatggaaaattgggggctaagcattttcgtagagcaaaggatcttgttggacccctcagtcagcagcatttcttacttgttggatgtgacaatggtcatagtgcacgagatttgccatcaatggttcggtgatctcgttaccccagtctggtgggaggacgtctggctcaaggagggatttgcccattattttgagtttgtgggcacggattatttgtatccagggtggaacatggaaaaacagcgctttttgactgatgtgttgcatgaagtgatgctgcttgacggcctcgctagttcccaccctgtgagccaagaagtgttacaggccaccgatattgaccgtgtgttcgattggattgcctacaaaaagggcgccgcccttatccgcatgctggcaaacttcatgggccacagtgtgttccagcggggcctgcaggattatctcacgatacataagtacggaaatgcagctcgcaacgatctttggaatactctcagcgaggcactgaaacgcaacggaaagtatgttaacatccaggaggttatggaccagtggacccttcagatgggctatcccgttattacgatcttggggaacactaccgcagaaaacagaatcatcataacccagcagcatttcatctatgatataagcgcaaaaaccaaagctcttaagttgcagaataacagctacctatggcagataccactgacaatcgtcgttggcaatcggagccatgtctctagtgaggctataatctgggtgtctaataagtctgaacaccaccgtataacctatctggataaaggcagttggttgctcgggaatatcaatcagaccggatatttcagggtgaattatgaccttcggaattggcggttgctgatcgaccagctcattcggaatcatgaggttctgagcgtcagcaacagagctggcctgatcgatgatgcattcagtttagctcgtgcgggctacctccctcagaacatacccttggagattatccgttatttgtccgaagagaaagattttctgccctggcatgctgcctcccgtgccctttaccctctggacaagctgctcgaccggatggaaaattacaacatattcaatgagtacattttgaaacaggtcgcgaccacttacatcaagcttggatggccaaagaataattttaacggatctctggtgcaagccagttatcagcacgaagagctccggcgcgaggtgattatgctggcctgcagcttcgggaacaagcactgtcatcagcaagcttccaccctcatctcagattggatttcaagcaaccgaaatcgaatacccctgaacgtacgggatattgtttattgtactggggtctcactgctggacgaagatgtgtgggagtttatctggatgaagttccactcaaccacggccgtgtccgaaaagaagatcctcctggaagccctaacttgctctgacgaccgcaatctcctgaatcgcctgctgaatttgtccctcaattccgaggtagtcctggatcaagacgccattgacgttatcatacacgtggcaaggaacccccacgggagggatctcgcttggaaattttttcgcgataagtggaagatcctaaatacacgctatggcgaggccctgttcatgaattccaagctcatctccggagtgaccgaattccttaatactgagggagagcttaaggaactgaaaaattttatgaagaactatgacggcgtggccgccgcctccttttctagggccgtggagacagtggaggccaatgtgcgttggaaaatgctgtaccaggacgaattattccagtggctgggtaaagcgctccggcactag

SEQ ID NO: 175962 - DNA, 3075 bp, Artificial Sequence
  derived and/or modified sequence
atgggagaagatgatgctgccctgcgggccggcagccggggcctgagtgacccctgggccgacagcgtgggcgtgcggcccaggaccacagagcggcacatcgctgtgcacaagaggctggtgctggcctttgctgtgtccctggtggccctgctggccgtgaccatgctggccgtgctgctgagcctgcgctttgatgaatgtggggccagcgccaccccaggagcagatggcggccccagcggcttccctgagcggggcggcaatggcagcctgcccggcagcgcccggaggaaccaccacgccggcggggacagctggcagcctgaggccggcggcgtggccagccctggcaccaccagcgcccagccccccagcgaggaggagcgggagccctgggagccctggacccagctgcggctgagcggccacctgaagcccctgcactacaacctgatgctgacagccttcatggagaacttcaccttcagcggggaggtgaatgtggagatcgcctgcagaaatgccaccaggtatgtggtgctgcacgccagccgggtggccgtggagaaggtgcagctggccgaggaccgggccttcggggctgtgcctgtggccggcttcttcctgtacccccagacccaggtgctggtggtggtgctgaacagaaccctggatgcccagaggaactacaacctgaagatcatctacaatgccctgattgaaaatgagctgctgggcttcttccgcagcagctatgtgctgcacggggagcggcgcttcctgggcgtgacccagttcagccccacccacgccaggaaggccttcccctgctttgatgagcccatctacaaggccaccttcaagatcagcatcaagcaccaggccacctacctgagcctgagcaacatgcctgtggagacctctgtgtttgaagaagatggctgggtgacagaccacttcagccagacccccctgatgagcacctactacctggcctgggccatctgcaacttcacctaccgggagaccaccaccaagagcggcgtggtggtgcggctgtatgcccggccagatgccatccggcggggcagcggggactatgccctgcacatcaccaagaggctgattgagttctatgaggactacttcaaggtgccctacagcctgcccaagctggacctgctggccgtgcccaagcacccctatgctgccatggagaactggggcctgagcatctttgtggagcagaggatcctgctggaccccagcgtgagcagcatctcctacctgctggatgtgaccatggtgattgtgcatgagatctgccaccagtggtttggagacctggtgacccctgtgtggtgggaggatgtgtggctgaaggagggctttgcccactactttgaatttgtgggcacagactacctgtacccaggctggaacatggagaagcagcgcttcctgacagatgtgctgcacgaggtgatgctgctggatggcctggccagcagccaccctgtgtcccaggaggtgctgcaggccacagacatcgacagagtgtttgactggatcgcctacaagaagggagctgccctgatccgcatgctggccaacttcatgggccacagcgtcttccagaggggcctgcaggactacctgaccatccacaagtatggaaatgctgccagaaatgacctgtggaacaccctgtctgaggccctgaagagaaatggcaagtatgtgaacatccaggaggtgatggaccagtggaccctgcagatgggctaccctgtgatcaccatcctgggcaacaccacagcagaaaatcgcatcatcatcacccagcagcacttcatctatgacatcagcgccaagaccaaggccctgaagctgcagaacaacagctacctgtggcagatccccctgaccatcgtggtgggcaacagaagccacgtgtcctctgaggccatcatctgggtgagcaacaagtctgagcaccaccgcatcacctacctggacaagggctcctggctgctgggcaacatcaaccagacaggctacttccgggtgaactatgacctgaggaactggaggctgctgattgaccagctgatcagaaatcatgaggtgctgtctgtgagcaacagagctggcctgattgatgatgccttcagcctggcccgggccggctacctgccccagaacatccccctggagatcatccgctacctgtctgaggagaaggacttcctgccctggcacgccgccagccgggccctgtaccccctggacaagctgctggacaggatggagaactacaacatcttcaatgagtacatcctgaagcaggtggccaccacctacatcaagctgggctggcccaagaacaacttcaacggcagcctggtgcaggccagctaccagcacgaggagctgcggcgggaggtgatcatgctggcctgcagctttggaaacaagcactgccaccagcaggccagcaccctcatcagtgactggatcagcagcaacagaaaccgcatccccctgaatgtgcgggacatcgtgtactgcacaggagtgtccctgctggatgaagatgtgtgggagttcatctggatgaagttccacagcaccacagctgtgtctgagaagaagatcctgctggaggccctgacctgcagtgatgacaggaacctgctgaaccggctgctgaacctgagcctgaacagcgaggtggtgctggaccaggatgccattgatgtgatcatccacgtggccaggaacccccacggccgggacctggcctggaagttcttccgggacaagtggaagatcctgaacaccaggtatggagaggccctcttcatgaacagcaagctgatctctggagtgacagagttcctgaacacagaaggagagctgaaggagctgaagaacttcatgaagaactatgatggagtggccgccgccagcttcagcagagctgtggagaccgtggaggccaacgtgcgctggaagatgctgtaccaggatgagctgttccagtggctgggcaaggccctgcggcactag

SEQ ID NO: 175963 - DNA, 3075 bp, Artificial Sequence
  derived and/or modified sequence
atgggcgaggacgacgccgccctgcgggccggcagccggggcctgagtgacccgtgggccgatagcgtgggggtccgccctcgcacgacggagagacacatcgcagtgcacaagcgcctcgtgctcgccttcgcagtgagcctggtggcactcctggccgtcactatgctcgccgtgctcttgagcttgagatttgacgaatgcggtgcctcagctactcccggagcggatggcggcccctctgggtttcccgaacggggcggtaacggctccctgcctggtagtgcgagaaggaaccaccacgcaggcggggatagttggcagcccgaggccggcggagtggcgagtcccggcacaacttccgcccagcctccctctgaggaggaaagggaaccgtgggagccctggacacagttacgattatctgggcacctgaagcccctgcactataacctgatgctgaccgcctttatggagaactttacattcagcggcgaagttaatgtcgaaatcgcctgcaggaacgcgacgagatatgtcgtgcttcacgccagtcgggtcgccgtcgagaaagtgcagctggcagaggacagggccttcggagccgtgccagtggctggattttttctgtacccccagacacaggtcctggtggtcgtgcttaaccggaccttggacgcccagcgtaattacaatctgaaaatcatatataatgccttgattgagaacgagctccttggcttcttcagaagctcctatgttctccatggggagaggcgatttctgggcgtaacacagttctcccccacccacgcacgcaaggccttcccctgcttcgacgagcccatctacaaagccacgttcaagatctcaattaagcatcaggcaacctacctctcactgagcaacatgcctgtggagacctccgttttcgaagaggatggctgggttactgatcatttctcgcaaaccccccttatgtctacctactacctggcctgggccatctgtaattttacctacagggagaccaccaccaaatccggagttgtggtgaggctctacgcaagacccgacgccatacgccggggcagtggggattacgctctgcacattaccaagcgactgattgagttctacgaggattatttcaaagttccctattcccttccaaagctggacctgctagctgttcccaagcacccatacgccgctatggagaattgggggctctcaatcttcgtggagcagaggatcctgctggaccccagcgtgtcaagcatttcatacttgttggacgtaactatggttatagtacacgagatttgtcaccaatggttcggggaccttgttacacctgtgtggtgggaggacgtctggctgaaggagggcttcgcccactactttgagtttgtaggaactgactacttgtatcctggttggaacatggaaaaacagcggtttctgaccgatgtgctgcacgaggtgatgcttctggacggattagcatctagccacccggtgagccaggaagtccttcaggctacagacattgaccgggtgtttgattggatcgcctataaaaagggagccgccttaattcgaatgttggccaacttcatgggacattctgtgtttcaaaggggtttacaggactacctcacaattcacaagtacgggaacgctgccagaaacgatctgtggaatactcttagcgaagcgctgaagcgcaacgggaagtatgtgaatattcaagaagtaatggaccagtggaccctacagatgggataccccgtaatcaccatcttgggaaacaccacggccgaaaataggatcatcattacacaacagcactttatttacgacatctctgcgaagaccaaagccttgaaactccagaataactcttacttgtggcagatacccctgaccatcgttgtgggcaatagatcacacgtgagttctgaggcaatcatctgggtgagcaacaagagcgagcatcatagaataacatatttagacaaggggtcctggctgctgggcaatatcaatcagacagggtacttccgtgtaaactatgacctgagaaactggcgtctactcatcgaccagcttatccgaaatcatgaagtcctttcagtgagtaaccgcgctggattaatcgatgacgccttctccctcgcccgcgccggctatcttccacagaatattcctcttgagatcatacggtacctatccgaagagaaggacttcctcccttggcacgcagcttcgcgggccctgtatccgctggataaacttctggacagaatggagaactataatatattcaacgagtacattctcaagcaggtggctacaacttacatcaaactgggatggccaaagaacaacttcaacggttctcttgttcaagcttcctaccaacatgaggaactgagacgcgaggttattatgctggcatgttccttcggaaacaagcattgtcatcagcaggcctcaaccctcatctccgactggatcagcagcaaccgcaacaggattcccttaaacgtgcgggacatcgtgtattgcacaggggtgtccctgctcgacgaggacgtatgggaatttatctggatgaagttccactcaactacagcagtctccgaaaaaaaaattcttctcgaagccttgacttgtagcgacgaccgcaaccttcttaaccgcttactgaatttaagcctaaacagtgaagtggttctcgaccaggacgctattgatgtgatcatacacgtggcaagaaatccgcatggacgggatctcgcttggaagttttttcgggataaatggaagattcttaatacaaggtatggggaggctttattcatgaacagcaagctcatttcaggcgtgactgagttcctcaatactgaaggtgaactcaaggagctcaagaatttcatgaagaactatgatggtgtcgccgcagccagtttttctcgcgccgtcgagactgtcgaagctaacgtgcggtggaagatgctgtaccaggatgaactgttccagtggctgggcaaggccctgcgccactag

SEQ ID NO: 175964 - DNA, 3075 bp, Artificial Sequence
  derived and/or modified sequence
atgggcgaagatgacgctgcgctcagggctgggtcgagagggctcagcgacccgtgggctgattctgtgggcgtgcggcctcgtaccaccgaacgtcacatagcggttcacaagcgtcttgtgctagcgttcgctgtctctctggtggcattgcttgccgtaacaatgctggccgtgcttctctcactccgtttcgacgagtgtggggcttcagccactcccggagccgatgggggaccctcaggctttccagaaagggggggaaacgggtcgcttcctggctccgctcggaggaatcatcacgcaggcggagattcatggcagccagaagccggtggggtggccagcccaggaaccacctctgctcaacctcctagtgaagaggagcgggagccttgggagccctggactcagctccgacttagcggccatttgaaacccctccactacaacctaatgctcacagcattcatggaaaattttacattctctggcgaagtaaatgtggagatcgcctgccgtaatgctacaagatatgtagtgctgcacgcaagtagagttgccgttgagaaggtccaacttgccgaggatagagcttttggggcagtccccgtagccggttttttcctctatcctcagacacaagtgctggtggtcgtgctgaaccggacactggatgcccagcgtaattataacctgaaaattatctacaacgcactaattgagaatgagttacttggcttcttccgctccagctatgtgttgcacggcgagcggaggtttttgggtgtcactcaattttcccctacacacgctcgcaaagcctttccctgcttcgacgagccaatttataaagctacttttaaaatctctatcaagcaccaagctacctacctgtcccttagcaacatgccagtcgagaccagcgtctttgaggaagacgggtgggtgaccgatcattttagccagactcccctcatgtctacttactacctcgcctgggctatctgtaacttcacatatcgggaaacaacaactaaaagtggagttgtggtaagactatatgctcggccagatgccatcagaagagggtccggggactacgccctgcacattaccaagaggctgattgagttttatgaagactactttaaagtcccttatagcctgcctaagctggatctgctggcggtacccaaacacccatacgcagccatggaaaattggggacttagtattttcgttgaacagaggattctcctggacccatccgtcagtagcatctcctacttactcgatgttacgatggtgatcgtccacgaaatatgccatcaatggtttggtgatttggtgacccctgtctggtgggaagacgtgtggttgaaagaaggattcgcccactacttcgaatttgtggggactgactacctgtatccagggtggaacatggagaaacagcggttcctgactgatgtcctgcatgaagtgatgctcctagatggactggcgtcatcccaccctgttagtcaagaggttctgcaggcaacagacatcgatcgggtctttgattggattgcatataaaaaaggagcagccctgattcggatgttggcgaactttatggggcactcagtatttcagaggggcctgcaagattacctgacaatccataagtacggtaatgcggcaaggaatgacctgtggaatactctgtctgaggctctaaaaagaaacggaaaatacgtaaatattcaagaggtgatggatcagtggaccctgcaaatgggttaccccgtgatcacgatcctgggtaacactaccgctgaaaacaggattataatcacccagcagcactttatatatgacatcagcgccaagaccaaggccttgaaactgcagaacaatagctatctctggcagatacctttgactattgtggtgggtaaccgctcacatgtctcatcagaagcaatcatatgggtgagcaacaagtcggagcatcatagaataacctatcttgacaaaggttcctggctcttaggcaacattaaccaaactggctactttcgcgtgaattacgacctcaggaattggcggctcctgattgaccaacttatccgcaaccacgaggtcctctccgtgagcaacagggccggactcatagatgacgctttctccctggcacgggcaggctatttacctcagaatatcccattagagatcatccgttacctgagcgaggagaaggatttcctgccttggcacgctgccagccgcgctctctatccgctggacaagctgttggataggatggagaattataatatctttaatgaatatattctcaagcaggtggcaaccacctacatcaagcttggatggcctaagaataactttaatggatctctggtccaagccagttatcaacacgaggaactgcgtcgggaagttataatgttggcatgctccttcggtaacaaacattgtcatcagcaagcatcaaccctcatctccgattggatttctagcaacagaaatcgtataccacttaatgttcgtgacatcgtgtactgtacaggtgtcagcctcttggacgaggatgtctgggagtttatctggatgaaattccattctacaaccgctgtctcagaaaagaaaattcttctggaggcattgacctgtagcgatgaccgcaaccttcttaaccgattattaaatctctctctcaacagtgaggtggtactggaccaggatgccattgatgttattatacacgtggcaagaaacccacacgggagggatctagcgtggaagttttttagagacaagtggaaaattctcaatacgagatacggcgaggcattatttatgaactcaaaactgattagtggggtcacggagtttctgaacaccgagggggagctcaaggaactgaagaacttcatgaagaattacgatggtgttgcagcagctagttttagcagagccgtcgaaaccgtggaggctaacgtgagatggaagatgctgtatcaggacgaactgtttcaatggctaggcaaggctctccgccactag

SEQ ID NO: 175965 - DNA, 5618 bp, Artificial Sequence
  derived and/or modified sequence
aagaaaaagaagaagaaaaagaagaggaagaagaagaaggaggaggaggaggaggaggagggggccgagaagagcagctcacccttcgcagccgcgatgggggaagacgacgccgcgcttcgggctggcagcagggggctctccgacccgtgggcagactcagtgggagtgcgaccccgcaccacggagcgccacatcgccgtacacaagcggcttgtgctggccttcgctgtgtccctcgtggcattgctcgcggtcacaatgctcgctgtgctgctcagcctgcgcttcgacgagtgcggggcgagtgccacgccaggcgccgacggtggcccctcaggctttccggagcgcggcggcaacgggagcctccctggatcggcccggcgcaaccaccacgcaggcggggactcctggcagcccgaggcgggtggggtggccagtccggggaccacgtcggcccagccgccgtcggaggaggagcgggagccgtgggagccgtggacgcagctgcgcctgtcgggccacctgaagccgctgcactacaatctgatgctcaccgccttcatggagaacttcaccttctccggggaggtcaacgtggagatcgcgtgccggaacgccacccgctacgtagtgctgcacgcttcccgagtggcggtggagaaagtgcagctggccgaggaccgggcgttcggggctgtccctgtagccggttttttcctctacccgcaaacccaggtcttagtggtggtgctgaataggacactggacgcgcagaggaattacaatctgaagattatctacaacgcgctcatcgagaatgagctcctgggcttcttccgcagctcctatgtgctccacggggagagaagattccttggtgttactcagttttcgcctacacatgccagaaaggcatttccttgttttgatgagccaatctacaaggctactttcaaaatcagcatcaagcatcaagcaacctatttatctttatctaatatgccagtggaaacttccgtgtttgaggaagatggatgggttacggatcacttttcacagacccctctcatgtccacatattatttagcctgggcaatttgcaacttcacatacagagaaactaccaccaagagtggggttgtagtacgattatatgcaagacctgatgctatcagaagaggatccggggactatgctctccatataacaaagagattaatagaattttatgaagactactttaaagtgccctattccttgccaaaactagatcttttagctgtgcctaagcatccgtatgctgctatggagaactggggactaagtatttttgtggaacaaagaatactgctggatcccagtgtttcatctatttcttatttgctggatgtcaccatggtcattgttcatgagatatgtcaccagtggtttggtgaccttgtgacgcctgtgtggtgggaagacgtgtggctgaaggaagggtttgctcactactttgaatttgttggtacagactacctctatcctggctggaacatggaaaagcagaggtttctgaccgatgttctgcatgaagtgatgctgctggacggtttggccagttcccatccagtatcacaggaagtgctgcaggcaacagatattgacagggtgtttgactggatcgcatataaaaagggtgctgctttaataagaatgctggctaattttatgggccattcagttttccagaggggtttgcaagattatttaaccattcataagtatggtaatgcagccagaaatgatctctggaatacattatcggaggctttaaaaagaaatgggaaatatgtaaatatacaagaagtaatggatcagtggacactccagatgggttatcctgttatcaccatcttgggaaacacaacagcagaaaatagaataataattacccaacagcattttatctatgatatcagtgctaaaactaaagcacttaaacttcagaataacagttacctgtggcagattccattaactattgtggtaggaaatagaagccatgtgtcttcagaagcaattatttgggtgtctaacaaatcagagcaccacagaataacttatttggacaaaggaagctggctgctggggaacatcaatcaaactggctattttagagtcaactatgacctaaggaactggagattattaattgatcaattaatccggaatcatgaggttctttctgtcagtaaccgagcgggcttgatcgatgatgccttcagcctagccagggctggctatttgcctcagaatattcctctggagattatcagatacctgtctgaggagaaggattttcttccttggcatgctgccagccgagctctttatcctctagataaattactggaccgcatggaaaactacaacattttcaatgaatatattttaaagcaagttgcaacaacatatatcaagcttgggtggccgaaaaataattttaatggatctcttgttcaagcatcctaccaacatgaagaactacgtagagaagttataatgctggcctgcagttttggcaacaagcactgtcaccaacaggcatcaacacttatttcagattggatttccagcaacaggaacagaataccactaaatgttagagacatcgtatactgtacaggagtgtcactactggatgaggatgtctgggaattcatatggatgaaattccattccaccacagcagtttctgagaagaaaatattattggaagccttaacttgcagtgatgacaggaatttattaaacaggcttctaaatctgtcactgaattctgaggtggtgctggatcaagatgcaattgatgtcataatccatgtagctcgaaatccacatggtcgagaccttgcctggaagtttttcagggataaatggaagatattaaataccaggtatggagaagcattgtttatgaattccaaactcatcagtggtgtcacagaatttcttaatactgaaggtgaactcaaagagctcaagaacttcatgaaaaactatgatggggtagctgctgcttctttctcacgagctgtggaaactgtcgaagccaatgtgcgctggaaaatgctttaccaagacgagcttttccaatggttaggaaaagctctaagacactaatatatgtatcttataaacaaacaattcaactcagaagtttatgagaagacacgctttttgtggaatgaggaaaatgtactacctagaaaatggccagattttcagtgttaacgtgtgggaggaattttttttttagtttttattttttggttttgggggatattttttatttgtttcattcattctgttctgtttctctactgggtgttcctctctaaagaaactcttgcaagtgaaactagccatgattgcttcagctgtacattccttgctgtacaggaccaaatatgatagtgatgcatgttgatgttacagtcaatttggaaaaacatattcagaatatctgtgcatggatatattgtcctgcctgtgttccagcatgcttatttcaaacgtccagtgttgtgtgtgaatatgtgttacacctaggatgggcattatgcaaaagcacaaagattatatatgacaatcagtattgcaatgaaagaaaaactaaaaacagaaatgatattctcaattttgggcaatgtgagaggtaaaatagcccttgacatgatgaacatcacttatttcagcacttggattgtctggcaatgattactgtgttgctaactcattttctttgagttaaagctgtgtatacattttaaaaggcatatagatagtgtatgcatatgtatatgtacatagggaagccccatatgtatatagtatgttgtacactgcacatgtacaaagaatgtcttcagatcaaagaaaatttatctctttttataaacttaaggacagttgcaaaaggcttcaaggaatttatctcaacattattctttctatgtcctaactaaatttctcaactgttatgaatttttcatctacttcttgaacagtggtctattctgctacatgaagatgaatacaaacaaaatttttgtataaactactattccagttctcctgtgtcagtcttgcctatagattttgccatcgttttctgtcaaagttccttttgcatgaaacaattatgcaaacttataattattagtgctgaaaaagagtttattttccatcttgtttgttttcctaccttatgctgagtagtccagagagttaaaaaaattctctgcatgttggtcttttaagtctgttttgctctaatcctccattaagcgagcatacctcaagtgggtctattagcatttaatgaccttttgtgccagttgtgccatcccttaagatgaaaagttccttttcttgtgttaatgtacaaagcttttcttttggcactgacaactgtgttctacctgggaattttgaatagccattttcatggctgtgtgttgtgtaacacaaatgtttttaaatggtattctcacccagtaggccagctctccaaacgttgcttagatgcttcaaaattagcatattttaagtttaccagtataaaataccaatgcaactactctacatagccaaatgtttgtaaatcacgtcttattttcctgaggtttttcactccaccaaatcttacaaatcattgaaagaaatatattctaacagtacgcactgaatagtgaaaataattagacattttaagaaccagagccatagaattattttaaattagtagaaaagaggagctatttccgaatctatagaataaagtaccacctaaaactgaattttatcatataagcaagtaatacctattagtcatacctaaatttttcagcacttcattcaattaaaatacatgaattttaaatattttacatgatgtgaataggcatgataatacttttagtataaaatctaaactttttccatttatcagaaatgataaaatccagttaccacatatcacgtttataaaatccttaattaaatgagtaacttctaaaatataacaatactaaatatcacactgcgatggaggtcccaaatatgtggtctatcaccactgaattcatgtaatagataagaaaaaaattagaggtggatgtcttgttttgtgtcatgaattactaaaatctcttagtagttgtggtatatttttgagtaaaattaccatttccagatttgagtttgaagggcttttatagttgtattttcctcctcactgttaataatcataatcctttttcagtattttagtggccttgaacaactggtttatctacaatctcaaatcctaagtgtataattatgtgcaatgttcaatacctcatataatacttgctcaacagtatagtggtaccaatggcattaagatggtgtttttgttctacatatttttcaataatttattctttctaatgttgaaattatatcaggctttaccggtttttttagttgtttaaataagtaatattttcaaaagaataaaataaccaatgatatctcttggaataatctgtaaaacgtagttataaaattctattttctactta

SEQ ID NO: 175966 - protein, 750 aa, Artificial Sequence
  derived and/or modified sequence
MPPATGGGLAESELRPRRGRCGPQAARAAGRDVAAEAVARSPKRPAWGSRRFEAVGWWALLALVTLLSFATRFHRLDEPPHICWDETHFGKMGSYYINRTFFFDVHPPLGKMLIGLAGYLSGYDGTFLFQKPGDKYEHHSYMGMRGFCAFLGSWLVPFAYLTVLDLSKSLSAALLTAALLTFDTGCLTLSQYILLDPILMFFIMAAMLSMVKYNSCADRPFSAPWWFWLSLTGVSLAGALGVKFVGLFIILQVGLNTIADLWYLFGDLSLSLVTVGKHLTARVLCLIVLPLALYTATFAVHFMVLSKSGPGDGFFSSAFQARLSGNNLHNASIPEHLAYGSVITVKNLRMAIGYLHSHRHLYPEGIGARQQQVTTYLHKDYNNLWIIKKHNTNSDPLDPSFPVEFVRHGDIIRLEHKETSRNLHSHYHEAPMTRKHYQVTGYGINGTGDSNDFWRIEVVNRKFGNRIKVLRSRIRFIHLVTGCVLGSSGKVLPKWGWEQLEVTCTPYLKETLNSIWNVEDHINPKLPNISLDVLQPSFPEILLESHMVMIRGNSGLKPKDNEFTSKPWHWPINYQGLRFSGVNDTDFRVYLLGNPVVWWLNLLSIALYLLSGSIIAVAMQRGARLPAEVAGLSQVLLRGGGQVLLGWTLHYFPFFLMGRVLYFHHYFPAMLFSSMLTGILWDTLLRLCAWGLASWPLARGIHVAGILSLLLGTAYSFYLFHPLAYGMVGPLAQDPQSPMAGLRWLDSWDF

SEQ ID NO: 175967 - DNA, 2253 bp, Artificial Sequence
  derived and/or modified sequence
atgcctcccgcaacaggaggcggtttggctgagagcgagctgcggcctcgaagaggccgctgcggacctcaagccgctagagctgcgggacgtgacgtggccgcggaagcagtcgcacgcagccctaagcgtccagcctggggcagtcgccggtttgaagctgtgggatggtgggctctcttggccttggtgacccttctctctttcgccacaagattccaccgccttgacgaacccccacacatttgctgggacgaaacacatttcgggaagatgggttcctattatatcaaccgtaccttcttttttgacgttcacccccccctgggtaaaatgctgattggtttggccggatacctatctggctacgacggcacctttttgtttcagaaacctggggacaagtacgagcaccactcatacatgggaatgagaggcttctgcgccttcctggggagctggcttgtccccttcgcttacctgaccgtgctcgacctgtctaagagtctctctgccgcgctgttaactgctgctcttcttaccttcgatactggatgcttgaccctgtcacagtatatcctgttagaccctatcctgatgttctttatcatggcagctatgctgagcatggtaaagtacaatagctgcgcggatagacctttttccgcaccctggtggttctggctgtccttgaccggtgtttccttagccggcgcgctgggggttaaattcgtgggcctatttatcatactgcaggtcggcctcaatacgatcgctgatctctggtacctgtttggagacctgtcccttagcctggtcaccgtgggcaaacatctaaccgcccgcgtactctgcttgattgtgctcccactggcattgtacacagccacttttgcggttcatttcatggtactgagcaagtcagggccaggagatggtttttttagctcagcatttcaggcgcgtctctccggtaataacctgcataacgcatccatccctgagcacctcgcttacggcagcgtgatcacagtgaaaaaccttcggatggccatcggatatctgcatagccatagacacctgtatccagagggcataggcgccagacagcagcaagtgaccacttatttgcataaggactataacaatctgtggattataaagaaacacaatacgaatagtgacccgcttgacccctccttccccgtcgaattcgtcagacacggcgatatcatcaggttggaacataaagagaccagccgaaatcttcattcccactatcatgaggcaccaatgactcgcaaacattatcaggtcactgggtacgggattaatggaaccggtgattccaatgacttctggaggatagaagtagttaatcggaagttcggcaaccgaatcaaggtgctacggtccaggatccggttcattcacctggtgacaggatgtgtgttaggctctagcgggaaggttctgcccaaatggggttgggagcagcttgaggtcacttgcactccatacctgaaggaaacgctgaattctatctggaatgtagaagaccacataaaccccaaacttcctaacatctccctggacgtccttcagccttcattccctgaaattctccttgaatcccacatggtgatgattcggggcaactccggtttaaaacccaaagacaacgagtttacaagtaagccgtggcactggcccatcaactaccaggggctcaggtttagtggggtcaacgacactgactttcgagtctacctactgggcaatccagttgtctggtggctgaacctcctctctatcgccctgtacctcttaagcggcagtataatcgccgtcgctatgcagagaggggctcgactgccagccgaagtggcagggctatcgcaggtgctgttaaggggcggcggtcaagtgcttctaggctggaccctgcattatttccctttcttcctgatgggcagagtgctgtactttcaccactattttcccgctatgctgttctcctcaatgctcactggcatcctgtgggatactctacttaggctgtgtgcatgggggctcgcatcctggccgctcgcaagggggatacacgtcgcaggcatcctaagtctgctactcggcacagcctattccttttatctcttccaccccctggcttacggaatggtgggaccgttggcccaagaccctcaatctcccatggccggcctgcgttggctcgactcttgggatttctag

SEQ ID NO: 175968 - DNA, 2253 bp, Artificial Sequence
  derived and/or modified sequence
atgcccccagccactggaggcggcctggccgagagcgagctgcggccccggcggggccgctgtggcccccaggccgcccgggctgctggaagagatgtggccgctgaggccgtggcccggagccccaagaggcctgcctggggcagccgccgctttgaggccgtgggctggtgggccctgctggccctggtgaccctgctgagctttgccacccgcttccaccggctggatgagcccccccacatctgctgggatgagacccactttgggaagatgggcagctactacatcaacagaaccttcttctttgatgtgcacccccccctgggcaagatgctgattggcctggccggctacctgagcggctatgatggcaccttcctgttccagaagccaggggacaagtatgagcaccacagctacatgggcatgaggggcttctgtgccttcctgggctcctggctggtgccctttgcctacctgactgtgctggacctgagcaagagcctgtctgctgccctgctgacagctgccctgctgacctttgacaccggctgcctgaccctgagccagtacatcctgctggaccccatcctgatgttcttcatcatggccgccatgctgtccatggtgaagtacaacagctgtgccgaccggcccttcagcgccccctggtggttctggctgagcctgactggagtgtccctggccggggccctgggcgtgaagtttgtgggcctcttcatcatcctgcaggtgggcctgaacaccatcgctgacctgtggtacctgtttggagacctgagcctgagcctggtgacagtgggcaagcacctgacagcccgggtgctgtgcctgattgtgctgcccctggccctgtacacagccacctttgctgtgcacttcatggtgctgagcaagagcggccctggagatggcttcttcagcagcgccttccaggcccggctgagcggcaacaacctgcacaatgccagcatccctgagcacctggcctacggcagcgtcatcaccgtgaagaacctgaggatggccatcggctacctgcacagccaccgccacctgtacccagagggcatcggggcccggcagcagcaggtgaccacctacctgcacaaggactacaacaacctgtggatcatcaagaagcacaacaccaacagcgaccccctggaccccagcttccctgtggagtttgtgcgccacggggacatcatccggctggagcacaaggagaccagcaggaacctgcacagccactaccacgaggcccccatgaccaggaagcactaccaggtgacaggctacggcatcaatggaactggagacagcaatgacttctggagaattgaggtggtgaacaggaagtttggaaaccgcatcaaggtgctgcggagccgcatccgcttcatccacctggtgacaggctgtgtgctgggcagcagcggcaaggtgctgcccaagtggggctgggagcagctggaggtgacctgcaccccctacctgaaggagaccctgaacagcatctggaatgtggaggaccacatcaaccccaagctgcccaacatcagcctggatgtgctgcagcccagcttccctgagatcctgctggagagccacatggtgatgatccggggcaacagcggcctgaagcccaaggacaatgagttcaccagcaagccctggcactggcccatcaactaccagggcctgcgcttcagcggcgtgaatgacacagacttccgggtgtacctgctgggcaaccctgtggtgtggtggctgaacctgctgagcatcgccctgtacctgctgagcggcagcatcatcgctgtggccatgcagagaggagcccggctgcctgctgaggtggccggcctgagccaggtgctgctgcggggcggcggccaggtgctgctgggctggaccctgcactacttccccttcttcctgatgggccgggtgctgtacttccaccactacttccctgccatgctgttcagctccatgctgaccggcatcctgtgggacaccctgctgcggctgtgtgcctggggcctggcctcctggcccctggcccggggcatccacgtggccggcatcctgagcctgctgctgggcacagcctacagcttctacctgttccaccccctggcctacggcatggtgggccccctggcccaggacccccagagccccatggccggcctgcgctggctggacagctgggacttctag

SEQ ID NO: 175969 - DNA, 2253 bp, Artificial Sequence
  derived and/or modified sequence
atgccccccgccaccggcggcggcctggccgagagcgagctgcggcctaggagaggaagatgcggaccacaagccgccagagccgccggtcgggatgtggccgccgaggctgtggccagaagccctaagaggcccgcttggggctcaagacggttcgaagcagtcggatggtgggctctcctggctttggttactctgctctcgttcgctacacgctttcataggctggatgaacctcctcacatctgttgggacgagactcacttcggaaaaatggggtcttactacataaatcgaacttttttcttcgacgtgcacccccctctgggtaagatgctaataggacttgccggctacctctcaggttacgatggcactttcctttttcagaagcccggcgacaagtacgagcaccattcttatatgggcatgcgagggttttgcgctttcctcggctcctggctggtgccgttcgcttacctcactgtcctggacctgagcaaatccctttcggcagcactgcttactgccgctctcctcacattcgataccggatgtttgaccctgagtcagtatatcttactggacccaatccttatgttctttatcatggcagctatgctgagtatggtgaagtataactcttgcgctgatcgcccattttccgccccttggtggttctggctttcccttaccggggtcagtctggccggcgctctgggcgtgaagtttgtgggactctttataatcttgcaggttggactcaacacaatagctgacctgtggtacctttttggcgacctatctttgtcactcgtaactgtgggcaaacatcttactgcccgcgttctctgtttgattgtgcttcccctcgctctctataccgcgacgtttgcagtacattttatggtgctttcaaagtccggccctggcgacggattcttctcttctgccttccaagcacggctttccgggaataatctccacaacgcttcaatacctgaacacctagcctatggatcggtcatcacagttaaaaacctacggatggctatcggctatttgcatagccaccgtcatctttaccccgaaggcattggtgcacggcaacagcaagtgactacctatctccataaggattataataatctttggatcatcaagaagcacaacacaaattccgaccctctggacccttcctttccagtggaattcgtgaggcacggggacattatccgactggagcacaaggagacatccagaaatctacattcacattatcatgaagcgcctatgacgcggaagcactatcaggtaaccggatatggcatcaacggaaccggtgatagcaatgatttctggaggattgaagtggtgaatcgaaaattcggcaaccgcatcaaggtgttgagatctagaatccgattcatacacctggtcaccggttgtgtgctgggctcatccggcaaagtgttgcccaaatggggctgggaacagctcgaagtgacttgtaccccatatctgaaggagacactgaatagtatctggaacgttgaagatcatattaatccaaagttgccgaatataagcctggatgtgctccaaccatccttccccgagattttactagagagtcacatggtcatgataaggggcaacagtggactgaagccaaaggataatgagtttacaagcaaaccgtggcattggcctataaactatcagggactcagattttctggggtcaacgacaccgattttagagtgtacctgttaggcaacccagttgtttggtggctgaacctgctcagcattgctctgtatttgttgagcggatctatcatcgctgtggctatgcaacgtggcgctcgactccctgccgaggttgccgggctgagtcaggttctgttacgaggtggggggcaggttctgctgggctggactctccattactttcctttttttctaatgggtcgggttctctactttcatcactacttccccgccatgctgttctctagcatgctgacaggaatactctgggataccctgctacgcctgtgcgcttggggactcgcttcgtggccgctggcccgagggattcatgtagctggaatcctctccctgctgctcgggacagcatattcattctatctttttcatcctctcgcttacggaatggtcggtcccttggctcaggacccgcagtcgccaatggccgggctgaggtggctcgattcctgggacttttag

SEQ ID NO: 175970 - DNA, 2253 bp, Artificial Sequence
  derived and/or modified sequence
atgccaccggctacagggggaggcctcgccgagagcgagctgagacccagacggggaaggtgtggtccacaggcagctcgggctgccggaagggacgtcgccgctgaagctgtggccagaagcccaaagcgacctgcttggggctcacggagatttgaggctgtgggatggtgggccctgctggccctggtcactctcctgtctttcgctactaggtttcaccgcctcgacgaacccccacacatctgctgggacgaaactcactttggcaaaatgggcagctattatatcaatcgtacatttttcttcgatgtgcatcctcctctcggaaaaatgctgatcggactagccggttaccttagcggttacgatggcacatttctgttccagaagcccggagacaaatacgaacaccactcttacatggggatgaggggcttttgtgcattcctgggcagctggttggttccattcgcttacctgactgtgttggatctatcaaagtcactgtctgccgctcttcttacagccgctctcctgactttcgacactggttgtctgacactatctcagtacatactgctagaccccatcttgatgttcttcatcatggctgctatgctgagtatggtgaaatataactcttgcgccgaccgacccttctccgctccttggtggttttggctgagcctaactggcgtatctctggcgggagcactcggagtgaagtttgttgggctgtttataatccttcaagtggggttgaatacgattgccgatctctggtatctgtttggcgatttgtcattgtcactggtgacggttggaaagcacttaactgctcgggtactatgcctgatagtgttaccccttgcactgtatacagccacttttgccgtgcactttatggtgctgtctaagagcgggcctggcgacggtttcttttcctctgcttttcaggccaggctcagcggcaacaatctgcacaacgcctcaatcccagagcatctggcttatggctcggtcataactgtcaagaacctgcgcatggccatcggttacttgcacagtcaccgacatctgtatcctgaaggtattggagcccgacaacagcaggtgactacctacctacacaaagactataataatttatggatcataaaaaagcataatacaaactctgaccccctggacccgtcctttcctgtggaatttgtgaggcacggggacataattcggctcgagcacaaagaaactagtcgcaatctgcactctcactaccacgaagccccaatgacccgaaagcactaccaggtgacgggatacggcatcaacgggaccggcgactctaacgatttctggcgaattgaagtagtgaatcgaaaatttggtaataggatcaaggtcttacggtcaagaattcgtttcatacatctggttacgggttgcgtgttaggcagctccgggaaggtgttgccaaagtgggggtgggaacagctggaggtgacctgcacaccctatctcaaagagaccctgaacagcatctggaacgtcgaggaccacatcaatcccaaactgcccaacatctccctagatgtcctgcagcccagtttccccgagattctcctggaatcccatatggtaatgatccggggaaattctgggcttaaaccaaaggacaacgaatttaccagcaagccttggcattggcccattaactaccagggactccggttctctggagtcaacgacacagacttcagagtctacttgctcggcaaccccgtagtgtggtggttaaacctcctgtccatagccctgtatctgctctctggttcaataatagcggtcgctatgcagcgcggagcgcgtctaccagctgaggttgcaggactttcccaggtgctcctccgcggaggcggacaagtgctgctgggatggacacttcactacttcccctttttcctcatgggaagggttctgtacttccaccattatttccctgcaatgctcttttccagcatgcttacagggatactgtgggacacattgctgcgcctgtgcgcctgggggctggcctcgtggccgctcgccagagggatccatgtggccggtattctcagtttgctactgggaaccgcttattctttttacttattccaccccttagcgtacgggatggtcggcccactcgcacaagaccctcagtcaccgatggccggtttgagatggctagatagttgggacttttag

SEQ ID NO: 175971 - DNA, 4876 bp, Artificial Sequence
  derived and/or modified sequence
tgcgcctcctgccgcctcctagcggcccgggccgcgaccacgctgcccgccccgccccgagcccggggccccgcgctccgctgcagtgaagggcgttgcatttcccggggtaccccgagctgccctcttgtgactccttggcggggcggctggtcagacaaagtgtgcctccgggccggagggcgacccagaggagggggaagatgccgccggccacgggcggaggcctggcagagtccgagctgcgtccccggaggggccgctgtggcccccaggctgctagggccgcaggccgggacgtggccgctgaggctgtggcgcgaagccccaaacggcctgcttggggctcacggcgcttcgaggcggtcggctggtgggccctgctggccttggtgacgctgctgtccttcgccacccgcttccaccgcttggacgagccgccgcacatctgttgggatgagactcactttggaaaaatgggaagttactatatcaaccgtacatttttctttgatgtgcacccgcccctgggaaagatgctgataggtcttgctggctacctgagtggatatgatggtacctttttgttccagaagcctggggataaatatgagcatcacagctacatgggaatgagaggattctgtgcattccttggctcctggctggtcccctttgcctacctcactgtactggatctgtccaagtccctctcggcagcactgctcacagctgccctcctcacctttgacacgggatgcctcactctgtcccagtacatcctccttgaccccatcctgatgttcttcatcatggctgccatgctgagcatggtcaagtacaactcttgcgccgacaggcccttctctgccccctggtggttctggctcagcctgactggcgttagtcttgctggtgctttaggggtcaagtttgttggcctctttatcatccttcaagtggggctgaacaccattgcagacctttggtacctgttcggagacctcagtctttcattggtgactgtgggaaaacacctgactgctcgtgtcctgtgcctcatagtgctgcccctggctctctatacagccacctttgctgttcacttcatggtgctgagtaaaagtggccctggtgacggtttcttcagttctgccttccaggcccggctttcagggaacaacctgcacaatgcttccatccctgaacacctggcctacggctctgtgatcactgtgaagaacctccggatggccatcggctatctgcactcccacaggcacctctaccccgagggcattggtgcccgtcagcagcaggtcaccacctatttgcacaaggactacaacaacctgtggattatcaagaaacataacacaaactcagatcccctagacccttccttcccagtggagtttgtaagacatggagacattattcgactagaacacaaagaaacttcccggaacttgcacagtcactatcatgaggcccccatgacccggaagcactatcaggtcaccggctatggcataaatggaacaggggactcaaatgatttctggcggattgaggtcgtaaacaggaaatttggaaaccggatcaaagtgctgagaagtcgaattcgcttcatccatttggtcacaggttgtgtcctgggctcctcgggaaaggttctgcccaagtggggctgggagcagttggaagttacttgcaccccatacctgaaagaaaccctcaactccatctggaatgtggaggaccatatcaatcccaagttgccaaacatcagcctggatgtgctacagcccagttttcctgagatcttgctggaatcccacatggtcatgatccgggggaacagtggcctcaaacccaaggacaatgagttcacgtccaaaccctggcactggcctatcaactatcagggcctacgcttctcaggggtcaatgacacagatttccgagtctatctgcttggcaacccggtggtttggtggctgaatctgttgagcatcgccctctacctcctctcagggagcatcattgctgtagccatgcagagaggggcacggctgccagcggaggttgcagggttgtcccaggtcctgcttcgaggaggcggccaggtcctgctcggctggacactccattacttcccgtttttcctgatgggccgggtcctctacttccaccactacttcccagccatgctcttctcaagcatgttgacaggcattctgtgggacaccctcctgcggctctgtgcctggggcttggcctcatggcccctggcgaggggcatacatgtggcgggaatcctgagcctgctcctgggaactgcctacagcttctacctcttccaccctctggcttacgggatggttggtcccctggcccaggacccccaaagtccaatggcaggactaaggtggctggactcatgggacttttgaggccactgcaaagattccagcctgggtccaggaacttcccaggagagccagctgggaagcagtactggaccatccggccatgaggaagctgcctaaggagcccgaagaattctgctgctcaccaggacccagctctgggagtgcagctggaatggaacccagcattggagagagccgggagagagccgcagctccgtccacagcaccacggagaggacagcgcctcttgggctgctccctcgtgcacagcgcaggggaggatgggtgccagagggtgggagtgggtgcgcgtgtgtgtatgtgagggcatgttgtccatatccctgtggaatacagaccgtgtaactggacagctgagtgtcataaactctaaaatagtccaggctatagtaatattttctggtatttttttctgttggatttctttggttttggtttgtaagatccatcaaaaattctcagacctctgagagggccttgagggcagagaatactgacctcaccttgggatgtcaccaaaggcagagcagatgggactgtcaaagttgtgctgccctccctcccacaaacaaatgaatccagcgtggaggaaggcgcgccgccccgagctggagggcctggctcccaccatgccccccagtggctgcaggtagctggacttcctgcctgtgacgcacagagagcagcggactccggagcgtcagcctgccttagcccttggttcctcgttttttgggattgtcacactgtgacactcgggaggaacgatgtcctatcctgggctgctcagtgttcccaggccctgtgtgccagaggccaggtctctccaagtgcatctagcctggcctggagggcaaggcagatgcattctcctggctgctgggagagcccatgggaaccttgcttagcgcccaaggtagatgagagacagggcagggaatctgcgtggtgctgggatgtggggactctggcctctccagactaatgttcctgtcacctgctgagctttcccagtgtcacttctgcagtcctcctctgctcacccctccctcactccgtgggcaattccctttctctctgtcactgcttcagcagtgaagacccatggcacctagaaatgcatgccagcttcctgcgtctaccactctgcagctcaaacaagaagctcagagctgccccttccacttcctccccaaaagggatgaagaaaaccctgtggtagaaccaaaccacccaaggccagcccttaagcctgcctccaccttcctggtgcatgacaaaatatttcttttgtctcagaggactttgatgcttcaatatttaatgatgaatccgccacactccattttccctcctctgaagctcccaacaactctgacagggtcagatctctttaaagcatcttcaggaggcggttgccacggagactggatattggtcccagggacaggctgtgctacctactgggtggtggggagggaagcttctggccatgcttgggcattcagaccaaccatcattaatgttaatagaggaaatgcagcaacgtcaaaagcaaggcaggttggttaattagatctggggcccgatgacctccctttcccactgctacagcccttttgacttcccccagcaggaagcgctgtctgtgcggctgagtctgggccacttgcttaattgcatttctggcagggaaggagaggagggatggagaagctctgctcgctgcttccacctcaccgtgtgtcctcccctcccctcccttcctctcctccccacaggcggaattgctttcttctgagccgggtgggctctcctgcagggagaatgcaggggtctgtgcttggctcttagcaaagcaggtggcccacagtgacctccaggaggtggctgattttcctttgtgccttcttatttctcagtaggaacttggaagggaagagctctgaaggagccagaggggcagccaccttgcatgagggtgaggaaggagaagcccagccagcctctacccatccctccctcccaattaggctgcactggggccgaacgcttccctgggctcccactgccttctaaggagccaaggagaattccctgcccactttctgttcctccatgcccaaactggcagatgcttctctgggagcaaggccacatgggctgatgcagctttgagtgctcaggttctgttttctggaagttgctggagaagggctgtcagggtgcttctatgaatatgggcttcagctgtagcacttggcagaaacgtgatgtgtcccacaaactgctggtggaggaagaagatgttcgtcagccaattcaacctccagccagcttcttgagcctatttggtttaaaaaaaaaaagtcttctaatcagaagccactgattttataataaataacacttgttttgaa

SEQ ID NO: 175972 - DNA, 2253 bp, Artificial Sequence
  derived and/or modified sequence
atgccccccgccaccggcggcggcctggccgagagcgagctgagacccagaagaggcagatgcggcccccaggccgccagagccgccggcagagacgtggccgccgaggccgtggccagaagccccaagagacccgcctggggcagcagaagattcgaggccgtgggctggtgggccctgctggccctggtgaccctgctgagcttcgccaccagattccacagactggacgagcccccccacatctgctgggacgagacccacttcggcaagatgggcagctactacatcaacagaaccttcttcttcgacgtgcacccccccctgggcaagatgctgatcggcctggccggctacctgagcggctacgacggcaccttcctgttccagaagcccggcgacaagtacgagcaccacagctacatgggcatgagaggcttctgcgccttcctgggcagctggctggtgcccttcgcctacctgaccgtgctggacctgagcaagagcctgagcgccgccctgctgaccgccgccctgctgaccttcgacaccggctgcctgaccctgagccagtacatcctgctggaccccatcctgatgttcttcatcatggccgccatgctgagcatggtgaagtacaacagctgcgccgacagacccttcagcgccccctggtggttctggctgagcctgaccggcgtgagcctggccggcgccctgggcgtgaagttcgtgggcctgttcatcatcctgcaggtgggcctgaacaccatcgccgacctgtggtacctgttcggcgacctgagcctgagcctggtgaccgtgggcaagcacctgaccgccagagtgctgtgcctgatcgtgctgcccctggccctgtacaccgccaccttcgccgtgcacttcatggtgctgagcaagagcggccccggcgacggcttcttcagcagcgccttccaggccagactgagcggcaacaacctgcacaacgccagcatccccgagcacctggcctacggcagcgtgatcaccgtgaagaacctgagaatggccatcggctacctgcacagccacagacacctgtaccccgagggcatcggcgccagacagcagcaggtgaccacctacctgcacaaggactacaacaacctgtggatcatcaagaagcacaacaccaacagcgaccccctggaccccagcttccccgtggagttcgtgagacacggcgacatcatcagactggagcacaaggagaccagcagaaacctgcacagccactaccacgaggcccccatgaccagaaagcactaccaggtgaccggctacggcatcaacggcaccggcgacagcaacgacttctggagaatcgaggtggtgaacagaaagttcggcaacagaatcaaggtgctgagaagcagaatcagattcatccacctggtgaccggctgcgtgctgggcagcagcggcaaggtgctgcccaagtggggctgggagcagctggaggtgacctgcaccccctacctgaaggagaccctgaacagcatctggaacgtggaggaccacatcaaccccaagctgcccaacatcagcctggacgtgctgcagcccagcttccccgagatcctgctggagagccacatggtgatgatcagaggcaacagcggcctgaagcccaaggacaacgagttcaccagcaagccctggcactggcccatcaactaccagggcctgagattcagcggcgtgaacgacaccgacttcagagtgtacctgctgggcaaccccgtggtgtggtggctgaacctgctgagcatcgccctgtacctgctgagcggcagcatcatcgccgtggccatgcagagaggcgccagactgcccgccgaggtggccggcctgagccaggtgctgctgagaggcggcggccaggtgctgctgggctggaccctgcactacttccccttcttcctgatgggcagagtgctgtacttccaccactacttccccgccatgctgttcagcagcatgctgaccggcatcctgtgggacaccctgctgagactgtgcgcctggggcctggccagctggcccctggccagaggcatccacgtggccggcatcctgagcctgctgctgggcaccgcctacagcttctacctgttccaccccctggcctacggcatggtgggccccctggcccaggacccccagagccccatggccggcctgagatggctggacagctgggacttctag

SEQ ID NO: 175973 - protein, 417 aa, Artificial Sequence
  derived and/or modified sequence
MGRRRAPELYRAPFPLYALQVDPSTGLLIAAGGGGAAKTGIKNGVHFLQLELINGRLSASLLHSHDTETRATMNLALAGDILAAGQDAHCQLLRFQAHQQQGNKAEKAGSKEQGPRQRKGAAPAEKKCGAETQHEGLELRVENLQAVQTDFSSDPLQKVVCFNHDNTLLATGGTDGYVRVWKVPSLEKVLEFKAHEGEIEDLALGPDGKLVTVGRDLKASVWQKDQLVTQLHWQENGPTFSSTPYRYQACRFGQVPDQPAGLRLFTVQIPHKRLRQPPPCYLTAWDGSNFLPLRTKSCGHEVVSCLDVSESGTFLGLGTVTGSVAIYIAFSLQCLYYVREAHGIVVTDVAFLPEKGRGPELLGSHETALFSVAVDSRCQLHLLPSRRSVPVWLLLLLCVGLIIVTILLLQSAFPGFL

SEQ ID NO: 175974 - DNA, 1254 bp, Artificial Sequence
  derived and/or modified sequence
atgggccggcgaagggcccccgaattataccgcgccccatttccgttgtacgcacttcaggttgatccctcaaccgggttactgattgccgccggcgggggcggggcagccaaaacgggcataaagaacggggtgcactttcttcagcttgagctcatcaatgggcgcttgtctgcaagcctattgcattcccacgacacagagacaagggctaccatgaatctagcgcttgctggcgacattctagctgccggacaggacgcacactgccagctacttagatttcaggcccaccagcagcaggggaacaaagccgaaaaagccgggagcaaagaacaggggccacgccagcggaagggcgccgctccggccgagaagaaatgcggtgcagaaacacagcacgagggccttgagttacgggtggagaacctgcaagcggtgcagacagatttctcttcagaccctcttcagaaggtggtctgcttcaaccacgataacaccttgctggctacagggggaacagacggttacgttagggtctggaaagtgccttcactggagaaggtactggaatttaaggcacacgaaggggagattgaggatctggctctagggcctgatggaaagctcgtcaccgtgggccgcgacttaaaggcctctgtttggcaaaaggaccaactcgtgactcagctccactggcaggaaaacgggcccacattctcttcaacgccttatagatatcaagcttgtcgcttcggtcaagtgccggaccagcccgccggcctgcggctgttcaccgtccagattcctcacaaaagactgcggcaacccccgccttgctatcttacagcgtgggacgggtccaacttcttgccactgcggaccaagtcttgtggccacgaagttgtgagctgcctggacgtgagtgagtcagggacattcctgggtctggggaccgtaaccggctcagtggcaatctatattgccttttcgctgcagtgcctgtactacgttcgggaagctcatgggattgtcgtcaccgatgtggccttcttacccgaaaaaggccgaggcccggaactgctggggagtcatgagaccgcactgtttagcgtcgcagttgatagccgttgccaactgcaccttctccccagcaggaggagtgtccctgtctggttactgttgctgctttgcgttggcctgatcattgtcactatcctgctgcttcagagcgcgtttcctgggttcctatag

SEQ ID NO: 175975 - DNA, 1254 bp, Artificial Sequence
  derived and/or modified sequence
atgggtcgaagacgggctcctgaattataccgcgccccctttccattgtacgcgctgcaggtggatccctctaccggcctgctcatcgccgcaggcggtgggggggcggcgaaaactggaatcaaaaatggggtgcattttctgcagcttgaactgatcaatggacggttgagcgcgtccctcttgcacagtcacgataccgaaacccgcgctaccatgaacctggccttggcaggagatatcctggctgcgggccaggacgcacattgccaactcctccggtttcaggctcaccagcagcagggcaataaggctgagaaggctggaagcaaggagcagggccccagacaacgtaagggggccgcccccgccgagaagaagtgcggggccgaaacccagcacgagggtttggagctgcgggtcgaaaacttacaggccgtgcagactgactttagtagtgaccccctgcagaaagtcgtgtgctttaatcatgacaataccctcctcgcgaccggcgggaccgacggctatgtaagggtgtggaaagtgccctcactggagaaggtgctcgagtttaaggcacacgaaggtgaaatcgaggaccttgccctgggccctgacggcaagctcgtgaccgtggggcgggacctcaaggcctcagtttggcagaaggatcagttggtcacccagctccattggcaggagaacggacccactttttcctctaccccctaccggtatcaggcgtgcaggttcggtcaggtgcctgatcagccagcgggcctccgcctctttaccgtacaaattccccataaacgactccgccagcctcctccttgttatctgaccgcctgggacggttccaacttcctacccctgcgtacaaaatcttgcggccacgaggtggtgtcctgtctggacgtaagcgagagcgggactttccttgggctggggacagtgaccggcagcgtggcaatttacatcgctttttcacttcagtgcctttactacgtccgggaagcgcatggcattgtggttaccgacgttgcctttttgccagaaaaagggagaggtcccgagctgctggggtctcacgagaccgccctgttttctgtggccgttgactccaggtgccagttacacctcctcccgagccgccgatccgtccctgtttggctcctcctgctcctgtgcgtgggcctgatcattgtcaccattttgctgttgcagtccgcatttccaggattcctctag

SEQ ID NO: 175976 - DNA, 1254 bp, Artificial Sequence
  derived and/or modified sequence
atgggcagaagaagagcccctgagctgtaccgggcccccttccccctgtatgccctgcaggtggaccccagcacaggcctgctgattgctgctgggggcggcggggccgccaagacaggcatcaagaatggagtgcacttcctgcagctggagctgatcaatggccgcctgagcgccagcctgctgcacagccatgacacagagacccgggccaccatgaacctggccctggccggggacatcctggccgccggccaggatgcccactgccagctgctgcgcttccaggcccaccagcagcagggcaacaaggccgagaaggccggcagcaaggagcagggcccccggcagaggaaaggagctgccccagctgagaagaagtgtggggctgagacccagcacgagggcctggagctgcgggtggagaacctgcaggccgtgcagacagacttcagcagtgaccccctgcagaaggtggtgtgcttcaaccacgacaacaccctgctggccactggaggaacagatggctacgtgcgggtgtggaaggtgcccagcctggagaaggtgctggagttcaaggcccatgaaggagaaattgaggacctggccctgggcccagatggcaagctggtgacagtgggccgggacctgaaggcctctgtgtggcagaaggaccagctggtgacccagctgcactggcaggagaatggccccaccttcagcagcaccccctaccgctaccaggcctgccgcttcggccaggtgcctgaccagcctgctggcctgcggctcttcaccgtgcagatcccccacaagaggctgcggcagcccccaccctgctacctgacagcctgggatggcagcaacttcctgcccctgcggaccaagagctgtggccacgaggtggtgtcctgcctggatgtgtctgagagcggcaccttcctgggcctgggcaccgtgactggatctgtggccatctacatcgccttcagcctgcagtgcctgtactacgtgcgggaggcccacggcatcgtggtgacagatgtggccttcctgcctgagaagggccggggccctgagctgctgggcagccatgaaacagccctcttctctgtggccgtggacagccgctgccagctgcacctgctgcccagccgccgctctgtgcctgtgtggctgctgctgctgctgtgtgtgggcctcatcatcgtgaccatcctgctgctgcagagcgccttccctggcttcctgtag

SEQ ID NO: 175977 - DNA, 1254 bp, Artificial Sequence
  derived and/or modified sequence
atgggccggcggcgggcccccgagctgtaccgggcccccttccccctgtacgcactgcaagtcgacccaagcacaggtttgctgatagcagccggcgggggcggagcagcgaagaccggaatcaagaacggcgtgcattttcttcagctggagctaataaatgggcggctctcagcttcattgctgcactctcatgatacagagacgagggccactatgaaccttgccttggcaggggacattctcgccgccggccaagacgctcactgccaacttctgcgttttcaggcccatcagcagcagggcaataaagccgaaaaagctggcagtaaggaacagggccctcgtcagcgcaagggggcggccccagcagaaaagaagtgtggcgccgaaacacagcacgagggactggagctcagggtggagaatctgcaagccgtgcaaaccgacttttcctccgacccgcttcagaaggttgtctgctttaaccacgataacactttactggccaccggaggcacggacggctatgttcgcgtgtggaaagtgcctagcctcgagaaagtgttagaattcaaggcccacgagggtgaaatcgaagatttagccctgggcccagacggcaagctggtgacagtaggtcgggatctgaaggccagcgtgtggcagaaggaccagctcgtcacacaactgcactggcaggaaaacggtcctacctttagctctacaccataccggtatcaggcttgcagatttggacaggtgcccgatcaacctgccgggctgagactctttaccgtgcagattccacacaaaagacttcggcagcctcccccatgttatcttacagcttgggacggttccaatttcctgccacttcgcacaaagtcatgcggccatgaagtggtgtcttgcctggatgtctctgaaagcgggaccttcctgggactgggcacagttaccgggtctgtggccatatacatcgcgtttagcctccaatgcctgtactatgttcgcgaagcccatggcatcgttgtcactgacgtggccttccttcccgaaaagggccggggaccagaactgctcgggagtcatgagaccgctctcttctctgtggcggtggactcacgctgtcagctccaccttttaccctcccgccgaagcgttcccgtgtggctgcttctccttctgtgcgtaggcttgataatcgtgaccatcctgctattgcagtccgcctttcccggattcctgtag

SEQ ID NO: 175978 - DNA, 1254 bp, Artificial Sequence
  derived and/or modified sequence
atgggccggcggcgggcccccgagctgtaccgggcccccttccccttatacgcccttcaggtggatccttccaccggtttgttgattgccgccggaggcggcggggcagccaagactggaattaagaacggcgttcacttcctgcagttggagcttatcaatggtcggcttagtgcctcccttctgcactcgcatgacactgaaacaagagctacaatgaacctggccctggctggggacattctggctgctggacaagacgcccactgccagcttttgcgctttcaagcacaccaacagcaggggaataaggcagagaaggccggtagcaaggagcagggtccacggcagcgcaagggcgctgcccccgcagaaaaaaagtgcggggcagagacgcagcatgagggcctcgagctacgagtggaaaacttacaggccgttcagaccgacttctctagcgaccccctccagaaggtggtctgtttcaaccacgacaacaccttactggccaccgggggcactgacggatacgtccgtgtctggaaagtgccctcgctcgagaaggtcttggagttcaaagcgcacgagggcgagattgaagatcttgcgctggggcccgatggaaagctcgtgaccgtcggaagggatctcaaggcatctgtttggcaaaaagatcagctcgtgactcagcttcattggcaggagaacggaccaaccttttcttccacgccttaccgatatcaggcctgtagattcggacaggttccagatcagccagccggattacgcctattcacggtgcagatcccccataagagactgcgacagccccctccctgctacctcaccgcctgggacgggagcaacttcctgccccttcgtaccaaatcatgcgggcacgaagtggtgtcgtgtctggatgtgagcgaatcagggactttcctgggcctcggcacagtgactgggtcagtggcaatctacatcgctttctcattgcaatgtctgtattacgtcagagaggcacacggcatcgtggtgaccgacgtcgcgttcttacccgaaaagggacgcgggcccgagctcctgggtagccatgaaaccgctctttttagtgtggcagtcgacagtcggtgccagttacacctattgccatcaagacggagcgtcccagtgtggctgcttttactcctttgtgtgggattgatcatcgtcaccattttactgcttcagagcgcctttcccggcttcctttag

SEQ ID NO: 175979 - DNA, 1254 bp, Artificial Sequence
  derived and/or modified sequence
atggggaggcgtcgtgcaccagagttatatagggctccttttcccctttatgcacttcaggtggaccctagcacaggcctcttgatcgctgcaggagggggaggagccgctaagaccgggattaagaacggtgtgcacttcctccagctcgaattaatcaacggacgtctgtcggcttcactcctccacagccatgacacagagacacgtgcaactatgaacctggccttagctggggatattttagccgcaggccaggacgcccattgtcaactgctgcggttccaagcacaccagcagcaggggaataaagccgagaaagccggatcaaaggagcaagggccacgacagcgcaaaggagcagcccctgccgagaagaaatgcggggcagaaacacaacatgaggggctggagctgagggttgaaaatctacaagccgtacaaaccgacttttcaagcgaccccctacagaaagttgtgtgctttaatcacgacaacactttacttgccactggcggtactgatggatatgtacgggtctggaaagtgccctctctagaaaaggtactcgagttcaaagcacacgaaggcgagatcgaagatctcgctctagggccagatggcaaactggtaacagtgggtcgcgacttgaaggcgagtgtgtggcagaaggaccagctggtgacccagcttcattggcaggagaacgggcctacgttctcgtctactccctatcgttatcaggcctgtcgattcgggcaggtgcccgatcagccggctggtttgagactatttacggtccagattccacacaagcgcctgagacagcccccaccatgttacctcaccgcatgggatggtagcaacttcctccccctgagaactaagtcatgcggccatgaggtggtcagttgtctcgacgtgtccgagagcggcactttcctgggcctgggtaccgtgaccggctccgtcgccatctacattgccttctccctgcagtgtctgtactatgtgagggaggctcacggcattgtggtaacagatgtcgcctttctgcctgagaaaggtcgagggccagagctgctcggttctcacgagaccgctctctttagtgtggctgtggacagccggtgccagcttcatctcctgccttcccgcaggtccgttccggtatggcttcttttgttactgtgcgtaggcctgatcatcgtgacaattctgttgttacagtccgcttttccagggttcttgtag

SEQ ID NO: 175980 - DNA, 1254 bp, Artificial Sequence
  derived and/or modified sequence
atgggacggagaagggcccctgaactgtatagagcacccttccccctgtatgcgctccaagtcgacccctcaaccggactgctgattgcagccggtggcggtggcgcagctaagacgggcattaagaacggggtacatttcttgcagttagagctgattaatggacggctgagtgccagcctgttacattctcacgatactgagacaagagcaaccatgaatcttgctcttgctggagatatcttggccgcagggcaggacgcccactgccaattgctccggtttcaggctcaccaacagcaaggcaataaggcagagaaggccggtagcaaggagcaaggacctcgccaaaggaagggtgccgctccagccgagaaaaaatgcggggctgaaacccagcatgagggccttgaactgagagtggagaacttgcaggcagtgcagaccgatttctcatcagaccctctccagaaagtggtctgttttaatcacgacaacacgctgctcgctacaggagggaccgacggatacgtgagggtgtggaaggtgccatccctggaaaaagtcctcgaatttaaagcccatgagggcgagatagaagatttggcactcggaccagatggcaagctggtgactgtgggcagggacttgaaggcatccgtctggcagaaagaccagctagtcacccaactgcattggcaggaaaatggccctactttcagttcaaccccctaccgctaccaggcctgtagattcggacaagtgcctgatcaaccagcagggctccgactgttcacagttcagattcctcacaaaagacttagacagccccctccatgctacctgaccgcctgggatggatctaatttcctacctctcagaacgaaatcgtgcgggcatgaggtggtatcctgtctcgatgtcagtgagagcggtacattcctggggctcggcactgttacagggtcggtcgctatctatattgcattctcccttcagtgcctctattatgtcagggaagctcatggaatcgtggtgacggatgtggccttcctcccagaaaagggccgtggccctgagctgctggggtcacacgaaacggctctcttcagtgttgccgtggactcgcggtgccagcttcatctgctgccctcgagacggagtgtccctgtgtggctgcttctgctattgtgcgtagggctgatcattgttaccattctccttttgcagtctgcattccctgggtttctttag

SEQ ID NO: 175981 - DNA, 2166 bp, Artificial Sequence
  derived and/or modified sequence
gcctgcgcggagggagccgcgagacaggtgcgcatgcgcagtgcgcgtctgcgagaccgacttggacggagccgagctgaggctcggcttcctgctgatggtcagggttttggcaactccccggtgtgagaggggtagggagtgctcccggcggcgacggggccgagttcaccagccgccggggcagtagtcgaaggcccggcgcggcatgtcctgggtgccgcggtgcgggcagtgaacgcgcgccgggcgggatgggccggcgccgggcgccagagctgtaccgggctccgttcccgttgtacgcgcttcaggtcgaccccagcactgggctgctcatcgctgcgggcggaggaggcgccgccaagacaggcataaagaatggcgtgcactttctgcagctagagctgattaatgggcgcttgagtgcctccttgctgcactcccatgacacagagacacgggccaccatgaacttggcactggctggtgacatccttgctgcagggcaggatgcccactgtcagctcctgcgcttccaggcacatcaacagcagggcaacaaggcagagaaggccggttccaaggagcaggggcctcgacaaaggaagggagcagccccagcagagaagaaatgtggagcggaaacccagcacgaggggctagaactcagggtagagaatttgcaggcggtgcagacagactttagctccgatccactgcagaaagttgtgtgcttcaaccacgataataccctgcttgccactggaggaacagatggctacgtccgtgtctggaaggtgcccagcctggagaaggttctggagttcaaagcccacgaaggggagattgaagacctggctttagggcctgatggcaagttggtaaccgtgggccgggaccttaaggcctctgtgtggcagaaggatcagctggtgacacagctgcactggcaagaaaatggacccaccttttccagcacaccttaccgctaccaggcctgcaggtttgggcaggttccagaccagcctgctggcctgcgactcttcacagtgcaaattccccacaagcgcctgcgccagccccctccctgctacctcacagcctgggatggctccaacttcttgccccttcggaccaagtcctgtggccatgaagtcgtctcctgcctcgatgtcagtgaatccggcaccttcctaggcctgggcacagtcactggctctgttgccatctacatagctttctctctccagtgcctctactacgtgagggaggcccatggcattgtggtgacggatgtggcctttctacctgagaagggtcgtggtccagagctccttgggtcccatgaaactgccctgttctctgtggctgtggacagtcgttgccagctgcatctgttgccctcacggcggagtgttcctgtgtggctcctgctcctgctgtgtgtcgggcttattattgtgaccatcctgctgctccagagtgcctttccaggtttcctttagcttccctgcttcctgggaatcaggagcctggacactgccatctctagagcagagtggaggcctggactccctttgctcactccattcgggtccacagctgaggttgccgctgacaagatgaatgggcactgcctgcccttctagtgaaaaggcttggctatggccctgtgtgactccaggtcccaggaaccttgccttcgtcatctgtggatccatccagaacagcggtatctgaagcccaggccatactccctgcctcctttcttctgcctaccagaggctccagagttgagcttgtccttatctagaaacatgtgaagatgcccaagagcctggaggcactgctgtccttcctgcagaaacagtttctcctcctcccctcagccttgtggccagttcctcttcacatgaagcccctggcatttgctggggaagggactggcctggtacttgctgttagggcaggaaggggcaaaaggaagacttgggtagtaatctgggggttcagatgggtagcactaagccagctggcctaaagatgcaataagttcctaggtagtctacccttaccttgaggaatgggaaaatgaacctcagcccattaggcaggaaaagttgatatttaataaacaaggaaagagtgaactgagaccccaaa

SEQ ID NO: 175982 - DNA, 1692 bp, Artificial Sequence
  derived and/or modified sequence
ttggacggagccgagctgaggctcggcttcctgctgatggtcagggttttggcaactccccggtgtgagaggggtagggagtgctcccggcggcatgtcctgggtgccgcggtgcgggcagtgaacgcgcgccgggcgggatgggccggcgccgggcgccagagctgtaccgggctccgttcccgttgtacgcgcttcaggtcgaccccagcactgggctgctcatcgctgcgggcggaggaggcgccgccaagacaggcataaagaatggcgtgcactttctgcagctagagctgattaatgggcgcttgagtgcctccttgctgcactcccatgacacagagacacgggccaccatgaacttggcactggctggtgacatccttgctgcagggcaggatgcccactgtcagctcctgcgcttccaggcacatcaacagcagggcaacaaggcagagaaggccggttccaaggagcaggggcctcgacaaaggaagggagcagccccagcagagaagaaatgtggagcggaaacccagcacgaggggctagaactcagggtagagaatttgcaggcggtgcagacagactttagctccgatccactgcagaaagttgtgtgcttcaaccacgataataccctgcttgccactggaggaacagatggctacgtccgtgtctggaaggtgcccagcctggagaaggttctggagttcaaagcccacgaaggggagattgaagacctggctttagggcctgatggcaagttggtaaccgtgggccgggaccttaaggcctctgtgtggcagaaggatcagctggtgacacagctgcactggcaagaaaatggacccaccttttccagcacaccttaccgctaccaggcctgcaggtttgggcaggttccagaccagcctgctggcctgcgactcttcacagtgcaaattccccacaagcgcctgcgccagccccctccctgctacctcacagcctgggatggctccaacttcttgccccttcggaccaagtcctgtggccatgaagtcgtctcctgcctcgatgtcagtgaatccggcaccttcctaggcctgggcacagtcactggctctgttgccatctacatagctttctctctccagtgcctctactacgtgagggaggcccatggcattgtggtgacggatgtggcctttctacctgagaagggtcgtggtccagagctccttgggtcccatgaaactgccctgttctctgtggctgtggacagtcgttgccagctgcatctgttgccctcacggcggagtgttcctgtgtggctcctgctcctgctgtgtgtcgggcttattattgtgaccatcctgctgctccagagtgcctttccaggtttcctttagcttccctgcttcctgggaatcaggagcctggacactgccatctctagagcagagtggaggcctggactccctttgctcactccattcgggtccacagctgaggttgccgctgacaagatgaatgggcactgcctgcccttctagtgaaaaggcttggctatggccctgtgtgactccaggtcccaggaaccttgccttcgtcatctgtggatccatccagaacagcggtatctgaagcccaggccatactccctgcctcctttcttctgcctaccagaggctccagagttgagcttgt

SEQ ID NO: 175983 - DNA, 1254 bp, Artificial Sequence
  derived and/or modified sequence
atgggcagaagaagagcccccgagctgtacagagcccccttccccctgtacgccctgcaggtggaccccagcaccggcctgctgatcgccgccggcggcggcggcgccgccaagaccggcatcaagaacggcgtgcacttcctgcagctggagctgatcaacggcagactgagcgccagcctgctgcacagccacgacaccgagaccagagccaccatgaacctggccctggccggcgacatcctggccgccggccaggacgcccactgccagctgctgagattccaggcccaccagcagcagggcaacaaggccgagaaggccggcagcaaggagcagggccccagacagagaaagggcgccgcccccgccgagaagaagtgcggcgccgagacccagcacgagggcctggagctgagagtggagaacctgcaggccgtgcagaccgacttcagcagcgaccccctgcagaaggtggtgtgcttcaaccacgacaacaccctgctggccaccggcggcaccgacggctacgtgagagtgtggaaggtgcccagcctggagaaggtgctggagttcaaggcccacgagggcgagatcgaggacctggccctgggccccgacggcaagctggtgaccgtgggcagagacctgaaggccagcgtgtggcagaaggaccagctggtgacccagctgcactggcaggagaacggccccaccttcagcagcaccccctacagataccaggcctgcagattcggccaggtgcccgaccagcccgccggcctgagactgttcaccgtgcagatcccccacaagagactgagacagccccccccctgctacctgaccgcctgggacggcagcaacttcctgcccctgagaaccaagagctgcggccacgaggtggtgagctgcctggacgtgagcgagagcggcaccttcctgggcctgggcaccgtgaccggcagcgtggccatctacatcgccttcagcctgcagtgcctgtactacgtgagagaggcccacggcatcgtggtgaccgacgtggccttcctgcccgagaagggcagaggccccgagctgctgggcagccacgagaccgccctgttcagcgtggccgtggacagcagatgccagctgcacctgctgcccagcagaagaagcgtgcccgtgtggctgctgctgctgctgtgcgtgggcctgatcatcgtgaccatcctgctgctgcagagcgccttccccggcttcctgtag

SEQ ID NO: 175984 - protein, 1359 aa, Artificial Sequence
  derived and/or modified sequence
MAEAGLRGWLLWALLLRLAQSEPYTTIHQPGYCAFYDECGKNPELSGSLMTLSNVSCLSNTPARKITGDHLILLQKICPRLYTGPNTQACCSAKQLVSLEASLSITKALLTRCPACSDNFVNLHCHNTCSPNQSLFINVTRVAQLGAGQLPAVVAYEAFYQHSFAEQSYDSCSRVRVPAAATLAVGTMCGVYGSALCNAQRWLNFQGDTGNGLAPLDITFHLLEPGQAVGSGIQPLNEGVARCNESQGDDVATCSCQDCAASCPAIARPQALDSTFYLGQMPGSLVLIIILCSVFAVVTILLVGFRVAPARDKSKMVDPKKGTSLSDKLSFSTHTLLGQFFQGWGTWVASWPLTILVLSVIPVVALAAGLVFTELTTDPVELWSAPNSQARSEKAFHDQHFGPFFRTNQVILTAPNRSSYRYDSLLLGPKNFSGILDLDLLLELLELQERLRHLQVWSPEAQRNISLQDICYAPLNPDNTSLYDCCINSLLQYFQNNRTLLLLTANQTLMGQTSQVDWKDHFLYCANAPLTFKDGTALALSCMADYGAPVFPFLAIGGYKGKDYSEAEALIMTFSLNNYPAGDPRLAQAKLWEEAFLEEMRAFQRRMAGMFQVTFMAERSLEDEINRTTAEDLPIFATSYIVIFLYISLALGSYSSWSRVMVDSKATLGLGGVAVVLGAVMAAMGFFSYLGIRSSLVILQVVPFLVLSVGADNIFIFVLEYQRLPRRPGEPREVHIGRALGRVAPSMLLCSLSEAICFFLGALTPMPAVRTFALTSGLAVILDFLLQMSAFVALLSLDSKRQEASRLDVCCCVKPQELPPPGQGEGLLLGFFQKAYAPFLLHWITRGVVLLLFLALFGVSLYSMCHISVGLDQELALPKDSYLLDYFLFLNRYFEVGAPVYFVTTLGYNFSSEAGMNAICSSAGCNNFSFTQKIQYATEFPEQSYLAIPASSWVDDFIDWLTPSSCCRLYISGPNKDKFCPSTVNSLNCLKNCMSITMGSVRPSVEQFHKYLPWFLNDRPNIKCPKGGLAAYSTSVNLTSDGQVLDTVAILSPRLEYSGTISAHCNLYLLDSTSRFMAYHKPLKNSQDYTEALRAARELAANITADLRKVPGTDPAFEVFPYTITNVFYEQYLTILPEGLFMLSLCLVPTFAVSCLLLGLDLRSGLLNLLSIVMILVDTVGFMALWGISYNAVSLINLVSAVGMSVEFVSHITRSFAISTKPTWLERAKEATISMGSAVFAGVAMTNLPGILVLGLAKAQLIQIFFFRLNLLITLLGLLHGLVFLPVILSYVGPDVNPALALEQKRAEEAVAAVMVASCPNHPSRVSTADNIYVNHSFEGSIKGAGAISNFLPNNGRQF

SEQ ID NO: 175985 - DNA, 4080 bp, Artificial Sequence
  derived and/or modified sequence
atggccgaagccggactgcgtggctggctgctttgggcccttttactgaggctagcacagagcgagccctacaccaccattcaccagcccggctactgcgcattttacgatgagtgtgggaagaatccagagctgagcggctccctcatgacattgtctaacgtcagctgtctatcaaatacgcccgctaggaagattacgggggatcatcttattctgctgcaaaaaatatgtccgcgactgtacacaggacctaacacacaggcatgctgctctgcaaaacagttggtgtcccttgaagcttctctatctataactaaggccctgctaacccggtgtccggcctgctctgataactttgtgaacttgcattgtcataacacgtgttctcccaatcagagcctgttcatcaacgtcacacgcgttgcgcagctcggggcggggcaacttcctgctgtcgtggcttacgaggccttttatcagcacagcttcgccgagcagtcctacgattcttgttcgagggtgagggtgcctgccgctgctactctggcagttggcactatgtgcggagtatacggatcagcactttgcaatgcccaacgctggctgaactttcaaggagacacgggaaatggactggcacctctggatatcacattccacctgctggaaccagggcaggccgttggaagcggaattcagcccctcaacgaaggcgtagctcgctgcaatgagtcacagggggacgacgtcgccacttgtagctgccaggactgtgctgctagttgtcctgcaatagcccgaccacaggctctcgactccacgttctacctagggcagatgcctgggtcgctcgtgctgatcataatcctgtgctctgtgttcgctgtagtgactatacttctggtaggctttagagtagctcccgctcgagacaagtctaagatggtggatcccaagaaagggacctccctgtcggataagctgtctttttcgacccacacactgctcggccagttttttcaaggttggggaacatgggtcgcaagctggcccctaactattctggtactctcagtcatcccggtcgttgccctggccgccggtctggttttcactgaattaaccactgaccctgtggaactgtggtccgccccgaactcccaggcccgttctgagaaggccttccatgaccagcacttcgggccctttttcaggactaatcaggtgatcctcaccgcgccaaaccgcagctcctataggtacgactctttattgctgggaccaaagaatttctccggcatactagacctagatttgctgcttgagttgctggaactgcaggaacgattacggcacttgcaagtttggagccccgaggctcagcgtaatattagtctgcaggacatttgttacgctcctctgaacccggacaacacctcactgtacgactgttgcatcaatagcctgctccagtattttcagaacaaccgcactctgctcctcctcaccgcgaatcagactctgatggggcagacgagccaggttgactggaaggatcactttctgtactgcgccaatgctccattaacttttaaagatggtactgctttggccctctcgtgtatggctgattatggcgcgcctgtcttccccttcctggccattggagggtataagggcaaggattattctgaagccgaagcattgataatgaccttttcgctcaacaattaccccgcaggagatccacgcctggctcaggcgaaactctgggaggaggcattcttagaggaaatgcgggccttccagcgccggatggctggcatgttccaggtcacatttatggccgagcggtccctggaggatgagatcaatagaactacggctgaggacctaccaatctttgctacttcctatatcgtgatctttctgtatatctctttagcactggggagttacagctcttggtccagggtgatggttgatagtaaggccacgctggggctcggcggcgtggcggtggttctaggcgccgtgatggcagcaatggggtttttcagctacctgggtattagatcatcactagtgattctacaagtggtgcctttcttagtcctgagcgttggggcagataatattttcatttttgtcttagagtaccaacggcttccgcgcaggcctggcgaaccacgcgaggtccatattggacgcgcactgggcagagtggcacctagcatgctactgtgcagtctgtcagaagctatctgcttcttcctcggggctctgacccccatgcctgctgtacgaacattcgcccttacatctggtctggctgtgatccttgattttttgttgcagatgtctgcctttgttgcattgctgtctctggacagtaaaagacaggaggcgtctcgcctggatgtgtgttgttgcgttaagcctcaggaattgccaccacctggacagggagaaggcctccttctgggcttcttccagaaggcttatgctcccttcctacttcactggattaccaggggcgtggtactgctactgttcctggccctcttcggcgtctctctttattctatgtgtcatattagcgttggcctcgatcaggagctggctctgcctaaagacagttacttacttgactattttctattcctgaaccgctacttcgaggtcggcgcgcccgtgtatttcgttacgacacttggctacaacttttcaagcgaagccgggatgaacgccatctgcagttcagcagggtgtaataacttctcattcacccaaaagatccagtacgcgactgagttccctgagcagagttatctggctatcccagctagctcctgggtggacgattttatcgattggctgacgcccagctcatgctgtaggctctacatttctgggcctaataaggacaaattttgtccatcgaccgtgaatagcctgaactgtctcaaaaactgtatgagcataactatgggatccgtacggccatctgtcgaacagttccacaaatatttgccttggtttcttaacgatagacccaacatcaagtgcccgaagggtgggttggccgcctattccactagtgtgaacctgaccagcgatgggcaggttctggataccgtcgccatcctgtctccgcgactggagtattccggcaccataagcgcccattgtaatttatatcttcttgacagcacctcccgttttatggcctatcataaacctcttaaaaacagccaagattacactgaagccctgcgcgccgcccgtgaattagccgcaaatatcacggccgacttgcggaaagtgcctggtaccgaccctgcttttgaggtgtttccatacactatcaccaatgttttctatgaacagtacctaactattcttcctgagggcctgtttatgctgtcactgtgcctggtgcccactttcgctgtctcatgcttgctgcttggcctcgacctgcgttcagggctcctgaatctgttatctattgtgatgatcctggttgatactgtaggattcatggccctgtgggggatttcttataacgcagtttcgctgattaacctagtctcagctgtgggtatgtctgtggaattcgtctctcacatcactcggagttttgccatcagcactaagccaacgtggctcgagagggctaaagaggcgactatctctatgggttctgccgtttttgcaggtgtggccatgacaaacctgccaggcatcctagtgctgggacttgcaaaggcacagcttatccagatattcttctttcgcttgaatttgctgattaccctgcttggcctgctgcatggcttagtgttcctgcccgtcattctttcctacgtcggccccgacgtgaatccggccctggcgctggagcagaaacgggctgaagaagccgtggccgctgtgatggtggcttcatgtcccaaccacccctcccgcgtttccaccgccgacaacatatatgttaaccatagctttgagggcagcattaagggggccggcgccatctcaaatttcctgccaaataacgggagacagttctag

SEQ ID NO: 175986 - DNA, 4080 bp, Artificial Sequence
  derived and/or modified sequence
atggccgaggccggcctgcggggctggctgctgtgggccctgctgctgcggctggcccagagcgagccctacaccaccatccaccagcccggctactgtgccttctatgatgaatgtgggaagaaccctgagctgagcggcagcctgatgaccctgagcaatgtgtcctgcctgagcaacaccccagccaggaagatcactggagaccacctgatcctgctgcagaagatctgcccccggctgtacacaggccccaacacccaggcctgctgcagcgccaagcagctggtgtccctggaggccagcctgagcatcaccaaggccctgctgacccgctgcccagcctgcagcgacaactttgtgaacctgcactgccacaacacctgcagccccaaccagagcctcttcatcaacgtgaccagggtggcccagctgggcgccggccagctgcctgctgtggtggcctatgaggccttctaccagcacagctttgctgagcagagctatgacagctgcagccgggtgcgggtgcctgctgctgccaccctggccgtgggcaccatgtgtggggtgtatggcagcgccctgtgcaatgcccagcgctggctgaacttccagggcgacacaggaaatggcctggcccccctggacatcaccttccacctgctggagcccggccaggccgtgggcagcggcatccagcccctgaatgaaggagtggcccgctgcaatgaaagccagggagatgatgtggccacctgcagctgccaggactgtgccgccagctgcccagccatcgcccggccccaggccctggacagcaccttctacctgggccagatgcctggcagcctggtgctgatcatcatcctgtgcagcgtgtttgctgtggtgaccatcctgctggtgggcttccgggtggccccagcccgggacaagagcaagatggtggaccccaagaagggcaccagcctgagtgacaagctgtccttcagcacccacaccctgctgggccagttcttccagggctggggcacctgggtggcctcctggcccctgaccatcctggtgctgagcgtcatccctgtggtggccctggccgccggcctggtgttcacagagctgaccacagatcctgtggagctgtggagcgcccccaacagccaggcccggtctgagaaggccttccatgaccagcacttcggccccttcttccgcaccaaccaggtgatcctgacagcccccaacagaagcagctaccgctatgacagcctgctgctgggccccaagaacttcagcggcatcctggacctggacctgctgctggagctgctggagctgcaggagcggctgcggcacctgcaggtgtggagccctgaggcccagaggaacatcagcctgcaggacatctgctacgcccccctgaacccagacaacaccagcctgtatgactgctgcatcaacagcctgctgcagtacttccagaacaacagaaccctgctgctgctgacagccaaccagaccctgatgggccagaccagccaggtggactggaaggaccacttcctgtactgtgccaatgcccccctgaccttcaaggatggaacagccctggccctgagctgcatggctgactatggagcccctgtgttccccttcctggccatcggcggctacaagggcaaggactacagcgaggccgaggccctgatcatgaccttcagcctgaacaactacccagctggggacccccggctggcccaggccaagctgtgggaggaggccttcctggaggagatgagggccttccagaggaggatggccggcatgttccaggtgaccttcatggccgagaggagcctggaggatgagatcaacagaaccacagctgaggacctgcccatctttgccaccagctacatcgtcatcttcctgtacatcagcctggccctgggcagctacagctcctggagccgggtgatggtggacagcaaggccaccctgggcctgggcggcgtggccgtggtgctgggcgctgtgatggccgccatgggcttcttctcctacctgggcatccgcagcagcctggtgatcctgcaggtggtgcccttcctggtgctgtctgtgggcgctgacaacatcttcatctttgtgctggagtaccagaggctgccccggcggcctggagagccccgggaggtgcacatcggccgggccctgggccgggtggcccccagcatgctgctgtgcagcctgtctgaggccatctgcttcttcctgggcgccctgacccccatgcctgctgtgaggacctttgccctgaccagcggcctggccgtcatcctggacttcctgctgcagatgtctgcctttgtggccctgctgagcctggacagcaagaggcaggaggccagccggctggatgtgtgctgctgcgtgaagccccaggagctgcccccacctggccagggcgagggcctgctgctgggcttcttccagaaggcctatgcccccttcctgctgcactggatcacccggggcgtggtgctgctgctcttcctggccctgtttggagtgtccctgtacagcatgtgccacatctctgtgggcctggaccaggagctggccctgcccaaggacagctacctgctggactacttcctgttcctgaaccgctactttgaggtgggcgcccctgtgtactttgtgaccaccctgggctacaacttcagcagcgaggccggcatgaatgccatctgcagcagcgctggctgcaacaacttctccttcacccagaagatccagtatgccacagagttccctgagcagagctacctggccatcccagccagctcctgggtggatgacttcatcgactggctgacccccagcagctgctgccgcctgtacatcagcggccccaacaaggacaagttctgccccagcacagtgaacagcctgaactgcctgaagaactgcatgagcatcaccatgggctctgtgcggcccagcgtggagcagttccacaagtacctgccctggttcctgaatgaccggcccaacatcaagtgccccaagggcggcctggccgcctacagcacctctgtgaacctgaccagtgatggccaggtgctggacacagtggccatcctgagcccccggctggagtacagcggcaccatcagcgcccactgcaacctgtacctgctggacagcaccagccgcttcatggcctaccacaagcccctgaagaacagccaggactacacagaggccctgcgggccgcccgggagctggccgccaacatcacagctgacctgaggaaggtgcctggaacagatcctgcctttgaggtgttcccctacaccatcaccaacgtgttctatgagcagtacctgaccatcctgcctgagggcctcttcatgctgagcctgtgcctggtgcccacctttgctgtgtcctgcctgctgctgggcctggacctgcggagcggcctgctgaacctgctgagcatcgtgatgatcctggtggacacagtgggcttcatggccctgtggggcatctcctacaatgctgtgtccctcatcaacctggtgtctgctgtgggcatgtctgtggagtttgtgagccacatcaccaggagctttgccatcagcaccaagcccacctggctggagcgggccaaggaggccaccatctccatgggcagcgctgtgtttgctggggtggccatgaccaacctgcccggcatcctggtgctgggcctggccaaggcccagctgatccagatcttcttcttccggctgaacctgctgatcaccctgctgggcctgctgcacggcctggtgttcctgcccgtcatcctgtcctatgtgggcccagatgtgaacccagccctggccctggagcagaagagagctgaggaggccgtggccgctgtgatggtggccagctgccccaaccaccccagccgggtgtccacagctgacaacatctacgtgaaccacagctttgagggcagcatcaagggagctggggccatcagcaacttcctgcccaacaacggccggcagttctag

SEQ ID NO: 175987 - DNA, 4080 bp, Artificial Sequence
  derived and/or modified sequence
atggccgaggccggcctgcggggctggctgctgtgggccctgctgctgcgcctggcccagagtgaaccctacactaccatacaccagccagggtattgtgctttctatgacgagtgcggcaaaaatccagagctgagtggctccctgatgactctgagcaacgtcagttgtctgtcaaatacaccagcgagaaagataactggagaccacctgattctgcttcagaaaatttgcccccggctatacacaggaccaaacactcaggcgtgctgcagcgcaaaacagctggtgtcactggaggcatctttaagtatcactaaggccctccttacccgctgtcccgcctgttcagacaacttcgtcaaccttcattgccataacacctgctcccccaatcagtcgttgtttatcaatgtgacccgcgtcgctcagcttggggcgggccaactgccagcagtcgtggcctatgaggccttctatcaacactctttcgcagagcagtcatatgacagctgctccagagttcgggtccctgcagccgccacactcgccgtgggaaccatgtgcggggtgtacggctctgccctctgtaatgcgcagcgctggctaaatttccagggagataccggtaacggcctggctcccctcgatatcactttccatctgttagaaccggggcaagctgtgggcagcggtatccagccccttaatgagggcgtagctaggtgtaacgaaagtcagggcgatgacgtggccacgtgttcatgccaggattgtgctgcttcatgtccagccatcgctaggccgcaggccctagactcaactttttatcttggacaaatgcctggcagcctggttcttattatcatcttatgcagtgtgttcgctgttgtgactatattattagtgggatttcgcgtagcacccgcacgggataagtccaagatggttgatcccaagaaaggaacatctctatccgataagcttagcttctcgacgcatacattgctaggacagttcttccaggggtggggaacttgggtggcttcctggcccctgacaattctggtgctgtcggtaatcccagtcgtggccttggccgcaggactcgtttttaccgagctgaccaccgacccagtggaactttggtcagctcctaatagccaggcgcggtcagaaaaagccttccatgaccagcacttcggaccctttttcaggacgaaccaagtgattttaactgcgcccaaccgcagcagctacagatatgactccctgctcttagggccaaagaatttcagcggaatcttggatttggatctgctgttagaactcttggagcttcaggagcgcctacgccatctgcaggtctggtctcccgaagcacagaggaacattagcctacaggatatatgctatgccccattaaaccctgacaacacttcactgtacgactgctgcatcaacagcttgttgcagtactttcagaataatcggacccttctactcctcacagccaatcagactctgatggggcagacaagccaggttgactggaaagaccacttcctgtattgcgcaaacgctcccctgacctttaaggatggcacagcgctcgcgctgagttgtatggcggattatggggctccggtgtttccctttctggcgattggaggatataaagggaaggattactccgaagctgaggcactaattatgacatttagcctcaataattacccagccggggaccccagactggcccaggccaaactatgggaagaggccttcctggaggaaatgagagcattccagaggaggatggcaggcatgttccaagtcaccttcatggctgagagaagcctggaggacgaaatcaacaggaccaccgcggaagatctcccaatatttgccacgagttacatagtgatattcctatacatatccctggcactcgggtcctattcttcttggagcagggtgatggttgacagtaaagctaccttagggctgggaggtgtcgcagtggtacttggagctgtcatggcggcaatgggcttcttcagctaccttggtatccggagctcactggtaattctgcaggtagtgccattcctggttctgtccgtgggtgctgacaacatttttatattcgtgctggaataccagcggttgcctaggcgacctggcgagcctcgggaggtacatatcggccgtgcactgggccgggtcgccccatctatgttactgtgcagcctgagcgaggcaatctgctttttcctcggggcccttactccaatgcccgccgtgagaacctttgctctcactagcgggctagcagtcattctagactttttgctacagatgagcgcatttgtggccctgctctccctcgactctaagcgccaggaggcttcccgcctagacgtgtgctgttgcgtgaagccccaggagctcccgccccccgggcagggagaaggtttgctccttgggttcttccagaaggcctacgctccgtttctgctgcactggattacaagaggcgttgtcctcctgcttttcctggcgctttttggagtttctctgtactcaatgtgccatatttcagtgggtctcgatcaggagcttgccttacccaaggactcctatctgttagattattttctcttcttgaataggtattttgaggtaggggcccctgtttacttcgttacgactcttggctacaacttctcgtcagaggccggtatgaatgccatctgctccagcgcaggatgcaacaactttagcttcacccagaagatccagtatgctaccgaatttcccgagcagtcctacttagctattcctgcctccagttgggttgacgactttatcgactggttgactccctcgtcatgttgtagactctacatctccggtccgaacaaagacaagttttgtccttccacggtgaatagcctgaattgtctcaaaaattgtatgagcattaccatgggaagcgtccgcccttccgtagaacaatttcacaagtacctgccttggttcttgaacgaccgcccgaatatcaaatgtcccaagggcgggctggccgcgtattctacatccgttaatttaacttcggacggccaggtgcttgatacggttgccatccttagccccagattggagtactccgggaccattagcgcccattgtaacctttatctgttggatagcacaagcagattcatggcctatcacaaaccactgaagaactcgcaggattacacggaggccttgagagctgcgcgcgagctcgcagcaaacattaccgccgaccttaggaaagtcccaggaaccgatccagcttttgaagtgttcccctataccattaccaatgtgttttatgaacagtatctcaccatactaccagagggtttattcatgctgtccctgtgtctggtgccgacattcgccgtgagttgtttgttgcttgggttggatctgcggagcgggttgttgaatctccttagcatcgttatgattttagtggacacagtcggcttcatggcattgtggggtatatcgtacaacgccgttagcctcataaacctcgtttcggccgtgggaatgtctgtcgaattcgtgtcccacattacccgctccttcgccatcagtacgaagcctacctggttggaaagagccaaagaggccactatcagcatggggtctgccgtgtttgcgggcgtagccatgaccaacttgccaggaatcctagtccttggtctggccaaggcccagctgatccagatatttttcttcaggcttaacctgctgatcaccttactagggctcttacacggcctcgtgttcttgcccgtgattttgagctacgtgggaccagatgtgaatccggctctcgctctggagcaaaagagagcagaagaagctgtggcggcagtgatggtcgctagttgccctaatcacccctcccgggtatcaacggccgacaacatctacgtgaatcactcctttgagggctcgatcaagggtgccggagccatttctaatttcttacccaacaacggaagacaattctag

SEQ ID NO: 175988 - DNA, 5048 bp, Artificial Sequence
  derived and/or modified sequence
cttggctgttcctgaggcctggcctggctccccgctgaccccttcccagacctgggatggcggaggccggcctgaggggctggctgctgtgggccctgctcctgcgcttggcccagagtgagccttacacaaccatccaccagcctggctactgcgccttctatgacgaatgtgggaagaacccagagctgtctggaagcctcatgacactctccaacgtgtcctgcctgtccaacacgccggcccgcaagatcacaggtgatcacctgatcctattacagaagatctgcccccgcctctacaccggccccaacacccaagcctgctgctccgccaagcagctggtatcactggaagcgagtctgtcgatcaccaaggccctcctcacccgctgcccagcctgctctgacaattttgtgaacctgcactgccacaacacgtgcagccccaatcagagcctcttcatcaatgtgacccgcgtggcccagctaggggctggacaactcccagctgtggtggcctatgaggccttctaccagcatagctttgccgagcagagctatgactcctgcagccgtgtgcgcgtccctgcagctgccacgctggctgtgggcaccatgtgtggcgtgtatggctctgccctttgcaatgcccagcgctggctcaacttccagggagacacaggcaatggtctggccccactggacatcaccttccacctcttggagcctggccaggccgtggggagtgggattcagcctctgaatgagggggttgcacgttgcaatgagtcccaaggtgacgacgtggcgacctgctcctgccaagactgtgctgcatcctgtcctgccatagcccgcccccaggccctcgactccaccttctacctgggccagatgccgggcagtctggtcctcatcatcatcctctgctctgtcttcgctgtggtcaccatcctgcttgtgggattccgtgtggcccccgccagggacaaaagcaagatggtggaccccaagaagggcaccagcctctctgacaagctcagcttctccacccacaccctccttggccagttcttccagggctggggcacgtgggtggcttcgtggcctctgaccatcttggtgctatctgtcatcccggtggtggccttggcagcgggcctggtctttacagaactcactacggaccccgtggagctgtggtcggcccccaacagccaagcccggagtgagaaagctttccatgaccagcatttcggccccttcttccgaaccaaccaggtgatcctgacggctcctaaccggtccagctacaggtatgactctctgctgctggggcccaagaacttcagcggaatcctggacctggacttgctgctggagctgctagagctgcaggagaggctgcggcacctccaggtatggtcgcccgaagcacagcgcaacatctccctgcaggacatctgctacgcccccctcaatccggacaataccagtctctacgactgctgcatcaacagcctcctgcagtatttccagaacaaccgcacgctcctgctgctcacagccaaccagacactgatggggcagacctcccaagtcgactggaaggaccattttctgtactgtgccaatgccccgctcaccttcaaggatggcacagccctggccctgagctgcatggctgactacggggcccctgtcttccccttccttgccattggggggtacaaaggaaaggactattctgaggcagaggccctgatcatgacgttctccctcaacaattaccctgccggggacccccgtctggcccaggccaagctgtgggaggaggccttcttagaggaaatgcgagccttccagcgtcggatggctggcatgttccaggtcacgttcatggctgagcgctctctggaagacgagatcaatcgcaccacagctgaagacctgcccatctttgccaccagctacattgtcatattcctgtacatctctctggccctgggcagctattccagctggagccgagtgatggtggactccaaggccacgctgggcctcggcggggtggccgtggtcctgggagcagtcatggctgccatgggcttcttctcctacttgggtatccgctcctccctggtcatcctgcaagtggttcctttcctggtgctgtccgtgggggctgataacatcttcatctttgttctcgagtaccagaggctgccccggaggcctggggagccacgagaggtccacattgggcgagccctaggcagggtggctcccagcatgctgttgtgcagcctctctgaggccatctgcttcttcctaggggccctgacccccatgccagctgtgcggacctttgccctgacctctggccttgcagtgatccttgacttcctcctgcagatgtcagcctttgtggccctgctctccctggacagcaagaggcaggaggcctcccggttggacgtctgctgctgtgtcaagccccaggagctgcccccgcctggccagggagaggggctcctgcttggcttcttccaaaaggcttatgcccccttcctgctgcactggatcactcgaggtgttgtgctgctgctgtttctcgccctgttcggagtgagcctctactccatgtgccacatcagcgtgggactggaccaggagctggccctgcccaaggactcgtacctgcttgactatttcctctttctgaaccgctacttcgaggtgggggccccggtgtactttgttaccaccttgggctacaacttctccagcgaggctgggatgaatgccatctgctccagtgcaggctgcaacaacttctccttcacccagaagatccagtatgccacagagttccctgagcagtcttacctggccatccctgcctcctcctgggtggatgacttcattgactggctgaccccgtcctcctgctgccgcctttatatatctggccccaataaggacaagttctgcccctcgaccgtcaactctctgaactgcctaaagaactgcatgagcatcacgatgggctctgtgaggccctcggtggagcagttccataagtatcttccctggttcctgaacgaccggcccaacatcaaatgtcccaaaggcggcctggcagcatacagcacctctgtgaacttgacttcagatggccaggttttagacacagttgccattctgtcacccaggctggagtacagtggcacaatctcggctcactgcaacctctacctcctggattcaacctccaggttcatggcctatcacaagcccctgaaaaactcacaggattacacagaagctctgcgggcagctcgagagctggcagccaacatcactgctgacctgcggaaagtgcctggaacagacccggcttttgaggtcttcccctacacgatcaccaatgtgttttatgagcagtacctgaccatcctccctgaggggctcttcatgctcagcctctgccttgtgcccaccttcgctgtctcctgcctcctgctgggcctggacctgcgctccggcctcctcaacctgctctccattgtcatgatcctcgtggacactgtcggcttcatggccctgtggggcatcagttacaatgctgtgtccctcatcaacctggtctcggcggtgggcatgtctgtggagtttgtgtcccacattacccgctcctttgccatcagcaccaagcccacctggctggagagggccaaagaggccaccatctctatgggaagtgcggtgtttgcaggtgtggccatgaccaacctgcctggcatccttgtcctgggcctcgccaaggcccagctcattcagatcttcttcttccgcctcaacctcctgatcactctgctgggcctgctgcatggcttggtcttcctgcccgtcatcctcagctacgtggggcctgacgttaacccggctctggcactggagcagaagcgggctgaggaggcggtggcagcagtcatggtggcctcttgcccaaatcacccctcccgagtctccacagctgacaacatctatgtcaaccacagctttgaaggttctatcaaaggtgctggtgccatcagcaacttcttgcccaacaatgggcggcagttctgatacagccagaggccctgtctaggctctatggccctgaaccaaagggttatggggatcttccttgtgactgccccttgacacacgccctcctcaaatcctaggggaggccattcccatgagactgcctgtcactggaggatggcctgctcttgaggtatccaggcagcaccactgatggctcctctgctcccatagtgggtccccagtttccaagtcacctaggccttgggcagtgcctcctcctgggcctgggtctggaagttggcaggaacagacacactccatgtttgtcccacactcactcactttcctaggagcccacttctcatccaacttttcccttctcagttcctctctcgaaagtcttaattctgtgtcagtaagtctttaacacgtagcagtgtccctgagaacacagacaatgaccactaccctgggtgtgatatcacaggaggccagagagaggcaaaggctcaggccaagagccaacgctgtgggaggccggtcggcagccactccctccagggcgcacctgcaggtctgccatccacggccttttctggcaagagaagggcccaggaaggatgctctcataaggcccaggaaggatgctctcataagcaccttggtcatggattagcccctcctggaaaatggtgttgggtttggtctccagctccaatacttattaaggctgttgctgccagtcaaggccacccaggagtctgaaggctgggagctcttggggctgggctggtcctcccatcttcacctcgggcctggatcccaggcctcaaaccagcccaacccgagcttttggacagctctccagaagcatgaactgcagtggagatgaagatcctggctctgtgctgtgcacataggtgtttaataaacatttgttggcagaaa

SEQ ID NO: 175989 - DNA, 4080 bp, Artificial Sequence
  derived and/or modified sequence
atggcagaggcaggcttacgagggtggctgctctgggccctgctgttgcgtttagcacagagcgagccatacacgactatccatcagccagggtattgcgccttttatgatgagtgcggtaagaatccagagctatccggctctttgatgacactctccaacgtaagctgtctgtccaatacaccagccagaaaaataacaggcgaccacctgatcttgttgcagaagatctgcccgcgtctttacaccggacccaatacacaggcttgctgtagtgccaagcagctggtctccctggaggctagcctatccattacgaaggctctcttgacccgttgccccgcttgttcagacaatttcgttaatttgcattgtcataatacctgttctcctaatcaatctcttttcatcaatgttactcgcgtggcacagcttggagcaggccagcttcctgcggtcgtggcgtatgaagccttttaccagcacagctttgctgagcagagttacgactcttgttccagggtgcgtgttccagccgcagctaccctagcagtcgggaccatgtgtggcgtgtatggatcagccctatgtaatgcccaacgctggcttaatttccagggtgatacgggaaacggactggctcccctggacatcacttttcatcttttagagccagggcaggctgtgggctcggggatccaacccctgaacgaaggagttgcgcgatgcaacgagtcccaaggggatgatgttgctacttgctcatgccaggattgcgctgcatcgtgccccgcaattgcaaggcctcaagctctggactcaactttttatctcggccagatgcccggaagtctggtgctgatcattatactctgctctgtcttcgccgttgtgacaattctgctggtgggctttcgagttgcacccgcacgggataagagtaaaatggttgatcccaagaaaggtacttccctctccgacaaacttagcttctctacacatacactcctggggcagtttttccaagggtggggtacttgggttgcaagctggccactcactatcttagtcctgtctgtaattccggtagtggcactggccgcaggactggtgttcaccgaactgacaaccgaccctgtggagctgtggtcagctccaaacagtcaggcacggagcgagaaagccttccacgaccagcattttggcccattctttcgcacaaatcaggtgatcctgacggcgcctaaccgcagctcataccgttatgatagtctcctgctgggtccaaagaatttctccggcattctcgacctggatctactgctggagctgctggagcttcaggaacgcctacgacacctccaggtttggagtccagaggcacagcgtaatatatcactccaggacatctgttacgctcccttgaaccccgataatacaagcctttacgattgttgtattaacagcttactacagtactttcagaataatcggacgctcctgctgctgactgctaaccagacgctcatgggacagaccagccaggtcgactggaaggatcactttctttattgcgcaaatgcacctctcactttcaaagatgggaccgccctggctctgtcttgcatggccgattacggcgcacctgtgtttccttttctagccatcggcggttataagggcaaggattattctgaggcggaggccctgataatgactttcagcttgaacaactaccctgccggagatcccagactcgctcaggctaagctgtgggaggaggcgtttcttgaggaaatgcgcgcttttcagagacgcatggcaggtatgtttcaggttacatttatggcggagagatctctggaggacgaaattaatcgcacaacagctgaagatctccccatcttcgccacatcctatatagtgatcttcctctatatatctctcgccctgggatcatacagcagttggtcgcgcgtaatggtggactctaaggccaccctaggattgggaggcgtggcggtcgtcctgggagccgttatggctgctatggggttttttagctacctggggatccgttcaagcctggttatcctgcaggtcgtaccgtttcttgtcctgtcagttggagctgataacatttttatcttcgtgttagagtatcagaggctgcctcggcgacccggtgagccccgagaggtccatataggcagagccctcgggagagtggcgccttccatgctgctgtgctcactctcagaggctatatgctttttcctgggtgcccttaccccgatgcctgctgtccgtacattcgcgcttacatctgggcttgcagtgatacttgattttttgttgcagatgtcagctttcgtggccctgctatcactcgacagtaagcggcaggaggctagtaggctggacgtgtgctgctgcgtgaagcctcaagagttgccgcctccgggacaaggcgaggggctgctcttaggattcttccaaaaggcatatgccccattcctgctgcattggatcacgaggggcgttgtactgctgctgtttcttgctctttttggggtctccctatactctatgtgccacatttcagtgggcctggatcaggaactcgcactgccgaaggactcttatctcctcgactatttcttatttctgaaccgctatttcgaggtgggagctcccgtgtactttgttacgacgttaggatataatttcagctccgaggctggtatgaacgcaatctgtagcagcgctgggtgtaataatttttcattcacacagaaaattcagtacgcaacagaattcccagagcagtcataccttgctatacccgcatccagttgggtagatgacttcattgattggttgacaccttcctcctgttgtagactttatatatccggccctaataaagataaattctgtccatctaccgtgaactccctgaactgcctgaaaaattgcatgtcaatcactatggggagtgtccgtccttctgtggaacagttccataagtatctaccctggttcctgaatgatcgacccaatattaaatgccctaaggggggactcgccgcatattctacatctgtgaatttgacctccgatgggcaggtactggataccgttgccattctaagtcctcgattggaatacagtggcacaataagtgctcattgcaatctgtacctactcgacagtacatctagattcatggcgtaccacaaaccattgaagaactctcaagactatactgaggctctcagagcagccagagagctggctgccaacattacagcagatttgcgtaaagtgcccggaaccgaccccgctttcgaggtgttcccatataccataaccaatgtgttctatgaacaataccttacaattctcccggaaggactgtttatgctttccttatgtctggttcctacttttgcggtcagctgcctccttcttggcttggatttgaggagtggcctgctgaatcttttgtctattgtgatgattctggtggatactgtggggttcatggcactgtggggtatttcctacaatgccgtatctctgataaacctcgttagtgccgtgggtatgtcagtagaattcgtttcccatatcacaaggagttttgccatatccacgaagcctacttggcttgagagagcgaaggaggcaacaatcagcatgggcagcgcggtattcgctggcgtcgcaatgaccaatttgccaggaattctggtactgggattagcgaaggcgcagctgatccagattttcttttttagactgaacctgctgattaccctgctgggcttgctccatggcctggtcttcctgcccgtcatcttgagctacgttggcccagacgttaatccagccctggcattggaacagaaaagagcagaagaggcagtagccgcagtgatggtggctagctgccctaaccaccctagtagggtgtctactgctgataatatctacgtcaatcactccttcgagggcagcatcaaaggtgctggtgctattagcaattttctgcccaacaatggaagacaattttag

SEQ ID NO: 175990 - DNA, 4080 bp, Artificial Sequence
  derived and/or modified sequence
atggccgaggccggcctgagaggctggctgctgtgggccctgctgctgagactggcccagagcgagccctacaccaccatccaccagcccggctactgcgccttctacgacgagtgcggcaagaaccccgagctgagcggcagcctgatgaccctgagcaacgtgagctgcctgagcaacacccccgccagaaagatcaccggcgaccacctgatcctgctgcagaagatctgccccagactgtacaccggccccaacacccaggcctgctgcagcgccaagcagctggtgagcctggaggccagcctgagcatcaccaaggccctgctgaccagatgccccgcctgcagcgacaacttcgtgaacctgcactgccacaacacctgcagccccaaccagagcctgttcatcaacgtgaccagagtggcccagctgggcgccggccagctgcccgccgtggtggcctacgaggccttctaccagcacagcttcgccgagcagagctacgacagctgcagcagagtgagagtgcccgccgccgccaccctggccgtgggcaccatgtgcggcgtgtacggcagcgccctgtgcaacgcccagagatggctgaacttccagggcgacaccggcaacggcctggcccccctggacatcaccttccacctgctggagcccggccaggccgtgggcagcggcatccagcccctgaacgagggcgtggccagatgcaacgagagccagggcgacgacgtggccacctgcagctgccaggactgcgccgccagctgccccgccatcgccagaccccaggccctggacagcaccttctacctgggccagatgcccggcagcctggtgctgatcatcatcctgtgcagcgtgttcgccgtggtgaccatcctgctggtgggcttcagagtggcccccgccagagacaagagcaagatggtggaccccaagaagggcaccagcctgagcgacaagctgagcttcagcacccacaccctgctgggccagttcttccagggctggggcacctgggtggccagctggcccctgaccatcctggtgctgagcgtgatccccgtggtggccctggccgccggcctggtgttcaccgagctgaccaccgaccccgtggagctgtggagcgcccccaacagccaggccagaagcgagaaggccttccacgaccagcacttcggccccttcttcagaaccaaccaggtgatcctgaccgcccccaacagaagcagctacagatacgacagcctgctgctgggccccaagaacttcagcggcatcctggacctggacctgctgctggagctgctggagctgcaggagagactgagacacctgcaggtgtggagccccgaggcccagagaaacatcagcctgcaggacatctgctacgcccccctgaaccccgacaacaccagcctgtacgactgctgcatcaacagcctgctgcagtacttccagaacaacagaaccctgctgctgctgaccgccaaccagaccctgatgggccagaccagccaggtggactggaaggaccacttcctgtactgcgccaacgcccccctgaccttcaaggacggcaccgccctggccctgagctgcatggccgactacggcgcccccgtgttccccttcctggccatcggcggctacaagggcaaggactacagcgaggccgaggccctgatcatgaccttcagcctgaacaactaccccgccggcgaccccagactggcccaggccaagctgtgggaggaggccttcctggaggagatgagagccttccagagaagaatggccggcatgttccaggtgaccttcatggccgagagaagcctggaggacgagatcaacagaaccaccgccgaggacctgcccatcttcgccaccagctacatcgtgatcttcctgtacatcagcctggccctgggcagctacagcagctggagcagagtgatggtggacagcaaggccaccctgggcctgggcggcgtggccgtggtgctgggcgccgtgatggccgccatgggcttcttcagctacctgggcatcagaagcagcctggtgatcctgcaggtggtgcccttcctggtgctgagcgtgggcgccgacaacatcttcatcttcgtgctggagtaccagagactgcccagaagacccggcgagcccagagaggtgcacatcggcagagccctgggcagagtggcccccagcatgctgctgtgcagcctgagcgaggccatctgcttcttcctgggcgccctgacccccatgcccgccgtgagaaccttcgccctgaccagcggcctggccgtgatcctggacttcctgctgcagatgagcgccttcgtggccctgctgagcctggacagcaagagacaggaggccagcagactggacgtgtgctgctgcgtgaagccccaggagctgcccccccccggccagggcgagggcctgctgctgggcttcttccagaaggcctacgcccccttcctgctgcactggatcaccagaggcgtggtgctgctgctgttcctggccctgttcggcgtgagcctgtacagcatgtgccacatcagcgtgggcctggaccaggagctggccctgcccaaggacagctacctgctggactacttcctgttcctgaacagatacttcgaggtgggcgcccccgtgtacttcgtgaccaccctgggctacaacttcagcagcgaggccggcatgaacgccatctgcagcagcgccggctgcaacaacttcagcttcacccagaagatccagtacgccaccgagttccccgagcagagctacctggccatccccgccagcagctgggtggacgacttcatcgactggctgacccccagcagctgctgcagactgtacatcagcggccccaacaaggacaagttctgccccagcaccgtgaacagcctgaactgcctgaagaactgcatgagcatcaccatgggcagcgtgagacccagcgtggagcagttccacaagtacctgccctggttcctgaacgacagacccaacatcaagtgccccaagggcggcctggccgcctacagcaccagcgtgaacctgaccagcgacggccaggtgctggacaccgtggccatcctgagccccagactggagtacagcggcaccatcagcgcccactgcaacctgtacctgctggacagcaccagcagattcatggcctaccacaagcccctgaagaacagccaggactacaccgaggccctgagagccgccagagagctggccgccaacatcaccgccgacctgagaaaggtgcccggcaccgaccccgccttcgaggtgttcccctacaccatcaccaacgtgttctacgagcagtacctgaccatcctgcccgagggcctgttcatgctgagcctgtgcctggtgcccaccttcgccgtgagctgcctgctgctgggcctggacctgagaagcggcctgctgaacctgctgagcatcgtgatgatcctggtggacaccgtgggcttcatggccctgtggggcatcagctacaacgccgtgagcctgatcaacctggtgagcgccgtgggcatgagcgtggagttcgtgagccacatcaccagaagcttcgccatcagcaccaagcccacctggctggagagagccaaggaggccaccatcagcatgggcagcgccgtgttcgccggcgtggccatgaccaacctgcccggcatcctggtgctgggcctggccaaggcccagctgatccagatcttcttcttcagactgaacctgctgatcaccctgctgggcctgctgcacggcctggtgttcctgcccgtgatcctgagctacgtgggccccgacgtgaaccccgccctggccctggagcagaagagagccgaggaggccgtggccgccgtgatggtggccagctgccccaaccaccccagcagagtgagcaccgccgacaacatctacgtgaaccacagcttcgagggcagcatcaagggcgccggcgccatcagcaacttcctgcccaacaacggcagacagttctag

SEQ ID NO: 175991 - protein, 1383 aa, Artificial Sequence
  derived and/or modified sequence
MYATDSRGHSPAFLQPQNGNSRHPSGYVPGKVVPLRPPPPPKSQASAKFTSIRREDRATFAFSPEEQQAQRESQKQKRHKNTFICFAITSFSFFIALAIILGISSKYAPDENCPDQNPRLRNWDPGQDSAKQVVIKEGDMLRLTSDATVHSIVIQDGGLLVFGDNKDGSRNITLRTHYILIQDGGALHIGAEKCRYKSKATITLYGKSDEGESMPTFGKKFIGVEAGGTLELHGARKASWTLLARTLNSSGLPFGSYTFEKDFSRGLNVRVIDQDTAKILESERFDTHEYRNESRRLQEFLRFQDPGRIVAIAVGDSAAKSLLQGTIQMIQERLGSELIQGLGYRQAWALVGVIDGGSTSCNESVRNYENHSSGGKALAQREFYTVDGQKFSVTAYSEWIEGVSLSGFRVEVVDGVKLNLLDDVSSWKPGDQIVVASTDYSMYQAEEFTLLPCSECSHFQVKVKETPQFLHMGEIIDGVDMRAEVGILTRNIVIQGEVEDSCYAENQCQFFDYDTFGGHIMIMKNFTSVHLSYVELKHMGQQQMGRYPVHFHLCGDVDYKGGYRHATFVDGLSIHHSFSRCITVHGTNGLLIKDTIGFDTLGHCFFLEDGIEQRNTLFHNLGLLTKPGTLLPTDRNNSMCTTMRDKVFGNYIPVPATDCMAVSTFWIAHPNNNLINNAAAGSQDAGIWYLFHKEPTGESSGLQLLAKPELTPLGIFYNNRVHSNFKAGLFIDKGVKTTNSSAADPREYLCLDNSARFRPHQDANPEKPRVAALIDRLIAFKNNDNGAWVRGGDIIVQNSAFADNGIGLTFASDGSFPSDEGSSQEVSESLFVGESRNYGFQGGQNKYVGTGGIDQKPRTLPRNRTFPIRGFQIYDGPIHLTRSTFKKYVPTPDRYSSAIGFLMKNSWQITPRNNISLVKFGPHVSLNVFFGKPGPWFEDCEMDGDKNSIFHDIDGSVTGYKDAYVGRMDNYLIRHPSCVNVSKWNAVICSGTYAQVYVQTWSTQNLSMTITRDEYPSNPMVLRGINQKAAFPQYQPVVMLEKGYTIHWNGPAPRTTFLYLVNFNKNDWIRVGLCYPSNTSFQVTFGYLQRQNGSLSKIEEYEPVHSLEELQRKQSERKFYFDSSTGLLFLYLKAKSHRHGHSYCSSQGCERVKIQAATDSKDISNCMAKAYPQYYRKPSVVKRMPAMLTGLCQGCGTRQVVFTSDPHKSYLPVQFQSPDKAETQRGDPSVISVNGTDFTFRSAGVLLLVVDPCSVPFRLTEKTVFPLADVSRIEEYLKTGIPPRSIVLLSTRGEIKQLNISHLLVPLGLAKPAHLYDKGSTIFLGFSGNFKPSWTKLFTSPAGQGLGVLEQFIPLQLDEYGCPRATTVRRRDLELLKQASKAH

SEQ ID NO: 175992 - protein, 376 aa, Artificial Sequence
  derived and/or modified sequence
MTITRDEYPSNPMVLRGINQKAAFPQYQPVVMLEKGYTIHWNGPAPRTTFLYLVNFNKNDWIRVGLCYPSNTSFQVTFGYLQRQNGSLSKIEEYEPVHSLEELQRKQSERKFYFDSSTGLLFLYLKAKSHRHGHSYCSSQGCERVKIQAATDSKDISNCMAKAYPQYYRKPSVVKRMPAMLTGLCQGCGTRQVVFTSDPHKSYLPVQFQSPDKAETQRGDPSVISVNGTDFTFRSAGVLLLVVDPCSVPFRLTEKTVFPLADVSRIEEYLKTGIPPRSIVLLSTRGEIKQLNISHLLVPLGLAKPAHLYDKGSTIFLGFSGNFKPSWTKLFTSPAGQGLGVLEQFIPLQLDEYGCPRATTVRRRDLELLKQASKAH

SEQ ID NO: 175993 - protein, 18 aa, Artificial Sequence
  derived and/or modified sequence
MYATDSRGHSPAFLQPQN

SEQ ID NO: 175994 - DNA, 4152 bp, Artificial Sequence
  derived and/or modified sequence
atgtacgccaccgacagcagaggccacagccccgccttcctgcagccccagaacggcaacagcagacaccccagcggctacgtgcccggcaaggtggtgcccctgagacccccccccccccccaagagccaggccagcgccaagttcaccagcatcagaagagaggacagagccaccttcgccttcagccccgaggagcagcaggcccagagagagagccagaagcagaagagacacaagaacaccttcatctgcttcgccatcaccagcttcagcttcttcatcgccctggccatcatcctgggcatcagcagcaagtacgcccccgacgagaactgccccgaccagaaccccagactgagaaactgggaccccggccaggacagcgccaagcaggtggtgatcaaggagggcgacatgctgagactgaccagcgacgccaccgtgcacagcatcgtgatccaggacggcggcctgctggtgttcggcgacaacaaggacggcagcagaaacatcaccctgagaacccactacatcctgatccaggacggcggcgccctgcacatcggcgccgagaagtgcagatacaagagcaaggccaccatcaccctgtacggcaagagcgacgagggcgagagcatgcccaccttcggcaagaagttcatcggcgtggaggccggcggcaccctggagctgcacggcgccagaaaggccagctggaccctgctggccagaaccctgaacagcagcggcctgcccttcggcagctacaccttcgagaaggacttcagcagaggcctgaacgtgagagtgatcgaccaggacaccgccaagatcctggagagcgagagattcgacacccacgagtacagaaacgagagcagaagactgcaggagttcctgagattccaggaccccggcagaatcgtggccatcgccgtgggcgacagcgccgccaagagcctgctgcagggcaccatccagatgatccaggagagactgggcagcgagctgatccagggcctgggctacagacaggcctgggccctggtgggcgtgatcgacggcggcagcaccagctgcaacgagagcgtgagaaactacgagaaccacagcagcggcggcaaggccctggcccagagagagttctacaccgtggacggccagaagttcagcgtgaccgcctacagcgagtggatcgagggcgtgagcctgagcggcttcagagtggaggtggtggacggcgtgaagctgaacctgctggacgacgtgagcagctggaagcccggcgaccagatcgtggtggccagcaccgactacagcatgtaccaggccgaggagttcaccctgctgccctgcagcgagtgcagccacttccaggtgaaggtgaaggagaccccccagttcctgcacatgggcgagatcatcgacggcgtggacatgagagccgaggtgggcatcctgaccagaaacatcgtgatccagggcgaggtggaggacagctgctacgccgagaaccagtgccagttcttcgactacgacaccttcggcggccacatcatgatcatgaagaacttcaccagcgtgcacctgagctacgtggagctgaagcacatgggccagcagcagatgggcagataccccgtgcacttccacctgtgcggcgacgtggactacaagggcggctacagacacgccaccttcgtggacggcctgagcatccaccacagcttcagcagatgcatcaccgtgcacggcaccaacggcctgctgatcaaggacaccatcggcttcgacaccctgggccactgcttcttcctggaggacggcatcgagcagagaaacaccctgttccacaacctgggcctgctgaccaagcccggcaccctgctgcccaccgacagaaacaacagcatgtgcaccaccatgagagacaaggtgttcggcaactacatccccgtgcccgccaccgactgcatggccgtgagcaccttctggatcgcccaccccaacaacaacctgatcaacaacgccgccgccggcagccaggacgccggcatctggtacctgttccacaaggagcccaccggcgagagcagcggcctgcagctgctggccaagcccgagctgacccccctgggcatcttctacaacaacagagtgcacagcaacttcaaggccggcctgttcatcgacaagggcgtgaagaccaccaacagcagcgccgccgaccccagagagtacctgtgcctggacaacagcgccagattcagaccccaccaggacgccaaccccgagaagcccagagtggccgccctgatcgacagactgatcgccttcaagaacaacgacaacggcgcctgggtgagaggcggcgacatcatcgtgcagaacagcgccttcgccgacaacggcatcggcctgaccttcgccagcgacggcagcttccccagcgacgagggcagcagccaggaggtgagcgagagcctgttcgtgggcgagagcagaaactacggcttccagggcggccagaacaagtacgtgggcaccggcggcatcgaccagaagcccagaaccctgcccagaaacagaaccttccccatcagaggcttccagatctacgacggccccatccacctgaccagaagcaccttcaagaagtacgtgcccacccccgacagatacagcagcgccatcggcttcctgatgaagaacagctggcagatcacccccagaaacaacatcagcctggtgaagttcggcccccacgtgagcctgaacgtgttcttcggcaagcccggcccctggttcgaggactgcgagatggacggcgacaagaacagcatcttccacgacatcgacggcagcgtgaccggctacaaggacgcctacgtgggcagaatggacaactacctgatcagacaccccagctgcgtgaacgtgagcaagtggaacgccgtgatctgcagcggcacctacgcccaggtgtacgtgcagacctggagcacccagaacctgagcatgaccatcaccagagacgagtaccccagcaaccccatggtgctgagaggcatcaaccagaaggccgccttcccccagtaccagcccgtggtgatgctggagaagggctacaccatccactggaacggccccgcccccagaaccaccttcctgtacctggtgaacttcaacaagaacgactggatcagagtgggcctgtgctaccccagcaacaccagcttccaggtgaccttcggctacctgcagagacagaacggcagcctgagcaagatcgaggagtacgagcccgtgcacagcctggaggagctgcagagaaagcagagcgagagaaagttctacttcgacagcagcaccggcctgctgttcctgtacctgaaggccaagagccacagacacggccacagctactgcagcagccagggctgcgagagagtgaagatccaggccgccaccgacagcaaggacatcagcaactgcatggccaaggcctacccccagtactacagaaagcccagcgtggtgaagagaatgcccgccatgctgaccggcctgtgccagggctgcggcaccagacaggtggtgttcaccagcgacccccacaagagctacctgcccgtgcagttccagagccccgacaaggccgagacccagagaggcgaccccagcgtgatcagcgtgaacggcaccgacttcaccttcagaagcgccggcgtgctgctgctggtggtggacccctgcagcgtgcccttcagactgaccgagaagaccgtgttccccctggccgacgtgagcagaatcgaggagtacctgaagaccggcatcccccccagaagcatcgtgctgctgagcaccagaggcgagatcaagcagctgaacatcagccacctgctggtgcccctgggcctggccaagcccgcccacctgtacgacaagggcagcaccatcttcctgggcttcagcggcaacttcaagcccagctggaccaagctgttcaccagccccgccggccagggcctgggcgtgctggagcagttcatccccctgcagctggacgagtacggctgccccagagccaccaccgtgagaagaagagacctggagctgctgaagcaggccagcaaggcccactag

SEQ ID NO: 175995 - DNA, 57 bp, Artificial Sequence
  derived and/or modified sequence
atgtacgccaccgacagcagaggccacagccccgccttcctgcagccccagaactag

SEQ ID NO: 175996 - DNA, 4152 bp, Artificial Sequence
  derived and/or modified sequence
atgtatgccacggatagccggggacactcaccagcctttttgcagccacaaaatgggaatagtagacatcccagcggttacgtaccaggcaaagtggtgcctttacgaccaccacctcctcccaaatcacaggcctccgcaaagttcacatcaattcgccgggaagacagggcaactttcgcattctccccggaggagcagcaggcccagagggagtctcagaagcagaagaggcacaagaacacatttatttgtttcgctatcacatcattcagcttctttatcgcactggccattatcctgggcatctcctctaagtacgctcccgacgaaaattgtcccgaccagaatccaagactgcgtaattgggaccctggccaggatagtgcaaaacaggtggtgattaaagaaggggatatgttgcggctgacttctgatgccacggtgcattctatagtgattcaagacgggggtctgttagtgttcggcgacaacaaggatggaagtcggaatatcactctgaggacgcattacatactgattcaagacggcggcgctctgcacattggagccgagaaatgcaggtataaatccaaggctaccatcacactctatgggaaatcggatgagggtgaatccatgcccacttttggcaagaagttcatcggcgtagaggccgggggtacgcttgagctccacggtgcacgaaaggcctcttggacgctgctcgctagaaccttgaattccagtggtctgccatttggctcttacacttttgagaaagactttagcagaggcctcaacgttagggtgatcgatcaggatactgcgaagattctcgaaagcgagcggttcgatacacatgagtatcgcaatgagtccagacggctccaggagttcttacggtttcaggacccgggccggatcgtggccattgctgtcggagattccgccgccaagagcctcctgcagggaaccatacagatgatccaagagcggctaggatctgagctgattcagggacttgggtaccgacaggcatgggcccttgttggcgtgattgacgggggttcgacatcttgcaacgagagcgtgcggaattacgaaaatcattcttctggcggaaaggccctggcgcaaagagaattctatacagtcgacggacagaagttctctgtgacagcttatagcgagtggatagagggggtgagcttgtccggattccgagtggaggttgtggatggagtcaaactgaatctcctcgacgacgtctcctcgtggaagcccggagaccaaatcgtggtggcctccactgactactccatgtaccaggccgaggagttcacccttctgccctgtagtgagtgttcacattttcaggtgaaggtgaaggagacgccacagtttttgcatatgggggagattatcgatggggtggatatgagggcagaagtcggaattctgactcggaatattgtcatccagggcgaggtcgaagacagctgctacgcggaaaaccagtgccaattttttgattacgacacttttgggggacatatcatgataatgaagaactttacctccgtgcacttatcatacgtggaactaaaacatatgggtcagcagcaaatgggaaggtacccagttcacttccacctgtgtggggatgtcgactataaagggggctacaggcacgccaccttcgtggacggtctgagcatccatcactcattcagccggtgtataaccgtacatggcaccaacggcctgctcatcaaggacacgatcgggtttgacacactgggacactgtttcttcttggaggacggcatagagcagcgaaacacactgttccacaacctgggcttgctcacaaagcctgggacgctgcttccaaccgacaggaacaattctatgtgcaccaccatgcgcgacaaggtctttggaaactacattccagtgccagccactgactgcatggcagtgtctaccttctggatagcacacccaaacaacaatctgatcaacaatgccgctgctggaagccaggacgccggtatatggtacttatttcataaggagccgacaggggaaagctccggactgcaattgctcgcgaaacccgagttgactcccttaggtatcttttacaataaccgagttcactccaactttaaagcagggctgttcattgacaagggcgttaaaaccaccaattctagcgccgcagaccccagggagtatttgtgtctcgacaactcggctaggttcaggcctcaccaggatgccaatcccgaaaaacctagggtggccgcccttattgatcggctcattgcctttaaaaataatgacaacggtgcctgggtcaggggcggggatataatcgtgcagaactctgcgtttgccgacaacggtatcggtcttacattcgcgtctgacggtagcttcccgagcgatgagggctctagccaggaagtgtctgaatccctgttcgtgggagaaagccgcaactacggttttcagggcggacagaataagtacgttgggaccgggggtatcgatcagaagcctcgcaccctcccacgaaacaggaccttcccaatcagaggcttccagatttatgacggccccattcatctgaccaggtcaacttttaagaagtatgtacctacaccagatagatactccagcgcgataggcttcctgatgaagaattcatggcagattactcccaggaacaacatcagtcttgtgaagttcgggccacacgtttccctgaacgtcttctttggaaagcctggcccatggttcgaggactgcgagatggatggggacaagaacagcatcttccatgacattgacgggtctgtgacgggctataaagacgcctatgtcgggagaatggacaattacctgattcggcatccctcatgcgtcaacgtgtccaaatggaacgccgtgatctgctctggtacttatgcgcaggtgtacgtgcagacatggtctacccagaacctgagcatgacgattactagggatgaatatcccagtaatcctatggtacttcgcggaattaaccagaaagccgcttttcctcagtatcaacccgtcgtaatgctagagaaaggttataccatacattggaatggaccagccccacgcactacctttttatacctcgtgaacttcaataagaatgactggattagagtgggactatgttacccctctaacacttcatttcaggtgacatttggctacttgcagaggcagaatggctcactatcgaaaatcgaagagtacgaaccagtccatagcttagaggagctccagagaaaacagtctgagcgcaaattttacttcgattctagcactggactgctgtttctctacctgaaggccaagtctcaccggcatggccatagttactgctcttcacaagggtgtgagagagtgaaaatccaagccgctacggacagtaaagacatcagcaactgcatggctaaagcataccctcaatactacagaaagccttccgttgttaaacgaatgccagccatgttaactggactgtgccaaggctgtggtactaggcaggtggtcttcacctcagaccctcacaaaagctatcttcctgtgcagttccagtctcccgataaagccgagactcagcggggagatcctagcgtaatctcagtcaatggcacggacttcacattccgaagcgccggtgttctgttactcgttgtggacccttgtagcgttccgtttcggcttacagagaagactgtgtttccactagcagatgtgagccgcatcgaggaatacctcaagacaggaattccacctcgatccatcgtcctcttgtctactcgcggggaaatcaagcagttgaacatcagtcacttactggtccctcttggtctcgccaagccagcccatttgtatgacaagggttctactatctttctcggatttagcggtaacttcaagccctcttggactaagctcttcaccagtcctgcaggccagggcctcggagtcctggagcagttcatacccttacagttggacgagtatggctgtccgcgcgctacaaccgtgaggcgccgggatttggagttgctgaaacaggccagcaaagcccactag

SEQ ID NO: 175997 - DNA, 57 bp, Artificial Sequence
  derived and/or modified sequence
atgtatgccactgattctagaggccattcccccgcatttctgcaacctcaaaactag

SEQ ID NO: 175998 - DNA, 4152 bp, Artificial Sequence
  derived and/or modified sequence
atgtatgccacagacagccggggccacagccctgccttcctgcagccccagaatggaaacagccgccaccccagcggctacgtgcctgggaaggtggtgcccctgcggcccccacctccacccaagagccaggccagcgccaagttcaccagcatcagaagagaagatcgggccacctttgccttcagccctgaggagcagcaggcccagcgggagagccagaagcagaagaggcacaagaacaccttcatctgctttgccatcaccagcttctccttcttcatcgccctggccatcatcctgggcatcagcagcaaatatgccccagatgagaactgcccagaccagaacccccggctgaggaactgggaccccggccaggacagcgccaagcaggtggtgatcaaggagggggacatgctgcggctgaccagtgatgccaccgtgcacagcatcgtcatccaggacggcggcctgctggtgtttggagacaacaaggatggcagcaggaacatcaccctgcggacccactacatcctgatccaggatggaggagccctgcacatcggggctgagaagtgccgctacaagagcaaggccaccatcaccctgtatggcaagagtgatgaaggagagagcatgcccaccttcggcaagaagttcatcggcgtggaggccggcggcaccctggagctgcatggagccaggaaggcctcctggaccctgctggcccggaccctgaacagcagcggcctgcccttcggcagctacacctttgagaaggacttcagccggggcctgaatgtgcgggtcatcgaccaggacacagccaagatcctggagagcgagagatttgacacccatgagtacagaaatgaaagccggcggctgcaggagttcctgcgcttccaggaccccggcagaattgtggccatcgctgtgggggacagcgctgccaagagcctgctgcagggcaccatccagatgatccaggagcggctgggcagcgagctgatccagggcctgggctaccggcaggcctgggccctggtgggcgtgattgatggcggcagcaccagctgcaatgaatctgtgaggaactatgagaaccacagcagcggcggcaaggccctggcccagcgggagttctacacagtggatggccagaagttctctgtgacagcctacagcgagtggattgagggcgtgtccctgagcggcttccgggtggaggtggtggatggagtgaagctgaacctgctggatgatgtgtcctcctggaagccaggggaccagatcgtggtggccagcacagactacagcatgtaccaggccgaggagttcaccctgctgccctgcagtgaatgtagccacttccaggtgaaggtgaaggagaccccccagttcctgcacatgggagagatcattgatggagtggacatgagagctgaggtgggcatcctgaccaggaacatcgtcatccagggcgaggtggaggacagctgctacgccgagaaccagtgccagttctttgattatgacaccttcggcggccacatcatgatcatgaagaacttcacctctgtgcacctgtcctatgtggagctgaagcacatgggccagcagcagatgggccgctaccctgtgcacttccacctgtgtggagatgtggactacaagggcggctacagacatgccacctttgtggatggcctgagcatccaccacagcttcagccgctgcatcaccgtgcacggcaccaacggcctgctgatcaaggacaccatcggctttgacaccctgggccactgcttcttcctggaggatggcatcgagcagaggaacaccctcttccacaacctgggcctgctgaccaagccaggcaccctgctgcccacagacaggaacaacagcatgtgcaccaccatgagggacaaggtgtttggaaactacatccctgtgcctgccacagactgcatggctgtgtccaccttctggatcgcccaccccaacaacaacctgatcaacaatgctgctgctggcagccaggatgctggcatctggtacctgttccacaaggagcccaccggggagagcagcggcctgcagctgctggccaagccagagctgacccccctgggcatcttctacaacaacagagtgcacagcaacttcaaggccggcctcttcatcgacaagggcgtgaagaccaccaacagcagcgctgctgacccccgggagtacctgtgcctggacaacagcgcccgcttccggccccaccaggatgccaaccctgagaagccccgggtggccgccctgattgacaggctcatcgccttcaagaacaatgacaatggagcctgggtgcggggcggggacatcatcgtgcagaacagcgcctttgctgacaatggcatcggcctgacctttgccagtgatggcagcttccccagtgatgagggcagcagccaggaggtgtctgagagcctgtttgtgggggagagcaggaactacggcttccagggcggccagaacaagtatgtgggcaccggcggcatcgaccagaagcccaggaccctgcccaggaacagaaccttccccatccggggcttccagatctatgatggccccatccacctgaccaggagcaccttcaagaagtatgtgcccaccccagaccgctacagcagcgccatcggcttcctgatgaagaacagctggcagatcacccccaggaacaacatcagcctggtgaagtttggcccccacgtgtccctgaatgtgttcttcggcaagccaggcccctggtttgaggactgtgagatggatggagacaagaacagcatcttccatgacattgatggctctgtgacaggctacaaggatgcctacgtgggccgcatggacaactacctgatccgccaccccagctgtgtgaatgtgtccaagtggaatgctgtgatctgcagcggcacctacgcccaggtgtatgtgcagacctggagcacccagaacctgtccatgaccatcaccagagatgagtaccccagcaaccccatggtgctgcggggcatcaaccagaaggccgccttcccccagtaccagcctgtggtgatgctggagaagggctacaccatccactggaatggacctgcccccaggaccaccttcctgtacctggtgaacttcaacaagaatgactggatccgggtgggcctgtgctaccccagcaacaccagcttccaggtgaccttcggctacctgcagaggcagaatggcagcctgagcaagattgaggagtatgagcctgtgcacagcctggaggagctgcagaggaagcagagcgagaggaagttctactttgacagcagcacaggcctgctcttcctgtacctgaaggccaagagccacagacatggccacagctactgcagcagccagggctgtgagcgggtgaagatccaggccgccacagacagcaaggacatcagcaactgcatggccaaggcctacccccagtactacaggaagcccagcgtggtgaagaggatgcctgccatgctgaccggcctgtgccagggctgcggcacccggcaggtggtgttcaccagtgacccccacaagagctacctgcctgtgcagttccagagcccagacaaggccgagacccagagaggagaccccagcgtcatctctgtgaatggaacagacttcaccttccgctctgctggggtgctgctgctggtggtggacccctgcagcgtgcccttccggctgacagagaagacagtgttccccctggctgatgtgtccagaattgaggagtacctgaagacaggcatcccccccaggagcatcgtgctgctgagcaccagaggagagatcaagcagctgaacatcagccacctgctggtgcccctgggcctggccaagccagcccacctgtatgacaagggcagcaccatcttcctgggcttcagcggcaacttcaagcccagctggaccaagctgttcaccagccctgctggccagggcctgggcgtgctggagcagttcatccccctgcagctggatgaatatggctgcccccgggccaccaccgtgagaagaagagacctggagctgctgaagcaggccagcaaggcccactag

SEQ ID NO: 175999 - DNA, 57 bp, Artificial Sequence
  derived and/or modified sequence
atgtatgccacagacagccggggccacagccctgccttcctgcagccccagaactag

SEQ ID NO: 176000 - DNA, 4152 bp, Artificial Sequence
  derived and/or modified sequence
atgtacgccaccgacagccggggccacagccccgccttcctgcagccacagaacggcaattcacgacatccgtctgggtatgtgcccggcaaggtggtgccacttaggccacctccaccccccaagagccaagctagtgctaaattcactagcattagacgcgaagacagggccacttttgctttttcacctgaagagcagcaagcgcagagggagtcacagaaacaaaaaaggcacaagaatacattcatctgcttcgccattacatcatttagtttctttattgccctggcaataattctggggatctcctccaaatacgcgcccgacgagaactgtccagatcagaacccacgtcttcgcaactgggatcccgggcaggattccgccaaacaggttgtgataaaggaaggggacatgctgagactcacatccgatgccacagtccatagcatagtgatccaggacgggggcctactagtgtttggcgataacaaggatggctcgcggaacataacgttgaggactcactacattctgatccaagatgggggcgcactgcacattggtgccgagaagtgccggtataagagtaaagccacaatcaccctttatgggaagagtgatgagggcgaatctatgccaacctttggcaaaaagttcatcggggttgaagctggcggaactctggagctgcatggagccagaaaggctagctggactttactggcccggacactcaactcgagcggcctcccttttgggtcctatacctttgagaaagatttctctcggggcttgaacgtgagagtcattgatcaggataccgcaaaaatactggaatccgagaggttcgacacccatgaataccgcaacgagtctcgccgacttcaggagttcctgcggtttcaggacccgggcagaattgtcgctatcgctgtcggagactctgccgccaagagccttttgcaggggaccatccagatgattcaggaaagactgggatcagagctgatccagggactgggatacaggcaagcttgggccctcgtaggagtgattgacggggggtctacttcatgtaatgagagtgtcaggaattacgaaaaccatagttcaggagggaaagctctcgctcagagagagttctacaccgttgacgggcagaagttctcggtcacggcttattctgagtggatcgagggcgtttccctatctggattcagggtggaggtcgttgacggagtcaagctgaatctgctcgacgatgtatccagttggaagccaggagaccaaatcgtggtcgcttctacagattattcaatgtatcaagctgaggagtttacccttctgccctgttcagagtgcagtcattttcaggtgaaagtaaaggagacaccgcagttcttacatatgggtgagattattgatggggtggacatgagggccgaggttgggatactgacccgcaacatcgtgatccagggggaggtcgaggactcttgttatgctgagaatcagtgtcagtttttcgactatgacacattcgggggtcacattatgatcatgaagaatttcaccagtgtgcatctgtcgtacgtcgaacttaaacatatggggcaacagcaaatgggtcgatatcccgtccactttcatctgtgtggggacgttgactacaaagggggttatcgacacgccacatttgtggacggcctgagcatacaccacagcttctctaggtgcatcactgtgcatggcaccaacggcctgctcattaaagacacaatcgggtttgatacactgggccattgcttttttctggaggacggcatcgagcagagaaacacactctttcacaatctggggctgctgacaaagccaggaacccttttgccaaccgatcggaacaattccatgtgtactaccatgcgcgataaagtcttcgggaattacattcctgttccagctacagattgtatggccgtttctacattttggatcgcacacccgaacaacaacttgatcaacaacgccgcggcgggttctcaggatgccggaatctggtacctgtttcacaaggagcccactggagagagcagtggactgcagctgctggctaaacccgaactgactcccctgggaatcttttataataatagggtgcattctaattttaaggcgggacttttcatcgacaagggggtcaaaaccactaactcttccgcagccgaccccagggagtatctgtgtctcgacaactcggcgaggtttcggccccatcaagacgccaacccagagaaacccagggtggccgccctaatagacagactcatcgcctttaagaataatgacaatggcgcctgggtccggggaggcgatatcatagtccaaaacagcgcatttgcggacaatggaataggcctgacttttgcatcagatggttcattcccatcggatgaaggtagctctcaggaggtcagtgaaagcctcttcgtcggagaaagccgcaactatggctttcagggcggccagaacaagtatgtagggactggaggcatcgatcaaaagccaaggacacttccccgaaatagaacatttcctattagaggatttcagatttacgatggcccaatacatcttacccggagcactttcaagaagtatgtgccaacacccgacaggtactctagtgccatcggctttttaatgaagaactcgtggcagatcactccacggaataatatctcattggtcaagttcgggccccacgtttctctcaatgtgttcttcgggaaaccagggccttggttcgaagactgcgagatggacggcgataagaattcgatattccacgacatagatgggagcgtcactggatacaaggacgcgtatgtgggaaggatggacaactacttaataaggcaccccagctgcgtgaacgtttctaagtggaacgcagtcatctgcagcggcacttatgcacaggtgtatgtccagacttggagcactcaaaacctgtcgatgacaataacaagagacgagtaccccagcaaccctatggttctcaggggtatcaatcagaaggccgccttcccacagtaccagcccgttgtgatgctggaaaaaggttatacaattcactggaacggcccagcacccagaaccaccttcctgtacctggtcaactttaataaaaatgactggatacgggtcggcctgtgttacccctcgaacaccagtttccaggtcacattcgggtaccttcagcgtcagaatggaagcctctctaagatcgaagagtacgagcccgttcacagcctcgaggaattgcagagaaagcaaagcgaacggaaattttacttcgactcgagcactgggctcctgttcctgtatttaaaggccaaaagtcaccggcacgggcattcttattgcagttcccagggatgtgaacgcgtgaagatccaggccgctactgatagtaaagacatttcaaattgcatggcaaaggcttaccctcaatattaccgcaaacccagtgttgttaagaggatgccagcaatgcttaccggactgtgtcagggatgcggtacacggcaggtagtatttacctcggacccacataagtcatacctgccggtgcagttccagtctcctgacaaggcagagacccagaggggggacccatctgtaatcagcgtgaacggtacagactttactttcagatccgccggtgtgctcctgcttgtagttgacccatgctcagtgcctttcaggctaaccgagaaaaccgtgttccctctggcagacgtgtcaaggatcgaagagtatctcaagaccggcattccccccagatccattgtgttgctgtctactaggggcgagattaagcagcttaatatctcccacctgctggtgcctctcggcctggccaaaccggctcatctgtacgacaagggatccacaattttcctggggttctcaggaaattttaaacccagctggacgaagctgttcacatcacctgcaggccaagggctcggtgtgcttgaacagtttattcccttgcaacttgatgaatacggatgtcctagggccaccacagtccgccgtcgagacctagagctcttgaaacaggctagtaaggctcactag

SEQ ID NO: 176001 - DNA, 57 bp, Artificial Sequence
  derived and/or modified sequence
atgtacgccaccgacagccggggccacagccccgccttcctgcagccacagaattag

SEQ ID NO: 176002 - DNA, 4152 bp, Artificial Sequence
  derived and/or modified sequence
atgtatgccacagacagtaggggtcactcccccgcatttctccaaccccagaatgggaacagtagacacccatctggatatgtgcctgggaaagtcgttccattacgcccacccccaccccctaagtctcaggcctctgcaaaattcacatcaatccgtcgcgaggacagagctacatttgcattttctccagaagaacagcaggctcagcgggagagccagaagcagaagcgccacaagaatacatttatctgctttgccatcaccagcttcagtttctttattgccttggccataattctgggtatctcaagtaaatatgcgcctgatgagaattgcccggatcaaaacccacgcctgcggaactgggatcccggtcaggatagcgcaaaacaagtggtgatcaaggagggcgacatgctaagacttacgagtgacgccacggtgcactcaatcgtaattcaggacggagggctgctggtgtttggcgataataaggatggttcacgaaatattactctgcggacacattacattctaattcaggatggtggggcactacacatcggagcggaaaagtgcagatacaaatctaaggcaaccatcactctgtatgggaagagcgacgagggtgagtcaatgccaacctttggcaaaaagttcataggcgtagaagcagggggaaccttggagctgcacggcgcacgcaaggcatcgtggaccctgcttgccaggactcttaactcctcaggcctgcccttcgggtcctatacgttcgagaaggacttctcaagaggccttaacgttagggtaatcgaccaagacactgcgaaaatcctcgaatctgagaggttcgacacgcacgaataccgaaatgagagtcggagactccaggaatttttgcggtttcaggacccaggacggatcgtggctatcgcagtaggcgacagcgccgctaagtctctcctacagggcactatacagatgattcaagagcgcctgggaagcgaactaatccaggggctggggtaccgtcaggcctgggcactcgtgggcgttatcgatggcggatctacatcgtgtaacgagtctgtgaggaattacgagaatcacagttccggaggcaaagctcttgcacagagagaattttatacagtggacggtcaaaaattttccgtgaccgcatatagcgaatggatcgaaggggtttctctgagcggctttcgagttgaggttgtagacggcgtcaagctgaatctgctcgatgacgtttcctcgtggaaacccggtgatcagatagtggtggcatctaccgactattccatgtatcaggccgaggagtttacactgttgccttgtagtgaatgcagtcacttccaggttaaggtgaaggagactccacagttcctgcatatgggggagataattgatggagtggatatgagggctgaggtcggcatcctgacgaggaacatcgtgatccaaggcgaggtggaggactcctgttatgcagaaaaccaatgccagttttttgattacgatacatttgggggacacataatgatcatgaaaaacttcacaagtgttcatctgagctacgtcgagctcaagcatatggggcagcagcagatggggagatacccagtgcatttccacttgtgcggcgacgtggattacaaagggggataccggcatgccacattcgtcgacggcctctctatccatcattccttctcaaggtgtatcacagttcatgggaccaatggtctgctgattaaggacacgattggcttcgacacacttggccactgctttttcctcgaggatggcatcgagcaaaggaacaccctgtttcataacctaggactcttaactaagcccggaaccctattgcctaccgataggaacaattctatgtgcacgactatgcgggataaagtgttcggtaactatatcccagtgcctgcaacagattgtatggccgtgagcacattctggattgctcatcccaacaacaacttgattaacaacgctgctgctggctcacaagatgccggaatctggtatctgttccacaaagagccgacaggggagtcatccggtctgcaactgctggccaagcccgagctaacacctttggggattttttataataatcgggtgcatagcaacttcaaggctggcttgtttatcgataagggagttaagacaacaaattcttccgccgcagacccacgcgagtacctgtgcctagacaattccgctcgcttcaggcctcatcaagacgccaacccggagaaacccagggttgcagccctgattgaccggctgattgcattcaagaacaacgataacggcgcttgggtccgcggaggcgacattattgtgcagaatagcgccttcgccgacaacggtatcgggctaacatttgcatctgacggcagcttcccatcagatgaagggtcaagccaggaggtttcggagtccctgtttgtcggcgagtcgcgcaattacggctttcaggggggacagaataagtatgtaggtaccggcggaatagatcagaaacccagaaccctcccacgtaatcgcacatttccaatccggggattccagatttatgatggcccaatccacctgacaagatctacgtttaagaaatacgtgcccacaccagatcgatattcatctgccattggtttcctgatgaagaacagttggcagatcacacccagaaacaatatatcgctggtaaaattcggtccacacgtgtcactcaacgtgttcttcggcaagccagggccttggttcgaggactgcgaaatggatggcgataaaaactcgatcttccatgatatagacggatccgtcacgggctacaaggatgcttacgtcgggaggatggataactacctgatccgacatccgtcttgcgtgaacgtatctaaatggaacgccgtgatctgtagtggtacgtacgcacaagtttatgttcagacgtggagcacccagaacctttctatgactattacgagagatgaatatccatccaaccctatggtgttgcgcggaatcaaccagaaagcagctttcccccagtaccagccagtcgtcatgttagagaaagggtacacaatccattggaacggacccgctcctcgcactacctttctgtacctggtgaactttaacaaaaacgattggattcgtgtaggattatgctaccccagtaacacaagtttccaggtgacttttggatatctgcagagacagaacggttccctgtctaaaatcgaggagtacgaacccgtgcacagcctagaggagcttcagcggaaacagagcgagcgcaaattttacttcgactcctctaccgggctcttgttcctgtacctgaaggcaaaatcgcaccgccacggccatagctactgttcctctcagggctgtgaacgggtgaaaatacaggccgctactgacagcaaggatatcagtaattgtatggcaaaggcttatccacaatactatcggaagccaagcgtcgttaaacgcatgcctgccatgctcaccggattgtgtcaaggatgtggcactcggcaagtggtgtttacttccgaccctcacaaaagttatttaccagttcaatttcagagcccagacaaggccgagacacagagaggagacccatcggtcatctcagtgaacggaactgacttcaccttcaggtcagccggtgttctgctgctcgttgtggacccttgttccgtcccatttaggctgactgagaaaacggttttccctttggccgatgtcagcaggattgaagagtatctcaaaacgggaatcccacccaggagcattgtacttttatccacacggggtgagataaaacagctaaacatctctcacctgctggttcctctcggcctggctaaacctgcccacctgtatgacaaagggagtaccatctttcttgggtttagcggaaatttcaagccatcgtggacaaaactctttacgagtcccgctggccaggggcttggtgtgcttgagcagtttattcccctgcagctcgacgagtacggctgccctcgggctactactgtgaggcgaagggacctggagctgcttaaacaggcctctaaggctcactag

SEQ ID NO: 176003 - DNA, 57 bp, Artificial Sequence
  derived and/or modified sequence
atgtacgctaccgattccagagggcattctcccgcatttcttcaaccccaaaactag

SEQ ID NO: 176004 - DNA, 6523 bp, Artificial Sequence
  derived and/or modified sequence
cggcccagccgagccgggctgcttgtctggccggcggaggctgagcgcgaccctagcaagccgcggcgcccgccgaccagggacaagagcgactcctgggaccccactctgccccgcgccgccgcctcctcccctgttgtcgcggggacgctcaggcccgcgccgcccgggccacgattctcctcctctttctcccggaggggaaggaacggagaaagccgagcggcggctccgggagagagcgagccgaggcccctgcccccgaggctcggggcaggaggaggaggaggaggaggaggcggaggcggagggaagtgcgcgtcactctcgggaggagagtatttcacctccaggcagaggctgcggctgccagttgagtacgagcggcagctgcgggcgccggcaatcgagtggcttcctggccatggagaggagatctggacccgaggacgccagggactcctctccgtctccctggaccgctgtgtaggcacctgagttaacggacgctaagcggggtaggggaagtaacagtgtatcatgtatgccactgattccaggggacactcccctgctttcctccaacctcagaatggaaatagtcgtcacccatctggctatgttccagggaaggttgtcccattgcgtccccctcctcctccaaagagtcaagcttcagccaaatttacctccatcagacgagaagaccgggcaaccttcgcattctcacctgaagaacagcaagcccagagagaaagtcaaaagcaaaagagacacaaaaatactttcatttgttttgctattactagtttctcattttttattgcacttgcaatcattttaggaatatcctcaaaatatgctccagatgaaaattgcccagatcaaaatcctcgtctcaggaattgggatccaggacaagattctgcaaagcaagttgttatcaaggagggagatatgctccgtctgacctcagacgccaccgtgcattctatagtcattcaggatggaggactgcttgtatttggggacaataaagatggatccagaaatattactttgaggactcattacatcctgatccaggatggtggggcgcttcatattggagcagaaaaatgccgctataaatccaaagcgacaattaccttgtatggcaagtcagatgaaggtgaaagtatgccaacatttggcaaaaagtttattggtgtggaagctggcgggacactggagttacatggggcacggaaggcatcgtggacgttgttggcaaggaccctgaattcctcaggcttgccctttgggtcctatacctttgaaaaggacttttcccggggcctcaatgtgagggtcattgaccaagacacggccaaaattttggaaagtgagagatttgatacccatgaataccgcaatgagagcaggcggcttcaggagtttctgagattccaggatccaggtcggattgttgccatagctgtcggggattcagccgctaaaagtctcttacaaggaaccatccagatgatccaggaacggttgggaagtgaactgatccaaggactgggctacaggcaagcttgggctttagttggtgtcattgatggtggaagcacttcttgcaatgaatccgtgagaaactatgaaaatcatagcagtggcgggaaggctcttgcccaaagagaattttatactgtggatggccagaagttctctgtgacagcttatagtgaatggattgaaggcgtttctctttcaggattccgggtagaggttgtagatggagtgaagctaaatttgctagatgatgttagtagttggaaacctggagaccagattgtggtcgcaagcacagactattccatgtaccaagcagaggagttcactcttcttccctgttctgaatgcagccattttcaggtcaaagtcaaagaaacccctcagttcctgcacatgggtgagatcatagacggtgtagacatgagagctgaggttggaattcttacccggaatattgtgatccaaggagaagtggaggactcatgctacgcagaaaatcagtgccaattttttgattatgatacctttgggggacacattatgataatgaaaaattttacttcagtccatctttcttatgtggaattgaaacacatgggtcagcagcagatggggcgataccctgttcattttcacctgtgtggtgacgtggattataaaggaggatacagacatgcaacatttgtggacggcctgtctattcatcacagcttctcaaggtgcatcactgtgcatgggacaaatggcttgctaataaaagacaccattgggtttgacacactaggtcattgtttctttttggaagatggtattgaacagaggaatactttgttccacaatctgggactcctcaccaagccgggtactctcctgcccaccgataggaacaactccatgtgtaccaccatgcgagataaagtgtttggaaattacattcctgtgcctgctactgactgtatggctgtttcaactttctggattgctcatcccaacaataatctgattaataatgcagctgcaggctcacaggatgctggaatatggtatttattccacaaggaaccaactggggaatccagtggattgcagctcttggcaaaaccagaactcactccattgggtatattttataacaacagggtccattcaaattttaaggctggcttatttattgacaaaggtgtcaaaacaaccaactctagtgctgctgacccaagggaatacctctgtttggacaatagtgcaagatttcgacctcatcaggatgcaaaccccgaaaaaccacgtgttgctgctctaattgacaggctcattgcttttaaaaataatgataatggagcttgggtcagaggaggagatattatcgttcaaaattcagcatttgcagataatggaataggactgacctttgccagtgatggaagcttcccaagtgatgaaggttccagccaagaggtatctgaatctctctttgttggggagagcaggaattacggctttcagggtggtcagaacaagtatgtaggcactggaggaatagaccagaagcctcgaacattacccaggaacaggacgttcccaattagaggctttcagatttatgatgggcccattcatctcacaaggagcactttcaaaaaatatgtgccaactccagataggtacagcagtgcaattggcttcctcatgaagaattcctggcagataacccccaggaataatatctccctcgtgaagtttggtccacatgtctctctgaatgtcttttttggaaagcctggtccctggtttgaagattgtgagatggatggtgataagaactccatattccatgacattgatggctctgtgacaggatacaaggatgcttatgtgggaagaatggacaactacctgatccgccatccaagctgtgtaaatgtgtctaagtggaatgcagtgatctgcagtgggacctatgcacaggtctatgtacagacatggagcactcagaatctttctatgaccattacacgagatgagtatccgtccaaccctatggtgctccgaggtattaatcagaaggctgcctttccacagtaccagcctgtcgtcatgctggagaagggttataccatccactggaatgggccggcaccacggactacatttctatacctcgtcaacttcaacaagaatgactggattcgagttggcctttgctatccatcaaacacaagttttcaagttacctttggctatttgcagcggcagaatggctcattatccaaaatcgaagaatatgagcctgtgcattcactggaagaactgcaaagaaagcaatccgagaggaaattctattttgactccagcacggggttactgtttttgtatctcaaagccaaaagccacaggcatggccacagttactgttcatctcagggatgtgaaagagtcaagatccaagcagccacagactcaaaggacatcagtaactgcatggccaaagcatacccacagtactacagaaagccgtcagtggtcaagcggatgccggccatgctcactggactctgtcaaggctgtggcactcggcaggtggtgtttactagtgatcctcataaaagttacctccctgtgcaattccagtcacctgataaagcagaaacccagcgtggagacccgtctgttatttctgtcaatggcactgactttaccttccgaagtgcaggcgtcctcctccttgttgtggatccgtgcagcgttccattccgcttgacggaaaaaacggtttttcctcttgctgatgtcagtcgcattgaagagtatttaaaaacaggcatccctccaaggtccattgttctgttgagcacaagaggagaaataaagcagttaaacatttcacacttactagtacctctgggattagccaaaccagctcatctttatgacaaagggagtaccatatttttgggattcagtggaaactttaaaccatcatggactaagctatttaccagtcctgctggacagggccttggggtgcttgaacaattcatacctttgcagctggacgaatatggttgtcccagagccaccactgtccgcagaagagacctggaactgctaaagcaagcttcaaaagcacattagagactaactgtaacttaagtgctgggggaaaaaaaatgtgaactaacttatttaatttatggcattttaaaatgacactgttaacccaacggaaccattttccagtttgatacagaatggggagaaaagaaagcgtttgaaattattgcttggataccagcttcatgcaccttctagttgtacaaaatgttaaagacgttgtttgtatttgtaaggctggtgtattcagagagcagatctcttattcctcactttccacccccgtattttgtaatgaccatgagcaatgtttttactttttgtataatggggtggggtggagtgggggcttctgagagtcagcctgaggtctttagaggaccagctattgtagcaccttggatacttgaagtttaatgctcagttgggtcgggtggcagttgacttggtggctggcatgttcagcagtgcctggggccctgtttctgggcagcctttgaggattttctatgatattgaatgacagttttaagtggcaactcaggcccagctcatgcccttttttgcctggacatgtgctatttttattcacttatatatcaattacttgtaagggttaaactttcaaacaggaagtatattgggacaaaagggctcttggggattagatatccctttaatctgtgaccattgggcaaaaaattttcctgcagcaaaagtctgaggctgttgggaccatttttgcagctttaatccttagcctcttttgactgtatatttgtgtttaaaatgcagagctcaactgaatatttccttttttgttttgttttgttttgttttaagaagtaggttgttttcctgaaccgtaaacttgtatcattttaacttgcacaaaggaagtctgttcttggtattgctcttgcacttgggttttttgttattgttttgtgtggattttttaaagcttttctgttcaccctcctgccaggaaaatcccagaaagcttaatgataccccaaaatgattacacccagggaggaaaaaaaggagcgctttctagggtcagaatcgtggagagaatactcagaaatgaacctctttaaagccttgcaggaatgagtcactcttacttaatgaaatgttaaagccaattaaaaagcatgctgtgatgcccagcttccctttccacagggtgcatgcgtctcctgctggtgaatcacatgcggcaagaggcaactggctccacagcctgggatgctgccgtaccaagaggaaagaagcagcaaaatgcctttacgttgttctaaacccccgacgcataaagtgtagaggagggatggccaagggtgggtggtagaaagtgtgttcaggctgacactggcaatgagtacagataatttcactttcctcttctaggggcaaaggctgatggcctctacctttgtatccaggagaaactgcagagcagccctgtgactttacaaaatatgctacctcaaagtgctaccgataaacctttctaattgtaagtgcccttactaagggcacatgtcttaatcaaagttagttttttgttttctggtttgttttttttttttgtatattgatgaatgagatcttacctattaaatatattattggattatggttcctgaaggtcattagagtgtgtgtgtgtgtgtgtgtgtgtgtgtgtgttttatgacttaaatatctttacgtgtgttttttagagcttggttctttaaagatttggagaagatatgtaaattaccaaggcacttggtttttctgttttatatactaataatcagggcctaagttaaataaaaatatgtgtgcatgtatttta

SEQ ID NO: 176005 - protein, 866 aa, Artificial Sequence
  derived and/or modified sequence
MLRPGAQLLRGLLLRSCPLQGSPGRPRSVCGREGEEKPPLSAETQWKDRAETVIIGGGCVGVSLAYHLAKAGMKDVVLLEKSELTAGSTWHAAGLTTYFHPGINLKKIHYDSIKLYEKLEEETGQVVGFHQPGSIRLATTPVRVDEFKYQMTRTGWHATEQYLIEPEKIQEMFPLLNMNKVLAGLYNPGDGHIDPYSLTMALAAGARKCGALLKYPAPVTSLKARSDGTWDVETPQGSMRANRIVNAAGFWAREVGKMIGLEHPLIPVQHQYVVTSTISEVKALKRELPVLRDLEGSYYLRQERDGLLFGPYESQEKMKVQDSWVTNGVPPGFGKELFESDLDRIMEHIKAAMEMVPVLKKADIINVVNGPITYSPDILPMVGPHQGVRNYWVAIGFGYGIIHAGGVGKYLSDWILHGEPPFDLIELDPNRYGKWTTTQYTEAKARESYGFNNIVGYPKEERFAGRPTQRVSGLYQRLESKCSMGFHAGWEQPHWFYKPGQDTQYRPSFRRTNWFEPVGSEYKQVMQRVAVTDLSPFGKFNIKGQDSIRLLDHLFANVIPKVGFTNISHMLTPKGRVYAELTVSHQSPGEFLLITGSGSELHDLRWIEEEAVKGGYDVEIKNITDELGVLGVAGPQARKVLQKLTSEDLSDDVFKFLQTKSLKVSNIPVTAIRISYTGELGWELYHRREDSVALYDAIMNAGQEEGIDNFGTYAMNALRLEKAFRAWGLEMNCDTNPLEAGLEYFVKLNKPADFIGKQALKQIKAKGLKRRLVCLTLATDDVDPEGNESIWYNGKVVGNTTSGSYSYSIQKSLAFAYVPVQLSEVGQQVEVELLGKNYPAVIIQEPLVLTEPTRNRLQKKGGKDKT

SEQ ID NO: 176006 - DNA, 2601 bp, Artificial Sequence
  derived and/or modified sequence
atgctcaggcccggcgcccagcttttaagggggcttctgctaaggtcttgtcccttacagggatctcctggcaggccgagaagcgtctgtggaagggagggggaggaaaagccccctctctccgccgaaacccaatggaaggacagggctgagacagtgatcattggcggtgggtgtgtgggcgtgtccttggcataccatctggccaaggcaggaatgaaggatgtggtgttgttggaaaagtctgagctgaccgccggatctacatggcacgcagccggtttaacgacctatttccaccctggcatcaatctgaaaaagattcattacgactccataaaactctacgagaagctcgaagaggagaccggacaggtggtgggcttccatcaaccaggatctattcggctggccaccactcctgtccgagtcgacgaatttaagtaccagatgaccagaacgggctggcatgcaacggaacagtacttgatcgaaccagaaaaaatacaggagatgtttccactcctgaatatgaataaagtactcgctgggctatataaccccggtgatgggcacatagatccctatagcctcacaatggctctggctgctggggcaaggaagtgcggcgcccttctgaaatacccagctcctgttacatcactgaaagcgagaagtgatgggacctgggatgtcgaaacaccacaagggagtatgcgagccaatcgcattgtgaatgccgcaggtttctgggctcgggaggttggaaagatgataggactggagcatccattgatccctgtgcaacaccagtatgtcgttacctctaccatctctgaggtcaaagccctgaagcgcgagctccccgtccttagggacctcgagggctcctattacttgagacaggaaagagatggcctactgttcggaccttacgagtcccaagaaaaaatgaaagtccaagattcttgggtcactaacggcgtcccacctggattcggtaaggagctattcgaatcggacttggatagaatcatggaacacatcaaagcggctatggagatggtgcccgtgctgaaaaaagccgacattataaacgttgtgaatggacctatcacttattccccagacatcttgccaatggtcggacctcaccagggagtgaggaattactgggttgccattggatttggctacgggattatccacgccggaggagtgggcaaatatctatctgattggatcctacacggcgaaccacctttcgacctgatcgagctcgatccgaaccgctacggcaaatggacaacgacccagtataccgaggccaaggctagggaatcctatgggttcaacaatatcgtaggataccccaaggaagagcgttttgcggggcgcccaacccagcgcgtgagcggcctctaccagcggttggagagtaagtgttccatgggctttcacgctggatgggagcagccgcattggttttataaacctgggcaggacacgcagtataggcccagcttcagacgaactaattggtttgagcctgtagggtccgaatacaagcaggttatgcagcgagtagctgttactgatctgtcacccttcggcaagtttaacatcaaggggcaggatagcatccgtttgctagatcacctgttcgccaatgtaattccaaaagtcggctttaccaatattagccacatgttgacgcctaaaggccgggtgtacgctgagcttaccgtgagtcatcagtcccccggggaatttctgctcatcacaggtagtggctctgagctccatgaccttaggtggattgaagaggaggccgtgaagggcgggtacgatgtggaaatcaagaacatcactgatgaactcggagtcctgggggtggccgggccacaagccagaaaagtcctccaaaaactcacttccgaggatttgagcgatgatgtgtttaaatttctccaaactaaaagtctgaaggtctcaaatatccctgtgacggccattcgcatcagctacacaggtgagctcggatgggagctgtaccaccggcgggaggactccgttgcgctctatgacgccataatgaatgccggacaggaagagggtatcgataattttggaacttacgcaatgaatgccttgagactcgagaaagccttccgtgcgtgggggttggagatgaattgcgacacgaaccctttggaagcaggactggagtactttgtgaagctcaataaaccagccgattttattgggaagcaggcactaaagcagattaaggccaaggggctgaagaggcggctggtgtgcctgacactggcaactgacgacgttgatccagagggaaatgagagcatttggtataatggcaaggtggtcggcaatactaccagcggctcctactcctatagtatccagaaatccctggcctttgcctatgtgccagtgcagctttctgaagttgggcaacaagtggaagtcgagcttcttgggaagaattaccccgctgtgatcatacaggaacctctggtgctcacagagccaacccgcaatcgtttgcagaagaaaggcggtaaagacaaaacatag

SEQ ID NO: 176007 - DNA, 2601 bp, Artificial Sequence
  derived and/or modified sequence
atgctgcggcctggggcccagctgctgcggggcctgctgctgcggagctgccccctgcagggcagccctggccggcccaggtctgtgtgtggccgggagggggaggagaagccacccctgtctgctgagacccagtggaaggacagagctgagaccgtcatcattggaggcggctgtgtgggcgtgtccctggcctaccacctggccaaggccggcatgaaggatgtggtgctgctggagaagtctgagctgacagctggcagcacctggcacgccgccggcctgaccacctacttccaccctggcatcaacctgaagaagatccactatgacagcatcaagctgtatgagaagctggaggaggagaccggccaggtggtgggcttccaccagcccggcagcatccggctggccaccacccctgtgcgggtggatgagttcaagtaccagatgaccaggacaggctggcacgccacagagcagtacctgattgagcctgagaagatccaggagatgttccccctgctgaacatgaacaaggtgctggccggcctgtacaaccctggagatggccacatcgacccctacagcctgaccatggccctggccgccggggccaggaaatgtggggccctgctgaagtacccagcccctgtgaccagcctgaaggcccggagtgatggcacctgggatgtggagaccccccagggctccatgagggccaaccgcatcgtgaatgctgctggcttctgggcccgggaggtgggcaagatgattggcctggagcaccccctcatccctgtgcagcaccagtatgtggtgaccagcaccatcagcgaggtgaaggccctgaagcgggagctgcctgtgctgcgggacctggagggcagctactacctgcggcaggagagagatggcctgctgtttggcccctatgagagccaggagaagatgaaggtgcaggacagctgggtgaccaatggagtgcccccaggctttgggaaggagctgtttgaaagtgacctggaccgcatcatggagcacatcaaggccgccatggagatggtgcctgtgctgaagaaggctgacatcatcaacgtggtgaatggccccatcacctacagcccagacatcctgcccatggtgggcccccaccagggcgtgaggaactactgggtggccatcggcttcggctacggcatcatccacgccggcggcgtgggcaagtacctgagtgactggatcctgcatggagagcccccatttgacctgattgagctggaccccaacagatatggcaagtggaccaccacccagtacacagaggccaaggcccgggagagctatggcttcaacaacatcgtgggctaccccaaggaggagagatttgctggccggcccacccagagggtgtctggcctgtaccagaggctggagagcaaatgttccatgggcttccacgccggctgggagcagccccactggttctacaagccaggccaggacacccagtaccggcccagcttccggaggaccaactggtttgagcctgtgggcagcgagtacaagcaggtgatgcagagggtggccgtgacagacctgagcccctttgggaagttcaacatcaagggccaggacagcatccggctgctggaccacctgtttgccaacgtcatccccaaggtgggcttcaccaacatcagccacatgctgacccccaagggccgggtgtatgcagagctgactgtgagccaccagagccctggagagttcctgctgatcactggaagtggcagcgagctgcatgacctgcgctggattgaggaggaggccgtgaagggcggctatgatgtggagatcaagaacatcacagatgagctgggcgtgctgggcgtggccggcccccaggccaggaaggtgctgcagaagctgaccagcgaggacctgagtgatgatgtgttcaagttcctgcagaccaagagcctgaaggtgagcaacatccctgtgacagccatccgcatctcctacacaggagagctgggctgggagctgtaccacagaagagaagattctgtggccctgtatgatgccatcatgaatgccggccaggaggagggcatcgacaactttggcacctacgccatgaatgccctgcggctggagaaggccttccgggcctggggcctggagatgaactgtgacaccaaccccctggaggccggcctggagtactttgtgaagctgaacaagccagctgacttcatcggcaagcaggccctgaagcagatcaaggccaagggcctgaagaggcggctggtgtgcctgaccctggccacagatgatgtggaccctgagggcaatgaaagcatctggtacaacgggaaggtggtgggcaacaccaccagcggcagctacagctacagcatccagaagagcctggcctttgcctacgtgcctgtgcagctgtctgaggtgggccagcaggtggaggtggagctgctgggcaagaactacccagctgtgatcatccaggagcccctggtgctgacagagcccaccaggaaccggctgcagaagaagggcggcaaggacaagacctag

SEQ ID NO: 176008 - DNA, 2601 bp, Artificial Sequence
  derived and/or modified sequence
atgctgcggcccggcgcccagctgctgcggggcctgctgctgcggagttgcccattgcagggttccccgggccggccccgatctgtttgtggccgggagggagaagagaaaccccctctttctgccgaaacccaatggaaagaccgcgcagagacagttatcattgggggcggctgcgtcggtgtaagcctggcctaccatctggcaaaagcgggcatgaaggatgttgtgcttttagagaaaagcgagttgaccgcaggatcaacctggcacgctgccggacttactacctattttcacccggggatcaacctgaaaaaaatacactatgattccataaaactgtacgaaaagttggaggaggaaactggccaagtggtgggctttcaccaacctgggagtataaggcttgccactacacccgtcagagtggacgagttcaagtaccagatgacaagaaccgggtggcacgccaccgaacagtatctcatcgaacctgagaaaatccaagaaatgtttccattgttgaacatgaacaaggtgcttgcaggcttgtacaatcccggcgacggtcacatagacccctattccctgacgatggcgctggccgccggtgcccggaagtgcggggctctgttgaagtatcctgccccagtcacctctcttaaagctaggtccgacgggacgtgggatgtggaaactccccagggcagcatgcgggctaaccgcattgtgaacgcagcaggattctgggcaagagaggttggaaagatgattggactggagcatccattaattcccgtgcagcaccagtacgttgtaacgagcactattagcgaggtgaaagccctaaaacgagagctccctgtgctgagggacctggaagggagctattatctgcgacaagaaagggatggcctgctatttggtccatacgagagccaggagaaaatgaaagtacaggatagttgggttaccaatggtgtgccacccggctttggcaaagaactattcgaatccgacctggaccgaattatggagcacataaaggctgcaatggagatggttcctgttctgaaaaaggcagacatcataaacgtggttaatgggccaatcacttactctccggacatcctgcccatggtgggcccccatcagggcgtccgcaactattgggtggctatcgggtttggctacgggatcatccatgccggtggtgtgggcaagtatctctctgattggattctgcacggagaaccccccttcgatctgatcgagctcgaccccaaccggtacggtaaatggactactacgcagtacactgaagctaaggctagggagtcctacggctttaacaatatcgttggttatcctaaagaggagcggttcgctggccgcccgacccaacgcgtttccggtttgtaccagcgcttagagagtaagtgttccatggggtttcatgccggatgggaacagcctcactggttctacaaacctgggcaggacactcagtatagaccatcctttaggagaacaaattggtttgaacctgtgggaagtgagtataaacaggtgatgcagagagtggcagtgactgacctaagcccattcggtaagtttaacatcaagggacaggattccattcgtttactagaccacctgtttgcaaacgttatccccaaggtgggctttacaaacatcagccatatgctgacaccgaaggggagagtatacgccgagctgactgtctctcaccagtcacccggcgaattcctgctgatcacaggatcagggtcagagctccacgacctgcgctggatcgaagaagaggctgtgaaagggggatacgacgtcgaaatcaagaacataacagacgagctcggagtgttgggtgttgctggcccccaggctagaaaggttttgcaaaaactgacatccgaggatttgagtgacgacgtctttaaattcctgcagacgaaatcactgaaagtgagcaacatccctgttaccgcaatccgtattagttacactggagagctggggtgggaactctatcatcgccgcgaggactcggttgccctgtacgatgcaatcatgaatgctggccaagaggagggtatagacaacttcggaacatatgccatgaatgctttgcgtctcgaaaaggcctttcgagcttggggcctcgagatgaactgtgataccaacccgctagaggccggcctagaatattttgtgaaactcaataagcccgcagactttatagggaaacaggcactgaagcagatcaaggcaaagggattgaaacggaggctggtgtgcctgaccttagctactgacgacgttgacccagaggggaacgaatccatatggtataatggaaaggtggtggggaacactacctcaggctcctactcctactccattcaaaaatcactagcctttgcatacgtcccagtacagctcagtgaggtggggcaacaggttgaggtggaactactggggaaaaactacccagcggttatcattcaggagcctctagtcctcactgaacccaccagaaatagacttcaaaagaaaggtggaaaggacaagacatag

SEQ ID NO: 176009 - DNA, 2601 bp, Artificial Sequence
  derived and/or modified sequence
atgctccggcctggagcacaattgctgcggggactcctgcttcgatcttgccctcttcaagggtctccagggagacccaggtcagtatgcggacgagaaggggaagaaaagcccccactgagtgctgagactcagtggaaagatcgagctgagaccgttatcatcggaggtggctgcgtaggggtatcgctggcctatcacttggccaaggcgggaatgaaggacgttgtgctgctggagaaatctgagttgactgccggaagcacctggcacgctgccggactgactacttatttccatcctggcatcaatcttaaaaaaatccactacgacagtatcaagctgtatgagaaattagaggaagagacgggccaagttgtcggattccaccagccagggagcatccgattggccacaactcctgttagggtcgacgagtttaaatatcaaatgactcgcactggctggcacgcaacagagcagtatctcatcgagccagagaaaattcaggagatgtttcccctcctgaacatgaacaaagtgttggcagggctttacaatcccggagatggacacatcgacccttactcccttaccatggctctggcagccggagctcgtaagtgtggcgcactgttgaagtatcccgcaccagtgacgtccctgaaagccagatccgacggcacttgggacgttgagaccccgcaggggtctatgcgggctaaccggatcgtaaacgctgcgggattttgggctagggaggtgggcaagatgattggcttagagcacccattaatccccgtccagcatcaatacgtggtcacgagtactatatcagaggtgaaggctctgaagcgggaacttcctgtcctccgtgacctggaggggagctactatttacgacaggaacgcgatggcctcctgttcggcccttacgaatctcaggagaagatgaaagtgcaagactcatgggtcactaatggcgtgccacctggatttgggaaggagctgttcgaaagcgatttggacagaattatggagcacattaaggcagccatggaaatggtgcccgtgttgaagaaggccgacatcatcaatgtggtgaacggccctattacctactcgcctgacatcctgccaatggtgggaccccaccagggagtgcgaaattactgggttgcgatcggatttggctacgggatcatccacgccggtggggtgggaaaatacttatccgattggatcctgcatggcgagcccccattcgacttaatcgaactggaccctaatagatatggcaaatggaccacaactcagtatactgaggcaaaggcccgagaaagttatggttttaacaacatcgtcgggtaccccaaggaggagagattcgccggaaggcctacccaaagagtgtctgggttataccagcggcttgagagcaagtgttccatgggcttccatgcaggctgggaacagccccattggttctacaagccaggacaggacacccagtatcgtccttcgttccggcgaacaaattggtttgaaccagtaggttctgaatacaagcaagtaatgcagcgtgttgctgtcacagacttgtcaccatttgggaaattcaatattaaaggtcaagatagtattcgactactggaccacttgttcgccaatgttatccccaaggtaggatttaccaatataagccatatgttgacacctaaaggcagagtgtatgccgaacttaccgtttctcaccaatcacccggtgaattcctgttaataacagggagtggatccgaattacacgacttgagatggatagaggaagaagctgtcaaaggtggatacgacgtcgagatcaagaatatcaccgacgagttaggagtgcttggtgtcgcaggaccccaggcaagaaaggtgctgcagaaactgactagtgaggacttgtccgatgacgtcttcaaattcctccagacgaaatccttaaaggtgtcaaatattcctgtgactgctatccgcatctcctacactggagaactcggttgggagctgtatcataggcgggaagacagtgtcgcgttgtacgacgccataatgaacgccggacaggaggaaggcatagataattttggaacgtatgcaatgaatgctttgcgcttagaaaaagcgttccgtgcatggggactggagatgaattgcgacactaatccattagaagctggtctggagtattttgtgaagttgaataaacctgctgacttcataggaaaacaggctcttaagcagattaaagccaaggggctgaagcgcaggctcgtgtgtctgaccttggccacagacgatgtcgatcctgaagggaatgagtcaatttggtataacggtaaagtcgtgggcaataccacttccggatcttacagttactccattcagaagagtttggcattcgcatacgtcccagtgcagctatctgaggtaggacagcaggtggaagtggagttactggggaaaaattaccccgctgtaattatccaggagccgctggtactgacggaaccaacaaggaacagactgcagaagaaaggtggaaaggacaagacgtag

SEQ ID NO: 176010 - DNA, 2601 bp, Artificial Sequence
  derived and/or modified sequence
atgctgagacccggcgcccagctgctgagaggcctgctgctgagaagctgccccctgcagggcagccccggcagacccagaagcgtgtgcggcagagagggcgaggagaagccccccctgagcgccgagacccagtggaaggacagagccgagaccgtgatcatcggcggcggctgcgtgggcgtgagcctggcctaccacctggccaaggccggcatgaaggacgtggtgctgctggagaagagcgagctgaccgccggcagcacctggcacgccgccggcctgaccacctacttccaccccggcatcaacctgaagaagatccactacgacagcatcaagctgtacgagaagctggaggaggagaccggccaggtggtgggcttccaccagcccggcagcatcagactggccaccacccccgtgagagtggacgagttcaagtaccagatgaccagaaccggctggcacgccaccgagcagtacctgatcgagcccgagaagatccaggagatgttccccctgctgaacatgaacaaggtgctggccggcctgtacaaccccggcgacggccacatcgacccctacagcctgaccatggccctggccgccggcgccagaaagtgcggcgccctgctgaagtaccccgcccccgtgaccagcctgaaggccagaagcgacggcacctgggacgtggagaccccccagggcagcatgagagccaacagaatcgtgaacgccgccggcttctgggccagagaggtgggcaagatgatcggcctggagcaccccctgatccccgtgcagcaccagtacgtggtgaccagcaccatcagcgaggtgaaggccctgaagagagagctgcccgtgctgagagacctggagggcagctactacctgagacaggagagagacggcctgctgttcggcccctacgagagccaggagaagatgaaggtgcaggacagctgggtgaccaacggcgtgccccccggcttcggcaaggagctgttcgagagcgacctggacagaatcatggagcacatcaaggccgccatggagatggtgcccgtgctgaagaaggccgacatcatcaacgtggtgaacggccccatcacctacagccccgacatcctgcccatggtgggcccccaccagggcgtgagaaactactgggtggccatcggcttcggctacggcatcatccacgccggcggcgtgggcaagtacctgagcgactggatcctgcacggcgagccccccttcgacctgatcgagctggaccccaacagatacggcaagtggaccaccacccagtacaccgaggccaaggccagagagagctacggcttcaacaacatcgtgggctaccccaaggaggagagattcgccggcagacccacccagagagtgagcggcctgtaccagagactggagagcaagtgcagcatgggcttccacgccggctgggagcagccccactggttctacaagcccggccaggacacccagtacagacccagcttcagaagaaccaactggttcgagcccgtgggcagcgagtacaagcaggtgatgcagagagtggccgtgaccgacctgagccccttcggcaagttcaacatcaagggccaggacagcatcagactgctggaccacctgttcgccaacgtgatccccaaggtgggcttcaccaacatcagccacatgctgacccccaagggcagagtgtacgccgagctgaccgtgagccaccagagccccggcgagttcctgctgatcaccggcagcggcagcgagctgcacgacctgagatggatcgaggaggaggccgtgaagggcggctacgacgtggagatcaagaacatcaccgacgagctgggcgtgctgggcgtggccggcccccaggccagaaaggtgctgcagaagctgaccagcgaggacctgagcgacgacgtgttcaagttcctgcagaccaagagcctgaaggtgagcaacatccccgtgaccgccatcagaatcagctacaccggcgagctgggctgggagctgtaccacagaagagaggacagcgtggccctgtacgacgccatcatgaacgccggccaggaggagggcatcgacaacttcggcacctacgccatgaacgccctgagactggagaaggccttcagagcctggggcctggagatgaactgcgacaccaaccccctggaggccggcctggagtacttcgtgaagctgaacaagcccgccgacttcatcggcaagcaggccctgaagcagatcaaggccaagggcctgaagagaagactggtgtgcctgaccctggccaccgacgacgtggaccccgagggcaacgagagcatctggtacaacggcaaggtggtgggcaacaccaccagcggcagctacagctacagcatccagaagagcctggccttcgcctacgtgcccgtgcagctgagcgaggtgggccagcaggtggaggtggagctgctgggcaagaactaccccgccgtgatcatccaggagcccctggtgctgaccgagcccaccagaaacagactgcagaagaagggcggcaaggacaagacctag

SEQ ID NO: 176011 - DNA, 3097 bp, Artificial Sequence
  derived and/or modified sequence
gcgcctgcgccctcggcctcggcctagtcatgctccgtcccggcgcgcagctgctgcggggcctcctgctgcggagctgcccgctgcagggctcccccgggcgcccgcgctctgtctgcggccgggaaggagaggaaaaaccacccttatctgcagaaacacaatggaaagacagagcagaaacagtgataattggaggtggctgtgttggtgtgagtctggcttatcacctggccaaagcagggatgaaagatgtggtcctgctggagaaatcagagctcacggctggatctacctggcacgcagcaggtttaacaacttactttcatcctggaataaacttgaagaaaatacattatgatagcatcaaactttatgagaaactggaagaagaaactggtcaggtggtgggattccatcagccaggtagtatcagacttgctaccacccctgtaagggtagatgaatttaaatatcaaatgactcggactggctggcatgcaacagaacagtatctcattgaacctgaaaaaattcaagagatgttccctttactcaacatgaataaggttttagctggattgtataatcctggagatggtcacattgatccttattctctaactatggcactggctgctggggctaggaaatgtggtgcccttttaaaatatcctgcaccagtaacttctctgaaagccaggtcagatggaacatgggacgttgaaacaccacaggggtctatgagagcaaatagaattgtgaatgctgcaggattttgggctcgtgaagtaggtaaaatgattggactagaacatcctctcattccggttcaacatcaatatgttgttacatcgactatatctgaagtgaaagctttgaaacgagaactgcctgtgctccgtgacctggaaggatcatattatctccgacaggaaagggatgggcttttgtttggtccatatgaaagtcaagagaaaatgaaagttcaggactcctgggtcaccaatggagttcctccaggttttggaaaggaactctttgagtctgatctagatcgaatcatggaacacatcaaagctgccatggaaatggttcctgtcttgaaaaaggctgacatcatcaatgttgtcaatggtcctatcacgtattctcctgacattctgcctatggtggggccccatcagggggtcagaaactactgggtggctataggctttggatatggcataatccacgctggtggggtagggaaatatctcagtgactggatcctgcatggagaacctccttttgatctgatagaattggatcctaatcgctatggcaaatggacaacaacccagtacactgaggccaaagcaagagaatcatatggattcaacaatattgttggttatcctaaagaagaacggtttgctgggaggccgactcaacgagtcagtgggctctatcaaaggctggagtctaagtgttccatggggttccatgctggctgggagcagccgcactggttctacaaaccaggccaggacactcagtacaggccaagttttcgccgcacaaactggtttgagcctgtgggctcggagtataaacaggttatgcaaagagtagcggtaactgacctatcaccatttggcaagtttaacatcaaaggccaagattccattagactactggaccatctctttgcaaatgtcattccaaaggtgggttttacaaatataagtcacatgttaacacccaagggtcgagtgtatgctgagctgactgtttctcaccaatctcctggggagtttcttttaattactggctctggatcagaacttcatgatcttagatggattgaagaagaagcagtcaaaggtggatatgatgttgaaattaaaaacataactgatgagcttggagttcttggagttgctgggccacaggcaagaaaggtccttcagaaactgacctctgaagatcttagtgatgatgttttcaagtttcttcaaaccaagtccttaaaggtttccaacattcctgtcactgctattaggatatcttatactggtgagctgggttgggagctgtatcacagaagagaagattctgtggcgctgtatgacgctatcatgaatgcaggccaggaggagggaatcgacaattttggaacctatgccatgaatgccttacgcctggagaaagccttcagagcctgggggttagagatgaactgtgatacaaatcctttggaagctggactggaatattttgtgaagttaaataagccagcagacttcataggaaagcaagcactgaaacagattaaagccaaggggctgaaacgaagactggtctgcctcaccttggcaacggatgatgttgatccagagggaaatgaaagcatctggtacaatggcaaggtggttggcaacacgacatctggaagctatagctacagcatccagaagagtctggctttcgcatatgtccctgtacaactaagtgaagtgggacagcaagtggaagttgaactattaggcaaaaattacccagcagtcatcatacaagaacctttggtattgaccgaaccaaccagaaaccggcttcagaaaaaaggtggaaaggacaaaacttgaaaaaagaccttcagcagtcaactgaattagagttgctaatgactgtccttgaaattattataactggctcccaggggaatagaggaaaccaggaattcatttcaaaatcatcaaagtctaaatttagaatcttaatgaaacctttctgttaagtgttttctaagcaagacagaataatagataaatgatttacattgttcttttaaatgaagaaatttgaaatgaatgtttttttatttaccccacattacccaatcagtaaaacatttaggtgtttgctaatatacacaatcattactataacctaattaagggacattttataattttagtaacaaatgcattcggttcttgacagctgaaaacaaattaataaattatcttttacataaaaacatgtacaatattgtttatggatttacttctttgagaaatctttccttagatgaataaatgaaagttttaat

SEQ ID NO: 176012 - protein, 246 aa, Artificial Sequence
  derived and/or modified sequence
MAGYLKLVCVSFQRQGFHTVGSRCKNRTGAEHLWLTRHLRDPFVKAAKVESYRCRSAFKLLEVNERHQILRPGLRVLDCGAAPGAWSQVAVQKVNAAGTDPSSPVGFVLGVDLLHIFPLEGATFLCPADVTDPRTSQRILEVLPGRRADVILSDMAPNATGFRDLDHDRLISLCLTLLSVTPDILQPGGTFLCKTWAGSQSRRLQRRLTEEFQNVRIIKPEASRKESSEVYFLATQYHGRKGTVKQ

SEQ ID NO: 176013 - protein, 145 aa, Artificial Sequence
  derived and/or modified sequence
MAGYLKLVCVSFQRQGFHTVGSRCKNRTGAEHLWLTRHLRDPFVKAAKVESYRCRSAFKLLEVNERHQILRPGLRVLDCGAAPGAWSQVAVQKVNAAGTDGVSLLPRLQCNGVISAHCNLCLPGSSDSPASASQIPALLLASCLG

SEQ ID NO: 176014 - DNA, 1601 bp, Artificial Sequence
  derived and/or modified sequence
gcggcgcgctgcaggcgcggggaacaccaatggcggggtacttgaagctggtgtgtgtttcctttcagcgtcaagggttccacactgttgggagtcgctgcaagaatcggacaggcgctgagcacctgtggctgacccgacatctcagggacccatttgtgaaggctgcgaaggtggagagttaccggtgtcgaagcgccttcaagctcctggaggtgaacgagaggcaccagattctgcggcccggccttcgggtgttagactgtggggcagctcctggggcctggagtcaggtggcggtgcagaaggtcaacgccgcaggcacagatcccagctctcctgttggcttcgtgcttggggtagatcttcttcacatattccccctggaaggagcaacttttctgtgccctgctgacgtgactgacccgagaacctcacagagaatcctcgaggtgcttcctggcaggagagcagatgtgattctgagcgacatggcgcccaatgccacagggttccgggacctcgatcatgacaggctcatcagcctgtgcctgacccttctcagcgtgaccccagacatcctgcaacctggggggacattcctttgtaaaacctgggctggaagtcaaagccgtcggttacagaggagactgacagaggaattccagaatgtaaggatcatcaaacctgaagccagcaggaaagagtcatcagaagtgtacttcttggccacacagtaccacggaaggaagggcactgtgaagcagtgaggatttcttgtgccattttcataatggtcattagctccttttaagctagaaacgtagcctgagctcctgaagagttcctgggagatttgagctgattttggagatggagcaggacaagtggggagtctctctctctctttctctctctctctttttaaccaaaaagagatgacaaaactaagttcaggggccatggaaaatgaaaaagtccgctatattgtgatttgggaagagaaagttatcaagagaaagaggtgaggatggaaggatggagaaaaacagactgtgggaaggatcagaaggaatccgccgaggcagggatgggtgtgcccatgtgtgccttgacgggacttcatcttatagactgttaaactgtcacacacaaacaggctttccacccctgctctgagagcaccacgcacagatttccagttcttagtgtggctgtttaaagtagaaaatctgggggctgggtgaggccactcatgcctgtaaacccagggctttagaaggctgaggctgggggattgcttgaagtcaggagttcaagaccaacctgggcaacatagcaacaccccccatgtctacaaaaatgaaaaaccaaaaagcaaaccaaaagaaaaatctgaaatttccatctggggattaacttctgtctttctggtgaacaatatagcaattcacgcattcttcaagcagcaaaagttcccggaacaattagggaagacgtatggtctgaatttatccaggcagtgggtctgctttggtttttgctggaaatttatatcagtgtctgggctcccaagaacataaatgtaattgccaaagcaa

SEQ ID NO: 176015 - DNA, 1628 bp, Artificial Sequence
  derived and/or modified sequence
acttccggcggcgcgctgcaggcgcggggaacaccaatggcggggtacttgaagctggtgtgtgtttcctttcagcgtcaagggttccacactgttgggagtcgctgcaagaatcggacaggcgctgagcacctgtggctgacccgacatctcagggacccatttgtgaaggctgcgaaggtggagagttaccggtgtcgaagcgccttcaagctcctggaggtgaacgagaggcaccagattctgcggcccggccttcgggtgttagactgtggggcagctcctggggcctggagtcaggtggcggtgcagaaggtcaacgccgcaggcacagatggagtctcactcttgcccaggctgcagtgcaatggtgtgatctcggctcactgcaacctctgcctacctggttcaagcgattctcctgcctcagcctcccaaatcccagctctcctgttggcttcgtgcttggggtagatcttcttcacatattccccctggaaggagcaacttttctgtgccctgctgacgtgactgacccgagaacctcacagagaatcctcgaggtgcttcctggcaggagagcagatgtgattctgagcgacatggcgcccaatgccacagggttccgggacctcgatcatgacaggctcatcagcctgtgcctgacccttctcagcgtgaccccagacatcctgcaacctggggggacattcctttgtaaaacctgggctggaagtcaaagccgtcggttacagaggagactgacagaggaattccagaatgtaaggatcatcaaacctgaagccagcaggaaagagtcatcagaagtgtacttcttggccacacagtaccacggaaggaagggcactgtgaagcagtgaggatttcttgtgccattttcataatggtcattagctccttttaagctagaaacgtagcctgagctcctgaagagttcctgggagatttgagctgattttggagatggagcaggacaagtggggagtctctctctctctttctctctctctctttttaaccaaaaagagatgacaaaactaagttcaggggccatggaaaatgaaaaagtccgctatattgtgatttgggaagagaaagttatcaagagaaagaggtgaggatggaaggatggagaaaaacagactgtgggaaggatcagaaggaatccgccgaggcagggatgggtgtgcccatgtgtgccttgacgggacttcatcttatagactgttaaactgtcacacacaaacaggctttccacccctgctctgagagcaccacgcacagatttccagttcttagtgtggctgtttaaagtagaaaatctgggggctgggtgaggccactcatgcctgtaaacccagggctttagaaggctgaggctgggggattgcttgaagtcaggagttcaagaccaacctgggcaacatagcaacaccccccatgtctacaaaaatgaaaaaccaaaaagcaaaccaaaagaaaaatctgaaatttccatctggggattaacttctgtctttctggtgaacaatatagcaattcacgcattcttcaagcagcaaaagttcccggaacaattagggaagacgtatggtctgaatttatcc

SEQ ID NO: 176016 - DNA, 741 bp, Artificial Sequence
  derived and/or modified sequence
atggcgggttacttgaaacttgtatgcgtgtccttccagaggcagggttttcacaccgtgggctcacgctgcaaaaaccgtactggcgcagagcacctgtggctcacacgccacctccgtgatccatttgttaaggcggctaaagtggaaagttataggtgcagatccgcttttaagctgctggaggtcaacgaacgacatcagattctgcgtcctggcctgcgagtgctggattgcggcgccgcacctggggcctggtcacaggtggccgttcaaaaggttaacgccgctggcacagaccctagctccccagtcggcttcgtgctgggagttgacctgctacacatttttccgttagagggggctacttttctgtgccctgctgacgtgaccgacccacgcaccagccaacgaatcttagaggtgctgcctggacgtcgagcagacgtgattttatccgatatggccccaaatgccaccggttttagggaccttgatcacgataggctgatttcactgtgtttgacgcttctctctgtcactcccgacatcctccagcctggagggacgtttttgtgtaagacatgggcagggagccagagcagaaggcttcagcgccgattaaccgaggaattccagaacgtacgcatcattaaaccggaagcctctcgaaaggaatcatccgaggtgtacttcttagccacacaataccatgggagaaagggtaccgtgaagcagtag

SEQ ID NO: 176017 - DNA, 438 bp, Artificial Sequence
  derived and/or modified sequence
atggccgggtatttaaagctggtttgtgttagctttcaaaggcaaggatttcacacagtaggttcaagatgcaaaaaccggacgggtgctgagcatctgtggctgacacgacatctgcgcgatccttttgttaaagccgccaaggttgaaagctaccgatgtcgaagtgcctttaaattgcttgaggttaatgagcgccatcagattttgcggccggggctacgagttcttgactgcggtgctgcccccggagcctggtcccaagtagccgtacagaaagtaaatgccgcaggcaccgatggcgtgagcctcctcccacggctgcagtgcaacggggtaatctccgcacactgtaacttgtgtctccctggctcctcagactcgcccgcgagcgcatcacagatcccagctctgctgctcgcatcttgtttggggtag

SEQ ID NO: 176018 - DNA, 741 bp, Artificial Sequence
  derived and/or modified sequence
atggccggctacctgaagctggtgtgtgtgtccttccagaggcagggcttccacacagtgggcagccgctgcaagaacagaactggagctgagcacctgtggctgaccaggcacctgcgggacccctttgtgaaggccgccaaggtggagagctaccgctgccgcagcgccttcaagctgctggaggtgaatgaaagacaccagatcctgcggcccggcctgcgggtgctggactgtggggccgcccctggggcctggagccaggtggccgtgcagaaggtgaatgctgctggaacagaccccagcagccctgtgggctttgtgctgggcgtggacctgctgcacatcttccccctggagggcgccaccttcctgtgcccagcagatgtgacagaccccaggaccagccagaggatcctggaggtgctgcccggccggcgggcagatgtgatcctgagtgacatggccccaaatgccaccggcttccgggacctggaccatgacaggctcatcagcctgtgcctgaccctgctgtctgtgaccccagacatcctgcagcccggcggcaccttcctgtgcaagacctgggccggcagccagagccggcggctgcagaggcggctgacagaggagttccagaatgtgcgcatcatcaagccagaggccagcaggaaggagagcagcgaggtgtacttcctggccacccagtaccacggcaggaaaggaacagtgaagcagtag

SEQ ID NO: 176019 - DNA, 438 bp, Artificial Sequence
  derived and/or modified sequence
atggccggctacctgaagctggtgtgtgtgtccttccagaggcagggcttccacacagtgggcagccgctgcaagaacagaactggagctgagcacctgtggctgaccaggcacctgcgggacccctttgtgaaggccgccaaggtggagagctaccgctgccgcagcgccttcaagctgctggaggtgaatgaaagacaccagatcctgcggcccggcctgcgggtgctggactgtggggccgcccctggggcctggagccaggtggccgtgcagaaggtgaatgctgctggaacagatggagtgtccctgctgccccggctgcagtgcaatggagtcatcagcgcccactgcaacctgtgcctgcccggcagcagtgacagccctgccagcgccagccagatcccagccctgctgctggccagctgcctgggctag

SEQ ID NO: 176020 - DNA, 741 bp, Artificial Sequence
  derived and/or modified sequence
atggccggctacctgaagctggtgtgcgtgagcttccagcggcagggatttcacaccgtcggaagccgctgcaaaaacaggacgggggcagagcatctttggcttacccggcacctgcgcgaccctttcgttaaagccgctaaagtcgagtcttatagatgcaggagcgcgttcaagttgctcgaagtgaacgaaaggcaccagatcctgcgccccggacttagggtgttggattgcggagcggctccaggagcctggagccaggtcgccgtacaaaaagtgaacgccgcagggaccgatccaagtagccctgtggggtttgttctcggggtggatctcctgcacatcttcccactcgaaggagcgacctttctatgtcccgctgacgtgacagaccctagaacctcacagaggatacttgaggtccttcctgggcgccgggctgatgtaatcctgtcggatatggccccaaacgcaactggctttcgcgatctagaccacgatcgcctcatctctctatgcctcacgttactgtcggtgactcccgatattctccaacccgggggcaccttcctgtgcaaaacctgggcaggcagtcaatcccgcaggttgcagcggcgcctgaccgaggaatttcaaaatgtgagaatcattaaacccgaggctagtcggaaagaaagcagcgaggtgtactttttggcaacacaataccacggaagaaagggaactgtcaagcagtag

SEQ ID NO: 176021 - DNA, 438 bp, Artificial Sequence
  derived and/or modified sequence
atggccggctacctgaagctggtgtgcgtgagcttccagcggcagggatttcacactgtcgggagtaggtgtaagaatagaacaggagctgagcacctctggctgactagacatctcagagaccccttcgtgaaggcggcaaaggtcgaatcctatcgctgtaggagcgcgtttaagctgcttgaagtgaatgagaggcaccagatattaaggccaggactacgagtgctggactgcggcgcagctccaggagcatggagccaggtcgccgtccagaaggtgaacgctgctggcaccgatggcgtcagcctgctaccaaggctgcaatgcaacggcgttatcagtgcacactgtaacttgtgtctgcctggctccagcgactcccctgcgtcggctagccaaatccccgcccttctgttggcgagctgtttaggttag

SEQ ID NO: 176022 - DNA, 741 bp, Artificial Sequence
  derived and/or modified sequence
atggctgggtacctgaagctcgtgtgcgtgagcttccagcggcagggattccacacggtcggctcaaggtgtaaaaataggacaggtgcggaacacctctggttgaccaggcacctgagggacccatttgtgaaagcagccaaggtggaatcctaccgttgcaggtcagccttcaaactactggaagtcaacgagcgccatcagattttgcggccaggtttacgagtcctggactgcggcgctgctcctggcgcttggagccaggtggcggtgcaaaaagtaaatgccgctggcacagaccctagttcaccagtcggatttgtactcggcgtggacctcctccatattttccccctagagggcgctaccttcctctgccccgcagacgtgacagatcctaggacgagccagagaatcctcgaagtattgcccggtaggagagccgacgtgatcctctccgacatggccccaaatgcaacagggttccgcgacctggatcatgacagacttattagcctatgtcttacactgctctcagtgactcccgacatcctccagcccggagggaccttcctgtgcaaaacctgggctggatcccagagcaggagacttcagagacgccttacggaggagtttcaaaatgtaaggattattaagcccgaagcaagtagaaaggaatcatcagaagtttacttcttggctactcagtatcacggtcgaaagggcaccgtgaaacagtag

SEQ ID NO: 176023 - DNA, 438 bp, Artificial Sequence
  derived and/or modified sequence
atggccggatacttaaagctcgtgtgtgtgtccttccagcgccaaggatttcatacagtggggtcccggtgtaaaaacagaaccggcgcagagcacctatggctgaccaggcacttgagggatccctttgtaaaagctgccaaggtcgaatcttatcgctgccgatccgcatttaagctgctcgaagtcaacgagaggcatcagatcctgcggcctggcctgcgagttctggactgcggagccgcacctggcgcatggagtcaagttgccgtccaaaaggttaatgccgctggcactgacggtgtatccctgctgcctaggttgcaatgtaatggcgtgatttctgcccattgtaacctatgcttgcctggcagcagcgactcacccgctagtgcaagccaaattccggcacttctgctggcatcttgcctcgggtag

SEQ ID NO: 176024 - DNA, 741 bp, Artificial Sequence
  derived and/or modified sequence
atggccggctacctgaagctggtgtgcgtgagcttccagagacagggcttccacaccgtgggcagcagatgcaagaacagaaccggcgccgagcacctgtggctgaccagacacctgagagaccccttcgtgaaggccgccaaggtggagagctacagatgcagaagcgccttcaagctgctggaggtgaacgagagacaccagatcctgagacccggcctgagagtgctggactgcggcgccgcccccggcgcctggagccaggtggccgtgcagaaggtgaacgccgccggcaccgaccccagcagccccgtgggcttcgtgctgggcgtggacctgctgcacatcttccccctggagggcgccaccttcctgtgccccgccgacgtgaccgaccccagaaccagccagagaatcctggaggtgctgcccggcagaagagccgacgtgatcctgagcgacatggcccccaacgccaccggcttcagagacctggaccacgacagactgatcagcctgtgcctgaccctgctgagcgtgacccccgacatcctgcagcccggcggcaccttcctgtgcaagacctgggccggcagccagagcagaagactgcagagaagactgaccgaggagttccagaacgtgagaatcatcaagcccgaggccagcagaaaggagagcagcgaggtgtacttcctggccacccagtaccacggcagaaagggcaccgtgaagcagtag

SEQ ID NO: 176025 - DNA, 438 bp, Artificial Sequence
  derived and/or modified sequence
atggccggctacctgaagctggtgtgcgtgagcttccagagacagggcttccacaccgtgggcagcagatgcaagaacagaaccggcgccgagcacctgtggctgaccagacacctgagagaccccttcgtgaaggccgccaaggtggagagctacagatgcagaagcgccttcaagctgctggaggtgaacgagagacaccagatcctgagacccggcctgagagtgctggactgcggcgccgcccccggcgcctggagccaggtggccgtgcagaaggtgaacgccgccggcaccgacggcgtgagcctgctgcccagactgcagtgcaacggcgtgatcagcgcccactgcaacctgtgcctgcccggcagcagcgacagccccgccagcgccagccagatccccgccctgctgctggccagctgcctgggctag

SEQ ID NO: 176026 - protein, 1055 aa, Artificial Sequence
  derived and/or modified sequence
MTVEQNVLQQSAAQKHQQTFLNQLREITGINDTQILQQALKDSNGNLELAVAFLTAKNAKTPQQEETTYYQTALPGNDRYISVGSQADTNVIDLTGDDKDDLQRAIALSLAESNRAFRETGITDEEQAISRVLEASIAENKACLKRTPTEVWRDSRNPYDRKRQDKAPVGLKNVGNTCWFSAVIQSLFNLLEFRRLVLNYKPPSNAQDLPRNQKEHRNLPFMRELRYLFALLVGTKRKYVDPSRAVEILKDAFKSNDSQQQDVSEFTHKLLDWLEDAFQMKAEEETDEEKPKNPMVELFYGRFLAVGVLEGKKFENTEMFGQYPLQVNGFKDLHECLEAAMIEGEIESLHSENSGKSGQEHWFTELPPVLTFELSRFEFNQALGRPEKIHNKLEFPQVLYLDRYMHRNREITRIKREEIKRLKDYLTVLQQRLERYLSYGSGPKRFPLVDVLQYALEFASSKPVCTSPVDDIDASSPPSGSIPSQTLPSTTEQQGALSSELPSTSPSSVAAISSRSVIHKPFTQSRIPPDLPMHPAPRHITEEELSVLESCLHRWRTEIENDTRDLQESISRIHRTIELMYSDKSMIQVPYRLHAVLVHEGQANAGHYWAYIFDHRESRWMKYNDIAVTKSSWEELVRDSFGGYRNASAYCLMYINDKAQFLIQEEFNKETGQPLVGIETLPPDLRDFVEEDNQRFEKELEEWDAQLAQKALQEKLLASQKLRESETSVTTAQAAGDPEYLEQPSRSDFSKHLKEETIQIITKASHEHEDKSPETVLQSAIKLEYARLVKLAQEDTPPETDYRLHHVVVYFIQNQAPKKIIEKTLLEQFGDRNLSFDERCHNIMKVAQAKLEMIKPEEVNLEEYEEWHQDYRKFRETTMYLIIGLENFQRESYIDSLLFLICAYQNNKELLSKGLYRGHDEELISHYRRECLLKLNEQAAELFESGEDREVNNGLIIMNEFIVPFLPLLLVDEMEEKDILAVEDMRNRWCSYLGQEMEPHLQEKLTDFLPKLLDCSMEIKSFHEPPKLPSYSTHELCERFARIMLSLSRTPADGR

SEQ ID NO: 176027 - DNA, 3168 bp, Artificial Sequence
  derived and/or modified sequence
atgacggtggaacagaacgttctacagcagagtgccgcacagaagcaccaacagacctttctgaaccaattgagggagatcacaggaattaatgacactcagatcctgcagcaggctctaaaggatagcaatggaaatctcgagctggccgtggcttttctgacggccaagaatgcgaagacaccccaacaggaagaaaccacctactaccagaccgctttaccaggcaacgatcgctatatctcagtgggcagtcaggccgacaccaacgtgattgatcttactggtgatgacaaggatgatctgcagagggcaatcgctctcagcctggctgaatccaatcgcgcattccgcgaaactggcatcaccgatgaggagcaagccataagtcgtgtcctagaagcgagcatcgcggaaaacaaagcctgcctgaagcggaccccgaccgaagtctggcgcgactctagaaacccatacgacagaaagaggcaagacaaagcaccagttggccttaaaaacgtaggcaatacttgttggttcagcgccgttattcagagtttgttcaacttgctggagttccgtcggctggtactgaactacaaaccgcccagcaatgctcaagacttacctcgaaatcagaaggagcaccggaatttaccgtttatgcgggaactccgctaccttttcgccctgctggtagggacaaaacggaaatatgtggacccaagcagggctgtggagatcttgaaagatgcttttaaatccaacgacagtcagcaacaggacgtctctgaattcacacacaaactcctggactggctggaagatgccttccagatgaaggccgaggaagagactgatgaggagaaacctaaaaaccctatggtcgagctcttctatggacgctttctcgcagtcggcgtgctggagggtaaaaaattcgaaaataccgaaatgttcggacaatatcctctccaggtcaatgggttcaaggatcttcatgaatgcttagaagccgccatgatcgaaggagagatcgagtcactgcattccgaaaactcaggtaagtctggccaggaacattggttcaccgaactgcctccagtccttacatttgagcttagcagatttgaatttaaccaggccctagggcgaccagagaaaatccacaacaagttggagttcccccaggtcctgtacctggacagatacatgcacagaaatcgtgagatcactcgtattaaaagagaagaaatcaagagactgaaggactacctgacagtgctacaacagcgcctggaacgctacctatcttatggcagcgggcctaaaagatttccactggtggatgtgctgcaatacgcgctcgagttcgcatcgagtaagcctgtgtgtacttcacccgtagatgacattgatgccagcagcccgccctccgggtccataccaagccagacactcccaagtactaccgagcagcaaggggcactctcctctgaactgccatcaacatcgccttccagcgtggccgcaatctcctcaagatccgttatccacaaacctttcactcagtcacgaatcccaccagatctgccgatgcatcccgcccctcggcatataacggaggaagagctgtctgttctggagtcttgtcttcataggtggaggactgagattgaaaacgacaccagagacctgcaggagtctattagtcggatccacaggacaatagaactgatgtatagcgataagagtatgattcaggtcccttaccggcttcacgcagtcctggttcatgaaggacaggccaacgctgggcattactgggcttacattttcgatcaccgggagagcagatggatgaaatacaatgatatcgccgtgaccaagtcatcttgggaagagctcgtgagagattcatttggtgggtacagaaacgcaagcgcctactgcctgatgtatataaacgataaggcccaattcctcatccaggaggagttcaacaaggagacaggccagcctctagtcggaatagagaccctgccgcctgatcttagggacttcgtcgaggaagataatcagcggttcgaaaaagaattagaggaatgggatgcgcagttggcacagaaggcactgcaggagaaactgctcgccagtcaaaagctgcgcgaatcggaaacatctgtgactactgcacaagctgccggggatccagagtacttggaacagccctcaaggtctgacttttcaaaacacttaaaagaggaaacgatacagattatcaccaaggcctcccacgagcacgaagataagtctcccgagactgttctgcagtcagctatcaaactcgaatacgcgcgtctggtgaaattagcacaagaagatactccccccgagacagattaccgcctgcatcacgtcgtggtgtactttatccagaatcaggctccaaagaagatcatcgaaaagactttgttggagcagtttggcgacaggaatctgagcttcgatgagagatgtcataatattatgaaggtcgctcaggcgaaactcgaaatgattaaacctgaggaagttaatctcgaggaatacgaggaatggcaccaggactacaggaagttccgggagaccacaatgtatctcattataggccttgagaactttcagcgagagagttacatcgattcgctactctttctcatatgcgcataccaaaataataaggagttgcttagtaaaggcctatacagaggacacgacgaggaattgatttcacactacagacgcgagtgcctgctgaagctcaacgaacaggccgctgagctcttcgagtccggagaggaccgggaagtgaataacggtctgatcatcatgaatgaattcatcgttcctttcctgccgctcttactggtggacgagatggaggaaaaagacatcctcgcggtagaggatatgaggaatcgttggtgcagttacttgggacaggaaatggagccgcatcttcaggagaagctgaccgactttctgccgaagctactggactgttcaatggaaatcaaaagttttcatgaaccacccaaactgcccagttacagtacacacgagctgtgcgagcgctttgccaggatcatgctgtcgctgtctcggacccccgcagacggacggtag

SEQ ID NO: 176028 - DNA, 3168 bp, Artificial Sequence
  derived and/or modified sequence
atgacagtggagcagaatgtgctgcagcagagcgctgcccagaagcaccagcagaccttcctgaaccagctgcgggagatcaccggcatcaatgacacccagatcctgcagcaggccctgaaggacagcaatggaaacctggagctggccgtggccttcctgacagccaagaatgccaagaccccccagcaggaggagaccacctactaccagacagccctgcctggaaatgaccgctacatctctgtgggcagccaggccgacaccaacgtcatcgacctgactggagatgacaaggatgacctgcagagggccatcgccctgagcctggccgagagcaacagagccttccgggagaccggcatcacagatgaggagcaggccatcagccgggtgctggaggccagcattgctgagaacaaggcctgcctgaagaggacccccacagaggtgtggagggacagcaggaacccctatgacaggaagaggcaggacaaggcccctgtgggcctgaagaatgtgggcaacacctgctggttctctgctgtgatccagagcctcttcaacctgctggagttccggcggctggtgctgaactacaagccacccagcaatgcccaggacctgcccaggaaccagaaggagcacaggaacctgcccttcatgagggagctgcgctacctgtttgccctgctggtgggcaccaagaggaaatatgtggaccccagcagagctgtggagatcctgaaggatgccttcaagagcaatgacagccagcagcaggatgtgtctgagttcacccacaagctgctggactggctggaggatgccttccagatgaaggccgaggaggagacagatgaggagaagcccaagaaccccatggtggagctgttctacggccgcttcctggccgtgggcgtgctggagggcaagaagtttgaaaatacagagatgtttggccagtaccccctgcaggtgaatggcttcaaggacctgcatgaatgtctggaggccgccatgattgaaggagaaattgagagcctgcacagcgagaacagcggcaagagcggccaggagcactggttcacagagctgccccctgtgctgacctttgagctgagcagatttgagttcaaccaggccctgggccggcctgagaagatccacaacaagctggagttcccccaggtgctgtacctggaccgctacatgcacaggaaccgggagatcacccgcatcaagcgggaggagatcaagaggctgaaggactacctgactgtgctgcagcagaggctggagcgctacctgtcctatggcagcggccccaagcgcttccccctggtggatgtgctgcagtatgccctggagtttgccagcagcaagcctgtgtgcaccagccctgtggatgacattgatgccagcagccccccatctggcagcatccccagccagaccctgcccagcaccacagagcagcagggcgccctgagcagcgagctgcccagcaccagccccagctctgtggccgccatcagcagccgcagcgtcatccacaagcccttcacccagagccgcatccccccagacctgcccatgcacccagcccccaggcacatcacagaggaggagctgtctgtgctggagagctgcctgcaccgctggaggacagaaattgaaaatgacacccgggacctgcaggagagcatcagccgcatccacaggaccatcgagctgatgtacagcgacaagtccatgatccaggtgccctaccgcctgcatgctgtgctggtgcatgagggccaggccaatgccggccactactgggcctacatctttgaccaccgggagagccgctggatgaagtacaatgacattgctgtgaccaagagctcctgggaggagctggtgcgggacagctttggaggctacagaaatgccagcgcctactgcctgatgtacatcaatgacaaggcccagttcctgatccaggaggagttcaacaaggagaccggccagcccctggtgggcatcgagaccctgcccccagacctgcgggactttgtggaggaggacaaccagagatttgagaaggagctggaggagtgggatgcccagctggcccagaaggccctgcaggagaagctgctggccagccagaagctgcgggagagcgagacctctgtgaccacagcccaggccgccggggaccctgagtacctggagcagcccagcagaagtgacttcagcaagcacctgaaggaggagaccatccagatcatcaccaaggccagccatgaacatgaggacaagagccctgagaccgtgctgcagagcgccatcaagctggagtatgcccggctggtgaagctggcccaggaggacaccccacctgagacagactaccgcctgcaccacgtggtggtgtacttcatccagaaccaggcccccaagaagatcatcgagaagaccctgctggagcagtttggagacaggaacctgagctttgatgagcgctgccacaacatcatgaaggtggcccaggccaagctggagatgatcaagccagaggaggtgaacctggaggagtatgaggagtggcaccaggactacaggaagttccgggagaccaccatgtacctgatcatcggcctggagaacttccagcgggagagctacatcgacagcctgctcttcctgatctgtgcctaccagaacaacaaggagctgctgagcaagggcctgtaccggggccatgatgaggagctgatcagccactaccgccgggagtgcctgctgaagctgaatgagcaggccgctgagctgtttgaaagtggagaagatcgggaggtgaacaacggcctcatcatcatgaatgagttcatcgtgcccttcctgcccctgctgctggtggatgagatggaggagaaggacatcctggccgtggaggacatgaggaaccgctggtgcagctacctgggccaggagatggagccccacctgcaggagaagctgacagacttcctgcccaagctgctggactgcagcatggagatcaagagcttccacgagccccccaagctgcccagctacagcacccatgagctgtgtgaaagatttgcccgcatcatgctgagcctgagcaggaccccagcagatggaagatag

SEQ ID NO: 176029 - DNA, 3168 bp, Artificial Sequence
  derived and/or modified sequence
atgaccgtggagcagaacgtgctgcagcagagcgccgcccagaagcaccaacagaccttcctgaaccagttacgcgaaatcactggaattaatgacacacaaatactccaacaagctctcaaagactccaatggcaatttggaattggccgtggccttcctaacagcgaaaaatgctaaaactccccaacaggaggaaacaacgtattaccagaccgctttgcctgggaatgaccggtacattagcgtgggttcccaggccgatacaaatgtcattgatttgaccggagacgataaagatgacctgcaacgagcaattgctctgtccctagcggagtcgaacagagcctttagagagacaggaattaccgatgaggaacaggcaatttccagagtccttgaagcaagcatcgccgaaaataaagcttgcctgaagaggactcctacggaagtgtggagggattcccggaatccttatgatcgcaagcggcaggacaaggcgccagtaggactgaagaacgtggggaacacttgctggttctccgccgtcatacaaagcttgttcaacttgctcgagtttcggagactcgtgctcaattataaaccgccaagcaatgcgcaggacctcccccgaaatcaaaaggagcaccgtaaccttcccttcatgcgggagctccgatatctcttcgctctgttggtgggcacaaaacgtaagtatgtcgatccatcccgtgcagtggagattttgaaggatgcattcaagtccaatgatagccagcaacaggatgtaagcgaatttacacataaacttctggactggttagaagacgcctttcagatgaaggctgaggaggagacggacgaagagaagcctaaaaacccgatggttgaactgttctacggccggtttctggccgtgggcgtgctggaagggaagaaatttgaaaatacagaaatgttcggtcagtatccactgcaggtcaacgggttcaaggatctccacgagtgtctggaggcggctatgatcgagggagaaatagaatctctgcactccgaaaacagtgggaagtccggccaggagcattggttcacagagctgcctccggtgttgaccttcgagttgtcccgatttgaatttaatcaggccttggggcgacctgagaagatccataacaagcttgagttcccccaggtgctgtatttggatcggtacatgcataggaatcgcgagatcacccggataaaaagagaggagattaagcgtctgaaagactacctgaccgtgctgcaacaaagactggaaagatatctaagctatgggtctggacctaaaagatttcctttggtggatgtcctgcaatacgcactggagttcgcttcgtctaaacccgtgtgtacatcacccgtcgatgacatcgacgcaagttcccccccatccggatctattccctctcagacactgccctccactactgagcagcaaggcgcactctcttcagagctgcccagcacatcacccagcagtgtggccgctatctctagcaggtcagtaattcataaaccattcactcagagtagaatcccgcccgatttacctatgcaccctgctcctagacacatcaccgaagaggagttgtcagtcctggaaagttgcctccaccggtggcgtacagagattgaaaatgacacacgagacctccaggagtccatcagtagaattcatcggacaattgagctgatgtattctgataagagcatgatccaagtcccgtacagacttcacgccgtgctggtccacgaaggccaagcgaatgccgggcactactgggcgtatattttcgatcaccgggaatcacgatggatgaaatataatgacatcgccgtaactaaaagttcatgggaagaactcgtgagggattccttcggtggctacaggaatgcgtctgcctattgtttaatgtacatcaatgacaaggcccagtttctgattcaggaggagtttaacaaggagactggacagccactggttgggatcgaaaccctcccccctgatctgagggacttcgtggaggaggataatcagaggttcgagaaggagctcgaagagtgggacgctcagctggctcagaaagccctccaggagaagctgctagcaagtcagaagctgagggagagtgagacctccgttaccaccgcgcaggcagcgggggatcctgaatatctggagcagccttctagaagtgacttctcaaaacatcttaaagaggagaccatccaaataattactaaggcttcccacgagcacgaggacaagagtccagagacggtcctgcagagcgcaataaagctggagtacgcccgtctggtgaagctggcccaggaggacaccccccccgaaaccgactatagattgcaccatgtcgtggtgtactttatccaaaatcaagctcccaagaagataatcgagaaaacactacttgagcagttcggggatagaaacttgtcattcgatgagcgttgtcataacattatgaaggtcgcccaggccaaactggaaatgattaagcccgaggaggtgaatttggaagagtacgaagaatggcaccaggattacagaaagttccgggaaacaacgatgtacctcatcattggccttgagaatttccagagagagtcgtatatcgactcactactgttcctaatctgcgcctatcagaataacaaggaacttctgtctaaaggcttgtatcgggggcacgacgaagaactgatatcgcactaccgccgcgaatgcctgttaaagctgaatgagcaggctgctgagctcttcgagtctggggaggacagggaggttaataacggcctgatcattatgaatgaatttattgtgccgttcctgcccctgctgctcgtggatgagatggaggaaaaggacatcctggccgtggaggacatgcgcaaccgttggtgcagttacctgggccaagagatggagccccacctccaagagaaactcaccgattttttgccgaaacttttagattgtagcatggagatcaagtcgttccatgaaccaccaaaattaccttcttacagcactcacgaactgtgcgaacggtttgcacgaattatgctgtccctgtcgcggacaccagcagatggaagatag

SEQ ID NO: 176030 - DNA, 3168 bp, Artificial Sequence
  derived and/or modified sequence
atgacagtagagcagaatgtgctgcagcaaagtgccgctcaaaaacatcagcagaccttcttaaatcagctgcgcgagattaccggtatcaatgatactcagatcttgcagcaggccctgaaggattccaacgggaatcttgaactggccgtggcttttctcactgccaaaaatgcgaagactccacaacaggaagagacaacatactaccagactgccctgccgggtaatgatcgatatatttctgttggaagccaggcggatactaacgtgatagatctaacaggcgacgataaggatgatctccagagagccatagccctgagcttggctgagtccaatagagcctttcgtgaaacaggcatcaccgacgaggagcaggcaatctccagggttctcgaggcctccattgctgaaaacaaggcgtgcctcaagcgcactcccaccgaggtctggcgggactcccgaaacccttacgaccgcaagcgccaagacaaggcccctgtaggacttaagaacgttggcaacacgtgttggttttcagccgtgattcagtccctgttcaacctgctggagttccgcaggctggtactgaattacaaacccccatctaacgcgcaggacctgccacgaaatcagaaagagcatcgtaacttaccttttatgagagagctcaggtatctattcgcactcctagtgggcaccaagcggaaatatgttgacccctctcgggcagtggaaattctcaaagacgcttttaaatcaaacgactcccagcagcaagatgttagcgagtttactcataaactgctcgactggctcgaagatgcctttcagatgaaagcagaggaagaaacggatgaggagaagccaaagaatcctatggtggagttattctacggacgcttcttggccgtgggagtgcttgaagggaagaaattcgaaaataccgagatgttcggccagtaccctttacaagtgaacggtttcaaagaccttcatgaatgtctggaggcggctatgatagagggagagatcgagtccttgcatagtgaaaatagcggcaagtccggtcaagaacactggtttaccgaattgccgcctgtattgactttcgagcttagccgcttcgaattcaaccaggcactgggtcggcctgagaaaattcataataagctcgaatttcctcaggtcctgtacctggatagatacatgcatcgtaatagagagatcacccgcatcaaacgcgaagagatcaagaggctaaaagattatctgactgtgctccagcagcgactcgaaaggtatctatcttatgggtcggggccaaagaggtttccgctggtcgacgtgctgcagtatgccctcgagtttgcaagcagcaagcccgtctgcacaagtccagtagacgacatcgatgcttctagcccgccatccggtagcatcccatcacagaccctcccctctaccacagagcagcagggtgctctcagttcggagctgcccagcaccagcccctcgagtgttgccgctatcagtagcagatccgtcatccataaacccttcacccaatcccggatacccccagatttaccaatgcatccggctccacgccacatcacagaggaggagctgtcggtgttagagagttgcctccacaggtggaggacagagatcgaaaacgacaccagagatctgcaggagtccatttcccgcatacacaggacgatagagctcatgtatagtgataagagtatgatccaagtgccctatcggcttcatgccgtccttgtgcacgagggacaggccaacgctggccactattgggcttacatttttgaccatcgggagtctcgctggatgaagtacaacgacattgcagtgactaagagttcttgggaagaactcgttcgagatagcttcggaggataccgtaatgcctccgcttactgcctgatgtacattaacgacaaggctcagtttctgatccaggaagaatttaacaaagagaccggtcagccgctggtcgggattgagacccttccacctgacctgcgcgacttcgtcgaagaggataaccagaggtttgagaaggagttggaggagtgggatgcgcagctggcccagaaagctcttcaggaaaagctgttagcttctcagaagcttagagaatccgagacatcagttactactgctcaggctgccggtgatccagagtacctggagcaaccctcccgatcagacttttcgaaacacttgaaggaggagaccattcagattatcacaaaggcctcacatgaacacgaggacaagtccccagaaaccgtgctgcagagcgccattaaattggaatatgcaaggctcgttaaactcgcccaggaggatactccccctgagacagactatcggctacatcacgtggtggtatacttcattcagaatcaagccccaaaaaagatcatcgagaagaccttactggagcagttcggcgaccggaatctaagttttgacgagcggtgtcacaacataatgaaggtcgcccaagctaagctggagatgatcaagccagaagaggtgaacctggaagagtatgaggagtggcaccaggattatagaaagtttcgggagacaactatgtatctgattattgggttagagaacttccagcgggaaagttacatagacagcctactgtttctaatttgtgcttaccagaataataaggagttgctgtccaaggggctctataggggacacgacgaggagttaatctcacactaccgccgtgaatgcctactgaaactgaacgagcaagccgctgagctttttgagtccggggaagacagggaggtcaacaacgggctgattattatgaatgagtttatcgtgcctttccttcccctactgctggtagatgaaatggaggaaaaagatatccttgccgtcgaagatatgcgtaatagatggtgtagttatttgggtcaggaaatggagccccacttacaagaaaaactgaccgatttcctcccaaaattgctggattgttccatggagatcaaatcgttccacgagcctcccaagttgccgagttacagcacacacgaactctgcgaaaggttcgcccgtattatgctctccctctctcggacacccgctgatgggcgatag

SEQ ID NO: 176031 - DNA, 3973 bp, Artificial Sequence
  derived and/or modified sequence
aagcagcccgcggaccggcagcaaaggaacgtgcgaacgcgtgacgccgcccgactggctcgcgctctcccgtgccccggcgtcctccgcccgctcatggcccgggccgccgcggacgagcggcgctgaggcgggccgcgtggagacgtgaggcggccgccgtggccctcacagtcggcgtttcgccgcctgcccgcggtgcccgcgcacgccggccgccatcgccttcgcgcctggctggcgggggcgctgtcctcccaggccgtccgcgccgctccctggagctcggcggagcgcggcagccagggccggcggaggcgcgaggagccgggcgccaccgccgccgccgccgccgccgccgcgggggccatgaccgtggagcagaacgtgctgcagcagagcgcggcgcagaagcaccagcagacgtttttgaatcaactgagagaaattacggggattaatgacacccagatactacagcaagccttgaaggatagtaatggaaacttggaattagcagtggctttccttactgcgaagaatgctaagacccctcagcaggaggagacaacttactaccaaacagcacttcctggcaatgatagatacatcagtgtgggaagccaagcagatacaaatgtgattgatctcactggagatgataaagatgatcttcagagagcaattgccttgagtttggccgaatcaaacagggcattcagggagactggaataactgatgaggaacaagccattagcagagttcttgaagccagcatagcagagaataaagcatgtttgaagaggacacctacagaagtttggagggattctcgaaacccttatgatagaaaaagacaggacaaagctcccgttgggctaaagaatgttggcaatacttgttggtttagtgctgttattcagtcattatttaatcttttggaatttagaagattagttctgaattacaagcctccatcaaatgctcaagatttaccccgaaaccaaaaggaacatcggaatttgccttttatgcgtgagctgaggtatctatttgcacttcttgttggtaccaaaaggaagtatgttgatccatcaagagcagttgaaattcttaaggatgctttcaaatcaaatgactcacagcagcaagatgtgagtgagtttacacacaaattattagattggttagaagatgccttccaaatgaaagctgaagaggagacggatgaagagaagccaaagaaccccatggtagagttgttctatggcagattcctggctgtgggagtacttgaaggtaaaaaatttgaaaacactgaaatgtttggtcagtacccacttcaggtcaatgggttcaaagatctgcatgagtgcctagaagctgcaatgattgaaggagaaattgagtctttacattcagagaattcaggaaaatcaggccaagagcattggtttactgaattaccacctgtgttaacatttgaattgtcaagatttgaatttaatcaggcattgggaagaccagaaaaaattcacaacaaattagaatttccccaagttttatatttggacagatacatgcacagaaacagagaaataacaagaattaagagggaagagatcaagagactgaaagattacctcacggtattacaacaaaggctagaaagatatttaagctatggttccggtcccaaacgattccccttggtagatgttcttcagtatgcattggaatttgcctcaagtaaacctgtttgcacttctcctgttgacgatattgacgctagttccccacctagtggttccataccatcacagacattaccaagcacaacagaacaacagggagccctatcttcagaactgccaagcacatcaccttcatcagttgctgccatttcatcgagatcagtaatacacaaaccatttactcagtcccggatacctccagatttgcccatgcatccggcaccaaggcacataacggaggaagaactttctgtgctggaaagttgtttacatcgctggaggacagaaatagaaaatgacaccagagatttgcaggaaagcatatccagaatccatcgaacaattgaattaatgtactctgacaaatctatgatacaagttccttatcgattacatgccgttttagttcacgaaggccaagctaatgctgggcactactgggcatatatttttgatcatcgtgaaagcagatggatgaagtacaatgatattgctgtgacaaaatcatcatgggaagagctagtgagggactcttttggtggttatagaaatgccagtgcatactgtttaatgtacataaatgataaggcacagttcctaatacaagaggagtttaataaagaaactgggcagccccttgttggtatagaaacattaccaccggatttgagagattttgttgaggaagacaaccaacgatttgaaaaagaactagaagaatgggatgcacaacttgcccagaaagctttgcaggaaaagcttttagcgtctcagaaattgagagagtcagagacttctgtgacaacagcacaagcagcaggagacccagaatatctagagcagccatcaagaagtgatttctcaaagcacttgaaagaagaaactattcaaataattaccaaggcatcacatgagcatgaagataaaagtcctgaaacagttttgcagtcggcaattaagttggaatatgcaaggttggttaagttggcccaagaagacaccccaccagaaaccgattatcgtttacatcatgtagtggtctactttatccagaaccaggcaccaaagaaaattattgagaaaacattactagaacaatttggagatagaaatttgagttttgatgaaaggtgtcacaacataatgaaagttgctcaagccaaactggaaatgataaaacctgaagaagtaaacttggaggaatatgaggagtggcatcaggattataggaaattcagggaaacaactatgtatctcataattgggctagaaaattttcaaagagaaagttatatagattccttgctgttcctcatctgtgcttatcagaataacaaagaactcttgtctaaaggcttatacagaggacatgatgaagaattgatatcacattatagaagagaatgtttgctaaaattaaatgagcaagccgcagaactcttcgaatctggagaggatcgagaagtaaacaatggtttgattatcatgaatgagtttattgtcccatttttgccattattactggtggatgaaatggaagaaaaggatatactagctgtagaagatatgagaaatcgatggtgttcctaccttggtcaagaaatggaaccacacctccaagaaaagctgacagattttttgccaaaactgcttgattgttctatggagattaaaagtttccatgagccaccgaagttaccttcatattccacgcatgaactctgtgagcgatttgcccgaatcatgttgtccctcagtcgaactcctgctgatggaagataaactgcacactttccctgaacacactgtataaactctttttagttcttaacccttgccttcctgtcacagggtttgcttgttgctgctatagtttttaacttttttttattttaataactgcaaaagacaaaatgactatacagactttagtcagactgcagacaataaagctgaaaatcgcatggcgctcagacattttaaccggaactgatgtataatcacaaatctaattgattttattatggcaaaactatgcttttgccaccttcctgttgcagtattactttgcttttatcttttctttctcaacagctttccattcagtctggatccttccatgactacagccatttaagtgttcagcactgtgtacgatacataatatttggtagcttgtaaatgaaataaagaataaagttttatttatggctaccta

SEQ ID NO: 176032 - DNA, 3168 bp, Artificial Sequence
  derived and/or modified sequence
atgaccgtggagcagaacgtgctgcagcagagcgccgcccagaagcaccagcagaccttcctgaaccagctgagagagatcaccggcatcaacgacacccagatcctgcagcaggccctgaaggacagcaacggcaacctggagctggccgtggccttcctgaccgccaagaacgccaagaccccccagcaggaggagaccacctactaccagaccgccctgcccggcaacgacagatacatcagcgtgggcagccaggccgacaccaacgtgatcgacctgaccggcgacgacaaggacgacctgcagagagccatcgccctgagcctggccgagagcaacagagccttcagagagaccggcatcaccgacgaggagcaggccatcagcagagtgctggaggccagcatcgccgagaacaaggcctgcctgaagagaacccccaccgaggtgtggagagacagcagaaacccctacgacagaaagagacaggacaaggcccccgtgggcctgaagaacgtgggcaacacctgctggttcagcgccgtgatccagagcctgttcaacctgctggagttcagaagactggtgctgaactacaagccccccagcaacgcccaggacctgcccagaaaccagaaggagcacagaaacctgcccttcatgagagagctgagatacctgttcgccctgctggtgggcaccaagagaaagtacgtggaccccagcagagccgtggagatcctgaaggacgccttcaagagcaacgacagccagcagcaggacgtgagcgagttcacccacaagctgctggactggctggaggacgccttccagatgaaggccgaggaggagaccgacgaggagaagcccaagaaccccatggtggagctgttctacggcagattcctggccgtgggcgtgctggagggcaagaagttcgagaacaccgagatgttcggccagtaccccctgcaggtgaacggcttcaaggacctgcacgagtgcctggaggccgccatgatcgagggcgagatcgagagcctgcacagcgagaacagcggcaagagcggccaggagcactggttcaccgagctgccccccgtgctgaccttcgagctgagcagattcgagttcaaccaggccctgggcagacccgagaagatccacaacaagctggagttcccccaggtgctgtacctggacagatacatgcacagaaacagagagatcaccagaatcaagagagaggagatcaagagactgaaggactacctgaccgtgctgcagcagagactggagagatacctgagctacggcagcggccccaagagattccccctggtggacgtgctgcagtacgccctggagttcgccagcagcaagcccgtgtgcaccagccccgtggacgacatcgacgccagcagcccccccagcggcagcatccccagccagaccctgcccagcaccaccgagcagcagggcgccctgagcagcgagctgcccagcaccagccccagcagcgtggccgccatcagcagcagaagcgtgatccacaagcccttcacccagagcagaatcccccccgacctgcccatgcaccccgcccccagacacatcaccgaggaggagctgagcgtgctggagagctgcctgcacagatggagaaccgagatcgagaacgacaccagagacctgcaggagagcatcagcagaatccacagaaccatcgagctgatgtacagcgacaagagcatgatccaggtgccctacagactgcacgccgtgctggtgcacgagggccaggccaacgccggccactactgggcctacatcttcgaccacagagagagcagatggatgaagtacaacgacatcgccgtgaccaagagcagctgggaggagctggtgagagacagcttcggcggctacagaaacgccagcgcctactgcctgatgtacatcaacgacaaggcccagttcctgatccaggaggagttcaacaaggagaccggccagcccctggtgggcatcgagaccctgccccccgacctgagagacttcgtggaggaggacaaccagagattcgagaaggagctggaggagtgggacgcccagctggcccagaaggccctgcaggagaagctgctggccagccagaagctgagagagagcgagaccagcgtgaccaccgcccaggccgccggcgaccccgagtacctggagcagcccagcagaagcgacttcagcaagcacctgaaggaggagaccatccagatcatcaccaaggccagccacgagcacgaggacaagagccccgagaccgtgctgcagagcgccatcaagctggagtacgccagactggtgaagctggcccaggaggacaccccccccgagaccgactacagactgcaccacgtggtggtgtacttcatccagaaccaggcccccaagaagatcatcgagaagaccctgctggagcagttcggcgacagaaacctgagcttcgacgagagatgccacaacatcatgaaggtggcccaggccaagctggagatgatcaagcccgaggaggtgaacctggaggagtacgaggagtggcaccaggactacagaaagttcagagagaccaccatgtacctgatcatcggcctggagaacttccagagagagagctacatcgacagcctgctgttcctgatctgcgcctaccagaacaacaaggagctgctgagcaagggcctgtacagaggccacgacgaggagctgatcagccactacagaagagagtgcctgctgaagctgaacgagcaggccgccgagctgttcgagagcggcgaggacagagaggtgaacaacggcctgatcatcatgaacgagttcatcgtgcccttcctgcccctgctgctggtggacgagatggaggagaaggacatcctggccgtggaggacatgagaaacagatggtgcagctacctgggccaggagatggagccccacctgcaggagaagctgaccgacttcctgcccaagctgctggactgcagcatggagatcaagagcttccacgagccccccaagctgcccagctacagcacccacgagctgtgcgagagattcgccagaatcatgctgagcctgagcagaacccccgccgacggcagatag

SEQ ID NO: 176033 - protein, 352 aa, Artificial Sequence
  derived and/or modified sequence
MSVQNSGWPHQEDSPKPQDPGPPANSDSDSGHLPGEDPEDTHAQGPAVLSLGSLCLDTNQAPNWTGLQTLLQQLPPQDIDERYCLALGEEERAELQLFCARRKQEALGQGVARLVLPKLEGHTCEKCRELLKPGEYGVFAARAGEQRCWHQPCFACQACGQALINLIYFYHDGQLYCGRHHAELLRPRCPACDQLIFSWRCTEAEGQRWHENHFCCQDCAGPLGGGRYALPGGSPCCPSCFENRYSDAGSSWAGALEGQAFLGAPPPHPPDPSLGARSSHRASLAGAFQGPPEPTPRRGRGCGARLPPRRGRRTPSGGGGGPWRGLSAAAAARTAQGLGGAGGWASPPLAAV

SEQ ID NO: 176034 - protein, 312 aa, Artificial Sequence
  derived and/or modified sequence
MSPQGPAVLSLGSLCLDTNQAPNWTGLQTLLQQLPPQDIDERYCLALGEEERAELQLFCARRKQEALGQGVARLVLPKLEGHTCEKCRELLKPGEYGVFAARAGEQRCWHQPCFACQACGQALINLIYFYHDGQLYCGRHHAELLRPRCPACDQLIFSWRCTEAEGQRWHENHFCCQDCAGPLGGGRYALPGGSPCCPSCFENRYSDAGSSWAGALEGQAFLGAPPPHPPDPSLGARSSHRASLAGAFQGPPEPTPRRGRGCGARLPPRRGRRTPSGGGGGPWRGLSAAAAARTAQGLGGAGGWASPPLAAV

SEQ ID NO: 176035 - protein, 344 aa, Artificial Sequence
  derived and/or modified sequence
MSPQGPAVLSLGSLCLDTNQAPNWTGLQTLLQQLPPQDIDERYCLALGEEERAELQLFCARRKQEALGQGVARLVLPKLEGHTCEKCRELLKPGEYGVFAARAGEQRCWHQPCFACQACGQALINLIYFYHDGQLYCGRHHAELLRPRCPACDQLIFSWRCTEAEGQRWHENHFCCQDCAGPLGGGRYALPGGSPCCPSCFENRYSDAGSSWAGALEGQAFLGETGLDRTEGRDQTSVNSATLSRTLLAAAGGSSLQTQRGLPGSSPQQENRPGDKAEAPKGQEQCRLETIRDPKDTPFSTCSSSSDSEPEGFFLGERLPQSWKTPGSLQAEDSNASKTHCTMC

SEQ ID NO: 176036 - protein, 384 aa, Artificial Sequence
  derived and/or modified sequence
MSVQNSGWPHQEDSPKPQDPGPPANSDSDSGHLPGEDPEDTHAQGPAVLSLGSLCLDTNQAPNWTGLQTLLQQLPPQDIDERYCLALGEEERAELQLFCARRKQEALGQGVARLVLPKLEGHTCEKCRELLKPGEYGVFAARAGEQRCWHQPCFACQACGQALINLIYFYHDGQLYCGRHHAELLRPRCPACDQLIFSWRCTEAEGQRWHENHFCCQDCAGPLGGGRYALPGGSPCCPSCFENRYSDAGSSWAGALEGQAFLGETGLDRTEGRDQTSVNSATLSRTLLAAAGGSSLQTQRGLPGSSPQQENRPGDKAEAPKGQEQCRLETIRDPKDTPFSTCSSSSDSEPEGFFLGERLPQSWKTPGSLQAEDSNASKTHCTMC

SEQ ID NO: 176037 - protein, 70 aa, Artificial Sequence
  derived and/or modified sequence
MSVQNSGWPHQEDSPKPQDPGPPANSDSDSGHLPGEDPEDTHAQEFLSLHLLRTWGFDFKLIHMSIHYLS

SEQ ID NO: 176038 - DNA, 1059 bp, Artificial Sequence
  derived and/or modified sequence
atgagcgtacaaaattccggttggccacaccaagaggacagccccaagccccaggaccccggccccccagcgaacagcgacagtgattccggacaccttccaggcgaagatccggaggacactcacgcccaaggcccagccgtgctaagtttgggatccttatgtttagataccaatcaggccccgaattggaccggactccagactctgcttcagcagctcccacctcaagacattgatgagagatattgtctcgctctgggagaggaagaacgggccgaattacagctcttttgcgccaggagaaaacaggaggctctggggcagggcgtcgccaggctcgtgttgccaaagctggaaggccacacgtgcgagaagtgtcgcgaactcctcaaaccgggcgaatacggagtgtttgccgctcgagctggtgagcagcgttgttggcatcagccctgtttcgcttgccaggcgtgcggtcaggccttgatcaacctcatctatttctaccatgatgggcagctctactgtggacgccaccacgcagagctgctgagaccacgctgccctgcctgtgaccagctcatcttctcctggcgttgcaccgaagcggagggacaacgctggcacgaaaaccacttttgctgtcaggactgtgcaggccccctggggggtggacgctatgccctgcccggaggcagcccctgctgcccaagttgctttgaaaatcggtactctgacgcagggtcctcatgggccggggctttggaagggcaggcgtttctgggggcgccacctccccacccacccgacccctcactgggagcacgttcttcacatcgggcatctttggcaggcgcatttcaggggcctccagagcccacacctagacggggaaggggctgcggggcacgcttgcctccacggcggggaagaaggacgccctccgggggggggggcggaccttggagagggttatcagccgcagcggccgcccgaacggctcagggactgggtggagcgggtggctgggctagtccgccactggcagccgtgtag

SEQ ID NO: 176039 - DNA, 939 bp, Artificial Sequence
  derived and/or modified sequence
atgtcgccccagggccctgctgtgttgtccctggggtcgttatgccttgacactaatcaggcccctaattggacaggtttacagacactcctccaacagttgcccccccaggacatcgatgagaggtattgtctcgccctaggcgaggaggaaagggccgagcttcagttgttctgtgcccgcagaaaacaagaagccctagggcagggcgtagcacggctggtattaccaaaattagagggccacacatgtgaaaaatgtagggagctcctgaagcctggcgaatacggggtctttgccgctcgggccggggaacaaaggtgttggcaccagccttgcttcgcttgccaggcctgcggtcaagccctgatcaatctaatctacttttatcatgacgggcagctttattgcgggcgccatcacgccgagttgctgaggccgagatgccctgcctgcgaccagctcatcttttcctggagatgcactgaggctgagggtcaaagatggcacgagaaccatttctgttgccaggactgcgcgggccctcttggggggggccggtatgcactgcctggcggctccccctgttgccctagttgctttgagaacagatatagcgatgctggcagctcatgggccggcgccctggaaggccaggcttttctgggagccccaccaccccaccctcctgatccatctctaggtgctaggtcttcacatcgtgctagtctggctggagccttccagggtccgcccgagccgaccccccggcgggggagaggatgtggcgccagactccccccccgtcgggggaggaggacaccatctggcggcggaggcgggccatggcggggcctgtcagcagccgccgcagctagaactgcacaaggtctgggaggagccggcgggtgggccagtccgccactcgctgccgtgtag

SEQ ID NO: 176040 - DNA, 1035 bp, Artificial Sequence
  derived and/or modified sequence
atgagcccacagggtcccgcggttctttctcttgggtccctatgtcttgacaccaaccaagccccaaactggaccggactgcagacactcctgcagcagctccctccacaggacatcgatgagcgctattgtctggccctgggagaagaggaaagagccgagcttcagctgttttgcgctcggcggaagcaagaggcgctcggacagggagttgcacggctggtactgcctaagttggagggccatacctgtgaaaagtgtcgcgagctactcaagccgggagagtatggggttttcgccgctcgcgctggagagcagaggtgctggcaccagccttgcttcgcgtgccaggcgtgtggacaggccctgatcaaccttatttatttctaccacgatgggcagttatactgcggcagacaccatgccgaattattgcggccaagatgtccggcgtgcgaccagctgatattctcctggcgatgtacggaagccgagggccagcggtggcatgagaaccacttttgctgccaagattgtgcaggccctctcggcggtggcagatacgccttgcccggcggatccccctgttgtcccagctgcttcgagaatagatattcagacgcgggctcctcttgggccggagccctggagggccaggcctttttgggtgagacgggactggacaggaccgaaggccgggatcagacctcagtgaacagcgcaacactgtcacgtacgctgctggcagcagccggagggtcaagcttacaaacgcagcgcgggttgcccggtagtagcccccaacaggagaaccggccgggtgacaaggccgaggcccctaaaggacaggagcagtgcaggctcgagactatcagggatccgaaagacactcctttctctacgtgctcttcttctagtgactcggaaccagaggggttcttcctcggggaacggctgcctcagtcgtggaaaaccccaggaagcctccaggctgaagactcaaatgcgagcaagactcactgtacaatgtgctag

SEQ ID NO: 176041 - DNA, 1155 bp, Artificial Sequence
  derived and/or modified sequence
atgtccgtgcagaactcaggctggccgcatcaggaagattcccctaagcctcaggatccaggaccaccagctaatagtgattccgactcaggtcacctgcccggcgaggaccctgaggatacacacgcacagggtccagctgtgctgagcctaggctccctttgtctggacaccaatcaggcccctaactggacaggccttcagaccttgcttcaacagttgccgccgcaggacattgatgaacgctattgccttgcactaggcgaggaggagagagccgaattacagcttttctgtgcccgacggaaacaagaggcattaggtcagggtgtagctcggctggtgttaccgaaactcgaagggcacacctgcgagaagtgccgtgagctgctgaaaccaggagagtacggggtcttcgctgctcgtgcaggtgagcagagatgctggcatcaaccatgcttcgcgtgccaggcgtgcgggcaggcgctgattaatctcatctatttttatcatgacggacagctttactgtggacgccatcatgctgagttgttgagaccacgctgtcctgcatgcgaccagttgatttttagttggcgttgcacagaagctgaaggccagagatggcacgagaatcacttttgctgtcaggactgtgcggggcctctgggaggcggcaggtatgctttacccggcggtagcccctgctgcccaagttgtttcgaaaatagatactcggatgcggggtcttcatgggcaggggccttagagggacaggcattcctgggagagacaggcctcgataggacagaggggagagatcagactagcgtgaactctgcaactctgtcacgtacgctcctggcggccgccggaggaagctctctgcaaacacagcgcggcctccccggtagctcccctcagcaagagaacaggccaggcgacaaggcagaggcacccaaagggcaagaacagtgcagattggagaccataagggaccctaaggacacaccattttctacatgcagtagctcctctgattcagagcccgagggtttcttccttggcgagcggcttccacagtcctggaagactcctggaagcctccaggcagaagacagtaatgccagtaaaacacactgcaccatgtgctag

SEQ ID NO: 176042 - DNA, 213 bp, Artificial Sequence
  derived and/or modified sequence
atgtccgtacagaactcgggatggccacaccaagaagactccccaaaacctcaggatcccggtccacccgctaatagtgattccgacagcggccaccttccaggcgaggatcctgaagatacccacgctcaggaattcctttctctgcacctgctccggacatgggggtttgatttcaagctgattcatatgtctattcactacctgtcctag

SEQ ID NO: 176043 - DNA, 1059 bp, Artificial Sequence
  derived and/or modified sequence
atgtctgtgcagaacagcggctggccccaccaggaggacagccccaagccccaggaccccggccccccagccaacagcgacagcgacagcggccacctgcccggggaggaccctgaggacacccacgcccagggccctgctgtgctgagcctgggcagcctgtgcctggacaccaaccaggcccccaactggacaggcctgcagaccctgctgcagcagctgcccccccaggacattgatgagcgctactgcctggccctgggggaggaggagagagctgagctgcagctgttctgtgcccggaggaagcaggaggccctgggccagggcgtggcccggctggtgctgcccaagctggagggccacacctgtgagaagtgccgggagctgctgaagccaggagaatatggagtgtttgctgcccgggccggggagcagcgctgctggcaccagccctgctttgcctgccaggcctgtggccaggccctgatcaacctgatctacttctaccatgatggccagctgtactgcggccgccaccacgccgagctgctgcggccccgctgcccagcctgtgaccagctgatcttctcctggcgctgcacagaggccgagggccagcgctggcatgagaaccacttctgctgccaggactgtgccggccccctgggcggcggccgctatgccctgcccggcggcagcccctgctgccccagctgctttgagaaccgctacagtgatgctggcagctcctgggccggggccctggagggccaggccttcctgggcgcccccccaccccaccccccagaccccagcctgggcgcccggagcagccaccgggccagcctggccggggccttccagggccccccagagcccaccccaagaagaggccggggctgtggggcccggctgcccccaagaagaggccgccgcacccccagcggcggcggcggcggcccctggaggggcctgtctgctgctgctgctgccaggacagcccagggcctgggcggggccggcggctgggccagcccccccctggccgctgtgtag

SEQ ID NO: 176044 - DNA, 939 bp, Artificial Sequence
  derived and/or modified sequence
atgagcccccagggccctgctgtgctgagcctgggcagcctgtgcctggacaccaaccaggcccccaactggacaggcctgcagaccctgctgcagcagctgcccccccaggacattgatgagcgctactgcctggccctgggggaggaggagagagctgagctgcagctgttctgtgcccggaggaagcaggaggccctgggccagggcgtggcccggctggtgctgcccaagctggagggccacacctgtgagaagtgccgggagctgctgaagccaggagaatatggagtgtttgctgcccgggccggggagcagcgctgctggcaccagccctgctttgcctgccaggcctgtggccaggccctgatcaacctgatctacttctaccatgatggccagctgtactgcggccgccaccacgccgagctgctgcggccccgctgcccagcctgtgaccagctgatcttctcctggcgctgcacagaggccgagggccagcgctggcatgagaaccacttctgctgccaggactgtgccggccccctgggcggcggccgctatgccctgcccggcggcagcccctgctgccccagctgctttgagaaccgctacagtgatgctggcagctcctgggccggggccctggagggccaggccttcctgggcgcccccccaccccaccccccagaccccagcctgggcgcccggagcagccaccgggccagcctggccggggccttccagggccccccagagcccaccccaagaagaggccggggctgtggggcccggctgcccccaagaagaggccgccgcacccccagcggcggcggcggcggcccctggaggggcctgtctgctgctgctgctgccaggacagcccagggcctgggcggggccggcggctgggccagcccccccctggccgctgtgtag

SEQ ID NO: 176045 - DNA, 1035 bp, Artificial Sequence
  derived and/or modified sequence
atgagcccccagggccctgctgtgctgagcctgggcagcctgtgcctggacaccaaccaggcccccaactggacaggcctgcagaccctgctgcagcagctgcccccccaggacattgatgagcgctactgcctggccctgggggaggaggagagagctgagctgcagctgttctgtgcccggaggaagcaggaggccctgggccagggcgtggcccggctggtgctgcccaagctggagggccacacctgtgagaagtgccgggagctgctgaagccaggagaatatggagtgtttgctgcccgggccggggagcagcgctgctggcaccagccctgctttgcctgccaggcctgtggccaggccctgatcaacctgatctacttctaccatgatggccagctgtactgcggccgccaccacgccgagctgctgcggccccgctgcccagcctgtgaccagctgatcttctcctggcgctgcacagaggccgagggccagcgctggcatgagaaccacttctgctgccaggactgtgccggccccctgggcggcggccgctatgccctgcccggcggcagcccctgctgccccagctgctttgagaaccgctacagtgatgctggcagctcctgggccggggccctggagggccaggccttcctgggggagaccggcctggacagaacagagggccgggaccagacctctgtgaacagcgccaccctgagcaggaccctgctggccgctgctgggggcagcagcctgcagacccagaggggcctgcccggcagcagcccccagcaggagaacagacctggggacaaggccgaggcccccaagggccaggagcagtgccgcctggagaccatccgggaccccaaggacacccccttcagcacctgcagcagcagcagtgacagcgagcctgagggcttcttcctgggggagcggctgccccagagctggaagaccccaggcagcctgcaggccgaggacagcaatgccagcaagacccactgcaccatgtgctag

SEQ ID NO: 176046 - DNA, 1155 bp, Artificial Sequence
  derived and/or modified sequence
atgtctgtgcagaacagcggctggccccaccaggaggacagccccaagccccaggaccccggccccccagccaacagcgacagcgacagcggccacctgcccggggaggaccctgaggacacccacgcccagggccctgctgtgctgagcctgggcagcctgtgcctggacaccaaccaggcccccaactggacaggcctgcagaccctgctgcagcagctgcccccccaggacattgatgagcgctactgcctggccctgggggaggaggagagagctgagctgcagctgttctgtgcccggaggaagcaggaggccctgggccagggcgtggcccggctggtgctgcccaagctggagggccacacctgtgagaagtgccgggagctgctgaagccaggagaatatggagtgtttgctgcccgggccggggagcagcgctgctggcaccagccctgctttgcctgccaggcctgtggccaggccctgatcaacctgatctacttctaccatgatggccagctgtactgcggccgccaccacgccgagctgctgcggccccgctgcccagcctgtgaccagctgatcttctcctggcgctgcacagaggccgagggccagcgctggcatgagaaccacttctgctgccaggactgtgccggccccctgggcggcggccgctatgccctgcccggcggcagcccctgctgccccagctgctttgagaaccgctacagtgatgctggcagctcctgggccggggccctggagggccaggccttcctgggggagaccggcctggacagaacagagggccgggaccagacctctgtgaacagcgccaccctgagcaggaccctgctggccgctgctgggggcagcagcctgcagacccagaggggcctgcccggcagcagcccccagcaggagaacagacctggggacaaggccgaggcccccaagggccaggagcagtgccgcctggagaccatccgggaccccaaggacacccccttcagcacctgcagcagcagcagtgacagcgagcctgagggcttcttcctgggggagcggctgccccagagctggaagaccccaggcagcctgcaggccgaggacagcaatgccagcaagacccactgcaccatgtgctag

SEQ ID NO: 176047 - DNA, 213 bp, Artificial Sequence
  derived and/or modified sequence
atgtctgtgcagaacagcggctggccccaccaggaggacagccccaagccccaggaccccggccccccagccaacagcgacagcgacagcggccacctgcccggggaggaccctgaggacacccacgcccaggagttcctgagcctgcacctgctgcggacctggggctttgacttcaagctgatccacatgagcatccactacctgtcctag

SEQ ID NO: 176048 - DNA, 1648 bp, Artificial Sequence
  derived and/or modified sequence
agaaaaactctggggatctatcgagagggcagttggcgggactgggcactccccttccttctccctcccactgtccccagaaatcttcccatccctccacctccccaagccctaagtcctctcgggctctgcccttcagggcagcgggtgttggggatgtccagctcctgagccctcttgcacggaggctctgcacggaggcaagacaaggggttcagctctgtcccttatctgaggtgggagggggaagggaattatggaaggaatccagctggcctgttagtaagggtgttccagtgctaggtggaggtggagtttggctgcctttggggagattggaagggtgaggaatagaggcctgatttctgagtgttgtttctgtgttggacaattctatgcaaactagagccaaaatggaagagggtgcaagtcccctcctggggccccagacgccccctcctttcttgctgcctggagcaggggcagtgctgttagtggctactcctggtgtgaacagcccatcctggccaccttccacaggaaacctgacctgaaggacagaagaggaaggaagcaggctttgccacaaatgtcagtgcagaactctggctggccccaccaagaagacagccccaagccccaggatccaggtccaccagccaactcagacagtgactcaggccacctgccgggggaggaccctgaggatacccatgctcagggtcctgcagttctgagcttgggttccctttgcctggacaccaaccaagcccccaactggactggacttcagaccctcctgcagcaactccctccgcaggacattgatgagcgctactgcctggcccttggggaggaggagcgggccgagctgcagctcttctgtgccaggcggaagcaggaagccctgggacagggggtagcccgcctggtacttcccaagcttgaaggacacacctgtgagaagtgtagggagctgctgaagccaggggagtacggagtgtttgcagcccgggcaggggaacagcgctgctggcaccagccttgctttgcctgccaggcctgtggccaggccctgataaacctcatctacttctaccatgatggacaactctactgcggccgtcatcatgcagagttgctgcgcccgcgctgcccggcttgtgaccagctgatcttctcctggcgctgcaccgaggcggagggacagcgctggcatgagaaccacttctgttgccaggactgcgccgggcctctgggcgggggacgttatgccctgcctgggggaagcccctgctgccccagctgcttcgagaaccgctactcggatgcaggctcgagctgggccggggcactggaagggcaggcattccttggagcgcccccaccgcaccccccagacccaagcctcggggcccgcagctctcaccgcgcatccctggccggagcgttccaagggccgcccgaacccaccccgcgccgcggtcggggttgcggcgccagactccctcccaggcgcgggaggcggacgccctctggtggaggcgggggaccctggcgaggactctcggcggcggcggcggcgcgcacggcccaggggctgggcggggcgggaggctgggcctcacccccactagctgcggtgtag

SEQ ID NO: 176049 - DNA, 939 bp, Artificial Sequence
  derived and/or modified sequence
atgtctcctcagggtcctgcagttctgagcttgggttccctttgcctggacaccaaccaagcccccaactggactggacttcagaccctcctgcagcaactccctccgcaggacattgatgagcgctactgcctggcccttggggaggaggagcgggccgagctgcagctcttctgtgccaggcggaagcaggaagccctgggacagggggtagcccgcctggtacttcccaagcttgaaggacacacctgtgagaagtgtagggagctgctgaagccaggggagtacggagtgtttgcagcccgggcaggggaacagcgctgctggcaccagccttgctttgcctgccaggcctgtggccaggccctgataaacctcatctacttctaccatgatggacaactctactgcggccgtcatcatgcagagttgctgcgcccgcgctgcccggcttgtgaccagctgatcttctcctggcgctgcaccgaggcggagggacagcgctggcatgagaaccacttctgttgccaggactgcgccgggcctctgggcgggggacgttatgccctgcctgggggaagcccctgctgccccagctgcttcgagaaccgctactcggatgcaggctcgagctgggccggggcactggaagggcaggcattccttggagcgcccccaccgcaccccccagacccaagcctcggggcccgcagctctcaccgcgcatccctggccggagcgttccaagggccgcccgaacccaccccgcgccgcggtcggggttgcggcgccagactccctcccaggcgcgggaggcggacgccctctggtggaggcgggggaccctggcgaggactctcggcggcggcggcggcgcgcacggcccaggggctgggcggggcgggaggctgggcctcacccccactagctgcggtgtag

SEQ ID NO: 176050 - DNA, 1035 bp, Artificial Sequence
  derived and/or modified sequence
atgtctcctcagggtcctgcagttctgagcttgggttccctttgcctggacaccaaccaagcccccaactggactggacttcagaccctcctgcagcaactccctccgcaggacattgatgagcgctactgcctggcccttggggaggaggagcgggccgagctgcagctcttctgtgccaggcggaagcaggaagccctgggacagggggtagcccgcctggtacttcccaagcttgaaggacacacctgtgagaagtgtagggagctgctgaagccaggggagtacggagtgtttgcagcccgggcaggggaacagcgctgctggcaccagccttgctttgcctgccaggcctgtggccaggccctgataaacctcatctacttctaccatgatggacaactctactgcggccgtcatcatgcagagttgctgcgcccgcgctgcccggcttgtgaccagctgatcttctcctggcgctgcaccgaggcggagggacagcgctggcatgagaaccacttctgttgccaggactgcgccgggcctctgggcgggggacgttatgccctgcctgggggaagcccctgctgccccagctgcttcgagaaccgctactcggatgcaggctcgagctgggccggggcactggaagggcaggcattccttggggagactggactcgaccgaactgaaggaagggaccaaacctcggtgaactctgcaaccctctcccgaacactcctcgctgctgccggcggttccagcctgcaaactcagagggggctgcctggatccagtccccagcaggagaaccgacctggggacaaagcggaggcacccaaagggcaggagcaatgccgcctggagactattcgtgatcccaaggacacccctttctccacctgctcctcctcctctgactcggaacctgaaggatttttcttaggcgagcgccttccccagtcctggaagacccccggaagcctccaagcagaggacagcaacgcctctaagacgcactgcaccatgtgctag

SEQ ID NO: 176051 - DNA, 1646 bp, Artificial Sequence
  derived and/or modified sequence
gaccgggtgaggggcctgacggcagagtcggtccagaactgcccggacagcgacgcacagcgaggagccaaaatggaagagggtgcaagtcccctcctggggccccagacgccccctcctttcttgctgcctggagcaggggcagtgctgttagtggctactcctggtgtgaacagcccatcctggccaccttccacaggaaacctgacctgaaggacagaagaggaaggaagcaggctttgccacaaatgtcagtgcagaactctggctggccccaccaagaagacagccccaagccccaggatccaggtccaccagccaactcagacagtgactcaggccacctgccgggggaggaccctgaggatacccatgctcagggtcctgcagttctgagcttgggttccctttgcctggacaccaaccaagcccccaactggactggacttcagaccctcctgcagcaactccctccgcaggacattgatgagcgctactgcctggcccttggggaggaggagcgggccgagctgcagctcttctgtgccaggcggaagcaggaagccctgggacagggggtagcccgcctggtacttcccaagcttgaaggacacacctgtgagaagtgtagggagctgctgaagccaggggagtacggagtgtttgcagcccgggcaggggaacagcgctgctggcaccagccttgctttgcctgccaggcctgtggccaggccctgataaacctcatctacttctaccatgatggacaactctactgcggccgtcatcatgcagagttgctgcgcccgcgctgcccggcttgtgaccagctgatcttctcctggcgctgcaccgaggcggagggacagcgctggcatgagaaccacttctgttgccaggactgcgccgggcctctgggcgggggacgttatgccctgcctgggggaagcccctgctgccccagctgcttcgagaaccgctactcggatgcaggctcgagctgggccggggcactggaagggcaggcattccttggggagactggactcgaccgaactgaaggaagggaccaaacctcggtgaactctgcaaccctctcccgaacactcctcgctgctgccggcggttccagcctgcaaactcagagggggctgcctggatccagtccccagcaggagaaccgacctggggacaaagcggaggcacccaaagggcaggagcaatgccgcctggagactattcgtgatcccaaggacacccctttctccacctgctcctcctcctctgactcggaacctgaaggatttttcttaggcgagcgccttccccagtcctggaagacccccggaagcctccaagcagaggacagcaacgcctctaagacgcactgcaccatgtgctagtggcgcagctcagagaggggatgtgagtgggaggaaaggggtctgtaaagcgggagaacaaggctagcctccccctaacaatcctagactgagacgcagtcaggcgcacgcccgcaagaggcggcgaggtgacaagtttggagtgcgcccccttcagtactgcgcgttctaagacttttggcggagactttcttggcaaaacccattccccaaagctacgcttcccctgctgagatagcccct

SEQ ID NO: 176052 - DNA, 3947 bp, Artificial Sequence
  derived and/or modified sequence
cggggctgggagaccacagggagagtttggggagacctgggaactgcggagagacagggctgcgggcccggcgaggcgtttccattcagcgaatggttgaaaacccagcgtaaacgcggctcccggcgtctgctggatgcctgccgggcgcagtccgagccagagagcccttgcacctgcatggcagaggccatggagcccgcacatttccaccctgagatcccataaatgtggttttgttttccttttttttttcctccccccaatctgcagctccaggcccctccctgagccgcccctctccaccagccggggaggggcgggcgggggccgctggggcgtgggagaggaagggccgcgctattagggcgggcgggggcggacgggggcgggcgctgaagccttggggtggggaccgggtgaggggcctgacggcagagtcggtccagaactgcccggacagcgacgcacagcgaggagccaaaatggaagagggtgcaagtcccctcctggggccccagacgccccctcctttcttgctgcctggagcaggggcagtgctgttagtggctactcctggtgtgaacagcccatcctggccaccttccacaggaaacctgacctgaaggacagaagaggaaggaagcaggctttgccacaaatgtcagtgcagaactctggctggccccaccaagaagacagccccaagccccaggatccaggtccaccagccaactcagacagtgactcaggccacctgccgggggaggaccctgaggatacccatgctcaggaattcctgtctctgcacctgcttagaacatggggttttgactttaaactcattcacatgagtattcattatctctcctagggggtctgtattgtcaaaccagactctaggggctttggccccaaggcgtgaagggggttaagaagggaaagcataagaagggaagctgttttggggtgtggggcctccccagcctccctcaaggaagaccacacatgcaggcatcagtcagctatccttgcactcagtgaggatctgcaaggaggaccctcccaaatggagggcatgcttagaagctgctctagattggagaagaggtggcaatgatgagggggaaagaaggagaaaggaaagaaaaacctagtttcactcctccccttcttccatgtctcctcagggtcctgcagttctgagcttgggttccctttgcctggacaccaaccaagcccccaactggactggacttcagaccctcctgcagcaactccctccgcaggacattgatgagcgctactgcctggcccttggggaggaggagcgggccgagctgcagctcttctgtgccaggcggaagcaggaagccctgggacagggggtagcccgcctggtacttcccaagcttgaaggacacacctgtgagaagtgtagggagctgctgaagccaggggagtacggagtgtttgcagcccgggcaggggaacagcgctgctggcaccagccttgctttgcctgccaggcctgtggccaggccctgataaacctcatctacttctaccatgatggacaactctactgcggccgtcatcatgcagagttgctgcgcccgcgctgcccggcttgtgaccagctgatcttctcctggcgctgcaccgaggcggagggacagcgctggcatgagaaccacttctgttgccaggactgcgccgggcctctgggcgggggacgttatgccctgcctgggggaagcccctgctgccccagctgcttcgagaaccgctactcggatgcaggctcgagctgggccggggcactggaagggcaggcattccttggagcgcccccaccgcaccccccagacccaagcctcggggcccgcagctctcaccgcgcatccctggccggagcgttccaagggccgcccgaacccaccccgcgccgcggtcggggttgcggcgccagactccctcccaggcgcgggaggcggacgccctctggtggaggcgggggaccctggcgaggactctcggcggcggcggcggcgcgcacggcccaggggctgggcggggcgggaggctgggcctcacccccactagctgcggtgtaggtccagctccgcggctctgagaccagcgtttccgacccggcccggaacaggggagactggactcgaccgaactgaaggaagggaccaaacctcggtgaactctgcaaccctctcccgaacactcctcgctgctgccggcggttccagcctgcaaactcagagggggctgcctggatccagtccccagcaggagaaccgacctggggacaaagcggaggcacccaaagggcaggagcaatgccgcctggagactattcgtgatcccaaggacacccctttctccacctgctcctcctcctctgactcggaacctgaaggatttttcttaggcgagcgccttccccagtcctggaagacccccggaagcctccaagcagaggacagcaacgcctctaagacgcactgcaccatgtgctagtggcgcagctcagagaggggatgtgagtgggaggaaaggggtctgtaaagcgggagaacaaggctagcctccccctaacaatcctagactgagacgcagtcaggcgcacgcccgcaagaggcggcgaggtgacaagtttggagtgcgcccccttcagtactgcgcgttctaagacttttggcggagactttcttggcaaaacccattccccaaagctacgcttcccctgctgagatagcccctacccccacctccacaggctgggacagccccgtccccaccatcctcctcccaagccaattaaatgatcacagcacgcgtgacagttaccggctggagagccggaggtgggaccgggagcaggggaccgtagaaccgggccgcgctcctcccctcctagagttcgtggaggcgcagcagagggccgtccctcttccggatgtcggactaagcgaacagcgcccccactgccggccggtagcagccggaagtgccagaccggaggtgcgtcattcaccggcgacgccgatacggttcctccaccgaggcccatgcgaagctttccactatggcttccagcactgtcccggtgagcgctgctggctcggctaatgaaactcccgaaataccggacaacgtgggagattggcttcggggcgtctaccgctttgccactgataggaatgacttccggaggaacttgatactaaatttgggactctttgctgcgggagtttggctggccaggaacttgagtgacattgacctcatggcacctcagccaggggtgtagccaagtagttctaatgccacctgtcgtcttatcatctgattgcagacaaatggaatcctgtgctgaacccgaatcttccaaaaaacagcctacaatctgtgaccaccacaagatgtgccctgatggcagctgaagtttgattcagatgggcacttttcttccccttccctgcctagtttccttttgttccttgagtccacgcagaattccattctctggtcagcagacaggcttaagctaaagtattgcctctattctgtaaagttctgtacatagttcccaagcttctgcagggggtgatttttgctcttgtcctgagaaataacagtgctgttttaaaaaacatttgaaataaataccgcacacaaaggcagtcattttattcttttaataagaaacttttgcttacaaaaacaaggtgtaaaaagatttacaaaaatcataaaaacatgatttatatttcacacttgagagacaaaaacaagccccaaaacatggattttaatggaggtggtttgcttcattttaaaagggaaaaaaaaaaaaggaagctgtaaccatacattgatgttaacctagcatgaagtttattcttgaagaatttacattgttgagcaat

SEQ ID NO: 176053 - DNA, 1059 bp, Artificial Sequence
  derived and/or modified sequence
atgagcgtgcagaacagcggctggccccaccaggaggacagccccaagccgcaggatccgggtccacccgcaaatagcgacagcgatagcggtcacctgcccggggaagatcctgaggatacgcacgcccagggtcccgcagtacttagcctgggctcgctctgcctggatactaatcaggcgccaaactggaccggtcttcagaccttgctgcagcagctcccaccccaggacattgatgaacggtactgcctcgctctcggcgaggaggaacgcgctgagttgcagctcttctgtgcccgccgcaagcaggaagcgctgggccagggtgttgcacgtctggtcctgccgaagcttgaggggcacacttgtgagaaatgtcgtgaattgctgaaacccggggagtacggcgtattcgctgcgcgagcaggagaacagaggtgctggcaccagccttgtttcgcatgtcaggcttgtggacaagcactcattaatctgatctacttttaccacgatggccagctctattgtggcagacaccatgccgaactgcttcgccccaggtgccccgcgtgcgatcaactgatattcagttggaggtgtacagaggccgagggccaacgctggcatgagaaccacttttgctgtcaggactgtgccggacctctggggggtggcagatacgccctccctgggggcagcccctgctgcccatcctgtttcgagaacaggtattccgacgcgggatcttcatgggcgggagctctcgagggacaagcattcctgggcgcaccccctccccatcctcccgacccttctctgggggcacgctcgtcgcatcgggcctcactcgccggcgcatttcagggcccccccgagccaacaccccgtcgaggtcgcggttgcggcgccagactccctcccagacgagggagacggaccccctcaggaggaggaggaggtccttggagaggcctttcggccgccgctgccgcacggaccgcccagggtcttgggggtgcaggcggttgggctagcccgccactggcagcagtgtag

SEQ ID NO: 176054 - DNA, 939 bp, Artificial Sequence
  derived and/or modified sequence
atgagcccccagggccccgccgtgctgagcctgggcagcctgtgcctcgacacaaaccaagcccccaactggacgggcctccaaacactgctacagcaattgccgccgcaggacattgatgaacggtactgcctggctttaggcgaggaggaaagggcagagctgcagctcttttgcgcacgtcgaaagcaggaagccctcggacaaggggtcgcacgactggttttgcccaagctagaggggcacacttgtgagaagtgtagggagctgctgaaacccggcgaatatggggtgtttgcagcccgggctggtgaacagagatgttggcaccaaccttgcttcgcctgtcaggcttgtgggcaggctctaataaacctcatctacttctaccacgacggccagctatactgcgggagacatcacgccgaactgcttcgcccccggtgtcctgcttgtgatcagctgatcttcagctggcgatgcacagaggctgagggccagcgatggcacgagaatcatttctgctgtcaggactgtgcaggtccgctggggggaggtagatacgcacttcctggaggcagtccctgctgcccaagctgtttcgaaaacagatatagtgacgccggcagctcctgggccggcgccctggaaggccaagcttttctgggcgcacctcccccccacccgcccgaccctagtctgggcgctcgctcatcgcatagggctagcctggcgggtgcttttcagggtccgcccgagccaaccccccgccggggcagaggatgtggcgcacggctgcccccaaggcggggacgtcggacccccagcggaggcggcggcgggccgtggcgagggctatcagctgccgccgcagcacgaactgcccagggactgggcggagccggcggctgggcaagcccccccctggcagccgtgtag

SEQ ID NO: 176055 - DNA, 1035 bp, Artificial Sequence
  derived and/or modified sequence
atgagcccccagggccccgccgtgctgagcctgggcagcctgtgcctcgacaccaaccaggcccctaattggaccggattgcagacactgcttcagcagcttcctcctcaggatattgacgaaaggtattgcttagctctgggagaagaagaacgcgccgagttacaacttttctgtgcacgccgcaagcaggaagctctcggccagggagtcgctaggctggtactcccaaagctggagggacacacctgcgagaagtgtcgcgagctgctgaaacccggtgaatacggagtctttgccgcacgcgccggcgaacagaggtgttggcatcagccctgcttcgcttgccaagcctgtggacaggccctaatcaacctgatatacttctaccacgatggacagttatattgtggacgccaccacgccgaactgctaaggccccggtgtccagcatgtgaccagcttatcttttcttggagatgtaccgaggccgaggggcagcgctggcacgagaaccatttttgctgtcaggattgtgcgggaccattaggtgggggtcgttacgcactgcccggtggatcgccatgctgcccaagttgcttcgaaaataggtactcagacgctggaagtagttgggctggtgccctcgagggacaggcattcctgggggaaacggggttggataggaccgagggtcgcgaccagacttctgtgaattcggcaaccctctctagaactcttctggccgcggcaggaggctcgagcctccagacccaaagaggactgcctggctcctctccccaacaggaaaatcgtcccggcgacaaggccgaagccccaaaaggccaggagcagtgcaggcttgagactatacgcgatccaaaggacactccattttctacatgtagcagttccagtgattccgaacctgagggattcttccttggcgaaagactgccccaatcttggaagacaccagggtccttgcaggctgaggacagcaatgcgtctaagacccattgcaccatgtgctag

SEQ ID NO: 176056 - DNA, 1155 bp, Artificial Sequence
  derived and/or modified sequence
atgagcgtgcagaacagcggctggccccaccaggaggacagccccaagccacaggaccccggacccccagccaattctgacagtgactccggacatcttccgggagaagaccctgaagatacacacgcccaggggcctgcagtgctgtccctagggagcctgtgcttggatacgaatcaggccccaaattggaccgggctgcagaccctcctgcagcagctgcctccacaagatattgatgagcgttattgcctcgctctgggcgaggaggaaagagctgagctgcagcttttttgcgccaggaggaaacaggaagccttgggacagggcgttgcacgtctcgtgctgccaaagctcgaaggccacacttgcgaaaagtgtagggaactcctcaagcctggagagtacggagtgttcgcagcccgagcaggcgaacagagatgctggcaccagccttgcttcgcatgtcaggcttgcggacaggcactcataaatctcatctatttttaccatgatggccaactatactgtggacgccatcacgcggagctgcttagacccaggtgtccagcctgcgaccagctcatattttcatggcgctgtactgaggcagagggtcaacggtggcacgagaatcatttctgctgccaggattgcgcagggccactgggcggaggaagatatgctttgcccggcggatctccatgctgtccctcctgtttcgaaaatcggtattccgacgctggtagtagttgggccggcgccctggaaggtcaggcctttttgggggaaacagggctggaccgaactgaggggagagaccagactagcgtaaacagcgcaacactaagccgaacattgctggctgctgctggggggtcttcacttcagactcagcgagggctccccggatccagtccccagcaagagaaccggccaggtgacaaggccgaagctcccaaaggccaggagcagtgcagattggagacgatccgtgaccccaaagacactcccttttcaacctgtagtagctcttctgatagcgagcccgagggcttctttctcggcgagaggctgccacaatcctggaaaacccctggctcattgcaggccgaagattccaatgcaagtaagacacattgcacaatgtgctag

SEQ ID NO: 176057 - DNA, 213 bp, Artificial Sequence
  derived and/or modified sequence
atgagcgtgcagaacagcggctggccccaccaggaggacagccccaaaccacaggatcccggtccaccagctaatagcgattccgatagcggccatctccccggcgaagaccccgaggatacccacgctcaggaattcttgagtctccatctcctaagaacttggggattcgacttcaaactgatccacatgtctatccactatttatcctag

SEQ ID NO: 176058 - DNA, 1059 bp, Artificial Sequence
  derived and/or modified sequence
atgagcgttcagaacagcgggtggccccatcaagaggactctcctaagccccaggatccagggccaccagctaacagcgatagcgactctggacaccttccgggagaagatccagaggatactcacgcccagggtccggcagtgctgagtttagggtcactgtgtctagatacaaatcaggcaccaaactggaccggcctgcagaccttgctacaacaactaccaccacaggacatcgacgagagatactgtctggcactgggcgaagaagaacgagccgaattgcagctgttctgtgcccgaagaaagcaggaggccctgggccagggggttgctaggctggtgttaccaaagctggagggtcacacatgcgagaagtgccgggagctgctcaaacccggtgagtacggtgttttcgctgccagggccggagagcagcgctgctggcaccagccatgctttgcatgtcaggcgtgcgggcaggcacttataaacttgatttacttttaccatgatggccagctttattgtggacgtcaccatgccgagctgctgcgcccacgctgtcctgcctgcgaccaactcattttttcatggcggtgcaccgaggctgagggacagcgctggcatgaaaatcatttctgctgtcaggattgcgcgggacctctgggaggcggaaggtatgcactaccgggtgggagcccttgttgtccttcctgttttgagaatcgctacagcgacgccggttccagttgggctggcgctctcgagggccaggcattcttgggggctcccccaccgcatcccccagatccaagcctaggtgccagaagctcccatcgggcatcattggccggagcttttcaggggccacccgaacctacaccaagaagaggccgaggatgtggagcacgtctgcctccgcgacgcggacggcgtacaccgagcggaggaggtgggggaccctggcgcggactgtcagctgctgcagccgctagaaccgctcagggactggggggtgctggcggatgggcaagcccacctcttgccgcagtttag

SEQ ID NO: 176059 - DNA, 939 bp, Artificial Sequence
  derived and/or modified sequence
atgagcccgcagggcccagcggtgctctccctggggtcgctgtgtttagacaccaaccaggcacctaattggacaggcctccagaccctgctccaacagctaccccctcaggacatcgatgagcgctactgtctggcactgggcgaagaagagagggccgagctccagctgttttgcgcaagacggaagcaggaggctttgggacaaggggttgccagactcgtgctccccaaactggaagggcacacgtgtgagaagtgtcgcgaactgctcaagcctggggaatacggggtgtttgccgctcgcgcaggagagcagcgctgctggcaccagccgtgcttcgcttgccaggcttgcgggcaagcactgatcaacctgatttatttttatcacgacggacagctctattgcggcaggcaccacgctgagctgctgcgacccagatgccctgcctgcgaccaactgatcttcagttggcgctgtactgaggccgagggccaaaggtggcacgaaaaccacttctgctgccaggattgtgcagggccacttggtgggggaagatatgccctcccagggggttcaccgtgctgcccttcatgcttcgaaaaccgttacagcgatgccggaagcagctgggccggtgccctagaagggcaagccttcctgggagctcccccacctcacccacctgacccgagtctgggggcacgctcttcccacagggccagtctagccggagccttccagggcccaccagaacccacacccaggcggggacgcggatgtggcgcacggctccccccacgacggggacggcgtactccatcagggggaggtgggggtccttggcgtggcttaagcgctgccgctgccgcaaggacagcccagggtcttggaggcgcaggcggttgggcctccccgcctcttgccgcagtttag

SEQ ID NO: 176060 - DNA, 1035 bp, Artificial Sequence
  derived and/or modified sequence
atgagccctcaagggccagccgtcttaagtctgggaagtttatgcttggacaccaaccaggcacctaactggacaggcttacaaacgctgctacaacaactccccccacaggacattgatgaacgttactgtctggcgctgggggaagaggagagagccgaactccagctgttttgcgccagaaggaaacaggaagctctcggacagggggtggcaagattggttctacccaagctggaaggtcatacgtgcgagaaatgcagggagttacttaaacctggggaatatggggttttcgcagcgagagccggtgaacagagatgctggcaccagccatgtttcgcctgtcaggcctgtggacaggccttgatcaacctcatttatttctaccatgacggccagctgtactgcggtcgccaccacgccgagctgctgcggccacgctgtcctgcctgcgaccagctgatcttttcatggcgttgcaccgaggctgaaggccagaggtggcacgagaaccatttctgttgtcaagactgcgctggccctttgggcggaggtagatacgccctccccggagggtcaccatgctgtccttcatgctttgagaataggtactcagatgcagggagtagctgggctggggcactcgaaggtcaggcttttttaggcgaaacgggcctcgatcgcacggaaggcagggaccagacctctgttaactccgcgaccttgtcacgcaccttactcgccgctgccggaggatcatcactccagacgcagagaggcttgccgggtagctctccacagcaggaaaatcgtcccggagacaaagccgaggcgccaaaaggccaggagcagtgtaggctcgaaacgatccgggatcccaaagacacacccttcagcacatgttcatctagctcggacagcgagcctgagggtttcttcctgggagagaggcttccccaaagttggaagacaccaggcagcctgcaggctgaagactccaacgcctcaaaaacacattgcaccatgtgctag

SEQ ID NO: 176061 - DNA, 1155 bp, Artificial Sequence
  derived and/or modified sequence
atgtcggtccagaattcaggctggccccatcaagaggattccccaaagccgcaggaccctggcccaccagccaactctgatagcgactccgggcacctacccggtgaagaccctgaagatactcacgcccagggccctgctgtgctgtctctcggcagtctgtgcctggataccaaccaggcacccaattggaccgggttgcagacactgttacagcaactgccgccacaggatattgacgaacggtattgcctagcactcggggaagaggagagagctgagctgcagttgttttgcgcgaggaggaagcaagaggccctgggacagggcgttgctcggctggtcttgccaaaactcgaaggtcatacctgcgaaaaatgccgtgaactgctcaaacccggagaatacggcgtttttgctgcgagagcaggagaacagagatgttggcatcagccttgtttcgcatgccaggcttgcggccaggccctgatcaatttgatctacttttaccacgatggccagctttactgcggaaggcaccacgcggaactcttaagacccaggtgccctgcgtgtgaccagttaatattctcctggcgatgcaccgaagccgagggacagcggtggcacgagaaccacttctgttgccaggattgtgcgggtcccctggggggtggtaggtatgccttgcctgggggttctccctgctgtccctcctgttttgagaaccgctactctgatgccggtagcagctgggctggagcactggaaggccaggcatttttgggggagacaggactcgatcgaactgaggggagagatcagaccagcgtcaattcggctacactctcgcggacactcttggcggctgcaggcggtagttctttgcagacgcagcggggactccctggatccagccctcagcaggaaaatcgccctggagataaggcagaggcacctaaagggcaggaacaatgtcgattggagactattagggatcctaaggacacgccattttccacatgctcaagcagcagtgactctgaacctgagggcttcttcttaggagaacgcttgccccagagctggaagacacccggaagcctgcaggctgaagactcaaacgcctcaaagacgcactgcactatgtgctag

SEQ ID NO: 176062 - DNA, 213 bp, Artificial Sequence
  derived and/or modified sequence
atgtcagtgcaaaattccgggtggccgcatcaggaggattctcccaagcctcaggacccgggtcccccagcgaattcggattcggatagcggccacctcccgggagaagaccctgaagatacccatgcacaggagtttctgtcactgcatctgctgagaacctggggcttcgattttaaattgattcatatgagtattcactacctctcctag

SEQ ID NO: 176063 - DNA, 1059 bp, Artificial Sequence
  derived and/or modified sequence
atgagcgtgcagaacagcggctggccccaccaggaggacagccccaagccccaggaccccggcccccccgccaacagcgacagcgacagcggccacctgcccggcgaggaccccgaggacacccacgcccagggccccgccgtgctgagcctgggcagcctgtgcctggacaccaaccaggcccccaactggaccggcctgcagaccctgctgcagcagctgcccccccaggacatcgacgagagatactgcctggccctgggcgaggaggagagagccgagctgcagctgttctgcgccagaagaaagcaggaggccctgggccagggcgtggccagactggtgctgcccaagctggagggccacacctgcgagaagtgcagagagctgctgaagcccggcgagtacggcgtgttcgccgccagagccggcgagcagagatgctggcaccagccctgcttcgcctgccaggcctgcggccaggccctgatcaacctgatctacttctaccacgacggccagctgtactgcggcagacaccacgccgagctgctgagacccagatgccccgcctgcgaccagctgatcttcagctggagatgcaccgaggccgagggccagagatggcacgagaaccacttctgctgccaggactgcgccggccccctgggcggcggcagatacgccctgcccggcggcagcccctgctgccccagctgcttcgagaacagatacagcgacgccggcagcagctgggccggcgccctggagggccaggccttcctgggcgccccccccccccacccccccgaccccagcctgggcgccagaagcagccacagagccagcctggccggcgccttccagggcccccccgagcccacccccagaagaggcagaggctgcggcgccagactgccccccagaagaggcagaagaacccccagcggcggcggcggcggcccctggagaggcctgagcgccgccgccgccgccagaaccgcccagggcctgggcggcgccggcggctgggccagcccccccctggccgccgtgtag

SEQ ID NO: 176064 - DNA, 939 bp, Artificial Sequence
  derived and/or modified sequence
atgagcccccagggccccgccgtgctgagcctgggcagcctgtgcctggacaccaaccaggcccccaactggaccggcctgcagaccctgctgcagcagctgcccccccaggacatcgacgagagatactgcctggccctgggcgaggaggagagagccgagctgcagctgttctgcgccagaagaaagcaggaggccctgggccagggcgtggccagactggtgctgcccaagctggagggccacacctgcgagaagtgcagagagctgctgaagcccggcgagtacggcgtgttcgccgccagagccggcgagcagagatgctggcaccagccctgcttcgcctgccaggcctgcggccaggccctgatcaacctgatctacttctaccacgacggccagctgtactgcggcagacaccacgccgagctgctgagacccagatgccccgcctgcgaccagctgatcttcagctggagatgcaccgaggccgagggccagagatggcacgagaaccacttctgctgccaggactgcgccggccccctgggcggcggcagatacgccctgcccggcggcagcccctgctgccccagctgcttcgagaacagatacagcgacgccggcagcagctgggccggcgccctggagggccaggccttcctgggcgccccccccccccacccccccgaccccagcctgggcgccagaagcagccacagagccagcctggccggcgccttccagggcccccccgagcccacccccagaagaggcagaggctgcggcgccagactgccccccagaagaggcagaagaacccccagcggcggcggcggcggcccctggagaggcctgagcgccgccgccgccgccagaaccgcccagggcctgggcggcgccggcggctgggccagcccccccctggccgccgtgtag

SEQ ID NO: 176065 - DNA, 1035 bp, Artificial Sequence
  derived and/or modified sequence
atgagcccccagggccccgccgtgctgagcctgggcagcctgtgcctggacaccaaccaggcccccaactggaccggcctgcagaccctgctgcagcagctgcccccccaggacatcgacgagagatactgcctggccctgggcgaggaggagagagccgagctgcagctgttctgcgccagaagaaagcaggaggccctgggccagggcgtggccagactggtgctgcccaagctggagggccacacctgcgagaagtgcagagagctgctgaagcccggcgagtacggcgtgttcgccgccagagccggcgagcagagatgctggcaccagccctgcttcgcctgccaggcctgcggccaggccctgatcaacctgatctacttctaccacgacggccagctgtactgcggcagacaccacgccgagctgctgagacccagatgccccgcctgcgaccagctgatcttcagctggagatgcaccgaggccgagggccagagatggcacgagaaccacttctgctgccaggactgcgccggccccctgggcggcggcagatacgccctgcccggcggcagcccctgctgccccagctgcttcgagaacagatacagcgacgccggcagcagctgggccggcgccctggagggccaggccttcctgggcgagaccggcctggacagaaccgagggcagagaccagaccagcgtgaacagcgccaccctgagcagaaccctgctggccgccgccggcggcagcagcctgcagacccagagaggcctgcccggcagcagcccccagcaggagaacagacccggcgacaaggccgaggcccccaagggccaggagcagtgcagactggagaccatcagagaccccaaggacacccccttcagcacctgcagcagcagcagcgacagcgagcccgagggcttcttcctgggcgagagactgccccagagctggaagacccccggcagcctgcaggccgaggacagcaacgccagcaagacccactgcaccatgtgctag

SEQ ID NO: 176066 - DNA, 1155 bp, Artificial Sequence
  derived and/or modified sequence
atgagcgtgcagaacagcggctggccccaccaggaggacagccccaagccccaggaccccggcccccccgccaacagcgacagcgacagcggccacctgcccggcgaggaccccgaggacacccacgcccagggccccgccgtgctgagcctgggcagcctgtgcctggacaccaaccaggcccccaactggaccggcctgcagaccctgctgcagcagctgcccccccaggacatcgacgagagatactgcctggccctgggcgaggaggagagagccgagctgcagctgttctgcgccagaagaaagcaggaggccctgggccagggcgtggccagactggtgctgcccaagctggagggccacacctgcgagaagtgcagagagctgctgaagcccggcgagtacggcgtgttcgccgccagagccggcgagcagagatgctggcaccagccctgcttcgcctgccaggcctgcggccaggccctgatcaacctgatctacttctaccacgacggccagctgtactgcggcagacaccacgccgagctgctgagacccagatgccccgcctgcgaccagctgatcttcagctggagatgcaccgaggccgagggccagagatggcacgagaaccacttctgctgccaggactgcgccggccccctgggcggcggcagatacgccctgcccggcggcagcccctgctgccccagctgcttcgagaacagatacagcgacgccggcagcagctgggccggcgccctggagggccaggccttcctgggcgagaccggcctggacagaaccgagggcagagaccagaccagcgtgaacagcgccaccctgagcagaaccctgctggccgccgccggcggcagcagcctgcagacccagagaggcctgcccggcagcagcccccagcaggagaacagacccggcgacaaggccgaggcccccaagggccaggagcagtgcagactggagaccatcagagaccccaaggacacccccttcagcacctgcagcagcagcagcgacagcgagcccgagggcttcttcctgggcgagagactgccccagagctggaagacccccggcagcctgcaggccgaggacagcaacgccagcaagacccactgcaccatgtgctag

SEQ ID NO: 176067 - DNA, 213 bp, Artificial Sequence
  derived and/or modified sequence
atgagcgtgcagaacagcggctggccccaccaggaggacagccccaagccccaggaccccggcccccccgccaacagcgacagcgacagcggccacctgcccggcgaggaccccgaggacacccacgcccaggagttcctgagcctgcacctgctgagaacctggggcttcgacttcaagctgatccacatgagcatccactacctgagctag

SEQ ID NO: 176068 - protein, 382 aa, Artificial Sequence
  derived and/or modified sequence
MWSGPPQPDQGLPPPLAAVPVPWKSTDPCQGHRESPGALVETSAGEEAQGQEGPAAAQLDVLRLRSSSMEIREKGSEFLKEELHRAQKELKLKDEECERLSKVREQLEQELEELTASLFEEAHKMVREANMKQAASEKQLKEARGKIDMLQAEVTALKTLVITSTPASPNRELHPQLLSPTKAGPRKGHSRHKSTSSTLCPAVCPAAGHTLTPDREGKEVDTILFAEFQAWRESPTLDKTCPFLERVYREDVGPCLDFTMQELSVLVRAAVEDNTLTIEPVASQTLPTVKVAEVDCSSTNTCALSGLTRTCRHRIRLGDSKSHYYISPSSRARITAVCNFFTYIRYIQQGLVRQDAEPMFWEIMRLRKEMSLAKLGFFPQEA

SEQ ID NO: 176069 - DNA, 1149 bp, Artificial Sequence
  derived and/or modified sequence
atgtggagcggccccccccagcccgaccagggcctgcccccccccctggccgccgtgcccgtgccctggaagagcaccgacccctgccagggccacagagagagccccggcgccctggtggagaccagcgccggcgaggaggcccagggccaggagggccccgccgccgcccagctggacgtgctgagactgagaagcagcagcatggagatcagagagaagggcagcgagttcctgaaggaggagctgcacagagcccagaaggagctgaagctgaaggacgaggagtgcgagagactgagcaaggtgagagagcagctggagcaggagctggaggagctgaccgccagcctgttcgaggaggcccacaagatggtgagagaggccaacatgaagcaggccgccagcgagaagcagctgaaggaggccagaggcaagatcgacatgctgcaggccgaggtgaccgccctgaagaccctggtgatcaccagcacccccgccagccccaacagagagctgcacccccagctgctgagccccaccaaggccggccccagaaagggccacagcagacacaagagcaccagcagcaccctgtgccccgccgtgtgccccgccgccggccacaccctgacccccgacagagagggcaaggaggtggacaccatcctgttcgccgagttccaggcctggagagagagccccaccctggacaagacctgccccttcctggagagagtgtacagagaggacgtgggcccctgcctggacttcaccatgcaggagctgagcgtgctggtgagagccgccgtggaggacaacaccctgaccatcgagcccgtggccagccagaccctgcccaccgtgaaggtggccgaggtggactgcagcagcaccaacacctgcgccctgagcggcctgaccagaacctgcagacacagaatcagactgggcgacagcaagagccactactacatcagccccagcagcagagccagaatcaccgccgtgtgcaacttcttcacctacatcagatacatccagcagggcctggtgagacaggacgccgagcccatgttctgggagatcatgagactgagaaaggagatgagcctggccaagctgggcttcttcccccaggaggcctag

SEQ ID NO: 176070 - DNA, 1149 bp, Artificial Sequence
  derived and/or modified sequence
atgtggagtggccctccacaaccagatcagggactccctccacccctcgccgcggttcccgtgccctggaagtctactgatccctgccagggtcatagggaaagcccaggggccttggtggagaccagcgctggagaagaagctcaaggtcaggaggggcctgccgcagctcagttggacgtgctgcgtctccggtcttctagcatggaaatacgagagaagggctcagaatttcttaaggaggagctgcaccgggctcaaaaggagcttaaactcaaggacgaagaatgcgagcggctctccaaagtgcgggagcagttggagcaggagcttgaggagctaacagcgtccctctttgaggaggctcacaagatggtgcgagaggcaaacatgaagcaggccgcttccgagaagcagctcaaagaagcgagaggcaaaatcgacatgctgcaggccgaagtgacagcccttaaaaccttggtgatcacctcaactcccgcctcacccaaccgagagctacatccccagctgctttctcccaccaaagctggcccccgcaaaggccatagtaggcacaaatccacttctagcaccctgtgtccggccgtatgccccgccgcaggtcataccctgactccagaccgcgagggtaaagaggtggataccattcttttcgctgagtttcaggcctggcgggagtctcccacactggacaagacttgtccctttctggagagggtttatcgggaggatgtggggccatgcctggacttcactatgcaggagctctccgtgctggtcagggctgctgttgaggataacacgctgacaatcgaacctgtggccagccagacgctaccaactgtcaaggtggctgaggtggattgttcaagtactaatacttgtgccctctcaggactaacaaggacctgcaggcatagaattaggctgggggatagcaagagtcattactacataagcccaagttccagggcccgcattactgctgtctgcaatttctttacgtacattcggtacatccagcaggggttggtccggcaggatgccgagcccatgttttgggaaattatgaggttgcggaaggagatgtccctcgctaaactggggttcttccctcaggaagcatag

SEQ ID NO: 176071 - DNA, 1149 bp, Artificial Sequence
  derived and/or modified sequence
atgtggagcggccccccccagcctgaccagggcctgcccccacccctggccgctgtgcctgtgccctggaagagcacagacccctgccagggccaccgggagagccctggggccctggtggagaccagcgctggggaggaggcccagggccaggagggccctgctgctgcccagctggatgtgctgcggctgcggagcagctccatggagatccgggagaagggcagcgagttcctgaaggaggagctgcaccgggcccagaaggagctgaagctgaaggatgaggagtgtgagcggctgagcaaggtgcgggagcagctggagcaggagctggaggagctgacagccagcctgtttgaggaggcccacaagatggtgcgggaggccaacatgaagcaggccgccagcgagaagcagctgaaggaggcccggggcaagattgacatgctgcaggccgaggtgacagccctgaagaccctggtgatcaccagcaccccagccagccccaaccgggagctgcacccccagctgctgagccccaccaaggccggccccaggaagggccacagccgccacaagagcaccagcagcaccctgtgcccagctgtgtgcccagctgctggccacaccctgaccccagaccgggagggcaaggaggtggacaccatcctgtttgctgagttccaggcctggagggagagccccaccctggacaagacctgccccttcctggagcgggtgtaccgggaggatgtgggcccctgcctggacttcaccatgcaggagctgtctgtgctggtgcgggctgctgtggaggacaacaccctgaccatcgagcctgtggccagccagaccctgcccaccgtgaaggtggccgaggtggactgcagcagcaccaacacctgtgccctgagcggcctgaccaggacctgccgccaccgcatccggctgggggacagcaagagccactactacatcagccccagcagccgggcccgcatcacagctgtgtgcaacttcttcacctacatccgctacatccagcagggcctggtgcggcaggatgctgagcccatgttctgggagatcatgaggctgaggaaggagatgagcctggccaagctgggcttcttcccccaggaggcctag

SEQ ID NO: 176072 - DNA, 1149 bp, Artificial Sequence
  derived and/or modified sequence
atgtggagcggccccccccagcccgaccagggcctgcccccccccctagctgcggtgcccgtcccatggaaaagtactgacccatgccaaggccatagggagtctcctggtgccctggtggagactagcgccggagaagaagcacaagggcaggaggggcctgccgccgcccaactggatgtcttacgactgcggagctcatctatggagattcgagagaaaggttctgagttccttaaggaagaactacacagagcgcagaaggagcttaagctgaaggatgaggaatgtgaacgcttgagtaaagtgcgcgagcagctagagcaagagctcgaggagttgaccgcatccctgttcgaggaagcccacaaaatggtcagagaagctaacatgaaacaggccgcatctgagaaacagctgaaagaggctcgggggaagatagatatgttacaggctgaagttaccgccttgaagactttggttataacatccacacctgctagtcccaaccgggagttgcaccctcagcttctatcacctacaaaggccggaccaaggaagggtcatagccggcacaaaagcactagcagcacattatgtccggccgtctgtccagcagctggacacacgctgacccccgaccgggaagggaaggaggtggatactatcctctttgctgagttccaggcttggcgggaatcgcctactctggataaaacctgcccattcctcgaacgggtctacagagaggacgtgggtccttgtctggactttaccatgcaggaactcagtgtgcttgtgcgcgctgcagtcgaggataacactctcacaatagagccagtggcttctcagaccctccccacggttaaggtggcagaagtagattgcagctcaaccaatacttgcgctttgtcgggcctgacccgcacatgtcggcaccgaatccgcctgggagatagtaagtcccattactacatcagcccttcctctcgggcacgaattactgccgtgtgtaacttcttcacctatatccgttacatccaacagggactggttcgacaggatgcagagccaatgttttgggagatcatgcgcttgaggaaagagatgtccctggccaaattgggatttttccctcaggaggcctag

SEQ ID NO: 176073 - DNA, 1149 bp, Artificial Sequence
  derived and/or modified sequence
atgtggagcgggcctccacagcccgatcagggcctcccccctcccctggccgctgtgccagtaccctggaagagcactgatccatgtcaaggccatcgtgaatcacctggagctttggtcgagacctctgcaggcgaagaggctcagggccaggagggcccagccgctgcgcaactggatgtcctccgactgcgcagctctagtatggagatccgcgaaaagggatccgaatttctcaaagaggaattacacagagcccagaaggaactgaaactgaaggatgaggagtgtgagcgactatctaaggttcgtgagcagcttgagcaggaactggaagagctcacagcaagcttgttcgaggaggcccataagatggtgcgcgaggctaacatgaagcaagccgcatctgaaaaacagctaaaagaagcaaggggaaaaattgatatgctgcaggcggaagtcactgccctgaagactctggtaatcacctccactcctgccagcccaaatagggagctgcacccgcagctcttatcacctacgaaggccggacccaggaagggtcactccagacacaagtcaacgagctcaaccttgtgtccagcagtgtgtcctgcggcaggccacaccctgacacctgacagagagggcaaggaggtggatacaatactcttcgctgagttccaggcttggagagagtcacccactctggataagacctgcccatttctcgaacgcgtctatcgcgaggacgtgggtccatgcctggactttacaatgcaggagcttagtgttctcgtgagagccgctgtcgaggacaacacgttgactatcgagcctgtggcttcccaaacgctgcccactgttaaggtggctgaggtggactgcagtagtaccaatacatgtgccctctccgggttaactagaacatgtagacaccgcatcagactcggtgacagcaagtctcattactacatctctccaagtagtcgtgcgcgaatcacggcggtgtgcaatttcttcacatacatccgctatattcagcaggggctggttagacaagatgcagagccgatgttttgggagattatgcggcttcgcaaagagatgtctctggccaagctgggtttcttccctcaggaggcctag

SEQ ID NO: 176074 - DNA, 2284 bp, Artificial Sequence
  derived and/or modified sequence
cgagcccaggcgtctgagacctactgaccggccgcgggcagggctgacaggcggtggggcggctcggcccctggcggagtcggcggcgggcggggacgcggcgctgggaggacgcggcggcgctgggaacggacgcctgggcgccccgaggcgccgggatgtggagcggcccaccccagccagaccagggcctcccgccgccccttgcagctgtcccggtcccctggaagagcacggacccctgccaaggccacagggagtccccaggagccctggtggagacctctgcaggggaggaggcccaaggccaggagggccccgcagccgcccagctggacgtgttgcgcctgcgcagctcttccatggagatccgagagaagggctccgagttcctgaaggaggagctgcacagagcgcagaaggagctgaagctaaaggacgaggaatgtgagcggctgtccaaggtgcgggagcagctagaacaggagctggaagagctgacggccagcctgtttgaggaagctcacaagatggttcgagaagccaacatgaagcaggcggcatcagaaaagcagctgaaggaggctcggggcaagatcgacatgctgcaggcagaggtgacagccttgaagacgctggtcatcacgtccacaccagcctctcccaaccgcgagcttcacccccagctgctgagccccaccaaggccgggccccgaaagggccactctcgccacaagagcaccagcagcaccctctgccccgccgtgtgtcccgctgcgggacacaccctcaccccagacagagagggcaaggaggtggacacaatcctgtttgcagagttccaggcctggagggaatcccccaccctggacaagacctgccccttcctggaaagggtgtaccgagaggacgtgggcccctgcctggacttcacaatgcaggagctctcggtgctggtacgggccgccgtggaggacaacacgctcaccattgagccggtggcttcgcagacgctgcccacagtgaaggtggccgaggttgactgtagcagcaccaacacatgtgccctgagcgggctgacccgcacctgccgccaccgaatccggctcggggactccaaaagccattactacatctcgccatcttcccgggccaggatcaccgcagtgtgcaacttcttcacctacatccgctacatccagcaaggcctggtgcggcaggacgcagagcccatgttctgggagatcatgaggttgcggaaggagatgtcactggccaagctcggcttcttcccccaggaggcttagggcgcggcccaggcctgaaggggagctctgagacagagcaaacacccaccccagaacaagccgacacacagggagacgggggcctggagccagccctgagccagaggcagaatggatggacagacaggccatggaggcagcactgagccagcaccacacgtccatcctgggacagacgggcctggacttcacggcaagacccccctctcttccccactgggttctgccaccaccaggaggatttcaagaaagcaccaaagaccagggagctcggatccatactcggggggcctcagcccttgggaggggacacctgaggcagccagcgccccctccccagtccccagaactgcctgcaggtgccttgttgctggcttgtcttcagaaagggactgttctgggtggctggatctccagggtaccctccaccccagctgccaagccctgggccagcagcacccccttgtggccatcctgtgccttgttcccggtggcctccctattggactactaggaggggctggcagggcctccatagcacagaattgccccaaagccttgttaagatgagtcaagacccctcccccgcttcctcccttcctttcccccttcctccctcccccttcataaaggcctcccttgtcaccttccctcccaccccgtctcagccctgtgctcctggaggccctgctcccaaaaccgctggaaggactggggcactttctgccacagtagaacacagacagggcttcagatcacccacgcctgttttcagctgtgggtggccatgcagacacgcgccctggcatgtggggcctgggtgggcaggcaggacctgggccctcccacccatcagagcccactcaggaccagcgttcggagctcccacctggacgcatccctcaccacgtccggatttccttctttggatggaatgtaacgcgatctctatttaataaaggcaggctttgttggta

SEQ ID NO: 176075 - protein, 501 aa, Artificial Sequence
  derived and/or modified sequence
MGTRAARPAGLPCGAENPARRRLALGARQQIHSWSPRTPSTRLTAPAGPARGVARPAMAPDPVAAETAAQGPTPRYFTWDEVAQRSGCEERWLVIDRKVYNISEFTRRHPGGSRVISHYAGQDATDPFVAFHINKGLVKKYMNSLLIGELSPEQPSFEPTKNKELTDEFRELRATVERMGLMKANHVFFLLYLLHILLLDGAAWLTLWVFGTSFLPFLLCAVLLSAVQAQAGWLQHDFGHLSVFSTSKWNHLLHHFVIGHLKGAPASWWNHMHFQHHAKPNCFRKDPDINMHPFFFALGKILSVELGKQKKKYMPYNHQHKYFFLIGPPALLPLYFQWYIFYFVIQRKKWVDLAWMITFYVRFFLTYVPLLGLKAFLGLFFIVRFLESNWFVWVTQMNHIPMHIDHDRNMDWVSTQLQATCNVHKSAFNDWFSGHLNFQIEHHLFPTMPRHNYHKVAPLVQSLCAKHGIEYQSKPLLSAFADIIHSLKESGQLWLDAYLHQ

SEQ ID NO: 176076 - protein, 360 aa, Artificial Sequence
  derived and/or modified sequence
MNSLLIGELSPEQPSFEPTKNKELTDEFRELRATVERMGLMKANHVFFLLYLLHILLLDGAAWLTLWVFGTSFLPFLLCAVLLSAVQAQAGWLQHDFGHLSVFSTSKWNHLLHHFVIGHLKGAPASWWNHMHFQHHAKPNCFRKDPDINMHPFFFALGKILSVELGKQKKKYMPYNHQHKYFFLIGPPALLPLYFQWYIFYFVIQRKKWVDLAWMITFYVRFFLTYVPLLGLKAFLGLFFIVRFLESNWFVWVTQMNHIPMHIDHDRNMDWVSTQLQATCNVHKSAFNDWFSGHLNFQIEHHLFPTMPRHNYHKVAPLVQSLCAKHGIEYQSKPLLSAFADIIHSLKESGQLWLDAYLHQ

SEQ ID NO: 176077 - protein, 376 aa, Artificial Sequence
  derived and/or modified sequence
QDAFRAFHQDLNFVRKFLQPLLIGELAPEEPSQDGPLNAQLVEDFRALHQAAEDMKLFDASPTFFAFLLGHILAMEVLAWLLIYLLGPGWVPSALAAFILAISQAQAGWLQHDFGHLSVFSTSKWNHLLHHFVIGHLKGAPASWWNHMHFQHHAKPNCFRKDPDINMHPFFFALGKILSVELGKQKKKYMPYNHQHKYFFLIGPPALLPLYFQWYIFYFVIQRKKWVDLAWMITFYVRFFLTYVPLLGLKAFLGLFFIRFLESNWFVWVTQMNHIPMHIDHDRNMDWVSTQLQATCNVHKSAFNDWFSGHLNFQIEHHLFPTMPRHNYHKVAPLVQSLCAKHGIEYQSKPLLSAFADIIHSLKESGQLWLDAYLHQ

SEQ ID NO: 176078 - DNA, 4523 bp, Artificial Sequence
  derived and/or modified sequence
cattcactcctgcagcgcggccccgcacccagggcctgcactagaaccgctgttcctaccgcggcgccccctgggagccaacgccgcgatgcccgcctgacgtcaggaagtcgaatccggcggcgacgcctttagggagcccgcgagggggcgcgtgttggcagcccagctgtgagttgcccaagacccaccgggggacgggatctcgctccccgcgccacgaggctcggccaatgggaacgcgcgctgcgaggcccgccggtctgccctgcggtgctgaaaacccggcgcgcaggcggctggctctgggcgcgcgccagcaaatccactcctggagcccgcggaccccgagcacgcgcctgacagcccctgctggcccggcgcgcggcgtcgccaggccagctatggcccccgacccggtggccgccgagaccgcggctcagggacctaccccgcgctacttcacctgggacgaggtggcccagcgctcagggtgcgaggagcggtggctagtgatcgaccgtaaggtgtacaacatcagcgagttcacccgccggcatccagggggctcccgggtcatcagccactacgccgggcaggatgccacggatccctttgtggccttccacatcaacaagggccttgtgaagaagtatatgaactctctcctgattggagaactgtctccagagcagcccagctttgagcccaccaagaataaagagctgacagatgagttccgggagctgcgggccacagtggagcggatggggctcatgaaggccaaccatgtcttcttcctgctgtacctgctgcacatcttgctgctggatggtgcagcctggctcaccctttgggtctttgggacgtcctttttgcccttcctcctctgtgcggtgctgctcagtgcagttcaggcccaggctggctggctgcagcatgactttgggcacctgtcggtcttcagcacctcaaagtggaaccatctgctacatcattttgtgattggccacctgaagggggcccccgccagttggtggaaccacatgcacttccagcaccatgccaagcccaactgcttccgcaaagacccagacatcaacatgcatcccttcttctttgccttggggaagatcctctctgtggagcttgggaaacagaagaaaaaatatatgccgtacaaccaccagcacaaatacttcttcctaattgggcccccagccttgctgcctctctacttccagtggtatattttctattttgttatccagcgaaagaagtgggtggacttggcctggatgattaccttctacgtccgcttcttcctcacttatgtgccactattggggctgaaagccttcctgggccttttcttcatagtcaggttcctggaaagcaactggtttgtgtgggtgacacagatgaaccatattcccatgcacattgatcatgaccggaacatggactgggtttccacccagctccaggccacatgcaatgtccacaagtctgccttcaatgactggttcagtggacacctcaacttccagattgagcaccatctttttcccacgatgcctcgacacaattaccacaaagtggctcccctggtgcagtccttgtgtgccaagcatggcatagagtaccagtccaagcccctgctgtcagccttcgccgacatcatccactcactaaaggagtcagggcagctctggctagatgcctatcttcaccaataacaacagccaccctgcccagtctggaagaagaggaggaagactctggagccaaggcagaggggagcttgagggacaatgccactatagtttaatactcagagggggttgggtttggggacataaagcctctgactcaaactcctcccttttatcttctagccacagttctaagacccaaagtggggggtggacacagaagtccctaggagggaaggagctgttggggcaggggtgtaaattatttcctttttctagtttggcacatgcaggtagttggtgaacagagagaaccaggagggtaacagaagaggagggacctactgaacccagagtcaggaagagatttaacactaaaattccactcatgccgggcgtggtggcacgcgcctgtaatcccagctacccaggaggctgaggcaggagaatcgcttgaaccggggaggtggaggttgcagtgagctgagatcacgccattgtactccagcctgggcgacagagcaagactccatttcaaaaaaaaaaaaaaaatccactcatataaaaggtgagctcagctcactggtccatttctcagtggcttctccatcctcatttgcaaacctcagagggataaggcagttgaacctgatgagcaagaattataacagcaaggaaacattaatgcttagaattctgagatccagcacaactcagtctgtgggagctcagctcgctgcccagggataggtatgacctatgtctgccttaggctgctgggagatgccattctccagtttcagaagcaggcagggcaaaggtcaagactgtggtattggggtcttttggctctgaaggatcctggaaccactgattttggtttattccctccagggtctaaagagaacaagaggtgctagctcttaccaaaacagatggtagagagagttgctggctatttaaaaagctctttcatcttttaattcacctcttcttttcacctctttaaccactcctcaggaacagaacacttctaggactgggggtcttttagctccataagcaagtgagcagatgggacaagttagtcttttctccctagaaacaaaggggatgcccagtggtttccctttgcttcccaacctaaaatttcaagtttaataaaatagcaattagcagaagtgaccaaattgggagataattatcagtcatgaggaaagacacagatttcggtcataaagaatgtaagggctataagtagaaactttctataacctaaatgatgttatagaattatttttgagcaggagcagaaagattaaatatgatcacttcatacttctaaatcagaaataggaagattaaaaccacagaacagtttgtgatttctattgctgtagctaggtatcttactctgtccactcttgttcaagtatctaactcttctggaaaccaaataggctttagaagagattatcctatattcctatcagtataatactaaaatgtaactttttaatcatctggtttttaaaagataaacagtttagcccatctctccagagagcaaacataggaatatgactcaggagcctcctagggcttatcatcagccctcacacccgcttccccctccaacccacagcctttgcttccaggtggcaggattactactttgcctcttcagcagcatctactctaggcatattgatcattttagacactgggagaagagaacctcaaactaggaggaaaagacagagcctccacttagttttgggaggggatggcagacagtcaaggagatgagcgtcctaaggcatgttgggatagggtcagatgcaccacccatggagaggtttgtcaacacaaagacatggaaggttagaggtttgtcaacaaaaagacatggaaggttaggtttgtcaacacaaagacatggaagattagaggtttgtcaacacaaagacacaggaagaatgggctgcagaagatttagatgttttccatttgggcacattttacttagctggagaactaggtttaaaacagcctgggtaggaaaattagaagcaagctggatgcagtggctcatgcctgtaatcccaacacttttgggaggtccaggcaggaggatcacttgggcccaggaggtcaagcctgcagcgagctgagatcacaccactgcactccagcctggggtgatagaacaagaccctgtctcaaaaaaaaaaaaaacaacaaaaacttagaattgaggagttgtacctccattggcttcctcactccaaaataggtgctgatccttcctattcctattctttgccaccttttgggtgtggtgtcaccagcctgtttagccaagtagctttgggcataggctgcccaatctgagcaaacaccagtgaggctctattgagccaagaccaagtcctcaaagcacctgaaccactgtggccttctcagcctacagcagtgtggtctcttacatggccacaaagggacacacagtgacaaaaggctcggaatgttacaatggtaaaatgagtgatctcaaatccactgacagatataaaataggcttagagaggaaaagctgcctctggtcaagtagatcatggcagcatgaattccaactcacttttttacaactccaacttctatgtttatctttgttactttcacttttttacaacctggccagaggcattttttaaatcaggcccaatatcagtattctttttgtgtgtgccaattttgttatcacatccctatgaagttgaaaaataaagttaattttgaccaaaa

SEQ ID NO: 176079 - DNA, 1506 bp, Artificial Sequence
  derived and/or modified sequence
atgggaacacgtgctgccagaccggcaggcctgccatgcggcgctgagaatcctgcacgccgtcggctggctcttggcgctcggcagcagattcattcctggtctccccggaccccatctactcgcctgactgctcccgccggtccagccagaggggttgctcgccctgccatggcccccgatcctgttgccgcagaaacggctgctcagggccccactccacgctacttcacctgggatgaagttgcgcagagaagtggatgcgaggaacggtggctcgttattgatcgaaaggtgtacaatatctctgagtttacccgccggcacccgggcgggtcacgggttattagccattacgccggacaagacgcaacagatccattcgtcgcatttcatatcaacaaagggctcgtcaagaaatacatgaactctctcctaatcggagagctgagccctgaacagcccagctttgaacccactaaaaataaggaactaaccgatgagttccgagaacttagggcaaccgtggaacgaatgggcctcatgaaagccaatcacgtcttctttctcctttacttgcttcacattctgttgctcgacggtgccgcgtggctcactctgtgggtctttggcacttcattcttgccttttctgctttgtgccgtactgctatctgcagtacaggcacaggccggctggttgcagcacgatttcggccacctctccgtgtttagtacaagtaagtggaaccatctgctgcaccacttcgtaatcggccatctgaaaggagcaccagctagctggtggaatcacatgcactttcagcaccatgcaaagcccaactgcttccgtaaagatcctgatatcaatatgcatcctttcttcttcgcactggggaaaattctttccgtagaattgggcaagcagaaaaagaagtacatgccttataatcaccagcataaatactttttcctaatcggccccccagccctccttcccctgtattttcagtggtacatcttctatttcgtcatccagcggaagaagtgggtggatttagcatggatgattacattttatgtccgcttctttctgacgtatgtcccactcttaggattgaaggcctttctgggcttatttttcatagtccgatttctcgagtcaaactggtttgtttgggtgacacagatgaaccacattccaatgcatatcgaccacgacagaaacatggattgggtgtcaacccagctgcaagccacctgtaacgttcataaatctgccttcaacgattggtttagcggccatcttaacttccaaatcgaacaccacctgtttcccaccatgccaagacacaactatcataaggttgccccgctggttcagagcctctgcgcaaaacacggcatcgaatatcagagcaagccattgctttcagcctttgccgacatcatccacagcttaaaagaatcgggtcagctctggctggacgcttatctgcatcagtag

SEQ ID NO: 176080 - DNA, 1506 bp, Artificial Sequence
  derived and/or modified sequence
atgggcaccagggctgcccggcctgctggcctgccctgtggggctgagaacccagcccggcggcggctggccctgggcgcccggcagcagatccacagctggagccccaggacccccagcacccggctgacagccccagctggccctgcccggggcgtggcccggcctgccatggccccagaccctgtggccgctgagacagctgcccagggccccaccccccgctacttcacctgggatgaggtggcccagaggagcggctgtgaggagcgctggctggtgattgacaggaaggtgtacaacatcagcgagttcaccaggaggcaccctgggggcagcagggtcatcagccactacgccggccaggatgccacagacccctttgtggccttccacatcaacaagggcctggtgaagaagtacatgaacagcctgctgattggagagctgagccctgagcagcccagctttgagcccaccaagaacaaggagctgacagatgagttccgggagctgcgggccaccgtggagaggatgggcctgatgaaggccaaccacgtgttcttcctgctgtacctgctgcacatcctgctgctggatggagctgcctggctgaccctgtgggtgtttggcaccagcttcctgcccttcctgctgtgtgctgtgctgctgtctgctgtgcaggcccaggccggctggctgcagcacgactttggccacctgagcgtcttcagcaccagcaagtggaaccacctgctgcaccacttcgtcatcggccacctgaagggggccccagcctcctggtggaaccacatgcacttccagcaccacgccaagcccaactgcttcaggaaggaccctgacatcaacatgcaccccttcttctttgccctgggcaagatcctgtctgtggagctgggcaagcagaagaagaagtacatgccctacaaccaccagcacaagtacttcttcctgattggccccccagccctgctgcccctgtacttccagtggtacatcttctactttgtgatccagaggaagaagtgggtggacctggcctggatgatcaccttctacgtgcgcttcttcctgacctacgtgcccctgctgggcctgaaggccttcctgggcctcttcttcatcgtgcgcttcctggagagcaactggtttgtgtgggtgacccagatgaaccacatccccatgcacatcgaccatgacaggaacatggactgggtgtccacccagctgcaggccacctgcaatgtgcacaagagcgccttcaatgactggttcagcggccacctgaacttccagatcgagcaccacctgttccccaccatgcccaggcacaactaccacaaggtggcccccctggtgcagagcctgtgtgccaagcatggaattgagtaccagagcaagcccctgctgagcgcctttgctgacatcatccacagcctgaaggagagcggccagctgtggctggatgcctacctgcaccagtag

SEQ ID NO: 176081 - DNA, 1506 bp, Artificial Sequence
  derived and/or modified sequence
atgggcacccgggccgcccggcccgccggcctgccctgcggcgccgagaacccagcgaggcgcaggcttgcactcggcgctcgacaacagatccactcttggtcccccaggacgccttccactaggctcacagcccccgcaggccccgctcggggagtggccaggcccgcgatggctcccgaccctgtggccgctgagaccgccgcacaggggccaacacctaggtattttacatgggacgaggtcgctcaaaggagcggttgtgaagaacggtggctcgtgattgatcgaaaggtctacaatatatctgagttcacccgcagacaccccggaggtagtcgggtgatcagtcactacgctgggcaggatgccacagaccccttcgtggcatttcacatcaacaagggattagtaaaaaaatacatgaactccttgctgatcggagagttgagtcctgaacagccctcctttgaacccaccaagaacaaagagcttactgacgagtttcgcgagcttcgcgctaccgtggaaaggatgggcttgatgaaagccaatcacgtgttcttcttactctatctgctgcacatattgttgttggacggggccgcatggctgacactttgggtcttcgggactagttttctgcccttccttctctgtgcggtcttgctgtcagccgtgcaagctcaagccggatggctccagcacgacttcggccacctaagtgtgttctctacctccaaatggaaccatctgctccaccactttgtcattggccacctcaagggcgcccctgccagttggtggaaccatatgcactttcaacatcatgccaagccaaactgtttccgcaaagacccagatatcaacatgcatcctttctttttcgctctcggtaagatcctaagcgttgagctcgggaagcagaaaaaaaagtacatgccttacaatcaccaacacaagtatttttttctgattgggccccctgccctcctgccattgtacttccagtggtatattttctactttgtgatccagagaaagaaatgggtggatttggcctggatgatcactttctacgtccggttcttcctgacatatgtgcctctcttaggtttgaaagcattcctcgggttgttttttatcgtgcgcttcctggagagtaactggtttgtctgggtcactcagatgaaccacattcccatgcacatcgaccatgaccgtaatatggattgggtaagtacacaattgcaggccacctgtaatgtccataagagcgcattcaacgactggttctctggtcatcttaacttccagatcgagcaccacctcttccccaccatgcccaggcacaactaccacaaggtggcacctttggtgcaaagcctctgcgccaagcacgggatcgagtaccagtctaaacccctgctatctgcctttgccgacatcatccattccctgaaggagagcggtcagctttggttggatgcctacctgcaccagtag

SEQ ID NO: 176082 - DNA, 1506 bp, Artificial Sequence
  derived and/or modified sequence
atggggacgcgggcagcgcgaccagccggtctgccatgtggcgctgaaaacccagctagacgcaggctggcacttggggctagacagcagatacacagctggtcccctagaacgccctccaccagattgaccgccccagctggcccagcaagaggtgtagcccgacctgcgatggccccagacccggttgctgcagagaccgccgcacagggcccaacaccacgctattttacctgggacgaggtggctcaaagaagcggctgtgaagagagatggctggttatcgaccgtaaagtttacaatatatctgagttcaccaggaggcacccaggcggatccagggttatctcgcactacgctggccaggacgcaacagaccccttcgtggcgtttcacattaataagggcctggtcaagaagtacatgaattccctcttgattggtgaactgagccctgagcaacctagctttgagcccactaaaaataaagagctgacagacgagttccgggaactgcgcgctaccgtcgagcggatgggactgatgaaggccaatcacgtgtttttcctgctgtacttactacacattctgctgctggacggagccgcttggctgacactgtgggtcttcggaacatcattcctgcctttcttgttgtgcgcagtcctcctgagcgccgtacaggctcaggcaggctggcttcagcacgacttcggacacctatctgtctttagtacctctaagtggaatcacttgcttcaccattttgtcattggccacctcaagggcgcacccgcaagttggtggaatcatatgcactttcaacaccatgctaagcccaactgctttagaaaggaccctgacatcaatatgcatccatttttttttgccttggggaaaattctgtcggtggagcttggcaagcagaagaagaagtacatgccttataaccatcagcacaagtacttctttctgattgggcctcccgctctgctgcccctttattttcaatggtacattttctactttgtgattcagagaaaaaaatgggtggacttagcttggatgattaccttttatgtgaggtttttcctaacatacgttccactgctggggctaaaagcattcctgggtctgttcttcatcgtcaggtttctggaatccaactggttcgtgtgggtgactcagatgaatcatatacctatgcacattgaccatgacaggaacatggactgggtgtctacccaattgcaggccacatgtaacgttcataagtccgctttcaacgactggttttctggacatctgaattttcagattgagcaccaccttttccccacaatgcctagacacaattatcataaggtggctcccttagtgcagagtttgtgcgcaaaacatggcatagagtaccagtctaagcccctcctgagcgcctttgctgatatcatccactcactgaaagagtctggacagctgtggcttgatgcttacctccaccaatag

SEQ ID NO: 176083 - DNA, 1506 bp, Artificial Sequence
  derived and/or modified sequence
atgggcaccagagccgccagacccgccggcctgccctgcggcgccgagaaccccgccagaagaagactggccctgggcgccagacagcagatccacagctggagccccagaacccccagcaccagactgaccgcccccgccggccccgccagaggcgtggccagacccgccatggcccccgaccccgtggccgccgagaccgccgcccagggccccacccccagatacttcacctgggacgaggtggcccagagaagcggctgcgaggagagatggctggtgatcgacagaaaggtgtacaacatcagcgagttcaccagaagacaccccggcggcagcagagtgatcagccactacgccggccaggacgccaccgaccccttcgtggccttccacatcaacaagggcctggtgaagaagtacatgaacagcctgctgatcggcgagctgagccccgagcagcccagcttcgagcccaccaagaacaaggagctgaccgacgagttcagagagctgagagccaccgtggagagaatgggcctgatgaaggccaaccacgtgttcttcctgctgtacctgctgcacatcctgctgctggacggcgccgcctggctgaccctgtgggtgttcggcaccagcttcctgcccttcctgctgtgcgccgtgctgctgagcgccgtgcaggcccaggccggctggctgcagcacgacttcggccacctgagcgtgttcagcaccagcaagtggaaccacctgctgcaccacttcgtgatcggccacctgaagggcgcccccgccagctggtggaaccacatgcacttccagcaccacgccaagcccaactgcttcagaaaggaccccgacatcaacatgcaccccttcttcttcgccctgggcaagatcctgagcgtggagctgggcaagcagaagaagaagtacatgccctacaaccaccagcacaagtacttcttcctgatcggcccccccgccctgctgcccctgtacttccagtggtacatcttctacttcgtgatccagagaaagaagtgggtggacctggcctggatgatcaccttctacgtgagattcttcctgacctacgtgcccctgctgggcctgaaggccttcctgggcctgttcttcatcgtgagattcctggagagcaactggttcgtgtgggtgacccagatgaaccacatccccatgcacatcgaccacgacagaaacatggactgggtgagcacccagctgcaggccacctgcaacgtgcacaagagcgccttcaacgactggttcagcggccacctgaacttccagatcgagcaccacctgttccccaccatgcccagacacaactaccacaaggtggcccccctggtgcagagcctgtgcgccaagcacggcatcgagtaccagagcaagcccctgctgagcgccttcgccgacatcatccacagcctgaaggagagcggccagctgtggctggacgcctacctgcaccagtag

SEQ ID NO: 176084 - protein, 753 aa, Artificial Sequence
  derived and/or modified sequence
MMEERAAAAVAAAASSCRPLGSGAGPGPTGAAPVSAPAPGPGPAGKGGGGGGSPGPTAGPEPLSLPGILHFIQHEWARFEAEKARWEAERAELQAQVAFLQGERKGQENLKTDLVRRIKMLEYALKQERAKYHKLKFGTDLNQGEKKADVSEQVSNGPVESVTLENSPLVWKEGRQLLRQYLEEVGYTDTILDMRSKRVRSLLGRSLELNGAVEPSEGAPRAPPGPAGLSGGESLLVKQIEEQIKRNAAGKDGKERLGGSVLGQIPFLQNCEDEDSDEDDELDSVQHKKQRVKLPSKALVPEMEDEDEEDDSEDAINEFDFLGSGEDGEGAPDPRRCTVDGSPHELESRRVKLQGILADLRDVDGLPPKVTGPPPGTPQPRPHEDVFIMDTIGGGEVSLGDLADLTVTNDNDLSCDLSDSKDAFKKTWNPKFTLRSHYDGIRSLAFHHSQSALLTASEDGTLKLWNLQKAVTAKKNAALDVEPIHAFRAHRGPVLAVAMGSNSEYCYSGGADACIHSWKIPDLSMDPYDGYDPSVLSHVLEGHGDAVWGLAFSPTSQRLASCSADGTVRIWDPSSSSPACLCTFPTASEHGVPTSVAFTSTEPAHIVASFRSGDTVLYDMEVGSALLTLESRGSSGPTQINQVVSHPNQPLTITAHDDRGIRFLDNRTGKPVHSMVAHLDAVTCLAVDPNGAFLMSGSHDCSLRLWSLDNKTCVQEITAHRKKHEEAIHAVACHPSKALIASAGADALAKVFV

SEQ ID NO: 176085 - protein, 634 aa, Artificial Sequence
  derived and/or modified sequence
MLEYALKQERAKYHKLKFGTDLNQGEKKADVSEQVSNGPVESVTLENSPLVWKEGRQLLRQYLEEVGYTDTILDMRSKRVRSLLGRSLELNGAVEPSEGAPRAPPGPAGLSGGESLLVKQIEEQIKRNAAGKDGKERLGGSVLGQIPFLQNCEDEDSDEDDELDSVQHKKQRVKLPSKALVPEMEDEDEEDDSEDAINEFDFLGSGEDGEGAPDPRRCTVDGSPHELESRRVKLQGILADLRDVDGLPPKVTGPPPGTPQPRPHEDVFIMDTIGGGEVSLGDLADLTVTNDNDLSCDLSDSKDAFKKTWNPKFTLRSHYDGIRSLAFHHSQSALLTASEDGTLKLWNLQKAVTAKKNAALDVEPIHAFRAHRGPVLAVAMGSNSEYCYSGGADACIHSWKIPDLSMDPYDGYDPSVLSHVLEGHGDAVWGLAFSPTSQRLASCSADGTVRIWDPSSSSPACLCTFPTASEHGVPTSVAFTSTEPAHIVASFRSGDTVLYDMEVGSALLTLESRGSSGPTQINQVVSHPNQPLTITAHDDRGIRFLDNRTGKPVHSMVAHLDAVTCLAVDPNGAFLMSGSHDCSLRLWSLDNKTCVQEITAHRKKHEEAIHAVACHPSKALIASAGADALAKVFV

SEQ ID NO: 176086 - DNA, 1905 bp, Artificial Sequence
  derived and/or modified sequence
atgctggagtacgccctgaagcaggagagagccaagtaccacaagctgaagttcggcaccgacctgaaccagggcgagaagaaggccgacgtgagcgagcaggtgagcaacggccccgtggagagcgtgaccctggagaacagccccctggtgtggaaggagggcagacagctgctgagacagtacctggaggaggtgggctacaccgacaccatcctggacatgagaagcaagagagtgagaagcctgctgggcagaagcctggagctgaacggcgccgtggagcccagcgagggcgcccccagagccccccccggccccgccggcctgagcggcggcgagagcctgctggtgaagcagatcgaggagcagatcaagagaaacgccgccggcaaggacggcaaggagagactgggcggcagcgtgctgggccagatccccttcctgcagaactgcgaggacgaggacagcgacgaggacgacgagctggacagcgtgcagcacaagaagcagagagtgaagctgcccagcaaggccctggtgcccgagatggaggacgaggacgaggaggacgacagcgaggacgccatcaacgagttcgacttcctgggcagcggcgaggacggcgagggcgcccccgaccccagaagatgcaccgtggacggcagcccccacgagctggagagcagaagagtgaagctgcagggcatcctggccgacctgagagacgtggacggcctgccccccaaggtgaccggccccccccccggcaccccccagcccagaccccacgaggacgtgttcatcatggacaccatcggcggcggcgaggtgagcctgggcgacctggccgacctgaccgtgaccaacgacaacgacctgagctgcgacctgagcgacagcaaggacgccttcaagaagacctggaaccccaagttcaccctgagaagccactacgacggcatcagaagcctggccttccaccacagccagagcgccctgctgaccgccagcgaggacggcaccctgaagctgtggaacctgcagaaggccgtgaccgccaagaagaacgccgccctggacgtggagcccatccacgccttcagagcccacagaggccccgtgctggccgtggccatgggcagcaacagcgagtactgctacagcggcggcgccgacgcctgcatccacagctggaagatccccgacctgagcatggacccctacgacggctacgaccccagcgtgctgagccacgtgctggagggccacggcgacgccgtgtggggcctggccttcagccccaccagccagagactggccagctgcagcgccgacggcaccgtgagaatctgggaccccagcagcagcagccccgcctgcctgtgcaccttccccaccgccagcgagcacggcgtgcccaccagcgtggccttcaccagcaccgagcccgcccacatcgtggccagcttcagaagcggcgacaccgtgctgtacgacatggaggtgggcagcgccctgctgaccctggagagcagaggcagcagcggccccacccagatcaaccaggtggtgagccaccccaaccagcccctgaccatcaccgcccacgacgacagaggcatcagattcctggacaacagaaccggcaagcccgtgcacagcatggtggcccacctggacgccgtgacctgcctggccgtggaccccaacggcgccttcctgatgagcggcagccacgactgcagcctgagactgtggagcctggacaacaagacctgcgtgcaggagatcaccgcccacagaaagaagcacgaggaggccatccacgccgtggcctgccaccccagcaaggccctgatcgccagcgccggcgccgacgccctggccaaggtgttcgtgtag

SEQ ID NO: 176087 - DNA, 2262 bp, Artificial Sequence
  derived and/or modified sequence
atgatggaggagagagccgctgcagcagtcgccgcggccgcctcctcctgtcgtccactagggtcgggggccggcccgggccctacaggagcagctcctgtctcggcgcctgcgccaggccccggcccagcggggaaaggtggtggaggcggtggcagtccaggtccgacagccggcccagaacctttatcactgccaggcatccttcattttattcagcatgagtgggctaggttcgaggcggagaaagcacgctgggaggcagagcgtgctgagttgcaggcccaggtcgcgtttctgcagggcgaacgtaagggccaggaaaatctgaaaactgacctggtgaggaggatcaaaatgttagagtacgccctgaaacaggaacgagctaagtatcacaaattaaagttcggaacagatctgaatcaaggcgagaagaaggctgatgtgtcagagcaggtctccaacggcccagtagaatctgtcaccctcgagaatagccctctcgtgtggaaagaagggagacagcttcttcggcagtacctggaggaggtcggatacacggacaccatcctggatatgagaagcaagagggtcagatctcttttaggcagaagtctcgaactgaatggggctgtggaaccatccgaaggggcccctcgagctcctccaggccccgcaggactgtctggaggggaatccctgttggtgaagcagatagaggagcagattaaaagaaatgcggccggaaaagacggaaaggagcggctcggggggagcgtactcggacagattcccttcttgcagaattgtgaagacgaggactctgacgaggatgatgagttagactctgtgcagcataaaaagcagcgagtcaagttgccgtcaaaagctctcgtgcccgagatggaggacgaggatgaggaagacgactctgaagacgccattaacgagttcgatttcctgggatcgggcgaggacggtgagggtgctcctgacccgcggcggtgtactgtggatggaagcccgcacgagctggaatcccgtcgcgttaaactccaggggatcctagctgacttgcgggatgtcgacggcctcccccccaaagtgacaggccctcctcctggtacacctcagccccgccctcacgaagacgtcttcattatggacaccatcggcgggggcgaggtatcactgggagacctggctgatctaacagtcactaacgataacgatctgagctgtgacttatctgattctaaggatgctttcaagaaaacctggaaccccaaatttacactacgcagtcactatgacggaattaggtccctggccttccaccattcccagtcggcccttctgacggcatctgaggacggcactctgaagttgtggaatctgcaaaaagcagtgacagccaaaaagaacgccgctctcgatgtagaaccaatccacgcttttcgcgcacatcgcgggcctgtgttagccgttgccatggggagcaacagcgaatactgctattctggtggggcagacgcatgtatacactcatggaagatacctgacctgagtatggatccttacgacgggtacgatccgtcggtcctcagccacgttctggaggggcatggagacgctgtgtggggacttgcgttttcaccaacaagccagcgacttgctagctgctccgcagacggaaccgtccgcatctgggacccttcctcctcttcgccagcttgtctgtgcacatttcccactgcctctgaacacggcgtgcctaccagcgttgcattcactagcacagaaccagcccacattgtcgcatctttcagatcgggggacactgtgctttatgatatggaagtgggttccgctctgttaacactggagtcccgaggatcgtccggcccgacacagattaatcaggttgtgagccacccaaatcagcccctcacaatcacagcccatgacgacaggggcatacgctttctggacaaccgaaccggcaagcctgttcatagtatggtggcacatctcgatgccgtgacctgtctggctgtggatccaaacggagctttcctgatgtcagggagtcacgattgctcactgaggctgtggtcattagataataagacctgcgtccaggagataactgcccatcgtaaaaaacatgaggaagctatccacgccgtggcatgccatccttctaaggctctgattgcttccgccggtgctgatgcgttagcaaaagtcttcgtatag

SEQ ID NO: 176088 - DNA, 1905 bp, Artificial Sequence
  derived and/or modified sequence
atgctagaatatgcgctgaaacaggagcgcgccaagtatcacaagctaaagtttgggaccgatttgaatcaaggcgagaagaaagccgacgtttctgagcaagtctctaacgggccagtggagagtgttactcttgaaaactcccccctcgtgtggaaagaggggagacaactactcagacagtacttggaagaggtgggatacactgataccatcttggatatgcgttcaaaacgcgtgagaagcctgctgggtaggagcttggaactcaacggcgcagtggaaccctcagaaggtgcccctagagcccccccagggcccgctggactgtcggggggagagagcttactagtcaagcagattgaagagcagattaaacggaacgccgcggggaaggacggaaaggagaggctgggagggtcagttctcgggcaaatcccatttttacagaattgcgaggatgaggatagtgatgaagacgatgagttggactcggtacagcataagaagcaaagagtgaaactgccttcaaaggctttggtgccagagatggaggacgaggatgaggaggacgactctgaagacgccatcaacgagttcgacttcctcggatcaggggaggacggagagggtgcacctgatccacgtaggtgtaccgtagacgggagcccacacgaactggaatcgcggagggtgaaactacagggcatacttgccgaccttagagatgtggacggcctaccacccaaagtgacagggccaccacctgggaccccacaaccgcgcccccacgaagatgtctttattatggacaccatcggcggcggcgaagtgtccttgggagatcttgcggatctgacggtcaccaatgataacgatctgtcttgtgacctgagcgatagcaaagatgcctttaagaagacttggaatccaaagttcacactgagaagtcattatgatggtatcaggtctcttgcctttcatcacagccagtctgctctgctcactgcctctgaggacgggaccttgaaattatggaatctgcaaaaagccgtcacagccaagaagaatgccgctctcgatgtcgaacccattcacgccttcagggcccacaggggccccgtgctggctgtcgcgatgggatcaaactccgagtactgctattctggcggggccgacgcatgcattcactcctggaaaatccctgacctttccatggacccgtacgacggttacgatccctcggtgctcagccacgtgctcgagggtcacggggacgctgtgtggggactggccttctcccctaccagtcagaggctcgctagctgcagcgctgacgggacagtccgcatatgggaccctagctctagctctcccgcctgtttgtgtacgttccccacagccagcgagcatggggtgccaactagcgtagccttcacaagtactgagccagctcacatcgtcgcatcatttagatctggtgatactgtgttatacgacatggaggtggggtcagcactgctgacactggagtctagagggtctagcggcccaactcaaattaaccaggtcgtgtctcacccaaatcaacctctgactatcacagcacatgacgaccgcggcatccgattcctcgacaacagaaccgggaaaccagtgcactccatggttgcccacctagacgccgtcacatgtctggctgtcgacccaaatggcgccttcttaatgtcaggctcacacgactgctctctgcgactctggagtctggataataaaacttgtgtacaagaaatcacggctcatagaaaaaagcacgaggaagctatccacgcagtggcttgccacccctccaaagccctcatcgcaagcgctggagccgatgctctcgccaaggtgttcgtctag

SEQ ID NO: 176089 - DNA, 2262 bp, Artificial Sequence
  derived and/or modified sequence
atgatggaggagagagctgctgctgctgtggccgctgctgccagcagctgccggcccctgggcagcggggccggccctggccccactggagctgcccctgtgtctgccccagcccctggccctggccctgctgggaagggcggcggcggcggcggcagccctggccccacagctggccctgagcccctgagcctgcccggcatcctgcacttcatccagcacgagtgggccaggtttgaagctgagaaggcccgctgggaggccgagagagctgagctgcaggcccaggtggccttcctgcagggcgagaggaagggccaggagaacctgaagacagacctggtgcggcgcatcaagatgctggagtatgccctgaagcaggagcgggccaagtaccacaagctgaagtttggaacagacctgaaccagggcgagaagaaggcagatgtgtctgagcaggtgtccaatggacctgtggagagcgtgaccctggagaacagccccctggtgtggaaggagggccggcagctgctgcggcagtacctggaggaggtgggctacacagacaccatcctggacatgaggagcaagagggtgcgcagcctgctgggccgcagcctggagctgaatggagctgtggagcccagcgagggcgccccccgggcccctcctggccctgctggcctgagcggcggggagagcctgctggtgaagcagatcgaggagcagatcaagagaaatgctgctgggaaggatggcaaggagcggctgggcggctctgtgctgggccagatccccttcctgcagaactgtgaagatgaggacagtgatgaagatgatgagctggacagcgtgcagcacaagaagcagagggtgaagctgcccagcaaggccctggtgcctgagatggaggatgaagatgaagaagatgacagtgaagatgccatcaatgaatttgacttcctgggcagcggggaggatggagagggcgccccagacccccggcgctgcaccgtggatggcagcccccatgagctggagagcagaagagtgaagctgcagggcatcctggccgacctgagagatgtggatggcctgccccccaaggtgactggacctcctcctggcaccccccagccccggccccatgaagatgtgttcatcatggacaccatcggcggcggggaggtgtccctgggggacctggccgacctgactgtgaccaatgacaatgacctgagctgtgacctgagtgacagcaaggatgccttcaagaagacctggaaccccaagttcaccctgcggagccactatgatggcatccgcagcctggccttccaccacagccagagcgccctgctgacagcctctgaagatggcaccctgaagctgtggaacctgcagaaggctgtgacagccaagaagaatgctgccctggatgtggagcccatccacgccttccgggcccaccggggccctgtgctggccgtggccatgggcagcaacagcgagtactgctacagcggcggcgcagatgcctgcatccacagctggaagatcccagacctgtccatggacccctatgatggctatgaccccagcgtgctgagccacgtgctggagggccatggagatgctgtgtggggcctggccttcagccccaccagccagaggctggccagctgcagcgcagatggcaccgtgcgcatctgggaccccagcagcagcagccctgcctgcctgtgcaccttccccacagccagcgagcacggcgtgcccacctctgtggccttcaccagcacagagcccgcccacatcgtggccagcttccgcagcggggacacagtgctgtatgacatggaggtgggcagcgccctgctgaccctggagagccggggcagcagcggccccacccagatcaaccaggtggtgagccaccccaaccagcccctgaccatcacagcccatgatgaccggggcatccgcttcctggacaacagaacaggcaagcctgtgcacagcatggtggcccacctggatgctgtgacctgcctggccgtggaccccaacggggccttcctgatgagcggcagccatgactgcagcctgcggctgtggagcctggacaacaagacctgtgtgcaggagatcacagcccacaggaagaagcatgaggaggccatccatgctgtggcctgccaccccagcaaggccctgattgccagcgctggagcagatgccctggccaaggtgtttgtgtag

SEQ ID NO: 176090 - DNA, 1905 bp, Artificial Sequence
  derived and/or modified sequence
atgctggagtatgccctgaagcaggagcgggccaagtaccacaagctgaagtttggaacagacctgaaccagggcgagaagaaggcagatgtgtctgagcaggtgtccaatggacctgtggagagcgtgaccctggagaacagccccctggtgtggaaggagggccggcagctgctgcggcagtacctggaggaggtgggctacacagacaccatcctggacatgaggagcaagagggtgcgcagcctgctgggccgcagcctggagctgaatggagctgtggagcccagcgagggcgccccccgggcccctcctggccctgctggcctgtctggaggagagagcctgctggtgaagcagatcgaggagcagatcaagagaaatgctgctgggaaggatggcaaggagcggctgggcggctctgtgctgggccagatccccttcctgcagaactgtgaagatgaagattctgatgaagatgatgagctggacagcgtgcagcacaagaagcagagggtgaagctgcccagcaaggccctggtgcctgagatggaggatgaagatgaggaggatgattctgaagatgccatcaatgaatttgacttcctgggcagcggagaagatggagagggcgccccagacccccggcgctgcaccgtggatggcagcccccatgagctggagagccggcgggtgaagctgcagggcatcctggccgacctgagagatgtggatggcctgccccccaaggtgacaggccccccacctggcaccccccagccccggccccatgaagatgtgttcatcatggacaccatcggcggcggggaggtgtccctgggggacctggccgacctgactgtgaccaatgacaatgacctgagctgtgacctgagtgacagcaaggatgccttcaagaagacctggaaccccaagttcaccctgcggagccactatgatggcatccgcagcctggccttccaccacagccagagcgccctgctgacagcctctgaagatggcaccctgaagctgtggaacctgcagaaggctgtgacagccaagaagaatgctgccctggatgtggagcccatccacgccttccgggcccaccggggccctgtgctggccgtggccatgggcagcaacagcgagtactgctacagcggcggcgcagatgcctgcatccacagctggaagatcccagacctgtccatggacccctatgatggctatgaccccagcgtgctgagccacgtgctggagggccatggagatgctgtgtggggcctggccttcagccccaccagccagaggctggccagctgcagcgcagatggcaccgtgcgcatctgggaccccagcagcagcagccctgcctgcctgtgcaccttccccacagccagcgagcacggcgtgcccacctctgtggccttcaccagcacagagcccgcccacatcgtggccagcttccgcagcggggacacagtgctgtatgacatggaggtgggcagcgccctgctgaccctggagagccggggcagcagcggccccacccagatcaaccaggtggtgagccaccccaaccagcccctgaccatcacagcccatgatgaccggggcatccgcttcctggacaacagaacaggcaagcctgtgcacagcatggtggcccacctggatgctgtgacctgcctggccgtggaccccaatggagccttcctgatgagcggcagccatgactgcagcctgcggctgtggagcctggacaacaagacctgtgtgcaggagatcacagcccacaggaagaagcatgaggaggccatccatgctgtggcctgccaccccagcaaggccctgattgccagcgctggagcagatgccctggccaaggtgtttgtgtag

SEQ ID NO: 176091 - DNA, 2262 bp, Artificial Sequence
  derived and/or modified sequence
atgatggaggagcgggccgccgccgccgtggccgccgccgccagctcatgtaggccactgggctcaggggctggacccggtcccaccggggcggcccccgtcagtgctcccgccccggggccggggccggcgggaaaggggggtggtggaggtggctcacctggacctaccgcagggccagagcctctttccctaccaggcattttgcacttcatccaacacgagtgggcgcgttttgaggcagagaaggcccggtgggaagctgagcgtgctgaactccaggctcaggtggcgttcttgcagggcgaaaggaaaggacaggaaaacctgaaaactgacctggtgcgaagaattaagatgctggagtacgctctcaaacaggaaagggccaagtaccacaagctgaagttcgggacagacttgaaccaaggtgagaagaaggctgatgtgtccgagcaggtgtctaatggccccgtcgaatccgtgacactcgaaaattcacccctcgtctggaaggaaggaaggcagctgctgcgccagtaccttgaggaagtcggttataccgataccatactcgatatgcgctctaaaagggtcagaagtctcctgggaagatccctagaactcaacggtgcagtggagccctccgagggcgccccaagggctccccctgggccagccggcctgagtggcggcgagagtctgctcgtcaagcagatagaagagcagataaagagaaatgccgctgggaaggacggcaaagagcggctcggaggctccgtactgggccagatccctttcctccagaattgcgaggatgaggatagtgatgaggatgacgagctggattccgtccagcacaagaagcagagagtgaagttgccttcgaaggccctcgtgcccgaaatggaagacgaagatgaagaagacgactcagaagacgctatcaatgaatttgactttcttggctctggagaggatggggagggggctcccgacccaaggcgctgtactgtagacgggtcacctcatgagttggagtcacgacgtgtaaaactgcagggtatcctcgccgacttgcgggacgtggacggtctgcctcctaaggtaacaggtccgccaccgggtacaccccagccacgtccacatgaagacgtgttcataatggatactatcgggggaggagaagttagtctgggggatcttgcagatctcactgtgaccaatgataacgaccttagctgtgatctgagtgacagcaaagacgctttcaagaagacctggaaccccaagttcaccctgaggtcccactacgacggaatccgatcactggcctttcaccacagccagagcgcgctgctgacagccagcgaggatggcacgctgaagttgtggaacctgcagaaggcagtcacagccaaaaagaacgctgctctggatgtggaacccattcacgccttcagagcgcacagggggcccgtgttggccgttgcaatgggatcaaactccgagtactgttacagcggtggtgccgacgcttgtatccactcttggaagatccccgatctgtcgatggatccttacgacggatatgatcctagtgtgttgtctcacgtccttgaaggccatggtgatgccgtgtggggcctagcctttagcccaacctcacaacgtctcgcttcctgcagcgctgacggcacagtgcggatttgggacccatcttccagttcaccagcctgtttgtgtactttcccgacagcctcggaacacggcgttcctacgtcggttgccttcacgtctactgagcctgctcacatagtggcttcctttaggtccggcgacacggtcctttacgatatggaggtgggaagcgcactgcttactctcgaatctcgaggcagcagtggacccacccaaatcaaccaggtggtctcccaccctaaccagccacttacgataacagctcatgatgacagaggcattaggttcctggataaccgcactggtaagccggtgcattctatggttgcccatctggacgctgtgacctgtcttgctgtggacccaaatggggcattcctgatgagtggaagccacgattgttcgctgcgcctgtggtcactcgacaacaaaacttgcgtccaggagataaccgcccatcggaaaaagcatgaagaagcaatccatgccgtcgcatgtcatcccagcaaagcgctcatagcgtcagcgggtgccgatgccctcgccaaagtttttgtgtag

SEQ ID NO: 176092 - DNA, 1905 bp, Artificial Sequence
  derived and/or modified sequence
atgctggagtacgccctgaagcaggagcgggccaagtaccacaagttgaaattcggcacagacctgaaccagggagaaaagaaagcagacgtttcagaacaggtgagcaacggacctgtggagagtgtgacattggaaaactctccattagtctggaaagagggccgccagctgctccggcagtacctggaagaggtgggttacactgacactatactagatatgagatccaaacgagtgcgcagccttttaggcagaagcttagaacttaatggagccgtggagccctctgagggcgctccacgtgccccaccaggcccggctggtctaagcggtggggaaagcctgctggtcaaacagattgaggaacagataaagcgaaatgcagccggcaaagatggcaaggaacgtttggggggcagtgtgttaggacaaatcccatttctccagaattgcgaggatgaggactccgacgaggatgacgaactcgattctgtgcagcataaaaagcagcgagtaaagttgccatcaaaagccctggttccggaaatggaggatgaggacgaagaagacgattctgaggatgccatcaatgaatttgattttttgggatcaggcgaggacggggagggtgctcctgacccacggaggtgtaccgtggatggcagcccgcacgaactagaatctcgccgggtaaaactgcagggcatcctggccgacctgagggatgttgacggcctgcctccgaaagtgacaggcccgcctcctgggacaccccaaccaagacctcatgaagatgtgttcatcatggacacgattggcggcggtgaggtgtcactgggcgacttggctgatttgaccgtcactaatgataacgacctcagttgcgacctgtccgattcgaaagacgcgttcaagaagacatggaacccaaagttcacactgagatcacattatgatggtattcgatctctcgcttttcatcacagtcagtcagcactgttgacagcctcagaagacggcaccctaaagttgtggaatctccagaaagctgtgacagcgaaaaagaatgccgccttggatgtcgaaccgatccacgctttcagagcccatcgagggcccgtgctggccgtcgcaatgggaagcaatagcgagtactgctactcaggcggagctgatgcatgcattcactcttggaagatcccagatctgagcatggacccctacgacggctacgaccccagcgtgctctcccacgtcttagaaggccatggggatgccgtctggggcttggccttctccccaactagccagcgactggcatcttgttctgccgatggtacagtgagaatctgggacccctcgtcttcttcccccgcttgtctctgcaccttccccacggctagtgagcacggcgtgcccacctccgtggcttttacaagtacggaacccgctcatattgtagcttcttttcgctccggcgacacagtgctgtatgacatggaagtcggaagtgccctgttgactctcgagagtagagggagtagcggccccactcaaattaatcaagttgtcagtcacccgaatcagcctctgaccataaccgcccacgatgatagggggatcagattcctggataatcggaccggcaaacccgtgcactctatggtggctcatctggatgctgtgacttgcctggctgtagacccaaacggggcttttctaatgagcggttctcatgattgctcactccggctgtggagtctagataataaaacatgcgtgcaagagataactgcccatcgcaagaagcacgaggaggcaatccacgcagtcgcatgccacccctcaaaggctttaatcgcctcagccggcgcggatgctcttgccaaggtttttgtttag

SEQ ID NO: 176093 - DNA, 2262 bp, Artificial Sequence
  derived and/or modified sequence
atgatggaggaaagagcggctgcagcagtggctgccgctgcctcttcttgtcggccattaggatctggagccggtcccggaccgaccggcgctgccccagtctccgcacccgctcccggacctggtcctgccggaaagggaggagggggagggggtagcccaggaccgaccgcgggacctgaacccctgtcactgccaggaatcctgcattttatacagcatgaatgggcccgatttgaggcagaaaaagcaagatgggaggctgagcgcgctgaattgcaggcccaagttgcattcctgcagggcgagcgtaagggacaggagaacctcaaaaccgatctggtccggaggattaaaatgttggagtatgccttaaaacaggaaagagcgaagtaccacaaactgaagttcggcaccgacctcaatcagggtgagaaaaaagccgacgtatccgagcaggtttccaatggtcctgtggagagtgtgaccctcgagaactcccccctcgtgtggaaagaggggaggcagctccttcgccagtatttagaggaagtgggctataccgatacaattctcgacatgcggagcaagcgagtcaggagtctgctgggtcgaagcttggagctgaatggagcagtcgagccctccgaaggagctccccgtgcccctcccggtcccgcaggcctctctggaggcgaaagcctacttgtgaaacaaatcgaggagcagataaaacggaatgccgctgggaaagacggaaaggaacgattaggtggttcagtgctggggcagattccatttctgcagaattgcgaagacgaggacagcgacgaagacgacgagctggacagtgtgcagcataagaaacagagagtgaaactgcctagtaaggctctggtaccagagatggaggacgaagatgaagaggatgacagcgaggacgcgatcaacgaatttgactttttagggtctggggaagatggagaaggagcacccgatccgagaaggtgtacagtggatggtagcccacatgagctggagagccgcagagtcaaactccagggcatcctcgccgacctgcgggacgtggatggtctcccaccaaaagtcacaggcccacccccaggaacgcctcagcctcgtccacacgaagacgtctttattatggacaccatcggaggtggcgaagtgtctctgggggacctcgcagatctcaccgtaaccaatgataacgacttgtcttgtgacctgtctgactccaaggacgcctttaaaaagacatggaaccctaagtttaccctgcgttcccactacgacggtattcgctctttagcctttcatcattcacaatccgcacttctgaccgcgtccgaggacgggaccctgaagctctggaatcttcagaaagccgtaaccgcaaaaaagaacgccgctctagatgttgagcccatccacgcattcagagctcacaggggccctgtgctggcagtggctatgggctcaaacagcgaatactgttattctggcggagcagatgcctgtatccatagctggaaaatcccagatctgagtatggatccttacgacggatacgacccctccgtgctgtcacatgtgctggaaggtcatggagacgccgtatggggtctggcattttctcccacaagtcagcgcctggccagttgttccgcagacggaaccgtgcggatctgggacccctcttcttccagcccagcttgtttgtgtactttcccgactgcttcagaacacggagtgccgacctcagtagccttcacctccaccgaaccggctcacattgtagcttccttccgttctggggatactgtgctgtatgatatggaggttgggagtgccttgctcactcttgagtccagagggagcagtgggcctactcagattaatcaagtcgtttcacacccaaatcaaccactcaccatcacagctcacgacgatcgcggaataagatttctggataaccgtaccggcaagcctgtgcattcgatggtcgctcacctggatgcggtgacttgcctcgctgtagatcctaacggggcatttctgatgagcggaagccatgactgctccttgcgcctctggagtctcgacaataagacctgcgtgcaagagataacagcgcacagaaaaaaacatgaggaagctatccacgccgtggcctgccaccccagcaaggccctgatagcaagtgccggtgctgacgccctggctaaggttttcgtttag

SEQ ID NO: 176094 - DNA, 1905 bp, Artificial Sequence
  derived and/or modified sequence
atgcttgaatacgccctgaagcaagaacgggctaaatatcacaaactgaaattcggaactgacttaaaccaaggcgagaagaaggcagacgtttctgaacaggtgtcaaatgggccagtagagtctgtcacattggagaattctcccttagtgtggaaagagggtaggcaattgctacgccagtatcttgaagaggtggggtacaccgataccattttggatatgagatctaagcgggtgagaagcctccttggacgttccctggagctgaatggtgctgtcgagccttcggaaggagcccctcgggctccccctggccctgcaggcctatcggggggtgaatccctcctcgtcaaacagatcgaggagcagatcaagcgcaacgccgctggcaaagacggtaaggaacgcctgggcggatctgtcctgggacagatcccattcctccaaaactgcgaggatgaagattctgacgaggatgatgaactcgacagtgtccagcataaaaaacagagggttaaactaccctccaaggctctggtgccggagatggaggacgaggatgaagaagacgattcggaggacgccatcaatgagtttgacttcttagggtcaggggaagacggagaaggcgctcccgacccaaggagatgtaccgtggacggctcgccgcatgagctcgaaagccgcagagtgaaattgcaggggatcctcgctgatttgagagacgtggatgggctgcctcccaaagtcacagggcctcccccaggcaccccgcaacccagaccccacgaggacgttttcattatggacacaattggaggtggagaagttagcttgggcgacttggccgacctgacagtcaccaacgacaacgatctgagttgtgatctgagtgatagcaaggatgcatttaagaagacttggaatcctaaatttactttgagatctcattatgacggaattaggtcattagccttccaccattctcagtctgcactgctgaccgcctcagaggacgggactctcaaactgtggaatctgcaaaaggcagtgaccgccaagaagaatgcggcactcgatgtggagcctatacacgcatttcgcgcacaccgtggcccagtgctggctgtagccatggggtctaacagcgagtattgctactcaggaggagccgatgcctgcatacactcctggaagatcccagacctgtccatggatccatacgacggttatgatccttcagtgctgagtcacgttttggagggtcacggcgatgccgtttggggcctggccttcagccctacatcacagcgactggctagttgcagtgcggatggcaccgtgagaatctgggacccttctagtagctctccagcttgtctgtgcacctttccaactgcatcagaacacggagtgcccacctcagtggcgttcacgagtacagagcctgcacatatcgtggcttcttttcgcagtggagatacagtgttgtacgacatggaagtgggttctgctttattgactttagagagtcggggatcctctggacccacacaaattaatcaggtagtctcccaccctaaccagcctctgaccatcactgcccatgacgaccggggtatccggttcctcgacaaccggacaggaaagcctgtacactccatggtggcacatctcgacgcagtgacctgtctggcagtggatccaaatggagccttcctgatgagcgggagccacgactgttccctacgactatggtccctagacaataagacatgtgtgcaagagattactgcccatcgcaaaaagcacgaagaagctattcacgcggttgcatgtcacccttcaaaagcactaatcgcttctgcaggcgctgacgcactggctaaagtcttcgtgtag

SEQ ID NO: 176095 - DNA, 3187 bp, Artificial Sequence
  derived and/or modified sequence
acagcgggcgcgcaggccggccccggggcctccatgatggaggagcgagcggccgccgcggtcgccgccgccgcctcctcctgccgtccgctcggctcaggcgcgggccctggccccactggggcggccccggtctccgcccctgcccccgggccgggcccggcaggtaagggaggcggcggcggaggcagccccgggcccacggcgggcccggagcccctgagcctgccggggatcctgcactttatccagcacgagtgggcgcgcttcgaagccgagaaagcccgctgggaggccgagcgcgccgagttacaggctcaggtggccttccttcagggagagaggaaagggcaggagaatctaaagacggacctggtgcggcggatcaagatgctagagtatgcgctgaagcaggaaagggccaaatatcataaactgaagtttgggacagacctgaaccagggggagaagaaagcagatgtgtcagaacaagtctccaatggccccgtggaatcggtcaccctggagaacagcccgttggtgtggaaggaggggcggcagcttctccgacagtacctggaagaggtgggctacacagacaccatcctcgacatgcggtccaagcgcgtccgttccctgctgggccgctcgctggagctcaacggggcagtggagccgagtgaaggggcccccagggctccaccaggccctgcagggctcagtggtggggagtcgctgctggtgaaacagatcgaggagcagataaagaggaacgcggcaggcaaagatggcaaagagcgcttgggcggctcagtgctggggcagatccccttcctgcagaactgcgaggacgaagacagcgacgaggacgatgagctggacagcgtgcagcacaagaagcagcgtgtgaagctcccatccaaggctctggtgcccgaaatggaagacgaggatgaggaagacgactctgaggatgctatcaatgagtttgatttcctgggctcaggagaggatggggaaggggctccagaccctcggcggtgcactgtggatgggagcccccatgagctggaaagccgtcgggtcaaactccaaggcattctggctgacctgcgggatgtggatgggctgcccccaaaagtgactggcccgcctcctggcacaccccagccccggccacatgaagacgtcttcatcatggacactatcgggggcggggaggtgagcctgggggacttggcagatctcaccgtcaccaacgacaacgacctcagctgcgatctgtctgacagcaaagatgcttttaagaagacgtggaaccccaagttcaccctgcgctcgcactacgacggcattcgttccctggccttccaccacagccagtcggctctgctcaccgcctccgaggacggcacgctcaagctctggaacctgcagaaggcggtcacggccaagaagaatgcggcgctagatgtggaacctatacatgctttccgggctcacaggggcccagtgttggctgtggctatgggcagcaacagtgaatactgctacagtggcggggcagatgcctgcatccatagttggaagattccagacctcagcatggatccctatgatggctacgacccaagcgtgctgagccacgtcctggagggccacggggacgccgtgtggggcctggccttcagtcccacctcccagcgcctggcctcctgttctgctgatggcaccgtccgcatctgggaccccagcagcagcagcccggcctgcctctgcaccttccccacagccagcgagcacggggtccccacctcagtggccttcaccagcaccgagcctgcccacatcgtggcctccttccgctctggcgacaccgtcttgtatgacatggaggttggcagtgccctcctcacgctggagtcccggggcagcagcggtccaacccagatcaaccaagtggtgagtcatccaaaccagcctctcaccatcaccgcccacgacgacaggggcatccgcttcctggacaatcggacaggtaagccggtgcactccatggttgcacacctggacgcagtcacctgcctagccgtggaccccaacggcgcattcctgatgtcaggaagccatgactgctccctgcgtctctggagcctggacaacaaaacgtgcgtgcaggagatcacggcccaccgcaagaagcacgaggaggccatccacgctgttgcctgccaccccagcaaggccctcattgccagtgctggcgctgatgccctggccaaggtcttcgtatgatgcccacctggccctgccctggccgccacgctggctggggtgtagggccgggcaggtggggctgaggggactcccagcctcgctggaggtgcagaggcctggcctctgtctgtttgccatggagcctggtggtgctaacggccctttccccaggaatccctccccaacggctgccttccccaagcatccagcctggggatgggcccctttcaggaatcacccccgaggatggcctcggggtttccccctgtgccctgacagccgctcctggtatcagagctgctttccagagggcagcacagccagggccgggtgtctttagggatcagtttttccaagactccagaaggtgccaggttctccccttgagctcctgctcccccatcccccatcctcccagacctgggcaggagctgtgctgggagaaagggtggcagccgggagcctcagagctgagccccggcctggctgcccctcccctccggccctctccactgctttccagacactaaccaaggcttccaggccagggattgcccaacactcctagggcagccctcccagcgccccatggggtcgcccatgggtagagacggctttcttgtgcccctccctggggcatggagggtggagtgggcctcgggtccccctgaactccctgtatatctgtataaataacgggattttcatggcgccgccccacccgcattatcactgtgtgatggtctcagtcagtctcctccctgtctccactctttccctctatttatttcactctcttgtttggttctaccctgcaccctcggtccccttccaggttcctgtttataagccccaacccctctgtccccatcttgtatgtgaaaacttgtctcaataaaccctttggagt

SEQ ID NO: 176096 - DNA, 2608 bp, Artificial Sequence
  derived and/or modified sequence
accttagcaaccttctcctggtgcagagtcctaagaggtttggggctccataaccacaaaggtggaagcgaggggaaggctgctccccaccacctcgcccccaccgctggggaagggttaccatgacaaccaacctggccggcaatcagagaggatggggccactgctggtcgccctttctctcagagtaaaagtaattgtccaggagagtggtgtttgggtgtggaagggcacgagtgggcgcgcttcgaagccgagaaagcccgctgggaggccgagcgcgccgagttacaggctcaggtggccttccttcagggagagaggaaagggcaggagaatctaaagacggacctggtgcggcggatcaagatgctagagtatgcgctgaagcaggaaagggccaaatatcataaactgaagtttgggacagacctgaaccagggggagaagaaagcagatgtgtcagaacaagtctccaatggccccgtggaatcggtcaccctggagaacagcccgttggtgtggaaggaggggcggcagcttctccgacagtacctggaagaggtgggctacacagacaccatcctcgacatgcggtccaagcgcgtccgttccctgctgggccgctcgctggagctcaacggggcagtggagccgagtgaaggggcccccagggctccaccaggccctgcagggctcagtggtggggagtcgctgctggtgaaacagatcgaggagcagataaagaggaacgcggcaggcaaagatggcaaagagcgcttgggcggctcagtgctggggcagatccccttcctgcagaactgcgaggacgaagacagcgacgaggacgatgagctggacagcgtgcagcacaagaagcagcgtgtgaagctcccatccaaggctctggtgcccgaaatggaagacgaggatgaggaagacgactctgaggatgctatcaatgagtttgatttcctgggctcaggagaggatggggaaggggctccagaccctcggcggtgcactgtggatgggagcccccatgagctggaaagccgtcgggtcaaactccaaggcattctggctgacctgcgggatgtggatgggctgcccccaaaagtgactggcccgcctcctggcacaccccagccccggccacatgaagacgtcttcatcatggacactatcgggggcggggaggtgagcctgggggacttggcagatctcaccgtcaccaacgacaacgacctcagctgcgatctgtctgacagcaaagatgcttttaagaagacgtggaaccccaagttcaccctgcgctcgcactacgacggcattcgttccctggccttccaccacagccagtcggctctgctcaccgcctccgaggacggcacgctcaagctctggaacctgcagaaggcggtcacggccaagaagaatgcggcgctagatgtggaacctatacatgctttccgggctcacaggggcccagtgttggctgtggctatgggcagcaacagtgaatactgctacagtggcggggcagatgcctgcatccatagttggaagattccagacctcagcatggatccctatgatggctacgacccaagcgtgctgagccacgtcctggagggccacggggacgccgtgtggggcctggccttcagtcccacctcccagcgcctggcctcctgttctgctgatggcaccgtccgcatctgggaccccagcagcagcagcccggcctgcctctgcaccttccccacagccagcgagcacggggtccccacctcagtggccttcaccagcaccgagcctgcccacatcgtggcctccttccgctctggcgacaccgtcttgtatgacatggaggttggcagtgccctcctcacgctggagtcccggggcagcagcggtccaacccagatcaaccaagtggtgagtcatccaaaccagcctctcaccatcaccgcccacgacgacaggggcatccgcttcctggacaatcggacaggtaagccggtgcactccatggttgcacacctggacgcagtcacctgcctagccgtggaccccaacggcgcattcctgatgtcaggaagccatgactgctccctgcgtctctggagcctggacaacaaaacgtgcgtgcaggagatcacggcccaccgcaagaagcacgaggaggccatccacgctgttgcctgccaccccagcaaggccctcattgccagtgctggcgctgatgccctggccaaggtcttcgtatgatgcccacctggccctgccctggccgccacgctggctggggtgtagggccgggcaggtggggctgaggggactcccagcctcgctggaggtgcagaggcctggcctctgtctgtttgccatggagcctggtggtgctaacggccctttccccaggaatccctccccaacggctgccttccccaagcatccagcctggggatgggcccctttcaggaatcacccccgaggatggcctcggggtttccccctgtgccctgacagccgctcctggtatcagagctgctttccagagggcagcacagccagggccgggtgtctttagggatcagttttt

SEQ ID NO: 176097 - DNA, 2262 bp, Artificial Sequence
  derived and/or modified sequence
atgatggaggagagagccgccgccgccgtggccgccgccgccagcagctgcagacccctgggcagcggcgccggccccggccccaccggcgccgcccccgtgagcgcccccgcccccggccccggccccgccggcaagggcggcggcggcggcggcagccccggccccaccgccggccccgagcccctgagcctgcccggcatcctgcacttcatccagcacgagtgggccagattcgaggccgagaaggccagatgggaggccgagagagccgagctgcaggcccaggtggccttcctgcagggcgagagaaagggccaggagaacctgaagaccgacctggtgagaagaatcaagatgctggagtacgccctgaagcaggagagagccaagtaccacaagctgaagttcggcaccgacctgaaccagggcgagaagaaggccgacgtgagcgagcaggtgagcaacggccccgtggagagcgtgaccctggagaacagccccctggtgtggaaggagggcagacagctgctgagacagtacctggaggaggtgggctacaccgacaccatcctggacatgagaagcaagagagtgagaagcctgctgggcagaagcctggagctgaacggcgccgtggagcccagcgagggcgcccccagagccccccccggccccgccggcctgagcggcggcgagagcctgctggtgaagcagatcgaggagcagatcaagagaaacgccgccggcaaggacggcaaggagagactgggcggcagcgtgctgggccagatccccttcctgcagaactgcgaggacgaggacagcgacgaggacgacgagctggacagcgtgcagcacaagaagcagagagtgaagctgcccagcaaggccctggtgcccgagatggaggacgaggacgaggaggacgacagcgaggacgccatcaacgagttcgacttcctgggcagcggcgaggacggcgagggcgcccccgaccccagaagatgcaccgtggacggcagcccccacgagctggagagcagaagagtgaagctgcagggcatcctggccgacctgagagacgtggacggcctgccccccaaggtgaccggccccccccccggcaccccccagcccagaccccacgaggacgtgttcatcatggacaccatcggcggcggcgaggtgagcctgggcgacctggccgacctgaccgtgaccaacgacaacgacctgagctgcgacctgagcgacagcaaggacgccttcaagaagacctggaaccccaagttcaccctgagaagccactacgacggcatcagaagcctggccttccaccacagccagagcgccctgctgaccgccagcgaggacggcaccctgaagctgtggaacctgcagaaggccgtgaccgccaagaagaacgccgccctggacgtggagcccatccacgccttcagagcccacagaggccccgtgctggccgtggccatgggcagcaacagcgagtactgctacagcggcggcgccgacgcctgcatccacagctggaagatccccgacctgagcatggacccctacgacggctacgaccccagcgtgctgagccacgtgctggagggccacggcgacgccgtgtggggcctggccttcagccccaccagccagagactggccagctgcagcgccgacggcaccgtgagaatctgggaccccagcagcagcagccccgcctgcctgtgcaccttccccaccgccagcgagcacggcgtgcccaccagcgtggccttcaccagcaccgagcccgcccacatcgtggccagcttcagaagcggcgacaccgtgctgtacgacatggaggtgggcagcgccctgctgaccctggagagcagaggcagcagcggccccacccagatcaaccaggtggtgagccaccccaaccagcccctgaccatcaccgcccacgacgacagaggcatcagattcctggacaacagaaccggcaagcccgtgcacagcatggtggcccacctggacgccgtgacctgcctggccgtggaccccaacggcgccttcctgatgagcggcagccacgactgcagcctgagactgtggagcctggacaacaagacctgcgtgcaggagatcaccgcccacagaaagaagcacgaggaggccatccacgccgtggcctgccaccccagcaaggccctgatcgccagcgccggcgccgacgccctggccaaggtgttcgtgtag

SEQ ID NO: 176098 - protein, 322 aa, Artificial Sequence
  derived and/or modified sequence
MEGSLEREAPAGALAAVLKHSSTLPPESTQVRGYDFNRGVNYRALLEAFGTTGFQATNFGRAVQQVNAMIEKKLEPLSQDEDQHADLTQSRRPLTSCTIFLGYTSNLISSGIRETIRYLVQHNMVDVLVTTAGGVEEDLIKCLAPTYLGEFSLRGKELRENGINRIGNLLVPNENYCKFEDWLMPILDQMVMEQNTEGVKWTPSKMIARLGKEINNPESVYYWAQKNHIPVFSPALTDGSLGDMIFFHSYKNPGLVLDIVEAQEFDGSDSGARPDEAVSWGKIRVDAQPVKVYADASLVFPLLVAETFAQKMDAFMHEKNED

SEQ ID NO: 176099 - DNA, 969 bp, Artificial Sequence
  derived and/or modified sequence
atggagggcagtttggaaagagaggcaccagccggagcacttgccgccgtgttaaagcactcttcaacccttccccctgagagtacacaagtcagaggctatgacttcaataggggtgttaactatcgagcactgctagaggccttcggcactaccggttttcaagccacgaattttggccgggcagtacagcaagtaaatgctatgatagagaagaagctggaaccgctctcccaagatgaggaccaacacgctgaccttacgcaaagccgccggcccctcacttcgtgcaccatcttcctggggtatacttctaacctcatttcaagcggaattagggagacgataaggtatttggttcagcacaatatggtggacgttcttgttactactgcaggcggggtggaagaggacctcatcaagtgcttggccccgacctatctgggggagttctccctgcgcggaaaggaactgcgcgagaatgggattaatcgcatcgggaatctcctggttccaaatgaaaactactgcaagttcgaggactggctgatgcccatcctggatcagatggtcatggaacagaataccgagggcgtgaagtggacaccctcaaagatgatcgcgcgactgggtaaggaaatcaacaaccctgagagcgtatactactgggctcaaaagaaccacattcccgtcttctctcctgccctaactgacggttccttaggagacatgattttttttcacagttacaagaacccgggcctggtgctcgatattgtggaggctcaggaatttgatgggtctgacagcggggcccgcccagatgaggccgtgtcctgggggaaaatccgcgttgatgcccagccagtgaaggtgtacgctgacgcctcccttgttttcccattgctggtggcagaaacatttgctcagaagatggatgccttcatgcatgaaaagaatgaggattag

SEQ ID NO: 176100 - DNA, 969 bp, Artificial Sequence
  derived and/or modified sequence
atggagggcagcctggagcgggaggccccagctggggccctggccgctgtgctgaagcacagcagcaccctgcccccagagagcacccaggtgcggggctatgacttcaacagaggagtgaactaccgggccctgctggaggccttcggcaccaccggcttccaggccaccaactttggccgggctgtgcagcaggtgaatgccatgattgagaagaagctggagcccctgagccaggatgaggaccagcacgccgacctgacccagagcagaagacccctgaccagctgcaccatcttcctgggctacaccagcaacctgatcagcagcggcatccgggagaccatccgctacctggtgcagcacaacatggtggatgtgctggtgaccacagctgggggcgtggaggaggacctgatcaagtgcctggcccccacctacctgggggagttcagcctgcggggcaaggagctgcgggagaatggcatcaaccgcatcggcaacctgctggtgcccaatgaaaactactgcaagtttgaggactggctgatgcccatcctggaccagatggtgatggagcagaacacagagggcgtgaagtggacccccagcaagatgattgcccggctgggcaaggagatcaacaaccctgagagcgtgtactactgggcccagaagaaccacatccctgtgttcagccctgccctgacagatggcagcctgggggacatgatcttcttccacagctacaagaaccctggcctggtgctggacatcgtggaggcccaggagtttgatggcagtgacagcggggcccggccagatgaagctgtgtcctggggcaagatccgggtggatgcccagcctgtgaaggtgtatgcagatgccagcctggtgttccccctgctggtggccgagacctttgcccagaagatggatgccttcatgcatgagaagaatgaagattag

SEQ ID NO: 176101 - DNA, 969 bp, Artificial Sequence
  derived and/or modified sequence
atggagggcagcctggagcgggaggcccccgccggcgccctggccgctgtgctgaaacattcctccacactgccccccgagtctacgcaagtgaggggctacgacttcaaccgaggagtgaactacagagcccttctggaggctttcggaacaacggggttccaagctactaatttcgggcgggccgtacagcaggtaaacgctatgatcgaaaagaaattggagccactgtcacaggacgaggaccagcacgccgatctgacccaatccaggagacctttaactagttgtaccatcttcctggggtatacctccaatctaatctcatctggcattcgtgagaccattaggtaccttgttcagcacaatatggtcgatgtgctggtgaccaccgccggcggagtggaggaggatctgattaaatgccttgccccaacctacctgggagaattttccctgaggggaaaggagctgcgggaaaacggcattaatagaattggcaatttgctggtgcccaacgagaattattgcaaattcgaagattggctgatgcctatcctggaccagatggtgatggagcagaataccgaaggggtcaaatggaccccatctaagatgatcgccaggttgggcaaggaaattaacaaccccgaaagcgtgtattattgggcccaaaaaaatcacatccctgtgtttagccctgcacttaccgatggtagcttgggcgacatgatcttctttcattcttacaagaacccggggctggtactcgacatcgtcgaggcacaggagtttgatggctccgattcaggcgcaaggcccgatgaagcggtttcttggggcaagatccgcgtcgacgcccaaccggtcaaagtgtatgctgatgcctcactggtgtttcccttgttggtggccgagacatttgcgcagaagatggacgcatttatgcacgagaaaaacgaggactag

SEQ ID NO: 176102 - DNA, 969 bp, Artificial Sequence
  derived and/or modified sequence
atggaggggagtcttgagagggaagcgccagctggcgcacttgccgcagtgcttaagcacagcagcaccctgccccctgagtccacacaggtgaggggttacgacttcaacagaggtgtgaactaccgcgctctgctcgaggcttttgggaccactggattccaggccacaaatttcggcagggcagtgcagcaggtgaatgcgatgattgaaaagaagctcgaaccattgtcacaggacgaagaccagcacgcagatttaacacagtctcgcaggcctcttacgagctgcactatcttcctgggttatacatctaatttgataagcagcggaatcagggaaaccatccgatatttggtgcaacacaatatggtcgacgtgctcgtcacaactgccggaggcgtagaagaagatctcatcaaatgtctggctcccacttacctgggcgagttctcactgcgcggtaaagagctgcgggagaatgggataaaccggattggcaacctgctggtgccaaacgaaaattactgcaagttcgaagattggctaatgcctatcttagaccaaatggttatggagcagaacaccgagggcgtgaagtggacacctagtaaaatgatcgccagactcggaaaggagatcaacaatcccgaaagcgtgtactactgggctcagaagaatcacattcccgtcttttcgcctgctcttacagacggttctctcggggacatgattttttttcacagctataaaaaccctgggctggtgctggatatcgttgaggcccaggagttcgatggctccgactcaggcgcacgccctgatgaggccgtgtcttgggggaagatcagggtggacgcgcagccggtgaaagtctacgcagacgcctccttagttttcccacttctcgtggcggagacatttgcccagaaaatggacgcattcatgcacgaaaaaaacgaggactag

SEQ ID NO: 176103 - DNA, 969 bp, Artificial Sequence
  derived and/or modified sequence
atggagggcagcctggagagagaggcccccgccggcgccctggccgccgtgctgaagcacagcagcaccctgccccccgagagcacccaggtgagaggctacgacttcaacagaggcgtgaactacagagccctgctggaggccttcggcaccaccggcttccaggccaccaacttcggcagagccgtgcagcaggtgaacgccatgatcgagaagaagctggagcccctgagccaggacgaggaccagcacgccgacctgacccagagcagaagacccctgaccagctgcaccatcttcctgggctacaccagcaacctgatcagcagcggcatcagagagaccatcagatacctggtgcagcacaacatggtggacgtgctggtgaccaccgccggcggcgtggaggaggacctgatcaagtgcctggcccccacctacctgggcgagttcagcctgagaggcaaggagctgagagagaacggcatcaacagaatcggcaacctgctggtgcccaacgagaactactgcaagttcgaggactggctgatgcccatcctggaccagatggtgatggagcagaacaccgagggcgtgaagtggacccccagcaagatgatcgccagactgggcaaggagatcaacaaccccgagagcgtgtactactgggcccagaagaaccacatccccgtgttcagccccgccctgaccgacggcagcctgggcgacatgatcttcttccacagctacaagaaccccggcctggtgctggacatcgtggaggcccaggagttcgacggcagcgacagcggcgccagacccgacgaggccgtgagctggggcaagatcagagtggacgcccagcccgtgaaggtgtacgccgacgccagcctggtgttccccctgctggtggccgagaccttcgcccagaagatggacgccttcatgcacgagaagaacgaggactag

SEQ ID NO: 176104 - DNA, 1186 bp, Artificial Sequence
  derived and/or modified sequence
ctgtgctcttgcggagacgcgcgcgtcggggtttaacgcgtttctgggccgccgtaagcccggcctaggggcagctttgactcgagagccggctataggcgcatggaaggttccctggaacgggaggcgccagcgggggcgctggccgccgtgctaaagcacagctcgacgttgccgcccgaaagcacccaggtccggggctacgacttcaaccgcggtgtgaattaccgcgcactgctggaggccttcggcaccaccggcttccaagcaaccaacttcgggcgcgctgtacagcaagtcaatgccatgatcgagaagaagctggaaccactgtcacaggatgaagaccagcacgcggacctgacccagagccgccgcccacttaccagctgcaccattttcctgggatatacatccaacctcatcagttcaggcatccgtgagaccattcgctaccttgtgcagcacaacatggtggacgtattggtgaccacagctggcggcgtggaggaagacctcatcaagtgcctggcgcccacatacttgggcgagtttagcctcagggggaaggagctccgggagaacgggatcaataggatcggaaacctgctggtgcccaatgagaattactgcaagtttgaggactggctgatgcccattctggaccagatggtgatggagcagaacacagagggtgtaaagtggacgccttctaagatgatcgcccggctgggcaaggagatcaacaacccagagtccgtgtattactgggcccagaagaaccacatccctgtgtttagtcccgcacttacagacggctcgctgggcgacatgatcttcttccattcctacaagaacccgggcctggtcctggacatcgttgaggcccaggagtttgatggctctgactcaggtgcccgaccagacgaggctgtctcctggggcaagatccgggtggatgcacagcccgtcaaggtctatgctgacgcctccctggtcttccccctgcttgtggctgaaacctttgcccagaagatggatgccttcatgcatgagaagaacgaggactgagcggctgcggtcccaggaaggtcttaccccctcttctatttattaatttgcagacccagcccctcccctactttttggtcagctacgtctctagaataagatggtatctgaagtc

SEQ ID NO: 176105 - protein, 344 aa, Artificial Sequence
  derived and/or modified sequence
MVRARHQPGGLCLLLLLLCQFMEDRSAQAGNCWLRQAKNGRCQVLYKTELSKEECCSTGRLSTSWTEEDVNDNTLFKWMIFNGGAPNCIPCKETCENVDCGPGKKCRMNKKNKPRCVCAPDCSNITWKGPVCGLDGKTYRNECALLKARCKEQPELEVQYQGRCKKTCRDVFCPGSSTCVVDQTNNAYCVTCNRICPEPASSEQYLCGNDGVTYSSACHLRKATCLLGRSIGLAYEGKCIKAKSCEDIQCTGGKKCLWDFKVGRGRCSLCDELCPDSKSDEPVCASDNATYASECAMKEAACSSGVLLEVKHSGSCNSISEDTEEEEEDEDQDYSFPISSILEW

SEQ ID NO: 176106 - protein, 340 aa, Artificial Sequence
  derived and/or modified sequence
MVRARHQPGGLCLLLLLLCQFMEDRSAQAGNCWLRQAKNGRCQVLYKTELSKEECCSTGRLSTSWTEEDVNDNTLFKWMIFNGGAPNCIPCKETCENVDCGPGKKCRMNKKNKPRCVCAPDCSNITWKGPVCGLDGKTYRNECALLKARCKEQPELEVQYQGRCKKTCRDVFCPGSSTCVVDQTNNAYCVTCNRICPEPASSEQYLCGNDGVTYSSACHLRKATCLLGRSIGLAYEGKCIKAKSCEDIQCTGGKKCLWDFKVGRGRCSLCDELCPDSKSDEPVCASDNATYASECAMKEAACSSGVLLEVKHSGSCNYTEEEEEDEDQDYSFPISSILEW

SEQ ID NO: 176107 - DNA, 1193 bp, Artificial Sequence
  derived and/or modified sequence
gggaaataagagagaaaagaagagtaagaagaaatataagagccaccatggtgagagcacggcatcagccaggtggcctttgcctgctccttcttcttttgtgtcaattcatggaagatcgttcggcacaggcgggaaactgttggctgcgacaggcgaagaacggtagatgccaagtgctgtacaaaactgagctgagcaaagaagaatgttgttcaaccggtcgactttcaacctcatggaccgaagaggatgtgaatgataacactttgtttaagtggatgattttcaacgggggagcccctaattgtattccttgtaaagaaacttgcgaaaacgtcgattgtggaccgggaaagaaatgtcgcatgaacaaaaagaataagccaaggtgtgtgtgcgcacctgactgttcaaacattacttggaagggacctgtctgtggccttgacgggaaaacctatcgcaacgaatgtgcactgctgaaggcgagatgcaaggaacaaccggaactcgaagtgcagtaccagggtagatgcaagaaaacgtgtcgtgatgtgttttgtcccggctcttcgacttgtgtggtcgatcaaaccaacaacgcatactgcgtcacttgtaaccggatatgccccgagcccgcatcctcggagcagtacctctgtggaaatgacggggttacttacagctcggcctgtcatctccggaaggcaacctgtctgctgggaagatcgatcggactggcctacgaaggcaaatgcattaaggcaaagtcgtgtgaggacatccaatgcaccggtggaaagaagtgtctctgggactttaaggtgggtcgcggcaggtgctccctttgcgatgaactttgcccagattccaagagcgatgaaccagtctgtgcatcagataatgcaacgtacgcctccgagtgcgctatgaaggaagccgcttgttcctccggggtgctgcttgaggtgaagcactcgggatcgtgtaatagcatcagcgaggacaccgaggaagaagaagaggatgaagatcaagactacagctttcctatttcctccatcctcgagtggtgataataggctggagcctcggtggccatgcttcttgccccttgggcctccccccagcccctcctccccttcctgcacccgtacccccgtggtctttgaataaagtctgagtgg

SEQ ID NO: 176108 - DNA, 2519 bp, Artificial Sequence
  derived and/or modified sequence
gatttcgggcacctccgaaagataattgggaagggtttccagaaggtgggaaatgtcacctgattcacactgaacttttgaaagctccccacccccaaggagccgcgcacaccctcgctcgcggccgccctcccacagccccacacactgggagaccgcccaccgcaaaccgcggagacccccgtctagatttaaagcgcggctgcgcccggcttctgacgtccattgaatcgcgcgggcggccggcggcgagcgcggggctgcgccgggatcgctgcgccctccgccgctggcctctgcgacgcgcgccgctcgcccgagccacccgccgccgcgccggctccccgcgccgctgcgctcctcgccccgcgcctgcccccaggatggtccgcgcgaggcaccagccgggtgggctttgcctcctgctgctgctgctctgccagttcatggaggaccgcagtgcccaggctgggaactgctggctccgtcaagcgaagaacggccgctgccaggtcctgtacaagaccgaactgagcaaggaggagtgctgcagcaccggccggctgagcacctcgtggaccgaggaggacgtgaatgacaacacactcttcaagtggatgattttcaacgggggcgcccccaactgcatcccctgtaaagaaacgtgtgagaacgtggactgtggacctgggaaaaaatgccgaatgaacaagaagaacaaaccccgctgcgtctgcgccccggattgttccaacatcacctggaagggtccagtctgcgggctggatgggaaaacctaccgcaatgaatgtgcactcctaaaggcaagatgtaaagagcagccagaactggaagtccagtaccaaggcagatgtaaaaagacttgtcgggatgttttctgtccaggcagctccacatgtgtggtggaccagaccaataatgcctactgtgtgacctgtaatcggatttgcccagagcctgcttcctctgagcaatatctctgtgggaatgatggagtcacctactccagtgcctgccacctgagaaaggctacctgcctgctgggcagatctattggattagcctatgagggaaagtgtatcaaagcaaagtcctgtgaagatatccagtgcactggtgggaaaaaatgtttatgggatttcaaggttgggagaggccggtgttccctctgtgatgagctgtgccctgacagtaagtcggatgagcctgtctgtgccagtgacaatgccacttatgccagcgagtgtgccatgaaggaagctgcctgctcctcaggtgtgctactggaagtaaagcactccggatcttgcaactccatttcggaagacaccgaggaagaggaggaagatgaagaccaggactacagctttcctatatcttctattctagagtggtaaactctctataagtgttcagtgttgacatagcctttgtgcaaaaaaaaaaaaaaaaaaaaagaaaaagaaaaaaagaaaaatatattgtccatactgtaaataagtgtatgcttatttatttggggggaaaactatacattaaaggacctttgtcctaaagctctctcccaggccaccttgttactcattggacacggagaggcattcattgtgaggtctactggatgaggcccatagttgagacttgtagacatttatttatactgtgtcatgttttataatttatacataaaatgtctggttgactgtataccttgtttttgaagaaatttattcgtgaaaggaagagcagttgttatttattgtgaggtctcttgcttgtaaagtaaaagctttttttccttgtaaaccatttaagtccattccttactattcactcactcatctgtctcccttcatttcactgttagactcttttccactttcaacaaacttgcatgtcagtttctgtcatgtttatttattggattctctgctgcctgatctgtacatacatgatccctcgggttttgtttacaaggaaccttgactgaccaaaaggcattataactctgactcaaatacaaggtacagaagataagcatctttgaggaaactcctacttcagttcttttgttatgatgaagacatttgtgagagaggagatgattagaattctagtaatgtacttttaagatgttacagatacaaagaaatgatgtgggtgtcaggagactaaaggatgttgaaggctacacattcaaccttttgttaggtgtttcctttaagctactcagctgtaccttttaaattagttctttttcaaccagtatatcactaaaagttatatcaaagctttatcagttcaagtttcttgcttttcataatacttttttctgatgcaattttatattttcaaacatggcaagttaaaatataaattcatttaaatatatagttttgtacttttctaccatgtaaatgtgcaatgtatataaaagttataatgtgtatttgtaaataaatgatgagtgaaaaaataaaaaaattttaaaaagccaa

SEQ ID NO: 176109 - DNA, 1023 bp, Artificial Sequence
  derived and/or modified sequence
atggtccgcgcgaggcaccagccgggtgggctttgcctcctgctgctgctgctctgccagttcatggaggaccgcagtgcccaggctgggaactgctggctccgtcaagcgaagaacggccgctgccaggtcctgtacaagaccgaactgagcaaggaggagtgctgcagcaccggccggctgagcacctcgtggaccgaggaggacgtgaatgacaacacactcttcaagtggatgattttcaacgggggcgcccccaactgcatcccctgtaaagaaacgtgtgagaacgtggactgtggacctgggaaaaaatgccgaatgaacaagaagaacaaaccccgctgcgtctgcgccccggattgttccaacatcacctggaagggtccagtctgcgggctggatgggaaaacctaccgcaatgaatgtgcactcctaaaggcaagatgtaaagagcagccagaactggaagtccagtaccaaggcagatgtaaaaagacttgtcgggatgttttctgtccaggcagctccacatgtgtggtggaccagaccaataatgcctactgtgtgacctgtaatcggatttgcccagagcctgcttcctctgagcaatatctctgtgggaatgatggagtcacctactccagtgcctgccacctgagaaaggctacctgcctgctgggcagatctattggattagcctatgagggaaagtgtatcaaagcaaagtcctgtgaagatatccagtgcactggtgggaaaaaatgtttatgggatttcaaggttgggagaggccggtgttccctctgtgatgagctgtgccctgacagtaagtcggatgagcctgtctgtgccagtgacaatgccacttatgccagcgagtgtgccatgaaggaagctgcctgctcctcaggtgtgctactggaagtaaagcactccggatcttgcaactacaccgaggaagaggaggaagatgaagaccaggactacagctttcctatatcttctattctagagtggtaa

SEQ ID NO: 176110 - DNA, 1035 bp, Artificial Sequence
  derived and/or modified sequence
atggtgcgagctagacatcaaccgggaggattgtgtttactgttgctcctcctatgtcaatttatggaggatcgctccgctcaagctggtaactgctggctgcgccaggccaagaacgggagatgccaagtgttatacaagaccgagcttagcaaagaggaatgttgctcaacgggccgactgtccaccagctggacagaggaagatgtcaatgacaataccctttttaagtggatgatatttaacgggggggcccctaactgtattccttgcaaagagacttgcgagaacgtggactgcggacccggaaagaagtgtcgaatgaacaagaagaataaaccaagatgcgtgtgtgccccagattgctctaatattacctggaagggccccgtgtgtggcctagacggcaagacctataggaacgagtgtgctttgttaaaggccagatgcaaagaacagcccgagttagaggtccaataccagggaagatgtaagaagacctgcagggacgtcttttgcccaggatcctctacttgcgtggtggatcagaccaataacgcctactgtgtaacctgcaatcgaatatgtcctgaacccgcatcctccgagcagtacctgtgcgggaatgacggtgttacctactcctcagcctgccatctgcgaaaggctacttgtctgttggggcggagcattggcctcgcttatgagggcaagtgtattaaggcaaagtcttgcgaggacattcagtgcacaggaggtaagaaatgtctctgggatttcaaagtggggcgcggccgatgtagtctgtgcgatgaactttgccccgatagcaaatctgacgagccagtctgcgccagcgataacgctacttatgcttcagaatgcgctatgaaggaagccgcttgttcttcaggggtcctgctggaggtgaagcatagcggctcgtgtaactccatatcggaggatacagaagaagaggaggaggatgaagaccaagactattcttttcccatatcttctatactggaatggtag

SEQ ID NO: 176111 - DNA, 1023 bp, Artificial Sequence
  derived and/or modified sequence
atggtgcgcgccagacaccagcccggagggctgtgtctcctgctgctcctcctatgtcagttcatggaggaccgctccgcacaggccggaaattgctggctgagacaagccaaaaatggacggtgtcaggtactttataaaacagaactgtccaaggaggagtgctgttcgaccggccgcttaagcacatcttggacagaagaagatgtgaatgacaatactctgttcaagtggatgatttttaacggcggcgctcccaattgtattccctgcaaggagacttgtgaaaacgtggactgtggtcccggcaagaagtgcagaatgaacaagaagaacaagccacgatgtgtttgtgcaccggattgcagtaacatcacttggaaaggtcctgtgtgcggcctggacggtaaaacttaccggaatgaatgtgccctgcttaaggctcgttgcaaagagcagccagaactggaagtgcagtatcagggccggtgtaagaaaacctgccgtgatgtgttctgccctggatcttctacatgcgtcgtggatcaaactaacaacgcctattgcgtgacctgtaaccgcatatgccccgagccagccagttctgaacaatacctctgtggaaatgatggggttacttactccagcgcatgtcatctgcgtaaagccacttgcctgttgggacggtccatcggccttgcttatgagggcaagtgcataaaagctaaaagctgcgaggatattcagtgtacagggggcaagaaatgcctgtgggacttcaaagtcggccggggacgttgctcactttgtgacgagctctgtcccgacagcaagtcagacgaacctgtgtgcgcctcagacaatgctacatacgcatctgaatgcgcaatgaaagaagccgcctgtagttcaggggtgttgctggaggtcaaacattctggctcctgtaattacacagaggaggaggaggaggatgaggaccaggactacagtttccccatctcttcaattcttgagtggtag

SEQ ID NO: 176112 - DNA, 1035 bp, Artificial Sequence
  derived and/or modified sequence
atggtgcgggcccggcaccagcccggcggcctgtgcctgctgctgctgctgctgtgccagttcatggaggacagaagtgcccaggccggcaactgctggctgcggcaggccaagaatggccgctgccaggtgctgtacaagacagagctgagcaaggaggagtgctgcagcacaggccgcctgagcacctcctggacagaggaggatgtgaatgacaacaccctcttcaagtggatgatcttcaacggcggggcccccaactgcatcccctgcaaggagacctgtgaaaatgtggactgtggccctgggaagaagtgcaggatgaacaagaagaacaagccccgctgtgtgtgtgccccagactgcagcaacatcacctggaagggccctgtgtgtggcctggatggcaagacctacagaaatgaatgtgccctgctgaaggcccgctgcaaggagcagcctgagctggaggtgcagtaccagggccgctgcaagaagacctgcagagatgtgttctgccccggcagcagcacctgtgtggtggaccagaccaacaatgcctactgtgtgacctgcaaccgcatctgcccagagcccgccagcagcgagcagtacctgtgtggaaatgatggagtgacctacagcagcgcctgccacctgaggaaggccacctgcctgctgggccgcagcatcggcctggcctatgagggcaagtgcatcaaggccaagagctgtgaggacatccagtgcacaggaggcaagaagtgcctgtgggacttcaaggtgggccggggccgctgcagcctgtgtgatgagctgtgcccagacagcaagagtgatgagcctgtgtgtgccagtgacaatgccacctacgcctctgaatgtgccatgaaggaggccgcctgcagcagcggcgtgctgctggaggtgaagcacagcggcagctgcaacagcatcagcgaggacacagaggaggaggaggaggatgaggaccaggactacagcttccccatcagcagcatcctggagtggtag

SEQ ID NO: 176113 - DNA, 1023 bp, Artificial Sequence
  derived and/or modified sequence
atggtgcgggcccggcaccagcccggcggcctgtgcctgctgctgctgctgctgtgccagttcatggaggacagaagtgcccaggccggcaactgctggctgcggcaggccaagaatggccgctgccaggtgctgtacaagacagagctgagcaaggaggagtgctgcagcacaggccgcctgagcacctcctggacagaggaggatgtgaatgacaacaccctcttcaagtggatgatcttcaacggcggggcccccaactgcatcccctgcaaggagacctgtgaaaatgtggactgtggccctgggaagaagtgcaggatgaacaagaagaacaagccccgctgtgtgtgtgccccagactgcagcaacatcacctggaagggccctgtgtgtggcctggatggcaagacctacagaaatgaatgtgccctgctgaaggcccgctgcaaggagcagcctgagctggaggtgcagtaccagggccgctgcaagaagacctgcagagatgtgttctgccccggcagcagcacctgtgtggtggaccagaccaacaatgcctactgtgtgacctgcaaccgcatctgcccagagcccgccagcagcgagcagtacctgtgtggaaatgatggagtgacctacagcagcgcctgccacctgaggaaggccacctgcctgctgggccgcagcatcggcctggcctatgagggcaagtgcatcaaggccaagagctgtgaggacatccagtgcacaggaggcaagaagtgcctgtgggacttcaaggtgggccggggccgctgcagcctgtgtgatgagctgtgcccagacagcaagagtgatgagcctgtgtgtgccagtgacaatgccacctacgcctctgaatgtgccatgaaggaggccgcctgcagcagcggcgtgctgctggaggtgaagcacagcggcagctgcaactacacagaggaggaggaggaggatgaggaccaggactacagcttccccatcagcagcatcctggagtggtag

SEQ ID NO: 176114 - DNA, 1035 bp, Artificial Sequence
  derived and/or modified sequence
atggtgcgggcccggcaccagcccggcggcctgtgcctgctgctgctcctgctgtgccaattcatggaagaccggagtgctcaggccgggaattgttggctgcgccaagcaaaaaacggccgatgtcaagttctctataaaaccgaactttctaaggaggagtgctgttctacaggccgactgtcaaccagctggaccgaggaagatgtcaatgacaataccctcttcaaatggatgatcttcaatggcggcgcaccaaactgtatcccgtgtaaggagacctgtgaaaatgtagattgcggcccagggaagaagtgtaggatgaacaaaaagaataaaccccggtgcgtctgcgcccccgattgttccaatattacctggaaaggccctgtttgtggcttggacggcaaaacttataggaatgaatgcgctttgttgaaggcccgatgcaaggaacagcctgagctggaagtccagtatcaaggacggtgtaagaaaacatgtcgggatgtgttctgccccggttcctctacatgtgtcgtcgaccagaccaacaatgcttactgcgttacttgcaaccgcatctgccctgagcctgcaagcagtgaacaatacctatgcggtaatgacggtgtaacatactcctccgcttgccatctcagaaaagctacttgtcttctaggccgcagcattgggttagcatacgagggaaaatgtataaaagccaaatcatgcgaagatatacagtgcacgggcggcaagaaatgtttgtgggatttcaaggtgggccgcggacgatgctcactctgcgacgaactgtgccctgactcaaaatccgacgagcctgtctgtgcatctgacaatgctacatacgcgagtgaatgcgccatgaaagaagctgcctgtagttccggagtgctcctggaggttaagcactcaggatcttgtaatagtatctctgaagacacggaagaggaagaggaagacgaggaccaggactatagctttcctatatcttctatactggaatggtag

SEQ ID NO: 176115 - DNA, 1023 bp, Artificial Sequence
  derived and/or modified sequence
atggtgcgggcccggcaccagcccggcggcctgtgcctgctgctgttgctgctgtgtcagtttatggaagatcgctcagcccaggccggcaactgctggctcagacaggctaagaacggtcgatgccaggtcctctacaaaaccgaattgtccaaggaagaatgctgtagcacgggccggctgagcacaagctggacagaggaggatgtcaatgacaacacactgtttaagtggatgatcttcaatggcggtgctcctaactgcatcccgtgtaaagaaacttgtgagaatgtcgattgtggccccggtaagaaatgtcgtatgaacaaaaagaacaaaccacggtgcgtgtgcgctcccgattgttctaatattacctggaaagggcccgtctgtggccttgacgggaagacttaccgcaatgagtgcgctctgcttaaggcaagatgcaaggaacagccagagcttgaagtccaataccagggtcggtgcaagaagacatgcagagacgtgttctgtccaggttcttctacctgtgtggtggaccagactaataatgcttactgcgttacctgtaaccgcatttgccctgaacctgcctcctccgagcagtacctctgcgggaatgacggtgtgacctacagctccgcctgccacctcaggaaggcgacctgcctcctcgggcgtagcattggactcgcttatgaggggaagtgcatcaaggctaaatcttgtgaagacattcagtgtaccggcggcaaaaaatgcttgtgggatttcaaggtcgggagaggccgatgtagtctctgcgatgaattatgccctgactcaaagtctgacgagcccgtgtgcgcaagtgataacgcaacctacgcgtccgaatgtgctatgaaagaggctgcctgttcctcaggggtacttctggaggtcaagcacagcggatcttgcaactacacagaggaagaagaggaggacgaggatcaagattattcctttccgatcagttcaatactggagtggtag

SEQ ID NO: 176116 - DNA, 1035 bp, Artificial Sequence
  derived and/or modified sequence
atggtgcgggctagacatcagcctggaggcctttgcctgcttttgctgttgctgtgccagttcatggaagaccgcagtgcacaggcaggtaactgctggctgagacaggccaagaatggcagatgccaggttctgtataagaccgagttgtctaaagaagaatgttgtagcacgggaaggttatcaacgagttggactgaggaggatgtaaacgataacactttgttcaaatggatgatcttcaacgggggtgctccaaactgcataccttgcaaggagacatgcgaaaatgtagattgcgggccaggaaagaaatgccgtatgaacaaaaaaaacaaaccaagatgtgtgtgcgcacccgactgttcaaatattacttggaaggggcctgtgtgtggacttgatgggaagacatacaggaacgagtgcgcactcctcaaggccaggtgtaaagaacaacccgaattagaggtgcagtaccaaggacgctgtaagaaaacgtgtagagatgttttctgcccaggaagctctacatgcgtggtggatcaaacaaataatgcctattgtgttacgtgtaatcgaatctgtccggaacccgcaagcagcgaacagtatttgtgtgggaacgatggcgttacctatagctccgcgtgtcacctgcgaaaggccacctgtctgcttggcagaagcatcggcctggcctacgaagggaagtgtatcaaagctaaaagctgtgaagacatccagtgcaccgggggaaaaaagtgtctctgggacttcaaagtgggacgtggccgatgtagcctgtgcgatgaactctgccctgactctaagtctgacgagcctgtgtgcgccagtgataatgccacctatgcctccgagtgtgctatgaaggaggccgcttgctctagcggtgtactacttgaggtaaagcacagtggttcttgcaactcaatctcagaggacacagaagaggaggaagaggacgaagaccaagattatagcttccccatttcgtcaatccttgagtggtag

SEQ ID NO: 176117 - DNA, 1023 bp, Artificial Sequence
  derived and/or modified sequence
atggtccgagctcggcaccagcctggagggctctgtctgttgttattgttgctgtgtcagttcatggaggatcgctccgcccaggctggtaattgctggctacggcaagctaagaatggcaggtgccaagtcctatacaagactgagcttagcaaagaagagtgttgctccacaggtcgcctgagtacaagctggacagaggaggacgttaatgacaacacactgttcaagtggatgatcttcaatggcggagcaccgaactgcatcccttgcaaagaaacctgtgagaacgtggattgcggacccggtaaaaagtgccgaatgaataagaaaaataagcctcggtgcgtgtgcgcgcctgattgttccaatatcacttggaaggggccagtatgcggactggacggaaagacttatcgcaacgagtgcgctctcctgaaggcccgttgcaaggaacagcccgagctcgaggttcagtaccagggccgatgtaaaaagacatgtcgggatgttttttgccccggatcttccacatgtgtggtggaccagactaacaacgcctactgcgtgacctgtaacagaatctgccccgagcccgcaagcagcgagcagtacttatgtgggaacgacggtgttacgtacagtagcgcctgtcatttaaggaaggctacctgcttgctgggcagaagcattggcctggcttacgaagggaagtgcatcaaggcgaagagctgcgaagatatacagtgcactggcggaaaaaagtgtctttgggacttcaaggtgggtagaggaaggtgttccctgtgcgatgagctgtgtcctgattctaaaagcgatgaacccgtgtgtgcttcggacaacgcgacatacgcctccgagtgcgctatgaaggaggcagcttgtagttccggagtgttactggaggtcaagcacagtggcagctgcaactacactgaggaagaggaggaagatgaagatcaggattatagcttccctatctcatcaatcctcgagtggtag

SEQ ID NO: 176118 - DNA, 1032 bp, Artificial Sequence
  derived and/or modified sequence
atggtccgcgcccgacaccaaccgggagggctctgtctgctgcttcttctgctttgtcagtttatggaggacaggagtgcccaggccggaaactgctggcttagacaagccaagaacgggcgctgccaggtgctgtataaaactgaactctctaaggaagagtgctgctccaccggcaggctatctacgtcatggacagaggaggacgtcaatgataacacactgttcaagtggatgatctttaatggaggcgcacccaattgtattccttgcaaagagacttgtgagaacgtagattgcgggccgggaaaaaagtgccgaatgaacaagaaaaacaagccgagatgtgtgtgtgctcccgactgttctaacatcacttggaagggacccgtgtgtggcttagatggcaagacctaccggaatgagtgtgcactgcttaaggcccgttgtaaagagcagcctgaactggaggtccagtatcagggacgatgtaagaagacctgcagagacgtcttctgcccgggctcctctacttgtgttgtcgatcagaccaacaacgcctactgcgttacctgcaatagaatatgccccgaacccgcgtcgtccgagcagtacctgtgcgggaacgatggcgtaacttattcttctgcctgtcacctgagaaaggccacatgccttctgggcaggtctataggactggcgtacgaaggtaaatgtattaaagcaaaaagctgtgaggatatccaatgtacaggcgggaagaagtgtttatgggacttcaaggtaggcaggggacggtgcagcctctgtgacgaactctgcccagacagtaaaagcgatgaaccagtgtgtgcatcggacaacgccacctatgcaagcgagtgcgccatgaaagaggcggcctgttcctcgggcgtcctgctcgaagtgaagcattctggaagctgcaattctattagtgaagataccgaggaggaggaagaagacgaggaccaggactatagttttcccataagctccatccttgaatgg

SEQ ID NO: 176119 - DNA, 1032 bp, Artificial Sequence
  derived and/or modified sequence
atggtccgtgctaggcaccaacctgggggcctctgcctcctactgctgctcctgtgtcagtttatggaggaccgctccgcccaggccggtaattgctggctcaggcaagcaaagaatgggcgctgccaggtgctgtataagacagagctgagcaaggaagaatgttgctctacaggaaggctgtccacatcgtggaccgaagaggacgtgaatgacaacacccttttcaagtggatgatcttcaatggaggggctccgaattgtatcccttgtaaggagacttgtgagaatgtggattgcggaccagggaagaaatgcaggatgaataagaagaataaacccagatgcgtctgcgccccagactgttctaatataacctggaagggacccgtgtgtgggctggacgggaaaacctaccgcaatgaatgtgccctcctcaaagcacggtgcaaagagcagcctgagttggaggtgcaataccagggccgctgcaagaaaacatgcagagacgtcttctgccctgggtcatcaacctgcgtggtggaccaaactaataacgcctattgcgtgacttgcaaccgaatctgccccgaaccagcgtccagtgaacagtatctgtgcggcaacgacggtgtaacttactctagtgcatgccacctgcggaaagctacctgcttgctggggcgaagcatcggactggcctacgaaggtaaatgtatcaaggctaagtcttgcgaggacatccagtgcactggtggcaagaaatgtctgtgggacttcaaggtcggaagaggacggtgctccctttgtgacgagctgtgtcccgattccaaaagtgacgagccggtgtgcgctagtgataacgcaacttatgcaagcgaatgcgccatgaaagaagccgcctgcagctcaggggtcctattagaggttaaacactctggctcttgtaacagcataagtgaggacactgaggaggaagaagaggacgaggatcaagactactcctttcctatcagctctattctggaatgg

SEQ ID NO: 176120 - DNA, 1032 bp, Artificial Sequence
  derived and/or modified sequence
atggtgagagccagacaccagccaggcggtttgtgcttgctcctactgctactgtgtcagtttatggaggatagatcggctcaggccgggaattgttggctgagacaggccaagaatgggcgttgccaggtgctatacaagactgagctgagcaaagaggagtgttgctcaacaggacgcctgtccacgagttggacagaagaagacgttaacgacaataccttgttcaagtggatgattttcaacggcggggccccaaactgcataccctgtaaagaaacctgcgaaaatgtagactgcgggcccggaaagaaatgccgtatgaacaagaagaataagccacgatgtgtctgcgctccggattgcagcaatatcacctggaaaggacccgtgtgtggtttggatggaaagacctacaggaacgaatgtgcccttctgaaggcccgttgcaaggaacagcccgagctcgaggtgcagtatcagggccgctgtaagaagacgtgtcgcgatgtcttctgccccggcagcagcacttgcgtggtggaccagacaaacaatgcctactgtgtgacatgcaatcgaatctgcccggaacctgccagcagcgagcagtacctttgcggtaacgacggagtcacgtacagctctgcgtgccatctgaggaaagccacgtgcctgcttgggcgctctattggcctggcgtacgaagggaagtgcatcaaggcgaagagttgcgaggatatccagtgtacaggaggtaagaagtgtttgtgggacttcaaggttggtaggggcaggtgcagcttatgtgatgagctgtgtccagactcgaagagcgacgagccagtatgtgccagtgacaatgctacttacgccagcgagtgcgcaatgaaggaagccgcatgtagctccggcgtgctcctggaggtgaaacattccggcagttgtaattctatctccgaagatactgaagaagaggaagaggatgaggatcaagattacagttttcctatttcatcaatcctcgaatgg

SEQ ID NO: 176121 - DNA, 1032 bp, Artificial Sequence
  derived and/or modified sequence
atggtccgggccaggcaccaacccggaggcctatgcctgctattattgctgctgtgccagtttatggaggaccggtcagcccaggccggcaactgttggctgcgacaggcaaaaaacggccggtgtcaggtgctctacaagaccgaactcagtaaggaagagtgctgtagcaccggccgccttagcacatcttggactgaggaggacgtgaacgataatacactttttaaatggatgatctttaatgggggcgcacctaactgtattccctgcaaggagacctgtgaaaatgttgactgcggcccgggcaaaaagtgccgcatgaacaagaaaaataaaccccggtgcgtctgcgcccctgactgttctaacataacatggaagggaccggtctgtggcctggatggcaaaacctacagaaacgagtgcgcactcttaaaagcacgctgtaaggagcaaccagagcttgaggtgcagtatcagggtaggtgtaagaagacttgcagagacgtgttttgcccgggaagttccacgtgcgtcgtagatcaaaccaataatgcttactgcgtgacatgcaaccgcatatgccccgagcccgccagcagcgagcagtacctgtgcggcaatgacggagtaacgtatagtagtgcctgccacctgagaaaggccacttgtctgctgggcaggtctataggtctggcctatgagggtaagtgtatcaaggctaagagctgcgaggatatccagtgcaccgggggcaaaaagtgtctttgggacttcaaggtgggcagaggcagatgtagcctgtgcgatgaactttgcccagacagtaaatctgatgagcccgtctgtgccagcgataacgccacatatgccagcgaatgcgccatgaaggaggctgcctgttcctctggtgtgctgctcgaagtcaagcattcgggatcctgtaactctataagcgaggacaccgaggaggaagaggaagacgaggaccaggattatagcttccccatttcatctattctcgagtgg

SEQ ID NO: 176122 - DNA, 1032 bp, Artificial Sequence
  derived and/or modified sequence
atggtccgcgcccggcaccaacctggaggattgtgcctcttgctcctgctgctttgccagtttatggaggacagaagcgcacaggccgggaactgttggctgcgccaggctaagaacggtcgttgtcaggtactctacaagaccgagctttcgaaggaagagtgctgttctaccgggagactctcaaccagctggaccgaagaagatgtcaacgataacaccctgttcaaatggatgatctttaacggtggagcgcccaattgtatcccctgcaaagaaacttgcgaaaacgttgattgcggaccgggaaaaaagtgccggatgaacaagaagaataagccgcgctgcgtatgcgcacctgactgttcaaatatcacctggaagggaccggtgtgcgggctggacggaaaaacttacagaaacgaatgtgctctgctgaaagcgcggtgcaaggagcagcctgaactcgaagtgcagtaccaaggcaggtgcaaaaagacttgccgcgacgtgttctgcccgggctccagcacttgtgttgtggatcagacgaacaatgcttactgcgtgacttgcaaccgcatctgcccggagccagcctcatccgagcaatacctgtgcgggaatgatggagtgacctatagttccgcctgtcatctgagaaaggccacgtgtctcttgggccggtcgattggactggcatacgaaggcaagtgtatcaaggcaaaatcctgtgaggacatccagtgtactggaggaaagaagtgcttgtgggatttcaaggtcggcagaggtcggtgctcactctgcgatgagctgtgcccggactcgaaatctgacgaaccagtgtgcgcgagtgacaacgcgacctacgcgtcggaatgcgctatgaaggaagccgcctgctcgtcgggagtgcttttggaagtgaaacactccggtagctgcaattcgatttccgaggacactgaagaggaggaagaagatgaggaccaagactacagcttcccaatcagctcgatactggagtgg

SEQ ID NO: 176123 - DNA, 1032 bp, Artificial Sequence
  derived and/or modified sequence
atggttcgcgctcgacaccagccggggggactgtgcttgctactgctgttactgtgccagtttatggaggaccggtctgctcaggcaggcaactgctggctgagacaggccaagaatggccgttgccaggtgctttacaagactgagctgagtaaggaagagtgttgttcaactggccggctctctaccagctggactgaagaagacgtcaacgacaacacgctgttcaaatggatgatttttaatgggggagctcctaattgtatcccatgtaaggaaacctgtgagaatgtggattgtgggcccgggaagaagtgccgcatgaataagaagaataagccacgctgtgtttgcgcccctgactgttctaatatcacctggaaaggaccagtgtgcggacttgacgggaaaacgtatcggaatgagtgtgcccttctgaaggctcgatgtaaagagcaacccgagctagaggtgcagtatcaaggccggtgcaagaagacatgccgcgatgtgttttgcccaggtagttctacctgcgtggtcgaccagacgaataacgcttattgcgtaacatgtaataggatatgtccagagcctgcctcgtcagaacaatacctgtgcggaaacgacggagtgacatactctagcgcatgccatctacgcaaagcaacctgtctcctgggtcgaagcattggactcgcttacgaaggcaaatgcattaaagccaagagctgcgaggatatccaatgcactggagggaagaagtgcctctgggacttcaaagtcgggcgaggacgctgcagtttatgcgatgagctgtgcccggattccaagtccgacgagcccgtgtgcgcctccgacaatgcaacatacgcgagtgaatgtgccatgaaagaggctgcttgctccagcggcgtactactcgaggtgaaacatagcggctcttgtaactcaatctccgaggatacagaagaagaggaagaagacgaggaccaagactactcatttcccataagttcaatccttgagtgg

SEQ ID NO: 176124 - DNA, 1032 bp, Artificial Sequence
  derived and/or modified sequence
atggtcagggccaggcaccaacccggcggtttgtgcctcctgttgttgctcctttgccagttcatggaggatcgttcagcacaggctggaaactgctggcttaggcaggcaaagaacggtcgctgccaggttctgtacaagacagaactgtcaaaggaagaatgttgttccaccggccgtctgtccacttcctggacagaggaagacgtcaatgataacaccttgttcaaatggatgatcttcaacggtggcgcaccaaactgcattccttgcaaggagacttgtgagaacgtggactgcggccccggaaagaagtgcagaatgaacaaaaagaacaagccacgctgcgtctgtgccccagattgttcaaatattacatggaagggaccagtctgtggacttgatggaaaaacttaccgcaacgagtgcgcactgctgaaggcccgttgcaaggagcagccagaactcgaggtgcaataccagggacgctgcaagaagacttgcagggacgtcttctgccccggttcttcaacatgcgtagtggatcaaaccaacaatgcctactgtgtcacctgtaaccgtatctgccccgagcccgcttcttctgagcagtacctgtgcggcaacgatggtgtgacatactcttccgcctgccaccttagaaaggccacctgcttgcttggcaggagcatcggcctcgcctacgaaggcaagtgcattaaggccaagtcttgtgaggatatccagtgcactggaggcaagaagtgtctgtgggacttcaaagtaggcaggggacgctgctccctctgcgacgaactttgtcccgattctaaatctgacgagcccgtgtgtgctagcgataatgcaacttacgcatctgagtgcgccatgaaagaagccgcttgctcatcaggtgtccttctggaggtgaagcacagcggatcttgtaactccatctcagaggataccgaggaggaggaagaggacgaagatcaggactattccttcccaatctccagcatcctggagtgg

SEQ ID NO: 176125 - DNA, 1032 bp, Artificial Sequence
  derived and/or modified sequence
atggtccgagcgcggcatcaaccgggcggcttgtgccttctcctcctgctgctgtgtcagtttatggaagataggtcggctcaagcaggaaactgctggctcagacaagccaaaaatgggcggtgtcaagttctgtacaaaacggaactcagcaaagaagaatgttgtagcaccgggcgcctgtcaacttcctggaccgaggaggatgtgaatgataatactcttttcaaatggatgatctttaatggcggtgccccaaactgtatcccatgtaaggaaacctgtgaaaacgtggattgcggaccgggcaagaagtgtcgaatgaacaagaagaataagccacgttgcgtgtgtgcgcctgactgttcgaatatcacgtggaagggccctgtctgcggacttgatggaaagacttaccgtaacgaatgcgcactgttgaaggcacgttgcaaagagcagcctgaacttgaagtccagtaccagggtcggtgcaaaaagacctgtcgtgatgtcttttgtccaggatctagtacttgtgtcgtggaccaaaccaacaacgcctactgtgtgacctgcaacagaatctgtcctgagcccgcatcgtcggaacagtacctttgtggaaacgacggcgttacgtactcatcggcgtgccacttgcggaaggcgacttgccttctcggacgaagcataggactcgcttacgagggaaagtgtattaaggccaagtcatgcgaagatattcaatgcactggaggcaagaaatgcctgtgggactttaaggtgggccgtgggagatgttctttgtgtgacgaactgtgcccagacagcaagtcagatgagcctgtttgcgcaagcgataacgcaacctatgcatcagagtgtgcaatgaaagaagcagcatgctcgagcggagtgctgcttgaagtgaagcattcaggttcctgtaactcgatctccgaagataccgaagaagaggaggaagatgaagatcaggactactccttccccatttccagcattttggagtgg

SEQ ID NO: 176126 - DNA, 1032 bp, Artificial Sequence
  derived and/or modified sequence
atggtgcgggcacgccaccaaccgggcggactctgccttctcctgctgcttttgtgccaattcatggaggacaggagcgcccaggccggcaactgttggctgcgccaggctaaaaacggacgctgccaggtcctgtacaaaaccgaactttcgaaagaagagtgttgctcaactggacggctgtcaaccagctggactgaggaggatgtcaatgacaacactctgttcaaatggatgatcttcaacggtggcgcgccaaattgcatcccgtgtaaagaaacctgcgaaaacgtcgactgcggaccagggaaaaagtgccggatgaacaaaaagaacaagccgcgctgcgtctgcgcgccggattgtagcaacatcacttggaagggaccagtgtgtgggctggatggaaagacctatcggaacgagtgtgcgcttctgaaggcacggtgcaaggagcagccggagcttgaggtccaataccaaggccgctgcaaaaagacctgtcgtgacgtattttgcccgggatcgtccacttgtgttgtggaccagactaacaatgcgtattgtgtgacctgtaatagaatctgccctgaacctgcatcctcagagcaatacctttgcggtaacgatggagtgacctactcatcggcttgccatctgcgcaaggcaacctgcctcctgggacgctctatcgggttggcgtacgaaggcaaatgcatcaaggcgaagtcttgcgaagatatccaatgcactggtggaaagaagtgcctctgggatttcaaggtgggccgggggcgctgcagcctgtgcgacgaactgtgcccggattccaagagcgacgagcctgtgtgtgcgtctgacaacgccacttacgcatcggagtgtgccatgaaggaagcagcatgttcctccggagtcctcctggaagtgaagcactccggctcatgcaatagcatttccgaggatactgaagaagaagaggaggacgaggaccaggactactcgtttcccattagctcgatcctggagtgg

SEQ ID NO: 176127 - DNA, 1032 bp, Artificial Sequence
  derived and/or modified sequence
atggttcgcgctcggcatcaacctggtggactctgtttgctgctccttctgttgtgtcagtttatggaggatcgctcggcacaagcagggaattgctggctcagacaggcaaagaacggacgctgtcaggtcctctataagactgaactgtcaaaggaagagtgttgttcgaccggcagattgtcaactagctggaccgaggaggacgtgaatgataacaccttgttcaagtggatgatcttcaacggaggggccccaaactgtataccatgcaaggaaacttgcgaaaacgtcgattgtggcccaggcaagaagtgtcgtatgaataagaaaaacaaaccccgctgtgtctgcgcccctgattgttctaacattacgtggaaaggtcccgtgtgcggtctggacggtaagacgtatcggaacgaatgtgcacttctgaaagctcgatgtaaagaacaaccagagttggaagtgcagtaccaaggacgatgtaagaaaacttgcagagatgttttttgtcctggttcgtcgacctgtgtggtggatcaaaccaacaacgcgtactgcgtcacgtgcaatcgtatctgtcccgaacctgccagctcggaacaatatctgtgtggtaatgacggagtcacttacagctccgcgtgtcacctcaggaaagcaacctgcctgcttggtaggtctattggactcgcatacgaaggaaaatgcattaaggcgaagtcgtgtgaggatattcagtgtacgggtggaaagaagtgcctttgggactttaaggtgggacgaggaagatgttcactttgtgacgaactgtgtccagacagcaagtcggatgaacctgtctgtgcctctgacaacgcaacttatgcttccgagtgcgccatgaaggaagcagcatgctcgtcaggtgtgcttcttgaagtgaagcattccgggtcgtgcaatagcatctcggaagatactgaagaagaggaggaggacgaagatcaagattacagctttccgatctcctcgattctggagtgg

SEQ ID NO: 176128 - DNA, 1032 bp, Artificial Sequence
  derived and/or modified sequence
atggtgagagcgaggcaccagcctggcggactgtgcttgttgctgcttctactgtgtcagtttatggaggatcgcagcgctcaagcaggcaactgctggttacgccaggccaagaatggacgctgccaagtgctgtataagaccgaactgagcaaggaggaatgctgcagtactggccggctgtccacaagctggacagaggaggatgtcaacgataacaccctgttcaagtggatgatctttaatggcggggcccctaactgcatcccttgtaaggaaacgtgtgagaacgtcgattgcggacctgggaagaaatgtaggatgaacaagaagaacaaaccgagatgtgtgtgcgcacctgactgttctaacattacttggaaaggacccgtgtgcggcctggacgggaagacttaccggaacgagtgcgctcttttgaaggcgcgatgtaaggagcagcccgagctggaggtgcagtaccagggcaggtgcaaaaagacatgtagggacgtcttttgtcccgggagttctacgtgtgtagtagaccagacgaataacgcctattgtgtgacttgtaacaggatctgccccgagccagcctcatctgagcagtatctgtgcggaaatgacggggttacatattcgtcggcttgccaccttcgcaaggctacttgcctgctaggcagatctatcggcctggcctacgaaggtaaatgtataaaggccaagagttgtgaagacatacagtgcacagggggcaagaagtgtctatgggattttaaagtgggacgcggacggtgtagcctgtgtgacgagctgtgcccagacagtaagtcagacgagcctgtctgtgctagcgacaatgctacctacgcttcggagtgcgcaatgaaagaggcggcctgttcctccggagtccttctcgaggtgaaacactccgggtcttgtaatagcatttccgaggacactgaggaagaagaagaagacgaggatcaggattactcgtttcctatttcttctattctggagtgg

SEQ ID NO: 176129 - DNA, 1032 bp, Artificial Sequence
  derived and/or modified sequence
atggtgcgagccagacaccagccaggagggctttgcttgcttcttttgctactgtgtcagtttatggaggatagaagcgctcaagctggaaactgttggcttagacaggcaaagaacggcaggtgtcaggtgctctataagactgaactgagcaaggaggagtgctgttctaccgggagactctccacaagctggactgaggaggacgtgaacgacaataccctctttaaatggatgatctttaacggaggcgctcctaattgcataccatgcaaagaaacttgcgagaacgttgattgtggaccggggaaaaaatgccgtatgaataagaagaacaaacccagatgcgtctgtgcacccgactgctctaacataacttggaaaggtcctgtatgtgggcttgacggtaagacatacaggaacgaatgcgcacttctgaaagcgcgatgtaaggaacaaccagagctggaggtccagtaccagggtcggtgcaaaaagacctgcagagacgtgttttgtccaggtagcagtacctgtgtggtggaccagacaaataatgcatactgcgttacctgcaatcggatctgcccagagcctgcttcttctgaacagtacctctgcggcaacgatggagtgacctattcgtcagcttgtcacttgaggaaagccacttgcttgctcgggcgctcaatcggcctcgcgtatgagggcaagtgtattaaggctaaatcatgtgaggatattcagtgtacagggggaaagaagtgcttgtgggatttcaaggtgggcagaggcaggtgtagcctctgcgatgagctctgtcctgactcaaagtccgacgaacctgtttgcgccagtgataacgccacatatgcatctgagtgcgctatgaaagaagccgcttgctctagtggagtactcctggaagtgaaacatagcggaagttgtaacagcatctccgaagatacggaagaggaagaggaagacgaggaccaggattacagctttccaataagtagcatcctggagtgg

SEQ ID NO: 176130 - DNA, 1032 bp, Artificial Sequence
  derived and/or modified sequence
atggtcagggcccggcatcaacccgggggtctgtgcctcctgctgctgctcttgtgtcagttcatggaggaccgaagcgcccaagcagggaattgttggttgagacaggctaaaaacggaaggtgccaggtgctgtacaaaaccgaattgtcaaaagaggagtgctgctcaacggggcggctcagcactagttggacagaagaggacgtgaatgacaacaccctgttcaagtggatgatatttaatggaggagcgcctaattgtattccttgtaaggaaacatgcgaaaatgtggattgcggccctggcaagaagtgtcgtatgaataagaagaataagccgcgttgcgtgtgcgcccctgactgttcgaacatcacctggaaggggcctgtgtgtgggctggacggtaaaacttacagaaacgaatgtgccttactgaaggcacgctgtaaagagcagcccgaactcgaagtccagtaccagggccgctgtaaaaagacctgtagagacgtattctgcccagggagctctacctgcgtcgttgaccagacgaacaacgcttactgtgtgacctgcaatcggatctgtccagaacccgcatctagcgaacagtacttgtgcggtaacgacggcgtaacctacagttctgcttgtcatctgcgtaaagccacatgcctgctggggcggtccattggccttgcctatgagggcaagtgtattaaagcaaaatcctgtgaagacatccagtgtacaggcggcaagaagtgcctatgggatttcaaggtcggacgggggagatgcagcctatgcgatgagctatgccccgactctaagagcgacgagcctgtgtgtgcctccgacaatgctacctatgctagcgagtgcgccatgaaagaggccgcttgtagtagtggcgtgctacttgaagtgaaacacagtggctcgtgcaacagcatctccgaggataccgaagaggaggaggaggatgaagaccaggattatagttttccgattagtagtatcctcgagtgg

SEQ ID NO: 176131 - DNA, 1032 bp, Artificial Sequence
  derived and/or modified sequence
atggtccgagcgcgacaccagcccggcgggctgtgcctcctcctgcttctgctttgtcagtttatggaagaccgctcagcccaagctggcaattgttggctaagacaggctaagaatgggcggtgtcaggtcctctataagaccgaattgagcaaagaagaatgttgttccacgggcaggctgtcaacatcatggaccgaagaagatgtgaacgacaacaccctgttcaagtggatgatcttcaatggcggagcgcccaattgtataccgtgcaaggaaacctgcgaaaacgtagactgcggtcctggtaagaagtgccgtatgaacaagaagaataaaccgcgttgtgtctgtgcgcctgactgtagtaacatcacatggaaggggcctgtgtgcggtttagacgggaagacctacagaaatgagtgtgcccttctcaaggcccgatgtaaggagcagcccgagctcgaggtacagtaccagggcagatgtaagaagacgtgcagggatgttttctgccccggatcctccacctgcgtggtcgaccagacaaataacgcgtactgcgtgacatgtaatcgcatatgtcctgaaccagcatcctccgagcaatacctctgtggcaacgacggagtcacctactccagtgcttgccacctcaggaaggccacatgcctgctgggccgcagtatcgggctcgcctacgaagggaaatgcatcaaggccaaatcatgtgaggacatccagtgtaccggcggcaagaagtgtctgtgggacttcaaggtgggccggggacgatgcagtctgtgcgacgagctctgtccggactcgaaatctgacgaacccgtttgtgcttcagacaatgctacctatgctagtgaatgcgccatgaaggaagctgcctgcagtagtggggtcctcctggaggtgaagcactcaggaagttgcaactccatttctgaagataccgaagaagaagaggaggacgaagatcaggactactcttttccgatatcttctatactggagtgg

SEQ ID NO: 176132 - DNA, 1032 bp, Artificial Sequence
  derived and/or modified sequence
atggtgagagcgcgacatcagcccgggggactctgcctactgttacttctcctttgccagtttatggaggatcgttctgcccaggccggaaactgttggcttcgacaggccaagaacgggcgctgtcaggtgttatataaaactgaactatccaaggaggaatgttgttccaccggccggctaagcacaagctggactgaggaagatgtcaacgacaatacgctgtttaagtggatgattttcaacggaggagctccgaactgtattccgtgtaaagagacctgtgagaatgtggactgcggccccggaaaaaaatgcaggatgaacaagaagaacaaaccgagatgtgtgtgcgccccagactgttccaacatcacttggaagggaccagtctgcggcctagatggtaaaacctacagaaacgaatgcgccctcctaaaggccaggtgtaaggaacaaccagaactagaggttcagtaccaaggtaggtgcaagaaaacctgccgggatgtgttctgccccgggagtagtacatgtgttgtggatcaaactaataacgcctattgcgtaacctgcaaccgtatttgtcctgaacccgccagctctgagcagtatttatgcggtaatgacggcgtgacatacagcagcgcttgtcatcttcgcaaagcaacctgcctgctgggccgatcaatcgggctagcctacgaaggcaagtgcataaaggcaaagtcttgcgaggacattcagtgtacagggggtaaaaagtgtctgtgggacttcaaagtcggtcgcggccggtgttccctttgcgatgaattatgtcctgacagtaaatccgacgaacccgtgtgcgccagcgacaatgcaacatatgcatccgaatgtgctatgaaagaggctgcatgtagctccggcgttctcctggaagttaaacactctggttcttgtaattcgataagcgaggacacagaggaagaagaggaagacgaagatcaggattatagttttcccatatctagcatcctggagtgg

SEQ ID NO: 176133 - DNA, 1032 bp, Artificial Sequence
  derived and/or modified sequence
atggtgagggcccgtcatcaacctggcggcctgtgcttactactcctccttttgtgtcagttcatggaggataggtcagcccaggccgggaactgctggttgagacaggccaagaatgggagatgccaggtgctctacaaaaccgagctgtcgaaggaagagtgttgcagcaccggacggctgagtacttcttggacagaggaggatgttaatgataatacgttgtttaagtggatgatctttaatgggggcgcccccaactgcataccatgtaaggaaacatgtgagaatgtggattgtggccccggcaagaaatgccgcatgaacaagaagaataagccgagatgtgtgtgcgccccggactgtagtaacatcacatggaagggccccgtttgtgggctagacggcaaaacttatcggaatgagtgcgccctgctgaaggcccgttgtaaagagcagcctgagcttgaagtgcagtaccagggccgctgcaagaagacatgtcgagacgtgttctgccccggaagcagtacttgcgtggttgatcagaccaataatgcgtactgtgtcacctgtaaccgtatctgtcctgaaccagctagttctgaacagtatctgtgtggtaacgacggcgtcacatattcctctgcttgccatctgaggaaggctacttgtcttcttgggcgttccatcggactcgcctacgagggcaaatgcataaaagccaaatcctgcgaggatatccaatgcaccggtggaaagaaatgcctgtgggactttaaggtgggtaggggcagatgttctctatgcgacgaactctgtcccgactctaaatctgatgagccggtgtgcgctagtgataacgccacgtatgcctctgagtgtgccatgaaagaggccgcctgttcatctggcgtgctcctagaggtaaagcattccggtagctgtaattcaatctcagaagacacagaagaggaagaggaggacgaagatcaagattatagcttccccatctcttcaatcctcgaatgg

SEQ ID NO: 176134 - DNA, 1032 bp, Artificial Sequence
  derived and/or modified sequence
atggttcgagcacgccaccaaccgggtggactgtgtctcctcctgctgctgctttgtcagttcatggaggatcgttcggctcaggcgggaaattgttggcttcgtcaggccaagaatggacgctgccaggtcttatacaaaaccgagctctctaaggaggagtgttgcagtaccggcagactgtcaacttcctggactgaggaagatgtaaatgataatactcttttcaagtggatgatcttcaatggtggcgcaccgaattgtattccatgtaaggagacgtgcgaaaacgtggactgcggccctggcaaaaaatgcagaatgaataagaagaataaaccgagatgcgtgtgtgccccagattgcagtaacattacctggaaaggccctgtttgtggactggacggcaagacctaccgtaacgagtgcgcgttgctaaaggcacggtgcaaggaacagcccgaactagaggtacagtaccagggacgctgtaagaagacttgccgtgacgtgttctgtcccggatcttcgacatgcgtcgtcgaccagactaacaacgcatactgcgttacttgcaaccgtatctgcccagaaccagcatcctcagaacagtatctgtgcggaaatgatggtgtcacatactcgtcagcgtgtcacctccgcaaggcgacatgtttgcttggcaggtctattggactcgcgtatgaaggtaaatgtatcaaggcaaaaagctgtgaggatattcaatgtaccggtggtaaaaagtgtctttgggatttcaaggtcggccgaggacggtgctctctctgtgacgaactgtgccctgattcaaaatccgatgaacccgtatgcgcctcagacaacgccacatatgctagcgagtgcgcaatgaaggaagcagcctgctcttccggtgttcttcttgaagtcaagcactcaggttcgtgtaacagtatctcagaagatactgaagaggaggaagaggatgaggatcaagactattcattcccaatctcctcgatcctcgagtgg

SEQ ID NO: 176135 - DNA, 1032 bp, Artificial Sequence
  derived and/or modified sequence
atggtccgtgcaagacaccagccaggaggcctgtgcctcttgctgctgctgttgtgtcagtttatggaggatcggagtgcccaggcagggaattgttggctacgtcaggctaaaaacggaagatgccaagtgctgtacaaaaccgagctgtcgaaggaagaatgctgcagcaccgggaggcttagtacgtcatggacagaggaggacgtgaatgataacacattgtttaagtggatgatctttaatgggggcgctcctaattgtattccatgcaaagagacgtgcgagaatgtggattgcggtcccgggaaaaaatgccggatgaataaaaaaaacaagccacggtgcgtctgtgctcctgattgttccaatattacctggaagggaccagtctgcggactagatggcaaaacctacaggaatgagtgcgccttactcaaggcacgatgtaaggagcagccagaactggaagtgcagtaccaagggaggtgcaagaaaacatgccgagatgtcttctgtccaggttccagcacctgcgtggtcgaccagacaaacaatgcatattgtgtgacatgtaataggatctgccccgaacccgccagttccgaacagtacctgtgcgggaatgacggcgtgacttacagctcagcctgccacttaagaaaggcaacctgtctattgggccgctctatcggccttgcctacgaaggcaagtgcataaaagcgaaatcttgtgaggatatccagtgcacgggcggaaagaaatgcctgtgggatttcaaagtgggaagaggaagatgttcgctatgtgacgaactctgtcccgactccaagtctgacgaacccgtgtgtgccagcgacaacgccacctatgcttccgagtgcgctatgaaagaagcggcctgtagcagcggcgtgctccttgaagtgaagcactcagggtcatgtaattccatttcagaagataccgaggaggaagaggaggatgaggatcaggactacagcttccctatttcgagcattctggagtgg

SEQ ID NO: 176136 - DNA, 1032 bp, Artificial Sequence
  derived and/or modified sequence
atggtgcgggcgcggcaccaacccggcggcctttgcctgctcttactactgctctgccaatttatggaggaccgcagcgcgcaagctgggaactgctggttgaggcaggctaagaatggcaggtgccaagtactgtataaaacagagttgtccaaagaagaatgttgcagtacagggaggctgtccacctcctggacagaggaagacgtgaacgataacactctgtttaagtggatgatctttaacggcggggccccgaactgcattccatgtaaggagacctgcgagaatgtggactgcggcccaggtaaaaaatgccggatgaacaagaagaacaagcctcggtgtgtatgcgctcccgactgcagcaacatcacttggaagggccccgtgtgtgggttggacggcaagacctatcggaacgaatgcgcactactaaaagctaggtgcaaagagcaacctgaactagaggtgcaataccagggtcgctgcaagaaaacctgcagggacgttttctgtccgggatccagcacttgcgtggttgaccagaccaataatgcgtactgcgtcacttgcaaccgtatctgcccggaaccagcttcttcggaacagtatctgtgcggaaatgacggcgtcacttatagctctgcatgtcacctccgaaaggctacatgcctgcttgggaggtccataggactggcttatgaagggaagtgcatcaaggctaagtcctgcgaggacatccagtgtacaggcggaaagaaatgtttgtgggactttaaggtaggcagggggcggtgctctttatgcgatgaactttgtcctgattccaagtcagatgagcccgtgtgcgcctctgacaacgccacgtacgccagtgaatgcgccatgaaggaggcagcctgttccagcggtgtcctcctcgaagttaaacatagcgggtcatgtaattccatatctgaggatacagaagaggaggaggaggacgaagaccaagattactcgttcccaatctcctccattctggaatgg

SEQ ID NO: 176137 - DNA, 1032 bp, Artificial Sequence
  derived and/or modified sequence
atggtgagagcaaggcaccagccgggcggactgtgcctgctcctgttgcttctgtgccagttcatggaggaccgctccgcgcaggccggcaactgctggcttagacaggctaaaaacggcagatgccaagtgctgtataagaccgagctgtccaaagaagagtgttgcagtactggtcggctgagtacctcatggacagaggaagacgttaacgataacaccctgttcaagtggatgatttttaacggcggcgcacccaactgcatcccctgtaaggagacctgcgaaaatgtggattgtggtccagggaaaaaatgtagaatgaacaagaagaacaaacctagatgcgtttgcgctcccgattgctctaatataacatggaagggccctgtctgtggattagacggaaaaacttacaggaacgaatgcgccctcttgaaagcaagatgtaaggagcaacctgagctggaggtgcaataccagggccggtgtaagaagacttgccgagatgttttctgcccgggctcatcaacctgcgtagtggaccagaccaacaacgcttactgtgtcacctgcaacaggatttgccccgaacctgctagttcagagcaatacttgtgcggcaacgatggcgtgacctacagtagcgcctgtcatctgcggaaggccacatgccttctgggacgctccattggactcgcttacgaaggaaagtgcatcaaagccaaatcatgcgaggatatacagtgtacaggaggcaaaaagtgtctatgggactttaaggtggggagaggcagatgctccctgtgtgacgagctctgccctgattcgaaaagtgacgagcctgtctgtgctagcgacaatgccacttacgcatctgaatgtgctatgaaggaagctgcttgtagctccggggtgctgctggaagtgaagcatagcgggagttgtaattctatcagcgaagacactgaagaggaggaagaagacgaggaccaggactacagttttcccattagttccattcttgagtgg

SEQ ID NO: 176138 - DNA, 1032 bp, Artificial Sequence
  derived and/or modified sequence
atggtgagagcaaggcaccagccaggtggcctgtgccttttgctcctcctgctgtgtcagtttatggaagatagatcagctcaggcaggaaattgctggctgcgccaagccaagaatggtagatgtcaggtactgtacaaaactgaactgtcgaaagaagaatgctgttcaactggccgcctctccactagctggaccgaggaggacgtgaatgataacacgctgtttaagtggatgatattcaatggtggcgcccccaactgcattccctgtaaagaaacttgtgaaaatgtcgactgtggaccaggtaaaaagtgccgcatgaacaagaagaacaagcctcgttgcgtttgcgccccagactgctcaaacattacttggaagggccctgtctgcggtcttgatggaaagacctaccggaacgagtgcgccctcttgaaggcaaggtgcaaggaacaacctgaactggaagtgcaataccaaggcagatgtaaaaagacctgtagggacgtattttgtcccggatcctcgacctgcgtggtggaccaaaccaacaacgcttactgtgtcacctgtaatcgaatctgtccagagcctgcatcctcggaacagtacctctgcggaaacgatggtgtgacctactcgagtgcatgtcatcttagaaaagcaacttgtcttttggggcgctccatcggccttgcgtacgaaggaaagtgtattaaggcgaagagctgtgaggatatccaatgtaccggagggaagaagtgcttgtgggacttcaaggtgggacgggggcgttgcagtctgtgtgatgaactttgtccggactccaagagcgatgaacctgtctgtgcaagcgataacgccacgtatgcatctgaatgtgcgatgaaagaagcagcctgttcaagcggggtgctccttgaagtgaaacattccggatcctgtaactcaatttcagaagataccgaagaagaggaggaggatgaggaccaggattactcttttcctatatctagcattctcgagtgg

SEQ ID NO: 176139 - DNA, 1032 bp, Artificial Sequence
  derived and/or modified sequence
atggtccgcgcgaggcatcagcctggcggcttgtgcctgctgttacttctgctatgtcagttcatggaggaccgaagtgcccaagccggaaactgctggcttcgacaggctaagaacgggcgttgccaagttctgtacaagacagagttgagtaaggaggagtgttgttcaaccggacgtctgtctacctcttggactgaggaggacgtgaacgataatactctctttaaatggatgatcttcaacggtggagctcctaactgcataccgtgcaaagaaacttgcgagaacgtggattgtgggcccggcaaaaagtgccgcatgaataagaaaaataagccccgctgtgtatgtgcaccggactgttctaatatcacctggaaaggacctgtctgcggtctggacggaaaaacatatcgcaacgagtgcgctctgctgaaagcgcgctgcaaagagcagcccgagctcgaagtgcagtatcagggccgatgtaaaaagacttgtagagacgtgttttgtccaggaagttccacctgcgtcgttgaccaaacaaacaacgcctactgcgtgacatgcaaccggatctgtcccgagccagctagctccgaacagtacctttgcgggaatgatggagttacatactctagcgcctgtcaccttaggaaagcaacgtgcctgcttggacgctctatcggactcgcatatgaaggaaaatgcataaaggctaaatcttgtgaggacatccaatgtacaggaggaaaaaaatgcttgtgggacttcaaggttggcaggggaagatgtagcctttgcgacgaactatgtcctgactctaaatccgacgaacccgtttgcgctagtgataacgcaacttatgcttcagaatgcgcaatgaaggaagctgcgtgctcttcaggagtcctcctagaggtgaagcattccggcagctgtaactccattagcgaagatacggaagaagaagaggaggacgaagatcaagattatagctttcccatctcaagcattctggagtgg

SEQ ID NO: 176140 - DNA, 1032 bp, Artificial Sequence
  derived and/or modified sequence
atggtgagagcacggcaccagccaggtggactgtgtctgctcctgctgctcctgtgccagttcatggaggaccgctcggcccaggctggaaactgctggctgcgacaggccaagaacggacgctgccaagtgctgtacaaaactgaactgtccaaagaagaatgctgtagcaccggacggctgtcgacttcctggactgaagaggacgtcaacgataatactctgtttaagtggatgatcttcaacggtggagcgccgaattgcatcccgtgcaaagagacttgcgaaaacgtggactgcggaccgggcaagaagtgccggatgaacaaaaagaataagccgcgctgcgtgtgcgccccagactgctctaacatcacgtggaagggtccggtgtgcggactcgatggcaagacctaccggaacgaatgcgcgctcttgaaggcacggtgtaaagagcaaccggagctcgaggtgcagtaccagggtcgctgtaagaaaacttgccgcgatgtgttctgcccaggaagcagcacctgcgtcgtggatcaaaccaacaacgcctactgcgtcacctgcaaccgcatatgcccggagccggccagctccgaacagtacttgtgcgggaatgatggagtgacttactcatccgcatgccatctgcgaaaggcaacttgcctgctcgggaggtcgatcggcctggcctacgaaggaaagtgtatcaaggcgaagagctgcgaggacatccaatgcacggggggaaagaagtgcctctgggatttcaaagtgggacgcggacgctgctcactgtgcgatgaactctgcccagatagcaagtccgacgagcccgtctgtgcctccgataatgctacttacgcctcggaatgtgccatgaaggaggcggcatgctcatcgggagtgcttctggaggttaagcattcgggatcttgcaactcaatctcagaagataccgaggaggaagaggaggatgaagatcaggactacagctttcccatttcttcaatcctggagtgg

SEQ ID NO: 176141 - DNA, 1032 bp, Artificial Sequence
  derived and/or modified sequence
atggtcagagccaggcatcaacctggcggattgtgcttgctgctgctgctcctctgtcagttcatggaggacaggagcgcacaggccggaaactgctggctgcgccaagctaagaatggaagatgccaggttctctacaagaccgagttgagtaaggaggaatgctgttccactggcaggcttagcacttcctggactgaggaagatgtaaacgacaacaccctttttaagtggatgatctttaatggtggagcgcctaattgcatcccttgcaaggagacgtgcgagaacgtggactgtggtcccggcaaaaagtgtaggatgaataagaaaaacaaacccagatgtgtgtgcgctcctgattgtagcaatattacttggaagggaccagtgtgtggcttggacggtaagacctaccgcaacgagtgcgccttgttgaaggcccgctgcaaagaacaaccggagctggaggttcaatatcagggtcgctgcaaaaagacctgcagagacgtgttctgccccggttctagcacgtgtgtagtggaccaaacaaacaacgcttactgcgtgacctgcaatcgcatctgccctgaacctgcgagttctgaacaatacctgtgcggaaatgacggagtaacttattcctccgcatgtcatctgcgcaaggctacgtgcctcttgggtaggtctattggtctggcctacgaaggcaagtgcatcaaagccaaaagttgcgaagacatccagtgtaccggtggtaagaagtgcctgtgggacttcaaagtgggtagaggaagatgcagcctctgcgacgaattgtgtccagacagcaaaagtgacgagcctgtttgtgcatccgacaatgccacgtacgcatctgaatgcgctatgaaagaagccgcctgtagctccggcgtcttgcttgaagtgaagcatagcggcagctgtaatagtatctctgaagacacagaggaggaagaggaggacgaggaccaagactacagtttccccattagcagtatcctggagtgg

SEQ ID NO: 176142 - DNA, 1032 bp, Artificial Sequence
  derived and/or modified sequence
atggtgcgggcccggcatcagcccggcggtctgtgcctcctgctgctgctcctctgccagttcatggaagataggtccgcgcaggccggcaactgctggctgcgccaggccaagaacgggcgctgtcaagtgctgtacaagactgaactgagtaaggaggaatgctgctcaaccgggcgactgtcaaccagctggacggaggaggacgtcaacgataacaccttgttcaaatggatgatcttcaacggcggagcgcctaattgtattccctgtaaggaaacctgcgaaaatgtcgactgcggtccgggcaagaaatgcagaatgaataagaaaaacaagccgaggtgcgtctgtgcaccagactgctcgaacatcacctggaagggaccagtgtgcggattggatgggaaaacttacagaaatgagtgtgcgcttctgaaagcacgctgtaaggagcaaccggaacttgaggtgcaataccagggacggtgcaaaaagacttgcagagatgtcttttgcccgggatcctcaacttgtgtggtggaccagactaataatgcctactgcgtgacctgcaaccgcatttgtccggagccagcttcatctgaacagtatctgtgcggaaacgacggtgtcacttactcctccgcatgccacctccggaaagctacgtgcttgctcgggcgctcgatcggactcgcgtacgaaggaaagtgcatcaaggccaagagctgcgaggatatccagtgtaccggaggaaagaagtgcctgtgggacttcaaggtgggacggggccgctgctcgctctgcgacgagctgtgccctgactcgaagagcgacgaaccggtgtgtgcgtcagacaacgctacctacgcctcggaatgtgccatgaaggaagcagcctgctccagcggcgttcttctggaggtgaaacacagcggatcctgcaactccatctcggaggatactgaagaagaggaagaagatgaagatcaagactactcgtttcctatcagctcgatcctggagtgg

SEQ ID NO: 176143 - DNA, 1032 bp, Artificial Sequence
  derived and/or modified sequence
atggtaagagcacgacaccagcccggaggattgtgcctgctactgctgctgctgtgccagtttatggaggaccgatccgctcaggcggggaactgctggcttcggcaggccaagaacggtcggtgtcaagttctctacaaaaccgaactttcaaaggaggaatgctgcagcaccggacgcctatccacctcctggaccgaagaggatgtcaatgacaacaccctttttaagtggatgatcttcaacggcggtgcccccaactgcattccatgtaaagagacttgcgagaatgtcgattgcggacctggcaaaaagtgccgtatgaacaagaagaacaaacctcggtgcgtgtgtgctccagattgttctaatatcacctggaagggccctgtgtgcgggttggatgggaagacatatcgtaatgaatgtgctctgcttaaggcacggtgcaaggaacagccagaactggaagtccagtaccaggggagatgtaagaagacatgtcgggatgtgttttgccccggctcctcgacttgtgttgtggaccagaccaataacgcctactgcgtgacctgtaatagaatctgccccgaacccgcatctagcgaacagtatctctgtgggaacgacggcgtgacctattcttccgcatgtcaccttcgaaaggccacctgccttttaggcagaagtatcggtctggcgtacgaagggaaatgtattaaggccaagagctgtgaagatattcagtgtacaggcggaaagaaatgcctgtgggattttaaggtgggcagggggcgctgttcactttgtgatgagctgtgccccgattcaaaaagcgacgaaccggtatgtgctagcgataacgctacgtatgccagcgaatgcgccatgaaggaggcagcttgttcctccggagtgctgctggaggtgaagcatagcggatcctgtaattccatctcggaagatacagaggaggaggaggaggatgaagaccaggactattctttccccatctcctccattctcgagtgg

SEQ ID NO: 176144 - DNA, 1032 bp, Artificial Sequence
  derived and/or modified sequence
atggtgcgtgccaggcatcaacctggaggtttgtgcttgttgctcctcctcctgtgccagttcatggaggaccgttcagctcaggctggtaactgctggctccgccaggcaaagaacggcagatgccaagttctttacaagacagagttgagtaaagaagagtgttgtagcactggtcgtttgtctacaagctggactgaagaggacgttaatgataatacattgttcaaatggatgatcttcaacggaggcgcacccaattgtatcccttgcaaagagacctgtgaaaacgtggactgcggccctggaaagaaatgccgtatgaataaaaaaaataaacccaggtgcgtgtgtgctcccgactgtagcaacatcacctggaagggccccgtgtgcggattggatggaaaaacatatcgtaatgagtgcgcattgctcaaggctcgttgtaaggaacagcctgagttggaggtgcagtatcaaggcagatgtaaaaagacatgcagagacgtcttctgtcccggttcttcaacctgcgtagtcgaccagactaacaatgcatactgcgtgacttgcaaccgtatttgccctgaaccagccagctccgagcaatatttgtgtggtaatgatggcgtaacatactcctctgcttgccatttgaggaaggctacatgtctgctgggtagatccatcggcctggcttacgagggaaaatgtatcaaggcaaagtcctgcgaggatatccagtgtaccggtggaaagaagtgtctttgggactttaaagtgggaaggggaagatgctcattgtgcgacgaactctgtccagattctaaatcagacgagcccgtttgtgctagcgacaacgctacatacgcctcagagtgtgccatgaaagaggctgcctgctcttctggagtgctgctggaggtcaagcatagtggcagttgcaactccatttcagaagatacagaggaggaagaggaggatgaggaccaggactacagcttccctatctccagtatcctggagtgg

SEQ ID NO: 176145 - DNA, 1032 bp, Artificial Sequence
  derived and/or modified sequence
atggtccgcgcccgccatcagcccggaggactgtgtctgcttctcctgctgctgtgccagttcatggaagataggtccgcccaggccgggaactgttggttgcgacaagctaagaatgggaggtgccaagtgctgtataaaacggagctcagcaaagaagaatgttgctctaccgggcgcctgagcacaagctggactgaggaagatgtcaatgataataccctgtttaagtggatgattttcaacgggggggcacccaactgtataccctgcaaagagacttgtgaaaatgtggactgtggcccgggtaaaaaatgtagaatgaacaagaagaacaaaccaagatgcgtctgtgccccagactgtagcaatatcacttggaaaggtcccgtttgcggactcgacggcaagacgtacagaaatgagtgcgcccttctgaaagctaggtgcaaggagcagccagagctagaggtccaatatcagggaaggtgcaaaaagacttgtcgggatgtattctgccctggctccagcacgtgcgtggtcgaccagactaataacgcatactgcgtaacctgcaaccgaatctgcccggagccagcatcttcagaacaatacctgtgcggcaatgacggagtgacctactcctccgcctgccatctccgcaaggcaacgtgcctgcttggaagatccataggcctcgcgtacgagggcaagtgcattaaagctaagagctgtgaagacatacagtgtacggggggcaaaaagtgcctatgggatttcaaggtgggcaggggaagatgttccctctgtgatgagctgtgcccggatagtaagagtgacgagccagtctgcgcgtccgataacgccacctacgcatccgagtgtgcgatgaaagaggcagcttgctcttctggcgtcctgctcgaggtgaagcattcaggttcctgcaactccatctccgaggatactgaagaagaggaggaagacgaggaccaagactactcttttcctatttcaagcattctggagtgg

SEQ ID NO: 176146 - DNA, 1032 bp, Artificial Sequence
  derived and/or modified sequence
atggtccgggctcgacaccagccgggggggctgtgtctactcctgctgctcctgtgtcagttcatggaggaccgatccgcacaagccgggaactgctggctgcgacaggccaaaaacgggcgatgtcaggtgctgtataaaaccgagctgagcaaggaggagtgctgttctaccgggcggcttagtaccagctggacagaagaggatgtaaacgataatactctgttcaagtggatgatctttaacgggggagccccaaattgtataccctgcaaagaaacctgtgagaacgtcgactgcgggccaggtaagaaatgtaggatgaacaagaaaaataaacctaggtgcgtctgtgctcctgattgtagcaatattacatggaagggccctgtgtgcggcctggacggcaagacgtacaggaacgagtgcgctctcttaaaggcccgatgtaaggagcagcccgagcttgaagtgcaataccagggaagatgtaagaagacttgccgcgacgtcttctgtccagggtcatccacgtgtgtggtagatcaaacaaacaacgcctattgcgtgacctgcaatcggatctgccctgagccagcaagttcagagcagtatctgtgcggaaacgatggtgtgacctacagttccgcttgccacctgaggaaggccacctgcctgttgggacggagcatcggactggcctacgaaggaaagtgcattaaggctaagtcctgcgaagatattcagtgtaccggaggcaagaaatgcctctgggactttaaagtcggccgtggaagatgtagcctgtgcgatgagttatgtcctgatagtaagtccgatgagcctgtctgtgcctccgacaacgctacttacgcatctgagtgtgctatgaaagaggctgcctgctctagtggcgtgctgctggaggtcaagcacagtggatcctgtaatagtatctctgaagacacggaggaggaggaggaggatgaagatcaagattactcgtttccgatctcctccattctagaatgg

SEQ ID NO: 176147 - DNA, 1032 bp, Artificial Sequence
  derived and/or modified sequence
atggtcagggctcgccaccagccgggcggactgtgtctcctgttactgctgctctgccaatttatggaggaccgttctgctcaagcaggaaactgttggctgcgtcaagcaaaaaacggacgctgtcaggtactgtataaaacagagctctctaaagaagagtgctgttcaaccggacgcttgagcacttcctggacagaggaggacgtcaatgacaacacactattcaaatggatgatctttaatggaggggcccctaattgtatcccctgtaaagaaacgtgtgagaacgtggactgcggtccaggcaaaaaatgtagaatgaacaagaagaacaagcccagatgcgtgtgcgcccctgattgcagcaacattacgtggaagggccccgtgtgtggactcgacggtaagacctatagaaatgagtgcgccctgctaaaagcccgctgcaaggaacagcccgaactagaggttcagtaccaggggagatgcaagaagacgtgtcgcgatgtgttttgcccaggatcatctacctgcgtagtggaccagactaacaacgcctattgcgttacatgtaacagaatttgccccgagcctgcatccagcgaacagtacttgtgtggaaacgatggcgtgacctattcctccgcctgtcatcttcgaaaggccacatgcctgctggggcggagtattggcctcgcatacgagggaaaatgtataaaagccaagtcctgtgaggatatccagtgcactggcggcaagaaatgcctctgggattttaaagtcggccggggaaggtgtagcttgtgcgacgaactgtgcccggactccaagtcagacgagcccgtctgcgccagcgacaacgcaacatacgccagtgagtgcgctatgaaggaggctgcgtgcagcagcggggtgttactggaagtcaagcactcggggagctgcaactcgattagtgaggatacagaggaagaggaggaagacgaggatcaggactattcttttccaatttcctctatcttagagtgg

SEQ ID NO: 176148 - DNA, 1032 bp, Artificial Sequence
  derived and/or modified sequence
atggtgcgagctaggcaccagcccggtggcctgtgtttgcttctgctactgctgtgccagtttatggaggaccggtctgcacaggctgggaactgctggctcaggcaggctaagaacggacggtgtcaggtgctgtacaagacagagctgtccaaagaagagtgctgtagcaccggacggctgagcactagttggacagaagaggacgtgaacgacaatacactgttcaagtggatgatcttcaacgggggagctccaaattgtatcccatgtaaggagacatgtgagaatgtcgactgcggccctggcaaaaaatgcagaatgaataagaaaaataagcccagatgcgtttgtgctcccgactgtagcaatattacatggaagggtcccgtctgtggcctggacggcaaaacatacagaaatgaatgtgctcttttgaaggcacgctgcaaagagcagccggagctcgaggtgcagtatcaaggccgctgtaagaaaacttgtagagatgtattttgccctggttcaagcacttgtgtggtggatcagaccaacaacgcttattgtgtcacttgcaataggatttgccccgagccagcctccagcgaacagtatctgtgtgggaacgatggagtcacatatagttccgcgtgccacctgcgcaaggccacctgtttgcttggccgaagtatcgggctggcctatgaaggcaaatgcataaaggccaaaagttgcgaagacattcaatgtacaggcggcaaaaagtgtctgtgggatttcaaggtggggcgcggacggtgtagcctgtgtgacgaactgtgccccgattccaaatcagacgaacctgtgtgtgcatccgacaatgcgacatacgcttcagaatgcgctatgaaagaagccgcctgctctagtggggtgctgctggaggtcaagcactctggtagttgcaacagcattagtgaggataccgaagaggaggaagaggacgaagaccaagattatagcttccctatcagcagtattctggaatgg

SEQ ID NO: 176149 - DNA, 1032 bp, Artificial Sequence
  derived and/or modified sequence
atggtgagagcaaggcatcaacccggtggactctgtctgcttctcctccttctctgccaattcatggaagatcgtagtgcccaggcaggaaactgctggctgagacaagcgaaaaatggacggtgtcaggtgctctataagaccgagctgagcaaggaggaatgctgcagcacgggccgcctttcgacctcatggacggaagaagatgtgaatgacaacactttgttcaaatggatgatctttaatgggggtgcgcctaactgtattccttgtaaggaaacttgtgaaaacgtcgattgtgggcctggaaagaagtgtagaatgaataagaagaataagcctcgctgcgtgtgtgccccagattgctccaacattacgtggaaaggaccagtgtgtggcttggatggaaaaacctaccgcaatgagtgtgcccttttgaaggcgaggtgcaaggagcaacccgagcttgaggtccaataccagggacgctgcaagaaaacctgccgcgacgtcttttgtccgggaagctccacctgcgttgtggatcagactaacaacgcatactgcgtgacttgtaaccggatttgtccagaaccagcatcctccgaacagtacctttgtggaaacgatggtgtcacctactcaagcgcatgccatcttcgtaaggcaacctgtctgctcggaagatcgattgggctggcatacgagggtaagtgtataaaggcgaagagctgtgaagatatccaatgtaccggaggtaagaagtgtttgtgggactttaaagtgggtaggggacgctgttccctctgtgacgaattgtgtcctgactccaaaagcgacgaacctgtgtgtgcgtccgataacgcaacttacgcctccgaatgtgcgatgaaggaagccgcatgttcctccggagtgctccttgaagtgaagcatagcggttcatgtaactccatttcagaagataccgaggaagaagaagaggatgaggatcaagactactcctttcctatctcgtccatcctggaatgg

SEQ ID NO: 176150 - DNA, 1032 bp, Artificial Sequence
  derived and/or modified sequence
atggtcagagcgagacatcaacccggaggtttgtgtctcttgctgttgctcctctgtcaattcatggaggatcgttcggctcaggcaggaaactgttggcttcgtcaagcaaagaacggtcgttgccaggttctttacaaaactgaactgagcaaggaagaatgttgttctaccgggaggcttagcacctcatggaccgaggaagatgtcaacgacaacactctgtttaagtggatgatctttaatggaggggcacccaattgtattccatgcaaggaaacctgcgaaaatgtggactgtggcccgggaaagaagtgtcgcatgaacaaaaagaacaagcctcgatgcgtgtgtgcacctgactgctctaacattacttggaagggacctgtatgcggcttggatggaaagacttacaggaacgaatgtgcactgctgaaagccagatgtaaggaacaaccggaactggaagtgcagtatcagggtcggtgtaaaaagacgtgccgagatgtgttttgtccaggtagctcaacttgcgtggtggatcaaacgaataatgcctactgcgtgacctgtaaccggatctgcccggagcctgcatcgtcagaacagtacctgtgtggcaatgatggcgtgacctacagctctgcgtgccaccttagaaaagccacgtgccttctcggccgctcgataggtcttgcttacgagggtaagtgtatcaaggcaaaatcctgtgaagatatccaatgtactggcgggaagaaatgcctgtgggactttaaggtcggcagaggacggtgttctctttgcgatgagttgtgtcctgactcaaagtccgatgagccagtgtgtgcgtccgacaacgccacctacgcaagcgaatgcgcaatgaaggaggccgcctgttcctctggagtccttctcgaggtcaaacatagcggctcctgtaacagcatttcggaggacaccgaagaagaggaagaagatgaggaccaggattacagtttcccaatatcctcaatactggaatgg

SEQ ID NO: 176151 - DNA, 1032 bp, Artificial Sequence
  derived and/or modified sequence
atggtacgcgcacgtcatcaacccggtggcttatgcctcctccttctcctgctgtgccagttcatggaagacagaagtgcccaggccgggaattgctggctccgtcaggcgaaaaatggccggtgtcaggttctatacaaaacagagcttagtaaggaagagtgctgctcgacaggcagactgagcacctcatggacagaggaagatgtgaatgataataccttgttcaaatggatgatattcaacggcggtgcacccaattgtatcccctgtaaagaaacctgtgagaatgtggactgtgggcccggtaagaaatgccggatgaacaaaaagaacaagcctaggtgtgtatgtgcccctgactgtagtaacatcacatggaaaggaccagtctgtggcctggatggcaagacgtaccgaaatgagtgtgcactgctgaaggcccgttgcaaggaacaaccagaacttgaagtacagtaccagggaaggtgtaaaaagacatgtcgggacgtattttgtcctggctcaagcacctgcgtggtggatcagacgaacaacgcttactgcgtgacctgtaatcgaatatgtccagagcctgcgagcagcgagcagtacctttgtggtaacgacggtgtaacatattcttcggcctgccatctcagaaaagcgacatgcttactgggaaggagcatcggattggcttatgaggggaagtgtattaaggctaaatcctgcgaggacatccagtgcacgggagggaagaaatgcctgtgggacttcaaagtgggacggggccggtgttccctgtgcgacgagctatgtcccgacagcaaatccgacgagcctgtgtgcgcaagtgataacgcgacctacgcaagcgagtgcgccatgaaagaggccgcgtgctcctcgggcgtgctgctggaggtgaagcactccggttcatgtaactcaattagtgaagatactgaggaagaggaggaagatgaggatcaggactattcgtttcctatctcatccattctggaatgg

SEQ ID NO: 176152 - DNA, 1032 bp, Artificial Sequence
  derived and/or modified sequence
atggtgagggcccgtcaccagcctggagggttgtgcctcttactgcttctgctgtgccaattcatggaagatagaagtgcacaggcagggaactgctggctacgacaagccaaaaatggcaggtgccaggttctgtacaagaccgaactctctaaggaggagtgctgctcaaccggcagactgtcaacgtcttggaccgaagaagacgttaacgacaatacactcttcaagtggatgatcttcaacggtggcgcccccaactgtatcccctgcaaagagacttgcgagaacgtcgactgtggtccgggcaagaaatgcaggatgaacaaaaagaacaaacctagatgcgtgtgcgctcctgactgcagcaatatcacatggaagggtccagtgtgtggcctggatggtaaaacgtataggaacgagtgtgctttgttgaaggccagatgtaaggagcaacccgaacttgaggtacaataccagggaagatgtaagaaaacctgtcgggacgtgttttgcccgggctcaagcacctgtgtcgtggatcaaaccaataacgcctactgtgttacctgtaatcgcatatgcccggagcccgcgtctagcgagcaatacctgtgcggcaatgatggggtcacctactcttctgcctgccacctgcgcaaggcgacctgccttctcggccgttccatcggcctggcctatgagggaaaatgtatcaaagccaaatcctgtgaggacatccagtgcacgggaggcaagaagtgtttatgggattttaaagtaggccggggccgctgctccttgtgtgatgaattgtgccctgacagcaagagcgatgaaccagtctgcgcaagcgataacgccacgtacgccagcgagtgcgccatgaaagaagccgcgtgctctagcggagtactgctcgaagttaagcacagcggctcttgcaacagcataagtgaggacacggaggaagaagaggaggacgaagatcaggactactcctttcctataagcagcatcctggagtgg

SEQ ID NO: 176153 - DNA, 1032 bp, Artificial Sequence
  derived and/or modified sequence
atggtgagggctcggcaccagccaggaggcctctgccttttactacttctcctctgccagtttatggaggatagaagcgctcaggcaggcaactgttggttgaggcaggccaaaaacggacggtgccaggtactctacaaaacagaactgtccaaggaagaatgttgttcaacagggcgactgagcaccagctggactgaggaagatgttaacgataacacactttttaaatggatgatctttaacggaggagctccaaactgtataccctgcaaggagacatgcgagaacgttgactgcgggcccggcaaaaaatgtcgtatgaacaaaaaaaataagccgaggtgtgtgtgcgcccccgactgctctaatattacttggaagggtcccgtatgcgggcttgatgggaaaacctaccggaatgaatgcgccctactaaaggcgagatgcaaagaacagccagaactggaggtacagtaccagggccggtgcaaaaaaacgtgccgagacgtgttctgccctggatcgtctacgtgcgttgtagatcagaccaataacgcctactgtgttacgtgtaaccgaatctgccctgaaccagcatcaagcgagcagtatctgtgtggcaatgatggcgtgacctactcctctgcatgccacctgcgtaaagctacctgcctgctggggcgaagtattggcttagcgtatgaggggaagtgcataaaggcaaaatcatgcgaggacatccagtgtaccggtggaaagaagtgtctttgggatttcaaggtggggagggggagatgttcgctatgtgatgagttgtgtcccgattctaaaagcgacgagccagtgtgtgcaagcgacaatgccacttatgcctctgagtgtgccatgaaagaggcggcctgcagcagtggtgttttgctcgaagtaaaacactctggatcctgcaacagcatctcagaggacaccgaggaagaagaagaggatgaagaccaggattacagctttccaatctccagtatactcgagtgg

SEQ ID NO: 176154 - DNA, 1032 bp, Artificial Sequence
  derived and/or modified sequence
atggtgcgggctcgccaccagccgggcggcctgtgcctgctgctgctcctgctgtgtcagttcatggaggaccggtcagcccaggccgggaactgctggctcagacaagcgaagaatggtcgctgtcaggtcctgtacaagactgagttgtcgaaggaagagtgttgcagtactggcagactgagcacttcgtggactgaagaagatgtgaacgacaatacccttttcaagtggatgatctttaatggcggagcgcctaactgcattccatgcaaagaaacctgcgagaacgtggactgtggacctggtaagaagtgccgcatgaacaagaagaacaaaccacgctgcgtctgcgccccggactgctcgaacattacgtggaaggggcctgtctgtgggttggacggaaagacttaccgcaacgagtgcgcgctgctgaaggcgagatgtaaggaacagccggaactggaggtacaataccaaggccgctgtaagaaaacttgccgcgatgtgttctgtcctggctcgtcaacctgcgtggtggatcagactaataacgcatactgcgtgacgtgcaaccggatctgcccagagcctgcttctagcgagcaatacctctgcggaaatgatggcgtgacttactcctcggcgtgccatttgcgaaaagccacctgcctcttgggaaggagcatcggactggcctacgaggggaagtgcataaaggccaaaagctgcgaagatatccaatgtactggagggaagaagtgtctgtgggactttaaggtcggacggggacgctgcagcctttgcgacgagctgtgcccggatagcaagtccgatgagccagtgtgtgcatccgataatgctacctatgcgagcgagtgcgctatgaaagaggcggcgtgctcctccggagtgcttctggaggtcaaacactccggctcctgcaattccatctcggaagataccgaagaagaggaagaggacgaggatcaggattactctttcccgatctcaagcatccttgaatgg

SEQ ID NO: 176155 - DNA, 1032 bp, Artificial Sequence
  derived and/or modified sequence
atggtccgagcaaggcaccagcctggaggactttgtctcttgctactcttactttgtcagttcatggaggacagatccgcccaagccggcaactgttggctgagacaggccaagaatggacgatgccaagtgctgtataagacagagctgtcaaaggaagagtgttgtagcaccggtaggctgtcaacctcatggactgaagaggatgtgaatgataacactcttttcaaatggatgatcttcaatggaggagcccccaattgcataccttgtaaagagacctgcgagaacgtggattgtggtcccggcaaaaagtgcaggatgaataagaagaacaaaccccgatgtgtttgcgcacccgattgttcaaatattacatggaaaggacctgtgtgcggcctggatgggaagacctaccggaacgaatgtgctctcctcaaggctaggtgtaaggaacaacccgagctagaagtgcagtaccaaggtcgatgcaagaagacatgcagggatgttttctgccccggcagctctacatgcgtggtagatcagaccaacaacgcgtattgtgttacctgtaatagaatctgcccagagcctgccagctccgaacagtatttgtgcggcaacgacggtgtcacctactctagcgcttgtcatctgcgaaaagcaacttgtctgctgggtaggtctatcggcctcgcttatgaagggaagtgtatcaaggccaaatcctgtgaagatatacaatgcactggcggtaagaaatgtctttgggatttcaaagtagggcgaggccggtgcagtctctgcgacgagttatgccccgactcaaagagcgacgaacctgtatgtgccagcgataacgcgacttacgcaagcgagtgcgccatgaaagaggcagcgtgcagctccggcgttctgctcgaagttaaacactccgggtcatgcaattctatctctgaggatacggaagaggaagaggaggatgaggaccaggactactcatttcccatttcttcaatcctggagtgg

SEQ ID NO: 176156 - DNA, 1032 bp, Artificial Sequence
  derived and/or modified sequence
atggtgagggccaggcaccagcctggtggcctgtgtctgttgcttttgttgctgtgccagtttatggaggacagatcagctcaagccggaaactgctggctcagacaagccaaaaatgggcggtgccaggtgttgtacaagactgaactttcgaaggaagaatgctgctccaccggtcggctgtcaacctcatggacggaagaagatgtgaacgacaatactctgttcaagtggatgatcttcaatggcggagcccccaactgtatcccgtgcaaggagacttgcgaaaacgtcgactgcgggccaggaaaaaagtgccgcatgaacaaaaagaacaaaccgagatgcgtctgcgccccggactgctcgaacattacttggaagggaccggtctgcggactggacggaaagacctaccgcaacgagtgtgcactgctgaaggcaagatgtaaggaacaacctgagctggaagtccagtaccagggtcgctgcaaaaagacttgtcgggatgtgttctgtccaggctcaagcacttgcgtggtcgatcaaactaacaacgcgtactgcgtgacctgcaacagaatttgcccggaaccagcgagcagcgaacagtacttgtgcggcaatgacggtgtgacttacagcagcgcgtgtcaccttcggaaagcaacctgtctcctcggccgctcaatcggactggcctacgagggaaaatgcattaaagccaagtcttgcgaggacatccagtgcaccggtgggaagaagtgcttgtgggactttaaagttggacggggaaggtgttcgctgtgtgacgagctgtgccctgattcgaagtcagacgagccggtttgcgcctcggataacgccacttatgcgtctgagtgcgcgatgaaggaggcggcatgctcctcgggcgtgctcctcgaagtcaagcactcaggaagctgcaattcaatctccgaggacaccgaggaggaggaagaggatgaggatcaggactactccttccccatcagctcgatcctggagtgg

SEQ ID NO: 176157 - DNA, 1032 bp, Artificial Sequence
  derived and/or modified sequence
atggtgcgggcccgccaccagccaggagggttgtgtttactgctgctgctcctgtgtcagttcatggaggataggtctgcacaggccggaaattgttggctgaggcaggccaagaacggacgttgccaggtcctgtacaagaccgaattatctaaggaagagtgctgtagtaccggacggctgtccaccagctggacagaagaggatgtcaatgataacaccctcttcaaatggatgatcttcaatggcggcgcccctaactgtattccctgcaaggagacctgtgagaatgtcgactgcgggccaggcaaaaaatgcagaatgaataagaaaaacaagccacggtgtgtctgcgcccccgactgctcgaacataacttggaaaggcccagtatgcggtctagatggcaagacttataggaacgagtgtgccctgctcaaggcaaggtgcaaggaacagcccgagcttgaggtgcagtaccaagggcgctgtaaaaagacctgccgtgacgttttttgccctggctccagcacatgtgtggtggatcagactaacaatgcctattgcgtgacgtgtaatagaatttgcccggagccagcctcatctgaacagtacctttgcggcaacgacggggtgacctactcatccgcttgccatctgaggaaggccacttgtctgctcggtcggtccatcgggcttgcctacgaaggcaaatgtataaaagctaagagctgtgaagatattcagtgcacgggcggcaagaagtgtctgtgggattttaaggtggggaggggacgttgttccctgtgtgacgagctgtgcccggactccaaaagtgacgagcccgtctgtgcctcagataacgccacttacgcgagcgagtgcgcaatgaaagaggcagcttgttccagtggagtgctcctggaggtgaagcattcaggcagctgcaacagtatcagtgaggataccgaagaggaagaagaagacgaggatcaggattactccttcccaatttcaagtattttggaatgg

SEQ ID NO: 176158 - DNA, 1032 bp, Artificial Sequence
  derived and/or modified sequence
atggtgcgggcccgccaccagcctgggggtctttgccttctgctgctgctgctttgtcagttcatggaggacagatccgcacaggctggcaattgctggctgcggcaggctaagaacggacggtgccaagtcctgtacaaaaccgaactgagcaaggaggaatgctgcagcactggacgactgagcacctcctggactgaagaagatgtgaacgacaacactctgttcaaatggatgatcttcaatggcggtgcgccgaactgtatcccctgcaaagagacgtgcgagaacgtggactgcggaccagggaagaaatgcaggatgaacaagaagaacaagccgaggtgtgtgtgcgcgcctgattgcagcaatatcacctggaagggcccggtgtgcggactggacggaaaaacttaccgcaacgagtgcgctttgctcaaagcccgctgcaaggagcagccggaactcgaagtgcagtaccagggacgctgcaagaaaacttgtcgggacgtgttctgcccaggatcctccacctgtgtcgtcgatcagactaacaatgcatactgcgtgacctgtaaccggatctgcccggagccagcttcctctgaacaatacctgtgcggcaacgacggagttacctactcgagcgcgtgtcacctgcggaaggcgacttgcctgcttggtcgctccattggactcgcgtacgaaggcaaatgtatcaaggcgaagtcgtgcgaggacatccagtgtaccgggggcaaaaagtgtctctgggatttcaaggtcgggcgcgggcgctgctcgctctgcgacgaactgtgcccggacagcaagagcgacgagccggtttgtgcttccgataatgctacttacgcctcagaatgcgctatgaaagaggcggcttgttcatcgggcgtgctccttgaagtcaagcattcggggtcgtgtaactccatctccgaagatacggaagaagaagaggaggacgaggaccaggattactcgtttccaatctcgagcattctcgaatgg

SEQ ID NO: 176159 - DNA, 1032 bp, Artificial Sequence
  derived and/or modified sequence
atggtacgagcgcgccatcagcccggtggcctgtgtctcctgctcctgttgctgtgccagtttatggaggataggagtgcgcaggccggaaattgttggctccggcaggcaaaaaatgggcgctgccaggttttgtataagaccgaactcagcaaggaggagtgttgctctaccggaaggctctctaccagttggactgaggaggacgtgaatgataatacactttttaagtggatgattttcaatgggggggctccaaattgtattccttgtaaagagacatgtgagaatgtcgactgcgggcctggcaaaaaatgtcgaatgaacaaaaagaataaaccaaggtgcgtctgcgccccagactgcagcaatattacatggaaaggtcccgtgtgcggtctcgatgggaagacatacaggaacgagtgcgctctgctgaaggcgaggtgcaaggagcagcccgagctcgaggttcaataccaggggagatgcaagaaaacttgccgcgatgtgttttgtcctggaagcagcacctgtgtggtcgatcagacgaacaatgcctactgtgtaacctgcaaccgcatatgccctgaaccagcgtcctccgagcagtacctttgcgggaacgatggcgtgacatattccagtgcttgtcatttgcgcaaggccacctgtttgttgggtcggtctatcgggttggcatacgagggcaagtgcattaaggccaaatcctgcgaagatatccagtgtaccgggggtaagaaatgcctctgggattttaaagtgggcagagggagatgctcactgtgcgacgaactctgccctgatagcaaatctgacgagcccgtttgcgcatcagataacgcaacttatgccagcgaatgtgctatgaaagaagctgcatgcagtagcggagttttgcttgaggttaaacatagtgggtcatgtaattctatttccgaagatacagaagaggaggaagaagacgaagaccaagactattcattccctatttcttccatactggagtgg

SEQ ID NO: 176160 - DNA, 1032 bp, Artificial Sequence
  derived and/or modified sequence
atggtgagagctcggcatcaaccaggtggactctgtctcttgttgttgttgctgtgtcagttcatggaggatagatctgctcaggcgggcaactgctggctcaggcaggccaagaacggacgatgtcaggtcctgtacaagaccgagctgtctaaagaggaatgttgcagtaccgggaggctgtctacatcatggactgaggaagatgtgaacgacaacactctgtttaagtggatgatctttaacggaggcgcgcctaactgtattccctgtaaagagacatgcgaaaatgtcgactgcggtccgggcaagaagtgtaggatgaacaaaaagaacaaacccagatgcgtgtgtgccccggactgttcaaacatcacctggaaaggtcccgtctgtgggcttgatggaaaaacctatagaaacgagtgtgctttgcttaaagcaagatgtaaggagcagccggaattggaggttcagtatcagggaagatgtaaaaagacctgtcgggatgtattctgtccgggcagctccacttgcgtggtagaccaaacaaacaacgcttactgcgtcacatgcaataggatctgccccgagcctgcctcaagtgagcagtatctgtgtgggaacgacggagtaacctactccagcgcttgtcatctcagaaaagccacctgcctcctgggtcggtcaattggactggcttatgaggggaaatgtattaaagctaagagctgcgaagatatacagtgtactgggggaaaaaagtgcttgtgggattttaaggtgggcagagggcgatgctccctgtgtgacgagctctgcccagatagtaaatccgacgagccagtttgtgccagcgataatgccacttacgccagtgaatgtgccatgaaagaggccgcttgctcttcaggtgtcctgctggaagtgaagcattcaggctcttgtaattctataagtgaagacaccgaagaggaggaggaagacgaagatcaggattactctttccctattagctctatacttgagtgg

SEQ ID NO: 176161 - DNA, 1032 bp, Artificial Sequence
  derived and/or modified sequence
atggttagagcccgccatcagcccggggggttgtgtctcctactacttcttctgtgccagttcatggaagatcggtctgcccaggcaggaaattgctggcttagacaggcaaaaaacggaaggtgtcaggtgctgtacaaaacagaactctctaaagaggaatgttgctctactggaagactttcgacatcctggacagaagaagacgtaaatgataacactttgtttaaatggatgatatttaatgggggagcaccaaactgtataccctgtaaagaaacttgtgagaatgtggattgtggacccggaaaaaaatgccgcatgaacaagaaaaataaaccaagatgtgtgtgtgcccccgattgtagtaacataacatggaaagggccagtgtgcggactcgatggaaaaacttatcggaacgaatgcgcactgctcaaggctcggtgtaaagaacagccagaacttgaagtccaatatcaagggagatgtaagaaaacttgtagagacgtcttttgtccaggatcatctacttgcgtggtagatcagacgaacaatgcttactgtgtcacatgcaaccggatctgtcctgaacccgcatcctcagaacagtatctgtgcgggaatgatggagttacttacagttcggcgtgtcatcttcgcaaagcaacttgtctccttgggaggagtataggactcgcctatgagggaaaatgcataaaagcaaaatcttgtgaggatatccagtgcactggaggaaaaaagtgcttatgggattttaaagtgggacgagggcgctgttccctctgtgatgaactttgccctgattcaaaatctgatgaacccgtgtgcgcctcagataacgccacttacgcctccgaatgcgcaatgaaagaagccgcctgttcatccggagtcctccttgaggtgaaacattctggatcttgtaacagtatctctgaagatacagaagaggaagaagaagatgaagaccaggattattctttccccattagttctatcttggaatgg

SEQ ID NO: 176162 - DNA, 1032 bp, Artificial Sequence
  derived and/or modified sequence
atggttcgggctcgccaccaaccagggggactctgccttctgcttctcctcctctgccaattcatggaagaccgcagcgcccaagcggggaactgctggctgaggcaagccaagaatggaagatgtcaggttctgtacaaaaccgagctatctaaagaggagtgttgctcgacggggcgactgtcaacgtcctggacagaggaggatgtgaatgacaacacacttttcaagtggatgatttttaacggcggggcacctaattgtatcccttgtaaggaaacttgtgagaacgttgattgtggccccgggaaaaaatgtcgcatgaataagaaaaacaagccgcgatgcgtctgtgcaccggactgctccaatattacttggaaagggcccgtgtgtggactcgacgggaaaacatatagaaatgagtgcgccttactcaaggcccgatgcaaagagcagcctgagctcgaggttcaatatcagggcagatgcaagaagacgtgccgagatgtgttctgcccaggctcgtcaacatgcgtcgtggaccaaactaataatgcctattgtgtgacatgtaatcgaatatgccccgaacctgcctcatctgaacagtacctgtgtggaaatgacggcgtcacgtattcttctgcctgtcatcttagaaaggctacctgcctgcttggcagatccatcggcctggcctatgagggcaagtgcatcaaagcgaagtcctgcgaagatatccagtgcacaggcggtaagaagtgtctgtgggacttcaaggtgggacgtggccgctgcagtttatgtgatgaactgtgtcccgactcgaagtctgacgaacctgtttgcgccagtgacaatgctacctacgcatctgagtgcgccatgaaggaggctgcttgctcttcgggagtgctcctagaggtaaagcactcaggctcctgcaattctatatccgaggacacggaagaagaagaggaagacgaagatcaagactactccttccctatctccagcattttggaatgg

SEQ ID NO: 176163 - DNA, 1032 bp, Artificial Sequence
  derived and/or modified sequence
atggtcagggccaggcaccaaccaggaggactctgcctcctcctgctgcttctgtgccagtttatggaagatcgttccgcacaggctggaaattgttggctgcgccaagccaaaaacggccggtgtcaagtcctttacaagaccgaactgtcaaaggaggagtgctgttccaccggtaggctttcgacttcgtggaccgaagaggatgtcaatgataacaccctgttcaaatggatgattttcaatggaggggcacctaattgtattccatgcaaggaaacttgcgagaatgtggattgcggacctggtaagaagtgtcgtatgaacaagaagaacaaaccaagatgcgtgtgtgccccagactgttccaacattacgtggaaaggtcctgtctgtggacttgatgggaaaacctaccgcaatgagtgcgccctgctcaaagcgcggtgcaaggaacagccagaactcgaagtccaataccaagggcggtgcaaaaagacgtgcagagatgtgttttgccccggttcttcaacttgcgtggtcgatcagacgaacaatgcttactgtgtcacttgtaacagaatttgtccagaacccgccagctcggaacaatacctttgcggaaacgacggtgtgacttacagctcagcatgtcatctgcggaaagcaacctgtcttttggggcgatcaatcgggctcgcatacgaaggaaagtgcattaaggcgaagtcgtgcgaagatattcaatgtaccggcggaaagaagtgcttgtgggatttcaaagtgggacgaggtagatgttcgctgtgtgatgaactttgcccggatagcaagtccgatgaaccagtgtgtgcatcggacaacgccacctacgcaagcgaatgcgctatgaaggaggcagcatgtagctcgggagtgcttctggaagtgaaacactcaggatcttgtaactcgatttcggaggatactgaagaagaggaggaagatgaagatcaggactacagctttcctatctcgagcatattggagtgg

SEQ ID NO: 176164 - DNA, 1032 bp, Artificial Sequence
  derived and/or modified sequence
atggtgcgtgcccgacatcaacctggcggactgtgcttacttttgttgttactctgccagtttatggaagatcgctctgctcaagcaggtaactgttggctgagacaagcaaagaatggccgttgtcaagtgctgtataaaactgagctttcaaaagaagaatgctgtagcacaggccgcttgtctacctcgtggacagaggaagacgtcaatgataatactttatttaagtggatgatcttcaatggcggcgcgccgaactgtatcccatgtaaagaaacatgcgagaacgtagactgtggaccgggtaaaaagtgccgtatgaacaaaaaaaacaaaccacgttgtgtctgtgcacctgattgttccaatattacatggaagggtccggtatgcggattagacggtaaaacgtatagaaatgaatgcgctctcttgaaagcgcgctgtaaggaacagcctgagcttgaagttcagtatcagggtcggtgcaaaaaaacctgccgcgatgttttttgtccgggatcttccacatgcgtggtagatcaaactaacaatgcgtattgtgtgacatgcaaccggatttgtcctgagcctgcctcatcagaacagtatctgtgcgggaatgacggagtcacctatagctctgcatgccatttaaggaaagctacatgcctgctgggccggagcataggccttgcctatgaggggaagtgtataaaggccaagtcttgtgaagatatccaatgcacgggcggaaagaaatgtttatgggactttaaagtcggacgaggacggtgttctttatgcgatgaactgtgtccggatagcaaatcagatgaacctgtgtgtgcctcagacaacgcaacatatgcgtcagagtgtgccatgaaggaagctgcgtgctcatcgggggtgttattggaagtcaaacatagcgggtcgtgcaattccatctccgaggacacagaagaagaggaagaggatgaagaccaagactatagcttccctatttcaagtatcctcgaatgg

SEQ ID NO: 176165 - DNA, 1032 bp, Artificial Sequence
  derived and/or modified sequence
atggtccgggctcgccaccaaccgggtgggctctgcctactgctcctcctactctgtcagtttatggaggaccggagcgcacaggccgggaactgttggctgagacaggcaaaaaatgggagatgtcaggtattgtacaagacagagctgtctaaggaggaatgttgcagcacagggaggttaagtacaagctggaccgaggaggacgtcaatgataacaccttgttcaaatggatgatcttcaacgggggagctcccaactgcatcccatgtaaggaaacttgcgagaatgtggattgtggacctgggaagaagtgccgcatgaataaaaagaataagcccaggtgcgtttgcgctcccgattgtagcaacataacctggaaaggacccgtgtgcggcctggatgggaagacgtatcgaaacgagtgtgcccttttaaaagccaggtgtaaggaacagccggagctggaggtgcagtaccaggggagatgcaagaaaacctgtagggacgtgttctgccctggttctagcacctgtgtggtggaccaaaccaataacgcctactgcgtgacctgtaacagaatttgtcccgaaccagcgtcaagcgagcagtacttatgcgggaatgacggtgtcacatattccagtgcctgccacctgcggaaagcgacttgtctgcttgggcggtcaataggcctggcttacgagggcaagtgtattaaggccaaatcatgtgaagatatccagtgcaccggagggaaaaagtgtctctgggacttcaaggtgggccgtgggagatgttcattgtgcgatgagttatgccctgatagcaagagcgatgaaccagtgtgtgcctctgataacgccacttatgcttccgagtgcgcaatgaaagaagctgcctgtagttcaggagttcttctggaggtgaaacacagcgggagctgcaatagtataagcgaagacacagaagaggaagaagaagacgaagaccaagattacagcttccccatcagttctattctggaatgg

SEQ ID NO: 176166 - DNA, 1032 bp, Artificial Sequence
  derived and/or modified sequence
atggttcgtgcgcgacatcaaccgggtggtttatgtctattattattattattatgtcaatttatggaagatcgttcggcgcaagcgggtaattgttggttacgacaagcgaaaaatggtcgttgtcaagttttatataaaacggaattatcgaaagaagaatgttgttcgacgggtcgattatcgacgtcgtggacggaagaagatgttaatgataatacgttatttaaatggatgatatttaatggtggtgcgccgaattgtataccgtgtaaagaaacgtgtgaaaatgtagattgtggtccgggtaaaaaatgtcgaatgaataaaaaaaataaaccgcgatgtgtatgtgcgccggattgttcgaatataacgtggaaaggtccggtatgtggtttagatggtaaaacgtatcgtaatgaatgtgcgttactaaaagcgcgatgtaaagaacaaccggaactagaagttcaatatcaaggtcgttgtaaaaaaacgtgtcgagatgtattttgtccgggttcgtcgacgtgtgtagtagatcaaacgaataatgcgtattgtgttacgtgtaatcgaatatgtccggaaccggcgtcgtcggaacaatatttatgtggtaatgatggtgtaacgtattcgtcggcgtgtcatctacgtaaagcgacgtgtctactaggtcgatcgataggtttagcgtatgaaggtaaatgtataaaagcgaaatcgtgtgaagatatacaatgtacgggtggtaaaaaatgtctatgggattttaaagtaggtcgaggtcgttgttcgttatgtgatgaattatgtccggattcgaaatcggatgaaccggtttgtgcgtcggataatgcgacgtatgcgtcggaatgtgcgatgaaagaagcggcgtgttcgtcgggtgtattattagaagtaaaacattcgggttcgtgtaattcgatatcggaagatacggaagaagaagaagaagatgaagatcaagattattcgtttccgatatcgtcgatattagaatgg

SEQ ID NO: 176167 - DNA, 1032 bp, Artificial Sequence
  derived and/or modified sequence
atggtcagagcccgccaccagccgggaggtctgtgtcttctcctgttgcttctgtgccaattcatggaagatagaagtgcccaagccggaaattgttggctgcgccaagccaagaatggaaggtgccaggtactttacaagacagagctgtccaaggaagagtgttgttccaccggcaggctgagcaccagctggactgaggaagatgtaaacgataacacactcttcaaatggatgatctttaatggaggcgcaccaaactgcatcccctgcaaggagacatgtgagaacgtggactgcggaccgggcaaaaagtgcaggatgaataagaagaacaagcctagatgtgtatgcgcccccgattgttctaacatcacctggaagggacctgtctgtggcttggatggtaagacgtatagaaacgagtgcgctctgcttaaagccagatgcaaagagcagccggaactcgaagttcagtaccaaggccgctgcaagaagacctgtagggacgtgttctgtccaggctcttctacctgtgtcgtcgaccagacgaataatgcctattgtgtgacgtgcaataggatttgccctgagcctgcttcatcagaacagtacctctgtggaaacgacggtgttacatatagctctgcttgtcatttgagaaaggcaacttgcctcttgggacgctccattggtctcgcttacgagggcaagtgcattaaggcaaagagctgtgaagatattcaatgcactggtggaaaaaaatgtctgtgggacttcaaagtcggcaggggtcgctgttcactgtgtgacgaactttgccctgattctaagtcagacgagcccgtttgcgcatcagataacgcgacctacgcatccgagtgcgcgatgaaagaggcagcctgctctagcggagtcctgctggaagtgaagcacagcggctcatgcaatagcatttctgaggacactgaagaagaggaggaagacgaggatcaggactattcttttcccatttccagcattctcgagtgg

SEQ ID NO: 176168 - DNA, 1032 bp, Artificial Sequence
  derived and/or modified sequence
atggtaagggcaaggcaccagcccggaggactgtgtctcctgctgctgttgctgtgtcagttcatggaggacaggagtgcacaggcagggaactgttggcttagacaggcgaaaaacgggagatgccaagttctgtacaagactgaactgagtaaggaggagtgctgttccactggacgcctttcaacttcttggactgaggaggacgtgaacgacaacactctgttcaaatggatgatatttaatgggggcgcacccaactgtattccgtgtaaggaaacgtgtgagaatgtggattgtggtcccggaaagaaatgtaggatgaataaaaaaaataaacctcgctgtgtgtgcgccccagattgttccaatattacatggaagggacctgtgtgtgggctcgacggtaagacttatagaaacgagtgcgcccttctgaaggccaggtgcaaggaacagccagaactggaagtgcagtaccaggggaggtgcaagaagacatgcagagatgttttctgtcccggatccagcacttgcgtggtggaccaaacaaacaacgcctactgtgtgacctgcaatcgcatatgcccagaacccgccagcagcgagcagtacctctgcggcaacgacggggtcacctattctagcgcctgtcatcttaggaaggccacgtgtcttctgggccggtcaatcggtctggcatatgagggaaagtgtattaaagccaaatcctgcgaagatatccagtgtactggcgggaagaaatgcctgtgggatttcaaagtgggcagaggacggtgcagcctgtgtgatgaactgtgtccagatagtaagtctgacgagcccgtgtgtgccagcgataacgccacatacgcctctgagtgcgccatgaaagaagccgcttgctcttcaggcgtcttgctggaggttaagcacagtggaagctgcaactctatctctgaggataccgaagaggaggaggaggacgaagaccaagactacagctttccgatctccagtattttggagtgg

SEQ ID NO: 176169 - DNA, 1032 bp, Artificial Sequence
  derived and/or modified sequence
atggtgagagctcgccatcagccaggcggactttgccttcttcttctcctgctttgccagtttatggaggatcgctccgcacaggccggaaactgttggctgcgacaagccaagaacgggaggtgtcaggtgctttacaaaaccgaactttccaaagaagagtgctgctcaaccggaaggctgtcaacttcgtggaccgaagaggacgtgaatgataacacgctgttcaagtggatgattttcaacgggggtgcaccaaactgcatcccttgtaaagaaacttgtgaaaacgtggattgtggaccaggcaaaaagtgtaggatgaacaaaaagaataaaccgcgctgtgtgtgtgctcccgattgctccaacattacttggaaaggccctgtttgtggacttgacggcaagacctacagaaacgaatgtgcccttctgaaggcgcgttgcaaggaacaaccagaacttgaagttcaataccaaggtcgttgtaagaaaacttgtcgagacgtcttttgtcctgggtcgtccacctgtgtggtggatcaaaccaataacgcttactgcgtcacctgtaaccgcatatgccctgagcctgcatccagcgaacagtacctgtgcggtaatgatggtgtgacctattcgtctgcatgccacctgagaaaggctacgtgcctgctgggacgatctattggccttgcgtacgaagggaagtgtattaaggcaaaatcatgtgaggacattcagtgtactggagggaagaagtgtttgtgggatttcaaggtcggtagaggacgttgttctttgtgcgatgaactttgccccgacagcaagtctgatgaaccggtgtgcgcctcagataatgcgacctacgctagcgagtgcgcaatgaaggaagcagcttgttcgtcaggagtccttctggaagtcaaacattcgggaagctgcaactccatttcggaggacacggaagaagaggaggaggatgaagatcaggattattcgttccccatctcctcgatcttggaatgg

SEQ ID NO: 176170 - DNA, 1032 bp, Artificial Sequence
  derived and/or modified sequence
atggtgagagctcggcaccagccaggcggcctgtgcctcctcctgctgctgctgtgccagttcatggaagaccgaagcgcccaggcagggaactgttggctgcgccaagctaaaaatggcagatgtcaggtattatacaagacagaactgtcgaaagaggaatgttgctctactgggagactcagtacatcttggacagaggaagatgtgaatgacaatactctgttcaaatggatgatctttaatggtggtgccccaaattgcatcccctgcaaggagacttgtgaaaatgttgactgcgggcccggcaaaaaatgccgtatgaacaagaagaataaaccccgatgcgtgtgtgccccagactgtagcaacataacttggaaaggtccagtgtgcggactggatggaaagacgtatcgaaatgagtgcgccctgctgaaggccaggtgtaaggagcaaccggaactggaagttcagtaccaggggcgctgcaagaagacttgtcgcgacgtcttttgtcccgggtcctctacctgtgtggtggatcagacaaacaacgcctattgtgtcacatgtaatagaatctgccctgaacctgcctcaagtgaacagtacctttgtggcaatgatggtgtaacctattccagtgcttgccatctcaggaaagcgacctgcctgctcgggagatctattggtctggcctatgaaggaaagtgcatcaaggccaagagctgcgaagatatccagtgcactggcggcaagaaatgtctgtgggattttaaagtcggccgcggtcggtgcagcctgtgcgacgagctttgtcctgatagcaaaagtgacgagccggtgtgtgcctccgacaatgcaacttacgcgagtgagtgcgccatgaaagaggcggcctgctcttcaggggtgttgctcgaagtgaagcactcaggatcctgcaattccatctcagaagacaccgaggaggaggaggaagatgaagaccaggactatagcttccccatctcatcaatacttgagtgg

SEQ ID NO: 176171 - DNA, 1032 bp, Artificial Sequence
  derived and/or modified sequence
atggtaagggcaaggcaccagccgggaggcttgtgcctgctcttgctgttactgtgccaatttatggaggatcgatccgcccaagcagggaactgttggctgcgacaggccaaaaatggacgctgtcaggtgttgtataaaaccgaactgtcgaaggaggagtgctgttcaaccgggagattatctacaagctggaccgaggaggatgtaaacgacaacacactgttcaagtggatgatattcaatggaggtgcccctaactgtatcccatgcaaagaaacctgtgagaacgtcgactgcggaccaggcaaaaaatgtcgaatgaataaaaagaataagccccgatgcgtgtgcgcgcccgattgtagtaacattacgtggaaagggcccgtgtgcggtctggatggaaagacttaccggaacgaatgtgcgctactgaaggccaggtgtaaggaacagcctgagctggaggtccagtaccagggtagatgcaaaaagacctgcagggacgtgttctgccctgggagtagtacctgcgtcgtcgaccaaacaaacaacgcttactgtgtgacctgcaaccgaatctgtcctgagcctgctagctctgaacaatacttgtgtgggaatgacggcgtgacttatagttcagcttgtcatctccggaaagccacctgcctgctgggccggagcatcgggctcgcttacgagggcaaatgcatcaaggccaaaagctgcgaggacattcaatgtactggcggtaaaaaatgcttgtgggacttcaaggttggtcggggacgctgctccctgtgcgatgaattgtgccccgactccaagagcgacgagccagtttgtgcctcagacaatgccacatacgcctccgaatgcgccatgaaagaagctgcatgctcaagcggcgtgctgctggaggttaaacatagcgggtcctgcaatagcatctccgaggatacagaagaggaggaagaggacgaagaccaagattattcgtttcccatatcaagtattctggagtgg

SEQ ID NO: 176172 - DNA, 1032 bp, Artificial Sequence
  derived and/or modified sequence
atggtgagagcacgtcatcaaccgggtggcctctgtctgcttctgctgcttctctgtcagtttatggaggatcggagcgcacaagccggtaactgttggttgagacaggcaaagaacgggcgctgccaagtcctttacaagactgagctctccaaggaagaatgttgttcgaccgggcgcctgtccacttcctggactgaggaagatgtgaatgataataccttgtttaagtggatgattttcaacggcggagcacccaattgcattccatgcaaagaaacctgtgaaaacgtggattgtggccccggcaaaaagtgcagaatgaacaagaagaacaaaccacgatgtgtctgtgcccccgactgctcgaatatcacttggaaggggcctgtgtgtggactggacggtaaaacctacaggaacgagtgtgcacttttgaaggcccgttgtaaggagcaaccggaacttgaagtgcaataccagggaaggtgtaagaaaacctgtagagacgtgttctgtcccggatcgtccacctgcgtggtggaccagacgaataacgcatactgcgtgacttgtaatagaatttgccctgaacctgccagctcggaacaatacttgtgcggcaatgatggtgtcacctactcatcggcatgtcatcttagaaaggcaacttgccttctcggccgatcaatcggtctggcatacgaaggaaagtgtatcaaggcaaagtcctgtgaagatattcagtgtaccggtggtaagaagtgtctttgggatttcaaggtgggacgtggtcgatgtagcctttgcgacgaactgtgtccagattcaaaatcggatgaacctgtctgtgcaagcgacaacgccacctacgcctcagaatgtgcaatgaaggaagccgcgtgttcatcaggagtgctgcttgaggtgaagcattcgggctcgtgtaactcgatatccgaggataccgaagaggaagaggaggacgaagatcaggactactccttcccaatctccagcattcttgaatgg

SEQ ID NO: 176173 - DNA, 1032 bp, Artificial Sequence
  derived and/or modified sequence
atggtgagagcccgccatcagcccgggggactttgtcttctccttctattactatgccagtttatggaagatagatccgcacaagccgggaattgttggctgcggcaggctaagaacgggcgctgtcaggttttatataaaacggaactgtccaaggaggaatgctgcagtactggaaggctttctacaagttggactgaagaagacgttaatgataatacattattcaaatggatgatctttaatgggggagcccctaattgtatcccttgtaaagaaacttgtgaaaacgtggactgtgggccggggaaaaaatgtcgaatgaacaagaaaaataaaccccgatgtgtgtgtgctcccgattgttcaaatatcacttggaagggaccagtatgtggactcgatggaaagacatatagaaatgaatgcgctctgttaaaagcccggtgcaaagagcagcctgaattagaagttcagtatcagggaaggtgtaaaaaaacatgccgggatgtcttctgtcccgggtcctccacttgcgtagtcgatcagactaataatgcctactgcgtgacatgtaaccggatctgtcccgaacctgctagttctgaacagtatttgtgcgggaacgatggggtaacatactcatccgcatgccatctacgtaaagctacatgcctgctgggaaggtctatcgggctagcgtatgaaggaaagtgcatcaaagcaaaatcatgtgaagatattcagtgtacaggggggaaaaaatgtctctgggatttcaaagtaggaagagggcgctgctcactctgcgatgaactgtgccctgatagtaagtccgatgaacctgtgtgcgcttctgacaacgctacatacgccagtgaatgtgccatgaaggaagctgcatgttcctctggggtgttattggaagtcaaacattctggatcatgtaacagtatttctgaagatactgaagaagaagaagaggatgaggatcaggattattcgtttcctatttcttcaatactggaatgg

SEQ ID NO: 176174 - DNA, 1032 bp, Artificial Sequence
  derived and/or modified sequence
atggtacgagctcgccaccagcctgggggcctgtgcctgctgttgctgctgctgtgtcagttcatggaagatcgatctgcacaggcaggtaactgttggctgagacaagccaagaatggtcggtgccaggttctgtacaagactgagttgtcaaaagaggaatgttgtagcaccgggaggctcagcacaagctggactgaagaggatgtgaatgacaacacgctctttaaatggatgattttcaacggcggcgcaccaaactgcattccctgtaaagagacctgcgagaatgttgactgcggcccaggaaagaaatgtaggatgaataagaaaaacaagcctcgttgcgtatgcgcacccgactgcagtaatatcacttggaaggggcccgtgtgcggactggatggcaaaacataccgcaacgagtgtgctttactgaaagcaaggtgtaaggagcagcctgagctggaggttcagtaccaggggcgctgtaagaagacttgtcgggacgtgttctgccctgggtcgtcaacttgtgtggttgaccaaacaaataatgcctattgcgtcacctgtaacaggatctgccccgaacccgcctcctctgagcagtacctctgtggcaatgatggagttacttattcgtccgcctgccacttgaggaaggcaacctgccttctgggtagatcaatcggcctcgcttatgaggggaaatgtatcaaagctaaatcatgtgaagatatccagtgtactggcggaaagaaatgcctgtgggatttcaaggtaggccgtggcagatgttcactgtgtgatgaactctgtcctgatagcaagagtgacgagcctgtttgtgcatcagacaatgcgacatacgccagcgagtgtgccatgaaggaagcagcttgcagcagtggcgtactgcttgaggtgaaacacagcggaagctgcaactctatctctgaggataccgaggaggaagaagaagacgaagaccaggattactctttccctatttcctcaatacttgagtgg

SEQ ID NO: 176175 - DNA, 1032 bp, Artificial Sequence
  derived and/or modified sequence
atggtacgcgctcgccatcagccgggcggcttgtgtctcctgctgcttcttctgtgtcagttcatggaagaccgatccgcccaagctggtaactgttggctgcgtcaggctaaaaatgggaggtgccaagtgctttataagactgaactgtcaaaagaggaatgctgcagcaccggccgccttagtaccagctggactgaagaagatgtaaacgacaacacgcttttcaaatggatgattttcaatggaggagcccccaactgtataccctgcaaggagacatgcgaaaatgtggactgtggccctgggaaaaaatgtagaatgaataaaaagaataagccccgatgtgtgtgcgcccctgattgttcgaacatcacgtggaagggcccagtgtgcggcctggacgggaagacgtataggaatgaatgtgctttgctgaaagctaggtgcaaggagcaacccgagttagaggtgcagtaccaaggtagatgtaaaaagacttgtcgcgatgtgttttgtcccggctcttcaacttgcgtggtcgaccaaacgaataatgcatactgtgtgacgtgcaatcgcatctgcccggagcccgcaagcagtgagcagtacttgtgcgggaacgatggggttacctatagctccgcctgccaccttcggaaggccacgtgcctgctcggacgcagtattgggctcgcctatgaaggtaagtgtattaaagcaaagagttgcgaggatattcagtgtaccgggggcaagaagtgtctctgggattttaaagtcgggagggggaggtgtagcctttgtgacgaactgtgtccagatagcaaatccgatgaaccagtctgtgccagcgacaacgcgacatatgcgagtgaatgtgccatgaaggaggccgcctgttcttcgggggtgttgctggaggtgaagcactctggcagctgtaacagtatctctgaagacacagaagaggaggaagaagacgaagaccaggattactctttccctattagtagcatcttagaatgg

SEQ ID NO: 176176 - DNA, 1032 bp, Artificial Sequence
  derived and/or modified sequence
atggttcgggcgaggcatcaacctggtgggttgtgcttgctgctcttgctcctctgccaattcatggaagatcgttcagcgcaagctggcaactgctggctaaggcaagccaagaatggcaggtgccaagtgttgtataagaccgagttgagcaaagaggaatgttgctccacgggaaggctttcaacgtcctggactgaagaagacgtcaatgataacactctattcaagtggatgattttcaacgggggtgcacctaactgtattccgtgtaaagaaacatgcgagaatgtggactgtggaccaggtaagaaatgcagaatgaacaagaaaaacaagcccagatgcgtgtgcgctccggattgtagtaatatcacttggaaggggcctgtgtgcggtcttgacggtaaaacatacagaaacgagtgtgctctgctcaaggctagatgcaaggaacaacctgaacttgaggttcagtatcaaggacgatgcaagaagacatgcagagatgtgttttgtccaggaagttctacatgtgttgtggaccaaactaacaacgcatattgtgttacctgcaaccgtatttgccccgagccagctagcagcgagcagtatctttgcgggaacgatggagttacttattcgtccgcttgccatcttaggaaagccacctgcctcctcggacgttccattggacttgcttatgaagggaagtgtattaaggcaaaaagttgtgaagatatacagtgcaccggtggaaaaaaatgcctttgggattttaaagttggtaggggaaggtgtagtctttgcgacgaactttgcccagatagtaagagtgacgagcctgtgtgcgccagtgataacgcaacgtacgcttcagagtgtgctatgaaggaggccgcttgctcgtcgggagtgttgctagaagtcaagcatagtgggtcttgcaatagcatcagtgaagatactgaggaagaagaagaggatgaagaccaagattactcttttcctataagttcgatcttagagtgg

SEQ ID NO: 176177 - DNA, 1032 bp, Artificial Sequence
  derived and/or modified sequence
atggtcagagctcgacaccagcctggaggcttgtgcctcctgttattgctgttatgccagtttatggaggataggagtgcccaagcggggaactgctggctccgccaggccaagaacggtagatgtcaggtgctatacaagactgaactgagcaaagaagagtgctgctccacaggccgcttgtcaacgtcatggaccgaagaagatgtaaacgacaacactctctttaagtggatgatattcaatggtggcgcgccaaattgtataccttgcaaggagacgtgcgagaacgtggactgcggccctggcaagaagtgccgtatgaacaagaagaataagccgcgatgtgtctgcgctcctgattgcagtaacatcacgtggaagggcccggtatgcggactggacggaaagacctatcgaaatgaatgtgccctgctgaaggcccgctgcaaggagcagccggagctcgaagttcagtaccagggccgctgtaagaaaacttgccgcgatgtgttttgcccaggtagcagtacctgcgtggtggaccagacaaacaatgcctattgtgtcacgtgcaacaggatttgccccgaaccggccagctcagagcaatacctgtgcggcaacgacggtgttacttacagttctgcctgccatctgagaaaagcgacatgcttgctgggcagatcgatcggattagcgtatgagggcaaatgtattaaggctaagtcctgcgaggatattcagtgcactggcggaaaaaagtgcctttgggattttaaggtgggccgtggccgctgcagcctgtgcgacgagttgtgccccgacagcaaatcggatgagccagtgtgcgcctccgacaatgccacctacgcgtctgagtgcgcgatgaaggaagcagcctgcagcagcggcgtgctgttggaagtcaaacactccggctcctgtaatagcatctcggaagataccgaagaagaagaggaggacgaggaccaagattacagtttcccgatctcctccatcctggaatgg

SEQ ID NO: 176178 - DNA, 1032 bp, Artificial Sequence
  derived and/or modified sequence
atggtgagggcccgccaccagccagggggcctctgcctactgttgctgctgttatgccaatttatggaagaccggtccgcccaggcgggtaactgctggctccgccaagcaaaaaatgggcggtgccaagtcctgtataagacagaattatctaaggaggagtgttgctctaccgggcggttgagtacgtcttggacagaagaagacgtgaacgacaacacactttttaaatggatgatctttaatgggggtgctcccaactgcatcccttgtaaagagacatgcgagaatgtggattgcggccccgggaagaagtgtaggatgaacaaaaagaataagcccaggtgcgtgtgtgccccagactgttccaacatcacttggaaaggtcctgtgtgcggtctagacggaaaaacctataggaacgagtgtgctctgttgaaagcccgctgcaaggagcagccagaactggaagtccaatatcaagggcgatgcaaaaagacatgtcgggatgttttctgccccggttcctcaacctgtgtggtggatcagaccaacaacgcctactgcgttacatgtaatcgaatctgccccgagcccgcaagctccgagcagtatctatgcggcaatgacggcgtgacatacagtagcgcatgccaccttagaaaagcaacctgcctcctcggacgatcgatcggcctcgcttatgaaggaaagtgtatcaaggctaagtcttgcgaggatattcagtgcactggagggaagaagtgtttatgggattttaaggtcgggagggggcgctgttccctctgcgacgaattatgtccagactctaagtctgacgaacccgtttgcgcgtcggacaatgcaacgtacgcctcagaatgtgctatgaaggaagcagcttgctcatccggcgtattactggaggttaagcacagtggatcgtgcaattctatctccgaggacactgaagaggaggaggaggacgaagatcaggactattcgtttcccatctcaagtatcctggaatgg

SEQ ID NO: 176179 - DNA, 1032 bp, Artificial Sequence
  derived and/or modified sequence
atggtccgcgccagacaccaacccggcgggctttgtctactgctgctgctcctgtgccagttcatggaggacagatctgcgcaggcaggaaactgttggttacgacaggctaagaacggtaggtgtcaggtcctttataagaccgagctcagcaaggaggagtgctgctcaaccggaaggttgtcaacgagctggactgaggaggacgtgaatgacaacaccctctttaaatggatgatcttcaatggtggggcgcctaattgtattccttgtaaggaaacatgtgagaacgtcgactgtggaccaggcaagaaatgcaggatgaataagaagaacaagccccgctgtgtgtgtgcccccgactgttcgaatatcacttggaaaggccccgtttgtggattggacggcaagacctaccgaaacgaatgcgctttgctaaaggccagatgtaaagagcagccagaactggaggtgcagtaccagggtcggtgcaaaaagacctgccgcgatgtcttttgcccagggagtagcacttgcgtcgtggatcaaacaaataacgcctactgcgtgacttgcaatcggatttgccctgagccagcctccagtgaacagtatctctgtggaaatgacggagtaacctactccagcgcctgccatctgaggaaagccacttgtctgttgggcagatcaattggcctggcgtacgaagggaagtgcatcaaagcaaagtcctgtgaggacattcagtgcaccggagggaaaaagtgcttgtgggacttcaaggtcggaagaggacgatgctctctttgcgatgagttgtgtcccgattccaagagcgacgagccagtgtgcgccagtgataatgctacctatgcttccgaatgcgccatgaaggaggccgcctgctcctcaggggtattactcgaggttaagcactcaggctcttgcaatagcatctccgaagataccgaagaagaggaggaagatgaagaccaggattatagttttcccatatcgtccatcctggagtgg

SEQ ID NO: 176180 - DNA, 1032 bp, Artificial Sequence
  derived and/or modified sequence
atggtaagggccaggcatcagcctggcgggctgtgcctccttctcctcctcctgtgccagtttatggaggaccggtcggcacaggcaggaaactgctggctgagacaggccaagaacggccgctgtcaagtgctgtacaagaccgaactgtcaaaggaagaatgctgttccactggtcggctgtctacctcgtggactgaagaagatgtgaatgacaataccttgttcaagtggatgatctttaacgggggagcaccaaattgcatcccgtgcaaggaaacgtgtgagaatgtcgactgcggcccgggcaaaaagtgccggatgaacaaaaagaacaaaccgcgctgcgtttgcgccccggattgttctaacatcacctggaaagggccagtctgtggattggacggcaagacctaccgcaacgagtgcgccttgcttaaggcgcgctgtaaggaacagcctgagcttgaagtccaataccaggggcgatgcaaaaagacctgtagagacgtgttctgccccggatcctcgacgtgtgtggtggatcaaaccaacaatgcctactgcgtcacttgtaaccggatttgtccagagcccgcgagcagcgagcaatatctgtgcggaaatgacggagtgacttactcgtcggcctgccacctcagaaaagcaacctgcctgctgggacggtcgattggactcgcatacgaaggcaagtgtattaaggcgaaatcctgcgaggatattcagtgtacggggggaaagaaatgcttgtgggatttcaaagtcggacggggccggtgctccctgtgtgacgaactgtgccctgactcaaagtccgacgagccggtgtgcgcaagcgacaacgctacctacgctagtgaatgtgcaatgaaggaagcggcctgcagctcgggagtgctgctggaggtaaagcactccggatcgtgcaattccatatcagaggacactgaagaggaggaggaagatgaggatcaggactactctttcccgatctcgtctatcctcgagtgg

SEQ ID NO: 176181 - DNA, 1032 bp, Artificial Sequence
  derived and/or modified sequence
atggttcgcgcccggcaccaaccgggcggcctctgtttgctccttctgcttctctgtcaattcatggaggatcggagcgcgcaagcaggaaactgttggttgcggcaggccaaaaacggacggtgccaggtcctgtacaagaccgagctcagtaaagaagagtgctgtagcactggacgcttgtccacgtcgtggaccgaggaggatgtgaatgataacaccctgtttaagtggatgatcttcaatgggggcgcaccaaattgtatcccgtgcaaggagacttgtgaaaacgtggactgtggcccgggaaagaaatgccgcatgaataagaagaacaagccgcgctgcgtgtgcgcgccggactgctccaacataacctggaagggtccggtgtgcgggttggatggcaaaacctaccgcaatgagtgcgctctgctcaaagcaagatgtaaagagcagccggagcttgaagtccaataccaaggacgctgcaaaaagacgtgtcgagatgtgttctgccccggctcgtccacttgcgtggtggaccagaccaacaacgcctattgcgtgacttgtaaccggatctgcccggagccagcctccagcgagcagtacctgtgcggaaacgacggagtgacttactcctcagcatgccacctccgcaaggcgacctgccttctgggacgctccatcggactggcttacgaaggaaaatgcattaaggcaaagtcctgcgaggatattcagtgcactggaggaaaaaagtgtctctgggatttcaaagtgggccggggtagatgctcgctgtgtgatgagctctgcccagattccaagagcgacgaaccagtgtgtgcttcggataatgccacctacgcctcggagtgcgcgatgaaggaggccgcttgctcgtccggcgtcctcttggaggtgaagcactcaggttcgtgcaattcaatctcggaggacactgaagaagaagaagaggacgaggaccaggattactctttcccaatctcgtcgatcctcgaatgg

SEQ ID NO: 176182 - DNA, 1032 bp, Artificial Sequence
  derived and/or modified sequence
atggtccgcgcacggcaccagccaggtggcttgtgccttcttctactgcttctttgtcagttcatggaagatagaagtgctcaagccggtaactgttggctgcgccaggcaaagaatggtaggtgccaggtgctctataagaccgaactgtccaaggaggagtgttgctccacaggacgcctctccacgtcttggactgaggaagatgttaatgacaataccctattcaagtggatgatattcaatggaggggcgcctaactgtattccatgtaaggaaacgtgcgagaatgtggactgcgggccgggtaagaaatgccggatgaataagaagaacaaacctcggtgtgtgtgtgcaccagactgctcgaacattacttggaagggcccagtctgcggtctcgatgggaagacgtatcgaaacgaatgtgcattgctgaaggcccgatgtaaggaacaacctgaactggaggtgcaataccagggtcgttgcaagaaaacgtgcagggacgtcttctgtccaggcagttctacctgtgtcgtagaccaaacaaacaatgcgtactgcgtgacctgtaaccgcatttgtcctgagcctgcctcgtctgagcaatacttatgcggaaacgatggggtaacgtacagctccgcctgccacctgcgcaaagcaacctgcctcctagggaggtcaatcggtcttgcgtatgaaggcaagtgcattaaagctaagagctgcgaggatatccagtgcacaggtggaaagaagtgcctctgggacttcaaggttggtaggggtcgatgctctttgtgtgatgaactttgccctgattccaagtcagatgagcccgtttgtgctagcgacaacgcaacttacgcgtccgaatgtgctatgaaggaggccgcttgttccagcggggtcctcttggaggttaagcattccggatcgtgtaattcgatttctgaggacaccgaggaggaggaggaggacgaagatcaagattacagcttcccaatatcgagcatcctcgagtgg

SEQ ID NO: 176183 - DNA, 1032 bp, Artificial Sequence
  derived and/or modified sequence
atggtccgcgctagacatcagccaggcgggctgtgcctgctgttgctactgctttgtcagttcatggaagataggtcagcccaagctgggaattgctggctccgccaggctaagaacggtcgctgtcaggtgctctacaagactgagttgtccaaggaggaatgctgctctaccggccgcctgtcgacatcctggacggaggaagatgttaatgataacaccctgtttaaatggatgattttcaacggaggcgcacccaattgcatcccctgtaaagagacgtgtgagaatgtggactgcggcccaggcaagaagtgtcgaatgaacaaaaagaacaaacctcgctgcgtttgtgccccggattgttctaacatcacatggaaggggccagtgtgtggtttggatggaaagacctatcgcaacgagtgcgccctgctcaaggcacgctgcaaggagcagccagagctagaggttcaatatcaaggaagatgcaagaagacctgtcgtgacgtcttctgccctggctcctcgacgtgcgtagtggaccagaccaataacgcctattgtgtcacatgtaatcgtatatgccccgagccggcctccagcgagcagtacctgtgtggaaatgatggtgtcacctacagttcagcctgtcacctgaggaaggctacgtgcctgcttggtcgcagcatcggactggcgtatgagggcaaatgtatcaaagcaaaaagctgcgaagacatccaatgcaccggcggaaagaagtgcctatgggattttaaagtaggcaggggacgttgctcgctgtgcgacgagctgtgccctgattctaaaagcgatgagccagtttgcgcctcagacaacgccacctatgcctcagaatgcgccatgaaggaggctgcttgcagctccggagtcttgctggaggtaaaacactccggctcttgcaactccatttccgaggacacagaagaggaggaagaggatgaagatcaagactacagcttcccaatttccagcatcctggagtgg

SEQ ID NO: 176184 - DNA, 1032 bp, Artificial Sequence
  derived and/or modified sequence
atggtgagggcgcgacatcagcccggggggctttgtctgttgcttttgcttttgtgtcagtttatggaagatagaagcgcgcaggccggaaattgctggctgcggcaggccaaaaacgggaggtgccaggtgctatacaagactgaactgagtaaggaggagtgttgttccacaggaagactgagcacttcctggactgaagaagatgtcaatgacaataccctcttcaagtggatgatatttaacggtggggcacccaactgtataccttgtaaggaaacgtgcgagaacgtcgattgcggacccggcaaaaaatgccggatgaataaaaaaaacaagcccagatgcgtctgtgccccagattgcagtaacataacatggaaaggacctgtatgtggactggatgggaagacctatagaaacgagtgtgctctactcaaggcccgctgcaaggaacagccggagttggaggtgcagtaccagggacgatgtaagaagacctgccgcgacgtgttctgtcctggctcgtctacctgcgtggtggatcaaacgaataacgcatactgtgtcacctgtaatcgtatttgccccgaaccagctagctccgaacagtacctctgcgggaatgacggagtgacttattcttccgcttgccatctcagaaaggccacatgccttctgggccgctcgatcggcctggcttatgagggaaaatgcatcaaggcaaagtcctgcgaggacatccagtgcacaggaggcaaaaaatgtctgtgggacttcaaggtgggacgtggtcggtgtagtctttgtgacgagttgtgcccagactcaaagtctgatgagcccgtttgcgcgtccgacaatgctacatacgcgtcagagtgcgctatgaaggaggctgcgtgttcctcaggtgtccttctggaggtcaaacactcgggctcctgtaacagtatttccgaggatacagaggaggaggaagaagatgaagaccaagactatagtttccctatcagcagcatcctggagtgg

SEQ ID NO: 176185 - DNA, 1032 bp, Artificial Sequence
  derived and/or modified sequence
atggtaagagcgagacaccaacccgggggactgtgccttttgctcttactcctctgtcaatttatggaagatagatcggcgcaagcaggaaactgttggcttagacaagcaaaaaacggccgttgccaagtcctgtacaaaacggagttgtcaaaagaagagtgctgttcgacaggaagactctctactagttggacggaggaagatgtaaacgataacacactttttaaatggatgattttcaatggaggcgctcctaactgtattccatgcaaggagacgtgcgaaaacgttgactgcggcccaggtaagaagtgtaggatgaataaaaaaaacaaacctcgctgtgtctgtgcaccagattgcagcaatattacttggaagggccccgtctgcggactcgatggtaagacttatagaaatgaatgcgctcttcttaaagctagatgcaaagaacaaccagagctggaagtgcaatatcaaggtagatgcaaaaaaacctgcagggatgtgttttgccctgggtccagcacctgtgttgttgatcaaacaaacaacgcttattgcgtcacgtgtaatcggatctgccctgagcccgcatcgtctgagcaatacctatgcggtaatgatggagtgacgtactcttccgcttgtcacttaagaaaggctacatgcctgttggggcgttccatcgggttggcctatgaaggaaagtgcattaaagccaaaagctgtgaggatattcagtgtacgggtgggaaaaaatgtctgtgggactttaaggtaggtagggggcgttgttctctttgcgatgagctttgcccggattccaagagcgacgagcctgtatgcgcatcggataatgccacctacgcttccgagtgtgcgatgaaagaagccgcctgttcctcaggggtattattggaggttaaacattctggctcctgcaacagcatatctgaggatactgaagaagaagaagaggatgaagatcaagattactcttttccaatttcaagcatattggaatgg

SEQ ID NO: 176186 - DNA, 1032 bp, Artificial Sequence
  derived and/or modified sequence
atggtgcgggcgcggcatcagcctggtggactctgtctgctcctccttctcctgtgtcagttcatggaggatcgatctgctcaagcggggaattgctggcttagacaggccaaaaatggccgctgccaggtgctgtataagacggaattgagcaaagaagaatgttgctcaactggacggctgagcacatcttggacggaggaagatgtgaatgataataccctctttaagtggatgatctttaacggaggcgccccgaactgcataccttgcaaagaaacttgtgaaaacgtggattgtggacccggaaaaaaatgtcgtatgaacaagaaaaacaagcccaggtgtgtgtgtgcgcccgactgcagcaacattacttggaagggccccgtgtgtggcctggatggtaagacgtaccgcaacgagtgtgcgttattgaaagcgcgctgtaaagaacagccagagttagaagtccagtaccaggggcggtgtaagaagacatgtagagatgtattctgcccaggtagctctacatgcgtggtcgatcaaactaataatgcatactgcgtaacgtgtaaccggatctgtcctgaaccggcttcctctgaacagtatctctgcgggaacgacggagtgacctacagttctgcatgtcatctgaggaaggcgacttgtctgctgggtaggtctatcggtcttgcttacgaaggtaaatgcataaaagctaaatcctgtgaggatattcagtgcaccggaggaaaaaagtgcttgtgggatttcaaagtggggagagggagatgttctttgtgcgacgagttgtgcccagattcgaaatctgacgagcccgtctgtgcctccgataatgcaacatacgcttccgaatgtgcaatgaaagaagctgcttgctcatcgggcgtgctcctggaggtcaagcactccgggtcatgcaacagcatctccgaggataccgaggaggaagaagaggatgaagaccaagattattccttccctatctcttctatcttagaatgg

SEQ ID NO: 176187 - DNA, 1032 bp, Artificial Sequence
  derived and/or modified sequence
atggtgagggccaggcatcagccaggaggactctgcctgctgttgttgctgctgtgtcagttcatggaggatagatccgcgcaggctggcaattgttggcttcgccaggctaaaaacgggaggtgccaggtactttataagaccgaactctccaaggaggagtgttgttccacgggccgactcagcacaagttggaccgaagaggatgtcaacgacaatactctcttcaagtggatgatctttaacgggggggccccaaactgcataccatgtaaagagacttgtgagaacgtagactgcggtccgggcaagaagtgcaggatgaacaaaaagaacaaaccccggtgcgtgtgcgcccctgactgttctaacatcacttggaaaggacccgtgtgtggattggacggtaaaacgtatagaaatgagtgcgccttgctgaaagctcgatgcaaggaacagccggaactcgaggtacagtatcaaggccgatgtaagaagacttgtcgggatgtgttttgccccggaagttctacttgcgtggtcgatcaaactaacaatgcatattgcgtcacctgcaatcgcatttgccccgagccggccagtagcgaacagtacctttgtggaaatgacggagtgacctattcctctgcatgccacttgagaaaagcgacatgtcttctcggccggagtattggactggcctacgaggggaagtgcattaaggcaaaaagttgtgaggacatccagtgtacaggaggcaagaagtgtctttgggatttcaaagtagggcggggacggtgcagtttgtgtgatgagctgtgtcctgattctaagagtgacgaacccgtgtgcgcttctgataatgccacttatgcttcagagtgtgccatgaaggaagccgcatgcagcagtggcgtgctgctcgaggtgaaacatagcggcagctgcaactcaatatccgaggatacagaagaggaggaggaggatgaggaccaggactactcttttcctatctcaagcatattggagtgg

SEQ ID NO: 176188 - DNA, 1032 bp, Artificial Sequence
  derived and/or modified sequence
atggtgagagctcgacaccagcctggcggactgtgcctgttgcttctccttctgtgccagtttatggaggatcgctccgcgcaggccggaaattgttggctcaggcaggcaaaaaacggtcgctgccaagtgctttacaagactgagctctcgaaggaggagtgttgctcgaccgggcggctgtcgacttcttggactgaggaggacgtgaacgataacaccctgtttaagtggatgatcttcaacggtggcgcaccaaattgcattccatgcaaggaaacttgtgaaaatgttgattgcggtccagggaagaagtgtcgcatgaacaagaagaacaagcccaggtgtgtctgtgcaccggattgctctaacattacctggaaaggtcctgtgtgtggcctggacggaaagacttaccggaatgaatgcgcactgctcaaagcacgctgtaaggaacaaccggagcttgaagtgcagtatcagggaagatgtaaaaagacctgtcgcgatgttttttgtccaggtagcagcacttgtgtggtggaccagactaacaacgcatactgcgtcacttgcaatcggatatgcccagaacccgcgagctccgagcaatacctctgtggtaacgatggagtgacttactcatcggcctgtcacctgaggaaggcaacttgccttctggggaggtcgatcggacttgcatatgaaggaaagtgcattaaagccaaatcctgcgaggatattcaatgtaccggcggaaaaaagtgtctgtgggatttcaaagtgggacgcggaagatgctcgctttgcgacgagctttgtcctgattcgaagtcagacgaaccggtctgtgcgtcagacaacgcaacgtacgcgagcgaatgcgctatgaaggaagcagcttgctcgagcggggtgctcctggaagtgaagcattccggatcgtgcaattctatttcggaggacaccgaggaagaagaggaagatgaagatcaagactactcatttcccatatcaagcattcttgagtgg

SEQ ID NO: 176189 - DNA, 1032 bp, Artificial Sequence
  derived and/or modified sequence
atggtgcgtgcgcgtcatcaaccggggggactttgtctgttgctgctgctcctgtgtcagtttatggaagataggagcgcgcaagcgggtaattgctggctgcgccaggcgaagaacggtagatgccaagtcttgtacaaaactgagctttccaaggaggagtgctgctccaccggacgtctctccacctcgtggactgaagaggacgtcaacgataacaccctgtttaagtggatgatctttaatggaggggcaccaaattgcattccatgtaaggaaacttgtgaaaacgtcgattgtggtccagggaagaaatgtagaatgaataagaaaaacaaaccacgatgcgtctgcgcacccgactgtagcaacatcacctggaaaggtccggtgtgtggcctcgatggaaagacctacaggaatgaatgcgcacttttgaaggcccggtgtaaagaacaaccagaactggaagtccagtaccaaggccggtgtaagaaaacttgtagggacgtgttttgccctggatcgtccacctgcgtggtggatcagactaacaacgcatactgtgtgacgtgcaatcgcatttgccctgaacctgcatcatctgagcaatacctctgtggcaacgatggcgtaacttactcgtcggcatgccaccttcggaaggcaacctgtcttttgggacgctcgatcggcctggcttacgaagggaagtgcatcaaggcgaaatcatgcgaagatatccagtgcaccggaggaaagaagtgtctctgggatttcaaggtggggagaggacggtgttcactgtgcgatgagctgtgtccggatagcaagtcagacgaaccagtgtgtgcatcggacaacgcaacctacgcgtctgagtgtgcaatgaaggaagcagcgtgctcctcaggggttcttctggaagtgaaacattcaggcagctgtaattcgatttcggaagatactgaagaagaggaggaagatgaagatcaggactattcgtttccaatatcctcgattcttgaatgg

SEQ ID NO: 176190 - DNA, 1032 bp, Artificial Sequence
  derived and/or modified sequence
atggtgagagcaagacatcagcctggcggactttgcctgctgttgctgctattgtgccagtttatggaagacagatccgcccaggccgggaactgctggctgcgccaggccaaaaatggccggtgccaggttctgtacaagacggagttgtccaaggaggaatgctgttctaccggtcggttatccaccagctggacggaggaggacgtgaacgataataccctattcaagtggatgatatttaacggtggggctccgaactgtatcccttgcaaagagacctgcgagaatgtggattgtgggcccgggaaaaaatgccgcatgaacaaaaagaataagccccgttgtgtgtgcgccccggactgtagtaacataacttggaaaggtccagtgtgtgggctggatgggaagacctatcggaatgagtgcgctctgctgaaggcccgctgtaaggagcagcccgaacttgaggtgcaatatcaggggcgatgcaagaagacctgtcgggatgtgttctgccccggatccagtacctgtgtggtggaccagacaaataacgcatactgcgttacttgcaaccgaatctgccctgaacccgcatcctctgagcagtatctgtgtgggaacgacggcgtcacctatagctcggcctgccatctcaggaaagccacatgcctgctgggcagatcaattggattagcttacgagggcaagtgtatcaaggccaaaagttgcgaagacatacagtgtaccgggggtaagaaatgcctctgggatttcaaggtgggtcgagggcgttgcagcctgtgcgatgagctatgccccgacagcaaatctgatgaacccgtctgtgcatcagataacgctacttacgcatcagaatgtgctatgaaggaagccgcttgttcttctggagtattgctagaggttaagcactccggctcatgcaactctattagcgaggataccgaggaggaagaggaagatgaggaccaggactactctttccctatatcatcgatactggaatgg

SEQ ID NO: 176191 - DNA, 1032 bp, Artificial Sequence
  derived and/or modified sequence
atggtccgagcccggcaccagccaggtgggctgtgtctgcttctcctcttgctttgtcagttcatggaggaccgcagcgcacaggcgggcaattgttggctgagacaagccaagaacggaagatgccaagtcctctacaaaactgaactcagcaaggaggagtgttgcagcactggccggctgtcgacgtcatggactgaggaggacgtgaatgataacactcttttcaagtggatgatcttcaacggaggtgctcccaattgtatcccatgcaaggaaacctgtgagaacgtcgattgcggtccgggtaaaaagtgccgaatgaacaagaagaataaaccgcgctgcgtgtgcgccccagactgttctaatatcacttggaaggggcctgtctgcggattggacggcaagacgtacaggaacgagtgtgcgttgctcaaagcacgctgcaaggaacagccggagctggaggttcagtatcaaggccggtgcaaaaagacctgcagagacgtcttttgcccaggatcatccacctgtgtcgtggaccagaccaacaatgcgtactgcgtgacttgcaatcgcatctgtccggaacccgcgtcctccgaacagtacctgtgtggtaacgatggagtgacttactcgtcggcttgtcacctcaggaaggcgacctgcctcctgggcagatctatcggtctggcgtacgagggaaagtgcatcaaggccaagtcctgtgaagatatccagtgcacggggggaaagaaatgtctctgggactttaaggtcggacgcggacgatgcagcctttgtgatgaactctgcccggactccaagagcgatgaaccggtgtgcgcctctgataacgcaacttacgcctccgaatgcgcaatgaaggaagctgcctgctccagcggagtccttttggaagtgaaacattcaggatcctgcaactccatttccgaggacactgaggaggaagaagaggatgaggatcaggactactcgttcccaattagctccatcctggaatgg

SEQ ID NO: 176192 - DNA, 1032 bp, Artificial Sequence
  derived and/or modified sequence
atggtgcgcgccagacatcagcctggtgggctgtgcctcctcctactgttgctctgccaattcatggaggacaggagcgcacaagcaggaaactgctggcttaggcaggccaagaatgggcgatgtcaggtgttgtataaaaccgagctgagcaaggaggaatgctgtagtaccgggaggctgtcaacaagctggaccgaggaagacgtgaacgataacacccttttcaagtggatgatttttaacggcggcgctccaaactgcataccttgcaaggaaacttgcgagaacgtggactgtgggcccggcaagaagtgtagaatgaacaagaaaaacaagcctaggtgtgtgtgcgcccctgactgcagtaacatcacatggaaaggtcccgtgtgcggcctcgatgggaaaacctacagaaatgagtgcgctcttctgaaggccagatgtaaggagcagcccgagctcgaggttcagtaccaagggcgctgcaagaaaacgtgtagggacgtattctgcccgggttcgagtacctgtgtggtcgaccagacaaataatgcatactgtgtaacttgtaaccggatctgtcctgagccagccagcagtgagcaatatctctgcgggaatgatggagtgacctattcaagtgcatgccacctccgcaaggccacctgcctgctaggcaggagcattggactggcttatgagggaaaatgcataaaagccaagtcatgcgaagacatacagtgtacaggaggaaagaaatgcctctgggactttaaggtgggtcggggtagatgttccttatgcgacgaactgtgtccagatagcaagtctgacgagcctgtctgtgcaagtgacaacgccacctacgcgagcgagtgcgctatgaaggaggctgcctgcagttctggggtcctcctggaggtcaagcactcaggtagttgcaattccatcagtgaggataccgaagaggaggaggaagatgaagatcaggattattccttcccaatctcgtcaatcctggaatgg

SEQ ID NO: 176193 - DNA, 1032 bp, Artificial Sequence
  derived and/or modified sequence
atggtgcgagcacgtcaccaacctggaggtctttgcttgttgctgctcttgctttgtcaattcatggaagatagatcggctcaagcggggaactgttggctgcgccaagcgaaaaatggccggtgtcaggtgctgtacaaaaccgaactgtccaaggaagaatgctgttcgaccggacgtctgtctacctcttggactgaagaggacgtcaacgacaataccctctttaagtggatgatcttcaacggaggagctccaaactgcattccatgcaaggaaacctgtgagaacgtggattgcgggccaggaaaaaagtgtagaatgaacaaaaagaataagcccagatgtgtctgcgcgccggactgctccaatatcacttggaagggacctgtgtgtggcctcgatgggaaaacttaccgtaacgaatgtgctctgctcaaggcccggtgtaaagaacagcctgaactggaagtgcaatatcaaggtcggtgcaagaaaacttgtagagacgtgttttgtcccggatcgagcacctgcgttgtcgatcagaccaacaatgcatactgtgtgacttgcaaccgtatatgcccagagcctgcatcctcagagcaatacctttgcggtaacgatggtgtgacttattccagcgcatgccaccttcgaaaagcaacttgtctgctcggacgatccattggtcttgcctacgaaggaaaatgtataaaggcaaaatcatgtgaggatatccagtgtaccggtggaaagaagtgtttgtgggactttaaggtcggacgggggagatgctctctttgtgacgaactgtgtccagatagcaagagcgatgaacccgtctgtgcaagcgacaatgccacgtacgcatccgaatgtgcaatgaaagaggcagcctgctcctcaggtgtgttgcttgaggtgaaacactcgggatcctgtaactcgatttcggaagataccgaggaagaagaagaggacgaagatcaggattactccttcccgataagctcgatcctggaatgg

SEQ ID NO: 176194 - DNA, 1032 bp, Artificial Sequence
  derived and/or modified sequence
atggttcgagctcgacaccagccaggtggcctgtgcctgctccttctgctgttgtgtcagtttatggaggataggtcggcccaggcggggaactgctggctccggcaggccaagaatggtcgatgccaagtcttgtataagaccgaactgagtaaggaagaatgctgctcaaccggacgactgtctacatcatggactgaggaagacgtgaacgacaacaccttgtttaagtggatgatcttcaatggtggggcccccaactgtatcccttgtaaggaaacctgcgaaaatgttgattgtgggccaggtaaaaagtgcagaatgaacaagaaaaataagcctcgctgtgtctgtgccccagattgcagtaatattacatggaaaggacccgtgtgtggcttagacggcaagacataccggaacgagtgtgccctgttgaaagccaggtgcaaagagcagcccgagctagaggtacagtaccaggggaggtgtaagaagacgtgtagggacgtcttctgccctgggtcctctacatgtgtcgttgatcagacaaacaatgcttattgtgtgacatgcaaccggatttgtcctgaaccggcctccagcgagcagtatctttgcggaaacgatggcgttacttattcgtctgcttgccatctgcgaaaggcaacatgcctgctcgggaggagcatcgggctggcttatgaaggcaagtgcatcaaggctaaaagctgtgaagatatacagtgcacgggagggaagaagtgcctatgggacttcaaagttggcagggggcgatgttctctgtgtgacgagctctgtccagattcaaaatcagatgagccagtctgcgcgagtgataatgcaacctatgcctccgaatgcgccatgaaagaggcggcctgtagcagtggcgttttgctggaagtgaaacactccggatcttgcaattccatatcggaagacacagaagaagaagaagaggatgaggaccaagattatagctttcccatatctagcattttggagtgg

SEQ ID NO: 176195 - DNA, 1032 bp, Artificial Sequence
  derived and/or modified sequence
atggtgcgggcgagacatcagccgggtggactctgcctcttgctgctgctgctctgtcaattcatggaagacaggtcggcccaggccggaaactgctggctgcgccaagcaaagaacggccgctgccaggtgctgtacaagactgagctgtctaaggaggaatgttgtagcacgggaagactctcaacctcatggactgaggaggatgtcaatgacaacactctcttcaagtggatgatcttcaacggaggggccccaaactgcatcccatgtaaagaaacctgtgaaaatgtcgactgcggaccgggcaagaaatgtcgcatgaacaagaagaacaaaccgcgctgcgtgtgtgcccctgactgctcgaacatcacgtggaagggaccggtgtgcgggttggatggtaagacctaccggaacgagtgcgcgctgctgaaagcccgctgcaaggagcaacctgaactggaagttcagtaccagggccggtgcaagaaaacttgccgggacgtgttctgcccgggctcgtccacgtgcgtggtggaccagaccaacaatgcctactgtgtgacttgcaatcggatctgcccagagccggcgtcgtcggagcaatatttgtgtggaaacgacggagtgacctactcatcggcgtgccacttgcggaaagccacgtgtctcctgggacggtccatcggccttgcgtacgagggaaagtgtatcaaggcaaaatcgtgtgaggacattcagtgcactggaggaaaaaagtgcctgtgggatttcaaggtgggcagaggaagatgttccctgtgcgatgagctgtgtccggatagcaagagtgatgagcctgtgtgcgcgtcagataatgccacctacgcttcggaatgcgctatgaaggaggcggcctgctcgtccggggtcctcctggaggtgaagcactccggctcgtgcaattcgatctcagaagatactgaagaagaggaggaagacgaagatcaggactacagcttcccgatctcctccattctcgagtgg

SEQ ID NO: 176196 - DNA, 1032 bp, Artificial Sequence
  derived and/or modified sequence
atggtgagagccaggcatcagccgggaggcctctgtcttctgctcctgcttctctgtcaatttatggaggaccgctccgctcaagctgggaactgttggctgcgccaagcaaagaatgggagatgtcaggtgctctataaaactgagcttagtaaggaggaatgttgtagcaccggaaggctgtccacctcttggacagaggaggacgtgaatgacaatactttgtttaaatggatgatcttcaatgggggtgctcccaattgtataccatgtaaggaaacatgtgaaaacgtggattgcggcccgggcaaaaaatgtcggatgaacaagaaaaataaacctaggtgcgtttgtgcccccgattgctctaacattacttggaaagggccagtgtgtgggcttgatggtaaaacctaccgaaacgagtgcgcattgctgaaggctaggtgcaaagagcagccggaactcgaagtgcagtaccagggacgctgcaaaaagacttgtcgggacgtcttctgccccggaagctccacctgcgtggttgatcagactaataatgcctactgcgtgacttgcaaccggatctgtcctgagcctgctagttccgagcagtacctctgcggaaatgacggagtgacctattcttccgcctgtcacctgcgaaaggccacctgcctgctggggcggagcatcggtctcgcctacgagggcaagtgcatcaaggccaagtcctgtgaggatatccagtgcactggaggcaagaagtgcctctgggacttcaaggtaggccgcggtaggtgttctttgtgcgacgagctgtgcccggatagtaaatctgatgagccagtttgcgccagtgataatgccacctacgcgagtgagtgcgctatgaaggaggctgcctgtagttcaggagtgctcctggaggttaagcattcaggtagctgtaactccatctctgaagataccgaagaggaggaagaggacgaggaccaggactattcttttcccattagctctatcctcgagtgg

SEQ ID NO: 176197 - DNA, 1032 bp, Artificial Sequence
  derived and/or modified sequence
atggtgcgcgccagacaccagccgggcggcttatgtttactcctgctattgctgtgtcagttcatggaagatcgttccgcacaggctggcaactgttggctcaggcaggcaaagaacggcaggtgccaagtgttatataagactgagctgagtaaagaagagtgttgctccacggggcggctgtcaacttcctggacagaagaggacgtgaatgataacacactcttcaagtggatgatatttaatggcggggccccaaattgcattccatgtaaagaaacctgtgagaatgttgactgcgggcctgggaaaaagtgtaggatgaacaaaaaaaacaagcctcgttgcgtctgcgcacctgattgttccaatatcacatggaagggccctgtgtgcggcctcgatgggaagacataccgcaacgaatgtgcgttactgaaggccaggtgtaaagagcaacccgagttggaggtacagtaccagggacggtgtaagaagacctgtcgggacgtcttttgccccggcagcagtacatgtgtagttgatcagaccaacaacgcttactgtgttacctgcaaccgcatctgccccgaacctgctagctctgagcagtacctatgtgggaacgatggcgttacctactcctccgcctgccaccttaggaaagcaacatgcctcctgggtaggtccatcggcctcgcttatgagggaaaatgtataaaagccaagagctgcgaggacattcagtgcaccgggggaaagaagtgtctgtgggattttaaggtcgggcggggtcgctgcagcctctgtgacgagctatgccccgattcaaagtcagacgaacccgtgtgcgcgtcagacaacgcaacctacgcctccgagtgcgccatgaaggaggctgcctgtagttcaggcgttctccttgaggtcaaacacagcgggtcctgcaattcaattagcgaagacaccgaagaggaggaggaggacgaagaccaggattattcatttccaatatcttcaattctcgaatgg

SEQ ID NO: 176198 - DNA, 1032 bp, Artificial Sequence
  derived and/or modified sequence
atggtgcgcgctaggcatcaaccaggaggactctgtctccttctcttgcttctgtgtcagtttatggaggataggagcgcacaggcaggcaactgttggttaaggcaggctaagaatgggaggtgtcaagtcctttacaaaacagaactttccaaggaggaatgctgtagcaccggtagactcagcacgtcttggacagaggaggacgtgaacgacaacactctttttaagtggatgatctttaacggaggagcccctaactgtattccctgcaaggaaacttgcgaaaacgtcgactgtggcccgggtaaaaagtgccgtatgaataagaaaaataagcctaggtgtgtttgcgctcccgactgtagtaacatcacatggaaggggccagtgtgcggactggatgggaaaacatataggaacgaatgcgcccttcttaaagcaagatgcaaggaacagcctgagttggaagtgcaatatcagggcagatgcaaaaagacatgcagggatgttttctgccctggcagctccacctgcgtggttgaccagactaacaatgcgtattgcgtgacctgcaatcgaatctgtcctgaacctgcttctagcgaacagtacctgtgcggcaatgacggagtgacctatagtagtgcctgtcacttgcgcaaagcaacctgcctgctgggccgatctattgggctcgcttacgagggaaaatgtatcaaggccaaatcatgcgaggacatccaatgcaccggaggaaagaagtgcctttgggactttaaagtgggccggggcagatgctcactttgtgacgagttgtgcccagattctaagagtgatgagccagtgtgtgcaagtgataatgctacatacgcctccgaatgtgcaatgaaggaggcagcctgctccagcggcgtcctgctcgaggttaagcactctgggagctgtaactcaatctctgaggacaccgaagaagaggaggaggatgaggaccaagactattctttccctatctcctccattctggaatgg

SEQ ID NO: 176199 - DNA, 1032 bp, Artificial Sequence
  derived and/or modified sequence
atggttcgcgctcggcaccaacctggaggcctctgtctgcttctcctcctgctgtgccagtttatggaagatagaagcgcgcaggcaggtaattgctggctccgacaggcgaaaaatggacggtgccaagttctgtataaaacggagctgagcaaagaagaatgctgttcaactggacggctctccacctcttggacggaagaggacgttaacgacaacaccctattcaaatggatgatcttcaacgggggcgccccaaactgcattccttgtaaagagacttgtgaaaacgtggactgtgggcctggtaaaaagtgccggatgaacaagaaaaacaaaccgcgctgcgtatgtgctcctgattgttccaatatcacatggaaaggcccggtgtgtgggctggacggaaaaacatacagaaacgagtgtgctcttctgaaagcccgctgcaaagagcaacctgaactggaggtgcagtatcagggaagatgcaagaaaacgtgcagggatgtgttctgcccgggtagtagcacctgcgtggtagaccagactaataatgcctactgcgtgacctgtaacagaatctgccccgagcctgcctcatctgagcagtacctctgtgggaacgatggagtcacctactcttctgcctgccacctgcggaaagccacatgcttgttgggccgtagcattggcctcgcctatgagggcaaatgcatcaaagctaagagttgcgaggatattcagtgtacgggaggaaagaagtgcctgtgggattttaaagtcgggcgggggcggtgtagcttgtgcgacgaactgtgccccgatagcaagtctgatgaacccgtgtgtgcctcagacaacgcgacatacgcctcggagtgtgctatgaaggaggcagcttgcagttctggcgtgctgttggaggtaaagcattccgggtcatgtaactctatcagtgaagataccgaagaggaggaggaggacgaagatcaggattactcatttcctattagctctattcttgaatgg

SEQ ID NO: 176200 - DNA, 1032 bp, Artificial Sequence
  derived and/or modified sequence
atggtgcgggccaggcaccaacccggcggcctgtgcctgctcttgttgttgctctgtcagtttatggaggatcgcagtgcccaggctggaaactgctggctgcgccaggctaaaaatggccgatgccaggttctgtataagaccgaactcagtaaggaagagtgctgctcaacggggcgcttgtctacatcttggaccgaggaggatgttaacgataacaccctgtttaaatggatgatcttcaacggcggcgcgcccaactgtataccttgcaaggaaacatgcgaaaacgtcgactgtggtcccggtaaaaaatgtcggatgaataagaaaaacaagccccggtgcgtgtgcgcgcctgattgctctaacatcacatggaaagggcccgtgtgcggactagatggcaagacctaccgtaacgagtgcgcgttgcttaaggcacgctgcaaggagcagcctgagctcgaggtccagtaccaagggcggtgcaaaaaaacatgccgggacgttttttgccccggctctagcacctgtgtcgtcgaccaaaccaacaacgcatattgcgtaacttgtaacaggatctgtccggaacctgcaagttctgaacaatacctgtgcgggaacgacggagtgacctacagctcagcatgtcatctccggaaagcaacctgtctgctggggcgtagtatcggattagcgtatgagggcaaatgcatcaaggcaaagagctgcgaggacattcaatgtaccggaggcaagaagtgtctatgggacttcaaggttggcaggggtcgatgctccttgtgtgacgagctctgccctgactccaaatccgatgagccagtctgtgccagcgataacgcgacctacgcctccgaatgcgccatgaaggaagctgcctgctcgtccggggtactcctcgaggtcaagcacagtggcagttgcaattcaatctccgaagatacagaggaagaggaagaggacgaggatcaggattactccttccctatctcctcaatcctggagtgg

SEQ ID NO: 176201 - DNA, 1032 bp, Artificial Sequence
  derived and/or modified sequence
atggtccgggcgaggcaccaaccaggcggactctgcctgctccttctgctcctgtgtcagttcatggaggacagatccgctcaggccgggaactgttggctgcggcaggcaaaaaacggccgctgccaggtgctgtataagaccgaactttcaaaggaagagtgctgctcgaccgggcggctatctaccagttggaccgaggaggatgttaacgacaatacactgttcaagtggatgatctttaatgggggggcgcctaattgtataccatgcaaagaaacatgcgagaatgtggactgtggtcccggcaagaaatgcaggatgaacaaaaagaacaagccgaggtgcgtgtgtgcccctgactgcagtaacataacctggaaaggtcctgtgtgcggactcgatggaaagacgtaccgcaacgaatgcgcactgttaaaagctaggtgtaaggaacagccagaattagaggttcaataccaagggaggtgcaaaaagacatgtagggatgtgttttgccctggctcgtcaacatgcgtagtagaccagacaaataacgcctattgtgtcacctgtaataggatttgtccggaacccgcttcttcagagcaatacctttgcggcaacgacggggttacatactccagtgcatgtcatttgaggaaggccacatgtctgttggggagatccatcgggttagcttacgagggcaaatgcatcaaggccaaaagttgtgaagatatccagtgtacagggggtaagaagtgtctttgggatttcaaggttggtagaggtcggtgctccctgtgcgacgagttgtgccctgactccaaatccgatgagccagtgtgcgcatcagataatgcgacctacgccagcgaatgtgccatgaaggaggcggcatgtagttcaggcgttcttcttgaagtcaaacatagtggttcgtgtaatagcatcagtgaagacaccgaagaagaggaggaggacgaagaccaggattactcctttcctatcagcagtatcctagagtgg

SEQ ID NO: 176202 - DNA, 1032 bp, Artificial Sequence
  derived and/or modified sequence
atggtgagggcgcgacatcagccaggtggactttgcctgctgcttcttttgctgtgtcagtttatggaggaccgtagcgctcaggctgggaactgttggttgcgccaggcaaaaaacggccgttgtcaggtgctgtacaagaccgaactttccaaagaagagtgttgttccactggtcgactttcgactagctggactgaagaagatgtcaacgataacacgctgtttaagtggatgattttcaacggaggtgcaccaaattgtattccatgtaaagaaacctgcgagaacgtggattgcggtccgggaaagaagtgtagaatgaataagaagaacaagcctcgctgtgtgtgtgcgccagattgttcgaacataacctggaagggtccggtgtgcgggctggacggcaagacgtaccgcaatgaatgcgccctcctcaaggcaagatgtaaggaacaaccagaactggaggtgcaatatcagggaagatgtaaaaagacttgtagggacgtgttttgtcccgggagctccacctgcgtggtggaccaaaccaataatgcctactgcgtcacctgtaatcgcatttgtccagagcctgcatcgtcagagcagtacctgtgcggtaatgacggtgtgacctactcgagcgcgtgccacttgagaaaggccacttgtctgctcggccggagcattggcctcgcttacgaaggaaagtgtatcaaggccaagtcgtgtgaggatatacaatgtaccggcggcaagaagtgtctctgggatttcaaggtggggagaggaagatgctccctgtgtgacgaactctgtccggatagcaaaagcgacgaacctgtctgtgcatccgacaacgcaacttacgcatcagaatgtgcaatgaaggaagccgcttgttcctccggcgtgcttctcgaagtgaagcattcaggatcctgtaattcgatttcggaagatactgaggaagaagaagaggacgaggatcaagactacagcttcccaatttcgtcgattctcgaatgg

SEQ ID NO: 176203 - DNA, 1032 bp, Artificial Sequence
  derived and/or modified sequence
atggtaagggctcggcatcagccgggtggactctgtctcctgctgctactcttgtgccagttcatggaagaccgatctgcgcaggcgggcaactgctggctccgacaggccaagaacggtcgctgccaagtcctatacaagaccgaactgtccaaggaagaatgctgcagcacaggtaggctttcgactagctggactgaagaggacgtcaatgacaacacgttgttcaagtggatgatctttaacgggggtgcccctaactgtataccctgcaaggaaacgtgcgagaacgtcgattgcggtccaggcaagaagtgtagaatgaataaaaagaataagcctcgttgcgtttgtgcccccgattgttctaacatcacctggaaaggcccggtctgcggtttggacggtaagacctatcgaaatgagtgtgccctactcaaagcgcgctgtaaggagcaaccagagcttgaagtccagtaccaggggagatgcaagaaaacatgccgcgacgtgttctgcccaggaagtagcacatgcgtggttgatcaaactaacaacgcctactgtgtcacctgcaatcgtatctgtccagagcctgcctcctccgagcagtacttgtgcggcaacgacggtgtaacgtattctagcgcctgccacctgcggaaagccacctgcttgttgggccgctctatcgggttggcttatgagggaaagtgcatcaaggccaagagctgcgaggatatccagtgcaccggcggaaagaaatgcttgtgggatttcaaggttggccgtggacgctgtagcctatgcgacgagctctgcccggactccaagtctgacgagccggtatgcgcaagtgacaacgcgacctatgcctcagagtgcgccatgaaggaggctgcgtgttcctccggtgttctgctggaggtcaagcactctggaagttgtaattctatcagtgaggatacagaggaggaggaggaggatgaggaccaggattactccttccccatttcttccatccttgagtgg

SEQ ID NO: 176204 - DNA, 1032 bp, Artificial Sequence
  derived and/or modified sequence
atggtacgagcacggcaccagcctggcggtctttgccttctcctgctgctgttatgccaatttatggaagatcggtcagcacaagccggcaactgttggctgcggcaagctaaaaacggccggtgccaagtgctgtataagactgagctgtcgaaggaagagtgctgttctaccggccgactgagcacgtcttggacagaagaggacgtgaacgataacacactattcaaatggatgatttttaacggaggtgcgcccaattgcattccttgtaaggagacctgcgagaacgtggattgcggtccgggtaagaagtgcagaatgaacaagaagaataaacccaggtgcgtatgcgctccagattgcagtaatattacatggaagggacccgtatgtggcttagacggtaagacatatcggaacgagtgcgcattactcaaggcaaggtgcaaagaacagccagaactggaagtccaataccagggcagatgcaagaagacttgcagggacgtgttctgccccgggtcgtccacatgtgtagtggaccagactaacaacgcttactgtgttacttgtaatcgcatttgtcctgaacctgccagctcagaacagtatctttgtgggaatgacggagtcacatactcgagcgcttgccatctcaggaaagcaacctgcctgttggggaggtcaatcgggcttgcctacgaaggtaagtgtatcaaagcgaaatcctgcgaggatatccagtgcacaggagggaagaagtgtctgtgggattttaaagtagggcgggggagatgcagtctgtgcgacgaattgtgtccagactcgaaatcagatgagccagtatgcgctagcgataacgccacgtatgcttctgagtgtgcaatgaaagaagcggcctgcagcagtggggttctgctggaggtcaagcactcgggatcatgcaattcgatcagtgaggatactgaagaagaagaagaggatgaggatcaagactactcctttcccatttcatctatcctggaatgg

SEQ ID NO: 176205 - DNA, 1032 bp, Artificial Sequence
  derived and/or modified sequence
atggtgcgggcccgccaccagccaggtggactgtgcctcctgctgctgctactgtgccagttcatggaggatcgcagcgcacaggcgggcaactgttggctgcgccaagccaaaaatggccgatgtcaagtcctgtacaagaccgagctgtctaaggaggagtgttgttcgacaggacggctgagcacgtcctggaccgaggaggatgtcaatgataataccttgttcaaatggatgatcttcaatggtggtgcgccaaattgtattccatgcaaagagacctgcgaaaacgtggactgcggtccaggcaagaagtgccgtatgaataagaagaacaagccacgttgtgtgtgtgccccggattgcagcaatatcacttggaaaggtcctgtgtgtggcctggatgggaagacttaccgcaatgagtgtgcgctgttgaaagcacgctgcaaggaacagccggagctggaggttcaatatcaaggtcgttgtaaaaagacctgccgggacgttttttgcccgggttctagtacctgtgtagtggaccagaccaataacgcgtactgcgtgacgtgcaatcgcatttgcccggaaccggcctcctcagaacaatatctgtgcggtaatgacggtgtcacttattcttccgcgtgccatctgaggaaagcgacgtgcctgctgggcaggagcattggtctggcctatgaaggcaagtgcatcaaggccaagtcttgcgaagatatccaatgtaccggtggtaagaagtgcctgtgggattttaaggttggtcgggggcgttgtagcctgtgcgacgagctgtgcccggatagcaagtcggacgagcccgtctgcgcctctgacaatgcgacctatgcaagtgagtgcgctatgaaggaggctgcatgttcctctggagtgcttctggaggtgaaacacagcggcagctgcaacagcatcagcgaagacaccgaggaggaggaagaagacgaggatcaggattatagcttcccgatcagcagcatactagagtgg

SEQ ID NO: 176206 - DNA, 1032 bp, Artificial Sequence
  derived and/or modified sequence
atggtgcgagcaaggcatcagcccggagggttgtgccttctgctcctgttgctgtgtcagttcatggaagacaggtcagctcaggcaggtaattgttggttacgacaagccaagaatggccgctgccaagttctctacaaaacagaattgtccaaagaggaatgctgcagcacaggtaggctttccacctcttggaccgaagaggatgtaaacgacaacactcttttcaagtggatgatttttaacggtggggctccaaactgcattccctgcaaggagacatgtgagaatgtggactgcggcccggggaagaaatgccgcatgaacaaaaaaaacaaaccacgctgtgtgtgcgccccagattgctccaacataacctggaagggaccagtgtgtggcctggacggaaagacataccggaacgaatgcgctctcctgaaggccaggtgcaaagaacaacccgaattggaagtgcaatatcaggggcgttgcaaaaaaacttgcagggatgttttctgtccaggcagctccacttgcgtagtggatcagacgaacaatgcatattgcgtcacctgcaaccgcatctgccccgagcccgcttcctccgaacagtatctctgtggcaacgacggggttacctactctagcgcatgccacctgagaaaagccacgtgtttgctgggccggtccattggcctagcatatgagggtaagtgcatcaaggctaagtcctgcgaagacatccagtgtaccggcggaaagaagtgcctgtgggacttcaaggttgggagaggacgttgcagcctttgtgacgagctgtgtcctgatagcaagtctgacgaacccgtctgcgctagcgacaacgctacatacgcgtctgaatgcgcgatgaaggaggccgcatgtagttctggcgtgctgctcgaggtgaaacacagtggatcttgcaactccattagcgaagatactgaagaagaagaggaagatgaggaccaggactactccttccctatctcatctatcctcgagtgg

SEQ ID NO: 176207 - DNA, 1032 bp, Artificial Sequence
  derived and/or modified sequence
atggtgagggctcggcatcagccgggcggcctgtgcttactgttgctgcttctttgtcaattcatggaggacagaagcgctcaagccggcaactgctggctgaggcaagccaaaaacggtcggtgtcaagtgttgtacaaaactgagctgagcaaagaggaatgttgttctaccggccgactttctacctcctggaccgaggaagacgtcaacgacaacactctgttcaaatggatgattttcaatggcggagccccaaactgtatcccatgcaaagagacttgtgaaaacgtcgattgcggcccaggaaagaaatgtcggatgaacaaaaaaaacaagcctagatgcgtttgtgcccccgactgttctaacataacatggaaaggaccggtgtgtgggcttgatgggaagacctacagaaacgagtgtgcacttctgaaggcccgctgcaaggagcagccagagctcgaagtgcagtatcagggacgctgcaagaaaacatgccgggatgtcttctgccctggcagcagcacatgcgttgttgaccagacaaacaacgcctattgcgttacctgcaacaggatctgccccgagccagcttcctcggagcagtatttgtgtggcaatgatggggtgacctacagctccgcctgccatctccgtaaagctacctgcctgctcggcaggtctattgggctcgcatatgaaggaaagtgtataaaagccaagtcatgtgaagatatacagtgcaccggaggaaagaagtgtttgtgggatttcaaagtgggaagagggcgatgcagcttgtgcgacgagctgtgccccgattcaaaatcggacgagcccgtttgtgctagtgataacgccacctacgcgagcgagtgtgcaatgaaagaggccgcttgcagctctggcgtgctgttggaggtgaaacactccggatcttgtaactccatctctgaagacactgaggaggaggaagaagatgaggatcaggactactcatttcctatctcaagcattctcgagtgg

SEQ ID NO: 176208 - DNA, 1032 bp, Artificial Sequence
  derived and/or modified sequence
atggtgcgcgcaagacaccaaccaggaggtctctgtctgctgctactcctcctttgtcagtttatggaggacaggtccgcccaggcaggaaactgctggctccgccaggccaaaaacggccggtgccaagtcctttataagaccgagttgtcaaaggaagaatgttgcagtactggaaggctttctaccagctggacagaagaagacgtgaacgacaacactctgtttaagtggatgatcttcaacggaggcgcccctaattgtatcccttgcaaagaaacctgcgagaacgttgattgtggtcctggcaagaagtgtcgtatgaacaagaaaaacaaaccgcgctgcgtgtgcgctcctgactgttctaacattacgtggaaaggaccagtgtgcggactggacggaaaaacttaccggaatgaatgcgcactgctgaaggctaggtgcaaggagcagcctgaactagaggtccagtaccaaggaagatgcaagaaaacatgcagggatgttttttgtccaggctcttccacctgtgtagtggaccagacaaacaatgcttactgtgtcacatgcaaccgtatctgccccgagcctgctagcagcgagcaatatctatgcggcaacgatggggtaacttacagtagcgcttgtcacttgcggaaggcaacctgtctacttggccggagcattggcttagcatatgaaggcaaatgcattaaagcaaagagctgcgaagacatccaatgtaccggggggaaaaagtgtctttgggactttaaagtgggtaggggcagatgttccctgtgtgatgaattgtgtccagatagcaagtctgatgagccagtgtgtgcctctgacaacgctacttacgcctctgaatgtgctatgaaagaagctgcttgcagtagtggcgttctgctcgaagtgaaacattccggtagctgtaactccatcagcgaagatacggaggaagaagaagaagacgaggaccaggactactcctttccaatctcatcaatcctggagtgg

SEQ ID NO: 176209 - DNA, 1032 bp, Artificial Sequence
  derived and/or modified sequence
atggtacgagccagacatcaacccggcggcctgtgtctcctgctcctcctgctgtgccagttcatggaagaccgatctgcccaggcggggaactgctggttgcgtcaagctaaaaacggccggtgtcaggtcttgtataagaccgagctgtcaaaagaggagtgttgctcaaccgggcggctgtccacatcctggaccgaggaggatgtgaacgataacacactctttaagtggatgatctttaatggtggcgccccaaattgcatcccctgtaaggagacatgcgagaatgtcgattgtggacctggaaagaagtgcaggatgaataagaaaaacaagccccggtgcgtttgtgctcccgattgctccaacattacatggaagggccccgtctgcggcctggatggaaagacctataggaatgaatgtgcccttttgaaggcgcgttgtaaagaacagcccgagcttgaggtgcagtaccaagggagatgtaagaagacatgtcgcgacgttttctgcccgggctcttctacctgtgtggtggatcagaccaataatgcatactgtgtgacctgtaaccgcatctgcccagagcccgcatcttcagaacagtacctgtgtggcaatgacggtgtgacgtattctagcgcctgccaccttagaaaggccacttgtctgctgggcagatccatcggcttggcctatgagggaaagtgcattaaggctaagtcatgcgaagacatccagtgcacgggtggcaaaaagtgcctgtgggacttcaaggtgggtaggggacgatgttccttatgcgacgaactgtgccccgacagtaaatccgacgaaccagtatgtgccagtgataacgcgacatacgcttctgagtgtgcaatgaaagaggctgcatgtagctcaggcgtgcttcttgaggtgaagcattcgggtagctgcaattccatcagtgaggacacggaggaggaggaagaggatgaagaccaagactactcgtttcctatctcaagtatactggagtgg

SEQ ID NO: 176210 - DNA, 1032 bp, Artificial Sequence
  derived and/or modified sequence
atggtgagagcccgccatcagcccggcggcctgtgcttgctcctcttgctgctttgtcagtttatggaggatagaagtgcccaggctgggaactgttggctgcggcaggccaagaatggtcggtgccaggtcctgtataagacagaactttccaaagaagagtgctgcagcacaggtaggctcagcactagctggactgaagaggatgtcaatgacaatacactcttcaaatggatgattttcaacgggggcgcccctaattgtattccatgtaaggagacttgcgagaacgtagactgcgggcctggaaagaaatgccggatgaataagaagaataaacctaggtgtgtctgtgcgcccgattgctcaaacataacgtggaagggccccgtctgcggcctcgatgggaagacttacaggaatgaatgcgctctgctcaaagcaaggtgcaaggaacaaccggagcttgaagtacagtatcaaggtcgatgcaagaaaacttgtagggacgttttttgccccggcagcagcacctgcgttgttgaccagactaacaacgcgtactgcgttacctgcaatcgaatctgtccggaaccggccagcagcgagcagtacctgtgcggcaacgacggcgtgacctacagcagcgcttgccatcttaggaaggcgacttgccttctcggacgctcaataggcctcgcgtacgagggaaagtgtataaaggcaaaatcctgtgaggatatccagtgcaccgggggtaagaaatgtctgtgggatttcaaggtgggccggggccggtgcagtctttgtgacgagctttgtcctgattccaaaagcgacgagcctgtctgcgctagtgacaacgctacctacgcgtccgagtgcgcaatgaaagaggcagcatgcagttccggtgtgctgctcgaggtcaaacattcagggagctgtaactctattagcgaggatacagaggaagaagaggaggatgaagaccaggactacagctttcctatctcatcaattctggagtgg

SEQ ID NO: 176211 - DNA, 1032 bp, Artificial Sequence
  derived and/or modified sequence
atggttagagccaggcatcagcccggaggactgtgtctgctgctgctcctgctatgccaattcatggaagataggtctgctcaggccgggaactgttggctaagacaggctaaaaacggccgctgccaggtgctatataagaccgaactgtctaaagaggagtgttgctcaaccggcagattgtctactagttggactgaagaagatgtcaatgataacacattgttcaaatggatgatcttcaacggaggagctccgaattgcataccttgcaaagagacatgtgaaaacgttgattgtggccccggtaagaagtgccggatgaacaagaaaaacaagccgcgatgcgtgtgcgcacccgactgttccaacatcacatggaaaggacctgtgtgtggtctggatggaaaaacctacagaaacgaatgcgcattgcttaaggccaggtgcaaggaacagccggagctggaggttcagtatcagggaaggtgtaagaaaacttgtcgtgacgtgttctgcccaggttcgagcacatgtgtggtggatcagacaaacaatgcgtactgcgtaacatgtaatcgtatttgccctgagccggcaagttccgagcagtacttatgtggaaacgacggggtgacctactcctccgcatgccatctgaggaaggcaacatgcctgttgggacgcagcattggacttgcgtacgaggggaaatgcatcaaagcaaaatcctgcgaggatatccagtgcaccggaggaaagaagtgcttgtgggacttcaaagttggcaggggccgctgttcactctgcgatgaattgtgtcctgattctaagtccgacgagccggtgtgcgcctccgataatgccacttatgcctccgaatgtgctatgaaggaggcggcatgctcctctggagtccttctggaagtaaagcatagtggttcctgcaattccatctcagaagatacagaagaggaagaggaggacgaggatcaagattactcctttccaatctcgtccatactggaatgg

SEQ ID NO: 176212 - DNA, 1032 bp, Artificial Sequence
  derived and/or modified sequence
atggtccgcgcacggcaccagcctggtggtctttgtttgttgctgttgcttctctgccagtttatggaggaccgctcggcccaggcggggaattgttggctgagacaggcaaaaaacggcagatgccaggtgctgtacaaaaccgaactgtcaaaagaagaatgttgttccaccggacgactgtccacctcctggactgaagaggacgttaatgataacaccttgtttaagtggatgatctttaatggtggtgccccaaactgtatcccttgcaaggagacgtgtgagaacgtggattgcggaccgggtaaaaagtgtcgaatgaacaagaaaaacaagccccgctgtgtgtgtgccccggattgctcgaatatcacctggaagggacccgtctgtgggcttgacggtaagacgtacaggaacgaatgtgcgctgctgaaggcaagatgcaaggaacaacctgaacttgaagtccagtaccaagggcggtgtaaaaagacttgcagagatgtgttttgtcctggctcctcaacctgtgtggtggaccaaaccaataacgcctactgcgtcacgtgtaaccggatttgccctgagccagcgtccagcgagcaatacctgtgcggtaacgacggtgtgacttactcgtcggcgtgtcatttgcgaaaggcaacttgtctgctcgggcgatccattggtcttgcatacgagggaaagtgtatcaaagccaaaagctgtgaagatattcaatgcaccggcggcaaaaagtgtctgtgggatttcaaggtgggaagaggtagatgctcgctttgcgatgaactgtgccccgattctaagagcgatgagccagtttgtgcaagcgataacgcgacctacgcatcggaatgtgcaatgaaagaagcagcatgctcaagcggtgtgctgctggaggtgaagcatagcggatcatgtaacagcattagcgaggacacggaagaagaagaggaggatgaagatcaggattactcgttccctatctcgtccatattggaatgg

SEQ ID NO: 176213 - DNA, 1032 bp, Artificial Sequence
  derived and/or modified sequence
atggtgcgagccaggcatcagccaggtggcttgtgcctgctgctcctgttactctgtcaattcatggaggataggagcgcacaggccggcaactgctggctgaggcaggccaaaaacggcaggtgccaagtcttgtataagacagaactctctaaagaagagtgctgtagcacaggcaggctctctactagctggaccgaggaagatgtcaacgataacaccctcttcaagtggatgatattcaatggtggagcccccaactgtatcccttgtaaagagacatgcgaaaacgtagattgcggcccaggcaaaaaatgtcgtatgaataagaaaaacaagccacggtgcgtgtgcgctcccgattgctctaatatcacttggaaaggaccggtgtgtgggcttgacggcaaaacctataggaacgagtgtgccctgctgaaggccagatgtaaggagcaaccagaactggaggttcagtatcaggggagatgcaagaaaacttgtcgtgatgtcttctgtcctgggagttcaacctgcgttgtggaccaaacaaacaatgcatactgtgtgacctgcaaccggatatgtccagagccagcctcctctgagcaatacctctgtggtaacgatggcgtcacatactcgtccgcctgtcatctaaggaaggctacttgtctgttagggagaagtataggcttggcgtatgaggggaagtgtatcaaagctaaatcttgtgaggacattcaatgcacaggcgggaagaaatgtctatgggatttcaaagtggggagaggacgatgtagtctctgcgacgaactgtgtccggactcgaaatctgacgagcccgtgtgtgcctcagacaacgccacttatgcctccgagtgcgcgatgaaagaggcggcctgcagttctggagtgctcctcgaagtaaaacactctggttcctgcaactcgatctcagaagacaccgaggaggaagaagaggatgaagaccaggactattctttccccatctcgtcgatcctggaatgg

SEQ ID NO: 176214 - DNA, 1032 bp, Artificial Sequence
  derived and/or modified sequence
atggtgcgcgctcggcaccagccgggcggcctgtgtctgctgctcttgctcctgtgccaattcatggaggaccggtcggcacaagcagggaactgttggctgcggcaggccaaaaacggacgatgccaggtgctgtacaagactgaactgtccaaagaagaatgctgcagcaccggtcggctctctacctcctggaccgaggaagatgtgaacgacaataccctgtttaagtggatgattttcaatggaggggccccaaactgcatcccttgcaaggaaacgtgcgaaaacgtcgactgcggaccgggaaagaagtgcaggatgaacaagaagaataagccgcgctgtgtgtgcgcgcccgactgctccaatatcacttggaagggaccggtctgcgggctcgacggaaagacctaccgaaatgagtgcgccctgctgaaggcccgctgcaaggagcaacctgaattggaggtccaataccagggacggtgcaagaaaacttgtagagatgtgttctgtccaggctcatcgacttgcgtggtggatcagactaacaacgcatactgcgtgacttgcaacagaatctgcccggaaccagcttcatccgaacagtacctgtgcggcaacgacggagtgacctattcatcggcctgtcatcttcgcaaggccacttgcttgctgggacggtccatcggactggcctacgaaggcaagtgcatcaaagccaagtcgtgcgaagatatccagtgcaccggaggcaagaagtgcctgtgggatttcaaagtggggcgcggcagatgctccctctgtgacgaactttgcccagattccaaaagcgacgagccggtctgcgcgtcggacaatgctacttacgcctccgaatgtgcgatgaaggaggccgcatgttcgagcggggtgctgctggaagtgaagcacagcggctcatgcaattccatctcggaagataccgaagaggaggaagaggatgaagatcaggattactcattcccgatttcgtccatcctcgaatgg

SEQ ID NO: 176215 - DNA, 1032 bp, Artificial Sequence
  derived and/or modified sequence
atggtgagagctcgacaccagcccgggggactttgccttttgctcctcctgctctgtcagttcatggaagaccggtctgcccaggcagggaattgctggctgagacaggctaaaaatggaaggtgtcaggttctctataaaactgaactgtcaaaagaagaatgctgctccactggaaggctttcaacttcctggacagaggaagatgtgaacgacaacacattatttaagtggatgatcttcaatggaggggctcccaactgcataccctgcaaagagacatgcgagaacgtggattgtggacctggaaaaaaatgccggatgaataaaaaaaataaaccccgatgcgtatgtgctcccgattgctcgaatattacttggaaagggcccgtttgcgggctcgatgggaaaacttatagaaatgaatgtgccctattgaaggccagatgcaaggaacagcccgaactggaggtccagtatcaggggcgatgtaaaaaaacttgtcgggatgtgttttgtcccgggtcttctacatgcgtagtggatcagactaacaatgcttactgtgttacatgtaaccgcatctgccccgagccagccagtagtgaacagtatctgtgtgggaacgatggagttacttactcttctgcctgtcaccttcgaaaggctacttgtctcctggggcggtctataggactagcctatgaggggaaatgtataaaagctaaatcttgtgaggatattcagtgcacaggggggaaaaaatgcctttgggactttaaagtaggaagaggacggtgttcattgtgcgacgagctatgccccgatagtaaatctgatgagcccgtctgtgcatcggataacgcaacatatgcctcagaatgtgctatgaaagaagctgcatgcagtagtggagtccttttagaagtgaaacattctggatcctgcaattccatctctgaagatacagaagaagaggaagaagatgaagatcaggactattcttttcctataagttcaatactagagtgg

SEQ ID NO: 176216 - DNA, 1032 bp, Artificial Sequence
  derived and/or modified sequence
atggtgcgggctaggcatcaacccggagggctctgcctcttgcttctgttactgtgccagttcatggaagaccggagcgctcaggcggggaactgttggctgagacaggcaaaaaatggaagatgccaagtgctgtacaaaaccgagctttctaaggaggagtgctgcagtaccgggagattgagcactagctggactgaggaggacgtcaatgacaacactctgttcaaatggatgatcttcaatgggggtgcaccaaattgtattccatgcaaagagacttgtgagaatgtagattgtggacctggtaagaagtgtcggatgaacaagaagaacaaacctagatgcgtctgcgcccctgattgttctaatatcacatggaaagggccagtctgtgggctcgatgggaaaacctataggaacgagtgtgccttgctgaaagcgcgctgcaaagagcaaccggaactggaagttcagtaccaggggaggtgcaaaaagacctgccgggacgtgttttgtccagggagctccacatgtgtggtggatcagacgaataacgcgtactgtgtaacatgtaatcgaatatgccccgagcctgcttcctcggaacagtacctctgtgggaacgacggcgtcacatatagctccgcatgccatctgcggaaggcaacatgtctcttaggtagatctattggactggcctatgaaggcaaatgtattaaggccaaaagctgtgaagatatccagtgcactggtggcaagaagtgtctgtgggacttcaaggtgggccgcgggcggtgcagcctgtgtgacgagctgtgtcccgactcaaagtcggacgaaccggtctgtgcgtcagacaatgcgacgtacgctagtgaatgtgctatgaaagaagctgcttgctcgtctggggttttgctagaggtgaaacattctggatcctgtaattcaatctcggaagataccgaggaggaggaggaggacgaggatcaagattactcgtttccaatctcaagcattctggagtgg

SEQ ID NO: 176217 - DNA, 1032 bp, Artificial Sequence
  derived and/or modified sequence
atggtgcgtgccaggcatcagccaggcggcttgtgtctccttctgctcctgctctgtcaattcatggaagatcgatcggcgcaagctggtaactgttggctcagacaggcgaagaacggacgctgtcaggtcctctacaagactgaactgtcgaaggaggaatgttgtagcaccggacgcctttccacctcctggaccgaagaggatgtgaatgataatacccttttcaagtggatgatctttaacggcggagcacctaactgtattccttgcaaagaaacttgcgaaaacgtggactgtggaccaggtaagaagtgtcgcatgaacaagaagaataagccacgatgtgtgtgcgcacctgactgctccaacattacctggaagggtcctgtgtgtggattggatggcaagacgtacagaaatgaatgtgcacttctgaaagcacgttgtaaggaacagccggaactggaagtgcaatatcaagggagatgtaaaaagacctgcagagatgtgttctgccctggttcatcgacttgtgtcgtcgaccagacgaataacgcatactgcgtgacttgcaaccggatctgcccagagccagcatcgagcgagcaatatctgtgtggaaacgacggagtcacttactcctcagcttgtcatctgcgaaaggccacttgtctcttgggccggtcgatcggcttggcgtacgaggggaaatgcatcaaagccaagagctgtgaggatatccagtgcaccggaggaaagaagtgtctgtgggatttcaaggtgggtagaggacgctgttctctgtgcgacgaactttgtcctgacagcaagtcggatgaacccgtgtgtgcgtcggacaatgcgacttacgccagcgaatgtgccatgaaagaggccgcttgcagctccggcgtgcttctcgaagtcaagcattcggggtcgtgcaattccatctccgaagataccgaagaagaggaggaggatgaagatcaagactactcattcccaatctcatccatcttggagtgg

SEQ ID NO: 176218 - DNA, 1032 bp, Artificial Sequence
  derived and/or modified sequence
atggtgcgagcaaggcaccagcccggcggtctctgcctgttactgctgctgctgtgccagtttatggaagaccggagcgcccaggccggaaattgctggctgaggcaggccaaaaacggacggtgccaggtgctgtacaagacagagctgtctaaggaagagtgttgcagtaccggacgcctgtctacaagctggaccgaggaagacgtcaatgataatactctgttcaagtggatgatcttcaacggcggcgctccaaactgcatcccatgtaaggagacatgcgagaacgtggactgtggtccaggcaagaagtgcaggatgaacaagaaaaacaaacctaggtgcgtgtgtgctccagattgctctaatatcacttggaagggcccagtgtgtggcctggatggtaaaacatatcgcaacgaatgcgcattgttgaaggctcgttgcaaggagcagcccgagctggaggtgcagtatcagggccggtgcaagaagacctgtcgcgatgtgttctgcccagggtcctccacttgcgttgtcgaccaaacaaacaatgcctactgcgtgacttgtaatagaatctgccctgaaccagctagctctgagcaatacttatgcggtaacgacggcgtgacttatagcagtgcctgtcatctgaggaaggcaacttgcctgctcggtaggtctattgggctcgcttatgaaggcaaatgtatcaaggctaagtcttgcgaagacattcagtgcaccggcggtaaaaagtgtctgtgggattttaaagtcggcagaggacgatgctcactttgtgatgaattgtgtcccgacagtaaatctgacgagcccgtatgcgctagcgacaacgctacatatgcaagcgagtgtgccatgaaggaagctgcatgcagtagcggggtcttgctggaggtgaagcattctggttcctgtaactccatctccgaagatacagaggaggaagaagaggatgaggatcaagattactcatttccaatttcaagtattctggaatgg

SEQ ID NO: 176219 - DNA, 1032 bp, Artificial Sequence
  derived and/or modified sequence
atggttagggcaagacaccaaccaggtggtttatgtcttttacttttacttttatgccaattcatggaagatagatcagctcaggcaggtaattgttggcttagacaagcaaaaaacggacgttgtcaagtgctttacaaaacagaattgtcaaaggaagaatgttgtagtactggtagactttcaactagttggactgaagaagatgttaatgataatactttgtttaaatggatgattttcaatggaggagcaccaaattgtattccatgtaaggaaacatgtgagaatgttgattgtggtccaggtaaaaaatgtagaatgaataagaaaaataaaccacgatgtgtatgtgcaccagattgttcaaatattacttggaaaggaccagtatgtggattagatggaaaaacatatagaaatgagtgtgcattattaaaggctagatgcaaagaacaaccagaattagaagtccaatatcaaggaagatgtaagaaaacttgtagagatgttttttgtccaggatcatctacatgtgttgttgatcaaaccaataatgcttattgtgtaacatgtaatagaatttgtccagaacctgcttcatctgaacaatatttatgtggaaatgatggagttacatattcatctgcttgtcaccttagaaaagctacttgtttacttggtagatcaattggacttgcatatgaaggtaagtgtataaaagctaaatcttgtgaagatattcaatgtacaggtggaaagaaatgtttatgggattttaaggttgggagaggaagatgctcactttgtgatgaattatgtccagattctaagtcagatgaaccagtttgtgcttctgataatgctacatatgcctcagaatgtgcaatgaaagaagcagcatgttcttcaggagttttattagaggttaaacattcaggttcttgtaattcaatttctgaagatacagaagaagaagaagaagatgaagatcaagattattcatttccaatatcttctattttagagtgg

SEQ ID NO: 176220 - DNA, 1032 bp, Artificial Sequence
  derived and/or modified sequence
atggttcgcgcacgtcaccaaccgggggggctttgtctgcttttacttctcctgtgccagttcatggaggacaggtctgctcaggcaggaaattgctggctcaggcaggccaagaatggacgttgtcaggtcctgtacaaaacagagctgagcaaggaagaatgctgctctacaggtcggctgagcacgtcgtggaccgaggaggacgtcaatgataacacactatttaaatggatgatcttcaatggtggggcccccaattgtattccatgtaaggaaacttgcgagaatgtggactgtggcccaggaaaaaagtgccgcatgaacaaaaaaaataagcctcgctgcgtgtgcgctcctgattgttccaacatcacatggaaaggaccagtgtgtggactggacggcaagacctatcgcaacgaatgcgcactcctcaaagcccgttgtaaggaacagcccgagttggaagttcagtaccaggggcgatgcaagaagacctgccgggatgtgttttgtccagggagctccacttgtgtggtggatcagacaaataatgcatactgcgtgacttgcaatcggatctgccccgaacctgcctcctccgagcagtatctatgtgggaatgatggagttacctattcctcggcatgtcatctgcgaaaagcgacctgtctccttggacggtccataggcttggcttatgagggaaaatgcataaaggcaaaatcttgtgaggacatacaatgcacgggtggaaaaaaatgcttatgggacttcaaggtcggtcgcggccgatgcagcctctgcgatgagctctgtccagattccaagtccgatgaacctgtatgcgccagcgataacgcaacctacgcttccgaatgcgccatgaaagaggcagcatgtagttctggcgtgctgttagaggttaaacattcaggttcctgcaatagcatatccgaagataccgaggaggaagaagaggatgaagatcaggactattccttcccaatcagctctattttagaatgg

SEQ ID NO: 176221 - DNA, 1032 bp, Artificial Sequence
  derived and/or modified sequence
atggtgagagcacgccatcaaccgggtggtctttgccttctgttgcttctgctgtgccagtttatggaagatagatcagcacaagccggcaactgctggctgcgccaagcgaaaaacggcagatgccaagtgctgtataagaccgagctttccaaagaggaatgctgctcaaccggacggctctccaccagctggactgaagaagatgtgaacgacaataccctctttaagtggatgattttcaatggcggggcacctaactgtatcccttgtaaagaaacctgtgaaaatgtggattgtgggccagggaagaagtgtcgcatgaataagaaaaacaagccacgatgtgtgtgcgcgcctgattgttcgaacattacgtggaagggaccagtgtgcggactggatggaaaaacttacaggaacgagtgtgctcttctgaaagcaagatgtaaggagcaacctgaactcgaagtccagtaccagggaagatgtaaaaagacttgtcgtgatgtgttctgtcccggctcctcgacgtgtgtggtggaccagaccaacaatgcctactgtgtgacttgtaacaggatatgcccggaacccgccagcagcgagcagtacctgtgtgggaatgatggcgttacctactcatcagcatgtcatctgaggaaggctacttgtctgcttgggaggtccatcggacttgcgtacgaagggaaatgtatcaaagcaaagtcatgcgaggatattcagtgtaccgggggcaaaaagtgtctttgggactttaaggtgggtagaggaagatgttccctgtgtgacgaactttgccctgatagcaaatccgacgagcctgtgtgtgcatcagacaatgccacctacgcatccgaatgtgcgatgaaggaagcagcatgctcctcaggcgtgcttctggaagtcaagcactcaggttcatgcaactcaatctcagaggatacggaagaggaagaagaggacgaagatcaagattacagctttcccatctcgtccatcctcgaatgg

SEQ ID NO: 176222 - DNA, 1032 bp, Artificial Sequence
  derived and/or modified sequence
atggtacgcgcgcggcaccagccggggggcttgtgcctgttgttgctcctcctgtgccagttcatggaggaccgaagcgcgcaggccggcaactgctggcttagacaagcgaagaacggacgctgtcaagtgctgtacaagaccgaactgtcaaaggaagagtgctgctccactggacggctttctacttcctggaccgaagaagatgtcaacgacaacactctcttcaagtggatgatctttaatgggggagcaccgaattgcatcccttgcaaggagacgtgtgagaacgtggactgcggccctggtaagaagtgtcgcatgaacaagaaaaacaagccgcggtgtgtgtgcgcaccggattgtagcaacattacgtggaagggcccggtctgcggcctggacgggaaaacctaccgcaacgaatgtgcccttcttaaagctcgctgtaaggaacagcctgaactcgaagtgcaataccagggacgatgtaaaaagacctgccgggacgtgttctgccccggctccagcacgtgtgtggtggaccagaccaataatgcctactgtgtaacttgtaacagaatctgccctgagccggcatcctccgagcagtatctctgtggtaatgatggggtcacttactcatcggcctgccatctgagaaaggctacctgcttgctcggaaggtcgattggactggcttacgaaggaaagtgcatcaaagccaaatcgtgcgaggatatccagtgcaccggaggtaagaaatgcctctgggacttcaaggttggacgcggaaggtgctctctgtgcgacgagctgtgccctgattcaaaatcggatgagccagtctgcgcatcggacaacgccacttacgcctcagaatgtgccatgaaagaagcggcgtgttcctcgggtgtcctcctcgaggtgaaacacagcggctcatgtaactcgatcagcgaagatactgaagaggaagaagaggacgaggatcaagactacagctttcccatatcatccatcctggagtgg

SEQ ID NO: 176223 - DNA, 1032 bp, Artificial Sequence
  derived and/or modified sequence
atggtgcgggctagacatcaaccaggtgggctatgtctcctgctgctgctattgtgccagtttatggaagaccgatctgctcaagcagggaactgttggctaaggcaggccaagaacggcagatgccaagtgctttacaaaacagagctatccaaagaagagtgttgttctactggccgcctgagtacttcctggactgaagaagacgttaacgataacacactctttaagtggatgatctttaacgggggcgctcccaattgtatcccttgtaaagagacctgcgagaatgtagactgcgggccaggtaaaaagtgccgcatgaacaagaagaacaaacccaggtgcgtatgtgctcccgattgtagtaacattacctggaaaggtcccgtgtgcggtctggacggtaagacctatagaaatgaatgtgctctgctgaaggctcgatgcaaagagcaaccagagttagaagtccagtaccaagggaggtgcaagaagacctgtagagatgttttttgtcccggttcatctacatgtgtggtcgaccagaccaacaatgcctattgcgtaacttgtaatcgcatttgcccagagcccgccagcagcgagcaatatctgtgtgggaacgatggcgtcacctactctagcgcttgccatctgaggaaagccacctgtctgctggggcgatctattggcttggcctatgagggaaagtgcattaaggcaaaatcttgcgaggacatccagtgcactggaggcaagaaatgtctgtgggatttcaaggtggggagagggcgatgttcattatgcgacgagctgtgtcctgatagtaagtctgacgaacctgtgtgtgccagcgataacgccacctacgcctctgagtgcgcaatgaaagaagctgcctgctcctctggggtattactcgaggttaagcattccggctcatgcaactccattagtgaagacaccgaagaggaggaggaggatgaggaccaggattactcctttccaatctcttcaattctggaatgg

SEQ ID NO: 176224 - DNA, 1032 bp, Artificial Sequence
  derived and/or modified sequence
atggttcgcgcgagacatcagccaggtggactgtgtctgctcttgctacttctttgtcagttcatggaggatagatccgctcaggccggtaattgctggctgcgccaagcaaaaaacggtaggtgccaggttctgtataaaactgaactatctaaagaggaatgttgtagtacaggtagacttagcacctcctggactgaggaggacgttaatgacaataccttatttaagtggatgattttcaatggaggtgccccaaactgcatcccttgcaaggaaacttgtgagaatgtggattgcggccccgggaagaaatgtagaatgaacaagaaaaataaacctaggtgcgtgtgtgcgcctgattgctcgaacattacatggaaggggccagtctgcggtttagatgggaaaacttatagaaacgagtgtgcactgctgaaggcccggtgcaaggagcagccagaattggaggtgcagtatcaggggcgctgtaagaagacctgtcgggacgtcttctgcccaggcagctctacctgcgtggttgatcaaaccaataatgcctattgtgtgacctgcaatcgaatttgccccgaacctgcaagcagtgaacagtacctctgcggcaatgacggcgtgacttatagttctgcctgccacctcagaaaggctacctgtctgctgggtagatcgatcggccttgcttatgagggtaagtgtattaaagctaagagctgtgaggacattcagtgtacaggagggaagaaatgtctgtgggactttaaagtcggacgcggcagatgttcactgtgcgatgagctttgccctgactctaagtctgatgagccggtatgtgcatctgataacgccacgtacgcttcggagtgcgccatgaaggaggccgcttgctccagcggtgtcctgctggaggtgaaacactcaggtagttgcaatagtattagcgaggacacagaagaagaggaggaggacgaggaccaggattactcttttcctatctcctccatactcgagtgg

SEQ ID NO: 176225 - DNA, 1032 bp, Artificial Sequence
  derived and/or modified sequence
atggtgcgcgcgcgccatcagccaggcggcttgtgcctgctccttctcctgttgtgccagttcatggaagataggagcgcccaagccggaaactgctggctccgccaggcaaaaaacggaagatgccaggtgctctacaagactgagttgagcaaggaagagtgctgttccaccggacggctctcgacgtcctggaccgaggaagatgtaaacgacaacactctgttcaagtggatgatctttaacggaggtgcaccgaactgcatcccgtgcaaggaaacctgcgagaatgtcgattgcggtccaggcaagaaatgccggatgaataagaagaataagccgcgctgcgtctgcgcccccgattgcagcaacatcacgtggaaaggccctgtttgtggcctcgacggaaagacttaccggaacgagtgcgcactgctgaaagcgcggtgcaaggagcaacccgagttggaagtccaataccagggacggtgcaaaaagacctgccgcgacgtcttttgccctgggtcgagcacctgcgtggtggaccagacgaacaatgcttattgtgtcacctgcaatagaatatgtccagagccagcttcctcagaacagtacctgtgcggcaacgacggggtgacttactcttccgcctgtcacctgagaaaggctacgtgtctgcttggacgctcgatcggtcttgcctacgaagggaaatgtatcaaggccaagtcatgcgaggacatccaatgcactggagggaaaaagtgtctgtgggacttcaaagtgggaagaggccggtgcagcctgtgcgacgagctgtgccctgactctaagagcgatgagccggtatgtgcgtcagataatgctacttacgcatcggaatgtgcgatgaaggaggccgcctgtagctcgggcgtgctgctcgaagtgaaacactcgggcagttgtaattccatctcagaagataccgaggaagaagaggaagatgaagatcaggactactcattcccgatctcgtcgattctggaatgg

SEQ ID NO: 176226 - DNA, 1032 bp, Artificial Sequence
  derived and/or modified sequence
atggtccgagcgcgccaccagcctggtggcctttgccttcttcttctcctcctttgtcaattcatggaggacagatccgcacaagcaggaaattgctggctgaggcaagcaaagaatggacggtgtcaagtgttgtacaagaccgaactttcgaaggaagaatgctgttcgactggaaggctgtctacttcgtggaccgaagaggatgttaatgacaatacgctctttaagtggatgatctttaatggtggtgcacccaattgtattccttgtaaggaaacctgtgagaacgtcgattgtggacctgggaagaaatgcagaatgaacaagaaaaacaagccacgttgtgtctgcgcacccgattgtagcaacattacctggaagggtcctgtgtgtggactggatggcaagacttaccgcaacgaatgcgccctgctgaaggcccgctgtaaagaacaacccgagcttgaagtccaataccagggaagatgcaagaaaacttgcagagacgtgttttgtcccggatcatcaacctgcgttgtggatcagaccaataacgcgtactgtgtgacctgcaacaggatttgtccagaaccggcaagttcggaacagtacctgtgtggtaacgacggggttacctattcatctgcctgtcatctccggaaggctacttgcttgcttggacggagcattgggctcgcatacgagggaaaatgtatcaaggcaaaatcctgtgaagatattcagtgcaccggtggaaaaaagtgcctttgggatttcaaggtcggccgaggcagatgttcgctgtgtgatgaactgtgtcctgattctaagagcgacgagccggtttgcgcctccgacaacgcgacttacgcatcagaatgtgctatgaaagaagccgcttgttcgtccggagtgctcttggaggttaagcattcaggttcatgcaactccatctcagaagataccgaggaggaagaggaggacgaagatcaggattactcttttccgatctcctcaatactggaatgg

SEQ ID NO: 176227 - DNA, 1032 bp, Artificial Sequence
  derived and/or modified sequence
atggtgcgcgcgaggcaccaaccaggtggcttatgcctgctgctgctgctgctctgtcagttcatggaggatcggagtgctcaggctggaaattgttggctgcgccaggctaaaaacgggcgatgccaggtgctgtataaaaccgaactgagcaaggaggaatgctgtagcacggggcgtttatctacctcctggaccgaggaggatgtgaacgacaacaccctgtttaagtggatgatttttaatgggggtgccccaaactgtatcccatgtaaagaaacatgcgagaacgtggattgcggtccgggtaaaaaatgccgaatgaacaagaaaaacaagccacgctgcgtttgcgctcccgattgcagtaacatcacgtggaagggtccagtttgcggcctggatggcaaaacgtaccgcaatgagtgcgcgttgttaaaagcccgatgtaaggaacaaccggaactggaagttcagtaccaaggacgctgcaaaaagacctgccgcgacgttttctgtccaggtagctctacgtgtgtggttgaccaaaccaataatgcatattgcgtcacgtgcaatcgaatttgccccgagccggcgtcgagcgagcaatacctttgcgggaatgatggcgtgacgtactctagtgcttgccacttaaggaaagcgacgtgcctcctgggtagaagcatcggcctggcctacgagggtaaatgtatcaaggccaagagctgtgaagacatccaatgcactggtggtaagaagtgcctgtgggattttaaagtcggtcgcggccgttgttccttgtgtgatgagctttgcccagattcgaagagcgatgagccggtatgcgcttccgataatgcgacgtatgcatctgagtgcgcgatgaaggaggctgcctgtagctcaggcgttctgctagaagtcaaacacagcggatcctgtaatagcattagcgaagatacggaggaggaggaagaagatgaggaccaagactacagcttccctatttccagcatcctagagtgg

SEQ ID NO: 176228 - DNA, 1032 bp, Artificial Sequence
  derived and/or modified sequence
atggtgcgtgcccgccaccagccaggtggactgtgcctgctcctccttctcctctgccagttcatggaggatcgctcggcccaggcaggtaactgttggctccgtcaggctaagaacggccgctgccaggtcctctacaaaactgagctctccaaagaggagtgctgttcgaccggtcgattgagtaccagctggacggaggaggacgtgaacgataacaccctcttcaagtggatgatcttcaacggtggcgcgcccaattgtattccctgcaaggagacttgcgagaacgtggactgtggccctgggaagaagtgccgaatgaataagaagaacaagccacgctgcgtgtgcgctcctgattgcagcaatatcacatggaaggggcccgtctgtggactcgacgggaagacctatcgaaatgagtgtgcccttctaaaagcccgctgcaaggagcaaccggagttggaggtgcagtaccagggtcgatgtaaaaagacctgtcgtgatgtgttctgccccggatcctcgacctgtgttgtcgatcagaccaacaacgcctattgcgtcacttgcaaccgcatctgccctgagcctgcctcctctgagcagtacctgtgtggtaacgatggagtcacatacagtagcgcctgccatttgcgcaaggccacatgcctcctgggacgctccattggtctcgcatatgaaggcaagtgcattaaggccaagtcttgcgaagatatacagtgcaccggtggcaaaaagtgcctctgggatttcaaggttgggcgtggccgctgctctttgtgcgatgaactctgcccggattccaagagtgacgaacccgtatgtgcttctgacaacgctacgtacgcgtccgagtgtgccatgaaagaggctgcttgcagtagcggcgtccttctcgaggtgaagcactcgggttcgtgtaacagcatcagtgaggacacagaggaggaggaggaggatgaggaccaggactactctttccccatcagttccatcctcgagtgg

SEQ ID NO: 176229 - DNA, 1032 bp, Artificial Sequence
  derived and/or modified sequence
atggtaagagctcgtcatcaaccaggtggactttgtcttctgcttctccttttatgccaatttatggaagaccgaagtgcacaggcaggaaactgctggctacggcaagctaaaaacggacgttgtcaggtgctctataagactgaattatctaaagaagaatgttgcagcacgggacggttgtcaacctcctggacagaagaagatgttaatgataatactcttttcaagtggatgattttcaatggaggggctccaaactgcataccatgtaaagaaacgtgtgaaaatgtcgattgcggtcccgggaaaaaatgccgtatgaataaaaaaaacaaaccccgatgtgtgtgtgcaccggattgctcaaatattacttggaaaggacccgtctgcggacttgatgggaagacatatagaaatgaatgtgcattactgaaggctaggtgcaaggaacaaccagagctcgaagtacaataccaaggaagatgtaaaaaaacatgtcgagatgttttctgcccaggatcctctacgtgtgtcgtcgatcaaacaaacaatgcttattgcgtgacttgtaaccgtatatgcccagaaccagcatcaagcgagcaatatttatgtggaaatgatggagtgacatattcttctgcttgtcatctccggaaggcaacttgtttattgggtagatctatcggactcgcatacgaaggaaagtgtattaaggctaaatcatgtgaagatatccaatgtacaggaggaaaaaaatgcttgtgggacttcaaggttgggagaggacggtgttcattgtgcgatgagctgtgtccagattcgaagagtgacgaacctgtttgtgcctcggataatgcaacatacgcatcggaatgtgctatgaaagaagctgcgtgctcaagtggcgtactcctagaggttaagcactccggatcctgcaactccatctcagaagatactgaagaggaggaagaagatgaggatcaagattactcatttcctattagtagcatcttagaatgg

SEQ ID NO: 176230 - DNA, 1032 bp, Artificial Sequence
  derived and/or modified sequence
atggttcgggcgagacaccagcccgggggtctgtgcttactgcttcttctcttgtgccagttcatggaggacagatctgcacaggcaggaaattgttggctgcgccaagctaaaaatgggcgatgccaggtgctctacaagaccgaacttagtaaggaggagtgttgctccaccggaaggctgtccacgagttggaccgaagaagatgtgaacgataacacactgtttaagtggatgatcttcaatggaggcgccccaaactgcattccttgtaaggagacctgcgaaaacgtggattgtggacccggcaaaaagtgccgaatgaacaagaaaaataagccgagatgtgtgtgtgctcctgattgtagtaatattacctggaaggggcctgtgtgcggactcgacggtaagacctaccggaatgagtgcgccctgcttaaggctagatgtaaggaacagcctgaacttgaagtgcagtaccagggccgctgcaaaaagacctgtcgagatgtgttctgtccaggatcatcaacttgtgtggtggatcagactaataacgcatattgcgtcacttgcaatagaatttgccctgagcctgcctccagcgagcagtacttgtgtggtaatgatggcgtaacttatagctcagcctgtcacctgcgcaaagccacatgcctgttaggccggtccataggactcgcatatgaagggaaatgtataaaggccaagtcgtgcgaagacatccagtgcacaggaggtaaaaaatgcctttgggatttcaaggtcggtcgaggccggtgttccttatgcgatgagctctgccctgattcaaagagtgacgaacctgtgtgcgcttccgacaatgccacctatgcaagcgagtgtgcaatgaaagaagccgcttgctcatcgggggtgctgctcgaggtcaagcactcaggttcctgtaacagcatatccgaggacaccgaggaagaagaggaagatgaagatcaggattatagtttcccaatttcctccattttggaatgg

SEQ ID NO: 176231 - DNA, 1032 bp, Artificial Sequence
  derived and/or modified sequence
atggtgcgtgcccggcaccagccgggtggcctgtgccttctgttgctgctcctgtgtcaattcatggaggaccgaagcgcacaagcggggaattgttggcttagacaggctaaaaacggaaggtgtcaggtgctttacaagaccgaactgtcaaaagaggagtgctgtagcaccggaaggttgtctacttcatggacagaggaggatgtgaacgacaatacgctgttcaaatggatgatcttcaacgggggagctcctaactgtatcccatgtaaggaaacatgcgagaatgttgactgcggacccggcaagaagtgtaggatgaacaagaagaataagcctcggtgcgtttgcgccccagactgctcaaacatcacttggaaaggccctgtatgcggtttagatgggaaaacatacaggaacgaatgcgccctcctcaaagcacgctgcaaagagcagcctgagctcgaagtgcagtatcagggtcgctgcaagaagacatgccgcgatgtgttctgccccggttcttccacctgcgtggtggaccaaaccaataatgcttactgcgtgacatgcaatcgaatttgccctgaacccgctagctctgagcagtacctttgcgggaacgacggagttacctacagcagcgcctgccacttgaggaaggcaacctgtctgctggggaggagtatcgggctggcatacgaaggaaagtgtatcaaagcaaagtcttgtgaggacatccagtgcacgggcggtaaaaaatgtctctgggatttcaaagtcggacgcgggagatgttccttgtgcgacgagctgtgtccagactcgaagtcagacgaacctgtttgcgcaagcgacaacgccacttatgcttccgagtgcgccatgaaagaggccgcatgctcatccggcgtattgcttgaggtcaagcattctggctcgtgtaattctattagtgaagataccgaggaggaagaggaggatgaggaccaggattactccttcccaatctcatctatcctagagtgg

SEQ ID NO: 176232 - DNA, 1032 bp, Artificial Sequence
  derived and/or modified sequence
atggtgagagccaggcaccaacccggaggtctctgtctgctgctccttctcctttgccagtttatggaggatcgctctgcccaggccgggaactgctggctccggcaggcaaaaaatggcagatgtcaggtcctgtacaaaacggagctctctaaggaggaatgttgtagcacagggagattatctaccagctggactgaggaggacgtcaacgataatactctcttcaaatggatgattttcaacggcggagcacctaattgcataccttgtaaggagacatgcgagaatgtagattgtggtccaggtaaaaaatgtaggatgaataagaaaaacaagcccagatgtgtgtgcgcaccagattgcagtaatattacctggaaaggtcctgtgtgtgggctggatggaaagacatacaggaatgagtgcgccctgttgaaggcacgctgtaaagagcagcctgaacttgaggtgcagtaccaggggaggtgcaagaaaacctgtcgagatgtcttctgtccaggcagtagcacttgcgtggtggatcagacaaacaatgcctactgcgtgacctgtaatcggatctgcccggagcccgcaagttccgagcagtatttatgtgggaatgatggagtgacttacagctctgcctgccatctgcgcaaagcaacctgcctcctcggtcgaagtatcgggttggcctatgagggcaaatgcattaaagccaagagctgcgaggatatacagtgcactggagggaaaaagtgcctgtgggactttaaggtgggacgcggacgctgctctctgtgcgatgagctttgtcctgactctaagtcagatgaacctgtgtgtgcatccgacaatgcaacttacgccagtgagtgtgcaatgaaggaggccgcctgctcatcaggcgttctgctcgaggtcaagcattcaggatcctgtaacagtatctccgaggacaccgaggaagaggaggaagacgaggaccaggactactctttccccatctctagtattctagagtgg

SEQ ID NO: 176233 - DNA, 1032 bp, Artificial Sequence
  derived and/or modified sequence
atggtgcgggcacggcatcaaccaggaggactatgcctcctgcttttacttttatgtcagtttatggaagatcgatcagctcaagctggaaactgctggttgcggcaagctaaaaacggtcgatgtcaagttctttataagaccgaattgagtaaagaggagtgttgcagcactggacgactttcgacttcttggactgaagaggatgtcaatgacaacacgttattcaagtggatgatttttaatggtggagctcctaactgcatcccgtgtaaagaaacttgtgagaatgtagattgcggaccgggaaaaaaatgtagaatgaacaaaaaaaataaaccaaggtgcgtctgcgcacctgattgctcaaatatcacttggaaaggcccagtctgcggattggatggtaaaacctaccgaaacgagtgcgctctcttgaaggcaagatgcaaagaacaacctgaattggaggttcagtatcagggccgatgcaagaaaacatgcagagacgtcttctgcccaggttcgtcaacatgcgttgtggaccagacaaataatgcttattgtgtgacttgtaaccgtatctgtccagagccagcctcaagtgagcagtacctatgtggaaatgacggagtgacttattcttcggcttgccaccttcgaaaggccacttgcctgctagggcgaagtataggccttgcatacgagggaaaatgcattaaagcgaaatcgtgtgaggatattcagtgtacgggcggaaagaaatgtctatgggattttaaggttggtagggggagatgttccttgtgtgacgaactgtgtccagactccaaaagtgatgaaccagtctgcgcatctgataatgccacctacgctagcgaatgtgctatgaaagaagcagcttgttcgagtggagtactactggaagtgaaacattcaggatcgtgtaacagtatatctgaagataccgaagaagaagaagaagatgaagatcaagattacagtttccccatttcttcgatactggagtgg

SEQ ID NO: 176234 - DNA, 1032 bp, Artificial Sequence
  derived and/or modified sequence
atggtacgtgctcgccatcagccaggtgggctgtgcctgcttctcctactgttatgccaattcatggaggaccgctcagcccaggcgggtaattgttggctgcgacaggccaagaatggacgctgccaggtactgtacaagaccgaactcagcaaggaggaatgctgcagcaccggaagactcagcacaagttggacagaagaagatgtaaacgataatactttgtttaagtggatgatctttaatggcggcgctccgaactgtatcccttgcaaggaaacctgtgagaacgtggactgtgggcccggcaaaaagtgcaggatgaataaaaaaaataagcccaggtgcgtgtgcgctcctgactgctctaatatcacctggaaaggccccgtgtgtggcttggatggaaagacgtataggaacgagtgcgccctcctcaaagcacgctgcaaagagcagcccgagttggaggtgcagtatcagggcagatgcaaaaaaacctgtcgcgacgtcttttgtccagggagctcaacttgtgtggtggaccagactaataacgcttactgcgtaacatgcaacagaatatgcccggagccggcaagctctgagcagtacctttgtggaaacgatggcgtgacatatagttccgcttgccatttgcgaaaagcaacttgcctgttggggcggagcattggtctggcatatgaggggaagtgtattaaggctaagtcctgcgaagatatccaatgtactggaggaaagaaatgtttgtgggatttcaaagtgggcagaggacgctgtagcttgtgcgacgagctgtgcccagactctaaaagtgacgagccggtctgcgccagcgataatgctacctacgcctctgagtgtgccatgaaggaagccgcgtgctcgtctggagttcttttggaggtgaagcactccggaagctgcaactccattagtgaggacacagaggaggaggaggaagatgaggatcaagactatagctttcccatttcctccatactcgagtgg

SEQ ID NO: 176235 - DNA, 1032 bp, Artificial Sequence
  derived and/or modified sequence
atggtgagggcgcgccaccaaccgggcggactgtgcctcctgctgctgttgctctgtcagtttatggaagataggtcagcacaggcagggaattgttggcttcggcaggcgaaaaacggacgctgtcaagttctgtacaagaccgaattgtccaaagaggaatgttgtagcacgggacgactcagcacgtcatggactgaagaagatgtgaacgacaacaccctgttcaaatggatgatcttcaacggtggagcgccgaactgcatcccctgcaaggaaacttgcgaaaatgtggactgcgggccgggcaagaagtgccgcatgaacaagaagaacaaaccacgctgcgtctgtgctccggactgctccaacatcacttggaagggacctgtgtgcggcctggacggaaagacctaccgcaatgaatgcgctctgctcaaggcacggtgtaaggagcagccggagttggaggtccagtaccaaggacgctgtaagaaaacctgccgtgacgtcttttgcccgggcagctcaacctgcgtcgtggatcagaccaacaatgcttactgtgtcacttgcaacagaatctgtcccgagcccgctagctcggaacagtacctgtgtggcaacgacggagtcacctatagctcggcctgccacctgcggaaagccacctgcctgcttggaagaagcatcggacttgcctacgagggtaagtgcatcaaggccaaatcatgcgaggacatccagtgcaccggcggcaagaaatgcctgtgggatttcaaggtcggacgtgggcgctgcagtctgtgcgatgaactctgccccgatagcaagagcgatgaaccagtctgcgcctcggacaatgcaacttacgcgtccgaatgtgccatgaaagaggccgcatgctcgtctggcgttctgcttgaggtgaaacacagcggatcatgtaattcgattagcgaggatactgaagaagaagaggaggatgaggaccaggattactcgttccccattagctccatcctcgaatgg

SEQ ID NO: 176236 - DNA, 1032 bp, Artificial Sequence
  derived and/or modified sequence
atggtgcgcgcccgacatcagcccggaggcctgtgtttgctgttgctgctcctctgtcaatttatggaagatagaagcgcccaggccggcaactgctggctccggcaggccaaaaacgggagatgccaggtgctgtacaaaacagagctgtctaaggaggaatgctgctcaaccggcaggttatctactagctggacagaggaagacgtgaacgacaacaccctgttcaaatggatgatcttcaacggaggcgcccccaactgcattccctgcaaggaaacgtgcgagaatgtggattgcggtccagggaagaagtgccggatgaacaaaaagaacaagccgcggtgcgtgtgcgcacctgactgttccaatattacgtggaagggtcctgtgtgcggtttggatgggaaaacctacaggaatgagtgcgctctgcttaaggcacgatgcaaagagcagccggaactggaagttcagtatcaaggcagatgcaaaaagacctgccgcgacgttttttgcccaggatcctcaacctgtgtggtggatcaaactaataacgcctattgcgtgacttgcaatcggatatgccctgagcccgctagctccgagcagtacctgtgcgggaacgacggcgtgacctattcatccgcttgccacttgcgcaaggcgacatgtttgttgggccgctccatcggactggcttacgagggtaaatgcatcaaagccaagtcttgcgaagacatccagtgcacgggtgggaaaaagtgcctgtgggacttcaaggtggggcgcgggagatgctcactctgtgacgagctctgccctgacagcaagagcgacgagccggtatgcgctagtgacaacgcaacgtatgcaagcgagtgtgccatgaaggaggctgcctgcagttccggcgtgctgctcgaagtgaagcacagtgggagttgtaatagtattagcgaggacactgaggaggaggaggaggatgaagatcaggactacagcttcccaatcagctcaatcctggagtgg

SEQ ID NO: 176237 - DNA, 1032 bp, Artificial Sequence
  derived and/or modified sequence
atggtccgcgccagacaccaaccgggaggcttgtgcctgttgctcctgctgttgtgtcagtttatggaagatcggtccgctcaggcgggaaattgttggttgaggcaggcaaagaatgggagatgccaagtcctgtacaaaactgaactgtcgaaggaggaatgttgctcgactggaaggctgagcacctcctggactgaggaggacgtgaatgataacaccctgtttaagtggatgatcttcaacggaggcgctccgaactgcatcccttgcaaggaaacttgcgaaaacgtggactgcgggcctggcaagaagtgccggatgaacaagaaaaacaagccgcgctgcgtctgcgccccggattgttcaaacatcacttggaagggtcccgtgtgtggattggatggaaagacgtacagaaacgagtgtgctctgctgaaggcacggtgcaaggaacagccagaacttgaggtgcaataccagggacggtgcaaaaagacctgccgcgacgtcttttgcccgggcagctcaacttgtgtggttgatcagacgaataatgcgtattgcgtcacttgcaaccggatctgtccagagccagcttcctcagagcagtacttgtgcggaaatgacggagtgacctactcctccgcatgccacctccgcaaggccacctgcctgctggggaggtcgatagggctcgcatatgagggaaagtgtatcaaagcgaagagctgcgaggacatccaatgtactggaggaaaaaagtgcctttgggatttcaaggtgggacgaggtcgctgctcgctttgtgacgagctctgcccagactctaagtccgacgaaccggtttgcgccagcgacaacgcgacttatgccagcgagtgcgcgatgaaggaggctgcctgcagctcgggcgtgctgctggaagtgaaacattctggttcctgcaattcgatctcggaggacaccgaggaagaagaagaagatgaagatcaggactactcgttccctatcagctctatcctggaatgg

SEQ ID NO: 176238 - DNA, 1032 bp, Artificial Sequence
  derived and/or modified sequence
atggtgagggccaggcatcagccaggggggctgtgcctgctgctgttattactctgtcaattcatggaggatcggtcagctcaggccggcaactgctggctccggcaggcaaagaatggcagatgccaagtcttgtataagacagagttgtccaaggaggagtgctgtagtactggtcgcctgagtacttcctggactgaggaggacgttaatgataataccctttttaagtggatgattttcaatgggggcgcccccaactgtatcccttgcaaagaaacttgcgagaacgtggattgtggacccgggaagaaatgtcggatgaataagaagaataagccacggtgcgtgtgcgctcccgactgctcaaacattacatggaagggcccagtctgcggactggacgggaagacctaccgcaacgagtgcgcattacttaaagcacgttgcaaagagcagcctgagctagaggtgcaataccagggtaggtgcaagaagacctgcagagatgtcttttgccctggctctagtacgtgtgtcgtagatcagacaaataatgcctattgtgtcacatgtaaccgcatttgccctgagcctgcgtcttctgagcaatacttatgcggaaacgacggcgtaacttactcttcggcatgccatctgagaaaggccacatgcctgctgggtcggagtatcggtcttgcgtacgaggggaaatgtataaaggccaagagctgcgaagatatacagtgcacagggggcaagaagtgcttatgggatttcaaggtgggtcgcggccgatgttccctctgcgatgagctgtgccctgatagcaagtctgacgagccggtctgcgcctcagataatgcaacatacgcctccgagtgtgctatgaaggaggcggcttgctcatccggcgtactgctcgaagtcaagcacagtggaagctgcaacagtatatccgaagacacagaagaggaggaggaggacgaagatcaggactacagttttccgatttcctctatcctcgagtgg

SEQ ID NO: 176239 - DNA, 1032 bp, Artificial Sequence
  derived and/or modified sequence
atggtgcgcgctcgccaccaaccaggcgggctttgcctgttgttgctcttgctgtgccagttcatggaggacagatcggcacaagctggaaattgctggctgcgacaagccaagaacggtcgctgtcaagtgctgtacaagactgagttgagcaaagaggaatgttgctccactggaaggctgtcgacgagctggaccgaagaggatgtgaacgacaacacgctgttcaagtggatgattttcaacggtggggcacccaactgcatcccatgtaaggagacgtgcgagaatgtggattgcggaccgggaaagaagtgccgtatgaacaagaagaataagccgaggtgcgtgtgcgccccagactgctccaacattacctggaaaggtcccgtgtgcggactggacgggaaaacctaccgcaatgaatgcgcgctcctcaaagcacgctgtaaggaacagccggaattggaagtgcagtatcaggggcggtgtaaaaagacctgtcgggacgtgttctgcccaggatcgtcgacctgtgtggtggaccaaactaacaacgcctactgcgtgacctgcaacagaatctgccccgagcctgccagctcggagcagtacttgtgcggaaatgatggagtgacgtattcctcggcttgccatctgcggaaggccacttgtctcctggggcggtccatcgggctggcctacgagggtaagtgcattaaagcgaaatcatgtgaagatattcagtgcacgggcgggaagaagtgcctctgggacttcaaggtgggacggggccggtgttcactctgcgacgagttgtgcccggattcgaagtctgatgaacctgtgtgcgcgtccgataacgccacttacgccagcgaatgtgcgatgaaggaggcagcctgcagctcaggcgtgctcctcgaagtcaagcacagcggctcatgtaactccatctcggaggacactgaagaagaagaagaggatgaggaccaggattacagctttccgatctcatccatcctcgaatgg

SEQ ID NO: 176240 - DNA, 1032 bp, Artificial Sequence
  derived and/or modified sequence
atggtccgggcaaggcaccaacccgggggcctctgcctgctactgctgttactttgtcagttcatggaagacagatccgcgcaagcggggaactgttggctgcggcaagccaaaaacgggaggtgccaggtgctctacaagaccgaactatctaaagaggaatgctgctccacgggtcgactatccacatcttggaccgaggaagatgtgaacgacaacaccctgtttaaatggatgatattcaatggcggtgccccgaactgtataccatgtaaagagacctgcgagaacgtagattgtggcccaggaaagaaatgccgcatgaataagaaaaacaagccccgctgcgtgtgcgccccagactgtagtaatattacgtggaagggacccgtgtgcggactggacgggaaaacttacagaaatgaatgtgccttactaaaagctaggtgtaaagagcaaccagaactggaagttcaataccagggtcggtgtaaaaagacatgcagagacgttttctgccctggctcgagcacgtgtgtggtcgatcagactaacaatgcctactgcgtcacatgcaatcggatttgccccgagcccgcctcgagtgagcagtacctgtgtggaaacgatggtgtgacttacagcagcgcgtgtcatcttagaaaagcaacatgcttattgggtcgcagtatcggactcgcctatgaggggaaatgcattaaggccaaatcctgtgaggacatacaatgcaccggtgggaagaagtgtctgtgggacttcaaggttggtaggggcagatgctccctgtgcgacgagttatgccctgatagcaagtctgacgagcccgtctgcgccagtgataatgccacctatgcctccgaatgcgcgatgaaagaggcagcctgcagttctggggtgctactcgaggtgaaacatagcgggagctgcaactctatctctgaggacacagaggaagaagaggaagatgaggatcaggactactccttccccatctcctccatcctcgagtgg

SEQ ID NO: 176241 - DNA, 1032 bp, Artificial Sequence
  derived and/or modified sequence
atggttcgcgcaagacatcaaccgggcggattgtgcttattattgctgcttctgtgtcaatttatggaagaccgctcagcacaagccggcaattgttggctccgccaggctaaaaacggccggtgccaggttttgtacaaaactgaattaagcaaagaagaatgttgcagcactgggcggttatctacgtcttggacggaagaagacgtgaacgacaataccctgttcaagtggatgatctttaacggcggcgcgccaaactgtattccatgcaaggaaacgtgcgaaaacgttgattgcggcccgggcaaaaagtgccggatgaataaaaagaataagcctcgctgcgtttgtgcaccggactgcagcaacattacgtggaaggggcccgtgtgcggtctggatggtaaaacataccgcaacgagtgcgccctccttaaggccaggtgtaaagagcagccggaactggaagtacaatatcagggtcgctgcaaaaagacatgccgggatgtgttttgcccaggaagctcgacatgtgtcgtggatcaaacaaataatgcctactgtgtcacctgtaaccggatttgtccggaaccggcatcatctgagcagtacctgtgtggtaatgatggggttacttactcttcagcgtgtcatctccggaaagccacatgtcttctgggaaggagcataggactggcctatgaaggcaaatgcatcaaagcaaaatcatgcgaagatatccagtgcacaggtggcaaaaaatgcttatgggactttaaagtggggagaggcagatgttccctgtgcgatgaactatgcccggattcaaaaagtgatgaacctgtctgtgcttccgataatgctacatatgcctccgaatgtgctatgaaagaggcagcttgttcaagcggggttttgctggaggttaaacattcaggaagctgtaactcaatttctgaagacacagaggaagaagaagaagatgaagatcaggattattcctttcctatttcaagtattctggagtgg

SEQ ID NO: 176242 - DNA, 1032 bp, Artificial Sequence
  derived and/or modified sequence
atggtgagagctagacatcaaccaggggggctttgtttattattacttttattatgtcaattcatggaagatagatcagctcaagcaggaaattgttggcttagacaagcaaaaaatggacgatgccaagtattatataaaacagaactttctaaggaagaatgttgtagtactggtagattatctacatcatggactgaagaagatgttaatgataatactttgtttaaatggatgatctttaatggaggagctccaaattgtattccatgtaaagaaacctgtgaaaatgttgattgtggacctggaaagaaatgtagaatgaataagaaaaataaaccaagatgtgtgtgtgctccagattgttcaaatattacttggaaaggaccagtatgtggattagatggaaagacttatagaaatgaatgtgctttgttaaaagcacgttgtaaggaacaaccagaattagaagttcaatatcaaggaagatgtaagaaaacatgtagagatgttttttgtcctggatcttcaacatgtgttgtagatcaaacaaataatgcatattgtgtaacttgtaatcgtatttgtccagagccagcatcttcagagcaatatttatgtggaaatgatggagttacctattctagtgcttgtcatcttagaaaagcaacttgtcttttaggtagatcaattggtttagcttatgaaggaaaatgtattaaagcaaaatcttgtgaagatattcaatgtacgggtggtaaaaagtgtctttgggatttcaaagttggaagaggaagatgttcattatgtgatgaattatgtccagattctaaatctgatgaaccagtttgtgcaagtgataatgctacttatgcaagtgaatgtgctatgaaggaagcagcatgttctagtggtgttttacttgaagtcaagcattccggttcatgtaacagtatttcagaagacactgaagaagaggaagaagatgaagatcaagattatagttttccaattagtagtatcctcgaatgg

SEQ ID NO: 176243 - DNA, 1032 bp, Artificial Sequence
  derived and/or modified sequence
atggtcagggctcgtcaccaaccgggcggcctgtgtctgctcctgctgctcctgtgtcagtttatggaagacaggtctgcccaggccggaaactgttggctccgacaggccaagaacgggaggtgccaggtcctttacaagactgagttatccaaggaggagtgttgctccacaggaaggttgtcgaccagttggaccgaagaagatgtgaatgataacaccctgttcaagtggatgatatttaatggcggcgcacctaactgtatcccctgtaaggaaacatgcgagaacgtcgactgtgggcccggtaagaagtgtagaatgaacaaaaagaacaagcccagatgtgtttgcgctcctgattgctctaacattacatggaagggacccgtgtgtggactggacgggaagacataccgtaatgaatgcgccctgctgaaagcacgttgcaaagaacagccggaattggaagtgcagtaccaaggcaggtgcaaaaagacgtgtagggatgtgttctgtcctggctcgtcaacgtgtgtggtggatcagactaataacgcttattgtgtcacatgtaatcggatctgcccagaacctgctagcagtgaacagtatttgtgcggcaatgatggggttacgtacagctccgcctgtcacctgcgaaaggctacctgccttttgggacgtagtatcggcctcgcttacgaggggaaatgtattaaagcaaaaagttgtgaagatattcaatgtaccggcgggaagaagtgtctctgggactttaaggttggacgtggacgatgtagtctgtgcgacgaattatgccccgattctaaaagcgatgagccagtctgcgcgagtgacaatgccacctacgcctctgagtgtgcgatgaaggaagcggcctgcagcagcggagtgctcctagaggtcaagcattcaggaagttgtaatagcatatccgaggatacggaggaggaagaagaagacgaagaccaggattactccttcccaatttcatccattctggagtgg

SEQ ID NO: 176244 - DNA, 1032 bp, Artificial Sequence
  derived and/or modified sequence
atggtccgagcaaggcatcaacccggcgggctatgtcttctactgctgctcctttgccagtttatggaggaccggtctgcacaggcaggcaactgctggctacgccaagctaagaacggacgctgccaggtactgtataaaacagagctgagcaaggaagagtgttgtagtaccggtagactgtctacttcctggaccgaggaggatgtcaacgacaacacactgttcaagtggatgattttcaacgggggggcacccaattgcattccctgcaaggagacttgcgagaatgttgactgtggacccggcaagaaatgtagaatgaataagaaaaacaaaccaaggtgtgtgtgcgcacccgactgttctaacattacctggaagggtccagtctgtggattggatggcaaaacctatcggaatgaatgtgccctgctgaaagcacgctgcaaggagcagcccgaattagaagtgcaataccaaggtcgctgcaaaaagacttgtcgggatgtcttttgccccggctcttctacctgtgtggttgatcagacgaacaacgcgtattgtgtcacatgcaatcgcatctgccctgaaccagccagttcggaacagtatctctgcggcaatgatggtgtgacatacagctccgcatgccacctgaggaaggccacttgtctcctagggagaagcatcgggcttgcatatgaggggaagtgtatcaaggcaaagtcatgcgaggacattcaatgtacaggcgggaaaaagtgtctgtgggacttcaaggtgggcagaggccgttgttctctgtgtgacgaactgtgcccagactcaaagtccgacgaacctgtatgtgcatcggataatgcaacctatgcatcggagtgcgctatgaaggaagccgcctgtagctcaggggtcttacttgaagtaaagcactcaggaagctgtaactctatctccgaagatactgaggaagaggaggaggacgaggaccaggactacagcttccctatctctagcatcctcgagtgg

SEQ ID NO: 176245 - DNA, 1032 bp, Artificial Sequence
  derived and/or modified sequence
atggtcagagcacgccaccagccagggggtctttgcctgttgctgttgttgctctgccagttcatggaggataggtcggcccaggccggaaattgctggctcagacaagccaagaacggcaggtgccaggtcctctacaagaccgaactgtccaaagaagagtgttgcagcacgggacggctgtccacttcatggactgaagaggacgtgaatgacaatactctgttcaagtggatgatcttcaacggaggagccccgaactgtattccgtgtaaagaaacgtgcgagaacgtggattgcgggccaggcaagaagtgcaggatgaacaagaagaacaaacccagatgcgtgtgcgccccggactgttcgaacatcacctggaaagggcccgtgtgcggccttgacggaaagacctatcgcaatgagtgtgcactgctcaaggcacgatgtaaggagcaaccggaactcgaagttcagtaccagggtcgctgtaaaaagacctgcagagatgtgttttgcccggggtcgtccacgtgcgtggttgaccaaaccaataatgcgtactgcgtgacctgcaacaggatctgtcccgaaccggcctcaagcgagcagtacttgtgcggtaacgatggggtgacctactcgtcggcatgccatctccggaaggccacctgcctgctcgggcgcagcatcggcctggcgtacgaaggcaaatgtatcaaggccaagtcctgcgaggacatccagtgtactggcggaaagaagtgcctctgggactttaaagttgggagaggcagatgcagcctgtgcgatgaactgtgcccagactcgaaaagcgacgagccagtgtgcgcctcggacaacgctacttacgcctcggaatgcgcaatgaaagaggcggcctgcagctcgggtgtgctgttggaggtcaagcactccggtagctgcaatagcatttccgaggacaccgaggaggaagaggaagatgaagatcaagattactcgttcccaatctcttcgatcctggaatgg

SEQ ID NO: 176246 - DNA, 1032 bp, Artificial Sequence
  derived and/or modified sequence
atggtccgcgctcgccaccaacctggagggctttgtctactcctcctgctcctatgtcagttcatggaagatcgctcagcgcaggccggaaattgttggcttagacaagcaaaaaacggaaggtgccaggtgctatataaaactgaactgagtaaggaagaatgttgctccacagggagactatctacatcctggactgaagaagatgtgaatgataacacactgttcaagtggatgatatttaatgggggggctcccaactgtattccctgcaaagaaacatgtgagaatgtcgattgtggacccggaaaaaaatgtagaatgaacaaaaaaaataaacctagatgcgtttgcgcacccgattgttcaaatataacgtggaaaggacccgtttgtgggcttgatggaaaaacttatcggaacgaatgtgccctgctaaaagcccgctgcaaagaacagcccgaactagaagtccagtaccaggggaggtgcaaaaaaacatgtcgcgatgtattctgcccaggatctagtacatgtgtggtcgaccagactaataatgcatattgcgtcacatgtaatcgcatctgcccagaacccgctagttctgaacagtatctatgtgggaacgacggagttacgtatagttccgcatgccatcttcggaaggccacttgtctccttggacgctctatagggctagcttatgaaggaaagtgcataaaagctaaatcctgcgaggatattcagtgtacaggggggaaaaaatgcctctgggatttcaaagtagggcgcggacggtgtagtctatgtgatgaactgtgccccgattcaaaatccgatgagcccgtgtgtgcatccgataatgcgacttacgcgagtgaatgtgccatgaaagaagccgcctgttcctctggggtcctcttagaggtaaaacactctggaagttgtaacagtatctctgaagacacagaagaagaagaagaagacgaagaccaggattattccttcccaatcagttctatattggaatgg

SEQ ID NO: 176247 - DNA, 1032 bp, Artificial Sequence
  derived and/or modified sequence
atggtgcgcgcaaggcaccaacctggtggattatgtctactgctgctgctcctgtgccagtttatggaagaccggtcagcacaggccggaaactgttggttacgacaggctaaaaatggaagatgccaggtgctctacaaaacagagctctctaaagaggagtgttgtagcacaggaaggttgtccacctcgtggacggaggaagatgtgaatgataacactctgttcaagtggatgattttcaacggcggtgctcctaactgcataccgtgcaaggagacctgtgaaaacgtggactgtggtccaggcaagaagtgtaggatgaataagaagaacaagcccagatgcgtgtgtgcccctgattgctccaatattacgtggaaaggccctgtgtgcgggctggacggcaagacctacaggaacgagtgtgcattacttaaggcaaggtgcaaggaacagcccgaactcgaagtgcagtaccagggaaggtgcaaaaagacatgccgagacgtgttctgccctggatcgtccacttgcgtcgtcgaccaaaccaataatgcctactgtgtgacgtgcaataggatttgtcccgagccagcctcatcagaacagtacctgtgcggtaacgatggcgtcacctattcgagcgcttgccacctcagaaaggccacttgcctgcttggccgctccattggccttgcctatgaagggaagtgcatcaaggccaagagctgcgaggacatacagtgcacgggcggaaagaaatgtctgtgggatttcaaggtgggcagggggcggtgttctctgtgcgatgagctctgtcctgacagcaaatctgacgagcccgtgtgcgcctcagacaatgctacttatgctagtgaatgtgctatgaaggaggccgcttgctcctccggagtgctcctggaggtcaagcactctggcagttgcaattccatctcggaagataccgaagaggaggaagaggacgaagaccaggactactcttttcctatctctagcattctcgaatgg

SEQ ID NO: 176248 - DNA, 1032 bp, Artificial Sequence
  derived and/or modified sequence
atggtcagagcaaggcatcagcccggggggctctgcctgctccttttgctcctctgccagtttatggaggaccgatctgctcaggcaggcaactgttggctacgacaggctaaaaatggacggtgtcaggttctgtataaaactgagttgtctaaagaagaatgctgctccactgggcgcctgagtaccagctggaccgaggaagatgtgaacgataacaccctatttaagtggatgatctttaacggaggcgctcccaactgcatcccctgtaaagaaacctgcgaaaacgtcgattgcgggccaggaaagaaatgcagaatgaacaagaagaataaaccccggtgtgtgtgtgctccagactgttctaatatcacttggaagggccctgtgtgtggtttggacggcaaaacctatagaaacgagtgcgcgctactgaaggcccggtgcaaggaacaaccagaactagaagtgcagtatcaggggcgctgtaagaaaacctgccgtgatgtgttctgccctgggagctccacctgcgtggtcgaccagaccaacaacgcctactgtgtgacctgtaaccggatctgtccagaacccgcctcgtcagagcaatatctttgtggcaacgatggcgtcacctattcatcagcatgccatctgaggaaggcaacatgccttctgggaagaagcattgggctggcttatgaaggaaagtgtatcaaggcaaaatcatgcgaggatattcaatgtaccggtggtaagaagtgcctctgggacttcaaagtgggaagaggacggtgcagtctgtgtgatgaattgtgccccgactccaaatccgatgaaccggtgtgtgcctcagataacgctacctacgcatctgagtgtgcaatgaaagaggcggcatgcagctccggtgtgctgcttgaggtgaagcactcaggaagttgtaattccattagtgaggacaccgaggaagaagaagaagacgaagatcaggactatagttttcccataagttccatcctcgagtgg

SEQ ID NO: 176249 - DNA, 1032 bp, Artificial Sequence
  derived and/or modified sequence
atggtccgcgcacgccatcagccaggcggattgtgtctgctgctgcttctgctctgccaattcatggaggatcgctctgcacaagcgggaaactgttggctcaggcaagccaagaacggacgttgccaagtgttgtacaaaaccgagctctcaaaggaagagtgttgctcaaccggccggctgtcgactagctggaccgaggaagatgtgaatgataacactctctttaagtggatgattttcaacggcggagctccgaactgcatcccatgtaaagaaacctgcgaaaatgtcgactgtggcccgggtaagaaatgccggatgaacaagaagaataagccgcgctgtgtctgcgccccggactgttccaatatcacttggaaaggcccagtgtgcgggcttgacggaaagacctatcggaacgagtgtgccctgctcaaggcccgctgtaaagaacaaccggaactcgaagtgcagtaccaagggcgctgtaaaaagacgtgccgcgatgtgttttgccctggcagctcaacctgcgtggtcgaccagaccaataacgcatactgcgtgacctgcaacagaatctgcccagaacctgcttcaagcgagcagtacctgtgcggcaacgacggagtaacctattcgtcggcatgtcacctccgcaaagcgacgtgcctcctgggacgctcaatcggtctggcatacgagggaaagtgcatcaaggcaaaatcctgcgaagatattcagtgtactggaggtaagaagtgcctgtgggacttcaaggtgggacgcgggcgctgctcgctgtgcgacgagctttgcccagactcgaagtcagacgaaccagtttgcgcaagcgataatgcgacttacgcctctgagtgcgcgatgaaggaggccgcctgcagctcaggcgtgcttttggaggtgaagcactcgggatcgtgcaactcgatctcggaggataccgaggaggaagaagaagatgaggaccaggactactccttcccgatctcgtctatcctcgaatgg

SEQ ID NO: 176250 - DNA, 1032 bp, Artificial Sequence
  derived and/or modified sequence
atggtacgtgcgcgtcatcaaccgggtggtctatgtctactactactactactatgtcaatttatggaagatcgttcggcgcaagcgggtaattgttggttacgtcaagcgaaaaatggtcgttgtcaagtactatataaaacggaattatcgaaagaagaatgttgttcgacgggtcgactatcgacgtcgtggacggaagaagatgttaatgataatacgctatttaaatggatgatatttaatggtggtgcgccgaattgtataccgtgtaaagaaacgtgtgaaaatgttgattgtggtccgggtaaaaaatgtcgaatgaataaaaaaaataaaccgcgatgtgtatgtgcgccggattgttcgaatataacgtggaaaggtccggtatgtggtctagatggtaaaacgtatcgaaatgaatgtgcgctattaaaagcgcgttgtaaagaacaaccggaattagaagttcaatatcaaggtcgatgtaaaaaaacgtgtcgtgatgttttttgtccgggttcgtcgacgtgtgtagtagatcaaacgaataatgcgtattgtgttacgtgtaatcgaatatgtccggaaccggcgtcgtcggaacaatatctatgtggtaatgatggtgtaacgtattcgtcggcgtgtcatttacgaaaagcgacgtgtttattaggtcgatcgataggtctagcgtatgaaggtaaatgtataaaagcgaaatcgtgtgaagatatacaatgtacgggtggtaaaaaatgtttatgggattttaaagttggtcgtggtcgttgttcgttatgtgatgaattatgtccggattcgaaatcggatgaaccggtatgtgcgtcggataatgcgacgtatgcgtcggaatgtgcgatgaaagaagcggcgtgttcgtcgggtgtattactagaagtaaaacattcgggttcgtgtaattcgatatcggaagatacggaagaagaagaagaagatgaagatcaagattattcgtttccgatatcgtcgatattagaatgg

SEQ ID NO: 176251 - DNA, 1032 bp, Artificial Sequence
  derived and/or modified sequence
atggtgagagccagacatcagcccggaggtctttgcctcctgttgctcctgctttgccaattcatggaagatcgctccgcacaggctggcaactgttggctgcgccaagcaaaaaacggtcgctgccaggtcttgtataagactgaactttccaaagaagaatgttgcagcaccggtaggctctcaacctcctggaccgaggaagatgtgaatgataacactctgtttaagtggatgatattcaatggaggagcaccaaattgcatcccgtgcaaggaaacttgtgaaaatgtcgattgcggtccagggaagaagtgcagaatgaataagaagaacaagccccgctgtgtctgtgcacctgactgcagcaacattacctggaaaggtcccgtgtgtggactcgatggaaagacctatagaaatgaatgtgcacttctcaaggcgcggtgtaaggaacaacctgagcttgaagtccagtatcaaggcagatgcaagaaaacttgtcgggatgtgttttgtcccggttcttcgacctgcgtcgtggatcaaactaataacgcatattgtgtgacttgtaacagaatttgtccagaacccgccagctcggagcagtacctgtgcggcaacgatggagtgacttacagctccgcatgccacctgcggaaggcaacgtgcctgcttggtcgtagcatcggcctcgcatacgagggtaaatgcattaaggccaagtcatgtgaggacattcagtgtaccggggggaagaaatgcctttgggatttcaaagtcggcaggggtcggtgttcattgtgtgacgaactgtgtcccgatagcaagtcggatgagccagtgtgtgcgagcgacaacgctacgtacgcgtccgagtgtgccatgaaagaggcggcgtgcagctccggagttctgctggaagtgaagcattcgggaagctgtaactccatttcagaagatactgaagaagaagaggaggacgaggatcaagattactcgtttccaatatctagcattcttgaatgg

SEQ ID NO: 176252 - DNA, 1032 bp, Artificial Sequence
  derived and/or modified sequence
atggtgcgggccaggcaccagccgggaggactgtgcctcctgcttctccttctgtgccagtttatggaagatagatcggcgcaggctggcaactgttggctgcgccaggccaagaatggacggtgtcaagtcctgtacaaaaccgaactgtcgaaagaagaatgctgctccaccggaaggctgtcaaccagctggacggaagaggacgtgaacgacaatactctgttcaaatggatgatcttcaacggaggagccccaaactgcatcccgtgcaaagaaacttgcgaaaacgtggattgcggtccgggaaagaagtgccgaatgaataagaagaacaaacctcggtgcgtgtgcgcgcccgactgtagcaatatcacctggaaggggccagtttgcggccttgatggaaagacttatcgcaacgaatgtgcgctcttgaaggctcggtgtaaggagcaaccagaactcgaggtccagtaccagggccgttgcaaaaagacttgcagagatgtgttttgccccggatcgtcaacctgcgtggtggatcagactaataacgcctactgcgtgacttgtaacagaatctgccctgaaccggcgagctcggagcaatacctgtgcggcaatgacggagtgacctactcctctgcatgccacctgcgcaaggcaacctgtttgctcggtcgctccatcgggctggcatacgaaggcaagtgtattaaggcgaagagctgcgaggacattcaatgtacgggaggaaagaaatgcctgtgggacttcaaggtcggtcgggggcgctgctcgctctgcgacgaactctgcccagactcgaagtcggacgagccggtctgcgcctcagacaacgcaacttacgccagcgaatgtgccatgaaagaagccgcttgttcgtccggcgtgttgctggaagtcaagcattccggtagctgcaactccatctcagaggacaccgaggaagaggaggaggatgaggatcaggattactccttcccgatcagttcaatcctggagtgg

SEQ ID NO: 176253 - DNA, 1032 bp, Artificial Sequence
  derived and/or modified sequence
atggtgagggcacgacaccagcctgggggcctctgcctcctgctgctgttattgtgccagtttatggaagaccgcagcgctcaagctggcaactgctggctcagacaggcaaagaacggacgttgccaggtgctttacaaaacggaactgtctaaggaggagtgctgctcaactgggcggctgtccacgagctggaccgaggaagatgtaaatgataacacgttgtttaagtggatgatttttaatggaggagcccctaattgtatcccctgcaaggaaacgtgtgaaaacgtcgattgtggcccgggcaagaagtgtaggatgaacaagaagaacaagcctagatgcgtgtgcgcaccggactgtagcaacatcacctggaaaggcccggtttgcggactcgacggaaagacatatcggaacgagtgtgccctattaaaggcccgctgtaaagaacagcctgaacttgaagtccaatatcagggacgatgcaaaaaaacttgccgggatgtgttttgccccggaagcagcacgtgcgtcgtggaccagaccaataacgcctattgcgttacatgcaatcggatatgccccgagcccgccagttctgaacagtacctgtgcggtaatgacggagtgacctacagttcagcttgccacctcagaaaggccacttgtttactaggccgctccataggcctggcatacgaaggaaagtgcatcaaagccaagtcttgtgaggatatacagtgtacaggtgggaagaagtgcctgtgggacttcaaagtcggtcggggcaggtgtagcctctgtgacgaactctgtcctgactctaaatcggacgagcccgtatgtgcctctgacaacgcgacctacgccagcgagtgcgcgatgaaggaggccgcttgttcgtcgggcgtgctgttagaggtcaagcattccgggtcctgcaattcaatttctgaagacacagaggaagaggaggaggacgaggaccaagattatagtttcccgatctccagcatactggagtgg

SEQ ID NO: 176254 - DNA, 1032 bp, Artificial Sequence
  derived and/or modified sequence
atggtccgcgcgcgccaccagccagggggcctgtgtctactgctccttctgctctgccagtttatggaagaccgtagtgcacaggcaggcaattgctggctgcgccaggcaaaaaacggaaggtgtcaggtgctctataagaccgagctgagtaaggaggagtgctgttccacgggtaggctcagtaccagctggactgaagaagacgtgaatgataacaccctcttcaagtggatgatcttcaatggcggtgcaccaaactgcattccttgcaaagagacatgtgagaacgtggattgtgggcccggaaagaaatgccgcatgaataaaaagaacaagcctcggtgcgtgtgtgcaccagactgtagtaatatcacatggaaggggcccgtatgcggacttgatgggaagacctaccggaatgagtgcgctctattgaaggctcggtgcaaggaacagcccgagctggaggtccagtatcaaggacgctgcaagaagacttgcagggatgttttttgcccagggtcatctacttgcgtcgtagaccagaccaacaatgcatattgcgtcacttgtaacaggatctgccccgagcctgcttcttcagaacaatatctctgcggcaacgatggagtgacctatagctctgcttgtcatctccgcaaagcaacatgtcttctcggcagaagtattggactggcttatgagggaaagtgtatcaaggccaaatcatgcgaagatatccagtgcaccggaggcaagaaatgtctctgggatttcaaggtgggtcgtggccgctgtagcctttgcgacgagctttgcccagattcgaagtcagacgagcctgtctgtgcctctgataacgccacctatgcatcggagtgtgccatgaaggaggccgcttgttccagcggcgtacttctggaggtaaagcacagcggcagttgtaattctatctccgaggatacggaggaggaggaggaggatgaggaccaggattattcgtttcccattagttctattctggaatgg

SEQ ID NO: 176255 - DNA, 1035 bp, Artificial Sequence
  derived and/or modified sequence
atggtgagagccagacaccagcccggcggcctgtgcctgctgctgctgctgctgtgccagttcatggaggacagaagcgcccaggccggcaactgctggctgagacaggccaagaacggcagatgccaggtgctgtacaagaccgagctgagcaaggaggagtgctgcagcaccggcagactgagcaccagctggaccgaggaggacgtgaacgacaacaccctgttcaagtggatgatcttcaacggcggcgcccccaactgcatcccctgcaaggagacctgcgagaacgtggactgcggccccggcaagaagtgcagaatgaacaagaagaacaagcccagatgcgtgtgcgcccccgactgcagcaacatcacctggaagggccccgtgtgcggcctggacggcaagacctacagaaacgagtgcgccctgctgaaggccagatgcaaggagcagcccgagctggaggtgcagtaccagggcagatgcaagaagacctgcagagacgtgttctgccccggcagcagcacctgcgtggtggaccagaccaacaacgcctactgcgtgacctgcaacagaatctgccccgagcccgccagcagcgagcagtacctgtgcggcaacgacggcgtgacctacagcagcgcctgccacctgagaaaggccacctgcctgctgggcagaagcatcggcctggcctacgagggcaagtgcatcaaggccaagagctgcgaggacatccagtgcaccggcggcaagaagtgcctgtgggacttcaaggtgggcagaggcagatgcagcctgtgcgacgagctgtgccccgacagcaagagcgacgagcccgtgtgcgccagcgacaacgccacctacgccagcgagtgcgccatgaaggaggccgcctgcagcagcggcgtgctgctggaggtgaagcacagcggcagctgcaacagcatcagcgaggacaccgaggaggaggaggaggacgaggaccaggactacagcttccccatcagcagcatcctggagtggtag

SEQ ID NO: 176256 - DNA, 1023 bp, Artificial Sequence
  derived and/or modified sequence
atggtgagagccagacaccagcccggcggcctgtgcctgctgctgctgctgctgtgccagttcatggaggacagaagcgcccaggccggcaactgctggctgagacaggccaagaacggcagatgccaggtgctgtacaagaccgagctgagcaaggaggagtgctgcagcaccggcagactgagcaccagctggaccgaggaggacgtgaacgacaacaccctgttcaagtggatgatcttcaacggcggcgcccccaactgcatcccctgcaaggagacctgcgagaacgtggactgcggccccggcaagaagtgcagaatgaacaagaagaacaagcccagatgcgtgtgcgcccccgactgcagcaacatcacctggaagggccccgtgtgcggcctggacggcaagacctacagaaacgagtgcgccctgctgaaggccagatgcaaggagcagcccgagctggaggtgcagtaccagggcagatgcaagaagacctgcagagacgtgttctgccccggcagcagcacctgcgtggtggaccagaccaacaacgcctactgcgtgacctgcaacagaatctgccccgagcccgccagcagcgagcagtacctgtgcggcaacgacggcgtgacctacagcagcgcctgccacctgagaaaggccacctgcctgctgggcagaagcatcggcctggcctacgagggcaagtgcatcaaggccaagagctgcgaggacatccagtgcaccggcggcaagaagtgcctgtgggacttcaaggtgggcagaggcagatgcagcctgtgcgacgagctgtgccccgacagcaagagcgacgagcccgtgtgcgccagcgacaacgccacctacgccagcgagtgcgccatgaaggaggccgcctgcagcagcggcgtgctgctggaggtgaagcacagcggcagctgcaactacaccgaggaggaggaggaggacgaggaccaggactacagcttccccatcagcagcatcctggagtggtag

SEQ ID NO: 176257 - RNA, 1193 nt, Artificial Sequence
  derived and/or modified sequence
gggaaauaagagagaaaagaagaguaagaagaaauauaagagccaccauggugagagcacggcaucagccagguggccuuugccugcuccuucuucuuuugugucaauucauggaagaucguucggcacaggcgggaaacuguuggcugcgacaggcgaagaacgguagaugccaagugcuguacaaaacugagcugagcaaagaagaauguuguucaaccggucgacuuucaaccucauggaccgaagaggaugugaaugauaacacuuuguuuaaguggaugauuuucaacgggggagccccuaauuguauuccuuguaaagaaacuugcgaaaacgucgauuguggaccgggaaagaaaugucgcaugaacaaaaagaauaagccaaggugugugugcgcaccugacuguucaaacauuacuuggaagggaccugucuguggccuugacgggaaaaccuaucgcaacgaaugugcacugcugaaggcgagaugcaaggaacaaccggaacucgaagugcaguaccaggguagaugcaagaaaacgugucgugauguguuuugucccggcucuucgacuuguguggucgaucaaaccaacaacgcauacugcgucacuuguaaccggauaugccccgagcccgcauccucggagcaguaccucuguggaaaugacgggguuacuuacagcucggccugucaucuccggaaggcaaccugucugcugggaagaucgaucggacuggccuacgaaggcaaaugcauuaaggcaaagucgugugaggacauccaaugcaccgguggaaagaagugucucugggacuuuaaggugggucgcggcaggugcucccuuugcgaugaacuuugcccagauuccaagagcgaugaaccagucugugcaucagauaaugcaacguacgccuccgagugcgcuaugaaggaagccgcuuguuccuccggggugcugcuugaggugaagcacucgggaucguguaauagcaucagcgaggacaccgaggaagaagaagaggaugaagaucaagacuacagcuuuccuauuuccuccauccucgaguggugauaauaggcuggagccucgguggccaugcuucuugccccuugggccuccccccagccccuccuccccuuccugcacccguacccccguggucuuugaauaaagucugagugg

SEQ ID NO: 176258 - protein, 348 aa, Artificial Sequence
  derived and/or modified sequence
MAVAQQLRAESDFEQLPDDVAISANIADIEEKRGFTSHFVFVIEVKTKGGSKYLIYRRYRQFHALQSKLEERFGPDSKSSALACTLPTLPAKVYVGVKQEIAEMRIPALNAYMKSLLSLPVWVLMDEDVRIFFYQSPYDSEQVPQALRRLRPRTRKVKSVSPQGNSVDRMAAPRAEALFDFTGNSKLELNFKAGDVIFLLSRINKDWLEGTVRGATGIFPLSFVKILKDFPEEDDPTNWLRCYYYEDTISTIKSVAWEGGACPAFLPSLRPLPLTSPSHGSLSHSKAPSGSQMSHNAVTSHQRPGWPGQPHSPFPHPTPHFQPDASLLQPVTPLGTSRWRKISAALPY

SEQ ID NO: 176259 - protein, 166 aa, Artificial Sequence
  derived and/or modified sequence
MRIPALNAYMKSLLSLPVWVLMDEDVRIFFYQSPYDSEQVPQALRRLRPRTRKVKSVSPQGNSVDRMAAPRAEALFDFTGNSKLELNFKAGDVIFLLSRINKDWLEGTVRGATGIFPLSFVKILKDFPEEDDPTNWLRCYYYEDTISTIKSVAWEGGACPAFLPSL

SEQ ID NO: 176260 - DNA, 303 bp, Artificial Sequence
  derived and/or modified sequence
atgggcaccagcagcatcttcctgtgcgtgctgttcctgtgcggcgcccttggacttacgatgtccccagcccgtggtcgtctcaggtgctacatttgcggctttacaaaaccttgccatccagtgcccaccgagtgccgggacgatgaagcatgtgggatcagcattgggacatcaggccgtaccctggtgcaatggcccttctctcgcagattgcccacatctatccaccccgcttttcccgtcgcacctgcgtccgcctgcctctttcatccgaccgatcaaagtgagataacagaatag

SEQ ID NO: 176261 - DNA, 1047 bp, Artificial Sequence
  derived and/or modified sequence
atggctgttgcacaacagcttagagccgaatctgattttgagcaactccccgatgacgtggcaatatccgctaatattgcagacattgaagagaagagggggttcaccagtcattttgtgttcgtgatcgaggtgaaaaccaagggggggagcaagtacctgatttatcgccgatataggcagttccacgcactccagtccaaactcgaagaacgcttcggaccagattctaaaagcagcgcgctggcctgcacgttgccgacgcttcccgcaaaggtctacgtcggagtgaaacaggagatcgctgaaatgagaataccagctctcaatgcttacatgaagtcccttcttagcctgccagtttgggtattgatggacgaggatgtgaggattttcttttaccaaagtccctacgatagtgagcaggtcccgcaggccctgcggcggctgcgaccccgcaccaggaaagtgaaaagtgtgagcccgcagggtaacagcgtggacagaatggctgccccccgggccgaggccctgttcgatttcactggaaattccaagctggagctaaattttaaagctggagacgtaatctttctgttgtccagaattaacaaggactggttggaagggaccgtacgcggcgcaactggtatctttcccctcagcttcgtcaagatccttaaggattttccggaagaggatgacccgaccaactggctgcgatgttactactatgaagacaccatttctacgatcaaatccgtggcatgggaggggggcgcatgcccggcctttctcccctccctgcgacccctgcctttaactagcccaagtcacggctctctgtcccactctaaggcgcccagcggaagccagatgtcgcacaacgcagtcaccagccaccagcgtcctggatggcccggacaaccacacagtccttttccgcaccccactccacatttccagcccgatgcttctctgttgcagccagttacccctctcggcacaagccgttggagaaaaatttcagctgctctaccatactag

SEQ ID NO: 176262 - DNA, 501 bp, Artificial Sequence
  derived and/or modified sequence
atgcgcataccagctctcaatgcctatatgaaatcattactgtcacttcctgtatgggtcctgatggacgaggacgtgagaatttttttctaccaatccccttacgattcggagcaggtaccgcaagcattacggcgcctccgacctaggacaaggaaagtgaagtcggtctccccacaaggtaattccgttgaccggatggctgcgcctcgcgcagaagccttattcgactttacaggtaattcaaaactcgagttgaacttcaaggctggggatgtcattttcctgttatctcgcattaataaagactggttggaggggactgtgaggggcgccacaggaatattcccactctcgttcgtaaagatacttaaagactttcctgaagaagatgatccgaccaattggctccggtgctattattacgaagacacaatttcgaccattaagagcgtggcgtgggaaggaggcgcttgccccgcatttctgccatccctctag

SEQ ID NO: 176263 - DNA, 1047 bp, Artificial Sequence
  derived and/or modified sequence
atggctgtggcccagcagctgcgggcagagagtgactttgagcagctgcctgatgatgtggccatcagcgccaacattgctgacatcgaggagaagaggggcttcaccagccactttgtgtttgtgattgaggtgaagaccaagggcggcagcaagtacctgatctaccgccgctaccggcagttccacgccctgcagagcaagctggaggagagatttggaccagacagcaagagcagcgccctggcctgcaccctgcccaccctgcctgccaaggtgtatgtgggcgtgaagcaggagattgctgagatgaggatcccagccctgaatgcctacatgaagagcctgctgagcctgcctgtgtgggtgctgatggatgaagatgtgcgcatcttcttctaccagagcccctatgacagcgagcaggtgccccaggccctgcggcggctgcggcccaggaccaggaaggtgaagtctgtgagcccccagggcaacagcgtggacaggatggccgcccccagggctgaggccctgtttgacttcaccggcaacagcaagctggagctgaacttcaaggctggagatgtgatcttcctgctgagccgcatcaacaaggactggctggagggcaccgtgcggggggccaccggcatcttccccctgagctttgtgaagatcctgaaggacttcccagaagaagatgaccccaccaactggctgcgctgctactactatgaggacaccatcagcaccatcaagtctgtggcctgggagggcggggcctgcccagccttcctgcccagcctgcggcccctgcccctgaccagccccagccacggcagcctgagccacagcaaggcccccagcggcagccagatgagccacaatgctgtgaccagccaccagaggcctggctggccaggccagccccacagccccttcccccaccccaccccccacttccagccagatgccagcctgctgcagcctgtgacccccctgggcaccagccgctggaggaagatctctgctgccctgccctactag

SEQ ID NO: 176264 - DNA, 501 bp, Artificial Sequence
  derived and/or modified sequence
atgaggatcccagccctgaatgcctacatgaagagcctgctgagcctgcctgtgtgggtgctgatggatgaagatgtgcgcatcttcttctaccagagcccctatgattctgagcaggtgccccaggccctgcggcggctgcggcccaggaccaggaaggtgaagtctgtgagcccccagggcaacagcgtggacaggatggccgcccccagggctgaggccctgtttgacttcaccggcaacagcaagctggagctgaacttcaaggctggagatgtgatcttcctgctgagccgcatcaacaaggactggctggagggcaccgtgcggggggccaccggcatcttccccctgagctttgtgaagatcctgaaggacttccctgaggaggatgaccccaccaactggctgcgctgctactactatgaggacaccatcagcaccatcaagtctgtggcctgggagggcggggcctgcccagccttcctgcccagcctgtag

SEQ ID NO: 176265 - DNA, 1047 bp, Artificial Sequence
  derived and/or modified sequence
atggccgtggcccagcagctgcgggccgagagcgacttcgagcagctccccgacgatgtcgccatctcagccaatattgcagatatagaagagaaacgcggcttcacgagtcatttcgtgtttgtaatcgaggtgaagacaaaaggtgggtctaagtatctgatctatcgccgttatcgacagtttcacgcgcttcagtctaagctcgaagaacgattcgggcccgactccaaaagttcagccctggcgtgcacgctgcccaccctgccggccaaagtttacgttggggtgaaacaggaaatcgcagaaatgagaattccagctttgaatgcatacatgaaaagtcttttgtctctacctgtgtgggttctcatggatgaagacgtccgaatcttcttctatcagagcccatacgattccgaacaagtgccccaggccctccgtaggctgagaccccggacgcgaaaggtgaagagtgtttcaccccagggaaattccgtagaccggatggctgctccaagggccgaggccctattcgatttcacaggtaatagcaaactcgaactcaacttcaaagccggtgatgtaattttcctcctcagtcggattaacaaagactggcttgagggaaccgtgagaggagctactggaatctttcctttatcttttgtaaagatactgaaggactttccagaagaagatgatccgaccaattggctccggtgctactattatgaggataccatctctacaataaagtctgttgcatgggaggggggggcctgccctgcatttctgcccagcctccggcccctcccactaactagcccaagccatggtagcttatcccatagtaaggctcccagcgggtctcaaatgtctcacaacgccgtgactagccatcaacgccctggctggcctggccaaccccactcccccttcccgcatcccacaccccattttcagcccgatgcctccctcttgcaacctgtcacacccctggggactagtcgatggagaaagatcagcgccgcccttccatactag

SEQ ID NO: 176266 - DNA, 501 bp, Artificial Sequence
  derived and/or modified sequence
atgcggatccccgccctgaacgcctacatgaagagcctgctgagcctgccagtgtgggtcctgatggatgaggacgtgaggatttttttctaccagagtccctacgactctgagcaggtgccgcaggctcttagaagactgagacctcggacaaggaaggtaaaatcggtgagcccccagggcaatagtgtagatagaatggccgccccccgcgccgaggccctgtttgactttaccggcaattccaagctagaactcaacttcaaggccggcgatgttatttttctgctgagtcggattaacaaagattggctcgaggggactgtgcgtggagcaaccggaattttcccgctgagcttcgtcaagatcttaaaggatttcccagaggaggatgatcccacaaattggcttcggtgttactactacgaggataccatctcaacaatcaagagcgtggcctgggaaggcggggcatgcccagccttcctgccctcactctag

SEQ ID NO: 176267 - DNA, 1641 bp, Artificial Sequence
  derived and/or modified sequence
ggaggaggagcctctgccagactggagagaagcaggcctgagcctccccaaaggcagctcctggggactcccaggaccacaggctgagacgagacgcagggtggctggaggaagtgagaggtgaactcagcctgggactggctgggcgagactctccacctgctccctgggaccatcgcccaccatggctgtggcccagcagctgcgggccgagagtgactttgaacagcttccggatgatgttgccatctcggccaacattgctgacatcgaggagaagagaggcttcaccagccactttgttttcgtcatcgaggtgaagacaaaaggaggatccaagtacctcatctaccgccgctaccgccagttccatgctttgcagagcaagctggaggagcgcttcgggccagacagcaagagcagtgccctggcctgtaccctgcccacactcccagccaaagtctacgtgggtgtgaaacaggagatcgccgagatgcggatacctgccctcaacgcctacatgaagagcctgctcagcctgccggtctgggtgctgatggatgaggacgtccggatcttcttttaccagtcgccctatgactcagagcaggtgccccaggcactccgccggctccgcccgcgcacccggaaagtcaagagcgtgtccccacagggcaacagcgttgaccgcatggcagctccgagagcagaggctctatttgacttcactggaaacagcaaactggagctgaatttcaaagctggagatgtgatcttcctcctcagtcggatcaacaaagactggctggagggcactgtccggggagccacgggcatcttccctctctccttcgtgaagatcctcaaagacttccctgaggaggacgaccccaccaactggctgcgttgctactactacgaagacaccatcagcaccatcaagtctgtggcctgggagggaggggcctgtccagccttcctgccatccctacgaccactgcccctcacatcaccttctcatgggtccctctcccactccaaagcccccagtggctcccagatgagccacaatgctgtaacaagccatcaacgtccagggtggcctggccagcctcattcccctttcccccaccccacaccccacttccagcctgatgcctccttactccagcctgtcacccccttagggacatcgcggtggaggaagatctcagcagcactcccctattgaaagacctgctggagctcacaaggcgggagttccagagagaggacatagctctgaattaccgggacgctgagggggatctggttcggctgctgtcggatgaggacgtagcgctcatggtgcggcaggctcgtggcctcccctcccagaagcgcctcttcccctggaagctgcacatcacgcagaaggacaactacagggtctacaacacgatgccatgagctgacggtgtccctggagcagtgaggggacaccagcaaaaaccttcagctctcagaggagattgggaccaggaaaacctgggaggatgggcagacttcctgtctttgaggctaatggacccgtggggcttgtaatctgtctctttctactatttacatctgatttaaataaaccattccatctgaaagggg

SEQ ID NO: 176268 - DNA, 906 bp, Artificial Sequence
  derived and/or modified sequence
ggaggaggagcctctgccagactggagagaagcaggcctgagcctccccaaaggcagctcctggggactcccaggaccacaggctgagacgagacgcagggtggctggaggaagtgagaggtgaactcagcctgggactggctgggcgagactctccacctgctccctgggaccatcgcccaccatggctgtggcccagcagctgcgggccgagaggttttcgtcatcgaggtgaagacaaaaggaggatccaagtacctcatctaccgccgctaccgccagttccatgctttgcagagcaagctggaggagcgcttcgggccagacagcaagagcagtgccctggcctgtaccctgcccacactcccagccaaagtctacgtgggtgtgaaacaggagatcgccgagatgcggatacctgccctcaacgcctacatgaagagcctgctcagcctgccggtctgggtgctgatggatgaggacgtccggatcttcttttaccagtcgccctatgactcagagcaggtgccccaggcactccgccggctccgcccgcgcacccggaaagtcaagagcgtgtccccacagggcaacagcgttgaccgcatggcagctccgagagcagaggctctatttgacttcactggaaacagcaaactggagctgaatttcaaagctggagatgtgatcttcctcctcagtcggatcaacaaagactggctggagggcactgtccggggagccacgggcatcttccctctctccttcgtgaagatcctcaaagacttccctgaggaggacgaccccaccaactggctgcgttgctactactacgaagacaccatcagcaccatcaagtctgtggcctgggagggaggggcctgtccagccttcctgccatcccta

SEQ ID NO: 176269 - DNA, 1047 bp, Artificial Sequence
  derived and/or modified sequence
atggccgtggcgcagcagttgcgggctgagtcagactttgagcaactgccggacgacgtcgccatatctgcaaatatagccgatattgaagaaaaaagggggtttacgtcacattttgtctttgtgattgaagtaaaaaccaaggggggtagcaaatacctgatatacaggcgttataggcaattccacgccctgcagagcaagttggaggagcgatttggtccagatagcaagtccagtgctttagcttgcacccttccaactctcccagccaaggtctacgtgggagtgaagcaggagatcgcagagatgaggataccggctcttaacgcttatatgaagagtctcctgagcctgccagtctgggtgctgatggatgaagatgtgaggatattcttttatcaaagcccctatgattcagaacaagtgccacaggccctgaggcgcctgcgccctcgcactaggaaggtgaagtccgtatcaccccaggggaacagtgtggacaggatggccgctcctagagcagaagccctgtttgacttcacagggaacagcaagcttgaactcaattttaaggctggcgacgtaatatttttactttcgcggatcaataaggactggctggaggggacagtccgcggtgccacaggcatcttcccattgtcatttgtgaagattctcaaagatttccctgaggaggacgacccaacaaattggctgcggtgttactactatgaagacacgatatccacaataaaatccgtggcctgggaaggcggagcttgccctgcttttttgccttctctccgacccctgccattgactagtccttcccatggatccctgagccattccaaagcccctagtggaagccagatgtctcacaacgctgtcactagtcatcaaaggcctggctggcccggtcagccacactctccctttccacatccgacaccccatttccagcccgacgcctcacttctccagcctgtaacacctttgggcacctcgcgttggcggaagatttcagcagccctgccctactag

SEQ ID NO: 176270 - DNA, 501 bp, Artificial Sequence
  derived and/or modified sequence
atgcgaataccggctctcaacgcctacatgaagtctctcttatcgcttcccgtgtgggtcctaatggatgaggatgtgcggatcttcttctaccagtcgccgtatgactccgagcaagtgcctcaggctcttaggcgactccgacccaggacacgtaaggtgaagagcgtgtctcctcagggcaatagcgtggacaggatggcagctccacgggctgaggctcttttcgacttcaccggaaattctaagctcgaattgaactttaaggcaggggacgtgatcttcttgctgtcacgcatcaataaagactggctggagggcaccgtcagaggtgctacaggcatctttcctctcagtttcgtgaagatcttgaaagactttcccgaggaagatgaccccaccaactggctaagatgctattattacgaagatacaataagcacaattaagagcgtggcttgggaaggcggagcttgtccagctttcctgcctagtctttag

SEQ ID NO: 176271 - DNA, 1047 bp, Artificial Sequence
  derived and/or modified sequence
atggccgtggcccagcagctgagagccgagagcgacttcgagcagctgcccgacgacgtggccatcagcgccaacatcgccgacatcgaggagaagagaggcttcaccagccacttcgtgttcgtgatcgaggtgaagaccaagggcggcagcaagtacctgatctacagaagatacagacagttccacgccctgcagagcaagctggaggagagattcggccccgacagcaagagcagcgccctggcctgcaccctgcccaccctgcccgccaaggtgtacgtgggcgtgaagcaggagatcgccgagatgagaatccccgccctgaacgcctacatgaagagcctgctgagcctgcccgtgtgggtgctgatggacgaggacgtgagaatcttcttctaccagagcccctacgacagcgagcaggtgccccaggccctgagaagactgagacccagaaccagaaaggtgaagagcgtgagcccccagggcaacagcgtggacagaatggccgcccccagagccgaggccctgttcgacttcaccggcaacagcaagctggagctgaacttcaaggccggcgacgtgatcttcctgctgagcagaatcaacaaggactggctggagggcaccgtgagaggcgccaccggcatcttccccctgagcttcgtgaagatcctgaaggacttccccgaggaggacgaccccaccaactggctgagatgctactactacgaggacaccatcagcaccatcaagagcgtggcctgggagggcggcgcctgccccgccttcctgcccagcctgagacccctgcccctgaccagccccagccacggcagcctgagccacagcaaggcccccagcggcagccagatgagccacaacgccgtgaccagccaccagagacccggctggcccggccagccccacagccccttcccccaccccaccccccacttccagcccgacgccagcctgctgcagcccgtgacccccctgggcaccagcagatggagaaagatcagcgccgccctgccctactag

SEQ ID NO: 176272 - DNA, 501 bp, Artificial Sequence
  derived and/or modified sequence
atgagaatccccgccctgaacgcctacatgaagagcctgctgagcctgcccgtgtgggtgctgatggacgaggacgtgagaatcttcttctaccagagcccctacgacagcgagcaggtgccccaggccctgagaagactgagacccagaaccagaaaggtgaagagcgtgagcccccagggcaacagcgtggacagaatggccgcccccagagccgaggccctgttcgacttcaccggcaacagcaagctggagctgaacttcaaggccggcgacgtgatcttcctgctgagcagaatcaacaaggactggctggagggcaccgtgagaggcgccaccggcatcttccccctgagcttcgtgaagatcctgaaggacttccccgaggaggacgaccccaccaactggctgagatgctactactacgaggacaccatcagcaccatcaagagcgtggcctgggagggcggcgcctgccccgccttcctgcccagcctgtag

SEQ ID NO: 176273 - protein, 174 aa, Artificial Sequence
  derived and/or modified sequence
MYTFDQATGGTAQFEAHSDAQALVLLDVTPDQSMVDEGMAREVINRIQKLRKKCNLVPTDEITVYYKAKSEGTYLNSVIESHTEFIFTTIKAPLKPYPVSPSDKVLIQEKTQLKGSELEITLTRGSSLPGPACAYVNLNICANGSEQGEMQWIIPEIYHFWKPRWSIAPGKSKR

SEQ ID NO: 176274 - protein, 1262 aa, Artificial Sequence
  derived and/or modified sequence
MLQQVPENINFPAEEEKILEFWTEFNCFQECLKQSKHKPKFTFYDGPPFATGLPHYGHILAGTIKDIVTRYAHQSGFHVDRRFGWDCHGLPVEYEIDKTLGIRGPEDVAKMGITEYNNQCRAIVMRYSAEWKSTVSRLGRWIDFDNDYKTLYPQFMESVWWVFKQLYDKGLVYRGVKVMPFSTACNTPLSNFESHQNYKDVQDPSVFVTFPLEEDETVSLVAWTTTPWTLPSNLAVCVNPEMQYVKIKDVARGRLLILMEARLSALYKLESDYEILERFPGAYLKGKKYRPLFDYFLKCKENGAFTVLVDNYVKEEEGTGVVHQAPYFGAEDYRVCMDFNIIRKDSLPVCPVDASGCFTTEVTDFAGQYVKDADKSIIRTLKEQGRLLVATTFTHSYPFCWRSDTPLIYKAVPSWFVRVENMVDQLLRNNDLCYWVPELVREKRFGNWLKDARDWTISRNRYWGTPIPLWVSDDFEEVVCIGSVAELEELSGAKISDLHRESVDHLTIPSRCGKGSLHRISEVFDCWFESGSMPYAQVHYPFENKREFEDAFPADFIAEGIDQTRGWFYTLLVLATALFGQPPFKNVIVNGLVLASDGQKMSKRKKNYPDPVSIIQKYGADALRLYLINSPVVRAENLRFKEEGVRDVLKDVLLPWYNAYRFLIQNVLRLQKEEEIEFLYNENTVRESPNITDRWILSFMQSLIGFFETEMAAYRLYTVVPRLVKFVDILTNWYVRMNRRRLKGENGMEDCVMALETLFSVLLSLCRLMAPYTPFLTELMYQNLKVLIDPVSVQDKDTLSIHYLMLPRVREELIDKKTESAVSQMQSVIELGRVIRDRKTIPIKYPLKEIVVIHQDPEALKDIKSLEKYIIEELNVRKVTLSTDKNKYGIRLRAEPDHMVLGKRLKGAFKAVMTSIKQLSSEELEQFQKTGTIVVEGHELHDEDIRLMYTFDQATGGTAQFEAHSDAQALVLLDVTPDQSMVDEGMAREVINRIQKLRKKCNLVPTDEITVYYKAKSEGTYLNSVIESHTEFIFTTIKAPLKPYPVSPSDKVLIQEKTQLKGSELEITLTRGSSLPGPACAYVNLNICANGSEQGGVLLLENPKGDNRLDLLKLKSVVTSIFGVKNTELAVFHDETEIQNQTDLLSLSGKTLCVTAGSAPSLINSSSTLLCQYINLQLLNAKPQECLMGTVGTLLLENPLGQNGLTHQGLLYEAAKVFGLRSRKLKLFLNETQTQEITEDIPVKTLNMKTVYVSVLPTTADF

SEQ ID NO: 176275 - protein, 1242 aa, Artificial Sequence
  derived and/or modified sequence
MLQQVPENINFPAEEEKILEFWTEFNCFQECLKQSKHKPKFTFYDGPPFATGLPHYGHILAGTIKDIVTRYAHQSGFHVDRRFGWDCHGLPVEYEIDKTLGIRGPEDVAKMGITEYNNQCRAIVMRYSAEWKSTVSRLGRWIDFDNDYKTLYPQFMESVWWVFKQLYDKGLVYRGVKVMPFSTACNTPLSNFESHQNYKDVQDPSVFVTFPLEEDETVSLVAWTTTPWTLPSNLAVCVNPEMQYVKIKDVARGRLLILMEARLSALYKLESDYEILERFPGAYLKGKKYRPLFDYFLKCKENGAFTVLVDNYVKEEEGTGVVHQAPYFGAEDYRVCMDFNIIRKDSLPVCPVDASGCFTTEVTDFAGQYVKDADKSIIRTLKEQGRLLVATTFTHSYPFCWRSDTPLIYKAVPSWFVRVENMVDQLLRNNDLCYWVPELVREKRFGNWLKDARDWTISRNRYWGTPIPLWVSDDFEEVVCIGSVAELEELSGAKISDLHRESVDHLTIPSRCGKGSLHRISEVFDCWFESGSMPYAQVHYPFENKREFEDAFPADFIAEGIDQTRGWFYTLLVLATALFGQPPFKNVIVNGLVLASDGQKMSKRKKNYPDPVSIIQKYGADALRLYLINSPVVRAENLRFKEEGVRDVLKDVLLPWYNAYRFLIQNVLRLQKEEEIEFLYNENTVRESPNITDRWILSFMQSLIGFFETEMAAYRLYTVVPRLVKFVDILTNWYVRMNRRRLKGENGMEDCVMALETLFSVLLSLCRLMAPYTPFLTELMYQNLKVLIDPVSVQDKDTLSIHYLMLPRVREELIDKKTESAVSQMQSVIELGRVIRDRKTIPIKYPLKEIVVIHQDPEALKDIKSLEKYIIEELNVRKVTLSTDKNKYGIRLRAEPDHMVLGKRLKGAFKAVMTSIKQLSSEELEQFQKTGTIVVEGHELHDEDIRLMYTFDQATGGTAQFEAHSDAQALVLLDVTPDQSMVDEGMAREVINRIQKLRKKCNLVPTDEITVYYKAKSEGTYLNSVIESHTEFIFTTIKAPLKPYPVSPSDKVLIQEKTQLKGSELEITLTRGSSLPGPACAYVNLNICANGSEQGGVLLLENPKGDNRLDLLKLKSVVTSIFGVKNTELAVFHDETEIQNQTDLLSLSGKTLCVTAGSAPSLINSSSTLLCQYINLQLLNAKPQECLMGTVGTLLLENPLGQNGLTHQGLLYEAAKVFGLRSRKLKLFLNETQTQEITEDIP

SEQ ID NO: 176276 - protein, 330 aa, Artificial Sequence
  derived and/or modified sequence
MLQQVPENINFPAEEEKILEFWTEFNCFQECLKQSKHKPKFTFYDGPPFATGLPHYGHILAGTIKDIVTRYAHQSGFHVDRRFGWDCHGLPVEYEIDKTLGIRGPEDVAKMGITEYNNQCRAIVMRYSAEWKSTVSRLGRWIDFDNDYKTLYPQFMESVWWVFKQLYDKGLVYRGVKVMPFSTACNTPLSNFESHQNYKDVQDPSVFVTFPLEEDETVSLVAWTTTPWTLPSNLAVCVNPEMQYVKIKDVARGRLLILMEARLSALYKLESDYEILERFPGAYLKGKKYRPLFDYFLKCKENGAFTVLVDNYVKEEEGTGVVHQAPYFGA

SEQ ID NO: 176277 - protein, 170 aa, Artificial Sequence
  derived and/or modified sequence
MAPYTPFLTELMYQNLKVLIDPVSVQDKDTLSIHYLMLPRVREELIDKKTESAVSQMQSVIELGRVIRDRKTIPIKLKGSELEITLTRGSSLPGPACAYVNLNICANGSEQGGVLLLENPKGDNRLDLLKLKSVVTSIFGVKNTELAVFHDETEIQNQTDLLSLSGKTLC

SEQ ID NO: 176278 - protein, 1152 aa, Artificial Sequence
  derived and/or modified sequence
MGITEYNNQCRAIVMRYSAEWKSTVSRLGRWIDFDNDYKTLYPQFMESVWWVFKQLYDKGLVYRGVKVMPFSTACNTPLSNFESHQNYKDVQDPSVFVTFPLEEDETVSLVAWTTTPWTLPSNLAVCVNPEMQYVKIKDVARGRLLILMEARLSALYKLESDYEILERFPGAYLKGKKYRPLFDYFLKCKENGAFTVLVDNYVKEEEGTGVVHQAPYFGAEDYRVCMDFNIIRKDSLPVCPVDASGCFTTEVTDFAGQYVKDADKSIIRTLKEQGRLLVATTFTHSYPFCWRSDTPLIYKAVPSWFVRVENMVDQLLRNNDLCYWVPELVREKRFGNWLKDARDWTISRNRYWGTPIPLWVSDDFEEVVCIGSVAELEELSGAKISDLHRESVDHLTIPSRCGKGSLHRISEVFDCWFESGSMPYAQVHYPFENKREFEDAFPADFIAEGIDQTRGWFYTLLVLATALFGQPPFKNVIVNGLVLASDGQKMSKRKKNYPDPVSIIQKYGADALRLYLINSPVVRAENLRFKEEGVRDVLKDVLLPWYNAYRFLIQNVLRLQKEEEIEFLYNENTVRESPNITDRWILSFMQSLIGFFETEMAAYRLYTVVPRLVKFVDILTNWYVRMNRRRLKGENGMEDCVMALETLFSVLLSLCRLMAPYTPFLTELMYQNLKVLIDPVSVQDKDTLSIHYLMLPRVREELIDKKTESAVSQMQSVIELGRVIRDRKTIPIKYPLKEIVVIHQDPEALKDIKSLEKYIIEELNVRKVTLSTDKNKYGIRLRAEPDHMVLGKRLKGAFKAVMTSIKQLSSEELEQFQKTGTIVVEGHELHDEDIRLMYTFDQATGGTAQFEAHSDAQALVLLDVTPDQSMVDEGMAREVINRIQKLRKKCNLVPTDEITVYYKAKSEGTYLNSVIESHTEFIFTTIKAPLKPYPVSPSDKVLIQEKTQLKGSELEITLTRGSSLPGPACAYVNLNICANGSEQGGVLLLENPKGDNRLDLLKLKSVVTSIFGVKNTELAVFHDETEIQNQTDLLSLSGKTLCVTAGSAPSLINSSSTLLCQYINLQLLNAKPQECLMGTVGTLLLENPLGQNGLTHQGLLYEAAKVFGLRSRKLKLFLNETQTQEITEDIPVKTLNMKTVYVSVLPTTADF

SEQ ID NO: 176279 - protein, 249 aa, Artificial Sequence
  derived and/or modified sequence
MAPYTPFLTELMYQNLKVLIDPVSVQDKDTLSIHYLMLPRVREELIDKKTESAVSQMQSVIELGRVIRDRKTIPIKYPLKEIVVIHQDPEALKDIKSLEKYIIEELNVRKVTLSTDKNKYGIRLRAEPDHMVLGKRLKGAFKAVMTSIKQLSSEELEQFQKTGTIVVEGHELHDEDIRLMYTFDQATGGTAQFEAHSDAQALVLLDVTPDQSMVDEGMAREVINRIQKLRKKCNLVPTDEITVYYKAKS

SEQ ID NO: 176280 - protein, 271 aa, Artificial Sequence
  derived and/or modified sequence
MMVLLLQLDCLTMDIYLRDKDTLSIHYLMLPRVREELIDKKTESAVSQMQSVIELGRVIRDRKTIPIKLKGSELEITLTRGSSLPGPACAYVNLNICANGSEQGGVLLLENPKGDNRLDLLKLKSVVTSIFGVKNTELAVFHDETEIQNQTDLLSLSGKTLCVTAGSAPSLINSSSTLLCQYINLQLLNAKPQECLMGTVGTLLLENPLGQNGLTHQGLLYEAAKVFGLRSRKLKLFLNETQTQEITEDIPVKTLNMKTVYVSVLPTTADF

SEQ ID NO: 176281 - DNA, 525 bp, Artificial Sequence
  derived and/or modified sequence
atgtatacgttcgatcaggccactggcggcaccgcccaatttgaggctcattccgacgctcaggccctcgttctactggatgtgacccccgaccaatccatggtcgatgagggtatggctcgcgaggtgattaatcgcatccaaaaactgcgcaaaaaatgtaatctggtccctacggatgagattaccgtgtactataaggcgaaatctgaaggaacatacttaaacagcgtgatcgagtcacacacagaatttatctttaccactattaaggcaccattgaagccataccctgtctctccatcagacaaggtgctcatacaggagaaaacacagctcaaagggagcgaactcgagatcacactcactagggggtcaagcctgcccggaccagcttgcgcatacgtgaatctgaatatctgcgcgaatggctctgaacaaggcgaaatgcagtggatcatccccgaaatctatcatttctggaagcctaggtggagcatcgccccagggaagagtaagaggtag

SEQ ID NO: 176282 - DNA, 525 bp, Artificial Sequence
  derived and/or modified sequence
atgtatacctttgaccaagcgaccggcggaactgcccagttcgaagcgcactccgacgcccaagccctggttcttctagacgtgacgcctgaccagtcaatggtggacgaagggatggcgagagaagtaataaatagaatacagaagttacgtaagaaatgtaatttagtgcctacagatgaaatcactgtctattacaaagctaagagtgaggggacgtatctcaactcagtcattgagtcccatactgagttcatcttcactacaataaaagctccactgaaaccataccccgtttctccgagcgacaaagtgcttatccaagagaagacccagctgaagggatcagagctagagattactcttacgcggggctccagcctgcccggccccgcctgtgcatacgtgaacttaaatatctgtgccaatggaagcgagcagggcgaaatgcagtggatcatccccgagatttatcacttttggaaaccccgctggtcgatcgccccaggcaagtcaaaacggtag

SEQ ID NO: 176283 - DNA, 3789 bp, Artificial Sequence
  derived and/or modified sequence
atgctgcagcaggtccctgaaaacattaattttcccgccgaggaggagaaaattctggaattctggacagaatttaattgcttccaggagtgcctgaaacaatccaaacacaagccaaagttcacattctacgacggtcctccgttcgctacaggactgccccattatggacacatattggccggtacaatcaaggacatagtcacgcgctatgcccaccaatcagggtttcacgtcgataggcgcttcgggtgggactgtcacggactgcctgtcgaatatgaaattgacaagacgctgggaatccgcggacccgaagacgtggccaagatgggaatcaccgagtataataatcagtgcagagcaatcgtcatgcgatactccgctgagtggaagtccactgtgtccaggctgggaagatggattgactttgacaatgactataaaacactgtacccccagtttatggagtcagtgtggtgggtattcaaacaactatacgataagggccttgtgtatagaggtgtgaaggtcatgccattcagcaccgcctgcaacacacccttgagtaactttgagagtcatcagaactataaggatgtgcaagatccgagcgtgtttgtgaccttccctcttgaagaggatgaaaccgtgagtttagttgcttggaccactaccccttggactctgcccagcaatcttgccgtctgcgtgaaccccgagatgcagtatgtaaagataaaggatgtggccagagggagattactgatcctgatggaggctcgattatccgccctgtacaaattggaaagcgactacgagatcttggagaggtttcctggtgcatatcttaaaggtaagaaatatcgcccactattcgattattttctcaaatgtaaagaaaatggggccttcactgtcctggtggacaattacgtaaaagaagaagagggtaccggggtagtgcaccaggccccatattttggggctgaggattacagggtgtgtatggattttaacattattagaaaggacagtcttcctgtctgtcctgtggacgcgtcaggttgtttcacgactgaggtcactgactttgctggccagtacgtgaaggatgccgacaagagcatcatcagaaccctcaaagagcagggaaggctgctggtggccacaacctttacgcactcatatccattctgctggagatccgacacccccttgatctacaaggccgtcccctcgtggtttgtgagggtcgaaaacatggtggaccagctcctgagaaacaatgacctctgctattgggtccccgagctggtgagggagaagagattcgggaactggttgaaggatgccagagattggaccatcagtcgcaatagatactgggggacaccaatcccactgtgggtttcagatgactttgaagaagtcgtctgtattggatctgtcgctgagctcgaggaactgtcgggcgccaagatctctgacctgcaccgtgaaagcgtcgatcatcttaccattcccagccggtgtgggaaaggtagcctgcatcggataagtgaagtgttcgactgttggttcgagagtggaagcatgccatacgcccaggtgcactacccttttgaaaacaaaagagaatttgaggacgcatttcctgccgactttatcgcggaaggaattgaccagactcgggggtggttttacacccttctggttctggcaaccgccctgtttgggcaaccaccattcaagaatgtcatcgtcaatggactggtgcttgcctcagatggccagaagatgagcaagaggaaaaagaattatcccgatcctgtttcaattatccagaaatacggggctgatgcccttcgtctgtatctcatcaactctccagtggtgcgagccgaaaatttgcgttttaaagaggagggcgttagagatgtactcaaagatgtgcttctgccgtggtacaatgcttaccgcttcttaattcagaacgtgcttaggctgcagaaagaggaggagatcgaatttctctataatgaaaacactgtgcgcgagagccccaatatcacagaccgctggattctgtcatttatgcagtctctgattggcttcttcgagacagagatggcagcctacaggctgtacaccgtggtccctcggctggtgaagtttgtcgatatacttactaactggtatgtgcgcatgaatcgccgccggctgaagggcgagaatggaatggaagactgcgttatggccctagagactctctttagtgtgctgctgtccctgtgtcgactcatggccccctatacaccctttctgacagaactgatgtaccaaaatctgaaggtgctgatagaccccgtgagcgttcaggacaaagatactctgagtatacactatctgatgctgccacgggtgcgcgaggagctaatcgacaaaaagaccgaaagtgccgtgtctcaaatgcagtcagtcatcgaactggggcgagtgattagagacaggaagacaattccaattaagtaccctttgaaggaaattgtggttatacaccaggacccagaagccctgaaggacattaaatcactggagaaatatataattgaggaactgaatgtgcgcaaagtcactctgtcaacagacaagaacaaatatggtatccgtctcagagccgagcccgaccacatggtgctaggcaaacgcctcaagggggctttcaaggccgtgatgacttccattaagcagctgtctagtgaagagctggagcaatttcagaaaacaggtactatcgtagtggaaggacatgaattacacgacgaggacatccgactaatgtacacattcgatcaggccacaggtgggactgctcagttcgaggcacacagtgacgcccaggccctggtcctgcttgacgtaaccccagaccaatccatggtcgacgaggggatggccagagaggtcatcaaccgcattcaaaaactcaggaagaaatgtaatttggtccctaccgacgaaatcaccgtgtattataaggctaagtctgagggcacttaccttaatagcgttatcgagagccacactgagtttatcttcaccacaattaaggccccccttaagccctaccccgtgtcaccatcggataaggtgctcattcaagaaaagactcaattgaagggcagcgaacttgagataacactgacgcgaggctcaagcctgcctggcccagcatgtgcctatgtgaatctgaacatatgcgctaatgggtccgaacagggcggcgtactgctgttagaaaacccaaaaggcgacaatagattagacctgctcaaacttaaatcagtggtgaccagcattttcggagtgaagaacactgagttagctgtgtttcacgacgagacagagattcagaatcaaactgatctgcttagcctgtctggcaagactctctgtgtgacagccggttccgcacccagtctgatcaactcctctagcacgctcctgtgtcagtacatcaatttacagcttttgaatgcaaagccccaggaatgtctcatgggtacagtggggacgctgctattggaaaacccccttggccagaatggtttgacccatcaaggtctcttgtatgaagctgctaaggtgttcggcctcaggagcagaaagctgaaactgtttttgaacgagacacagacccaagaaataacagaagacatccctgttaaaaccctgaacatgaaaacagtgtatgtgtctgtactccctaccaccgccgatttctag

SEQ ID NO: 176284 - DNA, 3729 bp, Artificial Sequence
  derived and/or modified sequence
atgctacagcaggtccctgagaatatcaacttccccgctgaggaagagaagattctggagttttggacagagtttaattgtttccaggaatgtttaaagcagtctaagcacaagcccaagttcacattttacgacggaccgcccttcgccaccgggctgccccattacgggcatatcctagcgggcacaattaaagatatcgtcacgcgatacgcacatcagagtggctttcacgtcgaccgtcgtttcggttgggactgccatggcctgccagtcgagtacgagattgataaaacccttgggattcgtggccccgaagatgtggcaaaaatgggaataactgagtataacaatcagtgtcgagcaattgttatgagatacagcgctgaatggaaaagtaccgtgtcccggctcggccgctggatcgatttcgataacgactacaagaccctctacccgcagttcatggagtcagtatggtgggtgtttaaacagctctacgacaaaggcctcgtgtaccggggggtgaaagttatgcctttttcaaccgcttgcaacactcctctcagcaactttgagagccatcagaattataaagatgtgcaggatccatccgtatttgtaacattccccctggaagaggacgagactgtctcgcttgttgcttggactacgacaccttggaccctgccaagcaacctggcagtgtgcgttaatcctgaaatgcagtatgtgaaaattaaggatgtcgctagaggccgtttgctcatcttgatggaagcgagattgagtgctttgtacaagctggagtctgattacgagatccttgagaggtttccgggcgcgtacctcaaggggaaaaagtaccggcccctattcgattacttcctcaaatgcaaggaaaacggtgctttcacagtgcttgtcgataactacgttaaagaagaggaaggtaccggagtggtccaccaagcaccatatttcggtgccgaggattaccgcgtgtgcatggatttcaacattataagaaaagacagcctgcctgtatgtcctgtggacgcgtctggctgttttacgacagaggtgaccgattttgccggacagtacgtgaaggacgcagacaagtctattatccgaacattaaaggaacagggtaggctgctcgtggctactactttcacgcacagctaccccttttgctggaggtctgatactcctctgatctataaagctgtgcccagttggtttgtgagagttgagaacatggtggatcagctgctgagaaataatgacctttgctattgggtgcccgaactcgtcagagagaagagatttggcaactggcttaaagatgcgcgtgattggacaattagtcgcaaccggtactgggggacacctattcctttgtgggtttcagacgattttgaggaggttgtgtgcattggatcagtagcagagctcgaagagctgtcaggcgctaagatctctgatctgcaccgagaatctgtcgaccacctcacaatcccctccagatgcggcaaaggatcacttcaccgtatttctgaagttttcgactgttggttcgagtctggctctatgccgtatgcccaagtacattacccattcgaaaacaagagggaatttgaggacgcgtttccagctgattttattgctgagggcatcgatcagaccagggggtggttttatacactactggtcctagcaacagcactcttcgggcagccccctttcaaaaatgtgatagttaatggcttagttctcgcctcagacggacaaaagatgtcgaaacgcaagaaaaactatcctgaccccgtgtcaattattcagaaatacggcgcggacgccctgcggctctatctgattaactctcctgtcgtgcgcgcggaaaacctccgatttaaagaagagggagtgagggacgtgctgaaggatgtgctccttccttggtataacgcttaccgattcctgattcagaacgtattgcgcctgcagaaggaggaggagattgagttcctgtacaatgagaacaccgtcagagagtctccaaacatcacagatcgctggattttatcttttatgcaatccctcataggattcttcgaaactgagatggccgcatacaggttatacaccgtggtgccacggctggtgaaattcgtggatatcctgacaaattggtatgtcaggatgaaccgccgacgcttgaaaggcgagaacggaatggaagactgtgttatggcattagagactctgttttctgttcttctgtcactctgtaggctgatggcaccttataccccgtttcttacagaacttatgtaccaaaatttaaaggtgttgatcgatcctgttagcgtgcaggataaagacacgctgagcatccattacctcatgctcccacgcgtgcgagaagagcttattgacaagaaaaccgaaagcgctgttagccagatgcaaagtgtcattgagctcggccgggttatccgcgaccgcaaaaccatacccattaagtaccccctaaaagaaatcgttgtaattcatcaggaccccgaagctcttaaggacataaagtctttagaaaagtacataattgaagagttaaacgtgaggaaagtgacactttccacagacaagaacaagtatgggatccggctccgcgcggagcccgaccacatggtgctagggaaacgtcttaagggtgccttcaaggctgtgatgaccagtatcaaacaactgagcagcgaggagttggagcagttccagaagaccggcacaattgtggttgagggccacgagctgcacgacgaggacatccggctgatgtacactttcgatcaagccacaggtggaactgctcaatttgaagcgcatagcgacgcccaagccctggtacttctggacgttacacctgatcagtcaatggtcgacgaaggcatggcgagggaggtgatcaaccgaatccagaagttgagaaagaagtgcaatttggtccctactgacgagatcactgtgtactataaagcaaaaagcgaagggacatacctgaatagtgtcatagagagtcacaccgagttcatattcacgaccattaaagctcctttgaagccctaccctgtgtcaccctcagataaagttctgatccaggaaaagactcaactgaaggggagtgagctggaaatcactttaactcggggatcctcgctgccagggcctgcttgtgcttatgtaaacctgaacatctgcgcaaatggttccgagcaaggcggagttcttttgcttgagaatcccaaaggggataacagactcgacctgctgaaactcaagtctgtcgtcacttctattttcggcgtgaagaataccgaactcgcggtgtttcacgacgaaaccgaaattcagaaccaaaccgacttgctgagcttaagtggaaagacactgtgcgttaccgctgggagtgcgccttctctgatcaattctagttctaccctcttgtgccagtacatcaacctgcaattgctgaatgctaagcctcaggaatgcctgatgggcaccgtgggcactcttttgttggagaacccactcgggcagaacggcctaacacaccaagggctcctctacgaagcagccaaggtgttcggcctcaggagcagaaaactgaaactgttcctgaacgagacccaaacacaggagatcaccgaggatatcccttag

SEQ ID NO: 176285 - DNA, 993 bp, Artificial Sequence
  derived and/or modified sequence
atgctccagcaagtgccagagaatattaattttcccgcggaggaagaaaagatattagagttctggacagagttcaactgcttccaagagtgtctaaaacagagtaagcataaacccaagtttaccttctacgacgggccaccctttgccaccggactgccccactacggccacatactggccggaacaattaaggacattgtaacacggtatgcccatcagtctggattccatgtggacagaaggttcgggtgggactgccacggcctgcccgtggaatacgagatcgacaagaccctgggaattcgtgggcccgaagacgtggccaagatgggcataacagaatataacaatcaatgcagggctatcgtgatgcgttatagcgcagaatggaagtccaccgtctctcgtttgggccgctggatcgactttgataatgactacaagacgttgtatcctcagttcatggaaagtgtgtggtgggtcttcaaacagctatacgacaagggccttgtctaccggggggtaaaggtgatgcccttcagcacggcctgcaatacacccctgtcaaacttcgagtcccatcagaattacaaggatgtacaggacccttctgtgttcgtgacattcccacttgaggaagacgagaccgtgtccctagtggcctggacaactacaccatggaccctgcctagtaatctggccgtgtgtgttaaccctgagatgcagtatgtcaagatcaaggatgtggcgagaggcagattgctgatattaatggaggccaggctgtcagccctgtacaagctggagtctgactacgagattctagagcgctttcccggcgcttacctgaaaggcaagaagtaccgcccactgttcgattactttctgaagtgcaaagagaatggcgcttttacagtgctggtggacaactatgtgaaagaagaagaagggaccggagttgtgcatcaggcaccctacttcggagcatag

SEQ ID NO: 176286 - DNA, 513 bp, Artificial Sequence
  derived and/or modified sequence
atggcaccctacaccccttttttgacagagctgatgtaccagaatctcaaggtcttgattgaccctgtgagcgtgcaagacaaagacactctgtccattcattatctaatgctcccaagagtacgggaagaactgattgacaagaagacagagagtgccgtatcacaaatgcagagcgttatagaattaggcagagtaataagggataggaagacaattcctatcaagctaaagggttccgaacttgagattactcttactaggggttcctctttacccgggccagcttgcgcttatgttaatctgaatatttgcgcaaatgggagcgaacagggcggcgtactgctgctcgaaaatcccaagggagataacaggctggacctcctgaagctgaaatctgtagttacgagcattttcggtgtaaagaataccgaactcgccgtgtttcatgatgaaaccgagatacagaaccagaccgatctgctgagcctgtcagggaagacgctgtgctag

SEQ ID NO: 176287 - DNA, 3789 bp, Artificial Sequence
  derived and/or modified sequence
atgctgcagcaggtaccagagaacattaattttccggcggaggaagagaagatcctagagttctggaccgagtttaattgttttcaagagtgcctgaaacaatctaaacacaaacctaagttcacattttatgatggaccaccctttgccacaggtctgccccattacggccacatccttgccggaactatcaaggacatcgtgacacgctacgcacatcagtctggtttccacgtcgatagaagattcgggtgggactgccatggacttcccgttgaatacgagatcgataaaacactgggtatcagggggcctgaggatgtggctaagatgggtataactgaatataataaccagtgcagggctatcgtgatgcgttattcggccgagtggaaatccaccgtgtcccggctgggcaggtggatcgatttcgataatgactataagaccctctatcctcagttcatggagtcagtctggtgggtctttaaacaactgtacgacaaaggtctggtctataggggcgttaaagtgatgccattctccacggcttgcaataccccactctctaattttgagagtcatcagaattacaaagatgtgcaagatccatctgtcttcgtgacttttcctctggaggaggacgagacagtgagcctggtggcctggaccaccacgccgtggaccctcccatccaacttggcagtgtgtgttaacccagaaatgcagtacgttaaaatcaaagacgttgcacgcggcagactactaatcctcatggaagcaagactctcggctctttacaagttggaaagtgattatgagatcctcgaacgcttcccaggcgcctacctcaagggcaagaaataccgaccattattcgactacttcctaaagtgtaaagaaaacggggcattcaccgtgctcgtggataattacgtgaaggaagaagaagggacgggtgtcgtgcaccaggctccttacttcggcgccgaggactatcgggtctgcatggattttaacatcatacgtaaggactccctgcccgtgtgtccagtggacgcgagcggatgctttactaccgaggtgaccgactttgcagggcagtacgtcaaggatgctgataagtcgatcattcgcacattgaaagagcaagggcgtctgctcgtggccactacattcacccatagttaccctttttgctggcggagtgatacaccgttaatctacaaggccgtacccagttggtttgtgcgtgtcgaaaatatggtagaccagctgcttaggaataatgacctctgctattgggtccccgagcttgtgcgcgagaaaaggtttgggaattggcttaaagatgctcgtgactggactattagtagaaaccggtactggggcacccctatacccctctgggtgtccgatgacttcgaggaagtggtgtgcattggcagtgtggccgagcttgaagaactgtccggcgcgaaaatctcagaccttcaccgggaaagtgtggaccatctgactattccgagcagatgtggaaaggggtccctccatcggattagcgaggtcttcgattgctggttcgaatccggtagtatgccgtacgctcaggtccactatcctttcgagaataagagggaattcgaggacgctttcccagcggattttatcgctgagggcatcgatcagactcgagggtggttctacacattgctggttttggccactgctctgtttggacagcccccttttaagaatgttattgtaaatgggttggtgctggcctccgacgggcagaagatgagcaaaagaaagaaaaattaccctgatcccgtttcaataatacagaaatacggtgccgacgccctcagactgtatcttatcaattcaccagtcgtgagggcagaaaatctccgattcaaggaggaaggagtgagggatgtgctcaaagatgtccttcttccttggtacaacgcctaccgtttcctcatacagaacgtgctccgcctgcaaaaagaggaggagattgaatttttatataacgaaaacactgtgcgcgagagccccaatatcactgaccgctggattctgtcattcatgcagtctcttatcggtttctttgagactgagatggccgcttacagactgtatactgtggtgcccagactggtcaaattcgtggatattctgacaaactggtatgtcaggatgaatcggagacggctgaagggagaaaatggcatggaagactgcgtaatggcactcgagactctgtttagcgttctcttgagcctttgccgattgatggcgccttacacccccttcctgaccgaacttatgtatcagaacctcaaggttttgattgatccagtgagcgtccaagataaagacaccctaagcatccactacctgatgttgcccagagtgagggaagagctgatcgacaaaaaaaccgagtcagccgtaagccagatgcagagtgttatcgaacttggaagagttattagagaccggaagacgatccccatcaagtatccgttgaaagagatcgtagttatccaccaagatccagaagcactgaaagacatcaaaagtttggaaaaatacataattgaggagctgaatgtgcgtaaggtgaccctgagcactgataagaataagtacggtatccgactccgagccgagcccgatcatatggtgttgggaaaacgccttaagggagcgtttaaggctgtgatgacgtcgatcaagcaattgagtagcgaagagcttgaacagttccaaaagaccggcactattgtggtcgaaggccatgagctccatgatgaggatatacgcttgatgtacacctttgaccaagcaaccggaggcacagctcagttcgaggctcatagtgatgcccaggcccttgtactgttagatgtgacccctgaccaaagcatggtcgatgaggggatggcacgggaggtcatcaatcgtattcagaagcttcggaagaaatgcaacttagtgcccaccgacgagataactgtatactacaaggcgaaatccgaaggcacttatctcaacagcgtgatcgaatctcataccgagttcatctttaccacaatcaaggccccactaaagccctaccctgtgtctccttctgacaaggtgcttatccaggagaaaacgcaacttaaaggcagtgagttggagattacacttacccggggtagctctttaccaggtcctgcttgcgcttacgttaacctgaacatctgtgctaatggttctgaacagggaggagtcctgctgctggagaatcctaagggagataacaggctcgacctacttaagctgaaatctgtggtcacctccatcttcggcgtaaaaaatactgaactggccgtcttccacgacgaaaccgaaattcaaaatcaaacagacttattatccctgtcaggcaagacgttatgtgtcactgctggtagcgcaccttcattaatcaattcttcctccactctgctgtgccagtatataaaccttcagctgctgaatgctaagccccaggagtgcctgatgggcaccgtgggtacacttctactcgagaatcctttgggccagaacggtctcactcaccaaggacttttgtatgaggccgccaaagtgtttgggctcaggagtcgaaaactgaaactgtttctcaatgagacccaaacccaagaaatcacagaagacattcctgtcaaaacattgaatatgaaaacggtttatgtcagcgtcctgcctacaaccgccgacttctag

SEQ ID NO: 176288 - DNA, 3459 bp, Artificial Sequence
  derived and/or modified sequence
atgggcatcaccgagtataacaatcaatgccgcgcaatcgtgatgcgctattctgcagagtggaaaagtactgtgagcagactgggccgctggatcgatttcgacaatgattataaaactctgtatccccaatttatggagtccgtgtggtgggtcttcaaacagctgtacgataaaggactggtataccgcggggttaaggtgatgccattctccacggcctgcaatactcctctgtccaatttcgagtctcatcaaaactataaggatgtgcaagatccctcagtgttcgtgactttcccattagaggaagatgagacggtgtctctagtggcgtggactactacgccctggaccctgccctctaacctggctgtttgtgttaaccctgagatgcagtatgtgaagattaaagacgtcgcccgtggtaggcttctcatcttgatggaggccaggcttagcgccctctacaagctggaatctgactacgagattttggagaggttccccggggcctatctgaagggcaagaaatatcgtccattattcgactacttcctgaaatgtaaagaaaatggagcattcaccgtcctcgtggataattacgtcaaagaggaggaaggcacgggtgtagtgcaccaggccccgtattttggcgccgaagactatagagtatgcatggattttaacattataaggaaggactcactgccggtatgccccgtcgacgccagcggctgtttcacaacagaggtaacagactttgccggccagtacgtaaaggacgctgacaagagtataataaggactctgaaagaacaagggaggctcctggtggcaacgactttcacacactcctatcctttctgctggagatccgacacaccgttgatttacaaagccgtccctagttggttcgtgcgcgtcgaaaacatggtggatcagctcctccgcaacaatgacctgtgctattgggtgccagaactggtgcgggagaagaggttcggtaactggttgaaagatgcccgggactggactatctcccgcaatcgatattggggtacgccaatccccctgtgggtgagcgacgatttcgaagaagttgtgtgtatcggaagcgttgcagagctggaggagttgtccggcgccaagatcagtgatctacatagagaaagtgtcgatcatctcactatcccgtcccgctgcgggaagggtagtctgcatcggatatctgaggtgttcgattgctggttcgaatctggatcgatgccatatgcccaggttcactatcccttcgagaataaaagagagtttgaggacgccttcccagccgattttatcgccgaaggaattgatcagacccgagggtggttctacacgttgctcgtgttggccactgccttgttcggacaaccgcctttcaagaatgttattgtaaatggccttgtgctggcgagcgatggtcagaagatgtccaagcgcaagaagaattacccggatccggtgtccattatccagaagtacggcgctgacgctctacgcctatacctaatcaatagtccagtggtgcgtgccgagaatctgcgctttaaagaggaaggggtgcgggatgtcctgaaggatgtgctgctgccttggtacaacgcctatagattcctgatacagaacgtgttaaggttacagaaagaagaggagattgagttcctgtacaacgagaatacagtgcgcgagagcccaaatataaccgaccgctggatcctgtcgtttatgcagtccttgatcggattcttcgagaccgaaatggccgcctataggctgtataccgtggtgccccgcctggtaaagtttgttgatattctaacgaattggtacgtgcgcatgaacaggagaaggcttaaaggtgaaaatggtatggaggattgtgtcatggcgcttgagaccctgttttctgtactcctgtccttgtgccgcctgatggctccctacactcctttcctgactgaacttatgtatcagaacctgaaggtactcatagatcctgtgagcgtgcaggataaagacactctttccatccactacctgatgttgcctcgcgtgagagaagaactcattgataagaaaaccgagagcgctgtcagccagatgcaatcggtgatagaactagggcgcgtgatccgggatcggaagaccatacccataaaatatcctcttaaggagatcgtggtgatacaccaggaccccgaagcccttaaagatataaaaagcctggaaaagtacatcatcgaggaactcaatgtgcggaaggtgactttaagcactgacaagaacaaatacggtatccgccttcgtgccgaacctgatcatatggtgctcggaaagaggctcaaaggcgcctttaaagctgtcatgacctccatcaagcaactttcaagcgaggagttggagcaattccaaaagactggcacaatagtggtggaagggcatgaactgcacgacgaagacattaggcttatgtatacttttgaccaggccactggaggcaccgcccagttcgaagcacactcggacgcgcaggcactggtgctcctggatgtgacacccgaccagtcaatggtcgacgagggtatggccagagaggtgatcaataggatccaaaaactacgcaagaagtgcaatctcgttcccactgatgaaatcacagtgtattacaaagccaaatctgagggtacatacctgaattccgtgatcgaatcacatacagaattcatcttcaccacgataaaggctcctcttaagccgtatcctgtgtctcctagcgataaagtgttgatacaggagaaaacccagcttaagggaagcgagctggaaataacgcttacccgcggcagtagcctccccggcccagcgtgcgcatatgtcaaccttaacatctgcgcgaacggttctgagcaagggggcgtgctgctcctggagaatccaaagggggacaaccgcctggacctgctcaagctcaaaagcgtagtcacctcaatctttggagtcaaaaatactgaactggctgtttttcacgacgaaaccgaaatccagaatcagaccgacctgctcagcctgtcaggcaaaactctctgtgtgacagccgggagcgcgcccagcctgataaatagtagtagcactttgctgtgtcagtacatcaatctgcagcttctgaacgcaaaaccccaagagtgcctgatgggcactgttgggacgctgctgttggagaaccccctgggccagaatggattgacccaccagggcctattatacgaggctgctaaggtgtttgggctgcgaagcaggaagcttaaactctttctgaatgagacccaaactcaggagatcactgaggatatcccagtgaaaaccctgaatatgaaaacagtttatgtcagcgtattacccactactgccgatttctag

SEQ ID NO: 176289 - DNA, 750 bp, Artificial Sequence
  derived and/or modified sequence
atggccccgtatacacccttccttacagaactgatgtatcaaaatcttaaggtactaattgatcccgtgtccgttcaggataaggacacactctctatccactatctcatgctgccccgtgtaagggaggagctgatcgacaaaaagacagagagcgccgtctcgcagatgcagtccgttatcgaacttggcagagtgatacgagataggaaaacgatccccatcaagtatccactgaaggaaatcgtagtcattcaccaggatccagaggccttaaaggacattaagagcttggagaagtatattattgaggagctcaatgtgcggaaagtgaccctttctacagacaagaacaagtatgggatccgccttcgtgctgaaccggaccacatggtgctgggcaagcgcctcaaaggtgccttcaaggcggttatgactagcatcaagcagctgtctagtgaggaactggagcagtttcagaagaccggcactatcgtcgtggaaggacacgagctgcatgatgaagacatccgactgatgtatacttttgaccaggctaccgggggcaccgcccagtttgaggctcactccgacgcacaagctctggtccttttggacgtgacccctgatcagtcaatggtggatgaggggatggctagggaggtaattaacaggatccagaagcttaggaagaagtgcaacctggtgcctaccgatgagatcaccgtgtattacaaggctaagtcttag

SEQ ID NO: 176290 - DNA, 513 bp, Artificial Sequence
  derived and/or modified sequence
atggcgccctatacgccatttctcactgagctgatgtaccagaatcttaaagtgcttattgatcccgtcagtgttcaggataaggacaccctaagcatccattatctcatgttgccccgggtgcgtgaggaactcattgataagaagacagagtccgcggtgtcccaaatgcagtcagtaattgaattgggcagagtgatccgggacaggaagacaatccctattaagcttaagggatccgaactcgagattaccttgacgagagggtccagtcttccaggaccagcctgcgcttacgtaaatctgaacatctgtgctaatggctctgaacaaggcggagtgctcctgctggaaaaccccaaaggtgataataggctggatctgttaaagctcaagagcgttgtgacgtccatctttggggtcaagaataccgagcttgcagtgtttcatgacgaaacggagatccagaaccagaccgacctgctgagcctgagcggaaaaacattgtgctag

SEQ ID NO: 176291 - DNA, 816 bp, Artificial Sequence
  derived and/or modified sequence
atgatggtactacttctgcagctggattgcctgaccatggacatatatttgcgggacaaggataccctttccattcattacctaatgctgcctcgggtccgggaggaactgatcgataaaaagaccgaaagtgccgtcagtcagatgcagtctgtgatcgagttaggaagggtgattagggatcgaaaaaccatccccatcaaactgaagggctccgagttggagatcaccttgacccgtggtagctctctgccgggacctgcctgtgcctatgtgaacctgaatatttgtgctaacggatcagaacaaggcggcgtgctcctgttggaaaatccaaaaggagacaaccgcttggaccttcttaaactgaaatcagttgtgacaagtattttcggggtgaaaaatacagaacttgctgtatttcacgatgagaccgaaatccagaaccagactgaccttctatccctgtccggcaagactctttgcgttacagctgggtcagccccttcattaatcaactcctcctctacactgctttgtcaatacattaaccttcagctgctgaatgctaagccccaagagtgccttatgggtactgtagggactctcctcctggaaaatcccctcggccagaacggcctgacacaccagggactcctttacgaggcggcaaaagttttcgggctgcggtcacggaaactgaagctttttttaaatgagacgcaaactcaagagatcacagaagacattcccgttaagactctgaacatgaagacagtttacgttagcgtcctcccaactacggccgacttttag

SEQ ID NO: 176292 - DNA, 697 bp, Artificial Sequence
  derived and/or modified sequence
ctgattaacagtgtagctgcttctccatagggaccattgttgtggaaggccatgaattgcacgatgaagacatccgcctcatgtacacctttgatcaggccacaggtgggactgcgcaatttgaagcacactcagatgctcaggctttggtcctcttagatgtcactcctgaccagtcaatggtagatgaaggaatggctcgggaagtcatcaatcgcatacagaaacttcgcaaaaagtgcaatctggttccaactgatgaaatcacagtgtactataaagcaaagtctgaaggaacatatctgaatagtgttattgaaagccacacagagttcatatttaccaccataaaggctcccttgaaaccatatccagtttctccatcggataaagtccttattcaagaaaaaacacagttgaagggatctgaactggaaattacactcaccagaggatcttcccttcctggtcctgcttgtgcatatgtcaatcttaacatttgtgcaaatggcagtgaacaaggcgagatgcagtggatcattcctgaaatctaccacttttggaagccaaggtggagtattgctcctggaaaatccaaaaggtgacaataggttggaccttttaaagctgaagagtgttgtcactagcatttttggtgtgaaaaatacagagctggctgtcttccatgatgaaacag

SEQ ID NO: 176293 - DNA, 4382 bp, Artificial Sequence
  derived and/or modified sequence
agcgtggacgccggatgagttgcttttaggcttgctggcccgcggggctgtccaggcacgcgaggcccctcagcaacaaaatgcttcaacaagttccagaaaacataaattttcctgctgaagaagagaaaatcttggagttttggactgaatttaattgttttcaggaatgcttaaagcaatcaaaacataaaccaaaatttaccttctatgatggtcctccttttgcaactggactgcctcactatggacatatacttgcgggtacaattaaagatatagttacaagatatgctcaccagagtgggtttcatgttgacagaagatttggatgggattgccatggcttacctgtggaatatgaaattgataagacactgggaatcagaggaccagaggatgtggccaaaatggggattacagagtataacaatcagtgccgagcaattgtgatgagatattctgctgagtggaagtctactgttagcagacttggccgatggattgactttgacaatgactataaaactctgtatccacaattcatggaatcagtctggtgggtcttcaaacaactctatgataaaggccttgtttatagaggtgtgaaagtcatgcccttctctacggcatgtaacactccactttccaacttcgagtcacaccagaattataaggatgttcaagatccttcagtatttgtaactttccctttggaagaagatgaaactgtatctttagttgcttggacaaccactccctggactctacctagtaaccttgctgtgtgtgttaatccagaaatgcaatatgtgaaaattaaagatgttgccagaggacgattactcattttaatggaagccagattgtcagccctctataaattggagagtgactatgagatccttgaaagatttcctggtgcctatcttaaaggcaagaagtacaggcccctgtttgactatttcctgaagtgtaaagagaatggcgctttcactgtgcttgttgacaactatgtgaaggaagaagaaggcacaggggttgtccaccaagctccttacttcggtgctgaggactatcgggtctgtatggactttaacattattcggaaagactcactccctgtttgccctgtggatgcttcaggctgcttcacaacggaggtgacagatttcgcaggacagtatgtgaaggatgctgacaaaagtatcatcaggactttgaaggaacaaggccgacttctggttgccaccaccttcactcacagctaccctttttgctggagatcagacactcctctaatttacaaagcagtgcccagctggtttgtgcgagtggagaacatggtggaccagctcctaaggaacaatgacctgtgctactgggtcccagagttggtacgagaaaaacgatttggaaattggctgaaagatgcacgtgactggacaatttccagaaacagatactggggcacccccatcccactgtgggtcagcgatgactttgaggaggtggtatgcattgggtcagtggcggaacttgaagaactgtcaggagcaaagatctcagatctccacagagagagtgttgaccacctgaccattccttcacgctgtgggaagggatccttgcaccgcatctctgaagtgtttgactgttggtttgagagtggcagcatgccctatgctcaggttcattacccgtttgaaaacaagagggagtttgaggatgcttttcctgcagatttcattgccgagggcatcgaccaaaccagaggatggttttataccctgctggtgctggccacggccctctttggacaaccgcctttcaagaacgtaattgtgaatgggcttgtcctggcaagtgatggccaaaaaatgagcaaacggaaaaagaattatccagatccagtttccatcatccagaagtatggtgctgatgccctcagattatatctgattaactcccctgtggtgagagcagaaaacctccgctttaaagaagagggtgtgcgggacgtccttaaggatgtactgctcccatggtacaatgcctatcgcttcttaatccagaacgttctgaggctccagaaggaggaagaaatagaatttctctacaatgagaacacggttagagaaagccccaacattacagaccggtggatcctgtccttcatgcagtctctcattggcttctttgagactgaaatggcagcttataggctttatactgtggtgcctcgcctggtcaagtttgtagatattctgaccaattggtatgttagaatgaaccgcagaagattaaagggtgaaaatgggatggaggattgtgtcatggccctagaaaccttgtttagtgttctgctttctctttgcagacttatggctccctacacaccttttctcactgaattgatgtaccagaatctaaaggtgctgattgaccctgtttctgttcaggacaaggacacactcagcattcactacctcatgctgccccgtgttcgagaagaattgattgacaagaaaacagagagtgcagtatctcagatgcagtctgtgattgaacttggaagagtgatcagagaccgaaaaactattcccataaagtatcctttgaaagaaattgtggttatccatcaagatccagaagctcttaaagatatcaagtctttggagaagtatatcattgaggaactcaatgttcgaaaagttacactgtctacagataaaaacaagtatggcattcggctaagggcagaaccagatcacatggtcctggggaagcgtctgaagggagcctttaaggcagtgatgacgtccatcaagcagttgagcagtgaggagctggagcagttccagaagactgggaccattgttgtggaaggccatgaattgcacgatgaagacatccgcctcatgtacacctttgatcaggccacaggtgggactgcgcaatttgaagcacactcagatgctcaggctttggtcctcttagatgtcactcctgaccagtcaatggtagatgaaggaatggctcgggaagtcatcaatcgcatacagaaacttcgcaaaaagtgcaatctggttccaactgatgaaatcacagtgtactataaagcaaagtctgaaggaacatatctgaatagtgttattgaaagccacacagagttcatatttaccaccataaaggctcccttgaaaccatatccagtttctccatcggataaagtccttattcaagaaaaaacacagttgaagggatctgaactggaaattacactcaccagaggatcttcccttcctggtcctgcttgtgcatatgtcaatcttaacatttgtgcaaatggcagtgaacaaggcgagatgcagtggatcattcctgaaatctaccacttttggaagccaaggtggagtattgctcctggaaaatccaaaaggtgacaataggttggaccttttaaagctgaagagtgttgtcactagcatttttggtgtgaaaaatacagagctggctgtcttccatgatgaaacagaaatacaaaaccaaactgacttactgagtcttagtggaaaaacactttgtgtgactgcaggatcggctccctctctgatcaacagttctagtactcttctttgtcagtatatcaacctacagctcctgaatgcaaagccacaagagtgtttaatggggacagtgggcactctcctgcttgaaaacccacttgggcagaatggactcacccaccaaggtcttctgtatgaagcagccaaggtgtttggccttcggagcaggaagctaaagctgtttctgaatgagacccaaacgcaggaaattacagaagacatccccgtgaagactttgaatatgaagactgtgtatgtttctgtgttaccaacaacagcagacttctagcatgtacttatcaatgttgttcggtcagcccttccctaattacacctatcccctacacatacatgcacatagacacacacatgaacacactgaagatatttccttcaggtgtgtgtaaaatatgctgcttggattgaaattcaaatgggattgattagtcaagtaacttgagacctcacagtaatcttcacacttaaccttagacacctatgcagtcatgttgggagcaggttacaatgttacttcagcccacagtttatttctatacttgagttcttaagtacagaagatagaagtgatttaaatggcatagtatatatatcattttctggccttttaaaatttatttgagacctcttgatgaaatggacatattatatatttctgccacctggattttcctggataatttgatggaatattttaagtttcagtaaatcagaacaataaacaaactcagatat

SEQ ID NO: 176294 - DNA, 4656 bp, Artificial Sequence
  derived and/or modified sequence
tccgtgcgcccggttgcagcgtggacgccggatgagttgcttttaggcttgctggcccgcggggctgtccaggcacgcgaggcccctcaggtacgccctctcttccctgcaggatccggccctcaaagacgagggtcacgcacgcgttacaaccccgaaacagtagcacaagatttaatttttaaaagagcgtgtttcttcggggcttgccgttcgttcgtttccagcctcaggaatttatggtcgcctttttgaatgagcaacaaaatgcttcaacaagttccagaaaacataaattttcctgctgaagaagagaaaatcttggagttttggactgaatttaattgttttcaggaatgcttaaagcaatcaaaacataaaccaaaatttaccttctatgatggtcctccttttgcaactggactgcctcactatggacatatacttgcgggtacaattaaagatatagttacaagatatgctcaccagagtgggtttcatgttgacagaagatttggatgggattgccatggcttacctgtggaatatgaaattgataagacactgggaatcagaggaccagaggatgtggccaaaatggggattacagagtataacaatcagtgccgagcaattgtgatgagatattctgctgagtggaagtctactgttagcagacttggccgatggattgactttgacaatgactataaaactctgtatccacaattcatggaatcagtctggtgggtcttcaaacaactctatgataaaggccttgtttatagaggtgtgaaagtcatgcccttctctacggcatgtaacactccactttccaacttcgagtcacaccagaattataaggatgttcaagatccttcagtatttgtaactttccctttggaagaagatgaaactgtatctttagttgcttggacaaccactccctggactctacctagtaaccttgctgtgtgtgttaatccagaaatgcaatatgtgaaaattaaagatgttgccagaggacgattactcattttaatggaagccagattgtcagccctctataaattggagagtgactatgagatccttgaaagatttcctggtgcctatcttaaaggcaagaagtacaggcccctgtttgactatttcctgaagtgtaaagagaatggcgctttcactgtgcttgttgacaactatgtgaaggaagaagaaggcacaggggttgtccaccaagctccttacttcggtgctgaggactatcgggtctgtatggactttaacattattcggaaagactcactccctgtttgccctgtggatgcttcaggctgcttcacaacggaggtgacagatttcgcaggacagtatgtgaaggatgctgacaaaagtatcatcaggactttgaaggaacaaggccgacttctggttgccaccaccttcactcacagctaccctttttgctggagatcagacactcctctaatttacaaagcagtgcccagctggtttgtgcgagtggagaacatggtggaccagctcctaaggaacaatgacctgtgctactgggtcccagagttggtacgagaaaaacgatttggaaattggctgaaagatgcacgtgactggacaatttccagaaacagatactggggcacccccatcccactgtgggtcagcgatgactttgaggaggtggtatgcattgggtcagtggcggaacttgaagaactgtcaggagcaaagatctcagatctccacagagagagtgttgaccacctgaccattccttcacgctgtgggaagggatccttgcaccgcatctctgaagtgtttgactgttggtttgagagtggcagcatgccctatgctcaggttcattacccgtttgaaaacaagagggagtttgaggatgcttttcctgcagatttcattgccgagggcatcgaccaaaccagaggatggttttataccctgctggtgctggccacggccctctttggacaaccgcctttcaagaacgtaattgtgaatgggcttgtcctggcaagtgatggccaaaaaatgagcaaacggaaaaagaattatccagatccagtttccatcatccagaagtatggtgctgatgccctcagattatatctgattaactcccctgtggtgagagcagaaaacctccgctttaaagaagagggtgtgcgggacgtccttaaggatgtactgctcccatggtacaatgcctatcgcttcttaatccagaacgttctgaggctccagaaggaggaagaaatagaatttctctacaatgagaacacggttagagaaagccccaacattacagaccggtggatcctgtccttcatgcagtctctcattggcttctttgagactgaaatggcagcttataggctttatactgtggtgcctcgcctggtcaagtttgtagatattctgaccaattggtatgttagaatgaaccgcagaagattaaagggtgaaaatgggatggaggattgtgtcatggccctagaaaccttgtttagtgttctgctttctctttgcagacttatggctccctacacaccttttctcactgaattgatgtaccagaatctaaaggtgctgattgaccctgtttctgttcaggacaaggacacactcagcattcactacctcatgctgccccgtgttcgagaagaattgattgacaagaaaacagagagtgcagtatctcagatgcagtctgtgattgaacttggaagagtgatcagagaccgaaaaactattcccataaagtatcctttgaaagaaattgtggttatccatcaagatccagaagctcttaaagatatcaagtctttggagaagtatatcattgaggaactcaatgttcgaaaagttacactgtctacagataaaaacaagtatggcattcggctaagggcagaaccagatcacatggtcctggggaagcgtctgaagggagcctttaaggcagtgatgacgtccatcaagcagttgagcagtgaggagctggagcagttccagaagactgggaccattgttgtggaaggccatgaattgcacgatgaagacatccgcctcatgtacacctttgatcaggccacaggtgggactgcgcaatttgaagcacactcagatgctcaggctttggtcctcttagatgtcactcctgaccagtcaatggtagatgaaggaatggctcgggaagtcatcaatcgcatacagaaacttcgcaaaaagtgcaatctggttccaactgatgaaatcacagtgtactataaagcaaagtctgaaggaacatatctgaatagtgttattgaaagccacacagagttcatatttaccaccataaaggctcccttgaaaccatatccagtttctccatcggataaagtccttattcaagaaaaaacacagttgaagggatctgaactggaaattacactcaccagaggatcttcccttcctggtcctgcttgtgcatatgtcaatcttaacatttgtgcaaatggcagtgaacaaggtggagtattgctcctggaaaatccaaaaggtgacaataggttggaccttttaaagctgaagagtgttgtcactagcatttttggtgtgaaaaatacagagctggctgtcttccatgatgaaacagaaatacaaaaccaaactgacttactgagtcttagtggaaaaacactttgtgtgactgcaggatcggctccctctctgatcaacagttctagtactcttctttgtcagtatatcaacctacagctcctgaatgcaaagccacaagagtgtttaatggggacagtgggcactctcctgcttgaaaacccacttgggcagaatggactcacccaccaaggtcttctgtatgaagcagccaaggtgtttggccttcggagcaggaagctaaagctgtttctgaatgagacccaaacgcaggaaattacagaagacatccccgtgaagactttgaatatgaagactgtgtatgtttctgtgttaccaacaacagcagacttctagcatgtacttatcaatgttgttcggtcagcccttccctaattacacctatcccctacacatacatgcacatagacacacacatgaacacactgaagatatttccttcaggtgtgtgtaaaatatgctgcttggattgaaattcaaatgggattgattagtcaagtaacttgagacctcacagtaatcttcacacttaaccttagacacctatgcagtcatgttgggagcaggttacaatgttacttcagcccacagtttatttctatacttgagttcttaagtacagaagatagaagtgatttaaatggcatagtatatatatcattttctggccttttaaaatttatttgagacctcttgatgaaatggacatattatatatttctgccacctggattttcctggataatttgatggaatattttaagtttcagtaaatcagaacaataaacaaactcagatataaatgtgttgaaagtaattcattctcccatagataaatgaaacttgaaatgtgtaaactttgaagaacataaaaacttcatggtggtttcttattaagacagtggactagacatctaataaaacttctttccaaaa

SEQ ID NO: 176295 - DNA, 4341 bp, Artificial Sequence
  derived and/or modified sequence
cgcccggttgcagcgtggacgccggatgagttgcttttaggcttgctggcccgcggggctgtccaggcacgcgaggcccctcagcaacaaaatgcttcaacaagttccagaaaacataaattttcctgctgaagaagagaaaatcttggagttttggactgaatttaattgttttcaggaatgcttaaagcaatcaaaacataaaccaaaatttaccttctatgatggtcctccttttgcaactggactgcctcactatggacatatacttgcgggtacaattaaagatatagttacaagatatgctcaccagagtgggtttcatgttgacagaagatttggatgggattgccatggcttacctgtggaatatgaaattgataagacactgggaatcagaggaccagaggatgtggccaaaatggggattacagagtataacaatcagtgccgagcaattgtgatgagatattctgctgagtggaagtctactgttagcagacttggccgatggattgactttgacaatgactataaaactctgtatccacaattcatggaatcagtctggtgggtcttcaaacaactctatgataaaggccttgtttatagaggtgtgaaagtcatgcccttctctacggcatgtaacactccactttccaacttcgagtcacaccagaattataaggatgttcaagatccttcagtatttgtaactttccctttggaagaagatgaaactgtatctttagttgcttggacaaccactccctggactctacctagtaaccttgctgtgtgtgttaatccagaaatgcaatatgtgaaaattaaagatgttgccagaggacgattactcattttaatggaagccagattgtcagccctctataaattggagagtgactatgagatccttgaaagatttcctggtgcctatcttaaaggcaagaagtacaggcccctgtttgactatttcctgaagtgtaaagagaatggcgctttcactgtgcttgttgacaactatgtgaaggaagaagaaggcacaggggttgtccaccaagctccttacttcggtgctgaggactatcgggtctgtatggactttaacattattcggaaagactcactccctgtttgccctgtggatgcttcaggctgcttcacaacggaggtgacagatttcgcaggacagtatgtgaaggatgctgacaaaagtatcatcaggactttgaaggaacaaggccgacttctggttgccaccaccttcactcacagctaccctttttgctggagatcagacactcctctaatttacaaagcagtgcccagctggtttgtgcgagtggagaacatggtggaccagctcctaaggaacaatgacctgtgctactgggtcccagagttggtacgagaaaaacgatttggaaattggctgaaagatgcacgtgactggacaatttccagaaacagatactggggcacccccatcccactgtgggtcagcgatgactttgaggaggtggtatgcattgggtcagtggcggaacttgaagaactgtcaggagcaaagatctcagatctccacagagagagtgttgaccacctgaccattccttcacgctgtgggaagggatccttgcaccgcatctctgaagtgtttgactgttggtttgagagtggcagcatgccctatgctcaggttcattacccgtttgaaaacaagagggagtttgaggatgcttttcctgcagatttcattgccgagggcatcgaccaaaccagaggatggttttataccctgctggtgctggccacggccctctttggacaaccgcctttcaagaacgtaattgtgaatgggcttgtcctggcaagtgatggccaaaaaatgagcaaacggaaaaagaattatccagatccagtttccatcatccagaagtatggtgctgatgccctcagattatatctgattaactcccctgtggtgagagcagaaaacctccgctttaaagaagagggtgtgcgggacgtccttaaggatgtactgctcccatggtacaatgcctatcgcttcttaatccagaacgttctgaggctccagaaggaggaagaaatagaatttctctacaatgagaacacggttagagaaagccccaacattacagaccggtggatcctgtccttcatgcagtctctcattggcttctttgagactgaaatggcagcttataggctttatactgtggtgcctcgcctggtcaagtttgtagatattctgaccaattggtatgttagaatgaaccgcagaagattaaagggtgaaaatgggatggaggattgtgtcatggccctagaaaccttgtttagtgttctgctttctctttgcagacttatggctccctacacaccttttctcactgaattgatgtaccagaatctaaaggtgctgattgaccctgtttctgttcaggacaaggacacactcagcattcactacctcatgctgccccgtgttcgagaagaattgattgacaagaaaacagagagtgcagtatctcagatgcagtctgtgattgaacttggaagagtgatcagagaccgaaaaactattcccataaagtatcctttgaaagaaattgtggttatccatcaagatccagaagctcttaaagatatcaagtctttggagaagtatatcattgaggaactcaatgttcgaaaagttacactgtctacagataaaaacaagtatggcattcggctaagggcagaaccagatcacatggtcctggggaagcgtctgaagggagcctttaaggcagtgatgacgtccatcaagcagttgagcagtgaggagctggagcagttccagaagactgggaccattgttgtggaaggccatgaattgcacgatgaagacatccgcctcatgtacacctttgatcaggccacaggtgggactgcgcaatttgaagcacactcagatgctcaggctttggtcctcttagatgtcactcctgaccagtcaatggtagatgaaggaatggctcgggaagtcatcaatcgcatacagaaacttcgcaaaaagtgcaatctggttccaactgatgaaatcacagtgtactataaagcaaagtctgaaggaacatatctgaatagtgttattgaaagccacacagagttcatatttaccaccataaaggctcccttgaaaccatatccagtttctccatcggataaagtccttattcaagaaaaaacacagttgaagggatctgaactggaaattacactcaccagaggatcttcccttcctggtcctgcttgtgcatatgtcaatcttaacatttgtgcaaatggcagtgaacaaggtggagtattgctcctggaaaatccaaaaggtgacaataggttggaccttttaaagctgaagagtgttgtcactagcatttttggtgtgaaaaatacagagctggctgtcttccatgatgaaacagaaatacaaaaccaaactgacttactgagtcttagtggaaaaacactttgtgtgactgcaggatcggctccctctctgatcaacagttctagtactcttctttgtcagtatatcaacctacagctcctgaatgcaaagccacaagagtgtttaatggggacagtgggcactctcctgcttgaaaacccacttgggcagaatggactcacccaccaaggtcttctgtatgaagcagccaaggtgtttggccttcggagcaggaagctaaagctgtttctgaatgagacccaaacgcaggaaattacagaagacatcccgtgaagactttgaatatgaagactgtgtatgtttctgtgttaccaacaacagcagacttctagcatgtacttatcaatgttgttcggtcagcccttccctaattacacctatcccctacacatacatgcacatagacacacacatgaacacactgaagatatttccttcaggtgtgtgtaaaatatgctgcttggattgaaattcaaatgggattgattagtcaagtaacttgagacctcacagtaatcttcacacttaaccttagacacctatgcagtcatgttgggagcaggttacaatgttacttcagcccacagtttatttctatacttgagttcttaagtacagaagatagaagtgatttaaatggcatagtatatatatcattttctggccttttaaaatttatttgagacctcttgatgaaatggacatattatatatttctgccacctggattttcctggataatttgatggaatattttaagtttcagtaaatcagaacaataaacaaactcagat

SEQ ID NO: 176296 - DNA, 1103 bp, Artificial Sequence
  derived and/or modified sequence
agcgcgttgcatcacctccgtgcgcccggttgcagcgtggacgccggatgagttgcttttaggcttgctggcccgcggggctgtccaggcacgcgaggcccctcagcaacaaaatgcttcaacaagttccagaaaacataaattttcctgctgaagaagagaaaatcttggagttttggactgaatttaattgttttcaggaatgcttaaagcaatcaaaacataaaccaaaatttaccttctatgatggtcctccttttgcaactggactgcctcactatggacatatacttgcgggtacaattaaagatatagttacaagatatgctcaccagagtgggtttcatgttgacagaagatttggatgggattgccatggcttacctgtggaatatgaaattgataagacactgggaatcagaggaccagaggatgtggccaaaatggggattacagagtataacaatcagtgccgagcaattgtgatgagatattctgctgagtggaagtctactgttagcagacttggccgatggattgactttgacaatgactataaaactctgtatccacaattcatggaatcagtctggtgggtcttcaaacaactctatgataaaggccttgtttatagaggtgtgaaagtcatgcccttctctacggcatgtaacactccactttccaacttcgagtcacaccagaattataaggatgttcaagatccttcagtatttgtaactttccctttggaagaagatgaaactgtatctttagttgcttggacaaccactccctggactctacctagtaaccttgctgtgtgtgttaatccagaaatgcaatatgtgaaaattaaagatgttgccagaggacgattactcattttaatggaagccagattgtcagccctctataaattggagagtgactatgagatccttgaaagatttcctggtgcctatcttaaaggcaagaagtacaggcccctgtttgactatttcctgaagtgtaaagagaatggcgctttcactgtgcttgttgacaactatgtgaaggaagaagaaggcacaggggttgtccaccaagctccttacttcggtgct

SEQ ID NO: 176297 - DNA, 583 bp, Artificial Sequence
  derived and/or modified sequence
ggacgccggatgagttgcttttaggcttgctggcccgcggggctgtccaggcacgcgaggcccctcagacttatggctccctacacaccttttctcactgaattgatgtaccagaatctaaaggtgctgattgaccctgtttctgttcaggacaaggacacactcagcattcactacctcatgctgccccgtgttcgagaagaattgattgacaagaaaacagagagtgcagtatctcagatgcagtctgtgattgaacttggaagagtgatcagagaccgaaaaactattcccataaagttgaagggatctgaactggaaattacactcaccagaggatcttcccttcctggtcctgcttgtgcatatgtcaatcttaacatttgtgcaaatggcagtgaacaaggtggagtattgctcctggaaaatccaaaaggtgacaataggttggaccttttaaagctgaagagtgttgtcactagcatttttggtgtgaaaaatacagagctggctgtcttccatgatgaaacagaaatacaaaaccaaactgacttactgagtcttagtggaaaaacactttgtg

SEQ ID NO: 176298 - DNA, 4406 bp, Artificial Sequence
  derived and/or modified sequence
cggtgcggagcctgtctccttcactggatcccgcattttcagcgcgttgcatcacctccgtgcgcccggttgcagcgtggacgccggatgagttgcttttaggcttgctggcccgcggggctgtccaggcacgcgaggcccctcagcaacaaaatgcttcaacaagttccagaaaacataaattttcctgctgaagaagagaaaatcttggagttttggactgaatttaattgttttcaggaatgcttaaagcaatcaaaacataaaccaaaatttaccttctatgatggtcctccttttgcaactggactgcctcactatggacatatacttgcgggtacaattaaagatatagttacaagatatgctcaccagagtgggtttcatgttgacagaagatttggatgggattgccatggcttacctgtggaatatgaaattgataagacactgggaatcagaggaccagaggatgtggccaaaatggggattacagagtataacaatcagtgccgagcaattgtgatgagatattctgctgagtggaagtctactgttagcagacttggccgatggattgactttgacaatgactataaaactctgtatccacaattcatggaatcagtctggtgggtcttcaaacaactctatgataaaggccttgtttatagaggtgtgaaagtcatgcccttctctacggcatgtaacactccactttccaacttcgagtcacaccagaattataaggatgttcaagatccttcagtatttgtaactttccctttggaagaagatgaaactgtatctttagttgcttggacaaccactccctggactctacctagtaaccttgctgtgtgtgttaatccagaaatgcaatatgtgaaaattaaagatgttgccagaggacgattactcattttaatggaagccagattgtcagccctctataaattggagagtgactatgagatccttgaaagatttcctggtgcctatcttaaaggcaagaagtacaggcccctgtttgactatttcctgaagtgtaaagagaatggcgctttcactgtgcttgttgacaactatgtgaaggaagaagaaggcacaggggttgtccaccaagctccttacttcggtgctgaggactatcgggtctgtatggactttaacattattcggaaagactcactccctgtttgccctgtggatgcttcaggctgcttcacaacggaggtgacagatttcgcaggacagtatgtgaaggatgctgacaaaagtatcatcaggactttgaaggaacaaggccgacttctggttgccaccaccttcactcacagctaccctttttgctggagatcagacactcctctaatttacaaagcagtgcccagctggtttgtgcgagtggagaacatggtggaccagctcctaaggaacaatgacctgtgctactgggtcccagagttggtacgagaaaaacgatttggaaattggctgaaagatgcacgtgactggacaatttccagaaacagatactggggcacccccatcccactgtgggtcagcgatgactttgaggaggtggtatgcattgggtcagtggcggaacttgaagaactgtcaggagcaaagatctcagatctccacagagagagtgttgaccacctgaccattccttcacgctgtgggaagggatccttgcaccgcatctctgaagtgtttgactgttggtttgagagtggcagcatgccctatgctcaggttcattacccgtttgaaaacaagagggagtttgaggatgcttttcctgcagatttcattgccgagggcatcgaccaaaccagaggatggttttataccctgctggtgctggccacggccctctttggacaaccgcctttcaagaacgtaattgtgaatgggcttgtcctggcaagtgatggccaaaaaatgagcaaacggaaaaagaattatccagatccagtttccatcatccagaagtatggtgctgatgccctcagattatatctgattaactcccctgtggtgagagcagaaaacctccgctttaaagaagagggtgtgcgggacgtccttaaggatgtactgctcccatggtacaatgcctatcgcttcttaatccagaacgttctgaggctccagaaggaggaagaaatagaatttctctacaatgagaacacggttagagaaagccccaacattacagaccggtggatcctgtccttcatgcagtctctcattggcttctttgagactgaaatggcagcttataggctttatactgtggtgcctcgcctggtcaagtttgtagatattctgaccaattggtatgttagaatgaaccgcagaagattaaagggtgaaaatgggatggaggattgtgtcatggccctagaaaccttgtttagtgttctgctttctctttgcagacttatggctccctacacaccttttctcactgaattgatgtaccagaatctaaaggtgctgattgaccctgtttctgttcaggacaaggacacactcagcattcactacctcatgctgccccgtgttcgagaagaattgattgacaagaaaacagagagtgcagtatctcagatgcagtctgtgattgaacttggaagagtgatcagagaccgaaaaactattcccataaagtatcctttgaaagaaattgtggttatccatcaagatccagaagctcttaaagatatcaagtctttggagaagtatatcattgaggaactcaatgttcgaaaagttacactgtctacagataaaaacaagtatggcattcggctaagggcagaaccagatcacatggtcctggggaagcgtctgaagggagcctttaaggcagtgatgacgtccatcaagcagttgagcagtgaggagctggagcagttccagaagactgggaccattgttgtggaaggccatgaattgcacgatgaagacatccgcctcatgtacacctttgatcaggccacaggtgggactgcgcaatttgaagcacactcagatgctcaggctttggtcctcttagatgtcactcctgaccagtcaatggtagatgaaggaatggctcgggaagtcatcaatcgcatacagaaacttcgcaaaaagtgcaatctggttccaactgatgaaatcacagtgtactataaagcaaagtctgaaggaacatatctgaatagtgttattgaaagccacacagagttcatatttaccaccataaaggctcccttgaaaccatatccagtttctccatcggataaagtccttattcaagaaaaaacacagttgaagggatctgaactggaaattacactcaccagaggatcttcccttcctggtcctgcttgtgcatatgtcaatcttaacatttgtgcaaatggcagtgaacaaggtggagtattgctcctggaaaatccaaaaggtgacaataggttggaccttttaaagctgaagagtgttgtcactagcatttttggtgtgaaaaatacagagctggctgtcttccatgatgaaacagaaatacaaaaccaaactgacttactgagtcttagtggaaaaacactttgtgtgactgcaggatcggctccctctctgatcaacagttctagtactcttctttgtcagtatatcaacctacagctcctgaatgcaaagccacaagagtgtttaatggggacagtgggcactctcctgcttgaaaacccacttgggcagaatggactcacccaccaaggtcttctgtatgaagcagccaaggtgtttggccttcggagcaggaagctaaagctgtttctgaatgagacccaaacgcaggaaattacagaagacatccccgtgaagactttgaatatgaagactgtgtatgtttctgtgttaccaacaacagcagacttctagcatgtacttatcaatgttgttcggtcagcccttccctaattacacctatcccctacacatacatgcacatagacacacacatgaacacactgaagatatttccttcaggtgtgtgtaaaatatgctgcttggattgaaattcaaatgggattgattagtcaagtaacttgagacctcacagtaatcttcacacttaaccttagacacctatgcagtcatgttgggagcaggttacaatgttacttcagcccacagtttatttctatacttgagttcttaagtacagaagatagaagtgatttaaatggcatagtatatatatcattttctggccttttaaaatttatttgagacctcttgatgaaatggacatattatatatttctgccacctggattttcctggataatttgatggaatattttaagtttcagtaaatcagaacaataaacaaactcagatat

SEQ ID NO: 176299 - DNA, 4186 bp, Artificial Sequence
  derived and/or modified sequence
gcgcccggttgcagcgtggacgccggatgagttgcttttaggcttgctggcccgcggggctgtccaggcacgcgaggcccctcagcaacaaaatgcttcaacaagttccagaaaacataaattttcctgctgaagaagagaaaatcttggagttttggactgaatttaattgttttcaggaatgcttaaagcaatcaaaacataaaccaaagaatatgaaattgataagacactgggaatcagaggaccagaggatgtggccaaaatggggattacagagtataacaatcagtgccgagcaattgtgatgagatattctgctgagtggaagtctactgttagcagacttggccgatggattgactttgacaatgactataaaactctgtatccacaattcatggaatcagtctggtgggtcttcaaacaactctatgataaaggccttgtttatagaggtgtgaaagtcatgcccttctctacggcatgtaacactccactttccaacttcgagtcacaccagaattataaggatgttcaagatccttcagtatttgtaactttccctttggaagaagatgaaactgtatctttagttgcttggacaaccactccctggactctacctagtaaccttgctgtgtgtgttaatccagaaatgcaatatgtgaaaattaaagatgttgccagaggacgattactcattttaatggaagccagattgtcagccctctataaattggagagtgactatgagatccttgaaagatttcctggtgcctatcttaaaggcaagaagtacaggcccctgtttgactatttcctgaagtgtaaagagaatggcgctttcactgtgcttgttgacaactatgtgaaggaagaagaaggcacaggggttgtccaccaagctccttacttcggtgctgaggactatcgggtctgtatggactttaacattattcggaaagactcactccctgtttgccctgtggatgcttcaggctgcttcacaacggaggtgacagatttcgcaggacagtatgtgaaggatgctgacaaaagtatcatcaggactttgaaggaacaaggccgacttctggttgccaccaccttcactcacagctaccctttttgctggagatcagacactcctctaatttacaaagcagtgcccagctggtttgtgcgagtggagaacatggtggaccagctcctaaggaacaatgacctgtgctactgggtcccagagttggtacgagaaaaacgatttggaaattggctgaaagatgcacgtgactggacaatttccagaaacagatactggggcacccccatcccactgtgggtcagcgatgactttgaggaggtggtatgcattgggtcagtggcggaacttgaagaactgtcaggagcaaagatctcagatctccacagagagagtgttgaccacctgaccattccttcacgctgtgggaagggatccttgcaccgcatctctgaagtgtttgactgttggtttgagagtggcagcatgccctatgctcaggttcattacccgtttgaaaacaagagggagtttgaggatgcttttcctgcagatttcattgccgagggcatcgaccaaaccagaggatggttttataccctgctggtgctggccacggccctctttggacaaccgcctttcaagaacgtaattgtgaatgggcttgtcctggcaagtgatggccaaaaaatgagcaaacggaaaaagaattatccagatccagtttccatcatccagaagtatggtgctgatgccctcagattatatctgattaactcccctgtggtgagagcagaaaacctccgctttaaagaagagggtgtgcgggacgtccttaaggatgtactgctcccatggtacaatgcctatcgcttcttaatccagaacgttctgaggctccagaaggaggaagaaatagaatttctctacaatgagaacacggttagagaaagccccaacattacagaccggtggatcctgtccttcatgcagtctctcattggcttctttgagactgaaatggcagcttataggctttatactgtggtgcctcgcctggtcaagtttgtagatattctgaccaattggtatgttagaatgaaccgcagaagattaaagggtgaaaatgggatggaggattgtgtcatggccctagaaaccttgtttagtgttctgctttctctttgcagacttatggctccctacacaccttttctcactgaattgatgtaccagaatctaaaggtgctgattgaccctgtttctgttcaggacaaggacacactcagcattcactacctcatgctgccccgtgttcgagaagaattgattgacaagaaaacagagagtgcagtatctcagatgcagtctgtgattgaacttggaagagtgatcagagaccgaaaaactattcccataaagtatcctttgaaagaaattgtggttatccatcaagatccagaagctcttaaagatatcaagtctttggagaagtatatcattgaggaactcaatgttcgaaaagttacactgtctacagataaaaacaagtatggcattcggctaagggcagaaccagatcacatggtcctggggaagcgtctgaagggagcctttaaggcagtgatgacgtccatcaagcagttgagcagtgaggagctggagcagttccagaagactgggaccattgttgtggaaggccatgaattgcacgatgaagacatccgcctcatgtacacctttgatcaggccacaggtgggactgcgcaatttgaagcacactcagatgctcaggctttggtcctcttagatgtcactcctgaccagtcaatggtagatgaaggaatggctcgggaagtcatcaatcgcatacagaaacttcgcaaaaagtgcaatctggttccaactgatgaaatcacagtgtactataaagcaaagtctgaaggaacatatctgaatagtgttattgaaagccacacagagttcatatttaccaccataaaggctcccttgaaaccatatccagtttctccatcggataaagtccttattcaagaaaaaacacagttgaagggatctgaactggaaattacactcaccagaggatcttcccttcctggtcctgcttgtgcatatgtcaatcttaacatttgtgcaaatggcagtgaacaaggtggagtattgctcctggaaaatccaaaaggtgacaataggttggaccttttaaagctgaagagtgttgtcactagcatttttggtgtgaaaaatacagagctggctgtcttccatgatgaaacagaaatacaaaaccaaactgacttactgagtcttagtggaaaaacactttgtgtgactgcaggatcggctccctctctgatcaacagttctagtactcttctttgtcagtatatcaacctacagctcctgaatgcaaagccacaagagtgtttaatggggacagtgggcactctcctgcttgaaaacccacttgggcagaatggactcacccaccaaggtcttctgtatgaagcagccaaggtgtttggccttcggagcaggaagctaaagctgtttctgaatgagacccaaacgcaggaaattacagaagacatccccgtgaagactttgaatatgaagactgtgtatgtttctgtgttaccaacaacagcagacttctagcatgtacttatcaatgttgttcggtcagcccttccctaattacacctatcccctacacatacatgcacatagacacacacatgaacacactgaagatatttccttcaggtgtgtgtaaaatatgctgcttggattgaaattcaaatgggattgattagtcaagtaacttgagacctcacagtaatcttcacacttaaccttagacacctatgcagtcatgttgggagcaggttacaatgttacttcagcccacagtttatttctatacttgagttcttaagtacagaagatagaagtgatttaaatggcatagtatatatatcattttctggccttttaaaatttatttgagacctcttgatgaaatggacatattatatatttctgccacctggattttcctggataatttgatggaatattttaagtttcagtaaatcagaacaataaacaaactcagat

SEQ ID NO: 176300 - DNA, 854 bp, Artificial Sequence
  derived and/or modified sequence
aagagaatggcgctttcactgtgcttgttgacaactatgtgaaggaagaagaaggcacaggggttgtccaccaagctccttacttcggtgctgaggactatcggacttatggctccctacacaccttttctcactgaattgatgtaccagaatctaaaggtgctgattgaccctgtttctgttcaggacaaggacacactcagcattcactacctcatgctgccccgtgttcgagaagaattgattgacaagaaaacagagagtgcagtatctcagatgcagtctgtgattgaacttggaagagtgatcagagaccgaaaaactattcccataaagtatcctttgaaagaaattgtggttatccatcaagatccagaagctcttaaagatatcaagtctttggagaagtatatcattgaggaactcaatgttcgaaaagttacactgtctacagataaaaacaagtatggcattcggctaagggcagaaccagatcacatggtcctggggaagcgtctgaagggagcctttaaggcagtgatgacgtccatcaagcagttgagcagtgaggagctggagcagttccagaagactgggaccattgttgtggaaggccatgaattgcacgatgaagacatccgcctcatgtacacctttgatcaggccacaggtgggactgcgcaatttgaagcacactcagatgctcaggctttggtcctcttagatgtcactcctgaccagtcaatggtagatgaaggaatggctcgggaagtcatcaatcgcatacagaaacttcgcaaaaagtgcaatctggttccaactgatgaaatcacagtgtactataaagcaaagtc

SEQ ID NO: 176301 - DNA, 3688 bp, Artificial Sequence
  derived and/or modified sequence
agcgtggacgccggatgagttgcttttaggcttgctggcccgcggggctgtccaggcacgcgaggcccctcagcaacaaaatgcttcaacaagttccagaaaacataaattttcctgctgaagaagagaaaatcttggagttttggactgaatttaattgttttcaggaatgcttaaagcaatcaaaacataaaccaaaatttaccttctatgatggtcctccttttgcaactggactgcctcactatggacatatacttgcgggtacaattaaagatatagttacaagatatgctcaccagagtgggtttcatgttgacagaagatttggatgggattgccatggcttacctgtggaatatgaaattgataagacactgggaatcagaggaccagaggatgtggccaaaatggggattacagagtataacaatcagtgccgagcaattgtgatgagatattctgctgagtggaagtctactgttagcagacttggccgatggattgactttgacaatgactataaaactctgtatccacaattcatggaatcagtctggtgggtcttcaaacaactctatgataaaggccttgtttatagaggtgtgaaagtcatgcccttctctacggcatgtaacactccactttccaacttcgagtcacaccagaattataaggatgttcaagatccttcagtatttgtaactttccctttggaagaagatgaaactgtatctttagttgcttggacaaccactccctggactctacctagtaaccttgctgtgtgtgttaatccagaaatgcaatatgtgaaaattaaagatgttgccagaggacgattactcattttaatggaagccagattgtcagccctctataaattggagagtgactatgagatccttgaaagatttcctggtgcctatcttaaaggcaagaagtacaggcccctgtttgactatttcctgaagtgtaaagagaatggcgctttcactgtgcttgttgacaactatgtgaaggaagaagaaggcacaggggttgtccaccaagctccttacttcggtgctgaggactatcgggtctgtatggactttaacattattcggaaagactcactccctgtttgccctgtggatgcttcaggctgcttcacaacggaggtgacagatttcgcaggacagtatgtgaaggatgctgacaaaagtatcatcaggactttgaaggaacaaggccgacttctggttgccaccaccttcactcacagctaccctttttgctggagatcagacactcctctaatttacaaagcagtgcccagctggtttgtgcgagtggagaacatggtggaccagctcctaaggaacaatgacctgtgctactgggtcccagagttggtacgagaaaaacgatttggaaattggctgaaagatgcacgtgactggacaatttccagaaacagatactggggcacccccatcccactgtgggtcagcgatgactttgaggaggtggtatgcattgggtcagtggcggaacttgaagaactgtcaggagcaaagatctcagatctccacagagagagtgttgaccacctgaccattccttcacgctgtgggaagggatccttgcaccgcatctctgaagtgtttgactgttggtttgagagtggcagcatgccctatgctcaggttcattacccgtttgaaaacaagagggagtttgaggatgcttttcctgcagatttcattgccgagggcatcgaccaaaccagaggatggttttataccctgctggtgctggccacggccctctttggacaaccgcctttcaagaacgtaattgtgaatgggcttgtcctggcaagtgatggccaaaaaatgagcaaacggaaaaagaattatccagatccagtttccatcatccagaagtatggtgctgatgccctcagattatatctgattaactcccctgtggtgagagcagaaaacctccgctttaaagaagagggtgtgcgggacgtccttaaggatgtactgctcccatggtacaatgcctatcgcttcttaatccagaacgttctgaggctccagaaggaggaagaaatagaatttctctacaatgagaacacggttagagaaagccccaacattacagaccggtggatcctgtccttcatgcagtctctcattggcttctttgagactgaaatggcagcttataggctttatactgtggtgcctcgcctggtcaagtttgtagatattctgaccaattggtatgttagaatgaaccgcagaagattaaagggtgaaaatgggatggaggattgtgtcatggccctagaaaccttgtttagtgttctgctttctctttgcagacttatggctccctacacaccttttctcactgaattgatgtaccagaatctaaaggtgctgattgaccctgtttctgttcaggacaaggacacactcagcattcactacctcatgctgccccgtgttcgagaagaattgattgacaagaaaacagagagtgcagtatctcagatgcagtctgtgattgaacttggaagagtgatcagagaccgaaaaactattcccataaagttgaagggatctgaactggaaattacactcaccagaggatcttcccttcctggtcctgcttgtgcatatgtcaatcttaacatttgtgcaaatggcagtgaacaaggtggagtattgctcctggaaaatccaaaaggtgacaataggttggaccttttaaagctgaagagtgttgtcactagcatttttggtgtgaaaaatacagagctggctgtcttccatgatgaaacagaaatacaaaaccaaactgacttactgagtcttagtggaaaaacactttgtgtgactgcaggatcggctccctctctgatcaacagttctagtactcttctttgtcagtatatcaacctacagctcctgaatgcaaagccacaagagtgtttaatggggacagtgggcactctcctgcttgaaaacccacttgggcagaatggactcacccaccaaggtcttctgtatgaagcagccaaggtgtttggccttcggagcaggaagctaaagctgtttctgaatgagacccaaacgcaggaaattacagaagacatccccgtgaagactttgaatatgaagactgtgtatgtttctgtgttaccaacaacagcagacttctagcatgtacttatcaatgttgttcggtcagcccttccctaattacacctatcccctacacatacatgcacatagacacacacatgaacacactgaagatatttccttcaggtgtgtgtaaaatatgctgcttggattgaaattcaaatgggattgattagtcaagtaacttgagacctcacagtaatcttcacacttaaccttagacacctatgcagtcatgttgggagcaggttacaatgttacttcagcccacagtttatttctatacttgagttcttaagtacagaagatagaagtgatttaaatggcatagtatatatatcattttctggccttttaaaatttatttgagacctcttgatgaaatggacatattatatatttctgccacctggattttcctggataatttgatggaatattttaagtttcagtaaatcagaacaataaacaaactcagatat

SEQ ID NO: 176302 - DNA, 1280 bp, Artificial Sequence
  derived and/or modified sequence
atgatggtcctccttttgcaactggactgcctcactatggacatatacttgcgggacaaggacacactcagcattcactacctcatgctgccccgtgttcgagaagaattgattgacaagaaaacagagagtgcagtatctcagatgcagtctgtgattgaacttggaagagtgatcagagaccgaaaaactattcccataaagttgaagggatctgaactggaaattacactcaccagaggatcttcccttcctggtcctgcttgtgcatatgtcaatcttaacatttgtgcaaatggcagtgaacaaggtggagtattgctcctggaaaatccaaaaggtgacaataggttggaccttttaaagctgaagagtgttgtcactagcatttttggtgtgaaaaatacagagctggctgtcttccatgatgaaacagaaatacaaaaccaaactgacttactgagtcttagtggaaaaacactttgtgtgactgcaggatcggctccctctctgatcaacagttctagtactcttctttgtcagtatatcaacctacagctcctgaatgcaaagccacaagagtgtttaatggggacagtgggcactctcctgcttgaaaacccacttgggcagaatggactcacccaccaaggtcttctgtatgaagcagccaaggtgtttggccttcggagcaggaagctaaagctgtttctgaatgagacccaaacgcaggaaattacagaagacatccccgtgaagactttgaatatgaagactgtgtatgtttctgtgttaccaacaacagcagacttctagcatgtacttatcaatgttgttcggtcagcccttccctaattacacctatcccctacacatacatgcacatagacacacacatgaacacactgaagatatttccttcaggtgtgtgtaaaatatgctgcttggattgaaattcaaatgggattgattagtcaagtaacttgagacctcacagtaatcttcacacttaaccttagacacctatgcagtcatgttgggagcaggttacaatgttacttcagcccacagtttatttctatacttgagttcttaagtacagaagatagaagtgatttaaatggcatagtatatatatcattttctggccttttaaaatttatttgagacctcttgatgaaatggacatattatatatttctgccacctggattttcctggataatttgatggaatattttaagtttcagtaaatcagaacaataaacaaactcagatat

SEQ ID NO: 176303 - DNA, 525 bp, Artificial Sequence
  derived and/or modified sequence
atgtacacctttgaccaggccaccggcggcacagcccagtttgaggcccacagtgatgcccaggccctggtgctgctggatgtgaccccagaccagagcatggtggatgagggcatggcccgggaggtgatcaaccgcatccagaagctgaggaagaagtgcaacctggtgcccacagatgagatcaccgtgtactacaaggccaagtctgagggcacctacctgaacagcgtgattgagagccacacagagttcatcttcaccaccatcaaggcccccctgaagccctaccctgtgagccccagcgacaaggtgctgatccaggagaagacccagctgaagggcagcgagctggagatcaccctgacccggggcagcagcctgcccggccctgcctgtgcctacgtgaacctgaacatctgtgccaatggaagtgagcagggcgagatgcagtggatcatccctgagatctaccacttctggaagccccgctggagcatcgcccctgggaagagcaagaggtag

SEQ ID NO: 176304 - DNA, 3789 bp, Artificial Sequence
  derived and/or modified sequence
atgctgcagcaggtgcctgagaacatcaacttccctgctgaggaggagaagatcctggagttctggacagagttcaactgcttccaggagtgcctgaagcagagcaagcacaagcccaagttcaccttctatgatggccccccatttgccaccggcctgccccactacggccacatcctggccggcaccatcaaggacatcgtgaccaggtatgcccaccagagcggcttccacgtggacagaagatttggctgggactgccacggcctgcctgtggagtatgaaattgacaagaccctgggcatccggggcccagaagatgtggccaagatgggcatcacagagtacaacaaccagtgccgggccatcgtgatgagatacagcgctgagtggaagagcacagtgtcccggctgggccgctggattgactttgacaatgactacaagaccctgtacccccagttcatggagagcgtgtggtgggtgttcaagcagctgtatgacaagggcctggtgtacagaggagtgaaggtgatgcccttcagcacagcctgcaacacccccctgagcaactttgagagccaccagaactacaaggatgtgcaggaccccagcgtgtttgtgaccttccccctggaggaggatgaaacagtgtccctggtggcctggaccaccaccccctggaccctgcccagcaacctggccgtgtgtgtgaaccctgagatgcagtatgtgaagatcaaggatgtggcccggggccgcctgctgatcctgatggaggcccggctgagcgccctgtacaagctggagagtgactatgagatcctggagcgcttccctggggcctacctgaagggcaagaagtaccggcccctgtttgactacttcctgaagtgcaaggaaaatggagccttcaccgtgctggtggacaactacgtgaaggaggaggagggcactggagtggtgcaccaggccccctactttggagctgaggactacagagtgtgcatggacttcaacatcatcaggaaggacagcctgcctgtgtgccctgtggatgccagcggctgcttcaccacagaggtgacagactttgctggccagtatgtgaaggatgctgacaagagcatcatccgcaccctgaaggagcagggccgcctgctggtggccaccaccttcacccacagctaccccttctgctggaggagtgacacccccctcatctacaaggctgtgcccagctggtttgtgcgggtggagaacatggtggaccagctgctgaggaacaatgacctgtgctactgggtgcctgagctggtgcgggagaagagatttggaaactggctgaaggatgcccgggactggaccatcagcaggaaccgctactggggcacccccatccccctgtgggtgtctgatgactttgaggaggtggtgtgcatcggctctgtggccgagctggaggagctgagcggggccaagatcagtgacctgcaccgggagagcgtggaccacctgaccatccccagccgctgtgggaagggcagcctgcaccgcatcagcgaggtgtttgactgctggtttgagagcggctccatgccctatgcccaggtgcactacccctttgagaacaagcgggagtttgaagatgccttccctgctgacttcatcgccgagggcatcgaccagacccggggctggttctacaccctgctggtgctggccacagccctgtttggccagccccccttcaagaatgtcatcgtgaatggcctggtgctggccagtgatggccagaagatgagcaagaggaagaagaactacccagaccctgtgtccatcatccagaagtacggggctgatgccctgcggctgtacctgatcaacagccctgtggtgcgggcagagaacctgcgcttcaaggaggagggcgtgagagatgtgctgaaggatgtgctgctgccctggtacaatgcctaccgcttcctgatccagaatgtgctgcggctgcagaaggaggaggagattgagttcctgtacaatgaaaatacagtgcgggagagccccaacatcacagaccgctggatcctgtccttcatgcagagcctcatcggcttctttgaaacagagatggccgcctaccgcctgtacacagtggtgccccggctggtgaagtttgtggacatcctgaccaactggtacgtgaggatgaacagaagaaggctgaagggagaaaatggcatggaggactgtgtgatggccctggagaccctcttctctgtgctgctgagcctgtgccgcctgatggccccctacacccccttcctgacagagctgatgtaccagaacctgaaggtgctgattgatcctgtgtctgtgcaggacaaggacaccctgagcatccactacctgatgctgccccgggtgcgggaggagctgattgacaagaagacagagagcgctgtgtcccagatgcagagcgtgattgagctgggccgggtcatccgggacaggaagaccatccccatcaagtaccccctgaaggagatcgtggtgatccaccaggaccctgaggccctgaaggacatcaagagcctggagaagtacatcatcgaggagctgaatgtgaggaaggtgaccctgagcacagacaagaacaagtatggcatccggctgcgggcagagccagaccacatggtgctgggcaagaggctgaagggggccttcaaggctgtgatgaccagcatcaagcagctgagcagcgaggagctggagcagttccagaagacaggcaccatcgtggtggagggccacgagctgcatgatgaggacatccggctgatgtacacctttgaccaggccactggaggaacagcccagtttgaggcccacagtgatgcccaggccctggtgctgctggatgtgaccccagaccagagcatggtggatgagggcatggcccgggaggtgatcaaccgcatccagaagctgaggaagaagtgcaacctggtgcccacagatgagatcaccgtgtactacaaggccaagtctgagggcacctacctgaacagcgtcatcgagagccacacagagttcatcttcaccaccatcaaggcccccctgaagccctaccctgtgagccccagcgacaaggtgctgatccaggagaagacccagctgaagggcagcgagctggagatcaccctgacccggggcagcagcctgcccggccctgcctgtgcctacgtgaacctgaacatctgtgccaacggcagcgagcagggcggcgtgctgctgctggagaaccccaagggggacaaccggctggacctgctgaagctgaagtctgtggtgaccagcatcttcggcgtgaagaacacagagctggccgtgttccatgatgaaacagagatccagaaccagacagacctgctgagcctgagcggcaagaccctgtgtgtgacagctggcagcgcccccagcctcatcaacagcagcagcaccctgctgtgccagtacatcaacctgcagctgctgaatgccaagccccaggagtgcctgatgggcaccgtgggcaccctgctgctggagaaccccctgggccagaatggcctgacccaccagggcctgctgtatgaggccgccaaggtgtttggcctgcggagcaggaagctgaagctgttcctgaatgagacccagacccaggagatcacagaggacatccctgtgaagaccctgaacatgaagacagtgtatgtgtctgtgctgcccaccacagctgacttctag

SEQ ID NO: 176305 - DNA, 3729 bp, Artificial Sequence
  derived and/or modified sequence
atgctgcagcaggtgcctgagaacatcaacttccctgctgaggaggagaagatcctggagttctggacagagttcaactgcttccaggagtgcctgaagcagagcaagcacaagcccaagttcaccttctatgatggccccccatttgccaccggcctgccccactacggccacatcctggccggcaccatcaaggacatcgtgaccaggtatgcccaccagagcggcttccacgtggacagaagatttggctgggactgccacggcctgcctgtggagtatgaaattgacaagaccctgggcatccggggcccagaagatgtggccaagatgggcatcacagagtacaacaaccagtgccgggccatcgtgatgagatacagcgctgagtggaagagcacagtgtcccggctgggccgctggattgactttgacaatgactacaagaccctgtacccccagttcatggagagcgtgtggtgggtgttcaagcagctgtatgacaagggcctggtgtacagaggagtgaaggtgatgcccttcagcacagcctgcaacacccccctgagcaactttgagagccaccagaactacaaggatgtgcaggaccccagcgtgtttgtgaccttccccctggaggaggatgaaacagtgtccctggtggcctggaccaccaccccctggaccctgcccagcaacctggccgtgtgtgtgaaccctgagatgcagtatgtgaagatcaaggatgtggcccggggccgcctgctgatcctgatggaggcccggctgagcgccctgtacaagctggagagtgactatgagatcctggagcgcttccctggggcctacctgaagggcaagaagtaccggcccctgtttgactacttcctgaagtgcaaggaaaatggagccttcaccgtgctggtggacaactacgtgaaggaggaggagggcactggagtggtgcaccaggccccctactttggagctgaggactacagagtgtgcatggacttcaacatcatcaggaaggacagcctgcctgtgtgccctgtggatgccagcggctgcttcaccacagaggtgacagactttgctggccagtatgtgaaggatgctgacaagagcatcatccgcaccctgaaggagcagggccgcctgctggtggccaccaccttcacccacagctaccccttctgctggaggagtgacacccccctcatctacaaggctgtgcccagctggtttgtgcgggtggagaacatggtggaccagctgctgaggaacaatgacctgtgctactgggtgcctgagctggtgcgggagaagagatttggaaactggctgaaggatgcccgggactggaccatcagcaggaaccgctactggggcacccccatccccctgtgggtgtctgatgactttgaggaggtggtgtgcatcggctctgtggccgagctggaggagctgagcggggccaagatcagtgacctgcaccgggagagcgtggaccacctgaccatccccagccgctgtgggaagggcagcctgcaccgcatcagcgaggtgtttgactgctggtttgagagcggctccatgccctatgcccaggtgcactacccctttgagaacaagcgggagtttgaagatgccttccctgctgacttcatcgccgagggcatcgaccagacccggggctggttctacaccctgctggtgctggccacagccctgtttggccagccccccttcaagaatgtcatcgtgaatggcctggtgctggccagtgatggccagaagatgagcaagaggaagaagaactacccagaccctgtgtccatcatccagaagtacggggctgatgccctgcggctgtacctgatcaacagccctgtggtgcgggcagagaacctgcgcttcaaggaggagggcgtgagagatgtgctgaaggatgtgctgctgccctggtacaatgcctaccgcttcctgatccagaatgtgctgcggctgcagaaggaggaggagattgagttcctgtacaatgaaaatacagtgcgggagagccccaacatcacagaccgctggatcctgtccttcatgcagagcctcatcggcttctttgaaacagagatggccgcctaccgcctgtacacagtggtgccccggctggtgaagtttgtggacatcctgaccaactggtacgtgaggatgaacagaagaaggctgaagggagaaaatggcatggaggactgtgtgatggccctggagaccctcttctctgtgctgctgagcctgtgccgcctgatggccccctacacccccttcctgacagagctgatgtaccagaacctgaaggtgctgattgatcctgtgtctgtgcaggacaaggacaccctgagcatccactacctgatgctgccccgggtgcgggaggagctgattgacaagaagacagagagcgctgtgtcccagatgcagagcgtgattgagctgggccgggtcatccgggacaggaagaccatccccatcaagtaccccctgaaggagatcgtggtgatccaccaggaccctgaggccctgaaggacatcaagagcctggagaagtacatcatcgaggagctgaatgtgaggaaggtgaccctgagcacagacaagaacaagtatggcatccggctgcgggcagagccagaccacatggtgctgggcaagaggctgaagggggccttcaaggctgtgatgaccagcatcaagcagctgagcagcgaggagctggagcagttccagaagacaggcaccatcgtggtggagggccacgagctgcatgatgaggacatccggctgatgtacacctttgaccaggccactggaggaacagcccagtttgaggcccacagtgatgcccaggccctggtgctgctggatgtgaccccagaccagagcatggtggatgagggcatggcccgggaggtgatcaaccgcatccagaagctgaggaagaagtgcaacctggtgcccacagatgagatcaccgtgtactacaaggccaagtctgagggcacctacctgaacagcgtcatcgagagccacacagagttcatcttcaccaccatcaaggcccccctgaagccctaccctgtgagccccagcgacaaggtgctgatccaggagaagacccagctgaagggcagcgagctggagatcaccctgacccggggcagcagcctgcccggccctgcctgtgcctacgtgaacctgaacatctgtgccaacggcagcgagcagggcggcgtgctgctgctggagaaccccaagggggacaaccggctggacctgctgaagctgaagtctgtggtgaccagcatcttcggcgtgaagaacacagagctggccgtgttccatgatgaaacagagatccagaaccagacagacctgctgagcctgagcggcaagaccctgtgtgtgacagctggcagcgcccccagcctcatcaacagcagcagcaccctgctgtgccagtacatcaacctgcagctgctgaatgccaagccccaggagtgcctgatgggcaccgtgggcaccctgctgctggagaaccccctgggccagaatggcctgacccaccagggcctgctgtatgaggccgccaaggtgtttggcctgcggagcaggaagctgaagctgttcctgaatgagacccagacccaggagatcacagaggacatcccctag

SEQ ID NO: 176306 - DNA, 993 bp, Artificial Sequence
  derived and/or modified sequence
atgctgcagcaggtgcctgagaacatcaacttccctgctgaggaggagaagatcctggagttctggacagagttcaactgcttccaggagtgcctgaagcagagcaagcacaagcccaagttcaccttctatgatggccccccatttgccaccggcctgccccactacggccacatcctggccggcaccatcaaggacatcgtgaccaggtatgcccaccagagcggcttccacgtggacagaagatttggctgggactgccacggcctgcctgtggagtatgaaattgacaagaccctgggcatccggggcccagaagatgtggccaagatgggcatcacagagtacaacaaccagtgccgggccatcgtgatgagatacagcgctgagtggaagagcacagtgtcccggctgggccgctggattgactttgacaatgactacaagaccctgtacccccagttcatggagagcgtgtggtgggtgttcaagcagctgtatgacaagggcctggtgtacagaggagtgaaggtgatgcccttcagcacagcctgcaacacccccctgagcaactttgagagccaccagaactacaaggatgtgcaggaccccagcgtgtttgtgaccttccccctggaggaggatgaaacagtgtccctggtggcctggaccaccaccccctggaccctgcccagcaacctggccgtgtgtgtgaaccctgagatgcagtatgtgaagatcaaggatgtggcccggggccgcctgctgatcctgatggaggcccggctgagcgccctgtacaagctggagagtgactatgagatcctggagcgcttccctggggcctacctgaagggcaagaagtaccggcccctgtttgactacttcctgaagtgcaaggaaaatggagccttcaccgtgctggtggacaactacgtgaaggaggaggagggcactggagtggtgcaccaggccccctactttggagcctag

SEQ ID NO: 176307 - DNA, 513 bp, Artificial Sequence
  derived and/or modified sequence
atggccccctacacccccttcctgacagagctgatgtaccagaacctgaaggtgctgattgatcctgtgtctgtgcaggacaaggacaccctgagcatccactacctgatgctgccccgggtgcgggaggagctgattgacaagaagacagagagcgctgtgtcccagatgcagagcgtgattgagctgggccgggtcatccgggacaggaagaccatccccatcaagctgaagggcagcgagctggagatcaccctgacccggggcagcagcctgcccggccctgcctgtgcctacgtgaacctgaacatctgtgccaatggaagtgagcagggcggcgtgctgctgctggagaaccccaagggggacaaccggctggacctgctgaagctgaagtctgtggtgaccagcatctttggagtgaagaacacagagctggccgtgttccatgatgaaacagagatccagaaccagacagacctgctgagcctgagcggcaagaccctgtgctag

SEQ ID NO: 176308 - DNA, 3459 bp, Artificial Sequence
  derived and/or modified sequence
atgggcatcacagagtacaacaaccagtgccgggccatcgtgatgagatacagcgctgagtggaagagcacagtgtcccggctgggccgctggattgactttgacaatgactacaagaccctgtacccccagttcatggagagcgtgtggtgggtgttcaagcagctgtatgacaagggcctggtgtacagaggagtgaaggtgatgcccttcagcacagcctgcaacacccccctgagcaactttgagagccaccagaactacaaggatgtgcaggaccccagcgtgtttgtgaccttccccctggaggaggatgaaacagtgtccctggtggcctggaccaccaccccctggaccctgcccagcaacctggccgtgtgtgtgaaccctgagatgcagtatgtgaagatcaaggatgtggcccggggccgcctgctgatcctgatggaggcccggctgagcgccctgtacaagctggagagtgactatgagatcctggagcgcttccctggggcctacctgaagggcaagaagtaccggcccctgtttgactacttcctgaagtgcaaggaaaatggagccttcaccgtgctggtggacaactacgtgaaggaggaggagggcactggagtggtgcaccaggccccctactttggagctgaggactacagagtgtgcatggacttcaacatcatcaggaaggacagcctgcctgtgtgccctgtggatgccagcggctgcttcaccacagaggtgacagactttgctggccagtatgtgaaggatgctgacaagagcatcatccgcaccctgaaggagcagggccgcctgctggtggccaccaccttcacccacagctaccccttctgctggaggagtgacacccccctcatctacaaggctgtgcccagctggtttgtgcgggtggagaacatggtggaccagctgctgaggaacaatgacctgtgctactgggtgcctgagctggtgcgggagaagagatttggaaactggctgaaggatgcccgggactggaccatcagcaggaaccgctactggggcacccccatccccctgtgggtgtctgatgactttgaggaggtggtgtgcatcggctctgtggccgagctggaggagctgagcggggccaagatcagtgacctgcaccgggagagcgtggaccacctgaccatccccagccgctgtgggaagggcagcctgcaccgcatcagcgaggtgtttgactgctggtttgagagcggctccatgccctatgcccaggtgcactacccctttgagaacaagcgggagtttgaagatgccttccctgctgacttcatcgccgagggcatcgaccagacccggggctggttctacaccctgctggtgctggccacagccctgtttggccagccccccttcaagaatgtcatcgtgaatggcctggtgctggccagtgatggccagaagatgagcaagaggaagaagaactacccagaccctgtgtccatcatccagaagtacggggctgatgccctgcggctgtacctgatcaacagccctgtggtgcgggcagagaacctgcgcttcaaggaggagggcgtgagagatgtgctgaaggatgtgctgctgccctggtacaatgcctaccgcttcctgatccagaatgtgctgcggctgcagaaggaggaggagattgagttcctgtacaatgaaaatacagtgcgggagagccccaacatcacagaccgctggatcctgtccttcatgcagagcctcatcggcttctttgaaacagagatggccgcctaccgcctgtacacagtggtgccccggctggtgaagtttgtggacatcctgaccaactggtacgtgaggatgaacagaagaaggctgaagggagaaaatggcatggaggactgtgtgatggccctggagaccctcttctctgtgctgctgagcctgtgccgcctgatggccccctacacccccttcctgacagagctgatgtaccagaacctgaaggtgctgattgatcctgtgtctgtgcaggacaaggacaccctgagcatccactacctgatgctgccccgggtgcgggaggagctgattgacaagaagacagagagcgctgtgtcccagatgcagagcgtgattgagctgggccgggtcatccgggacaggaagaccatccccatcaagtaccccctgaaggagatcgtggtgatccaccaggaccctgaggccctgaaggacatcaagagcctggagaagtacatcatcgaggagctgaatgtgaggaaggtgaccctgagcacagacaagaacaagtatggcatccggctgcgggcagagccagaccacatggtgctgggcaagaggctgaagggggccttcaaggctgtgatgaccagcatcaagcagctgagcagcgaggagctggagcagttccagaagacaggcaccatcgtggtggagggccacgagctgcatgatgaggacatccggctgatgtacacctttgaccaggccactggaggaacagcccagtttgaggcccacagtgatgcccaggccctggtgctgctggatgtgaccccagaccagagcatggtggatgagggcatggcccgggaggtgatcaaccgcatccagaagctgaggaagaagtgcaacctggtgcccacagatgagatcaccgtgtactacaaggccaagtctgagggcacctacctgaacagcgtcatcgagagccacacagagttcatcttcaccaccatcaaggcccccctgaagccctaccctgtgagccccagcgacaaggtgctgatccaggagaagacccagctgaagggcagcgagctggagatcaccctgacccggggcagcagcctgcccggccctgcctgtgcctacgtgaacctgaacatctgtgccaacggcagcgagcagggcggcgtgctgctgctggagaaccccaagggggacaaccggctggacctgctgaagctgaagtctgtggtgaccagcatcttcggcgtgaagaacacagagctggccgtgttccatgatgaaacagagatccagaaccagacagacctgctgagcctgagcggcaagaccctgtgtgtgacagctggcagcgcccccagcctcatcaacagcagcagcaccctgctgtgccagtacatcaacctgcagctgctgaatgccaagccccaggagtgcctgatgggcaccgtgggcaccctgctgctggagaaccccctgggccagaatggcctgacccaccagggcctgctgtatgaggccgccaaggtgtttggcctgcggagcaggaagctgaagctgttcctgaatgagacccagacccaggagatcacagaggacatccctgtgaagaccctgaacatgaagacagtgtatgtgtctgtgctgcccaccacagctgacttctag

SEQ ID NO: 176309 - DNA, 750 bp, Artificial Sequence
  derived and/or modified sequence
atggccccctacacccccttcctgacagagctgatgtaccagaacctgaaggtgctgattgatcctgtgtctgtgcaggacaaggacaccctgagcatccactacctgatgctgccccgggtgcgggaggagctgattgacaagaagacagagagcgctgtgtcccagatgcagagcgtgattgagctgggccgggtcatccgggacaggaagaccatccccatcaagtaccccctgaaggagatcgtggtgatccaccaggaccctgaggccctgaaggacatcaagagcctggagaagtacatcatcgaggagctgaatgtgaggaaggtgaccctgagcacagacaagaacaagtatggcatccggctgcgggcagagccagaccacatggtgctgggcaagaggctgaagggggccttcaaggctgtgatgaccagcatcaagcagctgagcagcgaggagctggagcagttccagaagacaggcaccatcgtggtggagggccacgagctgcatgatgaggacatccggctgatgtacacctttgaccaggccactggaggaacagcccagtttgaggcccacagtgatgcccaggccctggtgctgctggatgtgaccccagaccagagcatggtggatgagggcatggcccgggaggtgatcaaccgcatccagaagctgaggaagaagtgcaacctggtgcccacagatgagatcaccgtgtactacaaggccaagagctag

SEQ ID NO: 176310 - DNA, 816 bp, Artificial Sequence
  derived and/or modified sequence
atgatggtgctgctgctgcagctggactgcctgaccatggacatctacctgcgggacaaggacaccctgagcatccactacctgatgctgccccgggtgcgggaggagctgattgacaagaagacagagagcgctgtgtcccagatgcagagcgtgattgagctgggccgggtcatccgggacaggaagaccatccccatcaagctgaagggcagcgagctggagatcaccctgacccggggcagcagcctgcccggccctgcctgtgcctacgtgaacctgaacatctgtgccaatggaagtgagcagggcggcgtgctgctgctggagaaccccaagggggacaaccggctggacctgctgaagctgaagtctgtggtgaccagcatctttggagtgaagaacacagagctggccgtgttccatgatgaaacagagatccagaaccagacagacctgctgagcctgagcggcaagaccctgtgtgtgacagctggcagcgcccccagcctcatcaacagcagcagcaccctgctgtgccagtacatcaacctgcagctgctgaatgccaagccccaggagtgcctgatgggcaccgtgggcaccctgctgctggagaaccccctgggccagaatggcctgacccaccagggcctgctgtatgaagctgccaaggtgtttggcctgcggagcaggaagctgaagctgttcctgaatgagacccagacccaggagatcacagaggacatccctgtgaagaccctgaacatgaagacagtgtatgtgtctgtgctgcccaccacagctgacttctag

SEQ ID NO: 176311 - DNA, 525 bp, Artificial Sequence
  derived and/or modified sequence
atgtacaccttcgaccaggccaccggcggcaccgcccagttcgaggcccactcagatgctcaggccttggtccttctggatgtcactcctgaccagagcatggtggatgagggaatggcaagggaggtgattaacagaatccagaagcttagaaaaaagtgtaacctcgtcccaactgacgaaatcaccgtatattacaaggcgaaatctgagggtacctatttgaattcagtgattgagagccacacagaattcatttttacaacaatcaaagctccactgaaaccttaccctgtaagcccgtcggataaagtcctgattcaggagaaaacccagctgaagggtagtgagttagaaatcaccctgactcgtggctccagcctcccaggtccagcatgcgcctacgtgaacctgaacatttgtgccaatggatctgaacagggcgagatgcagtggattatccctgaaatttaccatttctggaagcctcgatggtcaattgccccaggaaagtcaaagaggtag

SEQ ID NO: 176312 - DNA, 525 bp, Artificial Sequence
  derived and/or modified sequence
atgtacaccttcgaccaggccaccggcggcaccgcccagttcgaggcccacagcgatgctcaagcattggttctgttagacgtgactccggatcagtcaatggtggatgaggggatggctcgagaagtcattaatagaatccagaaactgaggaaaaagtgtaatctggtgcccacggatgaaataaccgtatactacaaggcaaagagcgagggaacgtatctgaacagtgtgattgagtcccatactgaattcatattcactacaatcaaggctccactaaaaccctacccggtgagtccctcagacaaagtgctgatccaggaaaaaacccagttaaaaggatctgagctggagattactctgacccgcggttcttcacttcctgggcccgcgtgcgcctatgtgaatctgaacatttgcgccaatggttcagaacagggagagatgcaatggatcatcccggagatttaccacttttggaaacctaggtggagcattgctcccggcaaatcaaagcggtag

SEQ ID NO: 176313 - DNA, 3789 bp, Artificial Sequence
  derived and/or modified sequence
atgctgcagcaggtgcccgagaacatcaacttccccgccgaggaggagaaaatattggaattctggaccgagttcaactgttttcaggaatgtttgaaacagtcaaaacataagccgaaatttaccttttatgacgggccgcccttcgcgaccggcctaccccattacgggcatatcctggccggaacgattaaggacatcgtgacaagatacgctcaccagagcgggtttcacgttgaccgtcggttcggttgggactgtcacggtctccctgtggagtacgaaattgataaaacgctcgggatcagaggccctgaagatgttgctaagatggggatcacagaatacaataatcagtgtcgcgctatagttatgcgctatagcgcagagtggaagtctacagtcagcaggctggggagatggatcgacttcgataatgactacaaaactctgtaccctcaatttatggaaagtgtctggtgggtattcaaacagctctacgataagggactcgtgtaccgaggtgtgaaagtcatgccgtttagcaccgcctgcaacaccccgctctcgaactttgagagccaccaaaattacaaagacgtccaggacccctcagtgttcgtcacattccctctggaggaggatgagacagtgtcgctggtcgcctggacgactaccccctggacgctgccaagcaacctcgccgtgtgcgtcaatcctgaaatgcaatacgtgaagatcaaagatgtggcgagaggtcgactgttaatattaatggaagcccggttatctgccctttacaaacttgagtccgattacgagatcctggaacgctttcccggggcctacctgaagggcaagaagtacaggcctctattcgattactttttgaaatgcaaggagaacggagccttcaccgtacttgtggataactacgtcaaagaagaagaaggaactggagtggtgcaccaggcaccttactttggcgcggaagactatcgggtatgcatggattttaacattattcgaaaggattctctgcctgtctgccccgtggacgctagtggctgctttacaacagaggtcacggattttgccgggcaatacgtgaaggatgcagataaaagcataatcaggacccttaaagagcaaggccgtttactggttgctaccacattcacccacagctatcctttctgttggaggagtgacactccacttatttacaaagcggttcccagctggtttgtgagggtcgagaatatggttgaccagcttctgagaaataatgacctgtgttactgggtccccgaacttgtcagagagaaaagatttggtaactggctgaaggacgcccgggattggactatctcaagaaataggtattggggtacccccatccccctttgggtgtccgacgactttgaggaggtggtatgtatcggtagtgtggccgagctagaggagctgagcggcgccaagatttcggacctgcatagagagtctgtggaccacctgaccataccctctcgatgcgggaagggcagccttcacaggatatcagaggtttttgattgctggtttgaaagcgggtctatgccatatgcacaggtacactacccattcgagaataaacgggaattcgaagatgcttttccagctgactttatcgctgaaggtatcgaccagacacgtggatggttttataccctcctggtgttggctaccgcgttgtttggccagccccccttcaaaaacgtgatcgtgaatggattagtgctagccagcgacggacaaaaaatgagcaaaagaaaaaagaattatcccgaccccgtaagcatcatacagaagtacggcgcagacgccctgcgtctatatctcattaactctcccgtcgtgagagctgagaatttgcgctttaaagaagagggggttcgtgatgttttgaaagatgtactcctgccctggtataatgcctaccggtttctgatccagaacgttctgcggctgcaaaaagaagaggagattgagttcctctataatgagaacactgtccgggaatctcccaatattaccgacaggtggatcttatccttcatgcagtccctgatcggattcttcgaaacagaaatggcagcgtacaggttatacactgtcgtgccacggctcgtgaagttcgtggatatcttaacaaactggtacgtcaggatgaacaggcgtcgacttaaaggggaaaatggcatggaggattgcgtgatggctcttgagacattgttcagcgtgctcctctcgctgtgccgcctcatggctccatatacgccatttctgacagagttgatgtaccaaaatttaaaagtcctgattgatcccgtgtctgtgcaagacaaggacactctcagtattcattacctaatgctgccccgtgtgagggaggagttaatcgataagaaaacagaatctgctgtcagccagatgcaatccgtgatcgaactggggagagtgataagagacagaaagaccattcctattaagtacccactcaaagagatcgtcgtcattcatcaggatcccgaagccctcaaggacattaagtcattagaaaagtatattatcgaggaattgaatgtgcgaaaggtcactctgtccacagacaagaacaaatacgggatccgtctccgagccgaacccgatcacatggttctgggcaaacgtctgaagggtgcttttaaagcagttatgactagtatcaaacaactctcttcagaagagctcgagcagttccagaagacgggcacaattgtagtcgaaggccatgaactgcacgacgaagacattagactgatgtacacctttgatcaggctactggcggcactgctcagttcgaggctcacagcgatgcacaggccctggtgctgttggacgtgaccccagatcagagcatggtcgacgagggaatggcgagggaggtgattaaccgaatccaaaagttgaggaagaagtgtaacctggtacctaccgacgaaataaccgtgtactacaaagccaagtcagagggaacatacctgaactcagtgatagagagccacacagagtttatctttacaacgatcaaagctcccttaaaaccataccctgtgagtccctcggacaaggtgctcatccaggaaaagacccaacttaaaggttccgaactcgaaatcactttgacaagggggagctctctgcccggcccagcttgtgcctatgtgaatctcaacatttgtgcaaacggctcggagcagggtggcgtccttctgctcgagaatcccaagggcgataataggcttgacctcctaaagctgaaatcagtggtgacttccattttcggggtgaaaaataccgagctggctgtgttccatgatgagaccgagattcagaatcagaccgacttgctgtccctctcgggaaagacattatgtgtgactgccgggtctgcaccctctcttatcaattcatctagcaccctgttgtgccaatacatcaacctccagcttctgaacgcaaaaccccaagagtgtctgatgggcaccgtgggaaccctcctgttggaaaatcccttgggccagaacgggcttacgcatcagggcctgctgtatgaagcagccaaagtgttcgggttgaggtcccggaaactaaagctctttctgaatgagactcaaacccaggagatcaccgaggatatccctgtcaaaaccttgaatatgaaaacagtttatgtgagcgttttaccgacgacagccgacttctag

SEQ ID NO: 176314 - DNA, 3729 bp, Artificial Sequence
  derived and/or modified sequence
atgctgcagcaggtgcccgagaacatcaacttccccgccgaggaggaaaaaatcctggagttttggactgagtttaactgtttccaggaatgcctgaaacagagcaagcacaaacccaagttcacgttttatgacggccctcccttcgctactggcctcccccactacggccatatcctggctggaacgataaaggatatcgtaaccagatatgcccatcaatcgggcttccacgtggaccgccggttcggctgggactgtcacgggttgccagttgaatacgagatcgataaaactttgggtatacggggaccagaggacgtggctaaaatgggcattacagaatacaataaccagtgtagagcaattgtgatgcgctactccgctgagtggaagtcaaccgtatccagacttggacgatggatcgacttcgacaacgactacaagaccttatatcctcaatttatggaatccgtttggtgggtttttaagcaactttacgataaggggctcgtgtacagaggggtgaaagttatgccctttagcaccgcctgcaacacacccttatcgaacttcgagtctcatcaaaattataaggatgtgcaagatccatccgtgttcgtcacattccccctggaagaagacgagaccgttagtctggttgcctggacgacgaccccttggaccctcccttccaacctggccgtttgtgtgaatcctgagatgcagtatgtcaagattaaggatgtggcccgaggaagactgcttatcctaatggaagcacgtctgtcagctctgtataagcttgaatcagattatgaaattctggaaaggtttcctggggcctatctcaagggaaagaagtatcggccactgttcgattacttcctgaaatgtaaagagaacggggcattcacagtgctcgtggataattatgtgaaggaggaggaggggaccggggtcgtgcaccaggccccttactttggggccgaagactatagagtttgcatggatttcaacattatcaggaaagactctctaccagtgtgtcctgtggacgcctctggttgcttcactaccgaagtgacggattttgccggccagtatgtcaaagatgctgacaaaagcattatccggaccctgaaggagcaaggcagactcctggtggctactacgttcacccactcttaccccttttgctggagatccgacacccccctgatttacaaggccgtgccctcctggtttgtccgagttgagaatatggtagatcagctacttcgcaataatgacctatgctactgggtgccagagctggtgcgcgagaaacgctttggcaactggctgaaggacgcccgggactggaccatctcgcgaaatcgttactgggggacacctatacctctgtgggtatcggatgattttgaagaggtcgtatgtataggatctgtggcggaactggaagagctcagcggagccaagatatccgacctacacagggagtctgtcgaccatctaaccattccttctcgctgtgggaaggggtccctacatcggatctccgaagtatttgattgttggtttgaaagcgggtctatgccgtacgcacaggtccactatccttttgaaaataagagagagtttgaagatgcgttcccagccgattttattgctgaaggaatcgatcagacgcgagggtggttttatactctcttggtactcgctaccgcactctttggccagccccctttcaaaaacgttattgtgaatgggctggttctggcatcagacggccagaaaatgtccaaacggaagaaaaattatcccgacccggtctccataatccagaagtatggggcggatgccctgaggctatatctgattaatagccctgttgtgagggctgagaaccttaggttcaaggaggagggcgtgagggacgtgctcaaggacgtgctattgccctggtataacgcctatcgattcttgattcaaaacgtcctcaggttgcagaaggaggaagaaattgaattcttgtacaacgaaaacaccgtccgggaaagcccaaatatcactgatagatggatcctctcttttatgcagtcactgattggcttctttgagacagaaatggcagcttatagattgtatacagtggtcccaaggctggtgaagtttgtggatatactgacaaactggtatgtgcgcatgaacaggaggcgcctgaaaggtgagaatgggatggaagactgcgtgatggcactggaaacactgttcagtgtgcttttaagtttgtgtaggttgatggctccctatactcctttcctaacggaactcatgtaccaaaatctgaaggtccttatcgatccggtgtccgtacaggacaaagacacactctccatccactacttgatgctacctagagtgcgcgaggagctaatcgataaaaaaacagagtcggccgtatcccagatgcagagtgtgatcgaactggggcgagtgattagagaccggaagaccataccaataaagtatcctctgaaggagatcgtagttattcatcaggacccagaagctctgaaggatataaagtctctggaaaaatatatcatcgaagagttgaatgtgaggaaagtcaccttgagcaccgacaagaataagtatggaatcagactgagagcagagcctgatcacatggtgttggggaaacgcctcaaaggagccttcaaggccgttatgacatctataaagcaattgtccagtgaggagctggaacagtttcaaaagacaggaaccatagtggtggagggccatgagttacatgacgaggacattcgactgatgtacacgttcgatcaggccactggcggcacagcccagttcgaggctcactctgacgcccaggccctggtcttgctggacgtcaccccagaccagtcaatggtagatgagggcatggcgagggaggtcataaacagaattcagaagcttcgcaagaagtgcaacctggtcccaacagatgagattaccgtgtactacaaagcaaagtctgagggcacctatttgaacagtgttatagagtcccacaccgaatttattttcaccactatcaaggcgccactcaagccctacccagtgtccccttctgacaaggtgctcatccaagagaagacacaactgaagggttcagagctcgaaataaccctcactcgcggctccagcctgcccggtcctgcatgtgcctatgtcaatctcaacatctgcgcgaacggctcagaacaaggtggcgtcctgctgcttgagaatccaaagggagacaatcgtctggatttgcttaagttgaaatcagttgtcacctcgatatttggggtgaagaatacagagttagccgtgttccacgatgaaactgaaatccaaaaccaaaccgatttactatcactgtcaggtaagactctctgcgttactgcaggaagtgcccccagtctgatcaactcctcatccactttgctttgtcagtacattaatcttcagcttcttaacgctaagccccaggagtgcctgatggggaccgtggggaccctgctgttagaaaatcccctgggccagaacggactgactcatcagggcttactctacgaggcagccaaagtttttggcctccgcagcaggaaactgaaactcttcctgaatgagacacagacacaagaaattactgaagacatcccttag

SEQ ID NO: 176315 - DNA, 993 bp, Artificial Sequence
  derived and/or modified sequence
atgctgcagcaggtgcccgagaacatcaacttccccgccgaggaggaaaagatccttgaattctggacggagttcaattgcttccaggagtgtctgaagcagtctaagcacaaaccaaaatttactttctatgacgggccacccttcgctacaggactcccccactacggccacatactggctggaaccatcaaagacatcgttactcggtacgctcaccagtctgggtttcatgttgacaggcgattcggctgggactgccatgggcttcccgttgagtatgaaattgataagacactgggcattagggggcccgaggatgtggcaaagatggggattacagaatataacaaccagtgccgggccatcgtaatgcgctattcagctgagtggaagtccaccgtgagcaggcttggtagatggattgacttcgataatgattataagaccttgtatccccagtttatggagagtgtctggtgggtttttaagcagctttatgacaaagggctcgtgtaccggggtgtgaaggttatgcccttttcaaccgcatgtaacaccccactgtccaattttgagtcacaccagaactataaggacgtgcaggacccttcggtattcgttactttccccttggaagaggatgagacggttagcttggtagcctggacgactaccccttggactctaccaagcaatttagccgtgtgtgttaaccccgaaatgcagtacgtgaaaatcaaggacgttgcccgaggtcggctcctgattctaatggaggccagactgagcgccttgtacaaactggagtcggattatgagattctcgagcgtttccccggcgcttatctgaagggaaaaaagtaccgacccctgtttgactacttcctcaaatgtaaagaaaacggcgcctttaccgtgttggtggacaattacgtcaaagaggaggaggggaccggcgtggtgcatcaggcaccatacttcggcgcatag

SEQ ID NO: 176316 - DNA, 513 bp, Artificial Sequence
  derived and/or modified sequence
atggccccctacacccccttcctgaccgagctgatgtaccagaacctcaaggttctgattgacccagtgagcgtccaggacaaggataccttaagcatccattacctgatgctaccacgcgtgagagaagaactcattgacaagaagaccgaatccgctgtgtcacaaatgcagtcagtgatcgagctaggaagagtgattagggatcgaaaaaccatcccaattaaattgaaaggcagcgaattggagatcacgctgacccgggggagctcattacctggtcctgcttgcgcatatgtgaacttgaatatctgcgctaatggttccgaacaaggaggtgtgctgttgcttgaaaaccccaagggggacaaccgtctcgatttactcaagcttaaatcagtggtgacctcgatattcggtgtcaagaatacggagttagcagtgttccacgacgaaacggagatacagaaccagaccgacttgctcagtctttccggcaaaacactgtgttag

SEQ ID NO: 176317 - DNA, 3789 bp, Artificial Sequence
  derived and/or modified sequence
atgctgcagcaggtgcccgagaacatcaacttccccgccgaggaggaaaaaatcttggagttctggactgagtttaactgttttcaggaatgtttgaagcaatccaaacataagccaaagtttacgttctacgacggcccccctttcgcaaccggccttccacactacgggcatatcctggctggcactattaaggatattgtaactcggtatgcacatcagtcagggtttcatgtagacaggaggtttgggtgggattgccatgggctgcctgtggagtacgagatcgataaaacgctcggaattcgcggaccggaggatgtggccaaaatgggaataacggagtataacaaccaatgtcgagccattgtgatgaggtacagtgcggaatggaagagtacagtgtctcgtctgggacgctggattgattttgacaatgattataagaccttgtacccacagtttatggagagtgtctggtgggtcttcaaacagttgtacgataagggcctggtgtatagaggagtgaaagtgatgcccttttctacagcatgcaacactcccctgtctaactttgaaagccaccagaactacaaagatgtgcaagatccttctgtcttcgtgacattccccctggaggaagatgagactgtaagtctagtcgcctggactactacgccctggacgcttccatcaaatttggctgtgtgtgtgaatccagaaatgcagtacgttaagataaaagacgtggccaggggtcgcttactcatcctcatggaggcccggctctcagcgctgtataagttggaatccgactacgagatcctggagcggtttcctggagcttaccttaagggtaagaagtataggcccctgtttgactactttttgaaatgtaaagagaacggcgcttttaccgtgctcgtcgataactatgtgaaagaagaggagggtacaggcgtcgtgcatcaggcaccttatttcggtgctgaggactatagggtttgcatggatttcaacattattaggaaagactcactgccggtctgccctgttgacgcctcaggctgcttcaccaccgaagtgactgactttgcagggcaatacgtcaaagatgctgacaaatcaattatcaggactctcaaggagcagggaaggctgcttgtagctaccacctttacccattcctaccccttttgttggcggagcgatactcctcttatctataaagccgtgccatcctggttcgtgcgagtcgagaacatggttgatcagctgctgcgaaataacgatttgtgctactgggtgcccgagttagtgcgagagaagcgcttcgggaactggctgaaggatgcacgcgactggaccatctcgaggaaccgctattgggggacacctattcctctttgggtgtccgacgattttgaagaggtggtctgcattggctcggtcgcagaactggaagaattatccggcgcaaagatatcagaccttcatcgtgagagtgtggaccatctgacgattccgtcgcgctgtggaaaaggtagtctgcataggatcagcgaagtcttcgattgctggtttgagagcgggagtatgccatatgcccaggttcattaccccttcgagaacaaacgggagtttgaggacgcgttccctgcggacttcatcgctgaagggattgaccagaccaggggctggttttacacattgctggtgctagcaactgccctatttgggcaaccaccctttaaaaatgtcatagtgaatggcttagttttggccagcgacggccagaaaatgagcaagcgaaaaaaaaattatcctgatcctgtgtcaatcatccagaaatacggagccgacgcattgaggctgtacctgattaatagtccagtggtgcgcgctgagaaccttagatttaaagaggagggggtgcgggatgtcctgaaagacgtcctgctcccgtggtacaacgcgtatcggtttcttatccagaatgtcctgagactgcagaaggaagaagagattgagttcctgtacaacgagaacactgtccgggagagcccaaacatcacagaccggtggatcctcagttttatgcaatcgctgatagggtttttcgagacagagatggcggcctaccgactatacactgttgttccacggctcgtgaaatttgtcgacatcttaaccaattggtatgtgcggatgaatcgccgaagactgaagggggaaaacggcatggaggactgtgtgatggcactcgagaccctcttctctgtgctgctcagcctttgtcgcctgatggcaccttataccccattcctaacagaactgatgtaccagaacttaaaggtcttaattgatcccgtgagcgtccaggacaaagacacactgagcatccactatttaatgctcccacgggtccgggaggagcttattgacaagaagacagaatctgctgtgtctcaaatgcaatccgtcatagaactcggaagggtgatcagggaccgcaaaactatccccatcaaataccccctgaaggagatagtggtgatacatcaggaccccgaggccctgaaggacatcaagtcgcttgaaaaatacatcattgaggaactgaatgtgcggaaagttaccctaagcaccgataagaacaaatacgggattcgcctgcgggcagagcccgatcatatggtgctcggcaagcgcctcaaaggcgcgtttaaggcagtcatgaccagtatcaaacagctgtcaagcgaggagctggagcagttccaaaaaacaggtaccatagttgtggagggtcatgagctgcatgacgaggacattagactgatgtacacattcgaccaggctacaggcggcaccgcccagtttgaggctcatagtgacgcccaggctttagtgttgctggatgtgacacccgatcagagcatggtggacgagggcatggcccgcgaagtgatcaaccgtattcagaaactccgaaagaagtgtaacttagtccccaccgacgagatcaccgtgtactataaagccaagtcagagggcacctacctgaactctgtgatagaatctcacacagagttcatattcactaccataaaggctcccctgaagccatatcccgtttctcccagcgataaggttcttattcaagagaaaacacagttaaaaggcagcgagctggaaattaccctgacgcgggggtcttctctgcctgggcccgcgtgtgcttatgttaacctcaacatttgcgcgaacgggtctgagcagggtggagtgttgctattggaaaaccctaagggagacaatagactagacctattgaagcttaagagtgtggtgacttcaatttttggcgtgaaaaacaccgaattggctgtgtttcatgacgaaactgaaatccagaaccagaccgacttgctgtccttatccgggaagacactctgcgtgacggcaggttccgcaccatctctgattaactcaagctccacgctcctctgtcagtatataaacttacagcttttgaacgctaaaccccaggagtgtctcatgggcactgtcggcacgctgctcctcgagaatcccctgggccagaatgggcttacgcaccagggactcttatatgaggcggcgaaagtttttggcctgagaagcagaaaattaaagctgtttctgaacgagacccagacccaggagatcacagaggacattcctgtcaagacgctgaatatgaagaccgtgtacgtgtctgtgttgcctactactgcagatttctag

SEQ ID NO: 176318 - DNA, 3459 bp, Artificial Sequence
  derived and/or modified sequence
atgggcatcaccgagtacaacaaccagtgccgggccatcgtgatgagatacagtgccgagtggaagtcgaccgtgagtagactggggagatggatcgatttcgataacgactataaaacactctatccacagtttatggagtccgtgtggtgggtgttcaagcagttatatgacaaaggactggtttacaggggtgtcaaggtgatgccttttagcactgcctgcaacactccgctttctaatttcgagtcacaccagaactacaaagacgtccaggatccttccgtgtttgtaaccttccccctggaggaagacgaaacagtttcgcttgttgcatggaccacaacaccatggacattaccttctaatttggcggtgtgtgtcaatcccgagatgcaatatgtgaaaattaaagacgtcgctcggggaaggttactgatcctgatggaggcccgccttagtgccctatataaactggagtcagactacgaaattctggagcgctttcccggcgcttacctcaaggggaagaaatacaggccgctgttcgactattttctaaagtgcaaagaaaacggtgcctttacagtcttggtggataactatgtcaaggaagaagaagggacaggcgttgtccaccaggcaccctattttggcgcagaagattatagggtttgcatggatttcaatattataaggaaggattcacttcccgtttgccccgtcgacgccagtgggtgcttcaccaccgaagtaaccgatttcgcaggccagtacgtcaaagatgcagacaagtccatcatacggaccttaaaggaacaggggaggcttctggtggccactacatttacccacagctaccccttttgctggaggtccgacacccctcttatctataaggcggttcctagctggtttgtgagagtggaaaacatggtggaccagctgctccggaataatgatctgtgttattgggttcctgaattagtgagagagaaacgctttgggaactggctgaaagatgcgcgggactggactatcagtcgcaaccgatactggggaaccccaatcccactatgggtgtccgatgattttgaggaggtagtgtgtatcgggtctgtggccgaactagaagaattgagtggcgccaagatctcagacctacacagggagagcgtggaccatctgaccatcccttcgcggtgtggtaaaggctcactccacagaatctcagaggtgttcgattgttggtttgaatccggctctatgccctacgcacaagtacactatccttttgaaaacaagcgcgagttcgaagatgcgttccctgctgattttatcgcagagggcatcgaccagactagagggtggttttacacccttctggtcctcgctacggcactattcggacagccgccattcaagaacgtcatcgtgaacggtttggtcctcgcgtccgacggccagaagatgtccaagaggaagaaaaactatcccgacccggtgtctatcatccagaaatatggcgcggatgcccttagactttacctcataaatagccccgtggttagggctgaaaatttgagattcaaggaggaaggtgtgagagatgtgctcaaagatgtgctgctgccctggtacaacgcttatcgttttctcattcagaacgttttgaggctccagaaggaggaggagatagaattcctctataacgagaacactgtcagagagagccccaatatcaccgacagatggatactgtcctttatgcagtccctgatcggattttttgagacagaaatggcagcctatcggttatacacggttgtgccaagattagtgaagttcgtggatattctgaccaactggtacgttcgcatgaaccgacgtagactcaaaggggaaaatggaatggaggattgcgtgatggccctcgaaacattgtttagtgtattactgtcactctgtcgcctaatggctccatatacccctttcctcactgagctgatgtaccagaatttgaaagttcttatcgatcccgtgagcgtgcaggacaaggataccctgtcgattcattatctaatgctgccacgcgtgcgggaggaattgatagataaaaaaactgaatccgcagtgtcccaaatgcagtcagtcatcgagctgggccgagtgatccgcgataggaagacaatccccatcaaatacccactgaaagagattgtggtgatccatcaggaccctgaggcactgaaagatatcaaatctctcgagaaatacatcatcgaagaactgaacgtgagaaaagtgactctatccacagataaaaataaatatggcataagactcagagctgaacccgatcacatggtgttagggaagaggctgaagggagcattcaaagctgtcatgacatcaattaagcagttgagtagtgaggaactggagcagttccaaaaaactggcactatcgttgtggagggtcacgagttgcatgacgaagatatcagactgatgtacacctttgatcaagctaccggaggcaccgcacagtttgaggctcacagtgatgcacaggctcttgtactgctggacgttacccctgaccagtctatggtagatgagggcatggcccgcgaagtgatcaacagaattcagaaactgaggaagaaatgtaacctggtgccaacagatgaaatcaccgtgtactacaaggcgaagtcggaagggacataccttaattccgttattgagtcacataccgagtttatattcaccactatcaaggccccacttaaaccctatccagtgtccccctctgacaaagtgctcatccaggagaaaactcagttaaagggctcggagctagagattactttgacacggggaagcagcttgccaggcccagcttgcgcatacgtcaatttgaacatttgtgcaaacgggtccgaacaaggcggtgtgctgctgctggaaaaccccaagggggataatcgcctggatctactcaaactgaaatccgtcgtcacttccatcttcggcgtgaagaacactgagctcgcggtctttcacgacgagacggagatacagaatcagactgatttgctgagtctcagcggcaagacactatgcgtgaccgccgggagcgccccttctctgatcaattctagtagtaccctgttatgtcaatatattaacctgcagctgctgaatgcaaagccccaggagtgtttgatggggacagtgggaacgttgctgttggaaaaccccctgggacagaatggcctgacacaccaaggcctcctgtacgaggccgccaaagtattcggactgcgctcacgcaagcttaaattatttctcaatgaaacacagacccaagaaattactgaggacatcccagtgaagactctgaacatgaagacagtctatgtctccgtgctcccgacaaccgcggatttttag

SEQ ID NO: 176319 - DNA, 750 bp, Artificial Sequence
  derived and/or modified sequence
atggccccctacacccccttcctgaccgagctgatgtaccagaacttaaaagttttgatcgacccagtgagcgtgcaggacaaagatactctgtctatacactacctgatgttacctcgcgtgagggaggagctaatagacaagaaaactgagtctgccgttagccagatgcagtccgtgattgaactgggccgcgttatccgggacaggaagacaattcctataaagtatcccctcaaggagatcgttgtcattcatcaggaccctgaggccctgaaggatattaaatccctcgaaaaatacattatcgaagagcttaatgtgagaaaagtcacattgagtaccgataagaacaaatacggcattaggttgagagcagagccagatcatatggtgctcggtaaaaggttaaagggcgctttcaaggccgtcatgacctcgattaagcagcttagctcagaggaattggagcagttccaaaaaacaggaactattgtggtggaggggcacgagctgcatgatgaagacatccggttgatgtatacattcgaccaggccacaggtggtacagcccaattcgaggctcattctgacgcacaagcactcgtgctgttagacgtcaccccagatcaatccatggtggacgaagggatggcgagagaggtaattaataggattcagaaactgcgcaagaagtgcaatttggttccaaccgacgagattactgtctattataaagcaaaatcttag

SEQ ID NO: 176320 - DNA, 513 bp, Artificial Sequence
  derived and/or modified sequence
atggccccctacacccccttcctgaccgagctgatgtaccagaacctgaaggttctcatcgaccccgttagcgtgcaggataaggatactctgtcgatacactacctaatgctgccccgggttagggaagagctcattgataaaaaaactgaatcagccgtatcccagatgcaatccgtgattgagctggggagggtcattcgagacagaaaaacgatacccattaaattaaagggatctgagctggagattacgctgactcggggctcatccctccctggcccagcttgtgcatacgtgaacctaaatatctgtgccaatggctccgagcaggggggagtgctgctcttggagaaccccaagggcgacaataggctggacctgcttaagctcaagtctgtagttacctctatctttggcgtgaagaacaccgaactggccgtgttccatgatgagaccgagattcaaaaccagacggatctgctatctctgtctggtaaaaccctctgctag

SEQ ID NO: 176321 - DNA, 816 bp, Artificial Sequence
  derived and/or modified sequence
atgatggtgctgctgctgcagctggactgcctgaccatggacatctatctccgagacaaagacactctgtctatccattacctgatgctgcccagagtccgtgaggaactgatagataaaaaaaccgaaagcgctgtgtcgcaaatgcaatctgtcatagaattaggccgcgtgattcgtgacagaaaaactattcccatcaaattaaagggctcagagctggagattacactcacgcgcgggtcttcactccccgggcccgcttgcgcatatgtgaacctaaatatatgcgctaacggttctgaacaggggggggttctgctcttggagaaccctaagggggataacagactggacctgctaaagttgaagtcagtggtgaccagcatcttcggcgtcaaaaatactgagctcgccgtgtttcatgacgagactgagatccaaaatcaaacggacttgcttagcttgagtggtaaaacactgtgtgtgacagccggatccgccccgtctctcattaatagctcatccaccctgctgtgccaatatattaacctgcagctcctgaacgccaagcctcaggaatgcctgatgggtacagtcggcaccctgctgctggagaatccactgggtcagaatggcttgacgcatcaaggactgctctacgaagctgcaaaagtgtttggtctccgctctcgaaagttgaaactctttctgaacgagacccagacccaagagatcactgaggacattccggtgaaaacactcaatatgaaaacggtctacgtgtctgttctgcctactacagccgacttttag

SEQ ID NO: 176322 - DNA, 525 bp, Artificial Sequence
  derived and/or modified sequence
atgtatactttcgaccaggccaccggcggaaccgctcagtttgaagcgcatagtgatgcccaggctctggtactgctcgatgtgacccccgaccagagtatggtcgacgaaggcatggcacgtgaggtgatcaaccggatccagaagctgcggaagaagtgcaatctggtgccaactgatgaaataactgtgtattataaagccaagagcgaaggcacctaccttaactctgtgatcgaatcgcacactgagttcatctttaccaccatcaaggcacccttgaagccatatcccgtcagtccgtcagacaaggtgctcatacaggaaaaaactcagttgaagggtagtgaactcgagatcacgttgacgcggggatctagcttgcccggacccgcatgcgcgtatgttaatctgaatatctgtgctaatggctccgaacagggcgaaatgcagtggataattcccgagatttaccacttctggaaacctcgatggagtatcgctcccggtaagagcaagcgatag

SEQ ID NO: 176323 - DNA, 525 bp, Artificial Sequence
  derived and/or modified sequence
atgtacacgttcgaccaagctactggcggaactgcacagttcgaggcccactctgacgcgcaggctctggtgttactggatgtaaccccagaccaaagcatggtcgatgagggcatggcaagagaagttattaatcgaattcagaagctgcgcaagaaatgtaaccttgtccccaccgatgagataactgtttactacaaggccaaatctgaaggcacatacttaaactccgtgatcgagagtcacaccgaattcatttttactactatcaaagcaccactgaagccctaccctgtctcgccatcagataaggtcctgattcaggaaaagactcagctgaagggctcagaattggaaattactctgacgcggggatctagtctgcccggacccgcatgtgcctacgttaacctcaacatctgcgccaacggcagtgaacagggggaaatgcagtggatcatacccgagatataccacttctggaagcccagatggtctatcgcacctggcaaatctaagaggtag

SEQ ID NO: 176324 - DNA, 3789 bp, Artificial Sequence
  derived and/or modified sequence
atgttgcaacaggtcccggagaatataaattttcccgctgaggaggagaagatcttggagttctggacggaattcaattgctttcaagaatgcctcaaacagagtaagcacaaacctaagttcacattctatgacggtcccccattcgccaccggcttgccccactacggccacatactggccggtaccatcaaggacattgtgaccaggtacgcccaccaatctggattccacgtggatcgcaggtttggatgggattgccatggactgcccgtggagtatgagattgacaagaccctgggaattcgcggtccagaagacgtggccaaaatgggcatcaccgagtacaacaaccagtgtcgggctatcgtcatgcgctattcagccgaatggaaatccacagtcagtcgcctggggagatggatcgatttcgataatgattataagacactctatccccagttcatggagtccgtgtggtgggtatttaagcagttatacgacaagggactcgtgtatcgtggggttaaggtgatgcctttctctacggcatgtaatacacccctgagcaatttcgagagccaccagaattataaagacgtgcaagacccctctgtcttcgtaacttttccactggaagaggatgaaaccgtctccctggtagcttggacaacgacgccctggactctgccgagtaatttggccgtttgcgtgaacccggagatgcaatatgtaaaaataaaggacgtggctagggggcgtctcctgattctgatggaagctaggcttagcgcactctataaactcgagtccgattacgaaatcctggaacggttcccaggagcctaccttaaggggaagaaatacaggcccttatttgattactttctgaagtgcaaagaaaacggcgcttttacggtgctggtggacaactatgtgaaagaagaagagggaacaggcgtcgtgcaccaagcaccatactttggagccgaagattaccgagtctgcatggactttaatattatcagaaaggactctctgccggtatgtcccgtcgacgcttctgggtgttttacaacggaagttaccgatttcgccggacagtatgtcaaagacgctgacaagagcattatccgcacactgaaagagcagggcagattgctagtggcaacaactttcacacacagctatcccttttgttggaggtccgacactccactgatttacaaggcagtcccgtcttggtttgtgagagtcgagaatatggtcgaccagttattgagaaataacgatctgtgctattgggtaccagagctggttagggagaagagattcggaaattggctgaaagatgcacgcgattggacgatttccaggaatcgatactggggaacacctattccgctgtgggtatccgatgacttcgaggaggttgtgtgtattggcagtgtggcagaactcgaggaattatctggagctaaaatatctgaccttcatcgagaatctgtcgaccatttgacaattcccagtagatgtggaaaaggctctttacaccgcattagtgaagtgttcgactgttggttcgagtcgggatctatgccctacgcacaggtgcattatcctttcgagaataagcgcgagttcgaggacgcctttcccgctgatttcatagctgaaggtatcgaccagacacgcggatggttttatactctgttggttctggcgaccgcactgttcggacagcctccttttaaaaatgtcatcgtgaacggcctcgtgcttgctagcgatggtcagaaaatgagcaaacgtaagaagaactatcccgacccagtgtccataatccagaaatacggcgctgatgcactgaggctgtatctcatcaattctcccgtggttcgcgctgagaacctgaggttcaaagaagaaggggtacgcgacgtccttaaagatgttctgctcccgtggtacaacgcttacaggttcctgatccagaacgtcctgcggctgcagaaagaggaggaaatcgaatttctgtataacgaaaacaccgtccgcgagagcccaaatattacagatcgctggatccttagtttcatgcagagcttgattggatttttcgagactgagatggcagcttacagactgtatactgtcgtgcccaggttggtgaagtttgtggacattcttaccaactggtacgtccgcatgaatcgacgaaggctgaagggcgagaacgggatggaagactgcgtgatggccttggaaacgctgttttccgtattactgagcttgtgtagattaatggccccatacaccccctttttgaccgagcttatgtaccagaacctaaaagtactcatagaccccgtttctgttcaggataaagacacactgtcaattcactacctgatgctgcccagagtccgggaggagttgattgataagaaaacagaatctgccgtgtcgcagatgcagagcgtgatcgagctaggcagggtcatccgggatcgtaagactattcccataaaatatccacttaaagaaatcgtggtgattcaccaggaccccgaggcactgaaggacatcaagagcctggagaagtacatcattgaagagctaaacgtgcgtaaggtcaccctctccaccgataaaaacaagtatggtattagactcagagcagagccagaccacatggtgctagggaagaggctgaagggggctttcaaagcagtgatgacgagtattaaacagctgtctagcgaggagttggagcagttccaaaaaactggtactattgtggtcgaggggcacgaactacatgacgaggacatccgactgatgtatacctttgaccaggccacgggcggtacagcgcagtttgaggctcattcggatgctcaggccctggtgttgttggatgtgacgcccgatcaaagcatggtcgatgagggaatggcacgagaggtaataaatagaatacaaaagctccggaagaaatgcaacttggtgcccactgacgagataaccgtatattacaaggccaaatctgaggggacttacctgaactctgtaatagagtcgcacaccgaatttatctttacgaccatcaaggcccctctgaagccataccctgtttccccctccgataaagtgctcatacaggaaaagacccagcttaaggggagcgaactggaaattaccctcaccagagggagcagtctacccggtccagcgtgtgcgtacgtgaaccttaatatatgtgcaaatggttctgaacagggtggagtactgcttcttgaaaaccccaaaggcgacaatagactggatctgctaaaacttaagtcagtcgtgacgtccatttttggcgtgaaaaataccgagttagccgtgttccacgatgagacagaaattcaaaatcaaacagacttactcagcctctccggcaagactctgtgtgtgacagcaggatcggccccttctctaattaattcctctagcaccctgctttgccagtacatcaatctgcagctgttgaacgccaaaccgcaggagtgcttgatgggcactgtggggacgctgctcctcgagaatcctctgggccaaaatgggctaacgcatcagggcctgctctacgaggcggcaaaggtgttcgggttgagaagccgcaaactcaaactctttctcaacgagacccaaactcaggaaataaccgaggacataccggtcaagacacttaacatgaagacggtttacgtgagtgtcttgccaaccaccgcggacttctag

SEQ ID NO: 176325 - DNA, 3729 bp, Artificial Sequence
  derived and/or modified sequence
atgctgcaacaggtgccagagaatatcaatttcccagcagaggaggaaaagatactcgagttctggacggaatttaactgcttccaagagtgcctcaagcagtcgaagcacaagccaaagtttacattctatgacggccctccttttgctactggcctgccccattatgggcatattctggccggaactataaaggacatcgtgacgcgatatgctcaccaatccggatttcatgtggaccggcgtttcggatgggactgccacggcctgcccgtggagtatgagatagacaaaaccctggggatccggggaccagaagacgtagcaaaaatgggcattacggaatacaataatcagtgtcgggctatcgtcatgcggtacagcgcggaatggaagagcaccgtcagccgacttggtaggtggatcgacttcgacaatgattataaaactctttaccctcaattcatggaaagcgtgtggtgggtcttcaagcagctgtacgacaagggcctggtatataggggcgtgaaggttatgcccttcagtactgcgtgtaataccccactcagtaacttcgaatcgcaccagaactacaaggatgtgcaggacccatccgtgtttgtgactttccccctggaagaggacgagacggtttccttggtggcttggaccactacaccctggaccctgccttctaatctggccgtgtgcgtgaaccccgaaatgcaatacgtcaagatcaaggatgttgccagaggacgactgttgattttaatggaagccaggctgagcgccctgtataaactagagtctgactacgaaatcttagaacgctttcccggagcctacctgaagggcaagaaatataggcccctctttgactacttcctcaaatgtaaggagaacggggcttttaccgttcttgtggataactatgtgaaggaagaggaaggaaccggtgtggttcatcaggcgccttacttcggagccgaggactatcgggtgtgcatggatttcaacattatccgtaaagattctctgccggtctgcccagtcgatgcgtctggctgcttcaccaccgaggtgactgattttgctggtcaatatgtcaaggatgccgacaagtccataattcgaacattaaaggaacaaggtcgattgttggtcgccaccacttttacccattcttacccattctgctggcgtagtgatacacctctcatctacaaagccgtcccttcctggtttgtccgcgtcgagaatatggttgaccagcttttgaggaataacgatctgtgttattgggtccccgagctggttcgggagaaaagattcggaaattggttgaaggatgcacgcgattggactatatctaggaaccggtactggggaactcccatccctttgtgggtgtccgacgacttcgaagaggtggtgtgtatcggttccgtggccgaactggaggaactctctggggctaaaataagcgatctgcatagggagtctgtcgatcatctgacaatccccagccggtgcggcaaagggtccttgcatagaatatctgaggtgtttgattgttggtttgagagcgggtcaatgccttatgctcaggttcactacccattcgagaacaaacgggagttcgaagatgcctttcccgcagactttatcgcagaaggcatcgaccagactcgcggttggttctacacactactcgtgttggcaaccgcgctattcggccaaccccctttcaaaaatgtcatcgtcaacgggcttgtattggctagcgatgggcaaaagatgtctaagagaaagaaaaactatcccgatccagtctccatcattcagaaatatggggctgacgccctgcgactgtatctgattaattctccggtggttagggccgaaaacttgcggttcaaagaggaaggcgttagggacgtgttgaaggacgtgctcctcccttggtacaacgcttatcgttttctcatccagaacgtgctgcgcctgcagaaggaggaggagatagagttcctctacaatgaaaataccgtgagagagtccccaaatattacagaccggtggattctgtcatttatgcagtctctgatcggattcttcgaaaccgaaatggctgcctaccggctttacaccgtggtccctcgcttagtaaagtttgtggacattctcaccaactggtacgttcgaatgaataggcgtcggctgaaaggagaaaacggtatggaggactgtgtgatggcattagaaacactgtttagtgtactcctctcactgtgtagactgatggccccatatacacctttcctcaccgagctcatgtaccagaacttgaaggtgctcatcgatcccgtgagtgtgcaagataaagatacactgtcaatccactatctgatgctgcccagagttcgagaagaactgatcgataagaagacggagtctgcagtttcccagatgcagagtgttatcgagctgggccgtgtgattagggacaggaaaacgattccaatcaagtaccctttaaaggagattgtggtgattcaccaggatcctgaggcactcaaagatatcaagagtctggaaaagtacattatagaagaactgaatgtaaggaaggtgaccctgtcgacagacaagaacaaatacgggatcagactgcgagccgaacctgaccatatggtgctagggaagcggcttaagggcgctttcaaggcggtgatgaccagtattaaacagctcagtagcgaggaattggagcagttccagaagacagggacaatcgtggtggagggccacgagctgcatgacgaggacattagactaatgtacacattcgatcaggccacaggtggtactgcccagtttgaagctcatagcgacgcgcaggccctagtgcttcttgatgtgacccccgaccagagcatggtggacgaaggaatggcgagggaggtaattaatcggatacaaaaactgcgcaagaagtgcaacctggtgcccacagacgagatcaccgtgtactataaggccaagtcagagggtacctaccttaactcggtgatcgaaagccacacagaatttattttcaccacaatcaaggcaccgttgaagccatatcccgtttctccgtctgacaaagtccttatccaggaaaagacacaacttaaggggtccgaactcgaaatcacactgacccggggaagctctcttccagggccagcgtgcgcttacgttaatcttaatatatgcgcaaatggctccgagcaaggcggtgtcctgctgctggaaaaccctaagggggacaatcggcttgatttgctcaaactgaaatcagtggtgacctctatttttggtgttaagaatacagagctggccgtgtttcacgatgagacggagattcagaatcagacagacctcctttctctgagtggtaagaccctatgtgtaaccgcaggctcagctccttctttgatcaattcctccagcacccttctgtgccagtacatcaacttacaactgcttaatgctaaaccacaagaatgcttaatgggcactgtgggcacgcttttgctggaaaatcccctcggacagaatgggctgactcatcagggtctcctgtacgaggccgctaaggtcttcggcttacgcagcaggaagctgaaattattcctgaatgaaacacagacacaggaaatcactgaagatatcccctag

SEQ ID NO: 176326 - DNA, 993 bp, Artificial Sequence
  derived and/or modified sequence
atgctccagcaggtgcccgagaacatcaactttcccgctgaggaggagaagatccttgagttctggaccgagtttaattgttttcaggagtgcctgaaacaaagcaagcacaagccaaaatttactttctacgatggaccaccctttgcaaccggcttgcctcattacggtcatattttggccggaaccattaaggacattgtcactaggtacgctcaccagagcggcttccacgtggaccggcgattcggttgggattgtcacggtctaccagtcgaatacgagatcgacaaaaccttgggtatccgcggtcctgaggatgttgcgaagatggggatcactgaatataataaccagtgtcgcgctattgtcatgcgctactcggccgagtggaagtcgaccgtgagcaggctaggacgctggatagacttcgataacgattacaagactttataccctcagttcatggagtctgtgtggtgggttttcaagcagctatacgacaaaggcttggtatacaggggagtgaaagtaatgcctttctccaccgcctgtaataccccgctgagcaattttgagagtcatcagaactataaagacgtccaggatccttccgtgtttgtaacgttccccctcgaggaagacgaaacggtgtcgctggttgcctggacaacaacaccttggaccctgccatcaaacctggccgtgtgcgtgaacccagagatgcagtacgtgaagattaaggacgtggctaggggcaggctacttatactgatggaggctaggttatcagcactgtacaagttggagtctgattatgaaatactcgagcgtttccctggggcttacctgaaaggaaagaagtaccgccctctatttgattactttctgaagtgtaaggaaaatggggcttttacagtcctggtggacaattatgtgaaagaggaagagggcacaggtgtggttcatcaggcgccatatttcggggcatag

SEQ ID NO: 176327 - DNA, 513 bp, Artificial Sequence
  derived and/or modified sequence
atggcaccctatacaccattcctcactgaactgatgtaccagaacttaaaagtcttaattgacccggtctccgtacaggacaaagacaccctgtctatacactatctaatgttgcctagagtgcgtgaagaactcatagataagaagacggagagcgctgtgagtcagatgcagtctgtcattgaactgggaagggtaatccgcgatagaaaaactatcccaatcaaactcaaagggagtgagctggagattaccttgacccgcggaagcagccttccaggccctgcctgcgcctatgtaaatctcaacatctgcgcaaatggaagtgagcagggcggagttctgctcctggagaaccccaagggagacaataggcttgatctcctgaaactcaagtctgtcgtcacatccatctttggcgtgaagaatactgagctcgccgtgttccacgacgagactgagatccaaaaccagacggatctgctgagcttatccggcaaaaccctttgctag

SEQ ID NO: 176328 - DNA, 3789 bp, Artificial Sequence
  derived and/or modified sequence
atgctgcagcaggtccctgaaaatatcaatttccccgcagaagaggaaaaaatcctggagttttggacagaatttaattgtttccaagagtgcttaaagcagagcaagcataagcccaaattcaccttctatgatgggcctccatttgcgactggcctcccgcactatgggcacatacttgcaggaaccattaaagatatcgtgaccaggtatgcccaccagtccggattccacgtggacaggaggtttggctgggattgccacgggcttccagttgagtatgaaatcgacaagacattaggaatacggggacctgaagacgtggccaaaatgggaataacagaatataataatcaatgcagagccattgtgatgcggtattcggccgagtggaagagtaccgtaagccgactcggaaggtggattgatttcgataacgattacaaaaccctgtaccctcaattcatggagtcggtctggtgggtgttcaagcagctatatgacaagggtctggtctacagaggagtgaaagtgatgccgttttcaacagcgtgcaatacccccctttccaacttcgagagccaccagaactataaggatgtgcaggatcccagcgtcttcgttacttttcccctcgaggaggacgaaacagtctctcttgttgcgtggacaaccacgccttggaccctgccgtccaacttagcggtctgcgtcaaccctgagatgcaatacgtgaaaatcaaggacgtcgctagaggcaggttgttgattttaatggaagctagactttccgctttgtacaagctcgagtctgactatgagattctggagcgatttcctggtgcgtatctgaagggaaaaaagtaccggccactgtttgattatttcctgaagtgcaaagagaacggagccttcaccgtgctggtggataattatgtgaaggaggaggaggggaccggggtggttcatcaggctccgtactttggagctgaggattatagagtgtgcatggattttaatattatccgcaaggactcccttcctgtgtgcccagtagatgcctccggctgtttcaccacagaagtcactgacttcgctggacaatatgttaaagacgccgacaaatctatcatcaggacattgaaggagcagggcaggctgttagtagcaacaaccttcacacactcctacccattctgttggcgctccgacactccactcatctacaaagccgtccccagttggtttgtgcgagttgaaaacatggtggatcaattgctcagaaataacgacctgtgctactgggttcccgagctggtgcgagagaaacggtttggcaattggttgaaagatgcaagagattggacgatctctagaaacagatactggggtacgcccattcctctttgggtcagcgatgacttcgaagaagttgtttgtatcggcagtgtcgccgagctggaagagctgtctggtgcaaagatttcagacctccatagggagtctgtggaccacctcacaatcccttcacgatgtggcaaaggaagcttgcaccgaataagtgaggtgtttgactgctggtttgagtccgggtctatgccctatgcccaggttcactatcccttcgagaacaaaagagagtttgaagacgcttttccagccgactttatcgccgaaggcattgaccaaactcgaggatggttttacactttgctggtgcttgccacagccctgttcgggcagccacccttcaagaacgtcattgtgaatggccttgttctggcttccgacggtcagaaaatgtccaagaggaaaaagaattatccggacccagtgtctattatccagaaatatggcgctgatgctctcaggctttatctgattaattcccccgtggtgcgcgctgagaatctaagattcaaagaggaaggagtgagggatgtcctcaaggatgtgctgctgccgtggtataatgcctaccggttcttgattcagaatgtgctaagactgcagaaagaggaggaaatcgagtttttgtataacgagaatactgtccgcgaaagcccgaacattacggatcggtggatcctctctttcatgcagagccttataggattttttgaaactgagatggcagcctatcgattgtacacggttgtccccaggctagttaagttcgtggatatcttgaccaattggtacgtcaggatgaatcgtcgcaggttgaagggtgagaacggcatggaagactgcgtaatggctctcgagacactcttctccgtcctgctgtcattgtgtcgtctgatggctccttacacaccctttctgaccgaactgatgtaccagaacttgaaggtcctaatagatccggtgtctgtccaagacaaggatacacttagtattcattacctgatgttgccgagagtccgggaagaactgatcgacaagaagacagaatcggcagtgtctcagatgcaatccgtgatcgagctgggcagagtgatccgggatcggaaaacaattccaattaagtatcctctaaaggaaattgtggtaatccaccaggacccagaagcactgaaggacatcaagtcccttgaaaaatatattatagaagagttgaacgtcaggaaggtgactctatccacagacaagaacaaatacgggatcagactgagagccgagcctgatcacatggttcttggaaaacggctcaaaggggctttcaaggctgttatgacatctatcaagcagctttcatccgaagaattagagcaattccagaagaccggcaccattgttgtggagggtcatgaactgcacgatgaggatattagactgatgtacacattcgaccaagcaacagggggaacagcccaatttgaagcacattctgacgctcaggcgctggtacttctggatgtcacccctgaccagtccatggttgatgagggaatggcccgtgaggtgattaaccggatccagaaactgagaaaaaaatgtaacctggtgcccaccgatgaaattaccgtctattacaaggccaagagcgaggggacctacctcaactctgtaatcgaatcccacactgaattcatcttcaccaccatcaaagcaccgctgaagccatacccggtgtctccgtctgataaggtgctgatccaggaaaaaacccagcttaagggttcggagttggagatcaccttaacaagagggagctccctgccaggccctgcttgcgcttatgtcaatttaaatatttgtgccaacgggtctgagcagggcggtgtactactgcttgagaatcccaagggcgataaccggctggacctgctcaagctaaaatcagtcgtgactagcatattcggagtgaagaacactgagctcgcggtgttccatgacgaaactgaaatccagaatcagacagacctcctttccttgtctggtaagacactgtgtgttactgctggatccgcccctagcctgatcaattcctcctcaaccctgttgtgccagtacatcaacctccaactgctcaatgccaaaccccaggagtgcctgatgggcaccgtggggacactccttctggagaatcccctcggccaaaatggactgacacatcaaggactgctctacgaagctgcaaaagtgttcgggctgaggagtcgcaaactgaagctattcctgaacgagacccaaacccaagagatcacagaagatattcctgtcaagacacttaatatgaagacagtctacgtctccgtgctcccgaccactgccgatttctag

SEQ ID NO: 176329 - DNA, 3459 bp, Artificial Sequence
  derived and/or modified sequence
atggggatcactgagtataacaaccaatgccgggcaatagtgatgcgatactctgctgagtggaaaagtaccgtcagcagactggggaggtggatcgacttcgacaatgattacaagacattgtacccgcaattcatggaatctgtgtggtgggtgtttaagcagttatatgataaagggctcgtctaccgcggagtgaaagtcatgcccttcagtacagcctgtaacacccctctgagcaactttgagtcccatcagaattacaaggatgtgcaggacccgagtgtctttgtcactttcccccttgaggaagacgagaccgtgtcactcgtggcttggaccacaacaccttggacactgccgagcaatctggccgtttgtgtcaacccagaaatgcagtatgtgaagatcaaggacgtggctaggggaagactcctcatcctcatggaggctcgactatcggccctgtataagttggagtctgattatgaaatcctggaaaggttcccaggagcctatttgaaaggcaaaaaatacaggcctctgtttgactactttttaaagtgtaaggaaaacggggcatttaccgtgttagtagataactacgtgaaagaagaggaaggcactggagtagttcaccaagcgccatacttcggcgcagaggattacagagtttgcatggattttaatatcatccgaaaggactctcttcccgtatgccctgtggacgcaagcgggtgctttactaccgaagttaccgacttcgccggacaatacgtaaaagatgctgacaagtccataattcgcacactgaaagagcagggcaggctgctcgttgccacgacctttacacattcttacccgttttgctggcgcagcgacactcctctgatatacaaagcagtgccctcctggttcgtgcgtgtggagaacatggtggaccagctgctgaggaataatgacctttgctactgggtacccgagctggtgcgggagaagcgatttggaaactggcttaaggatgctcgagattggactatctctcggaacagatactggggaactcctatcccgctctgggtgagtgacgacttcgaggaggtcgtttgtatcggtagcgtggcggaactcgaggagctgtcgggcgcaaagatctccgatcttcatagagagagtgtcgaccacttgacgattccatcgcgctgcgggaagggatctttacatcgaataagcgaggtgttcgactgctggtttgaaagtggctccatgccctacgcccaggtgcactatcctttcgagaacaaaagggagttcgaggatgcttttccagcagatttcatcgccgagggcatcgaccagacacgcggatggttctacaccctcttagtcttagccaccgccttgttcggacaaccacccttcaagaatgtgatcgtcaatggcctggtcctggcatccgacggccagaaaatgtcaaagcgcaaaaagaactaccccgaccctgtatcgatcattcagaaatacggcgctgacgcgctgagactatatttaatcaacagtccagtggtgcgggctgaaaacctcagattcaaggaggagggggtgagggatgttctgaaagatgttctgttaccatggtataatgcgtacaggttcctgatccagaacgtcttgcggcttcagaaggaggaggagatagaattcctgtataatgaaaacaccgtccgggaatcacctaacatcaccgaccggtggattctctctttcatgcaatccctaatcgggttcttcgagacagaaatggcggcttaccgtttgtacactgtagttccaagattagtcaaattcgttgacatcctgacaaactggtacgtgcggatgaaccgcaggaggctgaaaggagagaacggtatggaggattgtgttatggccctggaaactctgttctctgtactcctgagcctgtgccgcctgatggccccatatacccccttcctgactgagctgatgtatcagaacctgaaagtgttgatcgatcccgtctcagtccaggataaggacacccttagcatccactaccttatgctgcctcgagttcgtgaagagctcatcgacaagaagacagagtctgcggtgtcacaaatgcagagcgtcatcgaactaggcagggtcatacgagataggaaaactatccccattaaatatccactgaaggagatcgtggtcattcaccaggatcctgaagcactcaaagatatcaagagcttagagaagtatatcatcgaggagctgaatgttaggaaagtcacactttcaaccgataaaaataaatatgggatcaggctgagagcagagcctgaccacatggtgctcgggaaaaggcttaagggcgcttttaaggcagtgatgacgtcaatcaagcagttgagctccgaagagctagagcagttccagaagactgggaccattgtggtagaggggcatgagctgcacgacgaggacattcgcttaatgtatacattcgaccaggccactggtgggaccgcacagtttgaggctcacagcgatgcccaggccttggtcctcctggacgtaacacccgatcagtccatggtggacgaaggcatggccagggaggtgataaatcggatccagaagctgcgtaagaaatgcaacctcgtccctactgatgagatcacagtgtactacaaagcaaagagcgagggaacttacctaaattccgtgattgaatcccatactgaattcatctttactacgataaaagcaccactaaagccctacccagtgtccccttccgataaggttctgatccaggaaaagactcagctcaaagggtctgaattagaaatcacgctgactcgcggaagcagtctgcctgggccagcttgcgcctacgtgaacctcaacatctgcgcaaatggatcagaacagggcggagtgctcttgctggagaaccccaaaggcgacaataggctcgacctgttgaagctgaagagcgttgtgacctcaatttttggggtgaaaaacaccgagttggcggtatttcatgacgagactgaaattcagaatcagacagacctgctttctcttagcggcaagactctgtgcgtgacagcagggagcgccccatcacttatcaatagttctagcacactcttatgtcagtatatcaacctgcaacttttgaatgcgaaaccacaggaatgtctgatgggcactgtgggtacattgctgctggaaaaccccttaggccagaacgggctgacccaccaaggccttttatatgaagccgcaaaagtgttcgggctgcggtctcggaaacttaagcttttcctaaacgagacgcagacccaggaaataaccgaagacatcccagtcaaaaccctcaacatgaagactgtgtacgtttcagtgttacctacaaccgccgacttttag

SEQ ID NO: 176330 - DNA, 750 bp, Artificial Sequence
  derived and/or modified sequence
atggccccttataccccattcctgactgagttgatgtaccagaatctgaaggtgctcatagaccctgtgtccgtgcaggacaaagacacactaagcatccactacctcatgcttcctagggtgcgagaggaactaattgataagaaaaccgagagtgctgtgtcccagatgcagtcagtgatcgaactgggacgcgtgatcagggaccgcaaaactattcctattaaatacccactgaaagagatcgtggtcatccaccaggaccccgaagcattgaaagacattaagagcctggagaagtatataatcgaggaacttaacgttcgcaaagttacgctgagcaccgacaagaataagtacggaattagacttcgagccgaacctgaccacatggtgttggggaagcggctcaaaggtgcctttaaagcagtcatgacaagtatcaagcaacttagttccgaagagttggaacagtttcaaaagactggaactattgttgttgaggggcacgagttacatgacgaggacattaggctcatgtatacattcgaccaggccactggaggaacagctcaattcgaagcacacagcgatgcccaggctcttgtgctcctggacgtgacacccgaccagagtatggtagacgagggtatggccagggaggtgataaatcgaattcagaagctaagaaaaaagtgtaacctcgtccccactgacgaaattactgtatattataaggctaagtcgtag

SEQ ID NO: 176331 - DNA, 513 bp, Artificial Sequence
  derived and/or modified sequence
atggcaccctacacgccctttctgactgagctgatgtatcaaaacctgaaggtactgatcgaccctgtatctgtgcaagacaaggatacactgtcgatccattatctaatgttgccaagagtgagggaagagcttatagataaaaagaccgaaagtgcagtcagccaaatgcaatccgtgatcgagctgggcagagtgatcagggaccggaagacaatacccatcaagttgaaaggttcagagcttgaaatcacccttacaagggggagcagtctccctggccctgcctgcgcttatgtcaatctgaacatctgtgctaatggcagcgagcagggcggtgttctgcttctcgagaaccctaagggtgacaatcgactggatctacttaagctaaagagtgtagtgacctctatcttcggcgtcaaaaacactgagcttgccgtgtttcacgacgagactgagattcagaaccagaccgacctgctatctctgtctggcaagacactgtgttag

SEQ ID NO: 176332 - DNA, 816 bp, Artificial Sequence
  derived and/or modified sequence
atgatggtacttctgctccagctggattgcctcactatggacatttacctccgcgacaaggataccctgtccattcattatctcatgcttccacgagtgagggaagagctgatcgacaagaaaacagagagcgccgtttctcagatgcagtcagttatcgagttaggacgcgtgattcgcgataggaaaacaatccccattaagctgaaagggtcggaattggagatcacactgactagaggcagcagccttcccggaccagcttgcgcgtatgtaaacctcaacatctgtgccaatggctccgaacaggggggagtactgttactagagaatcctaagggagataacaggctcgacctcctcaagctgaaaagcgtcgtgacctccatatttggggttaagaatacggaactcgcagtgttccacgacgagaccgagatccagaaccagaccgatctactcagtttaagtgggaagactctctgcgtcaccgcgggttcagctccctctctcatcaacagcagctcaactcttctctgtcagtacatcaacctgcagctactcaatgccaagccgcaggagtgtctgatgggaacagtggggactcttttgttggaaaaccctctgggtcaaaacgggttgactcatcagggcctcctgtacgaggccgctaaagtgtttggcctacgtagccgcaagcttaaacttttcctgaatgaaacccagacacaagagatcacagaggacattcctgtgaagaccttgaatatgaaaactgtctacgttagcgtcctccccactactgcagatttctag

SEQ ID NO: 176333 - DNA, 525 bp, Artificial Sequence
  derived and/or modified sequence
atgtacaccttcgaccaggccaccggcggcaccgcccagttcgaggcccacagcgacgcccaggccctggtgctgctggacgtgacccccgaccagagcatggtggacgagggcatggccagagaggtgatcaacagaatccagaagctgagaaagaagtgcaacctggtgcccaccgacgagatcaccgtgtactacaaggccaagagcgagggcacctacctgaacagcgtgatcgagagccacaccgagttcatcttcaccaccatcaaggcccccctgaagccctaccccgtgagccccagcgacaaggtgctgatccaggagaagacccagctgaagggcagcgagctggagatcaccctgaccagaggcagcagcctgcccggccccgcctgcgcctacgtgaacctgaacatctgcgccaacggcagcgagcagggcgagatgcagtggatcatccccgagatctaccacttctggaagcccagatggagcatcgcccccggcaagagcaagagatag

SEQ ID NO: 176334 - DNA, 3789 bp, Artificial Sequence
  derived and/or modified sequence
atgctgcagcaggtgcccgagaacatcaacttccccgccgaggaggagaagatcctggagttctggaccgagttcaactgcttccaggagtgcctgaagcagagcaagcacaagcccaagttcaccttctacgacggcccccccttcgccaccggcctgccccactacggccacatcctggccggcaccatcaaggacatcgtgaccagatacgcccaccagagcggcttccacgtggacagaagattcggctgggactgccacggcctgcccgtggagtacgagatcgacaagaccctgggcatcagaggccccgaggacgtggccaagatgggcatcaccgagtacaacaaccagtgcagagccatcgtgatgagatacagcgccgagtggaagagcaccgtgagcagactgggcagatggatcgacttcgacaacgactacaagaccctgtacccccagttcatggagagcgtgtggtgggtgttcaagcagctgtacgacaagggcctggtgtacagaggcgtgaaggtgatgcccttcagcaccgcctgcaacacccccctgagcaacttcgagagccaccagaactacaaggacgtgcaggaccccagcgtgttcgtgaccttccccctggaggaggacgagaccgtgagcctggtggcctggaccaccaccccctggaccctgcccagcaacctggccgtgtgcgtgaaccccgagatgcagtacgtgaagatcaaggacgtggccagaggcagactgctgatcctgatggaggccagactgagcgccctgtacaagctggagagcgactacgagatcctggagagattccccggcgcctacctgaagggcaagaagtacagacccctgttcgactacttcctgaagtgcaaggagaacggcgccttcaccgtgctggtggacaactacgtgaaggaggaggagggcaccggcgtggtgcaccaggccccctacttcggcgccgaggactacagagtgtgcatggacttcaacatcatcagaaaggacagcctgcccgtgtgccccgtggacgccagcggctgcttcaccaccgaggtgaccgacttcgccggccagtacgtgaaggacgccgacaagagcatcatcagaaccctgaaggagcagggcagactgctggtggccaccaccttcacccacagctaccccttctgctggagaagcgacacccccctgatctacaaggccgtgcccagctggttcgtgagagtggagaacatggtggaccagctgctgagaaacaacgacctgtgctactgggtgcccgagctggtgagagagaagagattcggcaactggctgaaggacgccagagactggaccatcagcagaaacagatactggggcacccccatccccctgtgggtgagcgacgacttcgaggaggtggtgtgcatcggcagcgtggccgagctggaggagctgagcggcgccaagatcagcgacctgcacagagagagcgtggaccacctgaccatccccagcagatgcggcaagggcagcctgcacagaatcagcgaggtgttcgactgctggttcgagagcggcagcatgccctacgcccaggtgcactaccccttcgagaacaagagagagttcgaggacgccttccccgccgacttcatcgccgagggcatcgaccagaccagaggctggttctacaccctgctggtgctggccaccgccctgttcggccagccccccttcaagaacgtgatcgtgaacggcctggtgctggccagcgacggccagaagatgagcaagagaaagaagaactaccccgaccccgtgagcatcatccagaagtacggcgccgacgccctgagactgtacctgatcaacagccccgtggtgagagccgagaacctgagattcaaggaggagggcgtgagagacgtgctgaaggacgtgctgctgccctggtacaacgcctacagattcctgatccagaacgtgctgagactgcagaaggaggaggagatcgagttcctgtacaacgagaacaccgtgagagagagccccaacatcaccgacagatggatcctgagcttcatgcagagcctgatcggcttcttcgagaccgagatggccgcctacagactgtacaccgtggtgcccagactggtgaagttcgtggacatcctgaccaactggtacgtgagaatgaacagaagaagactgaagggcgagaacggcatggaggactgcgtgatggccctggagaccctgttcagcgtgctgctgagcctgtgcagactgatggccccctacacccccttcctgaccgagctgatgtaccagaacctgaaggtgctgatcgaccccgtgagcgtgcaggacaaggacaccctgagcatccactacctgatgctgcccagagtgagagaggagctgatcgacaagaagaccgagagcgccgtgagccagatgcagagcgtgatcgagctgggcagagtgatcagagacagaaagaccatccccatcaagtaccccctgaaggagatcgtggtgatccaccaggaccccgaggccctgaaggacatcaagagcctggagaagtacatcatcgaggagctgaacgtgagaaaggtgaccctgagcaccgacaagaacaagtacggcatcagactgagagccgagcccgaccacatggtgctgggcaagagactgaagggcgccttcaaggccgtgatgaccagcatcaagcagctgagcagcgaggagctggagcagttccagaagaccggcaccatcgtggtggagggccacgagctgcacgacgaggacatcagactgatgtacaccttcgaccaggccaccggcggcaccgcccagttcgaggcccacagcgacgcccaggccctggtgctgctggacgtgacccccgaccagagcatggtggacgagggcatggccagagaggtgatcaacagaatccagaagctgagaaagaagtgcaacctggtgcccaccgacgagatcaccgtgtactacaaggccaagagcgagggcacctacctgaacagcgtgatcgagagccacaccgagttcatcttcaccaccatcaaggcccccctgaagccctaccccgtgagccccagcgacaaggtgctgatccaggagaagacccagctgaagggcagcgagctggagatcaccctgaccagaggcagcagcctgcccggccccgcctgcgcctacgtgaacctgaacatctgcgccaacggcagcgagcagggcggcgtgctgctgctggagaaccccaagggcgacaacagactggacctgctgaagctgaagagcgtggtgaccagcatcttcggcgtgaagaacaccgagctggccgtgttccacgacgagaccgagatccagaaccagaccgacctgctgagcctgagcggcaagaccctgtgcgtgaccgccggcagcgcccccagcctgatcaacagcagcagcaccctgctgtgccagtacatcaacctgcagctgctgaacgccaagccccaggagtgcctgatgggcaccgtgggcaccctgctgctggagaaccccctgggccagaacggcctgacccaccagggcctgctgtacgaggccgccaaggtgttcggcctgagaagcagaaagctgaagctgttcctgaacgagacccagacccaggagatcaccgaggacatccccgtgaagaccctgaacatgaagaccgtgtacgtgagcgtgctgcccaccaccgccgacttctag

SEQ ID NO: 176335 - DNA, 3729 bp, Artificial Sequence
  derived and/or modified sequence
atgctgcagcaggtgcccgagaacatcaacttccccgccgaggaggagaagatcctggagttctggaccgagttcaactgcttccaggagtgcctgaagcagagcaagcacaagcccaagttcaccttctacgacggcccccccttcgccaccggcctgccccactacggccacatcctggccggcaccatcaaggacatcgtgaccagatacgcccaccagagcggcttccacgtggacagaagattcggctgggactgccacggcctgcccgtggagtacgagatcgacaagaccctgggcatcagaggccccgaggacgtggccaagatgggcatcaccgagtacaacaaccagtgcagagccatcgtgatgagatacagcgccgagtggaagagcaccgtgagcagactgggcagatggatcgacttcgacaacgactacaagaccctgtacccccagttcatggagagcgtgtggtgggtgttcaagcagctgtacgacaagggcctggtgtacagaggcgtgaaggtgatgcccttcagcaccgcctgcaacacccccctgagcaacttcgagagccaccagaactacaaggacgtgcaggaccccagcgtgttcgtgaccttccccctggaggaggacgagaccgtgagcctggtggcctggaccaccaccccctggaccctgcccagcaacctggccgtgtgcgtgaaccccgagatgcagtacgtgaagatcaaggacgtggccagaggcagactgctgatcctgatggaggccagactgagcgccctgtacaagctggagagcgactacgagatcctggagagattccccggcgcctacctgaagggcaagaagtacagacccctgttcgactacttcctgaagtgcaaggagaacggcgccttcaccgtgctggtggacaactacgtgaaggaggaggagggcaccggcgtggtgcaccaggccccctacttcggcgccgaggactacagagtgtgcatggacttcaacatcatcagaaaggacagcctgcccgtgtgccccgtggacgccagcggctgcttcaccaccgaggtgaccgacttcgccggccagtacgtgaaggacgccgacaagagcatcatcagaaccctgaaggagcagggcagactgctggtggccaccaccttcacccacagctaccccttctgctggagaagcgacacccccctgatctacaaggccgtgcccagctggttcgtgagagtggagaacatggtggaccagctgctgagaaacaacgacctgtgctactgggtgcccgagctggtgagagagaagagattcggcaactggctgaaggacgccagagactggaccatcagcagaaacagatactggggcacccccatccccctgtgggtgagcgacgacttcgaggaggtggtgtgcatcggcagcgtggccgagctggaggagctgagcggcgccaagatcagcgacctgcacagagagagcgtggaccacctgaccatccccagcagatgcggcaagggcagcctgcacagaatcagcgaggtgttcgactgctggttcgagagcggcagcatgccctacgcccaggtgcactaccccttcgagaacaagagagagttcgaggacgccttccccgccgacttcatcgccgagggcatcgaccagaccagaggctggttctacaccctgctggtgctggccaccgccctgttcggccagccccccttcaagaacgtgatcgtgaacggcctggtgctggccagcgacggccagaagatgagcaagagaaagaagaactaccccgaccccgtgagcatcatccagaagtacggcgccgacgccctgagactgtacctgatcaacagccccgtggtgagagccgagaacctgagattcaaggaggagggcgtgagagacgtgctgaaggacgtgctgctgccctggtacaacgcctacagattcctgatccagaacgtgctgagactgcagaaggaggaggagatcgagttcctgtacaacgagaacaccgtgagagagagccccaacatcaccgacagatggatcctgagcttcatgcagagcctgatcggcttcttcgagaccgagatggccgcctacagactgtacaccgtggtgcccagactggtgaagttcgtggacatcctgaccaactggtacgtgagaatgaacagaagaagactgaagggcgagaacggcatggaggactgcgtgatggccctggagaccctgttcagcgtgctgctgagcctgtgcagactgatggccccctacacccccttcctgaccgagctgatgtaccagaacctgaaggtgctgatcgaccccgtgagcgtgcaggacaaggacaccctgagcatccactacctgatgctgcccagagtgagagaggagctgatcgacaagaagaccgagagcgccgtgagccagatgcagagcgtgatcgagctgggcagagtgatcagagacagaaagaccatccccatcaagtaccccctgaaggagatcgtggtgatccaccaggaccccgaggccctgaaggacatcaagagcctggagaagtacatcatcgaggagctgaacgtgagaaaggtgaccctgagcaccgacaagaacaagtacggcatcagactgagagccgagcccgaccacatggtgctgggcaagagactgaagggcgccttcaaggccgtgatgaccagcatcaagcagctgagcagcgaggagctggagcagttccagaagaccggcaccatcgtggtggagggccacgagctgcacgacgaggacatcagactgatgtacaccttcgaccaggccaccggcggcaccgcccagttcgaggcccacagcgacgcccaggccctggtgctgctggacgtgacccccgaccagagcatggtggacgagggcatggccagagaggtgatcaacagaatccagaagctgagaaagaagtgcaacctggtgcccaccgacgagatcaccgtgtactacaaggccaagagcgagggcacctacctgaacagcgtgatcgagagccacaccgagttcatcttcaccaccatcaaggcccccctgaagccctaccccgtgagccccagcgacaaggtgctgatccaggagaagacccagctgaagggcagcgagctggagatcaccctgaccagaggcagcagcctgcccggccccgcctgcgcctacgtgaacctgaacatctgcgccaacggcagcgagcagggcggcgtgctgctgctggagaaccccaagggcgacaacagactggacctgctgaagctgaagagcgtggtgaccagcatcttcggcgtgaagaacaccgagctggccgtgttccacgacgagaccgagatccagaaccagaccgacctgctgagcctgagcggcaagaccctgtgcgtgaccgccggcagcgcccccagcctgatcaacagcagcagcaccctgctgtgccagtacatcaacctgcagctgctgaacgccaagccccaggagtgcctgatgggcaccgtgggcaccctgctgctggagaaccccctgggccagaacggcctgacccaccagggcctgctgtacgaggccgccaaggtgttcggcctgagaagcagaaagctgaagctgttcctgaacgagacccagacccaggagatcaccgaggacatcccctag

SEQ ID NO: 176336 - DNA, 993 bp, Artificial Sequence
  derived and/or modified sequence
atgctgcagcaggtgcccgagaacatcaacttccccgccgaggaggagaagatcctggagttctggaccgagttcaactgcttccaggagtgcctgaagcagagcaagcacaagcccaagttcaccttctacgacggcccccccttcgccaccggcctgccccactacggccacatcctggccggcaccatcaaggacatcgtgaccagatacgcccaccagagcggcttccacgtggacagaagattcggctgggactgccacggcctgcccgtggagtacgagatcgacaagaccctgggcatcagaggccccgaggacgtggccaagatgggcatcaccgagtacaacaaccagtgcagagccatcgtgatgagatacagcgccgagtggaagagcaccgtgagcagactgggcagatggatcgacttcgacaacgactacaagaccctgtacccccagttcatggagagcgtgtggtgggtgttcaagcagctgtacgacaagggcctggtgtacagaggcgtgaaggtgatgcccttcagcaccgcctgcaacacccccctgagcaacttcgagagccaccagaactacaaggacgtgcaggaccccagcgtgttcgtgaccttccccctggaggaggacgagaccgtgagcctggtggcctggaccaccaccccctggaccctgcccagcaacctggccgtgtgcgtgaaccccgagatgcagtacgtgaagatcaaggacgtggccagaggcagactgctgatcctgatggaggccagactgagcgccctgtacaagctggagagcgactacgagatcctggagagattccccggcgcctacctgaagggcaagaagtacagacccctgttcgactacttcctgaagtgcaaggagaacggcgccttcaccgtgctggtggacaactacgtgaaggaggaggagggcaccggcgtggtgcaccaggccccctacttcggcgcctag

SEQ ID NO: 176337 - DNA, 513 bp, Artificial Sequence
  derived and/or modified sequence
atggccccctacacccccttcctgaccgagctgatgtaccagaacctgaaggtgctgatcgaccccgtgagcgtgcaggacaaggacaccctgagcatccactacctgatgctgcccagagtgagagaggagctgatcgacaagaagaccgagagcgccgtgagccagatgcagagcgtgatcgagctgggcagagtgatcagagacagaaagaccatccccatcaagctgaagggcagcgagctggagatcaccctgaccagaggcagcagcctgcccggccccgcctgcgcctacgtgaacctgaacatctgcgccaacggcagcgagcagggcggcgtgctgctgctggagaaccccaagggcgacaacagactggacctgctgaagctgaagagcgtggtgaccagcatcttcggcgtgaagaacaccgagctggccgtgttccacgacgagaccgagatccagaaccagaccgacctgctgagcctgagcggcaagaccctgtgctag

SEQ ID NO: 176338 - DNA, 3459 bp, Artificial Sequence
  derived and/or modified sequence
atgggcatcaccgagtacaacaaccagtgcagagccatcgtgatgagatacagcgccgagtggaagagcaccgtgagcagactgggcagatggatcgacttcgacaacgactacaagaccctgtacccccagttcatggagagcgtgtggtgggtgttcaagcagctgtacgacaagggcctggtgtacagaggcgtgaaggtgatgcccttcagcaccgcctgcaacacccccctgagcaacttcgagagccaccagaactacaaggacgtgcaggaccccagcgtgttcgtgaccttccccctggaggaggacgagaccgtgagcctggtggcctggaccaccaccccctggaccctgcccagcaacctggccgtgtgcgtgaaccccgagatgcagtacgtgaagatcaaggacgtggccagaggcagactgctgatcctgatggaggccagactgagcgccctgtacaagctggagagcgactacgagatcctggagagattccccggcgcctacctgaagggcaagaagtacagacccctgttcgactacttcctgaagtgcaaggagaacggcgccttcaccgtgctggtggacaactacgtgaaggaggaggagggcaccggcgtggtgcaccaggccccctacttcggcgccgaggactacagagtgtgcatggacttcaacatcatcagaaaggacagcctgcccgtgtgccccgtggacgccagcggctgcttcaccaccgaggtgaccgacttcgccggccagtacgtgaaggacgccgacaagagcatcatcagaaccctgaaggagcagggcagactgctggtggccaccaccttcacccacagctaccccttctgctggagaagcgacacccccctgatctacaaggccgtgcccagctggttcgtgagagtggagaacatggtggaccagctgctgagaaacaacgacctgtgctactgggtgcccgagctggtgagagagaagagattcggcaactggctgaaggacgccagagactggaccatcagcagaaacagatactggggcacccccatccccctgtgggtgagcgacgacttcgaggaggtggtgtgcatcggcagcgtggccgagctggaggagctgagcggcgccaagatcagcgacctgcacagagagagcgtggaccacctgaccatccccagcagatgcggcaagggcagcctgcacagaatcagcgaggtgttcgactgctggttcgagagcggcagcatgccctacgcccaggtgcactaccccttcgagaacaagagagagttcgaggacgccttccccgccgacttcatcgccgagggcatcgaccagaccagaggctggttctacaccctgctggtgctggccaccgccctgttcggccagccccccttcaagaacgtgatcgtgaacggcctggtgctggccagcgacggccagaagatgagcaagagaaagaagaactaccccgaccccgtgagcatcatccagaagtacggcgccgacgccctgagactgtacctgatcaacagccccgtggtgagagccgagaacctgagattcaaggaggagggcgtgagagacgtgctgaaggacgtgctgctgccctggtacaacgcctacagattcctgatccagaacgtgctgagactgcagaaggaggaggagatcgagttcctgtacaacgagaacaccgtgagagagagccccaacatcaccgacagatggatcctgagcttcatgcagagcctgatcggcttcttcgagaccgagatggccgcctacagactgtacaccgtggtgcccagactggtgaagttcgtggacatcctgaccaactggtacgtgagaatgaacagaagaagactgaagggcgagaacggcatggaggactgcgtgatggccctggagaccctgttcagcgtgctgctgagcctgtgcagactgatggccccctacacccccttcctgaccgagctgatgtaccagaacctgaaggtgctgatcgaccccgtgagcgtgcaggacaaggacaccctgagcatccactacctgatgctgcccagagtgagagaggagctgatcgacaagaagaccgagagcgccgtgagccagatgcagagcgtgatcgagctgggcagagtgatcagagacagaaagaccatccccatcaagtaccccctgaaggagatcgtggtgatccaccaggaccccgaggccctgaaggacatcaagagcctggagaagtacatcatcgaggagctgaacgtgagaaaggtgaccctgagcaccgacaagaacaagtacggcatcagactgagagccgagcccgaccacatggtgctgggcaagagactgaagggcgccttcaaggccgtgatgaccagcatcaagcagctgagcagcgaggagctggagcagttccagaagaccggcaccatcgtggtggagggccacgagctgcacgacgaggacatcagactgatgtacaccttcgaccaggccaccggcggcaccgcccagttcgaggcccacagcgacgcccaggccctggtgctgctggacgtgacccccgaccagagcatggtggacgagggcatggccagagaggtgatcaacagaatccagaagctgagaaagaagtgcaacctggtgcccaccgacgagatcaccgtgtactacaaggccaagagcgagggcacctacctgaacagcgtgatcgagagccacaccgagttcatcttcaccaccatcaaggcccccctgaagccctaccccgtgagccccagcgacaaggtgctgatccaggagaagacccagctgaagggcagcgagctggagatcaccctgaccagaggcagcagcctgcccggccccgcctgcgcctacgtgaacctgaacatctgcgccaacggcagcgagcagggcggcgtgctgctgctggagaaccccaagggcgacaacagactggacctgctgaagctgaagagcgtggtgaccagcatcttcggcgtgaagaacaccgagctggccgtgttccacgacgagaccgagatccagaaccagaccgacctgctgagcctgagcggcaagaccctgtgcgtgaccgccggcagcgcccccagcctgatcaacagcagcagcaccctgctgtgccagtacatcaacctgcagctgctgaacgccaagccccaggagtgcctgatgggcaccgtgggcaccctgctgctggagaaccccctgggccagaacggcctgacccaccagggcctgctgtacgaggccgccaaggtgttcggcctgagaagcagaaagctgaagctgttcctgaacgagacccagacccaggagatcaccgaggacatccccgtgaagaccctgaacatgaagaccgtgtacgtgagcgtgctgcccaccaccgccgacttctag

SEQ ID NO: 176339 - DNA, 750 bp, Artificial Sequence
  derived and/or modified sequence
atggccccctacacccccttcctgaccgagctgatgtaccagaacctgaaggtgctgatcgaccccgtgagcgtgcaggacaaggacaccctgagcatccactacctgatgctgcccagagtgagagaggagctgatcgacaagaagaccgagagcgccgtgagccagatgcagagcgtgatcgagctgggcagagtgatcagagacagaaagaccatccccatcaagtaccccctgaaggagatcgtggtgatccaccaggaccccgaggccctgaaggacatcaagagcctggagaagtacatcatcgaggagctgaacgtgagaaaggtgaccctgagcaccgacaagaacaagtacggcatcagactgagagccgagcccgaccacatggtgctgggcaagagactgaagggcgccttcaaggccgtgatgaccagcatcaagcagctgagcagcgaggagctggagcagttccagaagaccggcaccatcgtggtggagggccacgagctgcacgacgaggacatcagactgatgtacaccttcgaccaggccaccggcggcaccgcccagttcgaggcccacagcgacgcccaggccctggtgctgctggacgtgacccccgaccagagcatggtggacgagggcatggccagagaggtgatcaacagaatccagaagctgagaaagaagtgcaacctggtgcccaccgacgagatcaccgtgtactacaaggccaagagctag

SEQ ID NO: 176340 - DNA, 816 bp, Artificial Sequence
  derived and/or modified sequence
atgatggtgctgctgctgcagctggactgcctgaccatggacatctacctgagagacaaggacaccctgagcatccactacctgatgctgcccagagtgagagaggagctgatcgacaagaagaccgagagcgccgtgagccagatgcagagcgtgatcgagctgggcagagtgatcagagacagaaagaccatccccatcaagctgaagggcagcgagctggagatcaccctgaccagaggcagcagcctgcccggccccgcctgcgcctacgtgaacctgaacatctgcgccaacggcagcgagcagggcggcgtgctgctgctggagaaccccaagggcgacaacagactggacctgctgaagctgaagagcgtggtgaccagcatcttcggcgtgaagaacaccgagctggccgtgttccacgacgagaccgagatccagaaccagaccgacctgctgagcctgagcggcaagaccctgtgcgtgaccgccggcagcgcccccagcctgatcaacagcagcagcaccctgctgtgccagtacatcaacctgcagctgctgaacgccaagccccaggagtgcctgatgggcaccgtgggcaccctgctgctggagaaccccctgggccagaacggcctgacccaccagggcctgctgtacgaggccgccaaggtgttcggcctgagaagcagaaagctgaagctgttcctgaacgagacccagacccaggagatcaccgaggacatccccgtgaagaccctgaacatgaagaccgtgtacgtgagcgtgctgcccaccaccgccgacttctag

SEQ ID NO: 176341 - protein, 771 aa, Artificial Sequence
  derived and/or modified sequence
MSGRSVRLRSVPIQSLSELERARLQEVAFYQLQQDCDLSCQITIPKDGQKRKKSLRKKLDSLGKEKNKDKEFIPQAFGMPLSQVIANDRAYKLKQDLQRDEQKDASDFVASLLPFGNKRQNKELSSSNSSLSSTSETPNESTSPNTPEPAPRARRRGAMSVDSITDLDDNQSRLLEALQLSLPAEAQSKKEKARDKKLSLNPIYRQVPRLVDSCCQHLEKHGLQTVGIFRVGSSKKRVRQLREEFDRGIDVSLEEEHSVHDVAALLKEFLRDMPDPLLTRELYTAFINTLLLEPEEQLGTLQLLIYLLPPCNCDTLHRLLQFLSIVARHADDNISKDGQEVTGNKMTSLNLATIFGPNLLHKQKSSDKEFSVQSSARAEESTAIIAVVQKMIENYEALFMVPPDLQNEVLISLLETDPDVVDYLLRRKASQSSSPDMLQSEVSFSVGGRHSSTDSNKASSGDISPYDNNSPVLSERSLLAMQEDAAPGGSEKLYRVPGQFMLVGHLSSSKSRESSPGPRLGKDLSEEPFDIWGTWHSTLKSGSKDPGMTGSSGDIFESSSLRAGPCSLSQGNLSPNWPRWQGSPAELDSDTQGARRTQAAAPATEGRAHPAVSRACSTPHVQVAGKAERPTARSEQYLTLSGAHDLSESELDVAGLQSRATPQCQRPHGSGRDDKRPPPPYPGPGKPAAAAAWIQGPPEGVETPTDQGGQAAEREQQVTQKKLSSANSLPAGEQDSPRLGDAGWLDWQRERWQIWELLSTDNPDALPETLV

SEQ ID NO: 176342 - DNA, 492 bp, Artificial Sequence
  derived and/or modified sequence
atgcagagtgtagactctatgctggggacagtgggaggctgtggaggaggagaggctgcctccaccttctcaaaagatccctctggctgctgtgtggggaatgactgtcgggatggaggcagaggcctggagaggaggcacgggaggtggtctaggggagaagggggagaatctgggctgtgtagtggtggccagatggcttctgaaattgagtactgggatggattagccatctctgtcatggaagtggaaaaggcgtttggtagcacgaatgttctgtggaagacagagcccttctctttatgggcatgcacagctgcctgtcctcccagtctgtctcccaccctgctagcgctgggcctccccagagacgggaaagagctggcagagcagggctccctgtggactgtacttgagcctggaggagactggagccacagtcagagccagctgggaacccctgggcgcgggaaaggagctctaggtttttag

SEQ ID NO: 176343 - DNA, 2316 bp, Artificial Sequence
  derived and/or modified sequence
atgtctggccggagcgtccgcctgcgtagcgttcccatccagagtctgagcgagctagaacgagcgcgtctgcaagaagtcgcattttaccagctccaacaggattgtgacctcagttgccagattacaattcctaaggatggccagaagagaaagaagagcctgcgcaaaaaactcgactccctgggcaaggaaaagaataaagacaaggagttcatcccacaggccttcgggatgcccctaagtcaggtgatagccaacgaccgggcttacaaactcaaacaggacctgcaacgagacgaacagaaggacgcctcggacttcgtagcttctctgctgccctttggcaacaaaaggcaaaataaagagctgtccagttcaaacagtagcttgtcctcgacatcagagacgcccaatgaatccacatcacccaacactcccgagcctgccccccgggctcggcgacgcggcgctatgtcagtcgacagcattaccgatctggatgacaatcagtcacgcctactggaggctttgcagctgagcctccccgcagaagctcaaagcaagaaggaaaaggcccgggataaaaagttaagtcttaaccccatttatagacaagtccccagactggtcgactcttgttgtcagcatctggaaaagcatgggttacagacagtcgggatctttcgcgtaggctcctccaaaaagcgggttagacagctccgcgaggagttcgacagagggattgacgtatctctcgaggaagagcatagtgtgcacgacgtggcggcactcctgaaagaattcttgagggacatgccagaccccctccttacgagggaactgtacaccgcatttataaacaccttgctgcttgaacccgaagaacagctggggactttacagcttctgatttatctgttacctccctgtaactgtgatacactccataggcttctacagttcctgagcattgtagcaagacatgcagacgacaatatttccaaggacggccaggaggttactggaaataagatgacatcactgaacctggccacaattttcgggccaaatctgttgcacaagcagaagtcaagcgacaaagaattttccgtgcagtccagcgccagggctgaagagtctacagcaatcattgccgtggtccaaaaaatgatagaaaactatgaagccctgtttatggttccacctgacttacagaatgaagtgcttattagcctgctggagactgaccccgacgtggtggactatttacttagacggaaagcttcacagagttccagccctgatatgttacagtccgaggtttcattcagcgttggtgggagacacagcagcaccgacagcaacaaggcgtcatccggtgatatttccccatacgataacaacagccccgttctatccgagcggtcacttctagccatgcaggaggacgctgccccgggcggcagtgagaagctatacagagtgcccggacagtttatgctggtcggtcatctttcaagtagcaagagcagagagtcctcacctggtccaagactgggaaaagacctgtctgaggagccatttgacatttggggaacttggcactccactctgaaatcgggcagcaaagatcccggcatgaccggatcttccggagacatttttgagtcctcctctctgagggccgggccttgctcactttcacagggcaacctgtcccccaactggcctcggtggcaaggcagcccggccgagctggactccgacactcagggcgcgcgaaggactcaggcggccgcccccgccactgaagggcgagcccatcctgcggtgtcaagggcctgcagtacccctcacgtccaagtggcgggaaaggccgaaagacctacagccaggtccgagcagtacctgacgttgtctggcgcgcacgatctgagtgagagtgagctggatgtggccgggctgcagtcccgggcgacccctcagtgtcagaggccacacgggtcgggacgcgacgacaagcgacctccccccccttacccgggtccgggtaaaccggctgcagctgccgcctggatccagggacctcccgaaggtgtcgagaccccgacggaccagggcggacaggcggcagagcgggaacaacaggttacacagaaaaagctgtctagtgcgaactcgttacctgctggcgagcaagacagtccccgactcggagatgctggctggctggattggcaacgcgagaggtggcagatttgggagctcttgagcacagataaccctgatgcactgcccgaaaccttagtctag

SEQ ID NO: 176344 - DNA, 2316 bp, Artificial Sequence
  derived and/or modified sequence
atgtccggacgctccgttaggctgcggagcgtgccgatccaatccctgagcgagctggaacgagctagactccaggaagtggccttctaccagctgcaacaggattgcgatctatcctgccagatcacaattccaaaggatgggcaaaagcgtaagaagtcactgcggaagaaactggatagcctcggaaaagaaaagaacaaagacaaggaatttattccccaagccttcgggatgcctttaagccaagtcattgctaacgatcgcgcctacaagctgaagcaggacctgcagagagatgagcagaaagacgcttcggactttgttgctagtctcctcccctttgggaacaagcgacagaataaggaactgtcttcaagcaattcctccctgagttccactagtgagacgccaaacgaatcgacatctcctaacactccggagcccgccccgcgggcacgaaggcggggcgccatgtctgtcgattccattacagatcttgacgataatcaatccaggctgctcgaggcgttgcagctctcacttcccgccgaggcacagagcaagaaggagaaggcaagagataaaaaactctccctaaaccccatatacagacaggtcccacgtctcgtagactcctgttgccagcatctggaaaaacacggcctgcagaccgtaggaatattcagagtaggctctagtaagaagcgagttcggcaactgagggaagaattcgataggggaatcgatgtcagtctggaggaggaacacagtgttcacgatgtggccgcccttctcaaggaatttctgcgggacatgccagatccactgctgactagagaactgtatacagcgttcataaatacattgctgctggagccagaggaacagttaggcaccctgcagcttctgatctatttgctgcccccttgtaattgtgacaccctgcacaggttgttacagttcctgagcattgtggctcgccatgccgacgataatatctctaaagacggtcaagaggtcacgggcaacaaaatgacaagcctgaatctggctactatcttcggcccgaacctcctgcataaacagaaatctagcgataaggagttttcagtacagagcagcgctagggcagaagaaagcactgctatcattgccgtggtgcaaaagatgatcgagaattatgaggcattattcatggtcccacccgatcttcagaacgaggtgctcattagccttctggagaccgaccccgacgttgtcgactacctattacggagaaaggctagccagtcttccagccctgacatgctacaatctgaagtgagctttagcgtcggaggcagacattcctcgactgacagcaacaaagcatcctccggagacatatcaccttatgacaataatagtcccgtgttgtcagaaaggtcgctcttagccatgcaggaagatgctgcacccgggggctcagagaagctgtatagagtgccaggacagtttatgctcgtggggcacttgagttcaagcaaatcaagagaatcatcacctggtccgcgattgggtaaggatttgtctgaggaaccattcgacatttggggcacgtggcattctacactgaagtcgggctccaaggatcccgggatgactggttcctctggggatatctttgagtcttcctccctgagagcagggccatgttcgctgagtcagggcaatctttccccaaattggccacgctggcagggatcaccagccgagctcgattccgacacacaaggagctcgtcggactcaagccgcagcccctgcgacagagggaagggcacaccccgcagtgtccagggcttgctctacgccacatgttcaggtggcaggcaaggcagagcgcccaactgctcgaagcgagcagtacctgaccctttctggtgcccacgatctgagcgaatccgaactcgatgttgctgggttacagtcccgcgccacccctcagtgtcagcggccgcatgggagcggtcgcgatgataaacgccccccaccaccatacccaggccccggcaaacccgccgcagcggcggcgtggattcaggggcctcctgagggcgttgagacaccgactgaccagggtggccaggccgccgagcgagagcagcaggtcacccaaaagaaactgtcaagcgccaattccctgcctgctggcgaacaggatagtccccggctgggagacgcaggatggttggactggcaacgcgagcgttggcagatatgggaactactgagtactgataatccggacgccttgccagagacgttggtttag

SEQ ID NO: 176345 - DNA, 2316 bp, Artificial Sequence
  derived and/or modified sequence
atgagcggccgctctgtgcggctgcggtctgtgcccatccagagcctgtctgagctggagcgggcccggctgcaggaggtggccttctaccagctgcagcaggactgtgacctgagctgccagatcaccatccccaaggatggccagaagaggaagaagagcctgaggaagaagctggacagcctgggcaaggagaagaacaaggacaaggagttcatcccccaggccttcggcatgcccctgagccaggtgattgccaatgaccgggcctacaagctgaagcaggacctgcagagagatgagcagaaggatgccagtgactttgtggccagcctgctgccctttggaaacaagaggcagaacaaggagctgagcagcagcaacagcagcctgagcagcaccagcgagaccccaaatgaaagcaccagccccaacaccccagagcccgccccccgggccaggagaagaggagccatgtctgtggacagcatcacagacctggatgacaaccagagccggctgctggaggccctgcagctgagcctgcctgctgaggcccagagcaagaaggagaaggcccgggacaagaagctgagcctgaaccccatctaccggcaggtgccccggctggtggacagctgctgccagcacctggagaagcacggcctgcagacagtgggcatcttccgggtgggcagcagcaagaagagggtgcggcagctgcgggaggagtttgaccggggcattgatgtgtccctggaggaggagcacagcgtgcatgatgtggccgccctgctgaaggagttcctgcgggacatgccagaccccctgctgacccgggagctgtacacagccttcatcaacaccctgctgctggagcctgaggagcagctgggcaccctgcagctgctgatctacctgctgcccccctgcaactgtgacaccctgcaccggctgctgcagttcctgagcatcgtggcccggcatgctgatgacaacatcagcaaggatggccaggaggtgacaggcaacaagatgaccagcctgaacctggccaccatcttcggccccaacctgctgcacaagcagaagagcagtgacaaggagttctctgtgcagagcagcgcccgggcagaggagagcacagccatcatcgctgtggtgcagaagatgattgaaaattatgaggccctcttcatggtgcccccagacctgcagaatgaggtgctgatcagcctgctggagacagatcctgatgtggtggactacctgctgcggaggaaggccagccagagcagcagcccagacatgctgcagagcgaggtgtccttctctgtgggcggccgccacagcagcacagacagcaacaaggccagcagcggggacatcagcccctatgacaacaacagccctgtgctgtctgagaggagcctgctggccatgcaggaggatgctgcccctgggggcagcgagaagctgtacagagtgcccggccagttcatgctggtgggccacctgagcagcagcaagagccgggagagcagccctggcccccggctgggcaaggacctgtctgaggagccctttgacatctggggcacctggcacagcaccctgaagagcggcagcaaggaccccggcatgacaggcagcagcggggacatctttgagagcagcagcctgcgggccggcccctgcagcctgagccagggcaacctgagccccaactggccccgctggcagggcagccctgctgagctggacagcgacacccagggcgcccggaggacccaggccgccgccccagccacagagggccgggcccaccctgctgtgtcccgggcctgcagcaccccccacgtgcaggtggccggcaaggccgagcggcccacagcccggtctgagcagtacctgaccctgagcggggcccatgacctgtctgagagcgagctggatgtggccggcctgcagagccgggccaccccccagtgccagaggccccacggcagcggcagagatgacaagaggcctcctccaccctacccaggccctgggaagccagctgctgctgctgcctggatccagggccccccagagggcgtggagacccccacagaccagggcggccaggccgctgagcgggagcagcaggtgacccagaagaagctgagcagcgccaacagcctgcctgctggggagcaggacagcccccggctgggagatgctggctggctggactggcagcgggagcgctggcagatctgggagctgctgagcacagacaacccagatgccctgcctgagaccctggtgtag

SEQ ID NO: 176346 - DNA, 2316 bp, Artificial Sequence
  derived and/or modified sequence
atgagcggccggagcgtgcggctgcggagcgtgcccatccagagcctctcggagctggaacgagcacgcttacaggaggtggctttctaccagctgcagcaagattgcgatctctcgtgtcagattacaattccgaaagacgggcagaagcgaaaaaagtctctgagaaagaagttggatagtctgggaaaggagaagaacaaagacaaagagttcattccacaggcattcggaatgcctttgtcacaagtgattgcaaacgaccgtgcctataaattaaagcaggatcttcagcgcgatgaacaaaaagacgcttcagacttcgtggcctctctgctcccttttggcaacaagaggcaaaataaggagctgtcctcctcaaactcaagcctttcaagtacgtctgaaacaccaaacgagtctactagccctaataccccagagcccgcgcctagggctcgacgacggggcgccatgtctgtcgactccataacggacctggacgacaatcagtcccgtttgctggaggctttgcagctaagtctgccagctgaagcccagtctaagaaggaaaaggcaagggataaaaagctgtccctgaaccccatctaccgtcaggtaccacgcttggtggatagttgctgccaacatctcgaaaaacatggactgcagactgtcggcatctttcgggtgggctcgtcgaagaaacgggtgagacagttgcgggaggagtttgatcgaggaattgacgtgtcactcgaggaggagcatagcgtgcacgatgtggctgcactgctgaaggaattcctaagggatatgccggatccgctcctcacccgagaactgtatacagcttttattaacacactcttactggagcctgaggaacagttgggcacgctgcagctactgatctaccttctgccgccctgcaattgcgataccctccaccgcctcctgcaattcctatcaatcgttgcgagacatgcggacgataacatctccaaagatgggcaggaagtgactgggaacaagatgacttctctgaacctggctacaatctttgggcctaatctcttacataaacagaaatctagcgataaagagttttcggtacaaagctcagccagggctgaggagagtaccgctatcattgcggtggtccaaaaaatgatcgagaactatgaagcgttgttcatggtgccccccgatctgcaaaacgaagtgctgataagcctgttagaaacagatccagatgtagtggactatctgctgcgcagaaaagccagccaatcctccagtcccgatatgctacagagtgaagtgagcttcagtgttggagggcgtcactcctccactgacagcaataaagcaagcagcggagacatctccccgtacgacaataacagccctgtcctgagcgaaagatcgctgttagccatgcaggaagatgccgctcccggcggcagcgagaaactctaccgggtcccgggccagttcatgcttgttggacacctctcatccagcaagtctagggagtctagtccagggccgagactgggcaaagacctttcagaagagcccttcgacatttggggtacttggcattccactttgaaaagtggatctaaagatccaggtatgaccgggtcctcaggagacatcttcgagtcatcctcattacgcgccgggccgtgttccttaagtcaggggaacttgtcccctaattggccccgttggcaggggtccccagctgagctcgatagcgacacccagggggccagacggacacaggcggctgccccagctacagaaggcagagcacaccccgccgtgtcacgagcctgctccacaccacacgtgcaggtcgccggtaaagccgagcgtcccacagcacggagcgagcagtatctgactctttccggggcccatgatctgtccgaaagcgaactggatgtcgctgggcttcagagccgagccacacctcagtgtcagaggcctcatgggagcggcagagacgataagcgtcctcccccgccttatccaggcccggggaagcccgctgcagccgccgcctggatccagggccccccggaaggcgtagaaacgcccaccgatcagggggggcaggctgctgagcgcgaacagcaggtcacacagaagaaactgagttccgcaaattccttgcccgccggcgagcaggattcaccccgactcggggacgccgggtggcttgattggcagcgtgagcggtggcagatttgggagttgctttctacggacaacccagacgctttgcctgagacattggtctag

SEQ ID NO: 176347 - DNA, 2316 bp, Artificial Sequence
  derived and/or modified sequence
atgagcggccggagcgtgcggctgcggagcgtgcccatccagagcctgtccgagttggagcgagcccgactgcaggaagttgccttctaccagttacaacaagattgcgatctgtcatgtcagatcaccatccccaaagacgggcagaaacgaaaaaagtcactgagaaaaaaactcgactctctaggtaaagagaagaacaaggacaaggagttcattccccaggcattcggcatgcccctcagtcaggttattgccaatgatagagcatataagctcaagcaagacttgcagcgggacgagcagaaagatgcatccgattttgtggcgagcttgttgcctttcggaaacaaacgccagaacaaagaacttagttcttccaactcctctctgagctccacgagcgagacccccaatgaatctactagccccaacactcctgagcccgctcccagggcccgcagacgtggggcaatgagtgttgatagcattactgacctcgatgacaatcagtcgcgactgctggaggccctgcaactgagcctaccagcagaggcccagagcaagaaggagaaggctcgtgacaagaagctcagcttgaatccgatttatcgacaggtgccccgcctggtggattcctgttgccagcaccttgagaagcacggcctacagacggtcggcatctttagagtcgggtcgagtaagaaaagagtcagacaactccgggaggagtttgatcggggaattgatgtcagtctggaagaggagcactccgttcacgatgttgctgccttgctcaaagagttcctccgcgacatgccagacccactcctgacgagagaactatacacagccttcatcaacaccttactgttagaacctgaagagcagctgggcactctgcaactgctgatctatctgcttccaccctgcaactgtgacactctgcaccggctcctacagttcctttccatcgttgccaggcacgctgatgataatatcagtaaagacggacaggaggtgaccggcaataaaatgacttcactgaaccttgcaaccatcttcggcccaaatcttctgcataaacagaagtcctctgacaaggagttttccgttcagagctcagcccgcgcggaagaatctactgccataatagcagtggtgcagaagatgattgagaactatgaagctttattcatggtccctcctgacctgcagaacgaggtcttgatctctctgctggagactgaccccgatgtggttgactatctacttaggagaaaagcgtcgcagtccagcagcccagatatgctccagtcagaagtcagttttagcgtcggcggacgacactcctccacagattcaaataaagcttccagtggagacataagtccctacgataataactcaccagtcctctcagaaagatccttgcttgcgatgcaggaagatgccgctcccggcggaagcgagaaactgtaccgggtgccagggcagtttatgctagtgggccacctgtctagctcaaaatcccgagagtcctcacccggacccagactggggaaagacctctcggaagaacctttcgacatctggggcacatggcacagcaccctgaaatctgggagcaaagatcccggcatgaccggtagctctggtgatatctttgagtcaagctcgctccgagccggcccctgctctctgtctcaggggaacctctccccaaattggcctagatggcaggggtcccccgccgagttagactcagatacgcaaggcgcgcgacgcacacaggccgccgcaccggccaccgaggggcgagcccatcccgcggtatcgcgagcatgttctacgccacacgtgcaggtagccggaaaagctgaaagacccactgcgagaagcgagcaatatttgacattgagtggggctcacgatttgtccgagagcgagttagacgtggcagggctgcagtcgcgcgcaacaccccagtgccaacgaccgcatggatccggaagagatgataaaaggcccccacccccctatcctggccctgggaagcccgctgccgcagccgcctggatacaaggtcctcctgaaggggtggaaacaccgaccgatcaggggggacaggccgcggaacgggagcagcaagtcacccagaagaaactgtcaagcgctaactccctgcctgctggggagcaggattctccgcgcttgggtgacgccggttggcttgactggcagcgcgaaaggtggcagatatgggagttgctgtcaaccgacaatcccgacgctttacccgaaactctcgtatag

SEQ ID NO: 176348 - DNA, 2316 bp, Artificial Sequence
  derived and/or modified sequence
atgtcagggaggagtgtgcggctcagatcagtgcccatacaatctctgagcgaacttgagagggctcgcctgcaagaggtggccttctatcagctacagcaggactgtgatctcagctgccagatcacaatcccaaaggatggacaaaagagaaagaagtcactgaggaagaaactggattctctcgggaaggagaaaaacaaagataaggagttcatccctcaggcattcggaatgccgctgtctcaggtgatcgccaatgatcgagcctataagcttaagcaagacctgcaacgcgatgaacagaaggacgcaagcgacttcgtggcatccctgctcccatttgggaacaagaggcaaaataaagagctgtcaagtagtaattcctcgcttagttctacgtctgaaacccccaatgagagtacatcacccaatactcctgagcctgctccacgagctcgccgaaggggggctatgtcagttgactccatcaccgaccttgacgataatcagagtaggctgctcgaggccctgcagctttccttgcctgccgaggcccagagtaagaaagagaaggccagggataaaaaactgtcactcaaccctatttataggcaggtgccgcgactcgttgattcatgttgccagcacctagaaaaacacggattacagacagtgggcatcttcagagttggcagctcgaagaagagggtgaggcagcttcgtgaagaattcgacagggggatagacgtctccttggaggaagaacactccgtccacgatgttgccgctctgttgaaagaattcctgagggacatgcctgatccactactgacaagagagttatatacagcctttattaacacgctacttctcgagccagaagaacagctcggtactctgcagctcctgatatacctactgcctccatgcaattgcgatacgttacatcggctgcttcaattcttaagcatagtagctagacacgccgatgataatatcagtaaagacgggcaagaagtaacaggcaacaaaatgacctctctcaacctagccaccatctttggtcccaatctgctgcacaagcaaaagtcgtctgacaaggagttctctgtgcagagcagtgctcgggcagaagaatctaccgccattattgccgtggtgcaaaagatgatcgaaaattacgaagctctcttcatggttccaccagacttacagaacgaggtactcatttcactgctggaaaccgatcccgacgtggtggattacctgttgaggaggaaggcttcgcagtctagctcccccgacatgctgcagagtgaggtctccttttcagtgggcggacggcactcctcaacggattcaaacaaggccagctccggcgatatcagcccctacgacaacaattctccagttctgtccgagcgaagtctgctggctatgcaggaagatgccgcaccagggggttccgagaagctataccgtgtccctggacagttcatgttagtcggtcacctgtcgtccagcaagagcagagagtctagccctggtcccagactgggcaaagacctgtccgaggagccctttgacatctggggcacttggcatagcacactgaaaagcggcagtaaggacccgggtatgacgggatcctctggagatatcttcgagagtagtagcctgcgcgcaggaccttgtagcctgtctcagggaaacttatctcccaactggccccgatggcagggaagccccgcagaactggactctgatacccagggggcaaggcggacgcaggcggctgctcccgctacggagggaagagcgcacccagccgtgtcacgcgcatgctctacacctcacgttcaggtggctgggaaagccgaacgtccgaccgcaagatctgaacagtacttaactctgagcggagctcatgatctctcagagagcgagctggacgtcgccggacttcagtcccgtgcaacgcctcaatgccagcgaccacatggctcagggcgtgatgataagcgaccaccaccaccctaccccggaccaggaaaacctgcagccgcagccgcttggatacaggggccaccagagggagtggagacaccaaccgaccaaggaggacaggcagcagagcgcgagcaacaggtcacgcaaaagaaactgagctcagctaattccttacccgctggcgagcaggattcccccagattaggggacgccggatggctggactggcagcgggaaaggtggcagatttgggagctgctctcaaccgataatccagacgccctgccagaaacactggtgtag

SEQ ID NO: 176349 - DNA, 2316 bp, Artificial Sequence
  derived and/or modified sequence
atgagcggacgctctgtgaggctgcgttccgtccctatccagtcactctcagagctggaacgggcacggctccaagaggtggcattttaccagttacagcaggactgtgatctaagctgccagatcacaataccaaaggatggccaaaagaggaagaagtcgcttcgtaagaaactcgattcactgggtaaagaaaagaataaagacaaagagttcatcccccaggccttcggcatgccacttagccaagttatagcaaatgacagggcatataagttgaagcaggatctacagcgagacgagcagaaagatgcctccgattttgtggcctccctgcttcctttcggcaacaaacggcagaataaggaactatcttcctctaactcctccttatcctcaacaagtgagacccccaatgagtcaacgagtcccaacactccagagcctgcgccaagagccagacgcaggggtgcgatgtcagtggattcaatcacagatctcgacgacaatcagagcagactcctggaagcactccagctgtccctacccgctgaggctcagagcaaaaaggaaaaggccagggacaagaagttgtccctgaatcccatatatcgacaggtacccagattggtggattcatgttgtcagcacctggaaaagcatggtctacaaacggtgggaatctttagggtggggtccagcaagaagagggtacggcagcttcgcgaagaatttgatcggggtatcgatgtcagccttgaagaggaacattctgtccatgacgtcgccgcactgctcaaggagttcttgagagacatgcccgatcccctgctaacccgcgaactgtataccgcttttatcaacacgctgctcctggagccggaagaacaactcgggacgctgcagctgctgatatatctgttaccaccctgcaattgcgacacgctgcatcgcctcctccagtttctgagtatagttgctcgccacgcagacgacaacatctctaaagatggacaggaagtgaccggcaataaaatgacctccctgaatctggccactattttcggccctaatcttctccataagcagaaatctagcgacaaagagttctcagtgcagtcctccgcaagagcagaggagtctaccgctatcattgccgtggttcagaagatgatcgagaactacgaagcactgtttatggtgccaccggatctgcagaatgaggtactgatctcactactggagacagacccagatgtagtggactaccttttacgcagaaaagcgtcccagagcagttccccagacatgctgcagtctgaggtgtcgttcagcgtgggcggtcggcacagtagcaccgactcaaacaaagcatcctcgggcgacatttcaccgtatgataataattctccagttctcagcgagcgaagcctgcttgcgatgcaggaagacgcagcccctggagggtcagagaaattatacagggtacccggacaattcatgcttgtggggcatctttcaagttccaagtcacgagagtcttccccagggcctagattaggcaaggacctgtcagaggagcctttcgacatttggggcacttggcacagcactctgaaatcaggttccaaggatcctggcatgactggcagtagtggtgacatatttgagagctcaagccttagagccggtccatgctccttgagtcaggggaacttgtctccgaattggcctagatggcagggatcgcctgccgagctggacagtgacacccagggggcaagaaggacccaggccgctgccccagccaccgaaggtcgggctcaccctgcagtaagtcgcgcttgttccaccccgcacgtgcaggtagcgggaaaagccgagcgccctaccgcccgatcagaacagtacctcacactctccggagcacatgacctctctgagagcgagcttgacgtcgcagggctacagtcccgagcaacccctcagtgccagaggccccatggctcggggagagatgacaagagaccaccaccaccttatcccggacccggaaagccagctgctgctgctgcctggatacaggggcctccggagggagtggagacgcccacagaccaagggggacaagctgcagaaagggagcagcaagtgacccaaaagaagcttagttcagcaaactctttgcccgctggcgagcaggactccccccgtctcggggatgctgggtggctcgattggcagagggagagatggcagatttgggagttgctctctacagataaccccgacgcactgcccgagacccttgtctag

SEQ ID NO: 176350 - DNA, 2316 bp, Artificial Sequence
  derived and/or modified sequence
atgagcggcagaagcgtgagactgagaagcgtgcccatccagagcctgagcgagctggagagagccagactgcaggaggtggccttctaccagctgcagcaggactgcgacctgagctgccagatcaccatccccaaggacggccagaagagaaagaagagcctgagaaagaagctggacagcctgggcaaggagaagaacaaggacaaggagttcatcccccaggccttcggcatgcccctgagccaggtgatcgccaacgacagagcctacaagctgaagcaggacctgcagagagacgagcagaaggacgccagcgacttcgtggccagcctgctgcccttcggcaacaagagacagaacaaggagctgagcagcagcaacagcagcctgagcagcaccagcgagacccccaacgagagcaccagccccaacacccccgagcccgcccccagagccagaagaagaggcgccatgagcgtggacagcatcaccgacctggacgacaaccagagcagactgctggaggccctgcagctgagcctgcccgccgaggcccagagcaagaaggagaaggccagagacaagaagctgagcctgaaccccatctacagacaggtgcccagactggtggacagctgctgccagcacctggagaagcacggcctgcagaccgtgggcatcttcagagtgggcagcagcaagaagagagtgagacagctgagagaggagttcgacagaggcatcgacgtgagcctggaggaggagcacagcgtgcacgacgtggccgccctgctgaaggagttcctgagagacatgcccgaccccctgctgaccagagagctgtacaccgccttcatcaacaccctgctgctggagcccgaggagcagctgggcaccctgcagctgctgatctacctgctgcccccctgcaactgcgacaccctgcacagactgctgcagttcctgagcatcgtggccagacacgccgacgacaacatcagcaaggacggccaggaggtgaccggcaacaagatgaccagcctgaacctggccaccatcttcggccccaacctgctgcacaagcagaagagcagcgacaaggagttcagcgtgcagagcagcgccagagccgaggagagcaccgccatcatcgccgtggtgcagaagatgatcgagaactacgaggccctgttcatggtgccccccgacctgcagaacgaggtgctgatcagcctgctggagaccgaccccgacgtggtggactacctgctgagaagaaaggccagccagagcagcagccccgacatgctgcagagcgaggtgagcttcagcgtgggcggcagacacagcagcaccgacagcaacaaggccagcagcggcgacatcagcccctacgacaacaacagccccgtgctgagcgagagaagcctgctggccatgcaggaggacgccgcccccggcggcagcgagaagctgtacagagtgcccggccagttcatgctggtgggccacctgagcagcagcaagagcagagagagcagccccggccccagactgggcaaggacctgagcgaggagcccttcgacatctggggcacctggcacagcaccctgaagagcggcagcaaggaccccggcatgaccggcagcagcggcgacatcttcgagagcagcagcctgagagccggcccctgcagcctgagccagggcaacctgagccccaactggcccagatggcagggcagccccgccgagctggacagcgacacccagggcgccagaagaacccaggccgccgcccccgccaccgagggcagagcccaccccgccgtgagcagagcctgcagcaccccccacgtgcaggtggccggcaaggccgagagacccaccgccagaagcgagcagtacctgaccctgagcggcgcccacgacctgagcgagagcgagctggacgtggccggcctgcagagcagagccaccccccagtgccagagaccccacggcagcggcagagacgacaagagacccccccccccctaccccggccccggcaagcccgccgccgccgccgcctggatccagggcccccccgagggcgtggagacccccaccgaccagggcggccaggccgccgagagagagcagcaggtgacccagaagaagctgagcagcgccaacagcctgcccgccggcgagcaggacagccccagactgggcgacgccggctggctggactggcagagagagagatggcagatctgggagctgctgagcaccgacaaccccgacgccctgcccgagaccctggtgtag

SEQ ID NO: 176351 - protein, 974 aa, Artificial Sequence
  derived and/or modified sequence
MSAQSLLHSVFSCSSPASSSAASAKGFSKRKLRQTRSLDPALIGGCGSDEAGAEGSARGATAGRLYSPSLPAESLGPRLASSSRGPPPRATRLPPPGPLCSSFSTPSTPQEKSPSGSFHFDYEVPLGRGGLKKSMAWDLPSVLAGPASSRSASSILCSSGGGPNGIFASPRRWLQQRKFQSPPDSRGHPYVVWKSEGDFTWNSMSGRSVRLRSVPIQSLSELERARLQEVAFYQLQQDCDLSCQITIPKDGQKRKKSLRKKLDSLGKEKNKDKEFIPQAFGMPLSQVIANDRAYKLKQDLQRDEQKDASDFVASLLPFGNKRQNKELSSSNSSLSSTSETPNESTSPNTPEPAPRARRRGAMSVDSITDLDDNQSRLLEALQLSLPAEAQSKKEKARDKKLSLNPIYRQVPRLVDSCCQHLEKHGLQTVGIFRVGSSKKRVRQLREEFDRGIDVSLEEEHSVHDVAALLKEFLRDMPDPLLTRELYTAFINTLLLEPEEQLGTLQLLIYLLPPCNCDTLHRLLQFLSIVARHADDNISKDGQEVTGNKMTSLNLATIFGPNLLHKQKSSDKEFSVQSSARAEESTAIIAVVQKMIENYEALFMVPPDLQNEVLISLLETDPDVVDYLLRRKASQSSSPDMLQSEVSFSVGGRHSSTDSNKASSGDISPYDNNSPVLSERSLLAMQEDAAPGGSEKLYRVPGQFMLVGHLSSSKSRESSPGPRLGKDLSEEPFDIWGTWHSTLKSGSKDPGMTGSSGDIFESSSLRAGPCSLSQGNLSPNWPRWQGSPAELDSDTQGARRTQAAAPATEGRAHPAVSRACSTPHVQVAGKAERPTARSEQYLTLSGAHDLSESELDVAGLQSRATPQCQRPHGSGRDDKRPPPPYPGPGKPAAAAAWIQGPPEGVETPTDQGGQAAEREQQVTQKKLSSANSLPAGEQDSPRLGDAGWLDWQRERWQIWELLSTDNPDALPETLV

SEQ ID NO: 176352 - protein, 690 aa, Artificial Sequence
  derived and/or modified sequence
MSAQSLLHSVFSCSSPASSSAASAKGFSKRKLRQTRSLDPALIGGCGSDEAGAEGSARGATAGRLYSPSLPAESLGPRLASSSRGPPPRATRLPPPGPLCSSFSTPSTPQEKSPSGSFHFDYEVPLGRGGLKKSMAWDLPSVLAGPASSRSASSILCSSGGGPNGIFASPRRWLQQRKFQSPPDSRGHPYVVWKSELELYDLQILGTKPPMNSDTHRNFDPTATLRNQGDFTWNSMSGRSVRLRSVPIQSLSELERARLQEVAFYQLQQDCDLSCQITIPKDGQKRKKSLRKKLDSLGKEKNKDKEFIPQAFGMPLSQVIANDRAYKLKQDLQRDEQKDASDFVASLLPFGNKRQNKELSSSNSSLSSTSETPNESTSPNTPEPAPRARRRGAMSVDSITDLDDNQSRLLEALQLSLPAEAQSKKEKARDKKLSLNPIYRQVPRLVDSCCQHLEKHGLQTVGIFRVGSSKKRVRQLREEFDRGIDVSLEEEHSVHDVAALLKEFLRDMPDPLLTRELYTAFINTLLLEPEEQLGTLQLLIYLLPPCNCDTLHRLLQFLSIVARHADDNISKDGQEVTGNKMTSLNLATIFGPNLLHKQKSSDKEFSVQSSARAEESTAIIAVVQKMIENYEALFMVPPDLQNEVLISLLETDPDVVDYLLRRKASQSSTSSVLPAAVQACPQYPASMFTP

SEQ ID NO: 176353 - protein, 467 aa, Artificial Sequence [sequence omitted]

SEQ ID NO: 176354 - protein, 604 aa, Artificial Sequence
  derived and/or modified sequence
MKRLHIFGPKIHSSGGLWQQKGDFTWNSMSGRSVRLRSVPIQSLSELERARLQEVAFYQLQQDCDLSCQITIPKDGQKRKKSLRKKLDSLGKEKNKDKEFIPQAFGMPLSQVIANDRAYKLKQDLQRDEQKDASDFVASLLPFGNKRQNKELSSSNSSLSSTSETPNESTSPNTPEPAPRARRRGAMSVDSITDLDDNQSRLLEALQLSLPAEAQSKKEKARDKKLSLNPIYRQVPRLVDSCCQHLEKHGLQTVGIFRVGSSKKRVRQLREEFDRGIDVSLEEEHSVHDVAALLKEFLRDMPDPLLTRELYTAFINTLLLEPEEQLGTLQLLIYLLPPCNCDTLHRLLQFLSIVARHADDNISKDGQEVTGNKMTSLNLATIFGPNLLHKQKSSDKEFSVQSSARAEESTAIIAVVQKMIENYEALFMVPPDLQNEVLISLLETDPDVVDYLLRRKASQSSSPDMLQSEVSFSVGGRHSSTDSNKASSGDISPYDNNSPVLSERSLLAMQEDAAPGGSEKLYRVPGQFMLVGHLSSSKSRESSPGPRLGKDLSEEPFDIWGTWHSTLKSGSKDPGMTGTTPLLNISSQEDHRQKDLRLIFKIYP

SEQ ID NO: 176355 - DNA, 66 bp, Artificial Sequence
  derived and/or modified sequence
atgggagatcacctggatcttttacttggggtggtgttaatggcaggtccagtattcgggatttag

SEQ ID NO: 176356 - DNA, 2925 bp, Artificial Sequence
  derived and/or modified sequence
atgtcagctcagagcctccttcatagcgtttttagctgctcttccccagcctcaagctccgccgcatctgccaaaggatttagcaagagaaaacttcgccaaacaagatcacttgatccagccttaatcggaggatgtggttctgatgaagctggcgctgaagggtccgccagaggggcaacggccggtagactgtattcgccttcactgccagccgagtctctcggacccaggctggcttccagctctcgtgggccaccaccgcgtgccaccaggcttccacctccggggccactgtgttctagcttctctaccccatccacgccacaggagaaatctccatctggttctttccactttgactacgaagtaccactcggacgcgggggtctaaagaagtccatggcatgggatctacccagtgtcttagcaggccccgcatctagtcggtccgcgagttccatcctctgcagtagtggagggggtcccaacggaattttcgctagtcctcggaggtggctgcagcagcgcaaatttcaatccccccccgattcacggggacacccttacgtcgtgtggaaatccgagggagatttcacatggaattcaatgtccggaagatcggtgcgtttgaggtctgtgccaatacaatctctgagcgagcttgagagagcgcggttgcaggaggtggctttttaccagctgcaacaggactgcgatttatcttgccagattaccatcccaaaagatgggcagaagaggaaaaagagcttacgcaaaaagttagactcattaggtaaggaaaagaacaaggacaaggagtttattccacaggcgtttggtatgcccctgagccaggtgattgccaatgatcgcgcctacaagttgaaacaggatctccagagagatgagcaaaaggacgcaagtgacttcgttgcttccctcctgccatttggaaataaacgccagaacaaagagctgagctccagtaactcgagcctgtcatccacaagcgagacccctaatgagtctacctcacctaatacacctgagccagcccctcgagcgcgcagacgcggtgcaatgtccgtcgactcaatcactgacctcgatgacaaccagtccagattactggaagctctgcagttatctctgcccgccgaggctcagtcaaagaaggaaaaggctcgcgataagaagctatcactaaaccctatctaccgccaggtcccgaggctagtggacagctgctgccagcatctcgagaaacacgggctgcaaacggtgggcatcttcagagttggatctagtaaaaaaagagtgcggcagctgcgagaggagttcgatagaggcatcgacgtgtccctcgaggaggagcacagtgttcacgacgtagccgccctcttgaaagagttcctccgggacatgcccgacccccttttaacccgcgagctatacacggctttcattaacacgctgttactggaaccggaggagcagctgggcaccctgcagttactgatttatctcttacctccatgtaactgcgacaccctccataggctgctacagtttctgagtatagtagcccgtcatgcagacgataacatatcgaaagatggccaggaggtcacagggaataagatgacaagtctgaatctggccacgatctttggccctaacttactccataagcagaagtcctccgataaagagttctcagtacagagcagtgcgcgcgcagaagagtctacggccatcatagcagtcgtgcaaaaaatgattgagaattacgaggcccttttcatggtaccacctgatttacaaaacgaggtgctcatttccctgctagagacggatccggatgtagtcgactacttattgcgccggaaagcttcccagagctcctcccccgatatgctccagtcagaggtgagtttctccgtgggaggaagacactcgtcgacagattcaaataaggcctctagcggtgacatcagcccatatgataacaactccccggtgttgagtgagagatcactgctggctatgcaggaggatgccgcccctggggggtcggaaaagctgtatagagtgcctggtcaatttatgctggtcggacacttatcgagcagtaagtccagagagagttcacccggaccgagactcggcaaagacttgtctgaggaaccgttcgacatctgggggacatggcacagcacccttaagtcaggttctaaggatcctggcatgacaggtagttccggagatatattcgagtcatcaagtttacgggccggtccatgttcactgtcccagggaaatctcagtcctaactggccccgatggcagggttcacccgccgaactcgattcagacacccagggggcccggcgaactcaggcagcggcccccgccactgagggccgtgcgcatcccgctgtctcacgtgcatgtagtaccccacacgtccaggtggcagggaaagcggagagacccaccgcgagaagcgagcagtatctgacactctctggcgcacacgaccttagcgagtctgagctagacgtggccggtctccagagccgggccaccccccagtgccagaggccacacggatccggtcgagacgacaagagaccaccgcctccctatcccggccctgggaagcctgcggcagcagctgcatggattcaaggaccacctgagggtgtggagactcccacagatcagggcggtcaagccgcagaacgcgaacagcaggtcacccagaaaaagttatcgtccgctaattcgctgcctgccggtgagcaagactctccccgcctcggcgatgcaggctggctcgactggcagagagagcgctggcagatatgggagttactgagtactgataatccagatgcactccccgagacattggtgtag

SEQ ID NO: 176357 - DNA, 1815 bp, Artificial Sequence
  derived and/or modified sequence
atgaaacggctgcacattttcgggcccaagatccacagtagcggcgggctgtggcagcagaaaggggattttacgtggaacagtatgtcgggccggagtgtacgactgaggagcgtacctatccaatcactgagcgagctggagcgggccagattacaggaggtggcgttctatcaactccaacaggattgtgacctgagttgtcagattaccattcctaaagacggccaaaagaggaagaagagtctgagaaagaagctcgactccttgggtaaagaaaaaaataaagataaggagttcatcccccaggcgtttggaatgccactgagtcaggtgatcgcaaatgatcgcgcctacaaactcaagcaggatctccagagagatgagcagaaggacgcctctgactttgtggcttcgttgctgcccttcgggaacaagaggcagaataaggagttatcctcctcaaattcatccctcagtagcactagcgaaactcctaatgagtccactagccctaacacacccgagcctgcacctcgggctaggagaagaggcgcaatgtctgtagattccataacggacctggacgataaccaatctaggctcctggaagcactccagttgtctcttccagctgaagcccagagcaaaaaagaaaaggcaagagacaaaaaacttagcctgaatccaatctatcgccaggtgccaagactggtggactcatgctgccagcaccttgaaaagcatggcctgcaaacggttgggattttccgggtggggagttccaaaaagcgggtgaggcagttacgcgaggaatttgatcgaggcattgacgtgagtctggaagaggagcactcagtgcatgacgtggcagccttgctgaaggagtttctccgcgacatgcccgatcccctgctgacaagagaactgtataccgcttttattaatacactcctattggagccagaggagcaactggggacactgcaattgctgatctaccttcttcccccatgtaattgtgatacgttgcatcgtctgctgcagttccttagcatcgtggcacgccacgccgacgacaacattagtaaggacggacaagaggtgacagggaataaaatgaccagccttaatttggcaactatttttggtccaaacctgttgcataagcaaaagtcctccgacaaggagttcagcgtacaatcctcagccagggctgaagagtcaactgcgatcattgccgtagtgcagaaaatgatagaaaactatgaggcgctgtttatggtaccaccagacctacagaacgaggtgctcatctcgttacttgaaacagatcctgatgtggtggattatctcttaagaaggaaggcctcacaatcatcctcacccgatatgctgcaatccgaagtcagcttttcagtcggcgggagacatagctccacagattctaataaggctagttctggggacatcagtccatacgataataacagccctgttctttctgaacgatcccttctcgcaatgcaggaagacgcagcgcccggtgggagcgagaaactctacagggtgcctgggcagttcatgctggtgggtcacctgagcagctctaaatccagggagtctagccctggccctaggctcgggaaagatttaagtgaagaaccatttgacatctggggcacctggcactctacactcaagagtgggagcaaggatcctggtatgaccgggacaacccctctattgaatatcagctcccaggaagaccataggcagaaggatttgcgccttatttttaaaatttatccttag

SEQ ID NO: 176358 - DNA, 2925 bp, Artificial Sequence
  derived and/or modified sequence
atgtctgcccagagcctgctgcacagcgtcttcagctgcagcagccctgccagcagcagcgctgccagcgccaagggcttcagcaagaggaagctgcggcagaccaggagcctggaccctgccctgattggaggctgcggcagtgatgaagctggagctgagggcagcgcccggggggccacagctggccgcctgtacagccccagcctgcctgctgagagcctgggcccccggctggccagcagcagccggggccccccaccccgggccacccggctgcccccacctggccccctgtgcagcagcttcagcacccccagcaccccccaggagaagagccccagcggcagcttccactttgattatgaggtgcccctgggccggggcggcctgaagaagtccatggcctgggacctgcccagcgtgctggccggccctgccagcagccgcagcgccagcagcatcctgtgcagcagcggcggcggccccaacggcatctttgccagcccccggcgctggctgcagcagaggaagttccagagccccccagacagccggggccacccctacgtggtgtggaagtctgagggggacttcacctggaacagcatgagcggccgctctgtgcggctgcggtctgtgcccatccagagcctgtctgagctggagcgggcccggctgcaggaggtggccttctaccagctgcagcaggactgtgacctgagctgccagatcaccatccccaaggatggccagaagaggaagaagagcctgaggaagaagctggacagcctgggcaaggagaagaacaaggacaaggagttcatcccccaggccttcggcatgcccctgagccaggtgattgccaatgaccgggcctacaagctgaagcaggacctgcagagagatgagcagaaggatgccagtgactttgtggccagcctgctgcccttcggcaacaagaggcagaacaaggagctgagcagcagcaacagcagcctgagcagcaccagcgagaccccaaatgaaagcaccagccccaacaccccagagcccgccccccgggcccggcggcggggggccatgtctgtggacagcatcacagacctggatgacaaccagagccggctgctggaggccctgcagctgagcctgcctgctgaggcccagagcaagaaggagaaggcccgggacaagaagctgagcctgaaccccatctaccggcaggtgccccggctggtggacagctgctgccagcacctggagaagcacggcctgcagacagtgggcatcttccgggtgggcagcagcaagaagagggtgcggcagctgcgggaggagtttgaccggggcattgatgtgtccctggaggaggagcacagcgtgcatgatgtggccgccctgctgaaggagttcctgcgggacatgccagaccccctgctgacccgggagctgtacacagccttcatcaacaccctgctgctggagcctgaggagcagctgggcaccctgcagctgctgatctacctgctgcccccctgcaactgtgacaccctgcaccggctgctgcagttcctgagcatcgtggcccggcatgctgatgacaacatcagcaaggatggccaggaggtgactggaaacaagatgaccagcctgaacctggccaccatcttcggccccaacctgctgcacaagcagaagagcagtgacaaggagttctctgtgcagagcagcgcccgggcagaggagagcacagccatcatcgctgtggtgcagaagatgattgagaactatgaggccctcttcatggtgcccccagacctgcagaatgaggtgctgatcagcctgctggagacagatcctgatgtggtggactacctgctgcggaggaaggccagccagagcagcagcccagacatgctgcagagcgaggtgtccttctctgtgggcggccgccacagcagcacagacagcaacaaggccagcagcggggacatcagcccctatgacaacaacagccctgtgctgtctgagaggagcctgctggccatgcaggaggatgctgcccctgggggcagcgagaagctgtacagagtgcccggccagttcatgctggtgggccacctgagcagcagcaagagccgggagagcagccctggcccccggctgggcaaggacctgtctgaggagccctttgacatctggggcacctggcacagcaccctgaagagcggcagcaaggaccccggcatgacaggcagcagcggggacatctttgagagcagcagcctgcgggccggcccctgcagcctgagccagggcaacctgagccccaactggccccgctggcagggcagccctgctgagctggacagcgacacccagggcgcccggaggacccaggccgccgccccagccacagagggccgggcccaccctgctgtgtcccgggcctgcagcacccctcatgtgcaggtggccggcaaggccgagcggcccacagcccggtctgagcagtacctgaccctgagcggggcccatgacctgtctgagagcgagctggatgtggccggcctgcagagccgggccaccccccagtgccagaggcctcatggcagcggcagagatgacaagaggcctcctccaccctacccaggccctgggaagccagctgctgctgctgcctggatccagggccccccagagggcgtggagacccccacagaccagggcggccaggccgctgagcgggagcagcaggtgacccagaagaagctgagcagcgccaacagcctgcctgctggggagcaggacagcccccggctgggagatgctggctggctggactggcagcgggagcgctggcagatctgggagctgctgagcacagacaacccagatgccctgcctgagaccctggtgtag

SEQ ID NO: 176359 - DNA, 1815 bp, Artificial Sequence
  derived and/or modified sequence
atgaagaggctgcacatcttcggccccaagatccacagcagcggcggcctgtggcagcagaagggggacttcacctggaacagcatgagcggccgctctgtgcggctgcggtctgtgcccatccagagcctgtctgagctggagcgggcccggctgcaggaggtggccttctaccagctgcagcaggactgtgacctgagctgccagatcaccatccccaaggatggccagaagaggaagaagagcctgaggaagaagctggacagcctgggcaaggagaagaacaaggacaaggagttcatcccccaggccttcggcatgcccctgagccaggtgattgccaatgaccgggcctacaagctgaagcaggacctgcagagagatgagcagaaggatgccagtgactttgtggccagcctgctgccctttggaaacaagaggcagaacaaggagctgagcagcagcaacagcagcctgagcagcaccagcgagaccccaaatgaaagcaccagccccaacaccccagagcccgccccccgggccaggagaagaggagccatgtctgtggacagcatcacagacctggatgacaaccagagccggctgctggaggccctgcagctgagcctgcctgctgaggcccagagcaagaaggagaaggcccgggacaagaagctgagcctgaaccccatctaccggcaggtgccccggctggtggacagctgctgccagcacctggagaagcacggcctgcagacagtgggcatcttccgggtgggcagcagcaagaagagggtgcggcagctgcgggaggagtttgaccggggcattgatgtgtccctggaggaggagcacagcgtgcatgatgtggccgccctgctgaaggagttcctgcgggacatgccagaccccctgctgacccgggagctgtacacagccttcatcaacaccctgctgctggagcctgaggagcagctgggcaccctgcagctgctgatctacctgctgcccccctgcaactgtgacaccctgcaccggctgctgcagttcctgagcatcgtggcccggcatgctgatgacaacatcagcaaggatggccaggaggtgacaggcaacaagatgaccagcctgaacctggccaccatcttcggccccaacctgctgcacaagcagaagagcagtgacaaggagttctctgtgcagagcagcgcccgggcagaggagagcacagccatcatcgctgtggtgcagaagatgattgaaaattatgaggccctcttcatggtgcccccagacctgcagaatgaggtgctgatcagcctgctggagacagatcctgatgtggtggactacctgctgcggaggaaggccagccagagcagcagcccagacatgctgcagagcgaggtgtccttctctgtgggcggccgccacagcagcacagacagcaacaaggccagcagcggggacatcagcccctatgacaacaacagccctgtgctgtctgagaggagcctgctggccatgcaggaggatgctgcccctgggggcagcgagaagctgtacagagtgcccggccagttcatgctggtgggccacctgagcagcagcaagagccgggagagcagccctggcccccggctgggcaaggacctgtctgaggagccctttgacatctggggcacctggcacagcaccctgaagagcggcagcaaggaccccggcatgacaggcaccacccccctgctgaacatcagcagccaggaggaccaccggcagaaggacctgcggctcatcttcaagatctacccctag

SEQ ID NO: 176360 - DNA, 2925 bp, Artificial Sequence
  derived and/or modified sequence
atgagcgcccagagcctgctgcacagcgtgttcagctgcagcagccctgctagttcatcagccgcttccgccaaaggcttttcaaaacgcaagctacgccaaactcgttctcttgaccccgccctaatcggtggctgtgggtccgatgaagccggtgcagagggatctgcaagaggtgccacagcaggcagactttactctccgtcgttgccagcagagtccctggggcccaggctcgctagcagtagtcggggcccgccgcctcgtgctactcgcctcccccctcccgggcccctgtgcagttccttctcaacccctagcacaccgcaggagaagtccccgtctggctcctttcactttgactatgaggtgcccctgggtaggggagggctgaaaaagtccatggcatgggacctgccttctgtgctggctggccctgcctcttcaagaagcgcctccagtatactctgtagctcgggcggcggccccaacggtatattcgcttcaccgcgcaggtggctgcagcagcgaaagtttcaatcccccccagatagcaggggccatccatacgtcgtgtggaagtccgagggcgatttcacatggaatagcatgagtggcagaagtgtgcgtctgagatccgtacccatccagagcctgagcgagctcgaaagggcacgattgcaagaagtggccttttaccaacttcagcaggattgtgatctgtcatgtcagattactataccaaaagacgggcagaaacgcaagaaatccctgcgcaagaagctagattccctcggaaaagagaaaaataaagacaaagaattcattccgcaggcattcggcatgcccctgagtcaagtaatagccaatgaccgggcttacaaactgaagcaagacctgcagagggatgaacaaaaggacgccagcgatttcgtcgcctcactcctcccctttggtaacaagagacagaacaaggaactgtcctcttccaatagcagtctttcttccacatccgaaactccgaacgaatccacaagcccaaataccccagagcccgcccctcgggcacgccgccgcggagccatgtctgtggactccataaccgacctcgatgataaccagagcagactgttggaggcgctgcaactgagcctgccggccgaagcacagtccaagaaagagaaagcccgggataaaaagctcagcctgaatcctatctacagacaggtgccaaggcttgtcgactcctgctgtcaacacttggaaaagcatggactccagacagtaggaatctttcgcgtgggttcatcaaaaaagagggttcgccagctgcgggaagagttcgatcggggtatcgatgtgtccctggaggaggaacactcagtacacgacgtagctgctctccttaaagagttcctcagagatatgccggacccactgctgaccagagagctttacacagccttcatcaatactctccttttagaacccgaagaacaactcgggacactgcagctgctcatttacctactgcccccgtgcaactgtgacactctgcatcgcctcttgcagtttttgtctatcgtggccagacacgcagacgataacatctctaaagatgggcaggaagtgacagggaacaagatgacttcattgaatctggccaccatcttcggccctaatctcctgcataaacagaaaagctctgacaaggaattctccgtccagtcctccgctagagccgaggaaagcactgctatcatcgctgtagtacagaaaatgatagagaactacgaggctctcttcatggtccctcccgacctccagaacgaggtgctgattagtttgcttgagacagatcccgacgtggtagactacctgctgaggaggaaggcatcacagtcgagcagtccagacatgttacagtccgaggtatccttcagcgttgggggacgccatagttcgactgactccaataaggcatcaagcggcgacatctcaccttatgataacaactccccagtactctcagaaagatctctccttgcgatgcaggaagacgccgcccctggcggttcagagaagttgtaccgggtgcccggacagttcatgttagttggtcacctttcttcctccaagtccagggaatcctcacccgggcctagactcggtaaagatctgtccgaagagccttttgatatctgggggacctggcattctaccctgaaatctggaagtaaagaccctggtatgactggatctagcggcgatatatttgagtcatcgtctttacgcgctggaccttgcagcttgtcgcaaggcaacctctcacccaattggcctaggtggcaggggagccccgctgaacttgattcagacacacaaggcgccaggcgtactcaggctgcagcgcccgcaacagagggccgagcccacccagcagtctcaagggcttgctccacgccccacgtccaggtggcggggaaagcggagagaccgacggcaaggtctgagcagtacctcacgttgtctggagctcacgacttgtcagaatctgagctcgacgtcgctggattgcagtctcgcgccacaccgcagtgccagcgcccgcacggctctggccgcgacgacaagcgccccccgcctccttatcccggacccgggaagcctgctgccgctgctgcttggattcagggccctcctgagggagttgaaactcctaccgaccagggagggcaggctgccgagcgcgagcagcaggtgacacagaagaaactgagcagcgctaactccttgcctgcgggcgagcaggacagtcccagacttggggacgctgggtggctggattggcagcgggaacggtggcagatatgggaactgctctctacagataacccagacgccttgcccgagacgcttgtgtag

SEQ ID NO: 176361 - DNA, 1815 bp, Artificial Sequence
  derived and/or modified sequence
atgaagcggctgcacatcttcggccccaagatccacagcagcggcggcctgtggcaacagaaaggtgactttacctggaactccatgtctggccggtcggtacggctgagatcagttcctatccaatccctgagtgagctggaacgagcccgattacaggaagtggccttttaccaactgcagcaagactgcgatctctcctgtcagattaccatccctaaagatggccaaaaacggaagaagagcttgcgcaaaaaactggactctctgggaaaggaaaaaaacaaggataaggaatttattcctcaggctttcgggatgccactctcacaggttatagccaatgacagagcttacaagctgaaacaagatctccaacgtgatgagcagaaggacgcctctgacttcgtagcctccttgctccctttcggcaacaaacggcagaacaaagaactgtcctcttccaatagcagtctctcctccacgtctgaaactcccaatgagtcaaccagccccaatactccagagcccgccccccgggccagacgcaggggagctatgtctgtggatagtatcaccgacctggatgataatcagtctaggcttctggaggcactgcaactctcgctgcccgcagaggcacagtctaagaaagagaaagcccgggataaaaagctcagtcttaacccaatctaccggcaggtgccacggttggttgatagttgctgccaacacctggagaagcacggcctgcaaacagtgggaatctttagggtggggtcatccaagaagagagtgaggcagttacgagaggaattcgaccgcgggatcgatgtgtccctggaagaagagcattccgtccacgatgtggcagcgctccttaaggagtttctgcgcgatatgccagatcccctgctgacacgtgaactctacaccgcttttatcaatacgcttctactggagcctgaggaacagctcgggactctgcaactactgatttacctcttgcccccttgcaactgtgatactcttcaccgcctgctccagttcttgtcaatcgtggcacgacacgctgacgataacatcagcaaggatggccaagaagtgacggggaacaagatgacatcattaaacctggctactatattcgggcccaacttgttacacaagcaaaaatcctctgacaaggaattttctgtgcagtcaagtgccagggccgaagagagtaccgctatcatcgccgtcgtccagaagatgattgagaattacgaagctctcttcatggtgcctcccgacctccagaacgaagtgctcatatctttgctggaaaccgatcccgacgtggtggactacttactcagacgaaaagctagccagtcaagctcccctgacatgttgcagtctgaagtctcattctccgtcggaggccgccattcctcaacagactctaataaggctagttcgggcgatatcagtccatacgacaataacagcccagtgctgagtgaaaggtcgctcctggcaatgcaggaagacgccgcccctggtggtagtgagaagctatatcgggtgccaggacagttcatgctcgtgggccatctatcctcatcaaagtcccgggagtcgagtccgggcccccgcttaggtaaggacctgtctgaagaaccattcgacatctggggcacttggcattccactctgaaatccggatcaaaggatccgggtatgaccggtacaacgcctctcttaaatattagctctcaggaggatcaccggcagaaggaccttagacttattttcaagatatatccatag

SEQ ID NO: 176362 - DNA, 2925 bp, Artificial Sequence
  derived and/or modified sequence
atgtctgcccagtcccttttgcacagtgttttctcttgcagttcccccgcttcgtcaagtgccgcttcagccaaaggattctcgaagcgcaagctgagacagaccaggtctttagatcctgctctgatcggagggtgtgggtctgatgaggcaggggcagagggctcagctcggggagcgaccgcgggacggttatatagcccttcactgcctgcggaaagcctgggacctcggctagcctcttccagccgtggacctccaccaagggctactcggctgccccctccaggaccattgtgttcgagtttcagcacacctagcacaccccaggagaaatccccttctggcagcttccattttgactatgaggtgccactgggcagaggtggtttgaaaaaatctatggcttgggatctcccttcagtcctcgcaggtccagcctcgagccgctctgcaagttccattctttgttcaagtggtggtggccctaacggaatttttgcatccccaagacgttggttgcagcagagaaaatttcagtcccccccagatagccggggtcacccgtacgtggtgtggaagtcagagggggactttacctggaactccatgtccgggaggagcgtaagacttcgctccgtccccatccagagcctatccgagttggagcgagcgcgtttacaggaagtggcattctatcaactgcaacaggactgtgacttaagctgtcagattactattcctaaggatgggcagaagcgcaagaagagtctgcggaagaaattggacagcctgggaaaggagaagaataaggataaggagtttattccccaggcattcggcatgccgttaagccaggtgatcgccaatgatcgcgcatacaagctgaagcaggacctgcaaagggatgaacaaaaagacgcttccgactttgtagcctcactgctgccattcggcaataagcggcagaacaaggaactgtcctcgagtaatagcagcctgagttcaacgtccgagacgccaaatgagtccacatctcccaataccccagagccagcacctagagcacgcaggcgtggagcgatgtcagtcgacagcattaccgatctcgatgacaaccagtctaggctcctggaggctttacagctgtctcttcctgctgaagctcagtccaagaaggagaaggcacgggataagaagctgtcgcttaatcctatctacagacaagtgccgaggctagttgactcttgctgccagcacctggaaaaacacggactacaaacagtgggaatcttccgggttgggtcatctaagaagcgagtgcggcaactgagagaagagttcgaccgtggaatcgacgtctctctggaggaggagcactcagttcacgacgtggccgcactccttaaggagtttctgcgcgatatgcctgatcctctcctgaccagggagttatataccgctttcataaacacattactgctggagccagaagagcagttggggactctgcagctactgatctatctgctgcccccatgcaattgtgatacactgcaccgcctgctgcaattcctcagcattgtggcccgtcatgctgatgataatataagcaaggacgggcaggaagtgaccggcaacaagatgacatcactaaatctggcgacaatcttcggacctaatctcctccacaaacagaagagcagcgacaaggagtttagcgtgcagagctccgcccgtgccgaggagagcaccgctatcattgcagtagtacagaaaatgatcgaaaactatgaggccctgtttatggtcccccctgatctgcagaacgaggtgcttatcagcctgttggaaacagaccctgacgtggttgattatcttttacgacgaaaggctagtcaaagctcttcaccagacatgctgcagagcgaagtgtctttctcagtggggggacgtcacagcagcactgactccaataaagcctcctcaggggatatatcaccatacgataacaacagtcccgttctgtcagagaggtccctcctagctatgcaagaagacgccgctcccggagggtctgagaaactctatcgggtaccaggccagtttatgttagtgggccacctatcctcatctaagtcgagagagtcttctcccggacctagattggggaaggacttatctgaagagcctttcgatatctggggcacgtggcattccaccctgaagtctgggtccaaggacccaggcatgacaggttctagcggggacatatttgaatccagtagcctgcgcgctggaccatgtagcctgtcgcaggggaacctgtcaccaaactggcccaggtggcaggggtcacccgcagaactggacagcgacacccagggcgcaaggcgaactcaggccgcagcaccggcaacagaaggaagggctcaccccgcagtgtcacgtgcctgtagtaccccgcacgtgcaagtggctggcaaagccgagagacctacagccagaagtgagcagtatctgaccctgagtggcgcacatgatctgagtgaaagcgaacttgacgtggctgggctgcagtcccgagcaacacctcagtgccaacgccctcacggatctggtcgggacgataagcggccacccccaccataccccggaccagggaagcccgcagccgctgcagcctggatccaaggaccccctgagggagtggaaacgcctactgaccagggaggacaggcagcagaaagggagcaacaggttactcagaagaagctgtcttccgcgaatagtttgcccgcaggtgaacaagactcccctaggttaggcgacgcaggctggctggactggcaaagagagaggtggcagatctgggaactcctttcaaccgacaatcctgatgccctgcccgagacactagtgtag

SEQ ID NO: 176363 - DNA, 1815 bp, Artificial Sequence
  derived and/or modified sequence
atgaagaggctgcatatttttggtcccaagatccactcttctggtggcttatggcaacaaaaaggggacttcacttggaattccatgagtggacggagcgtgagactccgctctgtgcctattcagtccctgagcgagctggagagagccaggcttcaggaagtggccttctaccagctccaacaggactgcgatctaagctgtcagattactatccccaaagacgggcagaagcgcaagaagtctctgcgcaaaaaactggattcccttgggaaggaaaagaacaaggataaggaattcatcccgcaggccttcggtatgcccctcagccaggtgatcgctaacgatcgggcatacaagctgaagcaggacctacaacgtgacgaacaaaaggatgctagtgatttcgtggcgagtctgctgccattcggaaataagagacagaacaaagagctttcgtcctctaattccagcctgtcaagcacctccgagacgccaaacgagtccacatccccgaacacccccgaacccgctcctcgggcacgtaggcggggagccatgagcgttgattctatcaccgaccttgacgacaatcaatcacgacttctggaggccttacagctgtctcttcctgccgaagcccagagcaaaaaagaaaaggcccgagacaaaaagctgtctctgaatccaatctatagacaggtgccgcgactggtcgacagctgttgccaacatctcgaaaaacacgggttgcagaccgtgggtatattccgcgtcggaagtagcaaaaagcgagtgcgacagctaagagaggagttcgaccgcggtattgatgtctctctggaagaagaacattccgttcacgacgtcgcagcactgctaaaggagttcctccgagacatgccggaccccctcctgactcgcgagttatatacagcttttatcaacactttattgctggagcccgaagaacagctgggaacgctgcaactgttaatctacctccttcccccttgtaattgtgatactttacaccgtctcctgcagttcctcagtattgtggcaagacacgctgacgataatatatccaaggacggccaagaggttactgggaataaaatgacatctcttaatttggctacaatcttcggcccaaacctcctgcacaaacaaaaatcctccgataaagagttctccgtgcagagcagtgcacgcgctgaagagtcgacagccataatcgctgtggtgcaaaaaatgatcgagaattacgaggccctgttcatggtaccccctgacctacagaatgaggtactcattagcttgcttgaaactgatcccgatgttgttgattatctgctccggagaaaggcgtctcaaagctcttcgccagatatgctccagtcagaagtttctttcagtgtcgggggtcgccattctagcactgatagcaataaagcaagctccggagatatcagtccatatgataacaactcgccggtgctgtccgagcgaagcctcctggccatgcaggaggatgctgccccaggaggtagtgaaaagctctatcgagtacccggacagtttatgcttgtaggtcacctatcatcttccaagtctcgcgaaagctcccctggcccacgcctaggcaaggacctgtccgaggagccattcgacatatggggcacctggcacagcacgctcaagtccggctcaaaggacccaggaatgaccgggaccaccccattactaaatattagctcacaggaggatcacagacaaaaggacttgagattgattttcaagatttacccttag

SEQ ID NO: 176364 - DNA, 3946 bp, Artificial Sequence
  derived and/or modified sequence
gcctgcctctgttctgaaaggacaggaacttctcaatgatccgatgaaaagattgcatatttttggtcccaagattcacagtagcggaggtctctggcaacaaaaggtatcgtgggagtcacagctatgccagctgggccatttctcagacattcaatatgatctgccatttcaggatgcattttttaccaaaaaaataatttttttaaaacagactcaacttcctactgcaagcttagttcagttagattagagaggacagcaaagacgcggctgattataatttatggggtgatttcacctggaacagcatgtcaggccgcagtgtacggctgaggtcagtccccatccagagtctctcagagctggagagggcccggctgcaggaagtggctttttatcagttgcaacaggactgtgacctgagctgtcagatcaccattcccaaagatggacaaaagagaaagaaatctttaagaaagaaactggattcactaggaaaggagaaaaacaaagacaaagaattcatcccacaggcatttggaatgcccttatcccaagtcattgcgaatgacagggcctataaactcaagcaggacttgcagagggacgagcagaaagatgcatctgactttgtggcttccctcctcccatttggaaataaaagacaaaacaaagaactctcaagcagtaactcatctctcagctcaacctcagaaacaccgaatgagtcaacgtccccaaacaccccggaaccggctcctcgggctaggaggaggggtgccatgtcagtggattctatcaccgatcttgatgacaatcagtctcgactactagaagctttacaactttccttgcctgctgaggctcaaagtaaaaaggaaaaagccagagataagaaactcagtctgaatcctatttacagacaggtccctaggctggtggacagctgctgtcagcacctagaaaaacatggcctccagacagtggggatattccgagttggaagctcaaaaaagagagtgagacaattacgtgaggaatttgaccgtgggattgatgtctctctggaggaggagcacagtgttcatgatgtggcagccttgctgaaagagttcctgagggacatgccagacccccttctcaccagggagctgtacacagctttcatcaacactctcttgttggagccggaggaacagctgggcaccttgcagctcctcatataccttctacctccctgcaactgcgacaccctccaccgcctgctacagttcctctccatcgtggccaggcatgccgatgacaacatcagcaaagatgggcaagaggtcactgggaataaaatgacatctctaaacttagccaccatatttggacccaacctgctgcacaagcagaagtcatcagacaaagaattctcagttcagagttcagcccgggctgaggagagcacggccatcatcgctgttgtgcaaaagatgattgaaaattatgaagccctgttcatggttcccccagatctccagaacgaagtgctgatcagcctgttagagaccgatcctgatgtcgtggactatttactcagaagaaaggcttcccaatcatcaagccctgacatgctgcagtcggaagtttccttttccgtgggagggaggcattcatctacagactccaacaaggcctccagcggagacatctccccttatgacaacaactccccagtgctgtctgagcgctccctgctggctatgcaagaggacgcggccccggggggctcggagaagctttacagagtgccagggcagtttatgctggtgggccacttgtcgtcgtcaaagtcaagggaaagttctcctggaccaaggcttgggaaagatctgtcagaggagcctttcgatatctggggaacttggcattcaacattaaaaagcggatccaaagacccaggaatgacaggttcctctggagacatttttgaaagcagctccctaagagcggggccctgctccctttctcaagggaacctgtccccaaattggcctcggtggcaggggagccccgcagagctggacagcgacacgcagggggctcggaggactcaggccgcagcccccgcgacggagggcagggcccaccctgcggtgtcgcgcgcctgcagcacgccccacgtccaggtggcagggaaagccgagcggcccacggccaggtcggagcagtacttgaccctgagcggcgcccacgacctcagcgagagtgagctggatgtggccgggctgcagagccgggccacacctcagtgccaaagaccccatgggagtgggagggatgacaagcggcccccgcctccatacccgggcccagggaagcccgcggcagcggcagcctggatccaggggcccccggaaggcgtggagacacccacggaccagggaggccaagcagccgagcgagagcagcaggtcacgcagaaaaaactgagcagcgccaactccctgccagcgggcgagcaggacagtccgcgcctgggggacgctggctggctcgactggcagagagagcgctggcagatctgggagctcctgtcgaccgacaaccccgatgccctgcccgagacgctggtctgagcccgcacccagccgagccccccctgccccgagccccccgccctccagcccaggggggaccgtgggtggtggccactggcacacttagtgttcttctttcacacttctcaaaagtgacacaagagaaatccagttcacctacagaggtagagcactcacgcccccgccattgagaataaggttccattgcgtagccagccttaggaaaaacaaacagaacccaaaccagatggcaatgtccaatctaaaaacgtccctcttggctctataatataagatacaactcttgcttggtatagcctaaccgtatttatgtgtcttcggttttgactattgtgtattctgtaacagattatgtataatcatatatgatatattcacaaagagaaaacaaaaggaacttttaaaaaaaaaatcacttcacttatattaagcaatgagatatactaaacaatgagattctatagaatgttctagaatgtgcacaagcgggtttctgtgcttttgccatagctttataactggggataacccttccttcgataccaaacactaacaagaggaagcagaatatgagaagccatatttttacataggagtcagatacaaaaagaaaaatcactgaatgcttttagatattgaatacgttttcaggaaaatgctaaatctgatagattacgaaatatatttttagaacttgtttagaaaggattcagttaaccaaacaagaaaaaggcagtgcctcacaaagaaattaagaagttgtccgtcccacgttacatcaaattcagttttatataggccatatataatatatatttataatgtataatttttatgtatttttcaaaactacaaactggaatccaactataaagtgtttaagaatctacacagaatattcaaattatagaacatgttttttccctttgccccataatcagtatttgccaaattacatgcaattccttaaaaactaaatcacatttggtaaaaggcctacagctttgtacttacattgtgccaaaggctgaggaaatgttttctttcgtaattttatgtgtattgtaaaatgttctaccgtactttagtagtttgaagtttttcaagtgcataactatttttgaccagcagatggcgatacgcttcagtattttatgcaattttttttcacttctgaagggaaagtgtattataaaaaaagattttttttttttttataaaacatgctactcttaattttcatgttggtgatgaaattcccagtggtgtttcttaaggttctatcttgtgccatgatgaataaaaagttaagcaaa

SEQ ID NO: 176365 - DNA, 5117 bp, Artificial Sequence
  derived and/or modified sequence
ggctgggctgcgaatagcgtgttcctctccggcggaacacacacacccggccttggggctgtctcctgagctccctcctccacggagagcgctgagcgccgccgggaattccatcccaccgtgggcacgcagtctttggaggtcccgggcgcagcacgctcggtgtccccacactgcagcaagacagagaccccgcgggaaccttgagcttggaacaacccttgagcctctgcagtcggaagagtgggcgcagcagcccagcggaggccaggcgcgcaacctcgggcgccggggcaaggagagagtgcagggaggcgcagctcaggcgcccggctcaggagcgggaggaagttctcgcggcgccgggagcgcggtggacgcgccctgggcgcacgcccaggcagccttctccctggccctcgggactgtcctcgggccgcaaggaggagcttgctggagtcttagaggccatccagagccagcgagcaggagcgctgcgtctcccgcctcagctaggaagggggagtggcgctggcaggctggagctgggaacccagcgagcgcctgaccttcctcctcctcttcctgaccctcttcgcgtcttgggctccggaggaaggttctagcggctgcaggaggtccccagacccattttcctagaaggctggtgatggatctgctgctcctgccgccgccggggcacttggagcgcaccggcggcgcgtgagctgggctttgctctccactgccctgggcaaaccccgggccagccccgcctggcacctttgcctgagtccctttcggttcccgacccaaagccaccagcgtccagggagggaggaggaggtggtcctcaggtgcagccccgccgagatgtccgcgcagagcctgctccacagcgtcttctcctgttcctcgcccgcttcaagtagcgcggcctcggccaagggcttctccaagaggaagctgcgccagacccgcagcctggacccggccctgatcggcggctgcgggagcgacgaggcgggcgcggagggcagtgcgcggggagccacggcgggccgcctctactccccatcactcccagccgagagtctcggccctcgcttggcgtcctcttcccggggtccgccccccagggccaccaggctaccgcctcctggacctctttgctcgtccttctccacacccagcaccccgcaggagaagtcaccatccggcagctttcactttgactatgaggttcccctgggtcgcggcggcctcaagaagagcatggcctgggacctgccttctgtcctggccgggccagccagtagccgaagcgcttccagcatcctctgttcatccgggggaggccccaatggcatcttcgcttctcctaggaggtggctccagcagaggaagttccagtccccacccgacagtcgcgggcacccctacgtcgtgtggaaatccgagggtgatttcacctggaacagcatgtcaggccgcagtgtacggctgaggtcagtccccatccagagtctctcagagctggagagggcccggctgcaggaagtggctttttatcagttgcaacaggactgtgacctgagctgtcagatcaccattcccaaagatggacaaaagagaaagaaatctttaagaaagaaactggattcactaggaaaggagaaaaacaaagacaaagaattcatcccacaggcatttggaatgcccttatcccaagtcattgcgaatgacagggcctataaactcaagcaggacttgcagagggacgagcagaaagatgcatctgactttgtggcttccctcctcccatttggaaataaaagacaaaacaaagaactctcaagcagtaactcatctctcagctcaacctcagaaacaccgaatgagtcaacgtccccaaacaccccggaaccggctcctcgggctaggaggaggggtgccatgtcagtggattctatcaccgatcttgatgacaatcagtctcgactactagaagctttacaactttccttgcctgctgaggctcaaagtaaaaaggaaaaagccagagataagaaactcagtctgaatcctatttacagacaggtccctaggctggtggacagctgctgtcagcacctagaaaaacatggcctccagacagtggggatattccgagttggaagctcaaaaaagagagtgagacaattacgtgaggaatttgaccgtgggattgatgtctctctggaggaggagcacagtgttcatgatgtggcagccttgctgaaagagttcctgagggacatgccagacccccttctcaccagggagctgtacacagctttcatcaacactctcttgttggagccggaggaacagctgggcaccttgcagctcctcatataccttctacctccctgcaactgcgacaccctccaccgcctgctacagttcctctccatcgtggccaggcatgccgatgacaacatcagcaaagatgggcaagaggtcactgggaataaaatgacatctctaaacttagccaccatatttggacccaacctgctgcacaagcagaagtcatcagacaaagaattctcagttcagagttcagcccgggctgaggagagcacggccatcatcgctgttgtgcaaaagatgattgaaaattatgaagccctgttcatggttcccccagatctccagaacgaagtgctgatcagcctgttagagaccgatcctgatgtcgtggactatttactcagaagaaaggcttcccaatcatcaagccctgacatgctgcagtcggaagtttccttttccgtgggagggaggcattcatctacagactccaacaaggcctccagcggagacatctccccttatgacaacaactccccagtgctgtctgagcgctccctgctggctatgcaagaggacgcggccccggggggctcggagaagctttacagagtgccagggcagtttatgctggtgggccacttgtcgtcgtcaaagtcaagggaaagttctcctggaccaaggcttgggaaagatctgtcagaggagcctttcgatatctggggaacttggcattcaacattaaaaagcggatccaaagacccaggaatgacaggttcctctggagacatttttgaaagcagctccctaagagcggggccctgctccctttctcaagggaacctgtccccaaattggcctcggtggcaggggagccccgcagagctggacagcgacacgcagggggctcggaggactcaggccgcagcccccgcgacggagggcagggcccaccctgcggtgtcgcgcgcctgcagcacgccccacgtccaggtggcagggaaagccgagcggcccacggccaggtcggagcagtacttgaccctgagcggcgcccacgacctcagcgagagtgagctggatgtggccgggctgcagagccgggccacacctcagtgccaaagaccccatgggagtgggagggatgacaagcggcccccgcctccatacccgggcccagggaagcccgcggcagcggcagcctggatccaggggcccccggaaggcgtggagacacccacggaccagggaggccaagcagccgagcgagagcagcaggtcacgcagaaaaaactgagcagcgccaactccctgccagcgggcgagcaggacagtccgcgcctgggggacgctggctggctcgactggcagagagagcgctggcagatctgggagctcctgtcgaccgacaaccccgatgccctgcccgagacgctggtctgagcccgcacccagccgagccccccctgccccgagccccccgccctccagcccaggggggaccgtgggtggtggccactggcacacttagtgttcttctttcacacttctcaaaagtgacacaagagaaatccagttcacctacagaggtagagcactcacgcccccgccattgagaataaggttccattgcgtagccagccttaggaaaaacaaacagaacccaaaccagatggcaatgtccaatctaaaaacgtccctcttggctctataatataagatacaactcttgcttggtatagcctaaccgtatttatgtgtcttcggttttgactattgtgtattctgtaacagattatgtataatcatatatgatatattcacaaagagaaaacaaaaggaacttttaaaaaaaaaatcacttcacttatattaagcaatgagatatactaaacaatgagattctatagaatgttctagaatgtgcacaagcgggtttctgtgcttttgccatagctttataactggggataacccttccttcgataccaaacactaacaagaggaagcagaatatgagaagccatatttttacataggagtcagatacaaaaagaaaaatcactgaatgcttttagatattgaatacgttttcaggaaaatgctaaatctgatagattacgaaatatatttttagaacttgtttagaaaggattcagttaaccaaacaagaaaaaggcagtgcctcacaaagaaattaagaagttgtccgtcccacgttacatcaaattcagttttatataggccatatataatatatatttataatgtataatttttatgtatttttcaaaactacaaactggaatccaactataaagtgtttaagaatctacacagaatattcaaattatagaacatgttttttccctttgccccataatcagtatttgccaaattacatgcaattccttaaaaactaaatcacatttggtaaaaggcctacagctttgtacttacattgtgccaaaggctgaggaaatgttttctttcgtaattttatgtgtattgtaaaatgttctaccgtactttagtagtttgaagtttttcaagtgcataactatttttgaccagcagatggcgatacgcttcagtattttatgcaattttttttcacttctgaagggaaagtgtattataaaaaaagattttttttttttttataaaacatgctactcttaattttcatgttggtgatgaaattcccagtggtgtttcttaaggttctatcttgtgccatgatgaataaaaagttaagcaaa

SEQ ID NO: 176366 - DNA, 2096 bp, Artificial Sequence
  derived and/or modified sequence
actcatttgtgcacttactcagggacacagcctgcctctgttctgaaaggacaggaacttctcaatgatccgatgaaaagattgcatatttttggtcccaagattcacagtagcggaggtctctggcaacaaaagggtgatttcacctggaacagcatgtcaggccgcagtgtacggctgaggtcagtccccatccagagtctctcagagctggagagggcccggctgcaggaagtggctttttatcagttgcaacaggactgtgacctgagctgtcagatcaccattcccaaagatggacaaaagagaaagaaatctttaagaaagaaactggattcactaggaaaggagaaaaacaaagacaaagaattcatcccacaggcatttggaatgcccttatcccaagtcattgcgaatgacagggcctataaactcaagcaggacttgcagagggacgagcagaaagatgcatctgactttgtggcttccctcctcccatttggaaataaaagacaaaacaaagaactctcaagcagtaactcatctctcagctcaacctcagaaacaccgaatgagtcaacgtccccaaacaccccggaaccggctcctcgggctaggaggaggggtgccatgtcagtggattctatcaccgatcttgatgacaatcagtctcgactactagaagctttacaactttccttgcctgctgaggctcaaagtaaaaaggaaaaagccagagataagaaactcagtctgaatcctatttacagacaggtccctaggctggtggacagctgctgtcagcacctagaaaaacatggcctccagacagtggggatattccgagttggaagctcaaaaaagagagtgagacaattacgtgaggaatttgaccgtgggattgatgtctctctggaggaggagcacagtgttcatgatgtggcagccttgctgaaagagttcctgagggacatgccagacccccttctcaccagggagctgtacacagctttcatcaacactctcttgttggagccggaggaacagctgggcaccttgcagctcctcatataccttctacctccctgcaactgcgacaccctccaccgcctgctacagttcctctccatcgtggccaggcatgccgatgacaacatcagcaaagatgggcaagaggtcactgggaataaaatgacatctctaaacttagccaccatatttggacccaacctgctgcacaagcagaagtcatcagacaaagaattctcagttcagagttcagcccgggctgaggagagcacggccatcatcgctgttgtgcaaaagatgattgaaaattatgaagccctgttcatggttcccccagatctccagaacgaagtgctgatcagcctgttagagaccgatcctgatgtcgtggactatttactcagaagaaaggcttcccaatcatcaagccctgacatgctgcagtcggaagtttccttttccgtgggagggaggcattcatctacagactccaacaaggcctccagcggagacatctccccttatgacaacaactccccagtgctgtctgagcgctccctgctggctatgcaagaggacgcggccccggggggctcggagaagctttacagagtgccagggcagtttatgctggtgggccacttgtcgtcgtcaaagtcaagggaaagttctcctggaccaaggcttgggaaagatctgtcagaggagcctttcgatatctggggaacttggcattcaacattaaaaagcggatccaaagacccaggaatgacaggaactactcctctccttaacatctcttctcaagaggatcacaggcaaaaagatctaaggctcattttcaagatttacccatgatcatggagcagcactataaatccaaagctactatagaagcattgaaaacaaatataaaaggttcaccttagtctcattttactgagtcacagtaaaccagacttacagaatcatctatttttaaggtgacaattgttcagatagtaccactgatcaatgatcccctaactttttctaaacattttatctaacagtgttttcagtttttt

SEQ ID NO: 176367 - DNA, 2925 bp, Artificial Sequence
  derived and/or modified sequence
atgagcgcccagagcctgctgcacagcgtgttcagctgcagcagccccgccagcagcagcgccgccagcgccaagggcttcagcaagagaaagctgagacagaccagaagcctggaccccgccctgatcggcggctgcggcagcgacgaggccggcgccgagggcagcgccagaggcgccaccgccggcagactgtacagccccagcctgcccgccgagagcctgggccccagactggccagcagcagcagaggccccccccccagagccaccagactgcccccccccggccccctgtgcagcagcttcagcacccccagcaccccccaggagaagagccccagcggcagcttccacttcgactacgaggtgcccctgggcagaggcggcctgaagaagagcatggcctgggacctgcccagcgtgctggccggccccgccagcagcagaagcgccagcagcatcctgtgcagcagcggcggcggccccaacggcatcttcgccagccccagaagatggctgcagcagagaaagttccagagcccccccgacagcagaggccacccctacgtggtgtggaagagcgagggcgacttcacctggaacagcatgagcggcagaagcgtgagactgagaagcgtgcccatccagagcctgagcgagctggagagagccagactgcaggaggtggccttctaccagctgcagcaggactgcgacctgagctgccagatcaccatccccaaggacggccagaagagaaagaagagcctgagaaagaagctggacagcctgggcaaggagaagaacaaggacaaggagttcatcccccaggccttcggcatgcccctgagccaggtgatcgccaacgacagagcctacaagctgaagcaggacctgcagagagacgagcagaaggacgccagcgacttcgtggccagcctgctgcccttcggcaacaagagacagaacaaggagctgagcagcagcaacagcagcctgagcagcaccagcgagacccccaacgagagcaccagccccaacacccccgagcccgcccccagagccagaagaagaggcgccatgagcgtggacagcatcaccgacctggacgacaaccagagcagactgctggaggccctgcagctgagcctgcccgccgaggcccagagcaagaaggagaaggccagagacaagaagctgagcctgaaccccatctacagacaggtgcccagactggtggacagctgctgccagcacctggagaagcacggcctgcagaccgtgggcatcttcagagtgggcagcagcaagaagagagtgagacagctgagagaggagttcgacagaggcatcgacgtgagcctggaggaggagcacagcgtgcacgacgtggccgccctgctgaaggagttcctgagagacatgcccgaccccctgctgaccagagagctgtacaccgccttcatcaacaccctgctgctggagcccgaggagcagctgggcaccctgcagctgctgatctacctgctgcccccctgcaactgcgacaccctgcacagactgctgcagttcctgagcatcgtggccagacacgccgacgacaacatcagcaaggacggccaggaggtgaccggcaacaagatgaccagcctgaacctggccaccatcttcggccccaacctgctgcacaagcagaagagcagcgacaaggagttcagcgtgcagagcagcgccagagccgaggagagcaccgccatcatcgccgtggtgcagaagatgatcgagaactacgaggccctgttcatggtgccccccgacctgcagaacgaggtgctgatcagcctgctggagaccgaccccgacgtggtggactacctgctgagaagaaaggccagccagagcagcagccccgacatgctgcagagcgaggtgagcttcagcgtgggcggcagacacagcagcaccgacagcaacaaggccagcagcggcgacatcagcccctacgacaacaacagccccgtgctgagcgagagaagcctgctggccatgcaggaggacgccgcccccggcggcagcgagaagctgtacagagtgcccggccagttcatgctggtgggccacctgagcagcagcaagagcagagagagcagccccggccccagactgggcaaggacctgagcgaggagcccttcgacatctggggcacctggcacagcaccctgaagagcggcagcaaggaccccggcatgaccggcagcagcggcgacatcttcgagagcagcagcctgagagccggcccctgcagcctgagccagggcaacctgagccccaactggcccagatggcagggcagccccgccgagctggacagcgacacccagggcgccagaagaacccaggccgccgcccccgccaccgagggcagagcccaccccgccgtgagcagagcctgcagcaccccccacgtgcaggtggccggcaaggccgagagacccaccgccagaagcgagcagtacctgaccctgagcggcgcccacgacctgagcgagagcgagctggacgtggccggcctgcagagcagagccaccccccagtgccagagaccccacggcagcggcagagacgacaagagacccccccccccctaccccggccccggcaagcccgccgccgccgccgcctggatccagggcccccccgagggcgtggagacccccaccgaccagggcggccaggccgccgagagagagcagcaggtgacccagaagaagctgagcagcgccaacagcctgcccgccggcgagcaggacagccccagactgggcgacgccggctggctggactggcagagagagagatggcagatctgggagctgctgagcaccgacaaccccgacgccctgcccgagaccctggtgtag

SEQ ID NO: 176368 - DNA, 1815 bp, Artificial Sequence
  derived and/or modified sequence
atgaagagactgcacatcttcggccccaagatccacagcagcggcggcctgtggcagcagaagggcgacttcacctggaacagcatgagcggcagaagcgtgagactgagaagcgtgcccatccagagcctgagcgagctggagagagccagactgcaggaggtggccttctaccagctgcagcaggactgcgacctgagctgccagatcaccatccccaaggacggccagaagagaaagaagagcctgagaaagaagctggacagcctgggcaaggagaagaacaaggacaaggagttcatcccccaggccttcggcatgcccctgagccaggtgatcgccaacgacagagcctacaagctgaagcaggacctgcagagagacgagcagaaggacgccagcgacttcgtggccagcctgctgcccttcggcaacaagagacagaacaaggagctgagcagcagcaacagcagcctgagcagcaccagcgagacccccaacgagagcaccagccccaacacccccgagcccgcccccagagccagaagaagaggcgccatgagcgtggacagcatcaccgacctggacgacaaccagagcagactgctggaggccctgcagctgagcctgcccgccgaggcccagagcaagaaggagaaggccagagacaagaagctgagcctgaaccccatctacagacaggtgcccagactggtggacagctgctgccagcacctggagaagcacggcctgcagaccgtgggcatcttcagagtgggcagcagcaagaagagagtgagacagctgagagaggagttcgacagaggcatcgacgtgagcctggaggaggagcacagcgtgcacgacgtggccgccctgctgaaggagttcctgagagacatgcccgaccccctgctgaccagagagctgtacaccgccttcatcaacaccctgctgctggagcccgaggagcagctgggcaccctgcagctgctgatctacctgctgcccccctgcaactgcgacaccctgcacagactgctgcagttcctgagcatcgtggccagacacgccgacgacaacatcagcaaggacggccaggaggtgaccggcaacaagatgaccagcctgaacctggccaccatcttcggccccaacctgctgcacaagcagaagagcagcgacaaggagttcagcgtgcagagcagcgccagagccgaggagagcaccgccatcatcgccgtggtgcagaagatgatcgagaactacgaggccctgttcatggtgccccccgacctgcagaacgaggtgctgatcagcctgctggagaccgaccccgacgtggtggactacctgctgagaagaaaggccagccagagcagcagccccgacatgctgcagagcgaggtgagcttcagcgtgggcggcagacacagcagcaccgacagcaacaaggccagcagcggcgacatcagcccctacgacaacaacagccccgtgctgagcgagagaagcctgctggccatgcaggaggacgccgcccccggcggcagcgagaagctgtacagagtgcccggccagttcatgctggtgggccacctgagcagcagcaagagcagagagagcagccccggccccagactgggcaaggacctgagcgaggagcccttcgacatctggggcacctggcacagcaccctgaagagcggcagcaaggaccccggcatgaccggcaccacccccctgctgaacatcagcagccaggaggaccacagacagaaggacctgagactgatcttcaagatctacccctag

SEQ ID NO: 176369 - protein, 569 aa, Artificial Sequence
  derived and/or modified sequence
MKKKLVVLGLLAVVLVLVIVGLCLWLPSASKEPDNHVYTRAAVAADAKQCSKIGRDALRDGGSAVDAAIAALLCVGLMNAHSMGIGGGLFLTIYNSTTRKAEVINAREVAPRLAFATMFNSSEQSQKGGLSVAVPGEIRGYELAHQRHGRLPWARLFQPSIQLARQGFPVGKGLAAALENKRTVIEQQPVLCEVFCRDRKVLREGERLTLPQLADTYETLAIEGAQAFYNGSLTAQIVKDIQAAGGIVTAEDLNNYRAELIEHPLNISLGDVVLYMPSAPLSGPVLALILNILKGYNFSRESVESPEQKGLTYHRIVEAFRFAYAKRTLLGDPKFVDVTEVVRNMTSEFFAAQLRAQISDDTTHPISYYKPEFYTPDDGGTAHLSVVAEDGSAVSATSTINLYFGSKVRSPVSGILFNNEMDDFSSPSITNEFGVPPSPANFIQPGKQPLSSMCPTIMVGQDGQVRMVVGAAGGTQITTATALAIIYNLWFGYDVKRAVEEPRLHNQLLPNVTTVERNIDQAVTAALETRHHHTQIASTFIAVVQAIVRTAGGWAAASDSRKGGEPAGY

SEQ ID NO: 176370 - protein, 225 aa, Artificial Sequence
  derived and/or modified sequence
MTSEFFAAQLRAQISDDTTHPISYYKPEFYTPDDGGTAHLSVVAEDGSAVSATSTINLYFGSKVRSPVSGILFNNEMDDFSSPSITNEFGVPPSPANFIQPGKQPLSSMCPTIMVGQDGQVRMVVGAAGGTQITTATALAIIYNLWFGYDVKRAVEEPRLHNQLLPNVTTVERNIDQAVTAALETRHHHTQIASTFIAVVQAIVRTAGGWAAASDSRKGGEPAGY

SEQ ID NO: 176371 - protein, 120 aa, Artificial Sequence
  derived and/or modified sequence
MKKKLVVLGLLAVVLVLVIVGLCLWLPSASKEPDNHVYTRAAVAADAKQCSKIGRDALRDGGSAVDAAIAALLCVGLMNAHSMGIGGGLFLTIYNSTTRKAEVINAREVAPRLAFATMFN

SEQ ID NO: 176372 - protein, 463 aa, Artificial Sequence
  derived and/or modified sequence
MKKKLVVLGLLAVVLVLVIVGLCLWLPSASKEPDNHVYTRAAVAADAKQCSKIGRDALRDGGSAVDAAIAALLCVGLMNAHSMGIGGGLFLTIYNSTTRKAEVINAREVAPRLAFATMFNSSEQSQKGGLSVAVPGEIRGYELAHQRHGRLPWARLFQPSIQLARQGFPVGKGLAAALENKRTVIEQQPVLCEVFCRDRKVLREGERLTLPQLADTYETLAIEGAQAFYNGSLTAQIVKDIQAAGGIVTAEDLNNYRAELIEHPLNISLGDVVLYMPSAPLSGPVLALILNILKGYNFSRESVESPEQKGLTYHRIVEAFRFAYAKRTLLGDPKFVDVTEVVRNMTSEFFAAQLRAQISDDTTHPISYYKPEFYTPDDGGTAHLSVVAEDGSAVSATSTINLYFGSKVRSPVSGILFNNEMDDFSSPSITNEFGVPPSPANFIQPGKQPLSSMCPTIMVGQDG

SEQ ID NO: 176373 - protein, 80 aa, Artificial Sequence
  derived and/or modified sequence
MKKKLVVLGLLAVVLVLVIVGLCLWLPSASKEPDNHVYTRAAVAADAKQCSKIGRDALRDGGSAVDAAIAALLCVGLMNA

SEQ ID NO: 176374 - protein, 174 aa, Artificial Sequence
  derived and/or modified sequence
MKKKLVVLGLLAVVLVLVIVGLCLWLPSASKEPDNHVYTRAAVAADAKQCSKIGRDALRDGGSAVDAAIAALLCVGLMNAHSMGIGGGLFLTIYNSTTRKAEVINAREVAPRLAFATMFNSSEQSQKGGLSVAVPGEIRGYELAHQRHGRLPWARLFQPSIQLARQGFPVGKGL

SEQ ID NO: 176375 - protein, 126 aa, Artificial Sequence
  derived and/or modified sequence
MKKKLVVLGLLAVVLVLVIVGLCLWLPSASKEPDNHVYTRAAVAADAKQCSKIGRDALRDGGSAVDAAIAALLCVGLMNAHSMGIGGGLFLTIYNSTTRKAEVINAREVAPRLAFATMFNSSEQSQ

SEQ ID NO: 176376 - protein, 109 aa, Artificial Sequence
  derived and/or modified sequence
MKKKLVVLGLLAVVLVLVIVGLCLWLPSASKEPDNHVYTRAAVAADAKQCSKIGRDALRDGGSAVDAAIAALLCVGLMNAHSMGIGGGLFLTIYNSTTRKAEVINAREV

SEQ ID NO: 176377 - protein, 111 aa, Artificial Sequence
  derived and/or modified sequence
MKKKLVVLGLLAVVLVLVIVGLCLWLPSASKEPDNHVYTRAAVAADAKQCSKIGRDALRDGGSAVDAAIAALLCVGLMNAHSMGIGGGLFLTIYNSTTRKAEVINAREVAP

SEQ ID NO: 176378 - protein, 37 aa, Artificial Sequence
  derived and/or modified sequence
MKKKLVVLGLLAVVLVLVIVGLCLWLPSASKEPDNHV

SEQ ID NO: 176379 - protein, 68 aa, Artificial Sequence
  derived and/or modified sequence
MKKKLVVLGLLAVVLVLVIVGLCLWLPSASKEPDNHVYTRAAVAADAKQCSKIGRDALRDGGSAVDAA

SEQ ID NO: 176380 - protein, 116 aa, Artificial Sequence
  derived and/or modified sequence
MKKKLVVLGLLAVVLVLVIVGLCLWLPSASKEPDNHVYTRAAVAADAKQCSKIGRDALRDGGSAVDAAIAALLCVGLMNAHSMGIGGGLFLTIYNSTTRKAEVINAREVAPRLAFA

SEQ ID NO: 176381 - protein, 127 aa, Artificial Sequence
  derived and/or modified sequence
MKKKLVVLGLLAVVLVLVIVGLCLWLPSASKEPDNHVYTRAAVAADAKQCSKIGRDALRDGGSAVDAAIAALLCVGLMNAHSMGIGGGLFLTIYNSTTRKAEVINAREVAPRLAFATMFNSSEQSQK

SEQ ID NO: 176382 - protein, 98 aa, Artificial Sequence
  derived and/or modified sequence
MKKKLVVLGLLAVVLVLVIVGLCLWLPSASKEPDNHVYTRAAVAADAKQCSKIGRDALRDGGSAVDAAIAALLCVGLMNAHSMGIGGGLFLTIYNSTT

SEQ ID NO: 176383 - protein, 30 aa, Artificial Sequence
  derived and/or modified sequence
MKKKLVVLGLLAVVLVLVIVGLCLWLPSAS

SEQ ID NO: 176384 - protein, 225 aa, Artificial Sequence
  derived and/or modified sequence
MTSEFFAAQLRAQISDDTTHPISYYKPEFYTPVDGGTAHLSVVAEDGSAVSATSTINLYFGSKVRSPVSEILFNDEMDDFSSPNITNEFGVPPSPANFIQPGKQPLSSMCPTIMVGQDGQVRMVVGAAGGTQITTATALAIIYNLWFGYDVKRAVEEPRLHNQLLPNVTTVERNIDQAVTAALETRHHHTQIASTFIAVVQAIVRTAGGWAAASDSRKGGEPAGY

SEQ ID NO: 176385 - DNA, 1710 bp, Artificial Sequence
  derived and/or modified sequence
atgaagaagaaacttgtcgtgctcggattactggccgtggtgctggtgctggtgattgtcggcctatgcctgtggctgccatctgcctctaaagaaccagataatcatgtatacacaagagccgcagttgccgccgatgctaaacagtgctcaaaaataggtcgggatgcactgcgggatggcggcagcgccgtcgatgctgccattgccgcactgctttgcgtgggtttaatgaacgcacactccatggggatcggtggtggccttttccttacaatctacaacagcacaactagaaaggcagaagtaattaacgcccgggaagtggcacctcggctggcatttgcaactatgttcaattcctccgagcaatcacagaagggggggctgtcggttgccgtgccaggggagatcaggggctacgagctggctcaccagaggcacgggaggctgccttgggcaaggctttttcagccatcgatacaattagcacgtcagggtttccctgtgggcaagggtttagccgcggccctggagaacaaaaggaccgtcatcgagcagcagcctgtcctgtgcgaagtattctgccgggaccggaaagtgctgcgagaaggtgagaggttgaccctgccccagcttgcagacacctatgagacattggctatagagggtgcccaggctttctacaacggatcattgactgcgcagatagtcaaggatatccaagcagctggcggaatcgtgacagctgaagatctcaataattaccgtgccgagttaatcgaacacccccttaatatctccctcggagacgtcgtcctgtatatgccttcggctcccctgagcggtccagttttggcgttgatcctaaatattctgaaaggctataatttttcccgagaatctgttgagtcaccggaacagaagggtttgacgtaccataggattgtcgaggcattcaggtttgcttacgctaagcgcaccctgctgggagaccccaaatttgtcgacgtgaccgaggtcgtgaggaacatgacctccgaattttttgccgcgcagttgcgcgcccaaatttcggacgacacaactcatcctatctcatactacaagccagagttttacaccccagacgatggcggcaccgcccatcttagcgttgtcgctgaggatggcagcgctgtgagcgccacttccacaatcaacctgtatttcggctcaaaagtgcggtctccagtaagtggcatcctctttaataatgaaatggacgacttctcaagcccgagcataacaaacgaattcggagttccccccagccccgcaaattttatacagccggggaagcagccactctccagcatgtgccctacaatcatggtcggacaggacggacaggtgcgtatggttgtcggagccgctggcggaacacagattactacggcaactgccttagccatcatctataatctgtggtttggatacgacgtcaaaagggccgtcgaggagccccggcttcacaatcaactcctgcccaacgtgaccacggtcgaacgaaacattgatcaagcggtgactgctgcactcgagacccgacatcatcacacccaaattgcttcgacgttcattgctgtggtgcaggccatcgtcagaaccgccggcggatgggccgcagcctctgattcacggaaaggaggggagcccgccggctactag

SEQ ID NO: 176386 - DNA, 1710 bp, Artificial Sequence
  derived and/or modified sequence
atgaaaaagaaactagtcgtcctgggccttctcgctgtggttcttgtcctcgtgattgtgggactgtgcttatggctcccaagtgcatcaaaagagccagataaccacgtatatactagggcagccgtagcggccgatgcaaaacaatgttctaaaatcggccgagacgccctgcgtgacggcggctcggccgtcgatgccgcaatcgccgctttgctatgtgtgggcctgatgaacgctcactccatgggaattggggggggtctgttcttgaccatatacaattctacaacaaggaaagctgaagttatcaacgcacgcgaagtcgctccaagactcgccttcgcaacaatgtttaacagttcagaacagtcgcagaaaggcggactttccgtcgccgtccccggggagatacgcgggtacgagctggcccatcagaggcacggaagactgccttgggcacgtctttttcagccatcaatccaactcgccaggcaggggttccctgtgggcaagggcctggcggcggcactggaaaacaaacggaccgtgatcgaacagcaaccagtcctgtgtgaagtcttctgtcgggatagaaaggtgttgcgtgagggagaacgattgaccctgcctcagcttgccgacacctatgaaacattggctatcgaaggcgcgcaagcattttataacggcagtttaactgcacagatcgtgaaggacattcaggctgctggaggaatcgtgaccgcagaggatctgaataactatagagcggaactgatcgagcaccccctcaacatcagcctgggtgatgttgtcctatatatgccgagcgcgcctctgtctgggccagtgctcgcactcatcctgaacattctcaaaggctacaacttctcacgagaaagcgtggaatcaccagagcagaagggcttgacctatcacaggattgtcgaagcctttcggtttgcctatgccaagcgtaccctgctgggggaccccaagttcgtggatgtgacagaagtggtccggaatatgacgagcgagttttttgccgcacagttaagggctcaaatttcagatgatactactcaccccatatcttactacaagcctgaattttacacccctgatgatggcgggacagcccatcttagcgttgtcgccgaagacggttctgctgtatcagctacttcaaccatcaatctgtatttcggatccaaggtgaggagccccgtgagtgggattctcttcaataacgaaatggacgatttcagtagcccaagcattacaaacgagtttggagttcccccttctccagcgaactttatccagccaggcaagcagccactttcaagcatgtgccccaccattatggtgggacaggacgggcaagtacgtatggtggttggcgctgctggagggacccagatcaccaccgcaaccgctctcgccataatttataacctgtggtttgggtacgacgtcaagcgggctgtggaagagcccagattgcataaccaactgctccccaacgtgactacggtggagcggaacatagaccaggccgtcaccgccgcgctagaaacaagacaccaccatactcagatagcatcaaccttcatagccgtggtgcaggccatcgtaaggaccgccggtggatgggccgcggccagcgatagccgcaaaggaggggagccggccggatattag

SEQ ID NO: 176387 - DNA, 1710 bp, Artificial Sequence
  derived and/or modified sequence
atgaagaagaagttggtcgtactaggactgcttgccgtagtgctcgtgcttgttatagtagggctttgcctctggctgccatccgccagcaaagaacctgacaaccacgtttatacacgcgcggccgtcgcggccgatgcgaagcagtgttccaagattggcagggatgccttgcgggatggtgggtctgccgtcgacgccgccatcgcagccctgctctgcgtaggcctgatgaatgcccattcaatgggaattggtggagggttattcctgaccatctataatagcacaacccggaaggctgaagtgatcaatgcccgggaggtagctcctcgcctcgcattcgcaacgatgtttaatagctctgagcagagccagaagggtggactgagtgtggcagtacccggcgagatacgaggatacgaactggctcatcaacgacatggtcggctgccatgggcccggcttttccagccaagtatccagctggcccggcaggggttcccagttggtaaggggctggctgctgcgcttgagaacaagagaaccgtaattgaacagcagcctgtcctgtgcgaagttttctgtcgggacagaaaagtcctcagagaaggggagcggcttaccttaccccaactggccgacacttacgagactttggccattgaaggcgcccaggccttttacaatggtagtctgaccgctcagattgtaaaggatatccaggccgccggcggaatcgtcactgctgaggacctgaacaattaccgggcagaactgatcgaacatcctctgaatattagcctcggagacgtggtactttacatgcccagtgcacctttgtcagggcccgtgttggcactcatcctaaatattttaaaaggttataatttcagtcgggagtccgttgaatcgcccgaacagaagggactcacttaccataggattgtggaggctttccgattcgcgtatgcaaaacgcactcttctcggcgaccccaaatttgtcgacgtcactgaggtggtaagaaatatgacgtccgagttcttcgcggctcagctgcgggcccaaatcagtgatgacacaactcatcctatctcctattacaaaccagaattttatacacctgacgacggcggaacagcacatctctcagtggtggccgaggacggatctgcggtctctgctacttctaccatcaacctgtactttggaagcaaggtgcgttcccccgtctctggcatcctgttcaacaacgaaatggatgatttcagcagcccctcaatcaccaacgagtttggcgtccctccctctcctgctaactttatccagcctggaaaacaaccattaagtagcatgtgtcccaccattatggttggccaggatggacaagtgcgcatggttgtgggtgctgccggcggcacacagataacaaccgcaactgccctcgccatcatatacaatctctggttcggttacgacgtgaaacgcgcggtggaggagcctcgtttgcataatcaacttttgcctaatgtaactactgtggagagaaatattgaccaggcagtaaccgccgcactagagacacgacaccaccatacacaaatagcctcgactttcatcgctgtcgtacaagcaatcgtcagaactgccgggggctgggccgccgcatccgattcccgaaagggaggtgagccagctggctattag

SEQ ID NO: 176388 - DNA, 1710 bp, Artificial Sequence
  derived and/or modified sequence
atgaaaaagaagttggtggttttaggactattggcagtggtgctggtgctagtgatagttggcctttgcctctggctcccctccgcgtctaaggagcctgataaccacgtctacacaagagctgcggttgctgccgacgccaagcaatgttctaagattgggcgagacgctctgcgcgacgggggaagtgccgtggatgccgctatcgctgctctattatgtgtagggctcatgaatgcccattccatggggatcggaggcgggctttttctcaccatctataatagtaccacccggaaagctgaggttattaatgctcgcgaggtagcaccccgactggcttttgctaccatgtttaacagttcagaacagtctcagaagggcggtctctccgtagcagtgcccggggagatcagaggctacgagcttgctcatcaaagacatggtcggctcccttgggccaggttattccaaccgtccatccagctggcccgccagggcttccccgtgggtaaaggcctggccgccgccctggagaataagaggaccgtgatagagcagcagccagtgctctgcgaggtcttttgcagggacagaaaggtattgcgggaaggagaacgcctgacactcccccaattagcagacacctatgaaacccttgccatcgagggagcacaggccttttacaacggaagcctgacagctcagatcgtgaaagatatccaagccgctggggggatcgtgaccgcagaggacctgaacaactaccgagctgagctcatcgaacatccgctcaatatttctctcggggacgtggtgctttatatgccatctgcaccccttagcggcccagttctggcactgatcctcaacattcttaagggatataactttagtcgcgaatcggtagaatctccagagcagaaggggctcacctatcacaggatcgtggaggcctttcgttttgcatacgcgaaaaggacactcttgggggatcccaaatttgtggacgtaaccgaggtcgtgcgcaacatgaccagtgaattctttgccgcgcagcttcgggcccagatctctgatgataccacccatccaatttcctactataagccagagttctatacacctgacgacggaggtactgcgcatctttccgttgtcgcagaagacggatcagcagtgtccgcaactagcactattaacctgtactttggcagcaaagtgagaagccctgtctctggtatcctctttaataacgaaatggacgacttttctagcccctctatcacaaatgaattcggggtacctccctcaccagcgaatttcattcagccgggaaagcagccgttgtcatcgatgtgtccgacgattatggttggacaggatggccaggtgcgcatggttgtaggggccgctggcggaacacagatcaccaccgccacagccctcgcaatcatttacaatctatggtttggttatgacgtcaagagagccgtcgaggaaccacgattgcacaatcagctcctccctaacgtgactactgtggaaagaaacattgaccaggccgtcaccgctgcccttgaaacaaggcaccaccatacacagattgcaagtacattcattgccgtcgttcaggccatcgttaggacagccggcggttgggccgcggcttccgacagtaggaaagggggggaacccgccggatactag

SEQ ID NO: 176389 - DNA, 678 bp, Artificial Sequence
  derived and/or modified sequence
atgacatccgaattttttgctgctcagctgcgcgctcaaatctccgacgacaccactcatccgataagctactataaacctgaattctatactcctgatgacgggggcaccgcccatctctctgttgtggcggaggacggatcggccgtgtcagcaaccagcacaattaacttgtactttggctcaaaggtgagaagtccggtgagcggtatcctgtttaacaatgagatggatgacttctctagcccttctattactaatgaatttggtgttcccccttcacccgcaaactttattcagcccgggaagcaaccccttagttcaatgtgccctactattatggtaggtcaggacgggcaagtcaggatggtggtaggcgctgctgggggtactcagattaccaccgctaccgctttagcaattatctataatctgtggtttgggtacgacgtgaagagagctgtggaagagccaagactccacaaccagctgttgcctaatgttacaaccgttgaacgcaacatcgatcaagccgtgaccgccgcactggagacccgccatcatcatacacagatagcatccaccttcatcgctgtggtgcaagctatcgtgaggactgccggtggttgggccgccgcttccgattcaaggaaagggggcgagcctgccggatattag

SEQ ID NO: 176390 - DNA, 678 bp, Artificial Sequence
  derived and/or modified sequence
atgactagtgaattttttgctgctcaattacgggcccagatttcggatgacaccacccaccccatttcctattacaaacccgagttttatactccggacgatgggggcactgctcacctcagcgtagtcgccgaggacggttcagctgtgtctgctacctccaccataaatctgtactttggctcgaaggtgcgcagtccagtctccggcattctgtttaacaatgaaatggacgattttagtagcccgagcattaccaatgaatttggtgtcccacctagccccgccaactttattcagccggggaagcaaccgctctcctcaatgtgtcctacaatcatggtcggacaggatggtcaggtcaggatggtggtgggagccgctggtgggactcaaattaccaccgctaccgcactggctatcatttataacttatggttcggatatgacgttaaaagggctgttgaggaaccccggctgcataatcagctacttcctaatgtcaccacagtagaacgcaatattgaccaagccgtcaccgcagcccttgagacacgccatcatcacacccaaattgcatctacttttatcgccgttgttcaggcaattgtacggaccgctggaggctgggctgcagcttccgactccaggaaaggtggtgagccagcggggtactag

SEQ ID NO: 176391 - DNA, 678 bp, Artificial Sequence
  derived and/or modified sequence
atgacctcggaattcttcgctgcccagttgagagctcaaattagtgacgataccacacaccccattagctattacaaacccgagttttacacccctgacgacggcgggactgcccacctatccgtcgtagctgaggacgggagcgccgtttctgcaacatccaccatcaatctgtattttggttctaaagtgagaagtccggtgagtggcatcctttttaacaatgaaatggatgatttctctagcccttctattacgaatgagtttggcgtgcctccaagcccagctaattttatacaacctggtaagcagcccctgagctcaatgtgccccacgattatggtaggccaagacggccaggtacgcatggtggtaggagcagctggcgggacccagattacaaccgctaccgcactggccatcatctacaatctctggtttggatacgatgtcaaaagggccgtcgaggagccaaggttgcataaccagttgctgcctaacgttacgacagtggagcggaatatcgaccaggctgtgactgcggctctggaaacaaggcaccaccatacacagatcgcttccacctttatcgcggtggtgcaggctatcgtgcgaactgcagggggatgggccgcggcctccgactctaggaaagggggcgagcccgcgggatattag

SEQ ID NO: 176392 - DNA, 1710 bp, Artificial Sequence
  derived and/or modified sequence
atgaaaaaaaaacttgtggtgctcggcctactggcagtggtcttggtgttggtgatcgttgggctgtgcctgtggctcccaagtgcctcgaaagaacctgataaccacgtgtacactcgggccgccgtggctgccgacgccaagcaatgtagcaagatcggacgggatgcattgagagatgggggatctgcggtggacgctgcaatcgccgcactgctgtgtgtgggcctgatgaatgcacactctatgggcatcgggggtggtctctttttaaccatctacaattccacgactaggaaggcagaggtcattaacgcgcgcgaggtagccccccggcttgcgtttgccacaatgtttaacagttccgagcagagccagaagggagggttgagcgtcgctgtgcccggcgaaatccggggttatgagttagcacaccagaggcacggtcggctgccatgggcccgtttgttccagccttccatccagttggcgaggcagggtttccctgttggcaagggactagccgccgcactcgagaataaaaggacagtcatcgagcaacagcctgtcttgtgcgaggtattttgtcgggatcgcaaggttctccgggagggggagaggttaactctgccccagttagccgatacttatgagaccctcgccatcgagggggcccaggccttttataacggttctctgacagcacagatagtgaaagatatccaggctgcagggggtatcgttaccgccgaggatttaaataattatagggccgagttaatcgagcacccacttaacatctccctgggtgacgtagtgctgtacatgcccagcgccccactgagcggacctgtgctcgctcttattcttaatatccttaaagggtacaatttttcccgcgagagcgtcgaatcccccgaacagaaggggcttacctatcatcgaatcgtggaggcctttcggttcgcctatgccaagaggactcttctgggagaccctaaattcgtcgacgtcactgaagtcgtcagaaatatgacgtctgagttttttgccgcccagctcagagcccagatttcagatgataccacccatccaatctcttattataagccagaattttataccccagacgacggtgggaccgcacacctgagtgtggtggccgaggatggctctgcagtgagcgcaacatccactattaacctgtacttcggttcgaaggtgcgctcccccgtgtccgggatcctgttcaataacgaaatggatgacttttcatccccaagcatcactaatgaattcggcgttccaccatccccagcaaatttcattcagcctggaaaacagcctctcagcagcatgtgtcccactatcatggtgggacaggacgggcaggtgaggatggtggtcggcgccgctggtggcacccagatcaccacggcaactgccctggctattatttataacctctggtttggctacgatgtgaagagggcagtggaggagccaaggttacacaatcagctactgcctaacgtgacaactgtcgagcgcaatatcgaccaagccgtcacagcagccttagagacaaggcatcaccacacacaaatagcctccaccttcatcgcggtcgtgcaggcgatcgtacgcacagcgggtggctgggctgctgcatccgactctcggaagggcggggagcctgcgggttactag

SEQ ID NO: 176393 - DNA, 363 bp, Artificial Sequence
  derived and/or modified sequence
atgaaaaagaagttggtcgttctgggactcttagcagtagtcctcgttctggtgatcgtaggactctgtctttggctccctagcgcttccaaagagcctgacaaccatgtttacacccgagcggccgtcgccgccgatgccaaacagtgttccaagattggtagggacgccctgcgtgacggtggctctgctgtagacgccgcaatcgcagcccttctgtgtgtggggcttatgaacgcccactccatgggcattggaggcggtttgttcctgaccatttacaattccacgacacgtaaagccgaagtgattaacgcccgcgaagtcgctccacgactggccttcgcaactatgtttaactag

SEQ ID NO: 176394 - DNA, 1392 bp, Artificial Sequence
  derived and/or modified sequence
atgaagaagaagctggttgttttgggccttctggccgtggtgttggtgctcgtcatcgtgggcctctgtctgtggctgccttcagcctctaaggagccagataaccatgtgtatacccgtgccgcagttgctgcggacgctaagcaatgctcgaaaatcggtcgcgacgcattgagggatggggggtccgcagtcgacgccgcaatcgccgcgctgctctgcgtggggctcatgaacgcccattctatgggaatcggcggggggttatttctaacaatctacaatagtacaacacggaaggccgaagtgataaacgcaagggaggtggcacctagattggcctttgccacaatgttcaacagttccgaacagtctcaaaaaggcggcctgtccgtggctgtgcccggcgagattcgcggctacgagttagctcaccagagacatggaagactcccgtgggcgagactgtttcagccctcaatacagctcgcacgccaaggatttcctgttgggaaaggactggcggccgcactcgagaacaaacgaacagtgattgagcagcaacctgttctgtgcgaggtgttttgtcgagatcggaaggttctgagggagggggagcgcctcaccctaccgcagcttgcggatacttatgagacacttgccattgaaggggctcaggcgttttacaatggctcactcacagcgcaaatagtgaaggacatacaggcagctgggggaattgtgactgcagaggacttgaataactaccgtgccgagttgattgaacatcctctgaatatttccctcggcgatgttgttctatatatgcctagcgccccactcagcggccctgtcttggctctgatcctgaacatactcaaagggtacaacttctccagagaatctgtggaatcgccagagcagaaagggctgacttatcaccgtatagttgaggctttccggttcgcttatgccaagcgaactctccttggcgaccctaaattcgtggacgtgaccgaggttgtccggaacatgactagtgagtttttcgccgcccagctgagagcccagatcagcgacgatacaacgcaccctataagctactacaaaccggagttttatacaccagatgatggaggtacagcacacttgagcgtggtggctgaggacggttctgctgtgtccgccacgagcactataaatctgtacttcggtagcaaggtccgcagccccgtgtccgggatactctttaataatgaaatggacgacttcagctccccaagcattaccaatgagtttggtgtacctcccagccctgccaattttattcagcctggaaagcagcccctgagttcaatgtgtcctacgatcatggtgggccaggacgggtag

SEQ ID NO: 176395 - DNA, 243 bp, Artificial Sequence
  derived and/or modified sequence
atgaaaaaaaaactagtggtccttggtctgttggcagtcgtgctggttttagtgattgtagggctttgtctctggctcccgtctgcctctaaggaaccggataaccatgtctacacacgagcagcagtggcagcagacgcaaagcaatgttccaagatcggacgtgacgctcttcgcgacggcggaagtgctgtggatgcagcgatcgccgctctgctgtgtgttgggctaatgaatgcctag

SEQ ID NO: 176396 - DNA, 525 bp, Artificial Sequence
  derived and/or modified sequence
atgaagaagaagctggtcgtcctaggcctcctggcagttgtcctcgtgctcgtcattgtaggcctgtgtctgtggctcccttcagcttccaaggagcctgacaaccatgtgtatacccgggcagccgttgccgccgacgctaaacagtgtagcaagatcggtagagacgccctcagggatggagggtccgccgtggacgccgccatcgctgccctgctgtgcgtcggccttatgaacgctcatagcatgggaatcggcgggggtctgttcctcacgatctacaactcgactacaaggaaagctgaggtgatcaatgctagggaggttgctcccagactcgcctttgccactatgtttaatagttcagagcagtcacagaagggtgggttaagtgtagctgtgccgggtgaaatccggggatacgagctggctcaccagagacatggcaggttgccctgggcccgcctttttcagccttctattcagctggctaggcaaggcttccctgtaggtaaagggttgtag

SEQ ID NO: 176397 - DNA, 381 bp, Artificial Sequence
  derived and/or modified sequence
atgaagaaaaaactggttgtcctgggattactagccgtggtgctggtgctcgtaatagtaggattgtgcttgtggttaccgtccgcaagtaaagagcccgataatcacgtgtacacccgagccgccgtggctgcagatgctaagcaatgctcaaaaattggcagagatgccctccgggacggcggatccgctgtggatgccgctatcgctgcactcctctgtgttggcctgatgaacgctcattccatgggaattgggggagggctgtttttgacgatctacaatagcacgacccgcaaggcagaggtaattaacgcacgggaagtagctccacgtcttgcattcgccaccatgtttaactcatctgagcagtcccagtag

SEQ ID NO: 176398 - DNA, 330 bp, Artificial Sequence
  derived and/or modified sequence
atgaagaagaaattggtggtgctcggtctcctggccgtggtgctggtgctggtgattgtgggactgtgcctatggttgccctccgccagtaaagagcccgataatcacgtttacaccagagccgctgtggctgcagatgccaaacagtgctccaaaataggacgcgatgcccttcgggatggcgggtctgctgtcgatgctgccattgcggccctgctctgtgtcggcctcatgaatgctcacagtatgggaattgggggtggtctatttcttaccatctacaactcgacaaccaggaaggccgaggttatcaatgctagagaggtttag

SEQ ID NO: 176399 - DNA, 336 bp, Artificial Sequence
  derived and/or modified sequence
atgaagaaaaaacttgttgtactgggactgttggctgtcgtattggttctggtcatcgtgggcctgtgcctgtggctgccttcggcctccaaagaacccgacaaccacgtgtatacacgggcggctgtggctgctgacgcaaagcagtgctcaaagattggcagggacgctctgcgggacggcggctcagcggtagatgccgccattgcggctctgctctgcgtgggcctcatgaatgcccacagtatgggcatcggtggcggtctgttccttaccatttataatagtactacacggaaggccgaggtgatcaacgcaagagaggtcgcaccctag

SEQ ID NO: 176400 - DNA, 207 bp, Artificial Sequence
  derived and/or modified sequence
atgaagaagaagctggtggtgttggggttgctcgctgtggtattggtgctggttatcgtaggactgtgcttgtggttgccctccgcttccaaagagcctgacaatcacgtatatacacgtgccgctgtcgcggcggatgctaagcaatgcagcaaaattggtcgcgatgcactccgtgacggggggagcgccgttgacgcggcttag

SEQ ID NO: 176401 - DNA, 381 bp, Artificial Sequence
  derived and/or modified sequence
atgaagaaaaaactagtggttcttgggctgctagccgtcgtgctggtgctcgtgattgtggggctctgtctttggctgccgagtgcctctaaggaaccagataaccatgtgtacaccagggctgccgttgccgctgatgctaaacagtgctcaaagattggccgggacgctctcagagatggtggatccgctgtggatgcagctatcgccgcactcctgtgtgtaggactgatgaacgcccatagcatgggaatcgggggcggcctcttcctcaccatctataatagcacaacaaggaaggccgaggtgatcaatgcccgagaggtggccccccgcctggccttcgccaccatgttcaactcctccgagcagtctcaatag

SEQ ID NO: 176402 - DNA, 351 bp, Artificial Sequence
  derived and/or modified sequence
atgaaaaagaagctggtggtgttgggtctgctggctgtggtgctggtcctggtgatcgtgggcctgtgcctttggctgccctccgcttccaaggaaccagataaccacgtctatacacgcgctgcagttgccgccgatgctaaacagtgctcgaagattggcagggatgccctgcgcgatgggggatcagctgtggacgccgccattgcagcactgctctgtgtgggccttatgaacgctcatagtatgggcattggcggtgggctcttcttgactatttataattcaactacccggaaagccgaagtgatcaacgcccgcgaagtggcgcctcggcttgcatttgcttag

SEQ ID NO: 176403 - DNA, 384 bp, Artificial Sequence
  derived and/or modified sequence
atgaaaaaaaaacttgtcgtactggggctcctcgcagtcgtcctggtgctggtaatagtggggctttgtctctggttgccaagcgcatcaaaggaaccggacaatcatgtgtacactcgcgctgccgtcgctgccgacgccaaacaatgctctaaaattggtcgcgacgcactgcgggacggcggttcagccgtagatgccgcaattgccgctttactgtgtgtaggccttatgaacgcccacagcatgggaatcggcggtgggctgttcctaacaatttataactctactactagaaaggctgaggttataaatgcccgggaggtcgcccctcgactcgcattcgctactatgtttaattcttccgagcagtcacagaagtag

SEQ ID NO: 176404 - DNA, 297 bp, Artificial Sequence
  derived and/or modified sequence
atgaaaaagaaattagtggttctgggacttctcgcggtcgtgcttgtgttggtcatcgtcggcttgtgtttgtggctgccaagcgcaagtaaggaaccggataaccacgtgtataccagagccgcagtggcggccgatgccaaacagtgctccaaaatcgggcgagatgccctgcgggacggaggcagtgctgtagacgccgccatcgccgcccttctgtgcgtaggacttatgaatgcccacagcatggggattggagggggtctcttcctgaccatttacaacagcactacctag

SEQ ID NO: 176405 - DNA, 2326 bp, Artificial Sequence
  derived and/or modified sequence
gcctggattctcccagagattgcctggaacaccagctcgggtcctcgcacaccatcctgcgggtgcagcccagaactgtcttctgaggaagaggtgctctcctgggcccccactgtccccaggcctcagcaaggcaagtgaggtgctgccgtcatccaggctggacagttcagtgatttgcctgaggccccacagcagagttcaactggagacagagaaaccagctagaggcagagggaggtaacacggagtcccccagaaaggtctgggctgcgcgtgcttcaggtaacctcccttgaccttcaggagaacgagaaggctgcctgatcagagagtccctgaagaagattctgtggctacaggcttcagcagagtgtgagggagaccccggttatttcctcagctatttccaccaaatcctcctgtctttcgtggccaacaccccaggcaaggcttggggcccccgtctgctgctggacgcagagccatgaagaagaagttagtggtgctgggcctgctggccgtggtcctggtgctggtcattgtcggcctctgtctctggctgccctcagcctccaaggaacctgacaaccatgtgtacaccagggctgccgtggccgcggatgccaagcagtgctcgaagattgggagggatgcactgcgggacggtggctctgcggtggatgcagccattgcagccctgttgtgtgtggggctcatgaatgcccacagcatgggcatcgggggtggcctcttcctcaccatctacaacagcaccacacgaaaagctgaggtcatcaacgcccgcgaggtggcccccaggctggcctttgccaccatgttcaacagctcggagcagtcccagaagggggggctgtcggtggcggtgcctggggagatccgaggctatgagctggcacaccagcggcatgggcggctgccctgggctcgcctcttccagcccagcatccagctggcccgccagggcttccccgtgggcaagggcttggcggcagccctggaaaacaagcggaccgtcatcgagcagcagcctgtcttgtgtgaggtgttctgccgggatagaaaggtgcttcgggagggggagagactgaccctgccgcagctggctgacacctacgagacgctggccatcgagggtgcccaggccttctacaacggcagcctcacggcccagattgtgaaggacatccaggcggccgggggcattgtgacagctgaggacctgaacaactaccgtgctgagctgatcgagcacccgctgaacatcagcctgggagacgtggtgctgtacatgcccagtgcgccgctcagcgggcccgtgctggccctcatcctcaacatcctcaaagggtacaacttctcccgggagagcgtggagagccccgagcagaagggcctgacgtaccaccgcatcgtagaggctttccggtttgcctacgccaagaggaccctgcttggggaccccaagtttgtggatgtgactgaggtggtccgcaacatgacctccgagttcttcgctgcccagctccgggcccagatctctgacgacaccactcacccgatctcctactacaagcccgagttctacacgccggatgacgggggcactgctcacctgtctgtcgtcgcagaggacggcagtgctgtgtccgccaccagcaccatcaacctctactttggctccaaggtccgctccccggtcagcgggatcctgttcaataatgaaatggacgacttcagctctcccagcatcaccaacgagtttggggtacccccctcacctgccaatttcatccagccagggaagcagccgctctcgtccatgtgcccgacgatcatggtgggccaggacggccaggtccggatggtggtgggagctgctgggggcacacagatcaccacggccactgcactggccatcatctacaacctctggttcggctatgacgtgaagcgggccgtggaggagccccggctgcacaaccagcttctgcccaacgtcacgacagtggagagaaacattgaccaggcagtgactgcagccctggagacccggcaccatcacacccagatcgcgtccaccttcatcgctgtggtgcaagccatcgtccgcacggctggtggctgggcagctgcctcggactccaggaaaggcggggagcctgccggctactgagtgctccaggaggacaaggctgacaagcaatccagggacaagatactcaccaggaccaggaaggggactctgggggaccggcttcccctgtgagcagcagagcagcacaataaatgaggccactgtgcc

SEQ ID NO: 176406 - DNA, 2540 bp, Artificial Sequence
  derived and/or modified sequence
cagaccgggcgtcgggtgagcccagaagtgagagcagttggctgtgccccagtgctgtgtgacccagaggcgccgctcaccctctctgagctggtggacatcatagcgggtgcagcccagaactgtcttctgaggaagaggtgctctcctgggcccccactgtccccaggcctcagatgctgcatattgctggcccagctcctgaggctctttggacctccaggaatcggtgtctctatcaggaacccttaaccctgacccggactcccagctgggacccggggtgtcggagtggcaagagcgctgtcaggcctggtgaagggtgtgagctgtccaacggggcagggaggaggcagggcctgttctgcagttggacagacagagccctctagctgctttctggaagactgaagggcagcaaggcaagtgaggtgctgccgtcatccaggctggacagttcagtgatttgcctgaggccccacagcaggagaacgagaaggctgcctgatcagagagtccctgaagaagattctgtggctacaggcttcagcagagtgtgagggagaccccggttatttcctcagctatttccaccaaatcctcctgtctttcgtggccaacaccccaggcaaggcttggggcccccgtctgctgctggacgcagagccatgaagaagaagttagtggtgctgggcctgctggccgtggtcctggtgctggtcattgtcggcctctgtctctggctgccctcagcctccaaggaacctgacaaccatgtgtacaccagggctgccgtggccgcggatgccaagcagtgctcgaagattgggagggatgcactgcgggacggtggctctgcggtggatgcagccattgcagccctgttgtgtgtggggctcatgaatgcccacagcatgggcatcgggggtggcctcttcctcaccatctacaacagcaccacacgaaaagctgaggtcatcaacgcccgcgaggtggcccccaggctggcctttgccaccatgttcaacagctcggagcagtcccagaagggggggctgtcggtggcggtgcctggggagatccgaggctatgagctggcacaccagcggcatgggcggctgccctgggctcgcctcttccagcccagcatccagctggcccgccagggcttccccgtgggcaagggcttggcggcagccctggaaaacaagcggaccgtcatcgagcagcagcctgtcttgtgtgaggtgttctgccgggatagaaaggtgcttcgggagggggagagactgaccctgccgcagctggctgacacctacgagacgctggccatcgagggtgcccaggccttctacaacggcagcctcacggcccagattgtgaaggacatccaggcggccgggggcattgtgacagctgaggacctgaacaactaccgtgctgagctgatcgagcacccgctgaacatcagcctgggagacgtggtgctgtacatgcccagtgcgccgctcagcgggcccgtgctggccctcatcctcaacatcctcaaagggtacaacttctcccgggagagcgtggagagccccgagcagaagggcctgacgtaccaccgcatcgtagaggctttccggtttgcctacgccaagaggaccctgcttggggaccccaagtttgtggatgtgactgaggtggtccgcaacatgacctccgagttcttcgctgcccagctccgggcccagatctctgacgacaccactcacccgatctcctactacaagcccgagttctacacgccggatgacgggggcactgctcacctgtctgtcgtcgcagaggacggcagtgctgtgtccgccaccagcaccatcaacctctactttggctccaaggtccgctccccggtcagcgggatcctgttcaataatgaaatggacgacttcagctctcccagcatcaccaacgagtttggggtacccccctcacctgccaatttcatccagccagggaagcagccgctctcgtccatgtgcccgacgatcatggtgggccaggacggccaggtccggatggtggtgggagctgctgggggcacacagatcaccacggccactgcactggccatcatctacaacctctggttcggctatgacgtgaagcgggccgtggaggagccccggctgcacaaccagcttctgcccaacgtcacgacagtggagagaaacattgaccaggcagtgactgcagccctggagacccggcaccatcacacccagatcgcgtccaccttcatcgctgtggtgcaagccatcgtccgcacggctggtggctgggcagctgcctcggactccaggaaaggcggggagcctgccggctactgagtgctccaggaggacaaggctgacaagcaatccagggacaagatactcaccaggaccaggaaggggactctgggggaccggcttcccctgtgagcagcagagcagcacaataaatgaggccactgtgccaggctccaggtggcctccctggcctgtctcccc

SEQ ID NO: 176407 - DNA, 2628 bp, Artificial Sequence
  derived and/or modified sequence
gtgctgctggatgaccagaccgggcgtcgggtgagcccagaagtgagagcagttggctgtgccccagtgctgtgtgacccagaggcgccgctcaccctctctgagctggtggacatcataggtggggaagctcaggtcagggcactcccatgagtgtctggaggcctgagtcccattctcagctctgccatatgcttgctgcgctctagaggagttcctcttcctctccaagcctcggtttatgtacccgtgcagtgggagtgagttgcacttcggggtgaagggggcaagacttgtgtgggcgcatcctgcagaaggatcccacagcgggtgcagcccagaactgtcttctgaggaagaggtgctctcctgggcccccactgtccccaggcctcagcaaggcaagtgaggtgctgccgtcatccaggctggacagttcagtgatttgcctgaggccccacagcagagttcaactggagacagagaaaccagctagaggcagagggaggtaacacggagtcccccagaaaggtctgggctgcgcgtgcttcaggtaacctcccttgaccttcaggagaacgagaaggctgcctgatcagagagtccctgaagaagattctgtggctacaggcttcagcagagtgtgagggagaccccggttatttcctcagctatttccaccaaatcctcctgtctttcgtggccaacaccccaggcaaggcttggggcccccgtctgctgctggacgcagagccatgaagaagaagttagtggtgctgggcctgctggccgtggtcctggtgctggtcattgtcggcctctgtctctggctgccctcagcctccaaggaacctgacaaccatgtgtacaccagggctgccgtggccgcggatgccaagcagtgctcgaagattgggagggatgcactgcgggacggtggctctgcggtggatgcagccattgcagccctgttgtgtgtggggctcatgaatgcccacagcatgggcatcgggggtggcctcttcctcaccatctacaacagcaccacacgaaaagctgaggtcatcaacgcccgcgaggtggcccccaggctggcctttgccaccatgttcaacagctcggagcagtcccagaagggggggctgtcggtggcggtgcctggggagatccgaggctatgagctggcacaccagcggcatgggcggctgccctgggctcgcctcttccagcccagcatccagctggcccgccagggcttccccgtgggcaagggcttggcggcagccctggaaaacaagcggaccgtcatcgagcagcagcctgtcttgtgtgaggtgttctgccgggatagaaaggtgcttcgggagggggagagactgaccctgccgcagctggctgacacctacgagacgctggccatcgagggtgcccaggccttctacaacggcagcctcacggcccagattgtgaaggacatccaggcggccgggggcattgtgacagctgaggacctgaacaactaccgtgctgagctgatcgagcacccgctgaacatcagcctgggagacgtggtgctgtacatgcccagtgcgccgctcagcgggcccgtgctggccctcatcctcaacatcctcaaagggtacaacttctcccgggagagcgtggagagccccgagcagaagggcctgacgtaccaccgcatcgtagaggctttccggtttgcctacgccaagaggaccctgcttggggaccccaagtttgtggatgtgactgaggtggtccgcaacatgacctccgagttcttcgctgcccagctccgggcccagatctctgacgacaccactcacccgatctcctactacaagcccgagttctacacgccggatgacgggggcactgctcacctgtctgtcgtcgcagaggacggcagtgctgtgtccgccaccagcaccatcaacctctactttggctccaaggtccgctccccggtcagcgggatcctgttcaataatgaaatggacgacttcagctctcccagcatcaccaacgagtttggggtacccccctcacctgccaatttcatccagccagggaagcagccgctctcgtccatgtgcccgacgatcatggtgggccaggacggccaggtccggatggtggtgggagctgctgggggcacacagatcaccacggccactgcactggccatcatctacaacctctggttcggctatgacgtgaagcgggccgtggaggagccccggctgcacaaccagcttctgcccaacgtcacgacagtggagagaaacattgaccaggcagtgactgcagccctggagacccggcaccatcacacccagatcgcgtccaccttcatcgctgtggtgcaagccatcgtccgcacggctggtggctgggcagctgcctcggactccaggaaaggcggggagcctgccggctactgagtgctccaggaggacaaggctgacaagcaatccagggacaagatactcaccaggaccaggaaggggactctgggggaccggcttcccctgtgagcagcagagcagcacaataaatgaggccactgtgccaggctccaggtggcctccctggcctgtctcccca

SEQ ID NO: 176408 - DNA, 2413 bp, Artificial Sequence
  derived and/or modified sequence
gaccagaccgggcgtcgggtgagcccagaagtgagagcagttggctgtgccccagtgctgtgtgacccagaggcgccgctcaccctctctgagctggtggacatcatagcgggtgcagcccagaactgtcttctgaggaagaggtgctctcctgggcccccactgtccccaggcctcagcaaggcaagtgaggtgctgccgtcatccaggctggacagttcagtgatttgcctgaggccccacagcagagttcaactggagacagagaaaccagctagaggcagagggaggtaacacggagtcccccagaaaggtctgggctgcgcgtgcttcaggtaacctcccttgaccttcaggagaacgagaaggctgcctgatcagagagtccctgaagaagattctgtggctacaggcttcagcagagtgtgagggagaccccggttatttcctcagctatttccaccaaatcctcctgtctttcgtggccaacaccccaggcaaggcttggggcccccgtctgctgctggacgcagagccatgaagaagaagttagtggtgctgggcctgctggccgtggtcctggtgctggtcattgtcggcctctgtctctggctgccctcagcctccaaggaacctgacaaccatgtgtacaccagggctgccgtggccgcggatgccaagcagtgctcgaagattgggagggatgcactgcgggacggtggctctgcggtggatgcagccattgcagccctgttgtgtgtggggctcatgaatgcccacagcatgggcatcgggggtggcctcttcctcaccatctacaacagcaccacacgaaaagctgaggtcatcaacgcccgcgaggtggcccccaggctggcctttgccaccatgttcaacagctcggagcagtcccagaagggggggctgtcggtggcggtgcctggggagatccgaggctatgagctggcacaccagcggcatgggcggctgccctgggctcgcctcttccagcccagcatccagctggcccgccagggcttccccgtgggcaagggcttggcggcagccctggaaaacaagcggaccgtcatcgagcagcagcctgtcttgtgtgaggtgttctgccgggatagaaaggtgcttcgggagggggagagactgaccctgccgcagctggctgacacctacgagacgctggccatcgagggtgcccaggccttctacaacggcagcctcacggcccagattgtgaaggacatccaggcggccgggggcattgtgacagctgaggacctgaacaactaccgtgctgagctgatcgagcacccgctgaacatcagcctgggagacgtggtgctgtacatgcccagtgcgccgctcagcgggcccgtgctggccctcatcctcaacatcctcaaagggtacaacttctcccgggagagcgtggagagccccgagcagaagggcctgacgtaccaccgcatcgtagaggctttccggtttgcctacgccaagaggaccctgcttggggaccccaagtttgtggatgtgactgaggtggtccgcaacatgacctccgagttcttcgctgcccagctccgggcccagatctctgacgacaccactcacccgatctcctactacaagcccgagttctacacgccggatgacgggggcactgctcacctgtctgtcgtcgcagaggacggcagtgctgtgtccgccaccagcaccatcaacctctactttggctccaaggtccgctccccggtcagcgggatcctgttcaataatgaaatggacgacttcagctctcccagcatcaccaacgagtttggggtacccccctcacctgccaatttcatccagccagggaagcagccgctctcgtccatgtgcccgacgatcatggtgggccaggacggccaggtccggatggtggtgggagctgctgggggcacacagatcaccacggccactgcactggccatcatctacaacctctggttcggctatgacgtgaagcgggccgtggaggagccccggctgcacaaccagcttctgcccaacgtcacgacagtggagagaaacattgaccaggcagtgactgcagccctggagacccggcaccatcacacccagatcgcgtccaccttcatcgctgtggtgcaagccatcgtccgcacggctggtggctgggcagctgcctcggactccaggaaaggcggggagcctgccggctactgagtgctccaggaggacaaggctgacaagcaatccagggacaagatactcaccaggaccaggaaggggactctgggggaccggcttcccctgtgagcagcagagcagcacaataaatgaggccactgtgccaggctccaggtggcctccctggcctgtctccccactc

SEQ ID NO: 176409 - DNA, 1033 bp, Artificial Sequence
  derived and/or modified sequence
agggagtcagactggtcatgcaaggtcctgggcctgcccttgggtcctggggagccacggaaggttgtgggtgccagagggttgcggtcagagtcacagtcaagggccttctgagacctgtgccccctccccaccctccctccccacctcctcaggccagctctggggtctcggcaggtggtccgcaacatgacctccgagttcttcgctgcccagctccgggcccagatctctgacgacaccactcacccgatctcctactacaagcccgagttctacacgccggatgacgggggcactgctcacctgtctgtcgtcgcagaggacggcagtgctgtgtccgccaccagcaccatcaacctctactttggctccaaggtccgctccccggtcagcgggatcctgttcaataatgaaatggacgacttcagctctcccagcatcaccaacgagtttggggtacccccctcacctgccaatttcatccagccagggaagcagccgctctcgtccatgtgcccgacgatcatggtgggccaggacggccaggtccggatggtggtgggagctgctgggggcacacagatcaccacggccactgcactggccatcatctacaacctctggttcggctatgacgtgaagcgggccgtggaggagccccggctgcacaaccagcttctgcccaacgtcacgacagtggagagaaacattgaccaggcagtgactgcagccctggagacccggcaccatcacacccagatcgcgtccaccttcatcgctgtggtgcaagccatcgtccgcacggctggtggctgggcagctgcctcggactccaggaaaggcggggagcctgccggctactgagtgctccaggaggacaaggctgacaagcaatccagggacaagatactcaccaggaccaggaaggggactctgggggaccggcttcccctgtgagcagcagagcagcacaataaatgaggccactgtgccaggctccaggtggcctccctggcctgtctccccactc

SEQ ID NO: 176410 - DNA, 853 bp, Artificial Sequence
  derived and/or modified sequence
gacagggagtcagactggtcatgcaaggtggtccgcaacatgacctccgagttcttcgctgcccagctccgggcccagatctctgacgacaccactcacccgatctcctactacaagcccgagttctacacgccggatgacgggggcactgctcacctgtctgtcgtcgcagaggacggcagtgctgtgtccgccaccagcaccatcaacctctactttggctccaaggtccgctccccggtcagcgggatcctgttcaataatgaaatggacgacttcagctctcccagcatcaccaacgagtttggggtacccccctcacctgccaatttcatccagccagggaagcagccgctctcgtccatgtgcccgacgatcatggtgggccaggacggccaggtccggatggtggtgggagctgctgggggcacacagatcaccacggccactgcactggccatcatctacaacctctggttcggctatgacgtgaagcgggccgtggaggagccccggctgcacaaccagcttctgcccaacgtcacgacagtggagagaaacattgaccaggcagtgactgcagccctggagacccggcaccatcacacccagatcgcgtccaccttcatcgctgtggtgcaagccatcgtccgcacggctggtggctgggcagctgcctcggactccaggaaaggcggggagcctgccggctactgagtgctccaggaggacaaggctgacaagcaatccagggacaagatactcaccaggaccaggaaggggactctgggggaccggcttcccctgtgagcagcagagcagcacaataaatgaggccactgtgccaggctcc

SEQ ID NO: 176411 - DNA, 2375 bp, Artificial Sequence
  derived and/or modified sequence
cctgcaccctgtgcagatgcctcccactgtccgccggggctgctgggcacgccctggctggtctcttggactagcgggtgcagcccagaactgtcttctgaggaagaggtgctctcctgggcccccactgtccccaggcctcagcaaggcaagtgaggtgctgccgtcatccaggctggacagttcagtgatttgcctgaggccccacagcagagttcaactggagacagagaaaccagctagaggcagagggaggtaacacggagtcccccagaaaggtctgggctgcgcgtgcttcaggtaacctcccttgaccttcaggagaacgagaaggctgcctgatcagagagtccctgaagaagattctgtggctacaggcttcagcagagtgtgagggagaccccggttatttcctcagctatttccaccaaatcctcctgtctttcgtggccaacaccccaggcaaggcttggggcccccgtctgctgctggacgagccatgaagaagaagttagtggtgctgggcctgctggccgtggtcctggtgctggtcattgtcggcctctgtctctggctgccctcagcctccaaggaacctgacaaccatgtgtacaccagggctgccgtggccgcggatgccaagcagtgctcgaagattgggagggatgcactgcgggacggtggctctgcggtggatgcagccattgcagccctgttgtgtgtggggctcatgaatgcccacagcatgggcatcgggggtggcctcttcctcaccatctacaacagcaccacacgaaaagctgaggtcatcaacgcccgcgaggtggcccccaggctggcctttgccaccatgttcaacagctcggagcagtcccagaagggggggctgtcggtggcggtgcctggggagatccgaggctatgagctggcacaccagcggcatgggcggctgccctgggctcgcctcttccagcccagcatccagctggcccgccagggcttccccgtgggcaagggcttggcggcagccctggaaaacaagcggaccgtcatcgagcagcagcctgtcttgtgtgaggtgttctgccgggatagaaaggtgcttcgggagggggagagactgaccctgccgcagctggctgacacctacgagacgctggccatcgagggtgcccaggccttctacaacggcagcctcacggcccagattgtgaaggacatccaggcggccgggggcattgtgacagctgaggacctgaacaactaccgtgctgagctgatcgagcacccgctgaacatcagcctgggagacgtggtgctgtacatgcccagtgcgccgctcagcgggcccgtgctggccctcatcctcaacatcctcaaagggtacaacttctcccgggagagcgtggagagccccgagcagaagggcctgacgtaccaccgcatcgtagaggctttccggtttgcctacgccaagaggaccctgcttggggaccccaagtttgtggatgtgactgaggtggtccgcaacatgacctccgagttcttcgctgcccagctccgggcccagatctctgacgacaccactcacccgatctcctactacaagcccgagttctacacgccggatgacgggggcactgctcacctgtctgtcgtcgcagaggacggcagtgctgtgtccgccaccagcaccatcaacctctactttggctccaaggtccgctccccggtcagcgggatcctgttcaataatgaaatggacgacttcagctctcccagcatcaccaacgagtttggggtacccccctcacctgccaatttcatccagccagggaagcagccgctctcgtccatgtgcccgacgatcatggtgggccaggacggccaggtccggatggtggtgggagctgctgggggcacacagatcaccacggccactgcactggccatcatctacaacctctggttcggctatgacgtgaagcgggccgtggaggagccccggctgcacaaccagcttctgcccaacgtcacgacagtggagagaaacattgaccaggcagtgactgcagccctggagacccggcaccatcacacccagatcgcgtccaccttcatcgctgtggtgcaagccatcgtccgcacggctggtggctgggcagctgcctcggactccaggaaaggcggggagcctgccggctactgagtgctccaggaggacaaggctgacaagcaatccagggacaagatactcaccaggaccaggaaggggactctgggggaccggcttcccctgtgagcagcagagcagcacaataaatgaggccactgtgccaggctccaggtggcctccctggcctgtctccccactc

SEQ ID NO: 176412 - DNA, 758 bp, Artificial Sequence
  derived and/or modified sequence
ggtcagagctttaagctgcagctctgatgccccagggacctctcagacccccctgcccagagcaggcagcccgcgggtgcagcccagaactgtcttctgaggaagaggtgctctcctgggcccccactgtccccaggcctcagcagcaaggcaagtgaggtgctgccgtcatccaggctggacagttcagtgatttgcctgaggccccacagcaggagaacgagaaggctgcctgatcagagagtccctgaagaagattctgtggctacaggcttcagcagagtgtgagggagaccccggttatttcctcagctatttccaccaaatcctcctgtctttcgtggccaacaccccaggcaaggcttggggcccccgtctgctgctggacgcagagccatgaagaagaagttagtggtgctgggcctgctggccgtggtcctggtgctggtcattgtcggcctctgtctctggctgccctcagcctccaaggaacctgacaaccatgtgtacaccagggctgccgtggccgcggatgccaagcagtgctcgaagattgggagggatgcactgcgggacggtggctctgcggtggatgcagccattgcagccctgttgtgtgtggggctcatgaatgcccacagcatgggcatcgggggtggcctcttcctcaccatctacaacagcaccacacgaaaagctgaggtcatcaacgcccgcgaggtggcccccaggctggcctttgccaccatgttcaacag

SEQ ID NO: 176413 - DNA, 2091 bp, Artificial Sequence
  derived and/or modified sequence
aggggagggaaggaggagctgggtcacagcagggaatcttagcttggttttggtgtgctgctggatgaccagaccgggcgtcgggtgagcccagaagtgagagcagttggctgtgccccagtgctgtgtgacccagaggcgccgctcaccctctctgagctggtggacatcataggtggggaagctcaggtcagggcactcccatgagtgtctggaggcctgagtcccattctcagctctgccatatgcttgctgcgctctagaggagttcctcttcctctccaagcctcggtttatgtacccgtgcagtgggagtgagttgcacttcggggtgaagggggcaagacttgtgtgggcgcatcctgcagaaggatcccacagcgggtgcagcccagaactgtcttctgaggaagaggtgctctcctgggcccccactgtccccaggcctcagcaaggcaagtgaggtgctgccgtcatccaggctggacagttcagtgatttgcctgaggccccacagcaggagaacgagaaggctgcctgatcagagagtccctgaagaagattctgtggctacaggcttcagcagagtgtgagggagaccccggttatttcctcagctatttccaccaaatcctcctgtctttcgtggccaacaccccaggcaaggcttggggcccccgtctgctgctggacgcagagccatgaagaagaagttagtggtgctgggcctgctggccgtggtcctggtgctggtcattgtcggcctctgtctctggctgccctcagcctccaaggaacctgacaaccatgtgtacaccagggctgccgtggccgcggatgccaagcagtgctcgaagattgggagggatgcactgcgggacggtggctctgcggtggatgcagccattgcagccctgttgtgtgtggggctcatgaatgcccacagcatgggcatcgggggtggcctcttcctcaccatctacaacagcaccacacgaaaagctgaggtcatcaacgcccgcgaggtggcccccaggctggcctttgccaccatgttcaacagctcggagcagtcccagaagggggggctgtcggtggcggtgcctggggagatccgaggctatgagctggcacaccagcggcatgggcggctgccctgggctcgcctcttccagcccagcatccagctggcccgccagggcttccccgtgggcaagggcttggcggcagccctggaaaacaagcggaccgtcatcgagcagcagcctgtcttgtgtgaggtgttctgccgggatagaaaggtgcttcgggagggggagagactgaccctgccgcagctggctgacacctacgagacgctggccatcgagggtgcccaggccttctacaacggcagcctcacggcccagattgtgaaggacatccaggcggccgggggcattgtgacagctgaggacctgaacaactaccgtgctgagctgatcgagcacccgctgaacatcagcctgggagacgtggtgctgtacatgcccagtgcgccgctcagcgggcccgtgctggccctcatcctcaacatcctcaaagggtacaacttctcccgggagagcgtggagagccccgagcagaagggcctgacgtaccaccgcatcgtagaggctttccggtttgcctacgccaagaggaccctgcttggggaccccaagtttgtggatgtgactgaggtggtccgcaacatgacctccgagttcttcgctgcccagctccgggcccagatctctgacgacaccactcacccgatctcctactacaagcccgagttctacacgccggatgacgggggcactgctcacctgtctgtcgtcgcagaggacggcagtgctgtgtccgccaccagcaccatcaacctctactttggctccaaggtccgctccccggtcagcgggatcctgttcaataatgaaatggacgacttcagctctcccagcatcaccaacgagtttggggtacccccctcacctgccaatttcatccagccagggaagcagccgctctcgtccatgtgcccgacgatcatggtgggccaggacggcc

SEQ ID NO: 176414 - DNA, 831 bp, Artificial Sequence
  derived and/or modified sequence
ccagaccgggcgtcgggtgagcccagaagtgagagcagttggctgtgccccagtgctgtgtgacccagaggcgccgctcaccctctctgagctggtggacatcataggtggggaagctcaggtcagggcactcccatgagtgtctggaggcctgagtcccattctcagctctgccatatgcttgctgcgctctagaggagttcctcttcctctccaagcctcggtttatgtacccgtgcagtgggagtgagttgcacttcggggtgaagggggcaagacttgtgtgggcgcatcctgcagaaggatcccacagcaaggcaagtgaggtgctgccgtcatccaggctggacagttcagtgatttgcctgaggccccacagcagagttcaactggagacagagaaaccagctagaggcagagggaggtaacacggagtcccccagaaaggtctgggctgcgcgtgcttcaggcttcagcagagtgtgagggagaccccggttatttcctcagctatttccaccaaatcctcctgtctttcgtggccaacaccccaggcaaggcttggggcccccgtctgctgctggacgagccatgaagaagaagttagtggtgctgggcctgctggccgtggtcctggtgctggtcattgtcggcctctgtctctggctgccctcagcctccaaggaacctgacaaccatgtgtacaccagggctgccgtggccgcggatgccaagcagtgctcgaagattgggagggatgcactgcgggacggtggctctgcggtggatgcagccattgcagccctgttgtgtgtggggctcatgaatgcc

SEQ ID NO: 176415 - DNA, 1078 bp, Artificial Sequence
  derived and/or modified sequence
ggtgtgctgctggatgaccagaccgggcgtcgggtgagcccagaagtgagagcagttggctgtgccccagtgctgtgtgacccagaggcgccgctcaccctctctgagctggtggacatcatagcgggtgcagcccagaactgtcttctgaggaagaggtgctctcctgggcccccactgtccccaggcctcagcagcaaggcaagtgaggtgctgccgtcatccaggctggacagttcagtgatttgcctgaggccccacagcagagttcaactggagacagagaaaccagctagaggcagagggaggtaacacggagtcccccagaaaggtctgggctgcgcgtgcttcaggtaacctcccttgaccttcaggagaacgagaaggctgcctgatcagagagtccctgaagaagattctgtggctacaggcttcagcagagtgtgagggagaccccggttatttcctcagctatttccaccaaatcctcctgtctttcgtggccaacaccccaggcaaggcttggggcccccgtctgctgctggacgcagagccatgaagaagaagttagtggtgctgggcctgctggccgtggtcctggtgctggtcattgtcggcctctgtctctggctgccctcagcctccaaggaacctgacaaccatgtgtacaccagggctgccgtggccgcggatgccaagcagtgctcgaagattgggagggatgcactgcgggacggtggctctgcggtggatgcagccattgcagccctgttgtgtgtggggctcatgaatgcccacagcatgggcatcgggggtggcctcttcctcaccatctacaacagcaccacacgaaaagctgaggtcatcaacgcccgcgaggtggcccccaggctggcctttgccaccatgttcaacagctcggagcagtcccagaagggggggctgtcggtggcggtgcctggggagatccgaggctatgagctggcacaccagcggcatgggcggctgccctgggctcgcctcttccagcccagcatccagctggcccgccagggcttccccgtgggcaagggcttgg

SEQ ID NO: 176416 - DNA, 874 bp, Artificial Sequence
  derived and/or modified sequence
accctgtgcagatgcctcccactgtccgccggggctgctgggcacgccctggctggtctcttggactagcgggtgcagcccagaactgtcttctgaggaagaggtgctctcctgggcccccactgtccccaggcctcagcaaggcaagtgaggtgctgccgtcatccaggctggacagttcagtgatttgcctgaggccccacagcagagttcaactggagacagagaaaccagctagaggcagagggaggtaacacggagtcccccagaaaggtctgggctgcgcgtgcttcaggtaacctcccttgaccttcaggagaacgagaaggctgcctgatcagagagtccctgaagaagattctgtggctacaggcttcagcagagtgtgagggagaccccggttatttcctcagctatttccaccaaatcctcctgtctttcgtggccaacaccccaggcaaggcttggggcccccgtctgctgctggacgagccatgaagaagaagttagtggtgctgggcctgctggccgtggtcctggtgctggtcattgtcggcctctgtctctggctgccctcagcctccaaggaacctgacaaccatgtgtacaccagggctgccgtggccgcggatgccaagcagtgctcgaagattgggagggatgcactgcgggacggtggctctgcggtggatgcagccattgcagccctgttgtgtgtggggctcatgaatgcccacagcatgggcatcgggggtggcctcttcctcaccatctacaacagcaccacacgaaaagctgaggtcatcaacgcccgcgaggtggcccccaggctggcctttgccaccatgttcaacagctcggagcagtcccagaa

SEQ ID NO: 176417 - DNA, 929 bp, Artificial Sequence
  derived and/or modified sequence
gcccagaagtgagagcagttggctgtgccccagtgctgtgtgacccagaggcgccgctcaccctctctgagctggtggacatcataggtggggaagctcaggtcagggcactcccatgagtgtctggaggcctgagtcccattctcagctctgccatatgcttgctgcgctctagaggagttcctcttcctctccaagcctcggtttatgtacccgtgcagtgggagtgagttgcacttcggggtgaagggggcaagacttgtgtgggcgcatcctgcagaaggatcccacagcgggtgcagcccagaactgtcttctgaggaagaggtgctctcctgggcccccactgtccccaggcctcagcaaggcaagtgaggtgctgccgtcatccaggctggacagttcagtgatttgcctgaggccccacagcagagttcaactggagacagagaaaccagctagaggcagagggaggtaacacggagtcccccagaaaggtctgggctgcgcgtgcttcagctatttccaccaaatcctcctgtctttcgtggccaacaccccaggcaaggcttggggcccccgtctgctgctggacgcagagccatgaagaagaagttagtggtgctgggcctgctggccgtggtcctggtgctggtcattgtcggcctctgtctctggctgccctcagcctccaaggaacctgacaaccatgtgtacaccagggctgccgtggccgcggatgccaagcagtgctcgaagattgggagggatgcactgcgggacggtggctctgcggtggatgcagccattgcagccctgttgtgtgtggggctcatgaatgcccacagcatgggcatcgggggtggcctcttcctcaccatctacaacagcaccacacgaaaagctgaggtcatcaacgcccgcgaggt

SEQ ID NO: 176418 - DNA, 747 bp, Artificial Sequence
  derived and/or modified sequence
tccgtgagaggcctgcctgtcctgcaccctgtgcagatgcctcccactgtccgccggggctgctgggcacgccctggctggtctcttggactagcgggtgcagcccagaactgtcttctgaggaagaggtgctctcctgggcccccactgtccccaggcctcagcaaggcaagtgaggtgctgccgtcatccaggctggacagttcagtgatttgcctgaggccccacagcaggagaacgagaaggctgcctgatcagagagtccctgaagaagattctgtggctacaggcttcagcagagtgtgagggagaccccggttatttcctcagctatttccaccaaatcctcctgtctttcgtggccaacaccccaggcaaggcttggggcccccgtctgctgctggacgcagagccatgaagaagaagttagtggtgctgggcctgctggccgtggtcctggtgctggtcattgtcggcctctgtctctggctgccctcagcctccaaggaacctgacaaccatgtgtacaccagggctgccgtggccgcggatgccaagcagtgctcgaagattgggagggatgcactgcgggacggtggctctgcggtggatgcagccattgcagccctgttgtgtgtggggctcatgaatgcccacagcatgggcatcgggggtggcctcttcctcaccatctacaacagcaccacacgaaaagctgaggtcatcaacgcccgcgaggtggccccc

SEQ ID NO: 176419 - DNA, 606 bp, Artificial Sequence
  derived and/or modified sequence
cttagcttggttttggtgtgctgctggatgaccagaccgggcgtcgggtgagcccagaagtgagagcagttggctgtgccccagtgctgtgtgacccagaggcgccgctcaccctctctgagctggtggacatcataggtggggaagctcagcgggtgcagcccagaactgtcttctgaggaagaggtgctctcctgggcccccactgtccccaggcctcaggagaacgagaaggctgcctgatcagagagtccctgaagaagattctgtggctacaggcttcagcagagtgtgagggagaccccggttatttcctcagctatttccaccaaatcctcctgtctttcgtggccaacaccccaggcaaggcttggggcccccgtctgctgctggacgcagagccatgaagaagaagttagtggtgctgggcctgctggccgtggtcctggtgctggtcattgtcggcctctgtctctggctgccctcagcctccaaggaacctgacaaccatgtgtacaccagggctgccgtggccgcggatgccaagcagtgctcgaagattgggagggatgcactgcgggacggtggctctgcggtggatgcagc

SEQ ID NO: 176420 - DNA, 743 bp, Artificial Sequence
  derived and/or modified sequence
tcccagccaggctggacctccgtgagaggcctgcctgtcctgcaccctgtgcagatgcctcccactgtccgccggggctgctgggcacgccctggctggtctcttggactagcgggtgcagcccagaactgtcttctgaggaagaggtgctctcctgggcccccactgtccccaggcctcaggagaacgagaaggctgcctgatcagagagtccctgaagaagattctgtggctacaggcttcagcagagtgtgagggagaccccggttatttcctcagctatttccaccaaatcctcctgtctttcgtggccaacaccccaggcaaggcttggggcccccgtctgctgctggacgcagagccatgaagaagaagttagtggtgctgggcctgctggccgtggtcctggtgctggtcattgtcggcctctgtctctggctgccctcagcctccaaggaacctgacaaccatgtgtacaccagggctgccgtggccgcggatgccaagcagtgctcgaagattgggagggatgcactgcgggacggtggctctgcggtggatgcagccattgcagccctgttgtgtgtggggctcatgaatgcccacagcatgggcatcgggggtggcctcttcctcaccatctacaacagcaccacacgaaaagctgaggtcatcaacgcccgcgaggtggcccccaggctggcctttgccaccatgttcaacagctcggagcagtcccagaa

SEQ ID NO: 176421 - DNA, 853 bp, Artificial Sequence
  derived and/or modified sequence
cctgcaccctgtgcagatgcctcccactgtccgccggggctgctgggcacgccctggctggtctcttggactagcgggtgcagcccagaactgtcttctgaggaagaggtgctctcctgggcccccactgtccccaggcctcagcagcaaggcaagtgaggtgctgccgtcatccaggctggacagttcagtgatttgcctgaggccccacagcagagttcaactggagacagagaaaccagctagaggcagagggaggtaacacggagtcccccagaaaggtctgggctgcgcgtgcttcaggtaacctcccttgaccttcaggagaacgagaaggctgcctgatcagagagtccctgaagaagattctgtggctacaggcttcagcagagtgtgagggagaccccggttatttcctcagctatttccaccaaatcctcctgtctttcgtggccaacaccccaggcaaggcttggggcccccgtctgctgctggacgcagagccatgaagaagaagttagtggtgctgggcctgctggccgtggtcctggtgctggtcattgtcggcctctgtctctggctgccctcagcctccaaggaacctgacaaccatgtgtacaccagggctgccgtggccgcggatgccaagcagtgctcgaagattgggagggatgcactgcgggacggtggctctgcggtggatgcagccattgcagccctgttgtgtgtggggctcatgaatgcccacagcatgggcatcgggggtggcctcttcctcaccatctacaacagcaccacacgaaaagctgaggtcatcaacgcccgcgaggtggcccccaggctggcctttgcc

SEQ ID NO: 176422 - DNA, 811 bp, Artificial Sequence
  derived and/or modified sequence
gaccagaccgggcgtcgggtgagcccagaagtgagagcagttggctgtgccccagtgctgtgtgacccagaggcgccgctcaccctctctgagctggtggacatcatagcgggtgcagcccagaactgtcttctgaggaagaggtgctctcctgggcccccactgtccccaggcctcagcaaggcaagtgaggtgctgccgtcatccaggctggacagttcagtgatttgcctgaggccccacagcaggagaacgagaaggctgcctgatcagagagtccctgaagaagattctgtggctacaggcttcagcagagtgtgagggagaccccggttatttcctcagctatttccaccaaatcctcctgtctttcgtggccaacaccccaggcaaggcttggggcccccgtctgctgctggacgcagagccatgaagaagaagttagtggtgctgggcctgctggccgtggtcctggtgctggtcattgtcggcctctgtctctggctgccctcagcctccaaggaacctgacaaccatgtgtacaccagggctgccgtggccgcggatgccaagcagtgctcgaagattgggagggatgcactgcgggacggtggctctgcggtggatgcagccattgcagccctgttgtgtgtggggctcatgaatgcccacagcatgggcatcgggggtggcctcttcctcaccatctacaacagcaccacacgaaaagctgaggtcatcaacgcccgcgaggtggcccccaggctggcctttgccaccatgttcaacagctcggagcagtcccagaagg

SEQ ID NO: 176423 - DNA, 579 bp, Artificial Sequence
  derived and/or modified sequence
agaccgggcgtcgggtgagcccagaagtgagagcagttggctgtgccccagtgctgtgtgacccagaggcgccgctcaccctctctgagctggtggacatcataggagaacgagaaggctgcctgatcagagagtccctgaagaagattctgtggctacaggcttcagcagagtgtgagggagaccccggttatttcctcagctatttccaccaaatcctcctgtctttcgtggccaacaccccaggcaaggcttggggcccccgtctgctgctggacgcagagccatgaagaagaagttagtggtgctgggcctgctggccgtggtcctggtgctggtcattgtcggcctctgtctctggctgccctcagcctccaaggaacctgacaaccatgtgtacaccagggctgccgtggccgcggatgccaagcagtgctcgaagattgggagggatgcactgcgggacggtggctctgcggtggatgcagccattgcagccctgttgtgtgtggggctcatgaatgcccacagcatgggcatcgggggtggcctcttcctcaccatctacaacagcaccac

SEQ ID NO: 176424 - DNA, 1710 bp, Artificial Sequence
  derived and/or modified sequence
atgaagaagaagctggtggtgctgggcctgctggccgtggtgctggtgctggtgattgtgggcctgtgcctgtggctgcccagcgccagcaaggagccagacaaccacgtgtacaccagggctgctgtggccgcagatgccaagcagtgcagcaagattggaagagatgccctgagagatggcggcagcgctgtggatgctgccatcgccgccctgctgtgtgtgggcctgatgaatgcccacagcatgggcattggaggcggcctcttcctgaccatctacaacagcaccaccaggaaggccgaggtgatcaatgcccgggaggtggccccccggctggcctttgccaccatgttcaacagcagcgagcagagccagaagggcggcctgtctgtggccgtgcctggagagatccggggctatgagctggcccaccagagacatggccgcctgccctgggcccggctcttccagcccagcatccagctggcccggcagggcttccctgtgggcaagggcctggccgccgccctggagaacaagaggacagtgattgagcagcagcctgtgctgtgtgaggtgttctgccgggacaggaaggtgctgcgggagggggagcggctgaccctgccccagctggccgacacctatgagaccctggccatcgagggcgcccaggccttctacaacggcagcctgacagcccagatcgtgaaggacatccaggccgccggcggcatcgtgacagctgaggacctgaacaactacagagctgagctgattgagcaccccctgaacatcagcctgggagatgtggtgctgtacatgcccagcgcccccctgagcggccctgtgctggccctgatcctgaacatcctgaagggctacaacttcagccgggagagcgtggagagccctgagcagaagggcctgacctaccaccgcatcgtggaggccttccgctttgcctatgccaagaggaccctgctgggggaccccaagtttgtggatgtgacagaggtggtgaggaacatgaccagcgagttctttgctgcccagctgcgggcccagatcagtgatgacaccacccaccccatctcctactacaagccagagttctacaccccagatgatggcggcacagcccacctgtctgtggtggctgaagatggcagcgctgtgtctgccaccagcaccatcaacctgtacttcggcagcaaggtgcgcagccctgtgtctggcatcctcttcaacaatgagatggatgacttcagcagccccagcatcaccaatgaatttggagtgccccccagccctgccaacttcatccagcccgggaagcagcccctgagctccatgtgccccaccatcatggtgggccaggacggccaggtgaggatggtggtgggcgccgccggcggcacccagatcaccacagccacagccctggccatcatctacaacctgtggtttggctatgatgtgaagagagctgtggaggagccccggctgcacaaccagctgctgcccaacgtgaccaccgtggagagaaatattgaccaggccgtgacagctgccctggagaccaggcaccaccacacccagatcgccagcaccttcatcgctgtggtgcaggccatcgtgaggacagctgggggctgggccgccgccagtgacagcaggaagggcggggagcctgctggctactag

SEQ ID NO: 176425 - DNA, 678 bp, Artificial Sequence
  derived and/or modified sequence
atgaccagcgagttctttgctgcccagctgcgggcccagatcagtgatgacaccacccaccccatctcctactacaagccagagttctacaccccagatgatggcggcacagcccacctgtctgtggtggctgaagatggcagcgctgtgtctgccaccagcaccatcaacctgtacttcggcagcaaggtgcgcagccctgtgtctggcatcctcttcaacaatgagatggatgacttcagcagccccagcatcaccaatgaatttggagtgccccccagccctgccaacttcatccagcccgggaagcagcccctgagctccatgtgccccaccatcatggtgggccaggacggccaggtgaggatggtggtgggcgccgccggcggcacccagatcaccacagccacagccctggccatcatctacaacctgtggtttggctatgatgtgaagagagctgtggaggagccccggctgcacaaccagctgctgcccaacgtgaccaccgtggagagaaatattgaccaggccgtgacagctgccctggagaccaggcaccaccacacccagatcgccagcaccttcatcgctgtggtgcaggccatcgtgaggacagctgggggctgggccgccgccagtgacagcaggaagggcggggagcctgctggctactag

SEQ ID NO: 176426 - DNA, 363 bp, Artificial Sequence
  derived and/or modified sequence
atgaagaagaagctggtggtgctgggcctgctggccgtggtgctggtgctggtgattgtgggcctgtgcctgtggctgcccagcgccagcaaggagccagacaaccacgtgtacaccagggctgctgtggccgcagatgccaagcagtgcagcaagattggaagagatgccctgagagatggcggcagcgctgtggatgctgccatcgccgccctgctgtgtgtgggcctgatgaatgcccacagcatgggcattggaggcggcctcttcctgaccatctacaacagcaccaccaggaaggccgaggtgatcaatgcccgggaggtggccccccggctggcctttgccaccatgttcaactag

SEQ ID NO: 176427 - DNA, 1392 bp, Artificial Sequence
  derived and/or modified sequence
atgaagaagaagctggtggtgctgggcctgctggccgtggtgctggtgctggtgattgtgggcctgtgcctgtggctgcccagcgccagcaaggagccagacaaccacgtgtacaccagggctgctgtggccgcagatgccaagcagtgcagcaagattggaagagatgccctgagagatggcggcagcgctgtggatgctgccatcgccgccctgctgtgtgtgggcctgatgaatgcccacagcatgggcattggaggcggcctcttcctgaccatctacaacagcaccaccaggaaggccgaggtgatcaatgcccgggaggtggccccccggctggcctttgccaccatgttcaacagcagcgagcagagccagaagggcggcctgtctgtggccgtgcctggagagatccggggctatgagctggcccaccagagacatggccgcctgccctgggcccggctcttccagcccagcatccagctggcccggcagggcttccctgtgggcaagggcctggccgccgccctggagaacaagaggacagtgattgagcagcagcctgtgctgtgtgaggtgttctgccgggacaggaaggtgctgcgggagggggagcggctgaccctgccccagctggccgacacctatgagaccctggccatcgagggcgcccaggccttctacaacggcagcctgacagcccagatcgtgaaggacatccaggccgccggcggcatcgtgacagctgaggacctgaacaactacagagctgagctgattgagcaccccctgaacatcagcctgggagatgtggtgctgtacatgcccagcgcccccctgagcggccctgtgctggccctgatcctgaacatcctgaagggctacaacttcagccgggagagcgtggagagccctgagcagaagggcctgacctaccaccgcatcgtggaggccttccgctttgcctatgccaagaggaccctgctgggggaccccaagtttgtggatgtgacagaggtggtgaggaacatgaccagcgagttctttgctgcccagctgcgggcccagatcagtgatgacaccacccaccccatctcctactacaagccagagttctacaccccagatgatggcggcacagcccacctgtctgtggtggctgaagatggcagcgctgtgtctgccaccagcaccatcaacctgtacttcggcagcaaggtgcgcagccctgtgtctggcatcctcttcaacaatgagatggatgacttcagcagccccagcatcaccaatgaatttggagtgccccccagccctgccaacttcatccagcccgggaagcagcccctgagctccatgtgccccaccatcatggtgggccaggacggctag

SEQ ID NO: 176428 - DNA, 243 bp, Artificial Sequence
  derived and/or modified sequence
atgaagaagaagctggtggtgctgggcctgctggccgtggtgctggtgctggtgattgtgggcctgtgcctgtggctgcccagcgccagcaaggagccagacaaccacgtgtacaccagggctgctgtggccgcagatgccaagcagtgcagcaagattggaagagatgccctgagagatggcggcagcgctgtggatgctgccatcgccgccctgctgtgtgtgggcctgatgaatgcctag

SEQ ID NO: 176429 - DNA, 525 bp, Artificial Sequence
  derived and/or modified sequence
atgaagaagaagctggtggtgctgggcctgctggccgtggtgctggtgctggtgattgtgggcctgtgcctgtggctgcccagcgccagcaaggagccagacaaccacgtgtacaccagggctgctgtggccgcagatgccaagcagtgcagcaagattggaagagatgccctgagagatggcggcagcgctgtggatgctgccatcgccgccctgctgtgtgtgggcctgatgaatgcccacagcatgggcattggaggcggcctcttcctgaccatctacaacagcaccaccaggaaggccgaggtgatcaatgcccgggaggtggccccccggctggcctttgccaccatgttcaacagcagcgagcagagccagaagggcggcctgtctgtggccgtgcctggagagatccggggctatgagctggcccaccagagacatggccgcctgccctgggcccggctcttccagcccagcatccagctggcccggcagggcttccctgtgggcaagggcctgtag

SEQ ID NO: 176430 - DNA, 381 bp, Artificial Sequence
  derived and/or modified sequence
atgaagaagaagctggtggtgctgggcctgctggccgtggtgctggtgctggtgattgtgggcctgtgcctgtggctgcccagcgccagcaaggagccagacaaccacgtgtacaccagggctgctgtggccgcagatgccaagcagtgcagcaagattggaagagatgccctgagagatggcggcagcgctgtggatgctgccatcgccgccctgctgtgtgtgggcctgatgaatgcccacagcatgggcattggaggcggcctcttcctgaccatctacaacagcaccaccaggaaggccgaggtgatcaatgcccgggaggtggccccccggctggcctttgccaccatgttcaacagcagcgagcagagccagtag

SEQ ID NO: 176431 - DNA, 330 bp, Artificial Sequence
  derived and/or modified sequence
atgaagaagaagctggtggtgctgggcctgctggccgtggtgctggtgctggtgattgtgggcctgtgcctgtggctgcccagcgccagcaaggagccagacaaccacgtgtacaccagggctgctgtggccgcagatgccaagcagtgcagcaagattggaagagatgccctgagagatggcggcagcgctgtggatgctgccatcgccgccctgctgtgtgtgggcctgatgaatgcccacagcatgggcattggaggcggcctcttcctgaccatctacaacagcaccaccaggaaggccgaggtgatcaatgcccgggaggtgtag

SEQ ID NO: 176432 - DNA, 336 bp, Artificial Sequence
  derived and/or modified sequence
atgaagaagaagctggtggtgctgggcctgctggccgtggtgctggtgctggtgattgtgggcctgtgcctgtggctgcccagcgccagcaaggagccagacaaccacgtgtacaccagggctgctgtggccgcagatgccaagcagtgcagcaagattggaagagatgccctgagagatggcggcagcgctgtggatgctgccatcgccgccctgctgtgtgtgggcctgatgaatgcccacagcatgggcattggaggcggcctcttcctgaccatctacaacagcaccaccaggaaggccgaggtgatcaatgcccgggaggtggccccctag

SEQ ID NO: 176433 - DNA, 207 bp, Artificial Sequence
  derived and/or modified sequence
atgaagaagaagctggtggtgctgggcctgctggccgtggtgctggtgctggtgattgtgggcctgtgcctgtggctgcccagcgccagcaaggagccagacaaccacgtgtacaccagggctgctgtggccgcagatgccaagcagtgcagcaagattggaagagatgccctgagagatggcggcagcgctgtggatgctgcctag

SEQ ID NO: 176434 - DNA, 351 bp, Artificial Sequence
  derived and/or modified sequence
atgaagaagaagctggtggtgctgggcctgctggccgtggtgctggtgctggtgattgtgggcctgtgcctgtggctgcccagcgccagcaaggagccagacaaccacgtgtacaccagggctgctgtggccgcagatgccaagcagtgcagcaagattggaagagatgccctgagagatggcggcagcgctgtggatgctgccatcgccgccctgctgtgtgtgggcctgatgaatgcccacagcatgggcattggaggcggcctcttcctgaccatctacaacagcaccaccaggaaggccgaggtgatcaatgcccgggaggtggccccccggctggcctttgcctag

SEQ ID NO: 176435 - DNA, 384 bp, Artificial Sequence
  derived and/or modified sequence
atgaagaagaagctggtggtgctgggcctgctggccgtggtgctggtgctggtgattgtgggcctgtgcctgtggctgcccagcgccagcaaggagccagacaaccacgtgtacaccagggctgctgtggccgcagatgccaagcagtgcagcaagattggaagagatgccctgagagatggcggcagcgctgtggatgctgccatcgccgccctgctgtgtgtgggcctgatgaatgcccacagcatgggcattggaggcggcctcttcctgaccatctacaacagcaccaccaggaaggccgaggtgatcaatgcccgggaggtggccccccggctggcctttgccaccatgttcaacagcagcgagcagagccagaagtag

SEQ ID NO: 176436 - DNA, 297 bp, Artificial Sequence
  derived and/or modified sequence
atgaagaagaagctggtggtgctgggcctgctggccgtggtgctggtgctggtgattgtgggcctgtgcctgtggctgcccagcgccagcaaggagccagacaaccacgtgtacaccagggctgctgtggccgcagatgccaagcagtgcagcaagattggaagagatgccctgagagatggcggcagcgctgtggatgctgccatcgccgccctgctgtgtgtgggcctgatgaatgcccacagcatgggcattggaggcggcctcttcctgaccatctacaacagcaccacctag

SEQ ID NO: 176437 - DNA, 1710 bp, Artificial Sequence
  derived and/or modified sequence
atgaagaagaagctggtggtgctgggcctgctggccgtggtgctggtactggtaattgttggactctgtctgtggttaccctcagcgagcaaggagccagacaatcacgtatacactcgagccgccgtcgccgctgatgccaaacaatgcagcaagatcgggagggacgccctccgagacggggggagcgctgtggacgccgccattgccgcattgctctgcgttggcctaatgaacgctcactctatgggcattggcggtggactgttcctgacgatctacaactcgactacacgcaaggccgaggtcatcaacgctagagaagttgcgcctcggctcgctttcgcaaccatgtttaactcctctgagcaatcccaaaagggtggcctgtcagtcgccgtcccaggggaaataaggggctacgagttggcccatcagagacacggccgcctgccttgggccagactgttccagcccagtatccaattagccagacaaggatttccagttggaaagggtcttgctgccgcattagaaaataaaaggaccgtgattgagcaacagcccgtcctgtgcgaggtcttttgcagggataggaaggtgctgagggagggagaacgcctgaccctcccacagctggccgacacgtacgaaactctagccatagagggcgctcaggctttttacaacggctcacttactgcacagatcgtgaaggatatacaggcagccggaggaattgtcactgcggaggacttgaataactatcgtgctgaactcatcgagcatccattgaatatctcacttggggacgtagtgttatatatgccctcggctccattaagcgggcctgtgcttgcgcttatcttgaacattctgaaggggtataacttttccagggagagtgtcgagagtcccgagcaaaagggactgacctatcacagaattgttgaagcttttcgcttcgcctatgctaaaaggacactgctgggagatcctaagtttgtcgacgtgaccgaggtcgtgcgtaatatgacttccgagttcttcgcagcccagctccgggcacaaatcagcgatgataccacacacccaattagctattacaagccagagttctatacccctgacgacggcggcacagcccacttaagtgtcgttgcagaggatggaagcgctgtatccgctaccagtacaataaacctttactttgggtcaaaggttagatctcctgtgagtggaatacttttcaataatgaaatggacgactttagctccccctccataacgaatgagttcggtgtccctccatcacctgcgaacttcatccaacctggcaagcagcccctctcaagtatgtgccccaccatcatggtggggcaggacggtcaggtccggatggttgtgggggcagctggtggaacccagatcactaccgcaacagcacttgccatcatctataacctttggttcggctatgatgtcaagagggcggtggaggaacctcgcctacataaccagcttctgccaaacgtaaccactgtcgaacggaatatcgatcaggccgtaacagctgcactggagacacgccaccaccatacccagattgcttctacctttattgcggtggtacaggccatagttcgcaccgctggtgggtgggctgcggcgtctgacagcaggaagggaggtgagcctgctggttattag

SEQ ID NO: 176438 - DNA, 1710 bp, Artificial Sequence
  derived and/or modified sequence
atgaagaagaagctggtggtgctgggcctgctggccgtggtgctggtacttgttatcgtaggattatgcctatggctgccatcagcgagcaaggaacccgacaatcacgtctacactcgagccgcagtggcagctgacgctaagcagtgctccaagatcggcagggacgccctgcgagacggcggatcagccgttgacgccgcaattgcagccctgctgtgcgtaggcctgatgaacgctcacagtatgggcatcggaggtggcctcttcctgacgatttataactctaccacaaggaaggcagaagtgatcaacgcccgcgaagtagccccccggctcgcatttgctacaatgttcaacagttctgagcagtcccagaaggggggcctctccgtagctgtgccaggggaaatcagggggtatgagttggcacaccagaggcatgggcggctcccttgggccagactgttccaaccatcaattcagctagccagacaaggatttccagtcggaaaggggctggctgcagctctcgaaaacaaaagaacagtgattgaacagcaacccgtgttgtgcgaagtgttttgtcgagataggaaagtgttgcgggagggtgagcgcctcacactccctcagctggcagatacctacgaaaccttggcgattgaaggtgcccaggctttctacaacggatccttgactgcccagatcgtgaaagatatccaggctgctgggggaatagtgacggctgaggacctgaataattaccgagcagagttgatcgagcacccactcaacatatcacttggcgatgtggtgttgtatatgccatctgcccctctgagcggacccgtgcttgctctgattctgaatattctgaaaggttacaactttagtcgcgaaagcgtagagtcccctgagcagaagggattaacctaccacagaatcgtggaagcttttcgctttgcatatgcaaaaaggaccttgctgggagatcccaaatttgtagatgttactgaggtcgtaaggaatatgactagcgaattttttgctgctcagctacgggcacaaatcagcgacgacactactcatccaattagttactacaaaccggagttttacaccccagacgatggcgggaccgctcacctcagcgtggtcgcggaggatgggtccgccgttagtgctacaagtacaatcaacctgtattttggtagtaaggtccgctcccccgtatctgggatactgtttaataacgagatggacgacttctcatctccgtctatcacaaatgaattcggtgttcctccctcccctgccaactttattcagcccggaaaacaacccttgagtagcatgtgtcctacaatcatggtgggccaagatgggcaggtgcgcatggtggtcggtgccgccggcggaacccagattacaactgccactgccctcgcgatcatctacaatctatggttcggctatgacgtcaaacgagccgtagaagagccacgactacacaatcagctgctgccaaatgtgactaccgtggagagaaacattgaccaagccgtgacagccgctctggaaacccgccaccaccatactcaaatagcaagtacttttattgctgtggtccaggcaattgtgagaactgcaggtggatgggcagccgcaagcgactcaagaaaggggggggagcctgccgggtattag

SEQ ID NO: 176439 - DNA, 1710 bp, Artificial Sequence
  derived and/or modified sequence
atgaagaagaagctggtggtgctgggcctgctggccgtggtgctggtgctcgttattgtgggtctgtgtctgtggctcccgagtgcaagcaaggagcccgacaatcacgtgtatacacgtgccgctgtggctgccgatgctaaacagtgctcaaagatcggcagagatgccttgcgcgacggtggtagtgccgttgacgctgctatcgcagcattgctgtgcgttggtctcatgaacgcacattcgatgggcattggaggcggactgttcttgaccatatacaactcaactaccagaaaggcagaagtcataaacgcccgagaagtggccccacgcctagcctttgctaccatgttcaactcatcagagcagagccagaagggcggcctgtctgtggctgtgccaggagagatacggggctatgagctggctcatcagcgacatgggcggctgccctgggcgagactgttccagccaagtatacagctggcacgccagggttttcctgttggaaaagggctcgctgccgccttggagaataagcggacagtgatcgaacagcaacccgttctctgtgaggtcttctgcagggacagaaaggtgttgagggagggtgaaaggctcacgctccctcagctcgctgacacctacgagacactcgcaatcgagggcgctcaggcattctacaacggctccctcactgcacagattgtcaaggacatacaggccgccggcggtatcgttacggctgaggacctgaacaattaccgcgccgagctcattgaacatccacttaacatttcgttgggcgacgttgtgctgtatatgccatccgctccccttagtggacccgtgctggcactcattctaaatatcctcaaaggctacaacttttcccgggagtctgtggaaagcccagagcaaaagggactgacctaccatagaatcgtggaggccttccgattcgcttatgctaagaggactctcctgggagatccaaaatttgtcgatgtgacagaggtcgtgcgcaacatgacctctgagttctttgccgcccagttgagagcccagatctccgatgacaccacccatccgatttcctactacaaacccgagttttacacacctgatgacggcgggactgcccacttaagtgtcgtcgcagaagatggatctgccgtgtccgctacatctaccatcaacttgtactttgggagcaaggtgcgcagcccggtgtcggggatcctgttcaacaatgaaatggatgatttctcaagcccttccattactaatgagttcggcgtacccccgtcccctgccaacttcatccagcctgggaaacaaccgctttcttcgatgtgccccactataatggtgggccaagacgggcaggttcggatggtggttggagcagcaggcgggacgcaaatcacaactgcaacggctttggctattatctacaacctgtggttcggatatgacgtgaaacgcgcagtcgaagaacctaggctccacaaccagcttcttccaaatgtgacaactgtagagagaaatatcgaccaggcggtgacagccgcactcgagactaggcaccaccatacacagatcgccagcactttcattgctgtggtgcaagccatagtgcgcaccgccggtggatgggccgccgcaagtgactcccggaagggtggcgaaccagccggttattag

SEQ ID NO: 176440 - DNA, 1710 bp, Artificial Sequence
  derived and/or modified sequence
atgaagaagaagctggtggtgctgggcctgctggccgtggtgctggtactcgtaatcgttggtctttgcctttggctgccctcagcatcgaaggaacctgataaccacgtttacacccgagccgccgttgcagccgacgcaaagcaatgtagtaagattggacgggatgcattgcgagatggaggatccgcagtcgatgctgccattgcggccctcctgtgcgtcggcctcatgaacgcccacagtatggggatcggcggcgggctcttccttacgatctacaattcaactacccgcaaagccgaagtgatcaatgcgcgcgaggtggctccccggttagcctttgcaaccatgttcaactctagtgaacagtctcagaaagggggtctgtcagtggccgttccaggcgagatcaggggctatgaattggcccaccaacgacacgggagactgccctgggccaggctgtttcagccctccatccagctggcaagacaaggctttcccgtaggtaaagggctggctgcggccctcgaaaacaagcggacggtaatagaacaacagcctgttctgtgcgaagtattctgccgagataggaaggtgctccgagaaggcgaacggttgacactgccgcaattggccgacacttacgaaactctagccattgaaggggcccaggcattctataacggtagcctcacagcacaaatcgtgaaggacattcaggctgctggggggatagtgacggcagaggacctgaacaactaccgagcagaactgatcgagcatcctttaaatatcagtctgggcgacgtggtgctatacatgccttctgctccattgtccggccccgtcctggccctgatccttaacatcctaaaagggtataacttcagcagagagtcagtggaatcacccgagcagaagggactgacttatcatcgaatcgtcgaggccttccggtttgcttatgccaagcggaccctcctcggcgatccaaaattcgtagacgtgacagaagtcgtccgcaacatgacctctgagttttttgctgctcagcttcgcgcccaaatctcagacgatactacgcatccaatctcatactataagcccgaattttatacccctgatgatggtggtaccgcacatctgtctgttgtcgctgaggatggatcggctgtatctgcgacctcaaccatcaatctctactttggttcaaaagtgcgatcgcccgtgtccggtatcctgtttaataatgaaatggacgacttctccagcccaagcattacgaacgaatttggcgtcccacccagcccagctaactttatccagccaggaaaacaacctctgtccagtatgtgccctaccattatggtcggacaggatggccaagtcagaatggtggtcggggccgctggtgggacgcagataaccacagcgacagctctggcgatcatctataatctttggtttggctatgacgtgaaaagagcggtggaggaaccccgtttgcacaaccaacttttgccgaatgttaccaccgtagaacgcaacatcgaccaggccgtcaccgccgcgttagaaacaaggcaccaccacacccagattgcaagcacttttattgcagtggtacaggccatcgtccgcaccgcaggggggtgggcggctgctagcgactcgcgcaagggcggtgaacctgccggatactag

SEQ ID NO: 176441 - DNA, 678 bp, Artificial Sequence
  derived and/or modified sequence
atgaccagcgagttcttcgccgcccagctgcgggcccagatcagcgacgacacaactcatcccatctcctactataaacccgagttctacacccccgatgacggggggacagctcacctaagcgtggtcgcggaggatggttccgccgtctcagctaccagcactattaacctttatttcgggtcaaaggttcgcagtccagtgtcgggaattcttttcaacaacgaaatggatgactttagtagtccttccataaccaacgaatttggcgtgcctccatctcccgccaatttcattcagcccgggaagcagccacttagctccatgtgcccgaccataatggtgggccaggatggacaggtccgtatggtggtgggcgcagcaggcgggacgcagattaccactgccactgctctggccatcatctacaatttgtggttcggatatgacgtgaaaagggctgttgaagagcccaggctgcacaaccagctgctgcccaatgtcaccactgtggagcggaatatcgaccaagcggtaaccgccgctctggagacacgccaccatcatacccagatcgcctctaccttcattgctgttgttcaggccattgtgcgcaccgcgggtggttgggccgcagcctcagacagccgtaagggcggtgagcccgcgggatattag

SEQ ID NO: 176442 - DNA, 678 bp, Artificial Sequence
  derived and/or modified sequence
atgaccagcgagttcttcgccgcccagctgcgggcccagatcagcgacgataccacccatcctatttcatactataagcccgaattttacacccctgacgatggaggaaccgcccacctatcagtggtagctgaggacggctccgccgtgtcagccacatctactattaacttgtattttgggtccaaggttagatcacccgtaagcggaatcctctttaataacgaaatggatgacttcagcagcccaagcatcacaaatgagttcggcgtccctcccagcccagcgaattttatccagcctggcaagcaaccactgtcctcaatgtgcccaactatcatggtgggacaggacggtcaggttcgtatggtggttggagctgccggcggcacccagattacgaccgccacagctctggccatcatatacaatctctggtttgggtacgatgtcaagcgggctgtcgaggaaccaaggctgcataatcaactgttaccaaacgtgactacagtggaaaggaatattgatcaagctgtgacagcagccttggaaacaaggcaccaccacacgcaaatcgcctccacgttcatcgccgtggtccaggctatcgtgcggactgctggcggttgggccgccgcatctgattctagaaaagggggagaaccagccggatactag

SEQ ID NO: 176443 - DNA, 678 bp, Artificial Sequence
  derived and/or modified sequence
atgaccagcgagttcttcgccgcccagctgcgggcccagatcagcgatgacaccacgcaccccatttcgtattacaaacccgaattctacacacccgatgacgggggcactgcacatttgtccgtggtcgctgaggatggttccgcggtaagcgctacgagtaccattaacctatattttggatccaaggttcgatcccccgtcagcgggattctgtttaacaatgagatggacgacttctcctcacctagcatcacaaacgagttcggtgtcccaccatcccctgccaacttcatccaacccggcaagcaaccactgtcgtcaatgtgcccgacaatcatggttgggcaggatggccaggtgcggatggttgtcggagcagccggtggtacacaaattacaaccgcaaccgctctggctatcatctacaacctgtggtttggctacgacgtcaaacgggccgtagaagagccccgtctccataaccaactcctgccgaatgtgaccaccgtggaacggaatatcgatcaggccgttacagcagccctggagacccgacaccaccatacacagattgcgagcacttttatcgctgtagtgcaggcgattgtgaggacagccggcggatgggctgccgcatctgactctcggaaggggggcgaaccggctggctactag

SEQ ID NO: 176444 - DNA, 1710 bp, Artificial Sequence
  derived and/or modified sequence
atgaagaagaagctggtggtgctgggcctgctggccgtggtgctggtcttggttatcgtgggcctctgtctctggctcccaagtgcatcgaaggagcccgacaaccacgtatatacccgcgctgctgtggctgccgacgccaaacagtgtagtaagatcggtcgggacgccttgagggacggaggctctgcggtggacgctgcaattgccgcactgctctgtgtcggtttgatgaacgcccattcgatgggtatcggcgggggcttgttcctgactatttacaatagtacgacaaggaaagctgaagttatcaacgcccgcgaagtggcccccagactcgcctttgcaactatgttcaactcttccgagcagagccagaaagggggcttgtctgtagctgtgcctggggagatacggggatatgagctcgcccaccaacggcatggccggctgccctgggcgcggttgttccaacccagtatccagctcgccagacaggggtttcctgtgggaaaaggcctggctgccgctctcgagaacaagcgaaccgtaatcgagcaacagccagtgctctgcgaggtgttctgtcgggataggaaagttctgcgagaaggagaaaggctcactcttccccaactcgccgacacatatgaaacattggccattgaaggtgcccaggccttctacaacggcagtcttacagctcaaatagttaaggatattcaagctgctggtggcatcgtgaccgcagaggacctgaacaattatcgcgcagaactgatcgaacacccgctcaacattagtctcggcgacgtggtgctgtacatgccttctgctcccctgagtggccccgtcctggctttaatcctgaatattttgaaaggctataatttcagccgcgagtccgttgagtctccagagcaaaaagggctgacttaccatcgcatagtggaagcctttaggttcgcctacgccaaacggacactgctgggcgatcccaagttcgtggacgtgacagaagttgtgaggaacatgacgtccgaattcttcgccgcacagttgagggcgcaaatttccgatgacacaacacaccccatctcttactataaaccagagttctacacacctgatgatggcgggactgcacatctcagtgtggtggccgaggacggaagcgccgtgagcgccacaagtaccatcaacctctatttcggatcaaaggttagatcacccgtgtcaggaattctgtttaacaacgagatggatgatttctcgagtccttctatcaccaacgaattcggtgtccccccttcacccgccaattttatccagcctgggaagcaacccctcagctcaatgtgcccgactatcatggtagggcaggatggtcaagttagaatggttgtcggggctgcaggaggcactcagatcacaacagccacagccctcgccatcatttacaacctctggtttggatatgacgtgaagagagccgttgaggaaccacgcctgcataaccagctgctgccaaacgtgaccaccgtggagcgaaatatcgaccaggctgtgaccgccgccctcgagacgaggcaccaccatacgcaaattgcatcaactttcatcgctgtcgtacaagctatagttagaacagccggaggatgggccgcagcctctgattctcgtaaggggggcgagccggccgggtactag

SEQ ID NO: 176445 - DNA, 363 bp, Artificial Sequence
  derived and/or modified sequence
atgaagaagaagctggtggtgctgggcctgctggccgtggtgctggttctcgtgatcgtcgggctctgtctctggctgccctctgcctctaaagagcccgacaatcatgtctacacaagagctgcagtggccgccgacgcaaaacagtgttcaaagatcggtcgagatgcgttaagagacgggggcagtgcagtggacgccgccatagctgccctcctttgtgtggggttaatgaatgcccattctatgggcatcgggggtgggctgtttctgacgatttacaatagtacgacacgaaaggccgaagtgattaacgctcgagaggtcgcccctcggttggcctttgcgaccatgtttaattag

SEQ ID NO: 176446 - DNA, 1392 bp, Artificial Sequence
  derived and/or modified sequence
atgaagaagaagctggtggtgctgggcctgctggccgtggtgctggtgttggtgattgtggggttatgtctctggctcccttcggccagcaaagagcctgataatcatgtgtacacccgtgcagccgtggcagcagatgcgaagcagtgctcaaagatagggcgcgacgccctcagagatggcggcagtgctgtggacgccgcaatcgcagctttactgtgcgtaggcctgatgaacgcacacagtatggggatcggcgggggtttgttcttaactatctacaatagcaccacccgaaaagccgaagtcattaacgctagagaggtagccccccggctggcttttgccaccatgttcaacagctctgagcagtctcagaaaggcggcctgtcggtggccgtgcctggggagattcgaggttatgaactcgcgcaccagaggcacggacggctgccctgggcaagattgtttcagccgtccatccaactggcccgacagggctttccggtgggaaaaggcttggctgcagctttggaaaacaagaggacagtgatcgaacaacagcccgtgctgtgtgaagtgttctgtagagaccgaaaagtgcttcgtgagggagaacgacttactttgccacagcttgcagacacatatgagaccctggctatagagggcgcgcaagctttctataatggaagtctgacagcccaaatcgtgaaggacatccaggccgccggtgggattgtgacggcggaggatctgaacaattacagagcggagctgatcgagcacccgttgaatatatctctgggtgacgtagtgctgtacatgccctccgcgcccctcagcggtcccgttctcgctcttatattaaacatacttaaagggtacaacttcagtcgggagagcgtggagtcaccagagcagaagggcctgacataccataggatcgtagaggctttccggttcgcatacgccaagagaactctgctcggcgaccccaagttcgtggacgtaactgaggtggtaagaaatatgacctctgagttcttcgccgcccaattgcgagctcaaattagcgatgacaccacacaccccatcagctattataagcccgagttttacacgccggacgacggcgggaccgcccatctttccgtcgtggcggaagacggctctgcagtctcggccacgtccacaattaacctgtacttcggaagcaaggtgaggtcccctgtcagcgggatccttttcaataacgagatggatgacttctcatccccttccatcacaaacgagttcggcgtcccgccctctccagccaatttcatccagcctgggaaacagccactgtcttcaatgtgtccaaccatcatggtgggtcaggacggttag

SEQ ID NO: 176447 - DNA, 243 bp, Artificial Sequence
  derived and/or modified sequence
atgaagaagaagctggtggtgctgggcctgctggccgtggtgctggttctggtgatcgtcgggttatgcctgtggctgccttcagccagcaaggagccggacaaccacgtatatactagagccgccgttgctgccgatgcaaagcagtgtagcaaaattggtcgcgacgcactgcgtgacggcgggagtgccgtggatgccgctattgcggccctgctgtgcgtgggtttaatgaatgcctag

SEQ ID NO: 176448 - DNA, 525 bp, Artificial Sequence
  derived and/or modified sequence
atgaagaagaagctggtggtgctgggcctgctggccgtggtgctggttctcgttatcgtggggctatgcctgtggttaccttccgctagcaaagagcctgacaaccacgtctatacccgcgcagcagtagcggccgatgctaaacaatgctcgaaaatcggacgagacgccctgagggacggcggctcggccgtggatgctgccattgctgcactcctgtgcgttgggttgatgaacgcccactccatgggcattggtggcggcctgtttctcacaatctacaactccacaaccaggaaagcagaggtgataaacgctcgcgaggtggccccccgacttgcctttgccaccatgttcaacagttcagagcaatcccagaagggaggattatccgtcgcggtcccgggcgaaatccgggggtacgagctggcgcaccaacgccacgggcgcctgccctgggcccgcctttttcaacctagcatccagctggctagacagggcttccccgttggcaagggcttatag

SEQ ID NO: 176449 - DNA, 381 bp, Artificial Sequence
  derived and/or modified sequence
atgaagaagaagctggtggtgctgggcctgctggccgtggtgctggtgctagtcattgtagggctgtgcctttggctgccaagcgcttcaaaagagcctgataaccatgtttacacgcgcgctgccgtggcagccgacgccaaacaatgcagtaagatcgggagggacgccctccgagatggaggttctgccgtggacgccgctattgccgcactgctctgcgtgggtctgatgaatgctcacagcatgggcatcggcggaggcctattcttgacaatatataactcaaccacacggaaagctgaagtgattaacgctcgagaggtcgcacccaggttggcttttgcaactatgttcaacagctccgaacagagccaatag

SEQ ID NO: 176450 - DNA, 330 bp, Artificial Sequence
  derived and/or modified sequence
atgaagaagaagctggtggtgctgggcctgctggccgtggtgctggttttggtgattgtaggactgtgtctatggctgccgtctgcgtctaaggaacccgacaatcatgtgtacacaagagctgctgtcgccgccgacgcaaagcagtgctcaaaaataggccgagatgctctgcgagacggcggctctgctgttgatgccgccattgccgcactgctatgtgttggtctgatgaacgcccacagcatggggatcggcggcggactgttcctcaccatttacaattctaccacacggaaggctgaagtgattaatgcacgggaagtgtag

SEQ ID NO: 176451 - DNA, 336 bp, Artificial Sequence
  derived and/or modified sequence
atgaagaagaagctggtggtgctgggcctgctggccgtggtgctggtactggtcatcgtcggattgtgtctctggctgccttccgcttcaaaagagcctgacaaccacgtctacaccagggctgccgtagccgccgacgccaaacaatgcagcaaaataggacgtgacgctcttagagacggaggatccgccgtggatgctgctatagcagctttgctctgcgtagggctgatgaacgcacattcaatgggaataggcgggggtctgttcttaacgatatataatagcaccacgagaaaggccgaagttattaatgctcgggaagttgcaccttag

SEQ ID NO: 176452 - DNA, 207 bp, Artificial Sequence
  derived and/or modified sequence
atgaagaagaagctggtggtgctgggcctgctggccgtggtgctggtgctggtgattgtgggcctatgtctgtggctcccctcagcatctaaagaaccagacaatcatgtctacactcgggcagctgttgcagccgatgctaaacaatgcagcaagatcggccgcgacgcactacgggacggaggatccgcggtggacgccgcatag

SEQ ID NO: 176453 - DNA, 381 bp, Artificial Sequence
  derived and/or modified sequence
atgaagaagaagctggtggtgctgggcctgctggccgtggtgctggtgttggtgattgtgggactttgcctgtggctgccatctgctagcaaggagcctgacaaccacgtctatactagggccgccgtagctgctgatgcaaaacagtgctcaaagattggtcgcgacgctctgcgcgacgggggctccgctgttgacgctgccatcgccgccctgctttgtgtaggccttatgaacgcccactctatggggatcggcggtgggttgtttttaaccatttataacagcaccactcgaaaagctgaggtgattaacgcacgggaagtggcccccagacttgcgttcgccaccatgtttaattcctccgaacaatcacaatag

SEQ ID NO: 176454 - DNA, 351 bp, Artificial Sequence
  derived and/or modified sequence
atgaagaagaagctggtggtgctgggcctgctggccgtggtgctggttttggtgattgtaggactctgtctctggttgccaagcgcgagtaaggagccggataatcacgtgtatactagagctgcggtagcagccgatgcaaagcagtgttctaagatcggtagggatgctttgcgggatgggggaagtgcagtggatgctgccatcgcggcgctcctgtgtgtgggcctgatgaatgctcatagtatggggattggcggcggactgtttctcactatatacaactctacaacaaggaaggcggaggtcataaacgcccgcgaagtagcccctcgactcgccttcgcctag

SEQ ID NO: 176455 - DNA, 384 bp, Artificial Sequence
  derived and/or modified sequence
atgaagaagaagctggtggtgctgggcctgctggccgtggtgctggtgctggtgattgtgggcctttgcctgtggttgccatcggcttctaaagagcccgacaatcacgtgtatactagagcagccgtggcggctgacgccaaacagtgttccaaaattggccgggacgcgctgcgggacggcggctctgcagtggatgcagctatagctgcccttttatgtgttggcctcatgaatgcccactccatgggcatcgggggcggtttgttccttactatctacaattccactaccaggaaagctgaggttattaatgcccgcgaagtggcccctaggctagcattcgcaaccatgtttaacagctccgagcagtcgcaaaaatag

SEQ ID NO: 176456 - DNA, 297 bp, Artificial Sequence
  derived and/or modified sequence
atgaagaagaagctggtggtgctgggcctgctggccgtggtgctggtgttggtcattgttggactgtgtctgtggttgccctcagcgtccaaagaacctgataatcatgtctatacgcgtgctgctgtcgctgctgatgctaagcagtgcagtaagattggtcgggacgctctaagagatggtggatctgctgttgatgctgcgattgcggcattactgtgcgtggggctgatgaatgcacatagcatgggtattgggggcggcctgttccttactatctataactctacaacatag

SEQ ID NO: 176457 - DNA, 1710 bp, Artificial Sequence
  derived and/or modified sequence
atgaagaaaaaattagtggttcttgggctgttggctgttgttctggtgttagtgatagttggtttgtgtctgtggctcccgagtgccagcaaagaacctgacaatcatgtctatactcgggctgccgttgcggcagatgccaagcagtgctcgaagatcggtagggacgcactgcgggacggaggatctgccgtggatgccgcaatagccgctctgctgtgcgttggacttatgaacgcacattcaatgggaatcgggggtggcctcttcttaacgatatacaattccacaactcgcaaagccgaagtcattaacgcgagggaggtggctcccagattagcttttgccacaatgtttaactcctcagagcagtcgcaaaaggggggattgtctgtagctgtgcccggagaaatacgaggctatgaattagcgcaccaacggcacggtcgcctaccatgggccagattgttccaaccttcaatccaacttgcgagacaggggtttcctgttggtaaagggttagccgctgcactggagaacaagcggaccgttatcgaacagcagccagttctgtgcgaggtgttctgtcgtgataggaaggtgctgcgcgagggggaacgtctgactcttccacagctggccgacacttatgaaacactggctattgagggcgcacaggctttctataacggatcactgacagcccagatcgtcaaagacatccaggcagccggaggcatcgtgacggctgaggacctgaataattacagagcagagctaatcgagcatcccctgaacatatccttgggcgatgtagtcctatacatgccatccgcccctctctcggggcctgtcctcgcgttgatcctgaatatcctgaaagggtataacttcagccgagaatccgtagagtctcccgagcagaagggtctgacttaccacagaattgtggaggccttcagattcgcctacgccaaaagaaccctgctgggcgacccaaagttcgtggacgttactgaagtggtgcggaatatgacctccgagtttttcgctgcccagctccgggcacaaatttccgacgatacaacacacccaatctcctactataaacctgaattctatacccctgatgacggcggaacagcgcacctgtccgtagtcgcggaggatgggagcgcagtttcagctaccagtacaatcaatctctacttcggctctaaggtgaggagccccgtatctggcatcttgttcaataatgagatggatgacttcagcagcccctcgatcactaacgagtttggcgtgcctcctagcccagccaacttcatccagcccggtaagcagccgctgtcatcaatgtgccccaccatcatggtgggccaggacggccaggttcgtatggttgtgggtgctgctgggggtactcagatcacaacagccaccgctttggcaattatctataatctgtggtttggatatgatgttaagagagctgttgaagaacctcgacttcataatcagctccttcctaatgtgaccaccgtagaacggaatatagatcaggctgtgaccgcagcactggagacccgccaccaccatacacaaatcgcgtcaacctttatcgccgtggtccaagcaatagtgaggaccgctggtggttgggcagcggcatcggattctcggaaaggcggtgagccagcgggatactag

SEQ ID NO: 176458 - DNA, 1710 bp, Artificial Sequence
  derived and/or modified sequence
atgaaaaaaaaactcgtggtactgggtctactggccgtggtactagttcttgtgatcgtggggctgtgtctttggctcccaagcgcgagcaaggagcctgacaaccacgtctacacaagagctgccgtcgcggcagatgctaaacagtgcagtaagatcggtagagatgccctccgtgacggcggatcggccgtggacgccgcaattgccgcactactctgtgtggggctgatgaacgcccattcaatggggatcggaggtggactctttctgacaatctataattcaacgactcgcaaggctgaagtgatcaacgcgcgtgaagttgcacccaggctggccttcgccacaatgtttaacagcagcgaacaatcacagaagggaggcctgtctgtggctgtgccgggtgagattcggggatatgagctcgcgcaccagagacacgggcgactaccctgggccaggctgtttcaacctagcatacagttagcaaggcagggttttccggtgggaaagggcctggctgcagctttagaaaataagcgcacagtcatcgagcagcagccagtgctgtgcgaggtattttgtcgagaccgaaaggtgttacgggagggggagagattgactctcccccagctggccgatacttacgagaccctggctatagaaggtgcccaggctttctacaatggcagtctgaccgcgcagatcgtgaaagacattcaagccgcaggcggtattgtaaccgctgaggatcttaacaactaccgggcagaactcattgagcacccgctgaacatctctcttggtgacgtagtcttgtacatgccttctgctccgctgtcaggtcctgtgctggctctaatccttaacattctgaagggctacaacttctcgcgcgaatcagtcgaatcgcctgagcaaaagggcttgacatatcatcggattgtggaagcttttaggtttgcttacgctaaacggaccctgttgggggacccaaagttcgtcgatgtgacagaggtggtgcggaacatgactagcgaattttttgcagcacagctgcgggcacagatctccgatgataccacacaccccattagttactacaagccggaattctataccccggatgacggtggaaccgcccacctcagtgttgtagcagaagacggctcggctgtcagcgcaacatctactatcaacctctatttcggatcaaaagtgcgtagtcctgtgtccgggattctgtttaacaacgaaatggacgacttctcctccccctcaattacaaatgagtttggcgtgcctccttctcctgccaactttattcagccagggaagcagcctctaagttccatgtgcccaacaattatggtagggcaagacggacaggtacgcatggtcgtgggcgcagccggagggacccagatcaccaccgctactgctctggcgattatatataacctctggttcggctacgacgtgaaaagggccgtagaagaaccccgtcttcataaccaactcctgcccaacgtcaccaccgttgaacgaaatatagatcaggccgtgactgcggctcttgagacacgccaccaccacactcagatagcctccacttttatcgccgtggtacaggctattgtgaggacagcgggaggctgggctgcagccagcgacagtagaaagggcggtgagcctgcagggtactag

SEQ ID NO: 176459 - DNA, 1710 bp, Artificial Sequence
  derived and/or modified sequence
atgaagaagaaactggttgtgctgggattgctcgcagtcgtcctggtcctagttatagttgggttgtgtctatggttgcccagcgcttctaaggagccagataatcatgtttatacacgggctgccgtagccgcagatgccaaacaatgttccaaaatcggacgagatgccctgcgcgatgggggttctgcagtggacgccgcaattgctgctctgctgtgtgtgggcctgatgaacgctcacagtatggggatcggtggcggacttttcctcaccatctataactccacaacccgcaaggctgaagtgattaacgcccgtgaggtggctcctcgcctggcattcgccactatgttcaatagttccgaacaatcacagaaggggggactgagcgtagccgtgcctggagagatccgcggatatgaactggcccaccagcgccacggaaggttgccttgggccagattgttccagcccagcatccagctcgctagacagggatttccggtggggaaggggctggctgcagcgctagagaataaacgcaccgtgatcgaacagcagcccgtactctgcgaggtcttctgcagagacagaaaagttctgcgcgaaggcgaaagacttactctgccccagttggccgacacctatgagacccttgccatcgaaggcgcacaagctttctacaatggcagcctgacagcccagattgtgaaggacatccaagccgctggaggcatagtgaccgctgaagatctcaacaattatagggcagagctgatcgaacatcccctgaatatcagcctcggtgacgtggtgctctatatgccgagcgcccctctgtcaggcccagtgctggcccttattttgaatatccttaaaggctataattttagccgtgaatccgtggaaagtcccgaacagaagggcctgacttaccatcgaatcgtcgaggcctttcgctttgcctatgcaaagaggactcttctcggcgatccgaaatttgtagacgtaactgaagtggtccgcaatatgacctctgaattcttcgccgcacagctcagggcacagatctccgacgataccacccatccgatcagctactacaaacctgaattctacacccctgatgatggcggtactgcccacctctcagtcgtggccgaagacgggagcgctgtgagcgctacgtccactataaacctgtattttggatcaaaggtgcggtccccggtatcaggaatcctgtttaacaatgagatggacgactttagctcccctagtatcaccaatgagtttggggtgcccccatcccccgctaatttcatccagcctggcaagcagcccctctcttctatgtgcccgaccattatggtggggcaagatgggcaggttaggatggttgtcggcgctgccggtggcacgcaaataacaaccgccaccgcccttgcgattatctacaatctgtggtttggctacgacgtaaagcgagccgtggaagaacctcgtctgcataatcagctgctacctaatgtgaccactgttgaaagaaatattgaccaagccgtgactgccgcactggaaactcgccaccatcacacccagatcgcttctacgtttatagccgtcgtgcaagcaattgtgagaaccgctggcggatgggcggcagcttctgacagtagaaagggtggtgaaccagccggatattag

SEQ ID NO: 176460 - DNA, 1710 bp, Artificial Sequence
  derived and/or modified sequence
atgaaaaaaaaactggtagttctcggtctgcttgccgtagtgctggtcctggttatcgttggactgtgtctctggctccctagcgcaagtaaggagcccgacaaccacgtatacaccagagccgctgtcgccgcagacgcgaaacaatgttctaagatcgggagggacgccttgcgtgatgggggtagcgctgttgatgctgcaatcgccgctctcctttgcgttgggctgatgaacgcccattctatgggtatcgggggtgggttgttcttgaccatctacaacagtaccacaagaaaggccgaggtgattaacgctagagaggtcgcacccagactggcattcgccaccatgtttaactcgagcgagcaaagccaaaagggcggactctctgtggccgtccctggcgaaatcaggggctatgagttggcccaccagagacatgggaggctgccttgggctcgtctgtttcagccgtcaatccagctggcgaggcagggctttcccgtagggaagggcctcgcggcagccttggagaacaaacggaccgttattgagcagcagcccgtgctctgcgaggtgttttgccgcgatcgaaaggttctgagggagggagaacgtctgacattaccccagcttgccgatacatacgagactctcgccatagaaggggcacaagcattctacaacggaagcctgaccgctcagatagtgaaagacatccaggctgcgggagggattgtcacagccgaggacctgaacaactatagagccgaactcatagaacatcccctaaatatttctctcggtgatgtcgtgctctacatgccttccgcacccctgagtggaccagtgttggctttaatcctgaatatcctgaagggctataacttctcccgcgagagcgtggagtctcctgaacagaagggactcacttaccataggattgtcgaagcttttcggttcgcctatgcaaagcggaccctgctgggtgatcccaaattcgtggatgttactgaggtagtgaggaatatgacctccgagttcttcgcagcacaactgagggcgcaaatcagtgacgacacaactcatccaatctcctattacaagcccgaattctatacacccgatgatggcggaacagcccatctcagcgtagtggccgaagacggatcagctgttagcgctacaagcacaataaacctgtatttcggctctaaggtgcggtctccagtctctggcattctatttaataacgagatggatgatttttccagtccatctatcacaaatgaatttggtgtcccacccagtcccgctaattttatccagcctgggaagcagcctctatctagcatgtgtcctacgattatggtgggacaggatgggcaagtgcggatggtggtaggtgctgccggaggcacacagatcaccaccgcaaccgccctagcaattatttacaatctctggtttggatacgatgtgaagcgggcagttgaagagccgaggctccataatcagctgcttcctaatgtgaccaccgtggagcgcaatattgaccaagccgttactgctgccctggagacacggcatcaccatacacaaatagcctctacctttatcgctgttgtacaggctatcgtccggactgctggaggctgggcggctgcctccgatagtcggaagggcggagaacccgctggctactag

SEQ ID NO: 176461 - DNA, 678 bp, Artificial Sequence
  derived and/or modified sequence
atgacttctgagttctttgccgctcaactgcgggctcaaattagcgatgatacgacccaccctattagttattataagcctgaattttacacgccggacgacgggggaacagcccatctttctgtcgtggctgaggacggctccgccgtaagtgccacctccacaataaatctgtattttggcagcaaagtgcggagtcccgtcagtggcatcctgtttaataacgagatggacgatttttccagcccaagtattacaaacgaattcggggtgccaccatctcctgcgaattttatacagccagggaaacagcctctctcaagtatgtgtcctaccataatggtgggacaggacggccaagtgcgcatggtcgtcggagcagcagggggaacccaaatcaccacggccacggcactggctatcatttacaatttgtggtttggctatgatgtcaagagagccgttgaggaaccacgattacacaaccaactcttgcctaatgtgaccacagtggagaggaacattgaccaggcagtgacggccgcactggagacacggcaccaccacacccagattgcatctacatttatcgccgttgtgcaggccatcgtacgaaccgcgggtggttgggcagccgcttccgacagtagaaagggcggtgagccggctggatactag

SEQ ID NO: 176462 - DNA, 678 bp, Artificial Sequence
  derived and/or modified sequence
atgacgtccgagttcttcgctgcacagctccgggcacaaattagtgatgatactacgcaccccatctcttattacaaacctgaattttacactccggatgatggtgggaccgcccacctctcagtggttgcagaggatggatcggcggtgtctgcgactagcacaatcaatttgtatttcggcagtaaagttagatctccagtgtcggggatcctctttaacaacgagatggatgatttctccagcccttctattaccaatgaattcggggtgccaccatctcctgccaacttcattcagccaggtaaacagccactctcatcaatgtgccccactatcatggtagggcaggatggtcaggtgcgaatggtggtgggagctgctgggggaacccaaattaccactgccactgcactggcaattatatacaatctctggttcggctatgacgtcaaacgcgctgttgaagagcctagactacacaaccagttgttgccgaatgtgacaaccgtggagcgcaacatcgatcaagctgtaacagcggcactggagacacggcatcaccacacccaaatagcttccacatttatagccgtggttcaggccatcgtgcggacggctggtggttgggccgcagctagtgatagtcggaaaggtggcgagccagcaggatattag

SEQ ID NO: 176463 - DNA, 678 bp, Artificial Sequence
  derived and/or modified sequence
atgacctccgaattcttcgctgcacagctgcgggcacagatcagcgacgacaccacccacccgatctcttattataaaccggaattctacactccagatgacggaggcacagcccatctgtcagttgttgcagaggatgggtcagccgttagtgcgacatcaaccatcaacctgtacttcggctcaaaagtacggtcccccgtgtccggaatcctgttcaataacgaaatggacgactttagctccccaagtattacaaacgagttcggcgttcccccaagccctgccaacttcatccaaccaggtaagcaacctcttagttcgatgtgcccgaccattatggtgggccaggacggtcaggtgaggatggtggtgggggctgctgggggaacccagataaccacagcaaccgcactggccataatttacaacttgtggttcggctacgacgtcaaacgagccgtggaggagccacgactccacaaccagctgttaccaaacgtgaccactgtggagagaaatatagatcaagccgtgaccgccgctctcgaaactaggcaccaccatacccagatcgcttcaacatttatcgcagtggtccaggcaattgtccggacagctggcggatgggctgcagcctcagattcccgcaaaggtggagaacccgcaggctactag

SEQ ID NO: 176464 - DNA, 1710 bp, Artificial Sequence
  derived and/or modified sequence
atgaaaaagaaactcgtggtacttggattgctggcagtagtccttgtgctggtgatcgtaggtctgtgtctgtggctgcctagcgcctctaaagagccagacaaccatgtttacacgcgggcagctgtcgcagccgatgcaaaacagtgctccaaaatcggcagagatgccctgcgggatggcggatctgctgtggacgccgctattgccgctttgctctgtgtgggtcttatgaatgcccacagcatggggatcggagggggtttatttctgacaatctataattccaccactcgcaaggccgaagtgataaatgccagagaggtggcaccaagattggcgtttgccactatgttcaactcatccgagcagagccagaagggtgggttgagcgttgcggtgcctggtgaaatcagaggttatgaacttgcccatcagagacacggtcggctgccatgggctcggttgtttcagccctcgattcagctggctaggcagggattccccgtcggtaagggtctcgcagctgccctggagaataagaggacagttatcgagcagcagcccgttctctgtgaggtgttttgcagagaccgaaaggtgctaagggaaggcgagcgcctcacccttcctcaactggccgacacctacgaaaccttggccatcgagggcgctcaggctttttataacggctcactgactgcccaaatagtcaaagatatccaggcagccggaggaatcgtaaccgccgaagatctcaataactaccgtgccgagctgatagaacaccccctgaatataagcctgggggatgtggttttgtacatgcctagcgcaccactgtctggaccagtattggctctgatcctgaacatcttgaaggggtataatttctcaagagagtctgtggagagcccggaacaaaaggggttgacttatcatagaattgtggaggccttcaggttcgcttacgccaagcggactctgcttggagaccccaaattcgttgatgtcaccgaagtggtgagaaatatgacgagcgagttttttgcggcacagctgcgggcacaaattagcgatgacacaacacatcctatcagctactacaagccagagttctacacgccggacgacggcggtaccgcacatctgagcgtggtggccgaagacggctctgccgtgtccgccacatcaaccatcaatttgtatttcgggagcaaagtacgctcacccgtatctgggattctgtttaataatgagatggacgacttctcttccccatctattaccaatgagttcggtgtcccgccatcacctgccaactttatacaacccggaaaacaaccccttagtagcatgtgtccgaccatcatggtggggcaagacggtcaggtcaggatggtggtgggggcagcaggcggaacccaaattacaactgctaccgcgctggcaataatctacaacctgtggtttggctacgatgtcaaaagggccgtggaagagccaaggctgcacaatcaactgctgcctaacgtgaccaccgttgagcggaacatcgatcaggccgtcacagccgctttggagactcggcatcatcatacccaaatcgcatccacctttatagcggtcgttcaagcaattgtgcggaccgccggaggatgggcagccgcttctgactccagaaaggggggagagcccgctggatactag

SEQ ID NO: 176465 - DNA, 363 bp, Artificial Sequence
  derived and/or modified sequence
atgaagaagaagctggtggtgctggggctgctggcagtagtactagtgctggtaatcgtcgggctctgcctctggttaccttcagcttccaaggagccagataatcacgtgtacaccagagcagccgtggccgctgacgcaaagcaatgttccaagatcggacgagatgccctgcgggatggcggatcggcagtagatgccgctatagctgctttgttgtgtgttggcctgatgaacgcccatagcatgggtatcggtggcggattgttcctcacaatctataactccacaacgcgaaaagccgaggtgatcaacgctcgggaagtggcacccaggctggccttcgcaaccatgttcaactag

SEQ ID NO: 176466 - DNA, 1392 bp, Artificial Sequence
  derived and/or modified sequence
atgaaaaagaagctggtcgttctgggcctcctggctgtagtccttgtactggtcatcgtcggactttgcctgtggttgccatccgcctcgaaggaacctgataatcacgtgtacacacgcgcagcggttgcagctgacgctaaacagtgcagcaaaatcggcagggatgcgcttagggatgggggatctgccgtggacgcagcaatcgcggcacttctctgtgtgggcttaatgaacgcccatagcatggggatcgggggagggctgtttctcactatttataactcaacaacaagaaaggccgaagtgatcaatgcgagggaggtcgcacctaggcttgcctttgcgaccatgtttaactcttccgaacagtctcagaaaggaggtctctcagttgcagtgcccggtgagatcagaggatacgagctggcacaccaaaggcacggtaggctgccctgggccaggcttttccagcccagcatacagctcgctaggcagggattccccgtcggtaaggggctggctgccgctttggagaacaaacggacagtgattgagcagcagcccgtgctgtgtgaagttttctgcagggacagaaaggtgctgcgggagggagaacgcctaaccttgcctcagctcgctgacacctacgagacgctggccattgaaggcgctcaggctttttacaatggctccctcaccgctcagatagttaaagatatccaagcggctggcggaatagtcaccgcggaagatctcaataactatcgggctgagctgattgagcacccactaaacatttccctgggggatgtggtgctgtacatgccatccgcccctctgtctggtccagtcctggcgttgatcctgaacatcttaaagggctacaatttttctagagagtcggttgagtcacccgaacagaagggcctcacctatcaccgaattgtggaggcatttcgctttgcctacgcgaagaggactctgcttggggatcccaagttcgtggatgtgacagaagtagtcagaaacatgactagtgagttttttgcagcacaactccgggctcagatttcagacgacaccacccatccgataagttattacaagccggagttctatacccccgatgacgggggtacggcacacctgtcagtggtcgcagaggacggctcggcagtttctgccacttccacaataaatctatacttcggctcaaaagtgagaagtcccgtttcagggattttgtttaacaacgaaatggatgactttagctccccctctattaccaacgaattcggagtgcctccaagtccagcaaatttcatacaaccagggaaacagccgttgagcagcatgtgccccaccattatggtgggccaagacgggtag

SEQ ID NO: 176467 - DNA, 243 bp, Artificial Sequence
  derived and/or modified sequence
atgaaaaaaaaattagtcgtgctgggattgctggccgtcgtgctggtcctggttattgttggactgtgtctgtggctccccagcgcaagcaaggaacccgataatcacgtctatacaagggcggctgtggcggctgatgctaaacagtgcagcaagattggtcgggatgcgctgcgagatggtggctccgcggttgatgccgctatagcggctttgctgtgtgtggggctgatgaacgcctag

SEQ ID NO: 176468 - DNA, 525 bp, Artificial Sequence
  derived and/or modified sequence
atgaaaaagaagttggtagtcctggggctgctagcagtcgtgcttgttctggtgatagttggactgtgtctgtggctgccgagcgcaagcaaggagcctgacaaccatgtatacaccagagcagctgttgccgcagacgctaaacagtgtagcaagatcggacgagacgctctgagggacggaggaagcgctgtggacgcagcaatagccgcactcctgtgcgtggggctgatgaatgcacatagtatggggatcggcggaggcctatttctgaccatttacaacagtactacgcgaaaagccgaggtgataaatgctagggaagtcgctcctcgcctggccttcgcgacaatgtttaatagttccgaacaatcacaaaagggaggcctctccgtagctgtgccaggcgagattaggggctatgagctagcccatcagcgccacggcaggctaccatgggccagactgttccagccctctatccaactggcgcgacagggatttcctgtgggcaaaggtttatag

SEQ ID NO: 176469 - DNA, 381 bp, Artificial Sequence
  derived and/or modified sequence
atgaaaaagaaattggtcgtcttgggcctgcttgccgtggtcttggtacttgttatcgtgggattatgcctgtggttaccctcggcaagcaaggaacccgataaccacgtgtacactcgtgccgctgtggccgcagacgccaagcagtgcagcaagattggccgagatgctcttagagacggagggtctgctgtggacgccgcaatagcggctctgctgtgcgtgggactgatgaatgcgcactctatgggcatcggagggggactgtttctgacaatatataatagtacaacacgcaaggcggaagtgattaacgcccgtgaggttgcgccaagactggccttcgccacgatgtttaactcttccgaacaaagtcagtag

SEQ ID NO: 176470 - DNA, 330 bp, Artificial Sequence
  derived and/or modified sequence
atgaagaagaagctggttgttctgggcttgctcgccgtggtgcttgtcctggtgattgtaggattgtgcctctggctaccatcggcaagtaaagaacccgataatcacgtctacactagggcagctgtggcagccgacgcaaagcagtgtagtaagattggaagagacgcccttcgagatggcggatctgccgtcgatgccgcaatcgccgctctgctgtgcgtgggcctgatgaacgcccattctatgggaatcggcggaggccttttcttaaccatttacaacagcactacacgaaaggccgaggtgatcaacgcaagggaggtttag

SEQ ID NO: 176471 - DNA, 336 bp, Artificial Sequence
  derived and/or modified sequence
atgaaaaagaagttggtagtacttggactcttagcagttgtccttgtccttgttatcgtcggcctgtgcctctggttgccctctgcatctaaagagccagataatcacgtatacacacgagccgcagtggcagctgatgctaaacagtgctccaagataggaagagatgccctccgggatggtggaagtgccgtcgacgctgcgatcgcagcactgctgtgtgtgggactaatgaacgcccactctatgggtatcggcggaggacttttcttgactatttataattcaacaacaaggaaggctgaggttattaacgcaagagaggtcgcaccctag

SEQ ID NO: 176472 - DNA, 207 bp, Artificial Sequence
  derived and/or modified sequence
atgaaaaaaaaactggtggttctgggacttctggccgtcgtcctggtgctggtgattgtggggctgtgcctatggctgccctccgccagcaaagagcccgacaatcacgtctacacccgtgccgctgtcgccgctgacgcgaagcagtgttccaagattggaagagatgctcttcgagacggcggatccgccgttgatgcggcatag

SEQ ID NO: 176473 - DNA, 381 bp, Artificial Sequence
  derived and/or modified sequence
atgaagaaaaagcttgtcgttctgggcctgctcgctgttgtgttagtgcttgtgatagtggggctgtgtctatggctaccttccgcatccaaggagccagataatcatgtttacactagggccgctgttgcagccgatgcgaagcaatgtagcaagattggtcgggacgcactgagggacggcggaagcgccgtggacgcagccattgctgccttactgtgcgtgggcctgatgaatgcccacagtatgggcatagggggaggtctattcctcaccatctacaacagtaccacacgcaaggccgaggtgatcaacgcccgagaggtggctcctaggctggcattcgcgacaatgttcaattcctcagagcagagccagtag

SEQ ID NO: 176474 - DNA, 351 bp, Artificial Sequence
  derived and/or modified sequence
atgaagaaaaagctggtggttttaggtctcttagcagtcgtgcttgtgctcgtgatcgtggggttatgcttatggctaccctctgccagtaaggaacccgataaccacgtgtatactcgcgctgcagttgcagctgatgccaaacagtgttcaaagattggcagagacgccctgagagatggcggatctgctgtggacgccgctatcgcagcgctgctgtgcgtcgggctcatgaacgcccatagtatgggcatcggaggcggactgttcctgaccatctacaattccactacacgcaaggctgaggtaatcaatgcgcgagaggtcgctccgagactcgcattcgcttag

SEQ ID NO: 176475 - DNA, 384 bp, Artificial Sequence
  derived and/or modified sequence
atgaagaaaaaacttgtggtcctggggttgctggcggtggtgttagtgttggtcatagtagggttgtgtctgtggttgccatctgccagtaaagagccagataaccatgtgtacacaagggcagccgtggccgctgacgctaaacagtgttctaaaattgggagggatgcactccgggacggcggtagtgccgtcgatgcggcaattgcggctctgttatgcgtgggcttaatgaatgcacactcaatggggattggtgggggattattcttgacaatatataattcgacgacgaggaaggcggaagttatcaacgcaagggaggtcgcccctcggctggcctttgctaccatgttcaatagcagcgagcagtcccagaagtag

SEQ ID NO: 176476 - DNA, 297 bp, Artificial Sequence
  derived and/or modified sequence
atgaaaaaaaaattagtggttttaggactgctggcagtcgtcctggtgctggtcatcgtggggctttgtttgtggctaccctctgccagcaaggagccagacaaccacgtttatacaagagccgcagtggccgctgacgccaaacaatgttcaaagatcggcagggatgctctacgggatgggggttcagccgtggacgccgcaatcgccgctttattgtgcgtgggtctgatgaatgctcacagtatgggtataggcggagggttgtttttgaccatatacaactctacaacatag

SEQ ID NO: 176477 - DNA, 1710 bp, Artificial Sequence
  derived and/or modified sequence
atgaagaagaagctggtggtgctgggcctgctggccgtggtgctggtgctggtgatcgtgggcctgtgcctgtggctgcccagcgccagcaaggagcccgacaaccacgtgtacaccagagccgccgtggccgccgacgccaagcagtgcagcaagatcggcagagacgccctgagagacggcggcagcgccgtggacgccgccatcgccgccctgctgtgcgtgggcctgatgaacgcccacagcatgggcatcggcggcggcctgttcctgaccatctacaacagcaccaccagaaaggccgaggtgatcaacgccagagaggtggcccccagactggccttcgccaccatgttcaacagcagcgagcagagccagaagggcggcctgagcgtggccgtgcccggcgagatcagaggctacgagctggcccaccagagacacggcagactgccctgggccagactgttccagcccagcatccagctggccagacagggcttccccgtgggcaagggcctggccgccgccctggagaacaagagaaccgtgatcgagcagcagcccgtgctgtgcgaggtgttctgcagagacagaaaggtgctgagagagggcgagagactgaccctgccccagctggccgacacctacgagaccctggccatcgagggcgcccaggccttctacaacggcagcctgaccgcccagatcgtgaaggacatccaggccgccggcggcatcgtgaccgccgaggacctgaacaactacagagccgagctgatcgagcaccccctgaacatcagcctgggcgacgtggtgctgtacatgcccagcgcccccctgagcggccccgtgctggccctgatcctgaacatcctgaagggctacaacttcagcagagagagcgtggagagccccgagcagaagggcctgacctaccacagaatcgtggaggccttcagattcgcctacgccaagagaaccctgctgggcgaccccaagttcgtggacgtgaccgaggtggtgagaaacatgaccagcgagttcttcgccgcccagctgagagcccagatcagcgacgacaccacccaccccatcagctactacaagcccgagttctacacccccgacgacggcggcaccgcccacctgagcgtggtggccgaggacggcagcgccgtgagcgccaccagcaccatcaacctgtacttcggcagcaaggtgagaagccccgtgagcggcatcctgttcaacaacgagatggacgacttcagcagccccagcatcaccaacgagttcggcgtgccccccagccccgccaacttcatccagcccggcaagcagcccctgagcagcatgtgccccaccatcatggtgggccaggacggccaggtgagaatggtggtgggcgccgccggcggcacccagatcaccaccgccaccgccctggccatcatctacaacctgtggttcggctacgacgtgaagagagccgtggaggagcccagactgcacaaccagctgctgcccaacgtgaccaccgtggagagaaacatcgaccaggccgtgaccgccgccctggagaccagacaccaccacacccagatcgccagcaccttcatcgccgtggtgcaggccatcgtgagaaccgccggcggctgggccgccgccagcgacagcagaaagggcggcgagcccgccggctactag

SEQ ID NO: 176478 - DNA, 678 bp, Artificial Sequence
  derived and/or modified sequence
atgaccagcgagttcttcgccgcccagctgagagcccagatcagcgacgacaccacccaccccatcagctactacaagcccgagttctacacccccgacgacggcggcaccgcccacctgagcgtggtggccgaggacggcagcgccgtgagcgccaccagcaccatcaacctgtacttcggcagcaaggtgagaagccccgtgagcggcatcctgttcaacaacgagatggacgacttcagcagccccagcatcaccaacgagttcggcgtgccccccagccccgccaacttcatccagcccggcaagcagcccctgagcagcatgtgccccaccatcatggtgggccaggacggccaggtgagaatggtggtgggcgccgccggcggcacccagatcaccaccgccaccgccctggccatcatctacaacctgtggttcggctacgacgtgaagagagccgtggaggagcccagactgcacaaccagctgctgcccaacgtgaccaccgtggagagaaacatcgaccaggccgtgaccgccgccctggagaccagacaccaccacacccagatcgccagcaccttcatcgccgtggtgcaggccatcgtgagaaccgccggcggctgggccgccgccagcgacagcagaaagggcggcgagcccgccggctactag

SEQ ID NO: 176479 - DNA, 363 bp, Artificial Sequence
  derived and/or modified sequence
atgaagaagaagctggtggtgctgggcctgctggccgtggtgctggtgctggtgatcgtgggcctgtgcctgtggctgcccagcgccagcaaggagcccgacaaccacgtgtacaccagagccgccgtggccgccgacgccaagcagtgcagcaagatcggcagagacgccctgagagacggcggcagcgccgtggacgccgccatcgccgccctgctgtgcgtgggcctgatgaacgcccacagcatgggcatcggcggcggcctgttcctgaccatctacaacagcaccaccagaaaggccgaggtgatcaacgccagagaggtggcccccagactggccttcgccaccatgttcaactag

SEQ ID NO: 176480 - DNA, 1392 bp, Artificial Sequence
  derived and/or modified sequence
atgaagaagaagctggtggtgctgggcctgctggccgtggtgctggtgctggtgatcgtgggcctgtgcctgtggctgcccagcgccagcaaggagcccgacaaccacgtgtacaccagagccgccgtggccgccgacgccaagcagtgcagcaagatcggcagagacgccctgagagacggcggcagcgccgtggacgccgccatcgccgccctgctgtgcgtgggcctgatgaacgcccacagcatgggcatcggcggcggcctgttcctgaccatctacaacagcaccaccagaaaggccgaggtgatcaacgccagagaggtggcccccagactggccttcgccaccatgttcaacagcagcgagcagagccagaagggcggcctgagcgtggccgtgcccggcgagatcagaggctacgagctggcccaccagagacacggcagactgccctgggccagactgttccagcccagcatccagctggccagacagggcttccccgtgggcaagggcctggccgccgccctggagaacaagagaaccgtgatcgagcagcagcccgtgctgtgcgaggtgttctgcagagacagaaaggtgctgagagagggcgagagactgaccctgccccagctggccgacacctacgagaccctggccatcgagggcgcccaggccttctacaacggcagcctgaccgcccagatcgtgaaggacatccaggccgccggcggcatcgtgaccgccgaggacctgaacaactacagagccgagctgatcgagcaccccctgaacatcagcctgggcgacgtggtgctgtacatgcccagcgcccccctgagcggccccgtgctggccctgatcctgaacatcctgaagggctacaacttcagcagagagagcgtggagagccccgagcagaagggcctgacctaccacagaatcgtggaggccttcagattcgcctacgccaagagaaccctgctgggcgaccccaagttcgtggacgtgaccgaggtggtgagaaacatgaccagcgagttcttcgccgcccagctgagagcccagatcagcgacgacaccacccaccccatcagctactacaagcccgagttctacacccccgacgacggcggcaccgcccacctgagcgtggtggccgaggacggcagcgccgtgagcgccaccagcaccatcaacctgtacttcggcagcaaggtgagaagccccgtgagcggcatcctgttcaacaacgagatggacgacttcagcagccccagcatcaccaacgagttcggcgtgccccccagccccgccaacttcatccagcccggcaagcagcccctgagcagcatgtgccccaccatcatggtgggccaggacggctag

SEQ ID NO: 176481 - DNA, 243 bp, Artificial Sequence
  derived and/or modified sequence
atgaagaagaagctggtggtgctgggcctgctggccgtggtgctggtgctggtgatcgtgggcctgtgcctgtggctgcccagcgccagcaaggagcccgacaaccacgtgtacaccagagccgccgtggccgccgacgccaagcagtgcagcaagatcggcagagacgccctgagagacggcggcagcgccgtggacgccgccatcgccgccctgctgtgcgtgggcctgatgaacgcctag

SEQ ID NO: 176482 - DNA, 525 bp, Artificial Sequence
  derived and/or modified sequence
atgaagaagaagctggtggtgctgggcctgctggccgtggtgctggtgctggtgatcgtgggcctgtgcctgtggctgcccagcgccagcaaggagcccgacaaccacgtgtacaccagagccgccgtggccgccgacgccaagcagtgcagcaagatcggcagagacgccctgagagacggcggcagcgccgtggacgccgccatcgccgccctgctgtgcgtgggcctgatgaacgcccacagcatgggcatcggcggcggcctgttcctgaccatctacaacagcaccaccagaaaggccgaggtgatcaacgccagagaggtggcccccagactggccttcgccaccatgttcaacagcagcgagcagagccagaagggcggcctgagcgtggccgtgcccggcgagatcagaggctacgagctggcccaccagagacacggcagactgccctgggccagactgttccagcccagcatccagctggccagacagggcttccccgtgggcaagggcctgtag

SEQ ID NO: 176483 - DNA, 381 bp, Artificial Sequence
  derived and/or modified sequence
atgaagaagaagctggtggtgctgggcctgctggccgtggtgctggtgctggtgatcgtgggcctgtgcctgtggctgcccagcgccagcaaggagcccgacaaccacgtgtacaccagagccgccgtggccgccgacgccaagcagtgcagcaagatcggcagagacgccctgagagacggcggcagcgccgtggacgccgccatcgccgccctgctgtgcgtgggcctgatgaacgcccacagcatgggcatcggcggcggcctgttcctgaccatctacaacagcaccaccagaaaggccgaggtgatcaacgccagagaggtggcccccagactggccttcgccaccatgttcaacagcagcgagcagagccagtag

SEQ ID NO: 176484 - DNA, 330 bp, Artificial Sequence
  derived and/or modified sequence
atgaagaagaagctggtggtgctgggcctgctggccgtggtgctggtgctggtgatcgtgggcctgtgcctgtggctgcccagcgccagcaaggagcccgacaaccacgtgtacaccagagccgccgtggccgccgacgccaagcagtgcagcaagatcggcagagacgccctgagagacggcggcagcgccgtggacgccgccatcgccgccctgctgtgcgtgggcctgatgaacgcccacagcatgggcatcggcggcggcctgttcctgaccatctacaacagcaccaccagaaaggccgaggtgatcaacgccagagaggtgtag

SEQ ID NO: 176485 - DNA, 336 bp, Artificial Sequence
  derived and/or modified sequence
atgaagaagaagctggtggtgctgggcctgctggccgtggtgctggtgctggtgatcgtgggcctgtgcctgtggctgcccagcgccagcaaggagcccgacaaccacgtgtacaccagagccgccgtggccgccgacgccaagcagtgcagcaagatcggcagagacgccctgagagacggcggcagcgccgtggacgccgccatcgccgccctgctgtgcgtgggcctgatgaacgcccacagcatgggcatcggcggcggcctgttcctgaccatctacaacagcaccaccagaaaggccgaggtgatcaacgccagagaggtggccccctag

SEQ ID NO: 176486 - DNA, 207 bp, Artificial Sequence
  derived and/or modified sequence
atgaagaagaagctggtggtgctgggcctgctggccgtggtgctggtgctggtgatcgtgggcctgtgcctgtggctgcccagcgccagcaaggagcccgacaaccacgtgtacaccagagccgccgtggccgccgacgccaagcagtgcagcaagatcggcagagacgccctgagagacggcggcagcgccgtggacgccgcctag

SEQ ID NO: 176487 - DNA, 351 bp, Artificial Sequence
  derived and/or modified sequence
atgaagaagaagctggtggtgctgggcctgctggccgtggtgctggtgctggtgatcgtgggcctgtgcctgtggctgcccagcgccagcaaggagcccgacaaccacgtgtacaccagagccgccgtggccgccgacgccaagcagtgcagcaagatcggcagagacgccctgagagacggcggcagcgccgtggacgccgccatcgccgccctgctgtgcgtgggcctgatgaacgcccacagcatgggcatcggcggcggcctgttcctgaccatctacaacagcaccaccagaaaggccgaggtgatcaacgccagagaggtggcccccagactggccttcgcctag

SEQ ID NO: 176488 - DNA, 384 bp, Artificial Sequence
  derived and/or modified sequence
atgaagaagaagctggtggtgctgggcctgctggccgtggtgctggtgctggtgatcgtgggcctgtgcctgtggctgcccagcgccagcaaggagcccgacaaccacgtgtacaccagagccgccgtggccgccgacgccaagcagtgcagcaagatcggcagagacgccctgagagacggcggcagcgccgtggacgccgccatcgccgccctgctgtgcgtgggcctgatgaacgcccacagcatgggcatcggcggcggcctgttcctgaccatctacaacagcaccaccagaaaggccgaggtgatcaacgccagagaggtggcccccagactggccttcgccaccatgttcaacagcagcgagcagagccagaagtag

SEQ ID NO: 176489 - DNA, 297 bp, Artificial Sequence
  derived and/or modified sequence
atgaagaagaagctggtggtgctgggcctgctggccgtggtgctggtgctggtgatcgtgggcctgtgcctgtggctgcccagcgccagcaaggagcccgacaaccacgtgtacaccagagccgccgtggccgccgacgccaagcagtgcagcaagatcggcagagacgccctgagagacggcggcagcgccgtggacgccgccatcgccgccctgctgtgcgtgggcctgatgaacgcccacagcatgggcatcggcggcggcctgttcctgaccatctacaacagcaccacctag

SEQ ID NO: 176490 - protein, 37 aa, Artificial Sequence
  derived and/or modified sequence
EEWITYSNSCYYIGKERRTWEERVCWPVLRRTLICFL

SEQ ID NO: 176491 - protein, 158 aa, Artificial Sequence
  derived and/or modified sequence
MNKQRGTYSEVSLAQDPKRQQRKLKGNKISISGTKQEIFQVELNLQNASSDHQGNDKTYHCKGLLPPPEKLTAEVLGIICIVLMATVLKTIVLIPCIGVLEQNNFSLNRRMQKARHCGHCPEEWITYSNSCYYIGKERRTWEERVCWPVLRRTLICFL

SEQ ID NO: 176492 - DNA, 114 bp, Artificial Sequence
  derived and/or modified sequence
gaggagtggatcacctacagcaacagctgctactacatcggcaaggagagaagaacctgggaggagagagtgtgctggcccgtgctgagaagaaccctgatctgcttcctgtag

SEQ ID NO: 176493 - DNA, 114 bp, Artificial Sequence
  derived and/or modified sequence
gaggaatggattacatattctaatagctgctactacatcgggaaggaaaggcgcacctgggaggagcgggtttgctggcctgtgctccgcagaacattaatttgctttctgtag

SEQ ID NO: 176494 - DNA, 114 bp, Artificial Sequence
  derived and/or modified sequence
gaggagtggatcacctacagcaacagctgctactacatcggcaaggagaggaggacctgggaggagcgggtgtgctggcctgtgctgcggaggaccctcatctgcttcctgtag

SEQ ID NO: 176495 - DNA, 114 bp, Artificial Sequence
  derived and/or modified sequence
gaggagtggatcacctacagcaacagctgctactacatcggcaaggagcgcaggacgtgggaggaaagggtgtgctggcctgttctacgccgaactctgatttgcttcctgtag

SEQ ID NO: 176496 - DNA, 114 bp, Artificial Sequence
  derived and/or modified sequence
gaagagtggatcacctacagtaatagctgctattacattggtaaagagcgtagaacatgggaagaaagagtgtgctggccggttcttcggaggactctgatctgcttcctctag

SEQ ID NO: 176497 - DNA, 477 bp, Artificial Sequence
  derived and/or modified sequence
atgaataagcagagaggaacatactctgaggtgagcctggcacaagaccctaagagacagcagcgtaagctgaaggggaataaaataagtatctcaggcaccaagcaggagatattccaagttgaacttaatctgcagaatgcctcttccgatcatcaaggcaacgataagacctatcattgtaaggggcttctgcccccacccgagaaattgacagccgaagtgcttggtattatctgtatcgtgctgatggctactgtgcttaagaccatcgtactgatcccatgtatcggtgttctcgaacagaataacttctccctcaaccgccgcatgcagaaggcccgacactgcgggcactgccccgaagagtggattacctattcaaactcctgttactacattggcaaggagcgtcggacctgggaggaacgcgtgtgctggcctgtgttgagaaggaccttgatctgcttcctgtag

SEQ ID NO: 176498 - DNA, 928 bp, Artificial Sequence
  derived and/or modified sequence
taaaactttaggaaattagtaccagacttttatattggtcaacagcaaaatgaacattactactcagcctccaacacatgcagtttgcctataccagggatcctgtcaaaatatacaccacttatagcttcttaagtgcagttatcatagagcacagtccctgacatcacacagctgcagagatgaataaacaaagaggaacctactcagaagtgagtctggcccaggacccaaagaggcagcaaaggaaacttaagggcaataaaatctccatttcaggaaccaaacaggaaatattccaagtagaattaaaccttcaaaatgcttcttcggatcatcaagggaatgacaagacatatcactgcaaaggtttactgccacctccagagaagctcactgctgaggtcctaggaatcatttgcattgtcctgatggccactgtgttaaaaacaatagttcttattccttgtattggagtactggagcagaacaatttttccctgaatagaagaatgcagaaagcacgtcattgtggccattgtcctgaggagtggattacatattccaacagttgttattacattggtaaggaaagaagaacttgggaagaaagagtttgctggcctgtgcttcgaagaactctgatctgctttctatagataatgaggaagaaatggtaagacgtaaatgtttcaacactttactaaaagcttatttctgtcaatatcatatttgtagaaatcatccatatgtttatacatatatttacttcatatatttttaagtctgtgtagtattcaactgacttcataatatttttatattcatatactgttaatgcacatttggttatttccagttttgcttttcatggaaacccatgcttctataaatgtttttatcacaaaataaatataaagaaaactaa

SEQ ID NO: 176499 - DNA, 477 bp, Artificial Sequence
  derived and/or modified sequence
atgaacaagcagaggggcacctacagcgaggtgtccctggcccaggaccccaagaggcagcagaggaagctgaagggcaacaagatcagcatcagcggcaccaagcaggagatcttccaggtggagctgaacctgcagaatgccagcagtgaccaccagggcaatgacaagacctaccactgcaagggcctgctgcccccacctgagaagctgacagctgaggtgctgggcatcatctgcatcgtgctgatggccaccgtgctgaagaccatcgtgctgatcccctgcattggagtgctggagcagaacaacttcagcctgaacagaaggatgcagaaggcccggcactgcggccactgcccagaggagtggatcacctacagcaacagctgctactacatcggcaaggagaggaggacctgggaggagcgggtgtgctggcctgtgctgcggaggaccctcatctgcttcctgtag

SEQ ID NO: 176500 - DNA, 477 bp, Artificial Sequence
  derived and/or modified sequence
atgaacaagcagcggggcacctacagcgaggtgagcctggcccaggatcctaaaaggcagcagcgtaagctcaaaggaaacaagataagcatcagtgggaccaagcaggaaatcttccaggtcgagctaaatctgcagaacgcttcctcagaccatcaaggaaatgacaagacctaccactgtaaggggttactcccaccccccgaaaagctgacagccgaagtgttaggcattatctgtatagtgctcatggccacagtgctgaagacgatcgtcctaattccctgcataggagtgctggagcaaaacaatttctcactcaataggcggatgcaaaaggccaggcattgtgggcactgtccagaagaatggataacgtacagcaacagttgctactatattgggaaagagagacggacatgggaggaacgggtttgctggccagtgcttcggcgcaccttgatatgctttttatag

SEQ ID NO: 176501 - DNA, 477 bp, Artificial Sequence
  derived and/or modified sequence
atgaacaagcagcgaggtacatacagcgaggttagtttggcacaggaccccaagaggcaacaaaggaaattaaagggtaacaaaatctcaatctcagggactaagcaggagatcttccaggtggagctgaaccttcagaacgccagttctgaccatcaagggaacgataagacgtatcattgcaagggactcttgccccctcctgaaaagcttacagccgaggtactggggatcatttgcatcgttttaatggctactgttctgaagaccatcgtactgattccctgcatcggagtgttggagcagaacaacttttctcttaatagaagaatgcagaaagcccgtcattgcggccactgtcccgaagaatggataacgtacagtaactcttgctactacattggaaaggaacgccgtacatgggaggaaagagtgtgctggccagttctgaggagaaccttaatatgctttctttag

SEQ ID NO: 176502 - DNA, 477 bp, Artificial Sequence
  derived and/or modified sequence
atgaacaagcagagaggcacctacagcgaggtgagcctggcccaggaccccaagagacagcagagaaagctgaagggcaacaagatcagcatcagcggcaccaagcaggagatcttccaggtggagctgaacctgcagaacgccagcagcgaccaccagggcaacgacaagacctaccactgcaagggcctgctgcccccccccgagaagctgaccgccgaggtgctgggcatcatctgcatcgtgctgatggccaccgtgctgaagaccatcgtgctgatcccctgcatcggcgtgctggagcagaacaacttcagcctgaacagaagaatgcagaaggccagacactgcggccactgccccgaggagtggatcacctacagcaacagctgctactacatcggcaaggagagaagaacctgggaggagagagtgtgctggcccgtgctgagaagaaccctgatctgcttcctgtag

SEQ ID NO: 176503 - protein, 1378 aa, Artificial Sequence
  derived and/or modified sequence
MSLERELRQLSKAKAKAQRAGQRREEAALCHQLGELLAGHGRYAEALEQHWQELQLRERADDPLGCAVAHRKIGERLAEMEDYPAALQHQHQYLELAHSLRNHTELQRAWATIGRTHLDIYDHCQSRDALLQAQAAFEKSLAIVDEELEGTLAQGELNEMRTRLYLNLGLTFESLQQTALCNDYFRKSIFLAEQNHLYEDLFRARYNLGTIHWRAGQHSQAMRCLEGARECAHTMRKRFMESECCVVIAQVLQDLGDFLAAKRALKKAYRLGSQKPVQRAAICQNLQHVLAVVRLQQQLEEAEGRDPQGAMVICEQLGDLFSKAGDFPRAAEAYQKQLRFAELLDRPGAERAIIHVSLATTLGDMKDHHGAVRHYEEELRLRSGNVLEEAKTWLNIALSREEAGDAYELLAPCFQKALSCAQQAQRPQLQRQVLQHLHTVQLRLQPQEAPETETRLRELSVAEDEDEEEEAEEAAATAESEALEAGEVELSEGEDDTDGLTPQLEEDEELQGHLGRRKGSKWNRRNDMGETLLHRACIEGQLRRVQDLVRQGHPLNPRDYCGWTPLHEACNYGHLEIVRFLLDHGAAVDDPGGQGCEGITPLHDALNCGHFEVAELLLERGASVTLRTRKGLSPLETLQQWVKLYRRDLDLETRQKARAMEMLLQAAASGQDPHSSQAFHTPSSLLFDPETSPPLSPCPEPPSNSTRLPEASQAHVRVSPGQAAPAMARPRRSRHGPASSSSSSEGEDSAGPARPSQKRPRCSATAQRVAAWTPGPASNREAATASTSRAAYQAAIRGVGSAQSRLGPGPPRGHSKALAPQAALIPEEECLAGDWLELDMPLTRSRRPRPRGTGDNRRPSSTSGSDSEESRPRARAKQVRLTCMQSCSAPVNAGPSSLASEPPGSPSTPRVSEPSGDSSAAGQPLGPAPPPPIRVRVQVQDHLFLIPVPHSSDTHSVAWLAEQAAQRYYQTCGLLPRLTLRKEGALLAPQDLIPDVLQSNDEVLAEVTSWDLPPLTDRYRRACQSLGQGEHQQVLQAVELQGLGLSFSACSLALDQAQLTPLLRALKLHTALRELRLAGNRLGDKCVAELVAALGTMPSLALLDLSSNHLGPEGLRQLAMGLPGQATLQSLEELDLSMNPLGDGCGQSLASLLHACPLLSTLRLQACGFGPSFFLSHQTALGSAFQDAEHLKTLSLSYNALGAPALARTLQSLPAGTLLHLELSSVAAGKGDSDLMEPVFRYLAKEGCALAHLTLSANHLGDKAVRDLCRCLSLCPSLISLDLSANPEISCASLEELLSTLQKRPQGLSFLGLSGCAVQGPLGLGLWDKIAAQLRELQLCSRRLCAEDRDALRQLQPSRPGPGECTLDHGSKLFFRRL

SEQ ID NO: 176504 - protein, 1377 aa, Artificial Sequence
  derived and/or modified sequence
MSLERELRQLSKAKAKAQRAGQRREEAALCHQLGELLAGHGRYAEALEQHWQELQLRERADDPLGCAVAHRKIGERLAEMEDYPAALQHQHQYLELAHSLRNHTELQRAWATIGRTHLDIYDHCQSRDALLQAQAAFEKSLAIVDEELEGTLAQGELNEMRTRLYLNLGLTFESLQQTALCNDYFRKSIFLAEQNHLYEDLFRARYNLGTIHWRAGQHSQAMRCLEGARECAHTMRKRFMESECCVVIAQVLQDLGDFLAAKRALKKAYRLGSQKPVQRAAICQNLQHVLAVVRLQQQLEEAEGRDPQGAMVICEQLGDLFSKAGDFPRAAEAYQKQLRFAELLDRPGAERAIIHVSLATTLGDMKDHHGAVRHYEEELRLRSGNVLEEAKTWLNIALSREEAGDAYELLAPCFQKALSCAQQAQRPQLQRQVLQHLHTVQLRLQPQEAPETETRLRELSVAEDEDEEEEAEEAAATAESEALEAGEVELSEGEDDTDGLTPQLEEDEELQGHLGRRKGSKWNRRNDMGETLLHRACIEGQLRRVQDLVRQGHPLNPRDYCGWTPLHEACNYGHLEIVRFLLDHGAAVDDPGGQGCEGITPLHDALNCGHFEVAELLLERGASVTLRTRKASARWRRCSSGKLYRRDLDLETRQKARAMEMLLQAAASGQDPHSSQAFHTPSSLLFDPETSPPLSPCPEPPSNSTRLPEASQAHVRVSPGQAAPAMARPRRSRHGPASSSSSSEGEDSAGPARPSQKRPRCSATAQRVAAWTPGPASNREAATASTSRAAYQAAIRGVGSAQSRLGPGPPRGHSKALAPQAALIPEEECLAGDWLELDMPLTRSRRPRPRGTGDNRRPSSTSGSDSEESRPRARAKQVRLTCMQSCSAPVNAGPSSLASEPPGSPSTPRVSEPSGDSSAAGQPLGPAPPPPIRVRVQVQDHLFLIPVPHSSDTHSVAWLAEQAAQRYYQTCGLLPRLTLRKEGALLAPQDLIPDVLQSNDEVLAEVTSWDLPPLTDRYRRACQSLGQGEHQQVLQAVELQGLGLSFSACSLALDQAQLTPLLRALKLHTALRELRLAGNRLGDKCVAELVAALGTMPSLALLDLSSNHLGPEGLRQLAMGLPGQATLQSLEELDLSMNPLGDGCGQSLASLLHACPLLSTLRLQACGFGPSFFLSHQTALGSAFQDAEHLKTLSLSYNALGAPALARTLQSLPAGTLLHLELSSVAAGKGDSDLMEPVFRYLAKEGCALAHLTLSANHLGDKAVRDLCRCLSLCPSLISLDLSANPEISCASLEELLSTLQKRPQGLSFLGLSGCAVQGPLGLGLWDKIAAQLRELQLCSRRLCAEDRDALRQLQPSRPGPGECTLDHGSKLFFRRL

SEQ ID NO: 176505 - DNA, 4519 bp, Artificial Sequence
  derived and/or modified sequence
cgcggcgatccgagcatgagcctggagcgcgagcttcgccagctgagcaaggcgaaagccaaggcgcagagggccgggcagcggcgcgaagaggccgcgctgtgccaccagctgggggagctcctggccggccatggccgctacgccgaggctctggagcagcactggcaggagctgcagcttcgggagcgcgctgacgaccctctgggctgtgccgtggcccaccgcaagatcggagagcgcctggccgagatggaggactacccggctgccttgcagcaccagcaccagtacctggagctggcacattccctgcgcaaccacacggagctgcagagggcctgggccaccatcggccgcacccacctggacatctatgaccactgccagtcgagggatgctttgctgcaggcacaggctgcctttgagaagagcttggctattgtggatgaggagctggaggggacactggcccagggagagctgaatgagatgaggacccgcctctatctcaacctgggcctcacctttgagagcctgcagcagacagccctgtgcaacgattacttcaggaagagcatcttccttgcggagcagaaccacctttacgaggacctattccgcgcccgctacaacctgggcaccatccactggcgcgcgggccagcactcccaggctatgcgctgcttggagggtgcccgggagtgtgcgcacaccatgaggaagcggttcatggagagcgagtgctgcgtggttattgcacaggtcctccaagacctgggagactttttggctgccaagcgagccctgaagaaggcctacaggctgggctcccagaagcctgtgcagagggcagccatctgtcagaacctccagcatgtgctggcagtggtccggctgcagcaacagctggaagaggctgagggcagagaccctcagggtgccatggtcatctgtgagcagctaggggacctcttctccaaggcaggagactttcccagggcagctgaggcttaccagaagcagctgcgttttgctgagctgctggacagaccgggtgctgagcgggccatcatccacgtgtccctggccaccacactgggagacatgaaggaccaccatggggccgtgcgccactatgaggaggaactgaggctgcgcagcggcaacgtgctggaggaggccaagacctggctgaacattgcactgtcccgcgaggaggccggcgatgcctacgagctgctggccccgtgcttccagaaagcgctcagctgtgcccagcaggcccagcgtccccagctgcagaggcaggtcttgcagcatctccataccgtgcagctgaggctgcagccccaggaggcccctgagaccgaaaccagactacgggagctcagtgtagctgaagatgaagatgaggaggaggaggcggaggaggcggcagccacagcggagagcgaagccctggaggccggcgaggtggagctctcagagggcgaggacgacaccgatggcctgaccccgcagctggaggaggacgaggagcttcagggccacctgggccggcggaaggggagcaagtggaaccggcgaaacgacatgggggagaccctgctgcaccgagcctgcatcgagggccagctgcgccgcgtccaggaccttgtgaggcagggccacccccttaaccctcgggactactgtggctggacacctctgcacgaggcctgcaactacgggcatctagaaattgtccgcttcctgctggaccacggggccgcagtggacgacccaggtggccagggctgcgaaggcatcacccccctccacgatgccctcaactgtggccacttcgaggtggctgagctgctgcttgaacggggggcgtccgtcaccctccgcactcgaaagggcctcagcccgctggagacgctgcagcagtgggtgaagctgtaccgcagggacctggacctggagacgcggcagaaggccagggccatggagatgctgctccaggcggctgcctcgggccaagatccccacagctcccaggccttccacaccccaagcagccttctgtttgaccccgagacctctcctcctttgagcccctgcccagaacccccctctaatagcactagactcccagaggcctctcaggcccatgtcagggtctccccagggcaggcggcaccagccatggccaggcctcggaggagcaggcatgggccagccagcagcagcagcagctcagaaggcgaggacagcgcaggccccgcacggccgtcccagaagaggcctcggtgctcggccacagcacaacgggtggcagcctggacgcctggccccgccagcaacagggaagcagccacagccagcaccagccgggcagcctaccaggcagccatccggggtgtgggcagtgctcagagccggctggggcctggcccaccgcggggccacagcaaagcccttgccccccaggcagcgctcatcccggaggaggagtgcctggccggggactggctggagctggacatgcccctgacccgcagccgccggccccgcccccggggcactggagacaaccgcaggcccagtagtacctctgggtcggacagtgaggagagcaggccccgtgcccgagccaagcaggtccgcctgacctgcatgcagagttgcagtgcgccagttaacgcagggcccagcagcctggcttcagaacctccagggagccccagcacccccagggtctcagagcccagtggggacagctctgcggcaggccagcccttgggtccggccccgccccctcccatccgggttcgagttcaagttcaggatcatctcttcctcatccctgtcccacacagcagtgacacccactctgtggcctggctggccgagcaggcggcccagcgctactaccagacctgcgggctgctgcccaggctcaccctacggaaagagggggccctgctggccccacaggacctcatccctgatgtgctgcagagcaatgacgaggtgttggctgaggtgacttcgtgggacctgcccccgttgactgaccgctaccgcagggcctgccagagcctggggcaaggggagcaccaacaggtgctgcaggccgtggagctccagggcttgggcctctcgttcagcgcctgctccctggccctggaccaggcccagcttacacccctgctgcgggccctcaagctgcacacagcactccgggagctgcgcctggcagggaaccggctgggggacaagtgtgtggctgagctggtggctgccctgggcaccatgcccagcctggccctccttgacctctcctccaatcacctgggtcccgaaggcctgcgccagcttgccatggggctcccaggccaagccaccttgcagagtttggaggagctggacttaagcatgaaccccctgggggacggctgtggccagtccctggcctccctcctgcacgcctgccccttactcagcaccctgcgcctgcaggcgtgtggcttcggccccagcttctttctgagccaccagacagcactgggtagtgctttccaagatgctgagcacctgaagaccctgtccctgtcctacaacgccctgggagcccctgccctggccaggaccctgcagagcctgcccgccggcaccctcctgcacttagagctcagctccgtggcagccggcaagggtgattcggacctcatggagcctgtattccgatacctggccaaggaaggctgtgctctagcccacctgaccctgtctgcaaaccacctgggggacaaggctgttagagacctgtgcagatgtctctctctgtgcccctcactcatctcactggatctgtctgccaaccctgagatcagctgtgccagcttggaagagctcctgtccaccctccaaaagcggccccaaggccttagcttccttggcctgtcaggctgcgccgtccagggtcccctgggcctgggcctgtgggacaagatagccgcgcagctccgggaactgcagctgtgcagcagacgcctctgcgctgaggacagggacgccctgcgccagctgcagcccagtcggccgggccccggcgagtgcacgctggaccacggctccaagctcttctttcggcgcctctgaccctggcgctgcctttccccaccctcaccgaagcccctaataaatgaagctgctggccgggcgcggtggctcacgcctgtaatcccaacactttgggaggcccaggcgggcggatcacgaggtcaggagatcgagaccatcctggctaacatggtgaaaccccgtctctactaaaaataccaaaaattagccgggcgtggtggtggaagcctgtagtcccagctactccggaggctgaggcaggagaatggcgtgaacccgggaggcggagcttgcagtgagccgagatcgcaccactgcactccagcctgggcgacagaccgagactccgtctcaaaaaaaaaaaaaaataaaataaatgaaaaaa

SEQ ID NO: 176506 - DNA, 4137 bp, Artificial Sequence
  derived and/or modified sequence
atgagcctggagagagagctgagacagctgagcaaggccaaggccaaggcccagagagccggccagagaagagaggaggccgccctgtgccaccagctgggcgagctgctggccggccacggcagatacgccgaggccctggagcagcactggcaggagctgcagctgagagagagagccgacgaccccctgggctgcgccgtggcccacagaaagatcggcgagagactggccgagatggaggactaccccgccgccctgcagcaccagcaccagtacctggagctggcccacagcctgagaaaccacaccgagctgcagagagcctgggccaccatcggcagaacccacctggacatctacgaccactgccagagcagagacgccctgctgcaggcccaggccgccttcgagaagagcctggccatcgtggacgaggagctggagggcaccctggcccagggcgagctgaacgagatgagaaccagactgtacctgaacctgggcctgaccttcgagagcctgcagcagaccgccctgtgcaacgactacttcagaaagagcatcttcctggccgagcagaaccacctgtacgaggacctgttcagagccagatacaacctgggcaccatccactggagagccggccagcacagccaggccatgagatgcctggagggcgccagagagtgcgcccacaccatgagaaagagattcatggagagcgagtgctgcgtggtgatcgcccaggtgctgcaggacctgggcgacttcctggccgccaagagagccctgaagaaggcctacagactgggcagccagaagcccgtgcagagagccgccatctgccagaacctgcagcacgtgctggccgtggtgagactgcagcagcagctggaggaggccgagggcagagacccccagggcgccatggtgatctgcgagcagctgggcgacctgttcagcaaggccggcgacttccccagagccgccgaggcctaccagaagcagctgagattcgccgagctgctggacagacccggcgccgagagagccatcatccacgtgagcctggccaccaccctgggcgacatgaaggaccaccacggcgccgtgagacactacgaggaggagctgagactgagaagcggcaacgtgctggaggaggccaagacctggctgaacatcgccctgagcagagaggaggccggcgacgcctacgagctgctggccccctgcttccagaaggccctgagctgcgcccagcaggcccagagaccccagctgcagagacaggtgctgcagcacctgcacaccgtgcagctgagactgcagccccaggaggcccccgagaccgagaccagactgagagagctgagcgtggccgaggacgaggacgaggaggaggaggccgaggaggccgccgccaccgccgagagcgaggccctggaggccggcgaggtggagctgagcgagggcgaggacgacaccgacggcctgaccccccagctggaggaggacgaggagctgcagggccacctgggcagaagaaagggcagcaagtggaacagaagaaacgacatgggcgagaccctgctgcacagagcctgcatcgagggccagctgagaagagtgcaggacctggtgagacagggccaccccctgaaccccagagactactgcggctggacccccctgcacgaggcctgcaactacggccacctggagatcgtgagattcctgctggaccacggcgccgccgtggacgaccccggcggccagggctgcgagggcatcacccccctgcacgacgccctgaactgcggccacttcgaggtggccgagctgctgctggagagaggcgccagcgtgaccctgagaaccagaaagggcctgagccccctggagaccctgcagcagtgggtgaagctgtacagaagagacctggacctggagaccagacagaaggccagagccatggagatgctgctgcaggccgccgccagcggccaggacccccacagcagccaggccttccacacccccagcagcctgctgttcgaccccgagaccagcccccccctgagcccctgccccgagccccccagcaacagcaccagactgcccgaggccagccaggcccacgtgagagtgagccccggccaggccgcccccgccatggccagacccagaagaagcagacacggccccgccagcagcagcagcagcagcgagggcgaggacagcgccggccccgccagacccagccagaagagacccagatgcagcgccaccgcccagagagtggccgcctggacccccggccccgccagcaacagagaggccgccaccgccagcaccagcagagccgcctaccaggccgccatcagaggcgtgggcagcgcccagagcagactgggccccggcccccccagaggccacagcaaggccctggccccccaggccgccctgatccccgaggaggagtgcctggccggcgactggctggagctggacatgcccctgaccagaagcagaagacccagacccagaggcaccggcgacaacagaagacccagcagcaccagcggcagcgacagcgaggagagcagacccagagccagagccaagcaggtgagactgacctgcatgcagagctgcagcgcccccgtgaacgccggccccagcagcctggccagcgagccccccggcagccccagcacccccagagtgagcgagcccagcggcgacagcagcgccgccggccagcccctgggccccgccccccccccccccatcagagtgagagtgcaggtgcaggaccacctgttcctgatccccgtgccccacagcagcgacacccacagcgtggcctggctggccgagcaggccgcccagagatactaccagacctgcggcctgctgcccagactgaccctgagaaaggagggcgccctgctggccccccaggacctgatccccgacgtgctgcagagcaacgacgaggtgctggccgaggtgaccagctgggacctgccccccctgaccgacagatacagaagagcctgccagagcctgggccagggcgagcaccagcaggtgctgcaggccgtggagctgcagggcctgggcctgagcttcagcgcctgcagcctggccctggaccaggcccagctgacccccctgctgagagccctgaagctgcacaccgccctgagagagctgagactggccggcaacagactgggcgacaagtgcgtggccgagctggtggccgccctgggcaccatgcccagcctggccctgctggacctgagcagcaaccacctgggccccgagggcctgagacagctggccatgggcctgcccggccaggccaccctgcagagcctggaggagctggacctgagcatgaaccccctgggcgacggctgcggccagagcctggccagcctgctgcacgcctgccccctgctgagcaccctgagactgcaggcctgcggcttcggccccagcttcttcctgagccaccagaccgccctgggcagcgccttccaggacgccgagcacctgaagaccctgagcctgagctacaacgccctgggcgcccccgccctggccagaaccctgcagagcctgcccgccggcaccctgctgcacctggagctgagcagcgtggccgccggcaagggcgacagcgacctgatggagcccgtgttcagatacctggccaaggagggctgcgccctggcccacctgaccctgagcgccaaccacctgggcgacaaggccgtgagagacctgtgcagatgcctgagcctgtgccccagcctgatcagcctggacctgagcgccaaccccgagatcagctgcgccagcctggaggagctgctgagcaccctgcagaagagaccccagggcctgagcttcctgggcctgagcggctgcgccgtgcagggccccctgggcctgggcctgtgggacaagatcgccgcccagctgagagagctgcagctgtgcagcagaagactgtgcgccgaggacagagacgccctgagacagctgcagcccagcagacccggccccggcgagtgcaccctggaccacggcagcaagctgttcttcagaagactgtag

SEQ ID NO: 176507 - DNA, 4134 bp, Artificial Sequence
  derived and/or modified sequence
atgagcctggagagagagctgagacagctgagcaaggccaaggccaaggcccagagagccggccagagaagagaggaggccgccctgtgccaccagctgggcgagctgctggccggccacggcagatacgccgaggccctggagcagcactggcaggagctgcagctgagagagagagccgacgaccccctgggctgcgccgtggcccacagaaagatcggcgagagactggccgagatggaggactaccccgccgccctgcagcaccagcaccagtacctggagctggcccacagcctgagaaaccacaccgagctgcagagagcctgggccaccatcggcagaacccacctggacatctacgaccactgccagagcagagacgccctgctgcaggcccaggccgccttcgagaagagcctggccatcgtggacgaggagctggagggcaccctggcccagggcgagctgaacgagatgagaaccagactgtacctgaacctgggcctgaccttcgagagcctgcagcagaccgccctgtgcaacgactacttcagaaagagcatcttcctggccgagcagaaccacctgtacgaggacctgttcagagccagatacaacctgggcaccatccactggagagccggccagcacagccaggccatgagatgcctggagggcgccagagagtgcgcccacaccatgagaaagagattcatggagagcgagtgctgcgtggtgatcgcccaggtgctgcaggacctgggcgacttcctggccgccaagagagccctgaagaaggcctacagactgggcagccagaagcccgtgcagagagccgccatctgccagaacctgcagcacgtgctggccgtggtgagactgcagcagcagctggaggaggccgagggcagagacccccagggcgccatggtgatctgcgagcagctgggcgacctgttcagcaaggccggcgacttccccagagccgccgaggcctaccagaagcagctgagattcgccgagctgctggacagacccggcgccgagagagccatcatccacgtgagcctggccaccaccctgggcgacatgaaggaccaccacggcgccgtgagacactacgaggaggagctgagactgagaagcggcaacgtgctggaggaggccaagacctggctgaacatcgccctgagcagagaggaggccggcgacgcctacgagctgctggccccctgcttccagaaggccctgagctgcgcccagcaggcccagagaccccagctgcagagacaggtgctgcagcacctgcacaccgtgcagctgagactgcagccccaggaggcccccgagaccgagaccagactgagagagctgagcgtggccgaggacgaggacgaggaggaggaggccgaggaggccgccgccaccgccgagagcgaggccctggaggccggcgaggtggagctgagcgagggcgaggacgacaccgacggcctgaccccccagctggaggaggacgaggagctgcagggccacctgggcagaagaaagggcagcaagtggaacagaagaaacgacatgggcgagaccctgctgcacagagcctgcatcgagggccagctgagaagagtgcaggacctggtgagacagggccaccccctgaaccccagagactactgcggctggacccccctgcacgaggcctgcaactacggccacctggagatcgtgagattcctgctggaccacggcgccgccgtggacgaccccggcggccagggctgcgagggcatcacccccctgcacgacgccctgaactgcggccacttcgaggtggccgagctgctgctggagagaggcgccagcgtgaccctgagaaccagaaaggccagcgccagatggagaagatgcagcagcggcaagctgtacagaagagacctggacctggagaccagacagaaggccagagccatggagatgctgctgcaggccgccgccagcggccaggacccccacagcagccaggccttccacacccccagcagcctgctgttcgaccccgagaccagcccccccctgagcccctgccccgagccccccagcaacagcaccagactgcccgaggccagccaggcccacgtgagagtgagccccggccaggccgcccccgccatggccagacccagaagaagcagacacggccccgccagcagcagcagcagcagcgagggcgaggacagcgccggccccgccagacccagccagaagagacccagatgcagcgccaccgcccagagagtggccgcctggacccccggccccgccagcaacagagaggccgccaccgccagcaccagcagagccgcctaccaggccgccatcagaggcgtgggcagcgcccagagcagactgggccccggcccccccagaggccacagcaaggccctggccccccaggccgccctgatccccgaggaggagtgcctggccggcgactggctggagctggacatgcccctgaccagaagcagaagacccagacccagaggcaccggcgacaacagaagacccagcagcaccagcggcagcgacagcgaggagagcagacccagagccagagccaagcaggtgagactgacctgcatgcagagctgcagcgcccccgtgaacgccggccccagcagcctggccagcgagccccccggcagccccagcacccccagagtgagcgagcccagcggcgacagcagcgccgccggccagcccctgggccccgccccccccccccccatcagagtgagagtgcaggtgcaggaccacctgttcctgatccccgtgccccacagcagcgacacccacagcgtggcctggctggccgagcaggccgcccagagatactaccagacctgcggcctgctgcccagactgaccctgagaaaggagggcgccctgctggccccccaggacctgatccccgacgtgctgcagagcaacgacgaggtgctggccgaggtgaccagctgggacctgccccccctgaccgacagatacagaagagcctgccagagcctgggccagggcgagcaccagcaggtgctgcaggccgtggagctgcagggcctgggcctgagcttcagcgcctgcagcctggccctggaccaggcccagctgacccccctgctgagagccctgaagctgcacaccgccctgagagagctgagactggccggcaacagactgggcgacaagtgcgtggccgagctggtggccgccctgggcaccatgcccagcctggccctgctggacctgagcagcaaccacctgggccccgagggcctgagacagctggccatgggcctgcccggccaggccaccctgcagagcctggaggagctggacctgagcatgaaccccctgggcgacggctgcggccagagcctggccagcctgctgcacgcctgccccctgctgagcaccctgagactgcaggcctgcggcttcggccccagcttcttcctgagccaccagaccgccctgggcagcgccttccaggacgccgagcacctgaagaccctgagcctgagctacaacgccctgggcgcccccgccctggccagaaccctgcagagcctgcccgccggcaccctgctgcacctggagctgagcagcgtggccgccggcaagggcgacagcgacctgatggagcccgtgttcagatacctggccaaggagggctgcgccctggcccacctgaccctgagcgccaaccacctgggcgacaaggccgtgagagacctgtgcagatgcctgagcctgtgccccagcctgatcagcctggacctgagcgccaaccccgagatcagctgcgccagcctggaggagctgctgagcaccctgcagaagagaccccagggcctgagcttcctgggcctgagcggctgcgccgtgcagggccccctgggcctgggcctgtgggacaagatcgccgcccagctgagagagctgcagctgtgcagcagaagactgtgcgccgaggacagagacgccctgagacagctgcagcccagcagacccggccccggcgagtgcaccctggaccacggcagcaagctgttcttcagaagactgtag

SEQ ID NO: 176508 - DNA, 4137 bp, Artificial Sequence
  derived and/or modified sequence
atgtccttggagcgcgagctccggcagttgtccaaagccaaggctaaagctcagcgcgctggtcagagacgggaggaggcggctctttgtcaccagcttggtgaattgctggcaggccacggaagatatgccgaagctctggagcagcattggcaagaactgcagctccgcgagagagccgatgatccactgggatgcgccgttgcccaccgaaaaattggggaacgtctggcagaaatggaggactaccccgccgctctgcagcatcagcaccaatatctcgagcttgcacactccctgcggaaccataccgaactccagagggcatgggcaacgatcgggagaacacacctggatatttacgatcactgccagtccagggacgctctcctccaggcacaggcagcatttgaaaagagcctcgctattgtggacgaggagctcgaaggtaccctggctcagggggaactcaatgaaatgcggactcggttataccttaacctgggactgacattcgaatcgttgcagcagaccgctctgtgtaatgattattttcggaaatcaatttttctggccgaacagaaccacctgtatgaagacctgtttagagcacgctataaccttggaactatacattggagagccggccagcattcccaggccatgcggtgcttagaaggtgcccgcgaatgtgctcacaccatgcggaagagatttatggaaagtgaatgttgtgttgtcatcgcccaggtcttgcaggatctgggggacttcctcgcagcgaaaagagccttaaagaaggcttatagactggggtcccagaagcctgttcagcgcgctgcaatctgtcaaaatctgcagcatgttctcgctgtggtgagattacagcagcagctcgaggaagctgaagggcgagaccctcagggggccatggtgatctgcgaacagctgggggatcttttctccaaggcaggtgactttcctcgtgcagcggaagcttaccagaaacagctccggttcgcagagctgcttgatcgtccgggcgctgagagagccattatccatgtgagtctggccactaccctgggggacatgaaggaccaccacggggccgtgaggcactatgaggaagaactacgattgcgatccggcaacgtgctggaggaagctaagacatggttaaacattgctttgtcgcgggaagaagccggcgatgcttacgaactgctggccccatgcttccagaaagctttaagttgcgctcagcaagcacagaggccacaactgcagcgacaagtcctacaacatctgcacacggtgcagctccgactgcagccgcaggaagccccagagacggagacgaggcttcgggaactttccgtggccgaggacgaagatgaagaagaggaggcggaggaagctgccgccaccgccgaatcggaggccctggaagcgggagaggtagagctgtctgaaggagaagacgacaccgacggcttaaccccccaactcgaggaagatgaggagctccagggccacctggggcgccgcaaggggagtaaatggaataggcgtaacgacatgggtgagactctgctccaccgggcgtgcattgaaggtcagctccgccgggttcaggatctggtgcggcaaggtcatcccctcaatcccagggattactgcgggtggacacctctccacgaggcatgcaattatggccaccttgagatcgtccggtttctgctagatcatggagccgcagtggatgaccccggggggcaagggtgcgaagggatcacaccccttcatgatgctctgaactgcggccactttgaagtggctgaattactcctagagcgcggagcaagtgtgacattgagaacccggaaaggcctcagccctctcgaaacactccagcagtgggtgaagctgtaccgccgggatctcgacctggaaacacggcagaaggctagagctatggagatgctccttcaggccgccgcctccggtcaggatcctcactcttcacaggccttccataccccatcatctctgcttttcgatccagagacgagcccccctctgtctccctgtcccgaacccccgtctaactcaaccagactccctgaggctagccaggctcatgtgagggtgtccccagggcaggctgctcccgcaatggccaggccacgcagaagccgacatggcccagccagctcctcgtcttcaagtgaaggtgaggatagcgcaggaccagcgagaccaagccaaaaaaggcctcggtgctccgctacggcacagcgggtggcggcttggactcccggcccagcctccaatagggaggctgccactgcgagtactagtagagctgcctaccaagccgccatccgcggtgtcggttcagcacagagtcgactgggcccgggtccaccgcggggacacagtaaggcgcttgccccacaagccgccttgattcctgaggaggagtgtctggcgggcgactggctggagctggacatgcccttaacacgctccaggcgacctcgcccgcgaggtactggtgataaccgaagaccctcaagtacctcaggctccgattccgaagaatcacgccctcgcgcaagagccaagcaagttcggctgacatgcatgcagtcttgctccgcacccgtgaacgcagggccttcgagcctggccagcgaaccgcccggcagccctagcaccccaagggtttccgagccatctggtgactctagtgccgcaggacagcccttggggcctgccccacctcccccgatacgagtgagggtgcaagtacaggatcacctttttttgatccccgtgccacattcaagtgacactcactcagtcgcttggctagcagaacaagcagcccagcggtattatcagacgtgtggactccttcccaggctgaccctgcgaaaagaaggagctcttcttgccccacaagacctgattcctgacgttctgcagtcaaacgacgaagtgctcgctgaggtgacctcctgggacctgcccccgctcacagaccgttatagacgtgcatgtcagtcacttggtcaaggggaacaccagcaggtgctgcaagcagtagagttgcagggattgggtttgtccttcagcgcatgttcactagcgcttgaccaggcccagttgactccactgttacgagccctgaaactgcacactgccctcagggagcttcgtctggcgggtaaccgtctgggcgacaaatgcgtggctgagctagtggccgcgcttggaacaatgccctccttagcccttcttgatctgtcttccaatcacctcggcccagaaggcctgagacagctggccatgggtctccctggccaggccacactacagtccctggaagagctcgacctgtctatgaatcccctcggagatggatgcggccagtccctggcctccctactgcacgcctgccccctcctaagcacgctcaggctccaggcatgtggcttcggcccatcgttctttctatcacatcaaaccgcccttggcagtgcgtttcaggacgctgagcacctaaagacactcagtctcagctataacgccttaggcgccccagcactagcccgcacccttcagtccttacccgctggtaccctgttgcacctggagctttcctccgtggcggcaggaaaaggagacagtgacctcatggagcctgtctttcgttatctggcaaaggaggggtgtgcactggcacatctgacactttcggcaaatcatctgggagacaaggccgtgcgggacctctgtcgatgtctctcgttgtgcccttctctgatcagcctggacctcagcgctaacccagagataagctgtgcctctcttgaagagctgctcagtacattgcaaaagcggccccagggacttagtttcctggggctgagcggctgtgcggtccaaggtccactggggctcggtctgtgggataaaattgctgcccagctcagggagctgcaactgtgctcgagacggctgtgcgcggaggatagggatgccctgagacaactgcaaccatcccgccccggaccaggggagtgcacgctcgaccacggaagcaagctgttttttcggaggctttag

SEQ ID NO: 176509 - DNA, 4134 bp, Artificial Sequence
  derived and/or modified sequence
atgtctctcgaacgtgagctgcggcagctcagcaaggccaaggctaaggcgcagcgcgccggccagaggcgtgaggaagcggctctgtgtcaccagctcggtgagctgttagctggacacggacgctacgccgaggctttggagcagcactggcaagagctgcagctaagggagagggccgatgatcctctgggttgcgccgtggcccatagaaagatcggggaacgcctcgccgaaatggaagactacccagctgcgttgcagcaccagcaccagtatctggaactagctcattctctgcgcaatcataccgagctccagcgagcgtgggcaaccatcggaaggacacacttggatatctatgaccattgccagtcccgagatgcattgctccaagcacaggctgcctttgaaaagtcactagccatcgttgatgaagaactggaagggacattagctcagggcgagctcaacgaaatgcggaccaggctctacctgaatctggggctgacattcgaatcactgcaacagaccgccctgtgtaatgattattttcgcaagagcatttttcttgctgaacaaaatcacctgtatgaggacctttttcgggcaaggtacaatttgggcacaatacactggagagctggacagcattcacaggcaatgagatgtctggagggcgccagagagtgcgcacatacaatgaggaagcgtttcatggagtctgagtgttgtgttgtgatagctcaggtgttgcaggatctgggagattttctggccgccaagcgggctctgaaaaaggcatatcggttaggatcgcagaagccagttcagcgggctgccatctgccagaatctacagcatgtgctggccgtggtccgcctgcagcagcagctggaggaggccgaggggcgagatccccaaggcgctatggttatctgcgagcagctgggggatctttttagtaaggctggtgattttcctagggcagctgaagcataccagaaacagctacgctttgccgaactgctcgacaggcctggagcagaacgagccattatccatgtgtccttggcgaccacattgggcgacatgaaggatcaccacggagcagttcgccattacgaagaggagcttcgccttcggagtggaaacgtgttagaagaggccaaaacatggctgaacattgctctgagtagggaagaggctggagatgcctacgagctccttgctccttgctttcagaaagcactgtcctgtgcccagcaagctcagcggccacagcttcaacggcaggtgctgcagcatctccacaccgtccagctgcgactgcaaccgcaggaagcccccgaaacagaaacacgcctgagagagcttagcgtggcagaggacgaggacgaagaggaggaggcggaggaggcggcagccactgcggagagtgaggccctggaggctggggaggtagaactaagtgagggcgaggatgacactgatggcctcacaccacagctggaggaggatgaggagctgcagggacacctaggccggcgaaagggctctaagtggaataggcgcaatgacatgggggagacactgctccaccgtgcctgcattgaagggcaactcagacgggtgcaggacctggtgagacagggccatccactgaatcccagggattactgtggatggactcctctgcacgaggcatgcaattatggacatcttgagattgttcgctttctgctcgatcatggagccgcggtggacgatcctggtggacagggttgtgaaggaatcacccccttgcacgatgcccttaactgtggtcactttgaggtcgcagaactgctgctggagcgcggtgcttcagtgacattgcggactagaaaggcaagcgccagatggaggcggtgctcttccgggaagctgtataggagagatcttgacctggaaacccggcagaaggctagagctatggagatgctcctgcaggccgcagccagtggtcaagatccccactcatcccaggcattccacacgccaagctcactgctcttcgatcccgaaacgtcaccgccactatctccttgtcctgaacctccgtctaattctaccaggctgcccgaagcgtcacaggctcacgtccgggtgagccccggacaagctgcaccagcaatggcaaggcctcgccgtagtcgtcacggtccagcctcctcgagctctagctcagagggggaggactctgcaggcccagcgcggccaagccaaaagcggccccggtgctcggccactgctcaacgagtggccgcctggacaccaggccctgcttctaatcgagaagcagctactgcaagcacatcaagagccgcctatcaagcggccatccgaggtgtggggtcggcccagtcacggctgggccctggtcccccacgcggacatagtaaggccctggcaccacaggctgccctcatccccgaggaggaatgcctagccggagattggctagaactggatatgcctttgacccgtagcaggagacctcgaccacgagggacaggagataatagacggccaagcagtaccagcggctcagactccgaagaatctcgcccacgggcgcgtgctaagcaggtacgcctgacttgtatgcaatcttgttctgcgccagtgaatgccggacccagctccttagcttcagagccacccggctcaccctccacacctcgagtctctgagccctctggggattctagcgctgccggacagccattgggacctgccccacctccacctatcagggtgcgtgtgcaagttcaggaccacctgtttttgattccggtccctcacagtagtgacacgcatagcgtggcatggctcgccgagcaggccgcccagagatactaccaaacgtgtgggcttttaccccggctgacgttgcgtaaggaaggcgcgctgctcgcacctcaggatctgatacctgacgtgcttcagtctaacgacgaggtattggctgaggttacgtcttgggatttgcccccgcttacagacagatataggagggcctgtcagagcctggggcagggggagcaccaacaggtgctccaagctgtagagctgcaggggctcggcctctcgttcagtgcctgttctcttgccttggaccaagcacaacttacacccctgcttagagctctgaaactgcacacagcattgagagagctccgccttgcaggaaaccggttgggcgacaagtgtgtcgccgagcttgtcgcagctttggggacaatgccaagcctggcgttgctcgatctgagcagtaaccaccttggacccgagggactccgtcagttagccatgggcctgcccggccaggccacgttgcagtctctggaggagctggatctctctatgaatccactcggggatggctgcggccaaagcctggcttctttactgcatgcctgccccctcctgtccacacttcggcttcaggcctgcggctttggtccgagctttttcctgagccaccagacggccctgggctctgcctttcaggacgccgaacatctgaaaacgctgtccctgtcctacaatgccctcggtgccccagctctggcccggacgctccagtcccttccagcggggaccctgttgcatctcgagctgagtagtgtggctgctggtaagggggatagcgacctcatggagcctgtgttccggtatcttgccaaggaaggctgtgcacttgcgcacctcactctgtccgccaaccaccttggcgataaagctgtccgcgatctgtgtcggtgccttagtctctgcccgagcctgattagcctagatctgtctgcgaaccctgagatatcatgcgcctccctggaggagttgctctccactttgcagaagcgaccccaggggctgtcttttcttggcctgagcggttgcgccgtccagggaccattaggcctgggcctgtgggataaaattgcagcccagctccgggagctacagctttgctcaagacgcctctgtgcagaagatcgggatgcactccgacaactacagccctcacgaccgggacctggggaatgcacgctggaccatggttccaagctcttcttccgaaggttatag

SEQ ID NO: 176510 - DNA, 4137 bp, Artificial Sequence
  derived and/or modified sequence
atgagcctggagcgggagctgcggcagctgagcaaggccaaggccaaggcccagagagctggccagaggcgggaggaggccgccctgtgccaccagctgggggagctgctggccggccacggccgctatgcagaggccctggagcagcactggcaggagctgcagctgcgggagcgggcagatgaccccctgggctgtgctgtggcccacaggaagattggagagcggctggccgagatggaggactacccagctgccctgcagcaccagcaccagtacctggagctggcccacagcctgaggaaccacacagagctgcagagggcctgggccaccatcggccgcacccacctggacatctatgaccactgccagagcagagatgccctgctgcaggcccaggccgcctttgagaagagcctggccatcgtggatgaggagctggagggcaccctggcccagggcgagctgaatgagatgaggacccggctgtacctgaacctgggcctgacctttgagagcctgcagcagacagccctgtgcaatgactacttcaggaagagcatcttcctggccgagcagaaccacctgtatgaagatctcttccgggcccgctacaacctgggcaccatccactggagggctggccagcacagccaggccatgcgctgcctggagggcgcccgggagtgtgcccacaccatgaggaagcgcttcatggagagcgagtgctgcgtggtgattgcccaggtgctgcaggacctgggggacttcctggccgccaagagggccctgaagaaggcctaccgcctgggcagccagaagcctgtgcagagagctgccatctgccagaacctgcagcacgtgctggccgtggtgcggctgcagcagcagctggaggaggccgagggccgggacccccagggcgccatggtgatctgtgagcagctgggggacctcttcagcaaggccggggacttccccagggctgctgaggcctaccagaagcagctgcgctttgctgagctgctggacaggcctggagctgagcgggccatcatccacgtgtccctggccaccaccctgggggacatgaaggaccaccacggggctgtgcgccactatgaggaggagctgcggctgcggtctggaaatgtgctggaggaggccaagacctggctgaacatcgccctgagccgggaggaggccggagatgcctatgagctgctggccccctgcttccagaaggccctgagctgtgcccagcaggcccagaggccccagctgcagaggcaggtgctgcagcacctgcacacagtgcagctgcggctgcagccccaggaggcccctgagacagagacccggctgcgggagctgtctgtggctgaagatgaagatgaggaggaggaggccgaggaggccgccgccacagctgagagcgaggccctggaggccggggaggtggagctgtctgagggggaggatgacacagatggcctgaccccccagctggaggaggatgaggagctgcagggccacctgggccgcaggaagggcagcaagtggaacagaagaaatgacatgggagagaccctgctgcaccgggcctgcatcgagggccagctgcggcgggtgcaggacctggtgcggcagggccaccccctgaacccccgggactactgcggctggacccccctgcacgaggcctgcaactacggccacctggagatcgtgcgcttcctgctggaccacggggctgctgtggatgatcctgggggccagggctgtgagggcatcacccccctgcatgatgccctgaactgtggccactttgaggtggccgagctgctgctggagcggggggcctctgtgaccctgcggaccaggaagggcctgagccccctggagaccctgcagcagtgggtgaagctgtaccgccgggacctggacctggagacccggcagaaggcccgggccatggagatgctgctgcaggccgccgccagcggccaggacccccacagcagccaggccttccacacccccagcagcctgctgtttgatcctgagaccagcccccccctgagcccctgcccagagccccccagcaacagcacccggctgcctgaggccagccaggcccacgtgcgggtgtccccaggccaggccgccccagccatggcccggcccaggaggagcagacatggccctgccagcagcagcagcagcagtgaaggagaagattctgctggccctgcccggcccagccagaagaggccccgctgcagcgccacagcccagagggtggccgcctggaccccaggccctgccagcaaccgggaggccgccacagccagcaccagccgggccgcctaccaggccgccatccggggcgtgggcagcgcccagagccggctgggccctggccccccccggggccacagcaaggccctggccccccaggccgccctgatccctgaggaggagtgcctggccggggactggctggagctggacatgcccctgaccaggagccggcggccccggccccggggcactggagacaacagaagacccagcagcaccagcggcagtgacagcgaggagagccggccccgggcccgggccaagcaggtgcggctgacctgcatgcagagctgcagcgcccctgtgaatgccggccccagcagcctggccagcgagcccccaggcagccccagcaccccccgggtgtctgagcccagcggggacagcagcgctgctggccagcccctgggccctgcccctcctccacccatccgggtgcgggtgcaggtgcaggaccacctgttcctgatccctgtgccccacagcagtgacacccacagcgtggcctggctggccgagcaggccgcccagcgctactaccagacctgtggcctgctgccccggctgaccctgaggaaggagggcgccctgctggccccccaggacctgatcccagatgtgctgcagagcaatgatgaggtgctggccgaggtgacctcctgggacctgccccccctgacagaccgctaccgccgggcctgccagagcctgggccagggcgagcaccagcaggtgctgcaggccgtggagctgcagggcctgggcctgtccttcagcgcctgcagcctggccctggaccaggcccagctgacccccctgctgcgggccctgaagctgcacacagccctgcgggagctgcggctggccggcaaccggctgggggacaagtgtgtggccgagctggtggccgccctgggcaccatgcccagcctggccctgctggacctgagcagcaaccacctgggccctgagggcctgcggcagctggccatgggcctgcccggccaggccaccctgcagagcctggaggagctggacctgtccatgaaccccctgggagatggctgcggccagagcctggccagcctgctgcacgcctgccccctgctgagcaccctgcggctgcaggcctgtggcttcggccccagcttcttcctgagccaccagacagccctgggcagcgccttccaggatgctgagcacctgaagaccctgagcctgagctacaatgccctgggcgccccagccctggcccggaccctgcagagcctgcctgctggcaccctgctgcacctggagctgagctctgtggccgccggcaagggggacagcgacctgatggagcccgtcttccgctacctggccaaggagggctgtgccctggcccacctgaccctgagcgccaaccacctgggggacaaggctgtgcgggacctgtgccgctgcctgagcctgtgccccagcctcatcagcctggacctgagcgccaaccctgagatcagctgtgccagcctggaggagctgctgagcaccctgcagaagaggccccagggcctgtccttcctgggcctgagcggctgtgctgtgcagggccccctgggcctgggcctgtgggacaagattgctgcccagctgcgggagctgcagctgtgcagccggcggctgtgtgctgaagatagagatgccctgcggcagctgcagcccagccggcccggccctggagagtgcaccctggaccacggcagcaagctgttcttccggcggctgtag

SEQ ID NO: 176511 - DNA, 4134 bp, Artificial Sequence
  derived and/or modified sequence
atgagcctggagcgggagctgcggcagctgagcaaggccaaggccaaggcccagagagctggccagaggcgggaggaggccgccctgtgccaccagctgggggagctgctggccggccacggccgctatgcagaggccctggagcagcactggcaggagctgcagctgcgggagcgggcagatgaccccctgggctgtgctgtggcccacaggaagattggagagcggctggccgagatggaggactacccagctgccctgcagcaccagcaccagtacctggagctggcccacagcctgaggaaccacacagagctgcagagggcctgggccaccatcggccgcacccacctggacatctatgaccactgccagagcagagatgccctgctgcaggcccaggccgcctttgagaagagcctggccatcgtggatgaggagctggagggcaccctggcccagggcgagctgaatgagatgaggacccggctgtacctgaacctgggcctgacctttgagagcctgcagcagacagccctgtgcaatgactacttcaggaagagcatcttcctggccgagcagaaccacctgtatgaagatctcttccgggcccgctacaacctgggcaccatccactggagggctggccagcacagccaggccatgcgctgcctggagggcgcccgggagtgtgcccacaccatgaggaagcgcttcatggagagcgagtgctgcgtggtgattgcccaggtgctgcaggacctgggggacttcctggccgccaagagggccctgaagaaggcctaccgcctgggcagccagaagcctgtgcagagagctgccatctgccagaacctgcagcacgtgctggccgtggtgcggctgcagcagcagctggaggaggccgagggccgggacccccagggcgccatggtgatctgtgagcagctgggggacctcttcagcaaggccggggacttccccagggctgctgaggcctaccagaagcagctgcgctttgctgagctgctggacaggcctggagctgagcgggccatcatccacgtgtccctggccaccaccctgggggacatgaaggaccaccacggggctgtgcgccactatgaggaggagctgcggctgcggtctggaaatgtgctggaggaggccaagacctggctgaacatcgccctgagccgggaggaggccggagatgcctatgagctgctggccccctgcttccagaaggccctgagctgtgcccagcaggcccagaggccccagctgcagaggcaggtgctgcagcacctgcacacagtgcagctgcggctgcagccccaggaggcccctgagacagagacccggctgcgggagctgtctgtggctgaagatgaagatgaggaggaggaggccgaggaggccgccgccacagctgagagcgaggccctggaggccggggaggtggagctgtctgagggggaggatgacacagatggcctgaccccccagctggaggaggatgaggagctgcagggccacctgggccgcaggaagggcagcaagtggaacagaagaaatgacatgggagagaccctgctgcaccgggcctgcatcgagggccagctgcggcgggtgcaggacctggtgcggcagggccaccccctgaacccccgggactactgcggctggacccccctgcacgaggcctgcaactacggccacctggagatcgtgcgcttcctgctggaccacggggctgctgtggatgatcctgggggccagggctgtgagggcatcacccccctgcatgatgccctgaactgtggccactttgaggtggccgagctgctgctggagcggggggcctctgtgaccctgcggaccaggaaggccagcgcccgctggaggcgctgcagcagcggcaagctgtacagaagagacctggacctggagacccggcagaaggcccgggccatggagatgctgctgcaggccgccgccagcggccaggacccccacagcagccaggccttccacacccccagcagcctgctgtttgatcctgagaccagcccccccctgagcccctgcccagagccccccagcaacagcacccggctgcctgaggccagccaggcccacgtgcgggtgtccccaggccaggccgccccagccatggcccggccccggcgcagccgccacggccctgccagcagcagcagcagcagcgagggggaggacagcgctggccctgcccggcccagccagaagaggccccgctgcagcgccacagcccagagggtggccgcctggaccccaggccctgccagcaaccgggaggccgccacagccagcaccagcagagctgcctaccaggccgccatccggggcgtgggcagcgcccagagccggctgggccctggccccccccggggccacagcaaggccctggccccccaggccgccctgatccctgaggaggagtgcctggccggggactggctggagctggacatgcccctgaccaggagcagaagaccccggccccggggcaccggggacaacagaagacccagcagcaccagcggcagtgacagcgaggagagccggccccgggcccgggccaagcaggtgcggctgacctgcatgcagagctgcagcgcccctgtgaatgccggccccagcagcctggccagcgagcccccaggcagccccagcaccccccgggtgtctgagcccagcggggacagcagcgctgctggccagcccctgggccctgcccctcctccacccatccgggtgcgggtgcaggtgcaggaccacctgttcctgatccctgtgccccacagcagtgacacccacagcgtggcctggctggccgagcaggccgcccagcgctactaccagacctgtggcctgctgccccggctgaccctgaggaaggagggcgccctgctggccccccaggacctgatcccagatgtgctgcagagcaatgatgaggtgctggccgaggtgacctcctgggacctgccccccctgacagaccgctacagaagagcctgccagagcctgggccagggcgagcaccagcaggtgctgcaggccgtggagctgcagggcctgggcctgtccttcagcgcctgcagcctggccctggaccaggcccagctgacccccctgctgcgggccctgaagctgcacacagccctgcgggagctgcggctggccggcaaccggctgggggacaagtgtgtggccgagctggtggccgccctgggcaccatgcccagcctggccctgctggacctgagcagcaaccacctgggccctgagggcctgcggcagctggccatgggcctgcccggccaggccaccctgcagagcctggaggagctggacctgtccatgaaccccctgggagatggctgcggccagagcctggccagcctgctgcacgcctgccccctgctgagcaccctgcggctgcaggcctgtggcttcggccccagcttcttcctgagccaccagacagccctgggcagcgccttccaggatgctgagcacctgaagaccctgagcctgagctacaatgccctgggcgccccagccctggcccggaccctgcagagcctgcctgctggcaccctgctgcacctggagctgagctctgtggccgccgggaaaggagacagcgacctgatggagcctgtgttccgctacctggccaaggagggctgtgccctggcccacctgaccctgagcgccaaccacctgggggacaaggctgtgcgggacctgtgccgctgcctgagcctgtgccccagcctcatcagcctggacctgagcgccaaccctgagatcagctgtgccagcctggaggagctgctgagcaccctgcagaagaggccccagggcctgtccttcctgggcctgagcggctgtgctgtgcagggccccctgggcctgggcctgtgggacaagattgctgcccagctgcgggagctgcagctgtgcagccggcggctgtgtgccgaggacagagatgccctgcggcagctgcagcccagcaggcctggccctggagaatgtaccctggaccacggcagcaagctgttcttccggcggctgtag

SEQ ID NO: 176512 - DNA, 4137 bp, Artificial Sequence
  derived and/or modified sequence
atgagcctggagcgggagctgcggcagctgagcaaggccaaggccaaggcgcaacgcgcagggcaaaggagagaggaagctgcactgtgccaccagcttggggagctacttgctggccatggacgttacgcagaagctctcgagcaacactggcaggagctgcagctgcgggaacgggctgatgaccctctgggctgtgccgtggcacacagaaagatcggggaacgcctggcggagatggaagattatcccgctgctcttcagcaccagcatcagtacctcgagcttgcccactccctgcgtaaccataccgaactacagcgggcatgggccaccatcggcaggactcacctggacatttatgatcactgccaatccagggacgcgcttctgcaggcccaagccgctttcgagaaatcattggcgatcgtggatgaagagctggagggcacactggcacaaggggagttgaacgaaatgaggactaggctgtatctcaacctgggcctgacctttgaatcacttcagcagacagccttatgcaacgattacttccgcaagagcatatttttggctgaacagaaccatctgtacgaagacttgttcagggccagatacaatttaggaactatccactggcgcgctggacagcatagtcaggccatgaggtgtttggagggcgctcgcgagtgtgcccacaccatgaggaagagattcatggagtcagaatgttgtgtagtgattgctcaggtgttgcaggatctgggtgactttctggccgcaaagcgagctctgaaaaaggcctaccgcctggggtcacaaaagcctgtgcagcgcgccgccatatgtcagaacctgcaacacgtcctggccgtggtgcggctccagcagcaactagaagaggcagaaggaagggatccccagggggccatggtaatttgcgagcagctgggcgatctgttctcaaaagccggcgacttccctcgcgctgcggaggcctaccagaaacagcttcggttcgctgagctgttggaccgccccggagctgaaagggccatcattcatgtctctctagcgaccacgctgggcgacatgaaggatcaccacggggccgtcagacattacgaagaagagctgaggttacgctcaggcaatgtgctcgaagaggcaaaaacctggttaaacatcgccctctccagggaggaggcaggtgacgcatacgagctactcgccccctgtttccagaaggccctctcttgcgcacagcaagcccagcggcctcagttgcagcggcaggtcctgcagcatctgcacaccgttcagctgagacttcaacctcaggaggctcccgaaacagaaacgagactgcgtgaactgtcagtggccgaggacgaggacgaagaggaggaggctgaggaggctgccgcaacggctgagtccgaggccctcgaagctggcgaagttgagctttctgagggcgaggacgacacagacggactcacaccgcaactggaggaggacgaagaattgcagggtcatttaggccgacgcaaggggtccaagtggaaccgcaggaatgacatgggtgaaaccctgcttcaccgagcctgtattgagggacagttgaggcgggtgcaggatcttgtgaggcagggtcacccactcaatcctagggattactgcggctggacaccattacacgaagcctgcaattatggccacctggagattgtgagattccttttggaccacggcgcggctgttgacgaccctggaggccaggggtgcgaggggattacaccactgcacgacgctctgaattgcgggcacttcgaagtggctgaactgctgctggaacgtggagctagcgtgacgcttagaacacggaaaggtctgtctcctttggaaacgctacagcaatgggtaaagctctatagacgcgatctcgatttagaaacaagacagaaagctcgggctatggaaatgctcctccaagcggcggcttccgggcaggatccccactcgtcgcaagccttccacactccttcctctctgctgttcgatcccgaaaccagcccaccactgagtccctgccctgagccccccagcaattcgaccaggctaccagaggcgtcacaggcccacgttcgcgtgagtccaggccaggccgcaccagccatggccaggccacgtcgatctaggcacgggccagccagctccagcagctcttcggaaggagaggactcggccgggcccgcccggccatctcagaagagaccaaggtgctcagccaccgcacagagagttgccgcctggaccccaggcccagcctctaaccgggaggccgccacagcctctacgagtagggccgcataccaggcagccatcaggggagtggggtccgcccaatcccggcttggtcccggacctccaagaggtcactctaaggccttggccccccaggccgccctcatacctgaggaggagtgcctcgctggtgactggctagaactcgacatgccactgacacgcagcaggcgaccccgcccgcgcggcacgggcgacaacagaaggccctcgtctacctccggaagcgattctgaagaatctagacccagggcccgggccaagcaggttcgtttgacttgtatgcagagttgcagcgcccctgtgaatgccggtcctagcagcctggcaagcgaacccccaggatccccatctaccccaagagttagcgaacccagcggagacagtagcgccgctggccagcccctgggccctgcaccacccccccccattcgggttcgcgtccaggttcaagatcatctttttctcatcccagtgccccactcgagtgatacacactccgtggcctggctggctgagcaggccgcgcaaaggtattaccagacatgtggactgttaccccgtctgaccctgcgcaaagagggcgctctgctagctcctcaggacctgatcccagacgtgcttcaaagcaatgatgaggtgctggccgaggttacatcatgggacttgcctccccttacagaccgataccgtagggcctgtcaatcgttggggcagggagagcaccagcaggtcttacaagcggttgagttacaaggactaggtctgagtttctcagcatgcagcttggctttggaccaggcacagctcaccccattattgagagcactcaaactacacacagctctccgcgagctcaggctggccggaaatcgcctcggggataagtgcgtggcagaattagtggctgctcttggcaccatgccaagccttgcgttgctcgatctgtcatccaatcatctgggaccggagggtctaaggcagttggccatgggactgcccggccaggccacgctccagtccctcgaagagctggatctaagtatgaatcctctcggagacggatgtggacagtctctggccagcttgctccacgcttgccctctcctctcaaccttgcgcctgcaggcctgcggtttcgggccgtcattcttcttgagtcaccagactgcccttggatccgccttccaggacgcggagcatctgaagacactctccctatcatataacgccctcggtgctccggcgcttgctcgcaccctccaaagtcttcctgccggaacgctgctccacctggaactctcgtcggtcgctgctggaaaaggcgattccgacctgatggagcccgtatttagatatctggcaaaagaaggttgtgctctcgcccacctcacactctccgcaaatcatctgggtgataaagcggtgagagatctgtgccgctgcctgagtttatgcccctcactgatatccttagacctgtctgctaaccctgagattagctgcgcttcccttgaggagctcttaagcacccttcagaagcgacctcagggtctttcattcctcgggttgtccggctgcgccgtccaaggtccactcgggctcgggctttgggataagatagcagcccagctgagggaactgcagctgtgttctcggcgcctgtgcgccgaagaccgggacgccctgcgacagcttcagcctagcaggccggggcccggggaatgcacactcgatcacggttctaagctcttttttcgtcgcctctag

SEQ ID NO: 176513 - DNA, 4134 bp, Artificial Sequence
  derived and/or modified sequence
atgagcctggagcgggagctgcggcagctgagcaaggccaaggccaaagctcagagagcgggccaaagacgggaagaagcagccctgtgccatcaacttggcgagttacttgcagggcacggcaggtacgccgaagcccttgagcagcactggcaagagctgcagcttagggagagggcagacgacccgttggggtgcgctgtggcccaccgtaaaattggagaacgtctcgccgagatggaagactacccagccgccttgcagcatcagcaccagtatttagaattagcgcatagtctccggaatcatactgaacttcagagagcctgggccaccatcgggagaacacatctggatatttatgaccactgtcagtcaagggatgcgctccttcaggcccaggctgccttcgagaaaagtctcgccatcgtggacgaagagctggaaggcactctggcgcaaggtgaactgaatgaaatgcgtacacggctctatctcaatctgggcctgacctttgagagcctccagcagacagcactgtgcaacgattacttcaggaaaagcatcttcctggctgagcagaatcacctgtacgaagacctatttcgggcacgatataacctaggaacgatccactggagggcaggtcagcacagccaggctatgcgttgcttggagggggccagggaatgcgctcacaccatgcgtaaaaggttcatggaatccgaatgttgcgtcgtgattgcccaggtgttacaagatcttggcgacttcttggccgccaaacgcgctctgaagaaggcttacaggcttggatcccagaagccagtgcagagggccgctatctgtcaaaatctccagcatgtgcttgccgttgtgcgactgcagcagcagctcgaagaggccgagggacgggatccgcaaggggccatggttatctgcgaacaactcggagatcttttctcaaaggcaggagactttccaagagctgcggaggcttaccaaaagcaattgcgcttcgcggaacttctcgaccgccccggggccgagcgagccattatacacgtgagtctcgcaacaacgctgggggacatgaaagaccaccacggtgcggtccgccattatgaggaagagttacggcttcggagtggcaacgttctggaagaggccaagacatggttaaatatcgccctgtctcgcgaagaagcaggagatgcatacgaactgctggcaccctgtttccagaaagccctctcttgtgcgcagcaggcccaaaggcctcagcttcagcggcaagttttacagcacctccacactgtgcagttgcgactccagcctcaagaagcaccagagaccgaaacaaggcttcgggaactctctgtcgctgaggacgaggatgaagaggaggaagcggaggaagccgccgccacggccgaatctgaggcactggaggcgggcgaggtggagttgtctgagggagaagacgatacagacggtctcaccccccagttggaggaggacgaggaactgcaggggcatcttggtcgcagaaagggatctaagtggaataggcggaatgacatgggtgagacactgctccatcgagcctgcattgagggccagctccgccgggtgcaggaccttgttcggcagggccaccccctgaacccacgcgattattgtgggtggacacctttgcatgaggcctgcaattatggccacctggagattgtcaggtttctcttggaccacggagcagccgtggatgacccaggtgggcaaggatgcgaaggaatcacccccttgcatgacgctttaaactgtggccattttgaagtcgcggagctgctgcttgagagaggtgcatccgtgaccctacggactcggaaggcgagcgctcgatggcggaggtgcagctctggcaagctttatcgccgcgatttggatctggaaacacgccagaaggctagagccatggaaatgctgctgcaggccgccgcctccggccaagacccccactctagtcaggcctttcacactccctcctccctgctgtttgacccagaaacaagtcctccattgtctccctgcccagaaccccccagcaactcaacgagactgcctgaggcttctcaagctcatgtgcgggtgagccccggacaagcagcccctgccatggctagaccccgtcgttcacgtcacggcccagctagcagcagtagcagctcagaaggagaagatagtgctggaccagcccgcccatcacaaaaaaggccacggtgcagcgcaacagcacagagagtggccgcatggacaccaggaccagccagtaaccgggaggccgccacagccagtactagcagggcagcttatcaggccgctattaggggcgtgggcagcgctcagtccagactgggaccggggccgccccgagggcattccaaggccctcgccccacaggcggctctgatcccagaagaagagtgcctggccggcgattggttggagttggacatgcccctcaccaggtcacgccgacctcgcccccgcggcacgggtgataacagacggccttcttctaccagcggttccgactcagaggaatcacgcccccgcgcgcgcgcaaaacaggtgagattgacttgtatgcaaagttgctccgcccctgtgaatgccgggccaagttcactcgcgtccgaaccccctggttcaccctccacacctagagtgtccgaaccctcgggggactcatctgcagcgggacagcccctcggcccagctccccctccacccattcgcgtgcgagtacaggtgcaagatcaccttttcctcattcccgtgcctcacagttctgacacacactccgtcgcatggctggcagaacaggccgcccagagatactaccaaacttgtggcttgttgccgcgcttgacacttcggaaggagggggcgttgctggctccacaggatctgataccagatgttcttcagagcaatgatgaagtcttggcagaggttacatcttgggacctgccacccctcacagacagataccgtcgggcttgccagtccttagggcaaggcgaacatcaacaggtgctccaagctgtggaattacagggcctgggcttgtcattcagcgcctgctccctcgccctggatcaggctcagctgacccctctgctacgggcactaaagcttcatacagccctgcgtgaactgcgactggctggcaaccggctgggcgacaaatgtgtcgccgaattagttgccgccctagggaccatgcctagtctcgcgctgctcgatttgagctcaaaccatctcggacctgaaggcctccgacagctggcgatgggcctgcctggacaggctactctgcaaagtctggaggagttggacctcagtatgaaccctctaggagatggttgcggacagtccttggcctcattgctccatgcttgtcctttgctgtccaccctgcgcttacaggcctgcggcttcggcccttcttttttcctcagtcaccagaccgccctgggatccgcattccaggatgccgaacatctcaaaaccctatctctcagttacaatgcgctgggcgcgcccgctctagccaggacgctccagagtctcccggccgggaccctcctgcacctggaacttagctcagtggctgcagggaagggcgacagtgacctcatggagccagtattcaggtacctggccaaggagggatgcgccctggcgcacctgaccctgagcgccaaccacctgggcgacaaggctgtgagggacctgtgtcgctgcctttctctgtgtccttcactgatatctcttgatctgtccgcaaaccccgaaatttcctgtgcctccttagaagaactcctgtccacactgcagaagcggccacaggggttaagctttctgggactgagcggatgtgctgtgcaaggacctctagggctaggcttgtgggacaagattgccgcacagttgagggagcttcagctttgcagccgacgtctatgtgccgaggaccgagatgcactgcgtcagctccaaccctcccggcccggacccggcgagtgcacactcgaccacgggagcaagctgtttttcaggagactgtag

SEQ ID NO: 176514 - DNA, 4502 bp, Artificial Sequence
  derived and/or modified sequence
gggaagtccggatcccgcggcgatccgagcatgagcctggagcgcgagcttcgccagctgagcaaggcgaaagccaaggcgcagagggccgggcagcggcgcgaagaggccgcgctgtgccaccagctgggggagctcctggccggccatggccgctacgccgaggctctggagcagcactggcaggagctgcagcttcgggagcgcgctgacgaccctctgggctgtgccgtggcccaccgcaagatcggagagcgcctggccgagatggaggactacccggctgccttgcagcaccagcaccagtacctggagctggcacattccctgcgcaaccacacggagctgcagagggcctgggccaccatcggccgcacccacctggacatctatgaccactgccagtcgagggatgctttgctgcaggcacaggctgcctttgagaagagcttggctattgtggatgaggagctggaggggacactggcccagggagagctgaatgagatgaggacccgcctctatctcaacctgggcctcacctttgagagcctgcagcagacagccctgtgcaacgattacttcaggaagagcatcttccttgcggagcagaaccacctttacgaggacctattccgcgcccgctacaacctgggcaccatccactggcgcgcgggccagcactcccaggctatgcgctgcttggagggtgcccgggagtgtgcgcacaccatgaggaagcggttcatggagagcgagtgctgcgtggttattgcacaggtcctccaagacctgggagactttttggctgccaagcgagccctgaagaaggcctacaggctgggctcccagaagcctgtgcagagggcagccatctgtcagaacctccagcatgtgctggcagtggtccggctgcagcaacagctggaagaggctgagggcagagaccctcagggtgccatggtcatctgtgagcagctaggggacctcttctccaaggcaggagactttcccagggcagctgaggcttaccagaagcagctgcgttttgctgagctgctggacagaccgggtgctgagcgggccatcatccacgtgtccctggccaccacactgggagacatgaaggaccaccatggggccgtgcgccactatgaggaggaactgaggctgcgcagcggcaacgtgctggaggaggccaagacctggctgaacattgcactgtcccgcgaggaggccggcgatgcctacgagctgctggccccgtgcttccagaaagcgctcagctgtgcccagcaggcccagcgtccccagctgcagaggcaggtcttgcagcatctccataccgtgcagctgaggctgcagccccaggaggcccctgagaccgaaaccagactacgggagctcagtgtagctgaagatgaagatgaggaggaggaggcggaggaggcggcagccacagcggagagcgaagccctggaggccggcgaggtggagctctcagagggcgaggacgacaccgatggcctgaccccgcagctggaggaggacgaggagcttcagggccacctgggccggcggaaggggagcaagtggaaccggcgaaacgacatgggggagaccctgctgcaccgagcctgcatcgagggccagctgcgccgcgtccaggaccttgtgaggcagggccacccccttaaccctcgggactactgtggctggacacctctgcacgaggcctgcaactacgggcatctagaaattgtccgcttcctgctggaccacggggccgcagtggacgacccaggtggccagggctgcgaaggcatcacccccctccacgatgccctcaactgtggccacttcgaggtggctgagctgctgcttgaacggggggcgtccgtcaccctccgcactcgaaagggcctcagcccgctggagacgctgcagcagtgggtgaagctgtaccgcagggacctggacctggagacgcggcagaaggccagggccatggagatgctgctccaggcggctgcctcgggccaagatccccacagctcccaggccttccacaccccaagcagccttctgtttgaccccgagacctctcctcctttgagcccctgcccagaacccccctctaatagcactagactcccagaggcctctcaggcccatgtcagggtctccccagggcaggcggcaccagccatggccaggcctcggaggagcaggcatgggccagccagcagcagcagcagctcagaaggcgaggacagcgcaggccccgcacggccgtcccagaagaggcctcggtgctcggccacagcacaacgggtggcagcctggacgcctggccccgccagcaacagggaagcagccacagccagcaccagccgggcagcctaccaggcagccatccggggtgtgggcagtgctcagagccggctggggcctggcccaccgcggggccacagcaaagcccttgccccccaggcagcgctcatcccggaggaggagtgcctggccggggactggctggagctggacatgcccctgacccgcagccgccggccccgcccccggggcactggagacaaccgcaggcccagtagtacctctgggtcggacagtgaggagagcaggccccgtgcccgagccaagcaggtccgcctgacctgcatgcagagttgcagtgcgccagttaacgcagggcccagcagcctggcttcagaacctccagggagccccagcacccccagggtctcagagcccagtggggacagctctgcggcaggccagcccttgggtccggccccgccccctcccatccgggttcgagttcaagttcaggatcatctcttcctcatccctgtcccacacagcagtgacacccactctgtggcctggctggccgagcaggcggcccagcgctactaccagacctgcgggctgctgcccaggctcaccctacggaaagagggggccctgctggccccacaggacctcatccctgatgtgctgcagagcaatgacgaggtgttggctgaggtgacttcgtgggacctgcccccgttgactgaccgctaccgcagggcctgccagagcctggggcaaggggagcaccaacaggtgctgcaggccgtggagctccagggcttgggcctctcgttcagcgcctgctccctggccctggaccaggcccagcttacacccctgctgcgggccctcaagctgcacacagcactccgggagctgcgcctggcagggaaccggctgggggacaagtgtgtggctgagctggtggctgccctgggcaccatgcccagcctggccctccttgacctctcctccaatcacctgggtcccgaaggcctgcgccagcttgccatggggctcccaggccaagccaccttgcagagtttggaggagctggacttaagcatgaaccccctgggggacggctgtggccagtccctggcctccctcctgcacgcctgccccttactcagcaccctgcgcctgcaggcgtgtggcttcggccccagcttctttctgagccaccagacagcactgggtagtgctttccaagatgctgagcacctgaagaccctgtccctgtcctacaacgccctgggagcccctgccctggccaggaccctgcagagcctgcccgccggcaccctcctgcacttagagctcagctccgtggcagccggcaagggtgattcggacctcatggagcctgtattccgatacctggccaaggaaggctgtgctctagcccacctgaccctgtctgcaaaccacctgggggacaaggctgttagagacctgtgcagatgtctctctctgtgcccctcactcatctcactggatctgtctgccaaccctgagatcagctgtgccagcttggaagagctcctgtccaccctccaaaagcggccccaaggccttagcttccttggcctgtcaggctgcgccgtccagggtcccctgggcctgggcctgtgggacaagatagccgcgcagctccgggaactgcagctgtgcagcagacgcctctgcgctgaggacagggacgccctgcgccagctgcagcccagtcggccgggccccggcgagtgcacgctggaccacggctccaagctcttctttcggcgcctctgaccctggcgctgcctttccccaccctcaccgaagcccctaataaatgaagctgctggccgggcgcggtggctcacgcctgtaatcccaacactttgggaggcccaggcgggcggatcacgaggtcaggagatcgagaccatcctggctaacatggtgaaaccccgtctctactaaaaataccaaaaattagccgggcgtggtggtggaagcctgtagtcccagctactccggaggctgaggcaggagaatggcgtgaacccgggaggcggagcttgcagtgagccgagatcgcaccactgcactccagcctgggcgacagaccgagactccgtctc

SEQ ID NO: 176515 - DNA, 4469 bp, Artificial Sequence
  derived and/or modified sequence
atgagcctggagcgcgagcttcgccagctgagcaaggcgaaagccaaggcgcagagggccgggcagcggcgcgaagaggccgcgctgtgccaccagctgggggagctcctggccggccatggccgctacgccgaggctctggagcagcactggcaggagctgcagcttcgggagcgcgctgacgaccctctgggctgtgccgtggcccaccgcaagatcggagagcgcctggccgagatggaggactacccggctgccttgcagcaccagcaccagtacctggagctggcacattccctgcgcaaccacacggagctgcagagggcctgggccaccatcggccgcacccacctggacatctatgaccactgccagtcgagggatgctttgctgcaggcacaggctgcctttgagaagagcttggctattgtggatgaggagctggaggggacactggcccagggagagctgaatgagatgaggacccgcctctatctcaacctgggcctcacctttgagagcctgcagcagacagccctgtgcaacgattacttcaggaagagcatcttccttgcggagcagaaccacctttacgaggacctattccgcgcccgctacaacctgggcaccatccactggcgcgcgggccagcactcccaggctatgcgctgcttggagggtgcccgggagtgtgcgcacaccatgaggaagcggttcatggagagcgagtgctgcgtggttattgcacaggtcctccaagacctgggagactttttggctgccaagcgagccctgaagaaggcctacaggctgggctcccagaagcctgtgcagagggcagccatctgtcagaacctccagcatgtgctggcagtggtccggctgcagcaacagctggaagaggctgagggcagagaccctcagggtgccatggtcatctgtgagcagctaggggacctcttctccaaggcaggagactttcccagggcagctgaggcttaccagaagcagctgcgttttgctgagctgctggacagaccgggtgctgagcgggccatcatccacgtgtccctggccaccacactgggagacatgaaggaccaccatggggccgtgcgccactatgaggaggaactgaggctgcgcagcggcaacgtgctggaggaggccaagacctggctgaacattgcactgtcccgcgaggaggccggcgatgcctacgagctgctggccccgtgcttccagaaagcgctcagctgtgcccagcaggcccagcgtccccagctgcagaggcaggtcttgcagcatctccataccgtgcagctgaggctgcagccccaggaggcccctgagaccgaaaccagactacgggagctcagtgtagctgaagatgaagatgaggaggaggaggcggaggaggcggcagccacagcggagagcgaagccctggaggccggcgaggtggagctctcagagggcgaggacgacaccgatggcctgaccccgcagctggaggaggacgaggagcttcagggccacctgggccggcggaaggggagcaagtggaaccggcgaaacgacatgggggagaccctgctgcaccgagcctgcatcgagggccagctgcgccgcgtccaggaccttgtgaggcagggccacccccttaaccctcgggactactgtggctggacacctctgcacgaggcctgcaactacgggcatctagaaattgtccgcttcctgctggaccacggggccgcagtggacgacccaggtggccagggctgcgaaggcatcacccccctccacgatgccctcaactgtggccacttcgaggtggctgagctgctgcttgaacggggggcgtccgtcaccctccgcactcgaaaggcctcagcccgctggagacgctgcagcagtgggaagctgtaccgcagggacctggacctggagacgcggcagaaggccagggccatggagatgctgctccaggcggctgcctcgggccaagatccccacagctcccaggccttccacaccccaagcagccttctgtttgaccccgagacctctcctcctttgagcccctgcccagaacccccctctaatagcactagactcccagaggcctctcaggcccatgtcagggtctccccagggcaggcggcaccagccatggccaggcctcggaggagcaggcatgggccagccagcagcagcagcagctcagaaggcgaggacagcgcaggccccgcacggccgtcccagaagaggcctcggtgctcggccacagcacaacgggtggcagcctggacgcctggccccgccagcaacagggaagcagccacagccagcaccagccgggcagcctaccaggcagccatccggggtgtgggcagtgctcagagccggctggggcctggcccaccgcggggccacagcaaagcccttgccccccaggcagcgctcatcccggaggaggagtgcctggccggggactggctggagctggacatgcccctgacccgcagccgccggccccgcccccggggcactggagacaaccgcaggcccagtagtacctctgggtcggacagtgaggagagcaggccccgtgcccgagccaagcaggtccgcctgacctgcatgcagagttgcagtgcgccagttaacgcagggcccagcagcctggcttcagaacctccagggagccccagcacccccagggtctcagagcccagtggggacagctctgcggcaggccagcccttgggtccggccccgccccctcccatccgggttcgagttcaagttcaggatcatctcttcctcatccctgtcccacacagcagtgacacccactctgtggcctggctggccgagcaggcggcccagcgctactaccagacctgcgggctgctgcccaggctcaccctacggaaagagggggccctgctggccccacaggacctcatccctgatgtgctgcagagcaatgacgaggtgttggctgaggtgacttcgtgggacctgcccccgttgactgaccgctaccgcagggcctgccagagcctggggcaaggggagcaccaacaggtgctgcaggccgtggagctccagggcttgggcctctcgttcagcgcctgctccctggccctggaccaggcccagcttacacccctgctgcgggccctcaagctgcacacagcactccgggagctgcgcctggcagggaaccggctgggggacaagtgtgtggctgagctggtggctgccctgggcaccatgcccagcctggccctccttgacctctcctccaatcacctgggtcccgaaggcctgcgccagcttgccatggggctcccaggccaagccaccttgcagagtttggaggagctggacttaagcatgaaccccctgggggacggctgtggccagtccctggcctccctcctgcacgcctgccccttactcagcaccctgcgcctgcaggcgtgtggcttcggccccagcttctttctgagccaccagacagcactgggtagtgctttccaagatgctgagcacctgaagaccctgtccctgtcctacaacgccctgggagcccctgccctggccaggaccctgcagagcctgcccgccggcaccctcctgcacttagagctcagctccgtggcagccggcaagggtgattcggacctcatggagcctgtattccgatacctggccaaggaaggctgtgctctagcccacctgaccctgtctgcaaaccacctgggggacaaggctgttagagacctgtgcagatgtctctctctgtgcccctcactcatctcactggatctgtctgccaaccctgagatcagctgtgccagcttggaagagctcctgtccaccctccaaaagcggccccaaggccttagcttccttggcctgtcaggctgcgccgtccagggtcccctgggcctgggcctgtgggacaagatagccgcgcagctccgggaactgcagctgtgcagcagacgcctctgcgctgaggacagggacgccctgcgccagctgcagcccagtcggccgggccccggcgagtgcacgctggaccacggctccaagctcttctttcggcgcctctgaccctggcgctgcctttccccaccctcaccgaagcccctaataaatgaagctgctggccgggcgcggtggctcacgcctgtaatcccaacactttgggaggcccaggcgggcggatcacgaggtcaggagatcgagaccatcctggctaacatggtgaaaccccgtctctactaaaaataccaaaaattagccgggcgtggtggtggaagcctgtagtcccagctactccggaggctgaggcaggagaatggcgtgaacccgggaggcggagcttgcagtgagccgagatcgcaccactgcactccagcctgggcgacagaccgagactccgtctc

SEQ ID NO: 176516 - DNA, 4137 bp, Artificial Sequence
  derived and/or modified sequence
atgtctctggaacgggagctgcgccagctcagcaaggcgaaagccaaggcccagagagctggacaaagacgcgaagaggcggcactctgtcaccaactcggagagctgttggctgggcatggacgttacgcggaagctctcgagcaacactggcaggaactccaacttcgcgagagagctgacgaccctctggggtgtgccgtggcacatagaaaaattggggaaaggttagctgaaatggaggactacccagccgctctgcaacaccaacatcagtatctggaactggcccactccctgagaaaccacaccgagctacagcgtgcttgggcaacgattggacgcactcacttggatatatatgaccactgtcagtcgcgcgacgcactcctgcaagcccaggccgcttttgaaaagtctctggccattgtagacgaagagcttgaagggaccctggcacaaggagagctgaatgaaatgaggacacggctttacctcaatctgggacttacattcgaaagccttcaacaaaccgctctttgcaacgattacttccggaagtctatattcctggcagagcagaatcatctctacgaagacctttttcgggctaggtacaacctcggtaccattcactggagggccggacagcacagtcaagccatgcgatgcctcgagggtgcacgggaatgtgcacatactatgaggaagcgattcatggagagtgagtgctgcgtggttattgcacaagtcctacaggacctgggcgacttcttggccgcaaagcgggcactgaagaaagcataccgcttggggagtcagaagcccgtccaaagggcagccatatgccaaaacctacagcacgtcctcgcagtcgtccgcctccagcaacaactcgaggaggcagaaggccgagatccccagggcgctatggtcatttgtgagcagctgggggacctgttttccaaggcaggtgacttcccaagggctgccgaggcttaccaaaaacaactgaggtttgctgagttactcgacaggcctggggctgagcgagctatcatccatgtgagtctggccaccacgcttggcgatatgaaggatcatcatggagccgtccggcattatgaggaagaactgagattaaggtctggtaacgttttggaagaggcgaaaacatggctgaacatcgcacttagtcgcgaggaagcaggagacgcttatgaactgttagccccttgttttcagaaggcgctgagctgtgcgcaacaggcgcaaaggccacagctacagcgtcaggtcctccaacacttgcacaccgtacagctgagactccaaccccaggaggcaccagaaaccgagactcggctccgggagttatccgtcgctgaagatgaggacgaggaggaagaagcagaggaagctgctgctactgctgagtcggaagctttagaggcaggggaggtcgagttgagtgagggggaggatgataccgacgggcttacaccccagttagaggaggacgaagagctacagggacacctcgggaggaggaagggatccaaatggaaccgcaggaacgacatgggcgaaactctgctgcaccgagcctgtatcgaaggacagttgaggcgtgtccaggacctggttagacagggtcatcctctgaacccccgtgactactgcgggtggactcccctgcacgaggcgtgtaactatggccacctggagatcgtgagattcttactggatcacggtgccgcagtggacgatcctggaggtcagggctgtgaaggaatcactcctctccatgatgcattgaactgcgggcacttcgaggtggccgaactgctattggagcgaggtgcgtccgtgacactgcggaccaggaaaggcctgtccccactggaaactttgcagcagtgggtcaagctttatcgcagggatctggatttggaaacccgtcaaaaagcaagagcaatggaaatgctcctgcaggccgctgccagtggccaggaccctcacagcagtcaagcatttcacacacccagcagcctcctttttgacccagaaacaagtcctcctctgagcccatgtcccgagccgcctagcaactcaactcgcctgcctgaggcttcgcaggcccatgttagagtgagtccaggacaggccgctcccgctatggcacgtcctcgtcgctcccggcatggacccgcatcttccagcagcagcagtgagggggaggatagtgctggacccgcacgaccctcccagaagcggccacgctgctccgccacagcacagagagttgcagcttggaccccaggtccagctagtaaccgcgaggccgcaacagcatcgacaagccgggctgcttaccaagccgctatcagaggggttggtagcgctcagagccggctcggaccaggtccgcctagaggtcactccaaagccctggccccacaggctgcccttatacccgaggaggaatgcctagctggggactggcttgaactggacatgccgctgactaggtctcgaagaccacggcctcggggaacaggcgacaatagaaggccgtccagcacaagcggatctgactccgaagagtctcgcccacgcgcacgggcaaagcaggttcgtctcacttgcatgcagtcctgttccgcacccgtcaacgctgggccatcttcattggctagcgagccgccaggcagcccaagcacccctagagtgtcggagccctctggtgacagttccgcagctggccaacctctgggacctgccccacctccccctatccgtgtgagagtgcaagtgcaggaccatctgttcttaatccccgtgcctcactcttctgacacacatagtgtggcctggctggctgagcaggcggcacagagatactatcagacatgcggcttactccctcgactgacactccgcaaggagggggcactgctggccccacaagatctgattcccgacgtgctgcagtcgaatgatgaggtcctggcagaggtgacttcctgggatctgccacccctgacagaccggtatcggcgagcctgtcagtccctgggtcagggcgagcatcagcaggtgctacaagctgtcgagctgcaggggttaggcctctcattcagcgcttgctccttggctttagatcaggcacagctgacacccctgttgcgagctctgaaactccataccgccctgagggaactgaggctagccggtaaccggctcggcgataaatgcgtggccgagctcgtggctgcacttggcacaatgccttccctggctcttctagacctcagctccaaccatttaggcccagagggattacgacagctagccatggggcttcccggacaagctacgttgcagtccctcgaggaactcgatctatccatgaacccacttggggacgggtgcggacagtcactcgcctccctcctccatgcatgccccctgctttccacattgagattacaggcttgtggctttggtccaagcttttttctcagccaccagactgccctggggtctgccttccaggatgctgagcacttaaaaaccctttctcttagctacaatgccctcggcgcaccggctctggctcggacactccagagcttgccggcaggcacattgctgcacttggagctgagtagtgtggctgccggaaaaggggacagcgacttgatggagccagtgtttagatacctcgcaaaggaaggttgcgcccttgcgcacctcactcttagcgcaaatcacctgggcgacaaagccgtgcgcgacctctgtagatgcttaagcttgtgtccttctctgataagtctcgatttatcagccaatcctgagatctcatgcgccagcctggaagagttgctaagcactttgcaaaaacggccacaaggcctgagtttcctgggcctcagtgggtgtgcagtgcaaggccctttaggtctgggcctatgggataaaattgccgcacagttacgggaattgcaactctgtagtaggaggctatgcgctgaggatagagacgccctgcgacagctccaaccttctagacctggtcctggcgagtgtacacttgatcacggctctaaactgttcttcaggaggctctag

SEQ ID NO: 176517 - DNA, 4134 bp, Artificial Sequence
  derived and/or modified sequence
atgagcctggaacgggaactgcggcagctgtccaaggcaaaggccaaggcccagagagcaggccagcgcagggaggaagcagccctgtgtcatcagctgggcgagcttttggctgggcacggaaggtacgccgaggcactggagcagcactggcaagaattgcagctacgggaacgggcagatgaccccctggggtgtgccgtagcccacaggaaaatcggcgaacggttggccgaaatggaggactatcctgctgctcttcagcaccagcatcagtacctggagcttgcccacagcttacggaaccatactgagttgcagagagcctgggctacaattgggcgaacccacctagacatctacgatcactgtcagagcagggacgcccttctacaggcccaagccgcttttgaaaagtcactagccattgtcgatgaagagcttgaaggcacgcttgcccagggggaactgaacgagatgcggacgaggctgtacctcaacctaggcctcacttttgagtctttacagcagaccgccctgtgtaacgactatttcagaaagagcatcttccttgcggaacagaaccacctgtacgaggatctttttcgcgcaagatacaatctcggtaccatacattggagagcaggtcagcactcccaggccatgcggtgtctggagggagcgagagaatgtgcccataccatgagaaagcggtttatggagagtgagtgttgtgtcgttatcgcgcaggtcttacaggacctgggagacttcctggcagccaagagggcactgaagaaggcctatcgtctgggaagtcagaagccagttcagcgggctgccatttgccagaatctgcaacatgtcctcgccgtcgtgaggctgcagcaacagctggaagaagctgaaggacgcgatcctcaaggagctatggtcatttgtgaacagctgggagacctcttctctaaggccggtgatttcccgagagccgctgaagcctatcaaaaacaactgcgcttcgctgagcttctggaccggccaggagcagagcgtgcgatcatacatgtcagtcttgcaaccactctgggcgacatgaaggaccatcacggcgcagtgcgacactatgaggaggagcttcgcctgcggagtggcaatgttctggaggaggccaaaacatggttgaacatcgcattgagtcgcgaagaggccggagacgcttacgagcttttagcaccatgttttcagaaagctctctcctgcgcacagcaggcacagaggccccagctccagcgtcaagtgctgcaacatctgcacaccgtccagttaaggctgcagcctcaggaagccccagagactgaaactaggctacgtgagctatcagtagctgaagacgaggatgaagaagaggaggctgaagaggccgcagcaacagccgagtccgaagcattggaggccggagaagttgagctaagtgaaggcgaagatgacaccgacgggcttacaccacaactcgaagaggacgaggagctgcagggccacctaggccgaagaaagggcagtaaatggaatcgcaggaatgatatgggagaaactttgctgcacagagcatgcattgagggacagttacggagagtccaggatttggtccgacaagggcatccactaaatccacgcgattactgcggatggacacccctgcacgaggcctgcaattacggccacttggagatcgtgcgattcttactggatcatggagccgctgtggacgaccctggagggcagggctgcgaaggcattacacctctgcacgacgccctaaactgcgggcatttcgaggtggcagagctgctcctggagaggggtgcttccgtgacactccgaacgagaaaagcctcggcaagatggcggagatgctctagcggcaagctgtataggcgggatctggatctggaaacacgccagaaggctagggccatggaaatgttattgcaagctgccgcttcaggacaggacccgcatagctctcaagcgtttcatacaccatccagcctgctttttgatccagagactagtcctcccttgagcccctgccccgagcctccttcgaatagtacccggctgcccgaggcttcccaggcccacgtacgagtgtcccctgggcaggccgcaccagcgatggcccgacctagacgctcaagacacggccctgccagtagctcctcttcatctgagggggaggactctgccggacccgcacgcccatctcagaaacgccctcgttgcagcgccaccgctcagcgggtggccgcatggaccccgggtcctgcgtctaatcgggaggctgcaacagcgtcaactagtcgcgcagcctaccaagccgctattagaggagtgggaagcgcccagtcacggctcggtcccggaccccctcgtgggcatagcaaagccttggccccacaggccgctctaattcctgaagaggagtgtttggctggcgactggctggaacttgacatgccgttaacaaggagtaggaggcctcggcctcggggtactggagataacagacgccctagcagtacatctgggtccgatagcgaagaatcgcgtccacgcgctcgggcaaaacaggttcgccttacctgtatgcaaagttgttctgccccagtgaacgcaggtccaagctctctggcctctgagcccccaggttcccctagtaccccccgagtgtccgaaccttcaggagactcgtccgctgcgggtcagccgctgggacccgctcctcctccacctatccgagtgcgggtgcaggtccaggaccaccttttcctcatccccgttccgcattcttccgatacccactcagtcgcatggttggccgagcaggcggctcagagatattatcagacctgtgggctcttaccacggctgacgctcagaaaggagggtgccctcctggcgcctcaggacctgattcccgatgtcctgcagtccaacgatgaagtgctagctgaggtcacatcttgggacctgccacccctcacagatcgatatcgcagagcgtgtcagtcgctcggacagggggaacatcagcaggttctgcaggccgttgagcttcagggcctcggcctttccttttctgcctgcagtctcgctctggaccaggcccaattgacgccactgctgagagcattgaaactgcacaccgccctgagggagctgagattggccggtaaccgccttggcgacaaatgtgtggctgagctggtggcggctcttggcaccatgccttcgctggccttgctggatctcagctccaaccatctaggaccagagggtctgaggcagctggcaatgggattgcccggacaggcaacactgcaatcccttgaagagctggacctgtccatgaaccccctcggcgacgggtgcggacagagtctggcttctctgctgcatgcttgccctcttcttagcactttgaggctgcaggcctgtggattcggcccaagtttcttcctcagccatcagacagccctcggaagtgccttccaggatgccgaacatctcaaaaccctaagcctgtcttataatgccctgggggcacctgccctggccaggaccctccagtccctgccagcagggaccctgcttcaccttgagctgagtagcgttgctgccggtaaaggggatagtgatctgatggaacccgttttccgatacctggccaaagagggctgcgcacttgctcacctgaccctaagcgccaaccatctgggcgataaggccgtgagagatctctgtagatgtctaagtctgtgtccgagcctcatcagcttggacctctccgccaatcctgagatctcatgcgcgtcgctcgaggagttactttcaaccctgcagaagaggccacaaggcctatcatttttgggtttatcagggtgtgctgtgcagggtcctctcggactggggctatgggacaaaattgctgcacagctacgcgagctgcagttgtgtagtcgtcgtctgtgcgccgaggatcgcgatgctttgaggcagctgcagccttcccggccaggtcctggggagtgcacactggaccacggaagcaagctattcttcaggcgtctttag

SEQ ID NO: 176518 - protein, 256 aa, Artificial Sequence
  derived and/or modified sequence
MQPAKEVTKASDGSLLGDLGHTPLSKKEGIKWQRPRLSRQALMRCCLVKWILSSTAPQGSDSSDSELELSTVRHQPEGLDQLQAQTKFTKKELQSLYRGFKNECPTGLVDEDTFKLIYAQFFPQGDATTYAHFLFNAFDADGNGAIHFEDFVVGLSILLRGTVHEKLKWAFNLYDINKDGYITKEEMLAIMKSIYDMMGRHTYPILREDAPAEHVERFFEKMDRNQDGVVTIEEFLEACQKDENIMSSMQLFENVI

SEQ ID NO: 176519 - protein, 234 aa, Artificial Sequence
  derived and/or modified sequence
MQPRKEVTKASDGSLLGDLGHTPLSKKEGIKWQRPRLSRQALMRCCLVKWILSSTAPQGSDSSDSELELSTVRHQPEGLDQLQAQTKFTKKELQSLYRGFKNGDATTYAHFLFNAFDADGNGAIHFEDFVVGLSILLRGTVHEKLKWAFNLYDINKDGYITKEEMLAIMKSIYDMMGRHTYPILREDAPAEHVERFFEKMDRNQDGVVTIEEFLEACQKDENIMSSMQLFENVI

SEQ ID NO: 176520 - DNA, 2928 bp, Artificial Sequence
  derived and/or modified sequence
gacaattacgtctgggtccaagcaaacatgaggcagctgccagccggcctgggcagtcttgtctgcctcggctgtgaagtggggaggctggcaacagttttcttcagcgcccaggatgcagccggctaaggaagtgacaaaggcgtcggacggcagcctcctgggggacctcgggcacacaccacttagcaagaaggagggtatcaagtggcagaggccgaggctcagccgccaggctttgatgagatgctgcctggtcaagtggatcctgtccagcacagccccacagggctcagatagcagcgacagtgagctggagctgtccacggtgcgccaccagccagaggggctggaccagctgcaggcccagaccaagttcaccaagaaggagctgcagtctctctacaggggctttaagaatgagtgtcccacgggcctggtggacgaagacaccttcaaactcatttacgcgcagttcttccctcagggagatgccaccacctatgcacacttcctcttcaacgcctttgatgcggacgggaacggggccatccactttgaggactttgtggttggcctctccatcctgctgcggggcacagtccacgagaagctcaagtgggcctttaatctctacgacattaacaaggatggctacatcaccaaagaggagatgctggccatcatgaagtccatctatgacatgatgggccgccacacctaccccatcctgcgggaggacgcgccggcggagcacgtggagaggttcttcgagaaaatggaccggaaccaggatggggtagtgaccattgaagagttcctggaggcctgtcagaaggatgagaacatcatgagctccatgcagctgtttgagaatgtcatctaggacacgtccaaaggagtgcatggccacagccacctccacccccaagaaacctccatcctgccaggagcagcctccaagaaacttttaaaaaatagatttgcaaaaagtgaacagattgctacacacacacacacacacacacacacacacacacacagccattcatctgggctggcagaggggacagagttcagggaggggctgagtctggctaggggccgagtccaggagccccagccagcccttcccaggccagcgaggcgaggctgcctctgggtgagtggctgacagagcaggtctgcaggccaccagctgctggatgtcaccaagaaggggctcgagtgcccctgcaggggagggtccaatctccggtgtgagcccacctcgtcccgttctccattctgctttcttgccacacagtgggccggccccaggctcccctggtctcctccccgtagccactctctgcccactacctatgcttctagaaagcccctcacctcaggaccccagagggaccagctggggggcaggggggagagggggtaatggaggccaagcctgcagctttctggaaattcttccctgggggtcccaggatcccctgctactccactgacctggaagagctgggtaccaggccacccactgtggggcaagcctgagtggtgaggggccactgggccccattctccctccatggcaggaaggcgggggatttcaagtttagggattgggtcgtggtggagaatctgagggcactctctgccagctccacagggtgggatgagcctctccttgccccagtcctggttcagtgggaatgcagtgggtggggctgtacacaccctccagcacagactgttccctccaaggtcctcttaggtcccgggaggaacgtggttcagagactggcagccagggagcccggggcagagctcagaggagtctgggaaggggcgtgtccctcctcttcctgtagtgcccctcccatggcccagcagcttggctgagccccctctcctgaagcagtgtcgccgtccctctgccttgcacaaaaagcacaagcattccttagcagctcaggcgcagccctagtgggagcccagcacactgcttctcggaggccaggccctcctgctggctgaggcttgggcccagtagccccaatatggtggccctggggaagaggccttgggggtctgctctgtgcctgggatcagtggggccccaaagcccagcccggctgaccaacattcaaaagcacaaaccctggggactctgcttggctgtcccctccatctggggatggagaatgccagcccaaagctggagccaatggtgagggctgagagggctgtggctgggtggtcagcagaaacccccaggaggagagagatgctgctcccgcctgattggggcctcacccagaaggaacccggtcccaggccgcatggcccctccaggaacattcccacataatacattccatcacagccagcccagctccactcagggctggcccggggagtccccgtgtgccccaagaggctagccccagggtgagcagggccctcagaggaaaggcagtatggcggaggccatgggggcccctcggcattcacacacagcctggcctcccctgcggagctgcatggacgcctggctccaggctccaggctgactgggggcctctgcctccaggagggcatcagctttccctggctcagggatcttctccctcccctcacccgctgcccagccctcccagctggtgtcactctgcctctaaggccaaggcctcaggagagcatcaccaccacacccctgccggccttggccttggggccagactggctgcacagcccaaccaggaggggtctgcctcccacgctgggacacagaccggccgcatgtctgcatggcagaagcgtctcccttggccacggcctgggagggtggttcctgttctcagcatccactaatattcagtcctgtatattttaataaaataaacttgacaaaggaaaaaaaaaaaaaaa

SEQ ID NO: 176521 - DNA, 771 bp, Artificial Sequence
  derived and/or modified sequence
atgcagcctgccaaggaggtgacaaaagctagtgatggttctctgcttggggatctcgggcacactcctctgagcaagaaggaaggaataaagtggcagcgccctcgactgtcccgacaggcgttgatgcggtgctgcctggtgaaatggattctgagttccacagcaccccaaggctcagacagcagcgacagcgagcttgaactttccaccgttcgccatcagccggaaggattagaccagttacaagcgcaaactaagttcacaaaaaaggaactccagtcattgtatcggggtttcaaaaatgaatgtcccaccggtctagttgacgaggacacttttaaactcatttatgcccagttcttcccacagggtgacgcaaccacgtatgcccatttcctgttcaatgctttcgacgccgacggtaatggagccatccactttgaagacttcgtcgtgggcctgagtatcctgctcaggggtacggtgcatgagaagctcaagtgggccttcaacttgtacgatataaataaagacggttacattactaaagaggagatgctggccatcatgaagtcaatctacgacatgatgggaagacatacctacccaattctccgcgaggacgctccagccgagcatgtcgaacgctttttcgagaagatggaccgcaaccaggacggtgtcgttactatcgaagaattccttgaggcttgccagaaagacgaaaatatcatgagctcaatgcagctgtttgagaatgttatctag

SEQ ID NO: 176522 - DNA, 705 bp, Artificial Sequence
  derived and/or modified sequence
atgcaacccagaaaagaagtgacaaaggcttcagatggatcacttctcggggatctcggacatacgccgttgagtaagaaggaagggatcaaatggcagaggcctaggctgtctagacaagccctaatgcgttgctgcttggtgaaatggattttgagcagtactgctccacaggggagtgactcctccgactctgagctggagctctccacggttcggcaccagcctgaggggctggaccaactgcaggctcagaccaagtttaccaagaaagagctccagtccctgtacaggggttttaagaacggggacgccacaacttatgcccacttcctgttcaacgccttcgacgccgatgggaatggcgccatacactttgaagactttgtggtgggcctgtcgattctgttacgagggacggtgcatgagaagcttaagtgggcctttaacttgtacgatataaataaggacggctatataaccaaagaagaaatgctggctatcatgaaatctatctacgatatgatgggcaggcacacataccccatcctgcgggaggacgcgccagctgagcatgtggagaggttttttgaaaagatggacagaaatcaggacggagttgttaccatcgaagagttcctggaggcttgtcagaaggatgaaaacatcatgtcctccatgcaactgttcgagaacgtcatctag

SEQ ID NO: 176523 - DNA, 2934 bp, Artificial Sequence
  derived and/or modified sequence
gagggcgagaagccgccgttgacaattacgtctgggtccaagcaaacatgaggcagctgccagccggcctgggcagtcttgtctgcctcggctgtgaagtggggaggctggcaacagttttcttcagcgcccaggatgcagccggctaaggaagtgacaaaggcgtcggacggcagcctcctgggggacctcgggcacacaccacttagcaagaaggagggtatcaagtggcagaggccgaggctcagccgccaggctttgatgagatgctgcctggtcaagtggatcctgtccagcacagccccacagggctcagatagcagcgacagtgagctggagctgtccacggtgcgccaccagccagaggggctggaccagctgcaggcccagaccaagttcaccaagaaggagctgcagtctctctacaggggctttaagaatgagtgtcccacgggcctggtggacgaagacaccttcaaactcatttacgcgcagttcttccctcagggagatgccaccacctatgcacacttcctcttcaacgcctttgatgcggacgggaacggggccatccactttgaggactttgtggttggcctctccatcctgctgcggggcacagtccacgagaagctcaagtgggcctttaatctctacgacattaacaaggatggctacatcaccaaagaggagatgctggccatcatgaagtccatctatgacatgatgggccgccacacctaccccatcctgcgggaggacgcgccggcggagcacgtggagaggttcttcgagaaaatggaccggaaccaggatggggtagtgaccattgaagagttcctggaggcctgtcagaaggatgagaacatcatgagctccatgcagctgtttgagaatgtcatctaggacacgtccaaaggagtgcatggccacagccacctccacccccaagaaacctccatcctgccaggagcagcctccaagaaacttttaaaaaatagatttgcaaaaagtgaacagattgctacacacacacacacacacacacacacacacacacacagccattcatctgggctggcagaggggacagagttcagggaggggctgagtctggctaggggccgagtccaggagccccagccagcccttcccaggccagcgaggcgaggctgcctctgggtgagtggctgacagagcaggtctgcaggccaccagctgctggatgtcaccaagaaggggctcgagtgcccctgcaggggagggtccaatctccggtgtgagcccacctcgtcccgttctccattctgctttcttgccacacagtgggccggccccaggctcccctggtctcctccccgtagccactctctgcccactacctatgcttctagaaagcccctcacctcaggaccccagagggaccagctggggggcaggggggagagggggtaatggaggccaagcctgcagctttctggaaattcttccctgggggtcccaggatcccctgctactccactgacctggaagagctgggtaccaggccacccactgtggggcaagcctgagtggtgaggggccactgggccccattctccctccatggcaggaaggcgggggatttcaagtttagggattgggtcgtggtggagaatctgagggcactctctgccagctccacagggtgggatgagcctctccttgccccagtcctggttcagtgggaatgcagtgggtggggctgtacacaccctccagcacagactgttccctccaaggtcctcttaggtcccgggaggaacgtggttcagagactggcagccagggagcccggggcagagctcagaggagtctgggaaggggcgtgtccctcctcttcctgtagtgcccctcccatggcccagcagcttggctgagccccctctcctgaagcagtgtcgccgtccctctgccttgcacaaaaagcacaagcattccttagcagctcaggcgcagccctagtgggagcccagcacactgcttctcggaggccaggccctcctgctggctgaggcttgggcccagtagccccaatatggtggccctggggaagaggccttgggggtctgctctgtgcctgggatcagtggggccccaaagcccagcccggctgaccaacattcaaaagcacaaaccctggggactctgcttggctgtcccctccatctggggatggagaatgccagcccaaagctggagccaatggtgagggctgagagggctgtggctgggtggtcagcagaaacccccaggaggagagagatgctgctcccgcctgattggggcctcacccagaaggaacccggtcccaggccgcatggcccctccaggaacattcccacataatacattccatcacagccagcccagctccactcagggctggcccggggagtccccgtgtgccccaagaggctagccccagggtgagcagggccctcagaggaaaggcagtatggcggaggccatgggggcccctcggcattcacacacagcctggcctcccctgcggagctgcatggacgcctggctccaggctccaggctgactgggggcctctgcctccaggagggcatcagctttccctggctcagggatcttctccctcccctcacccgctgcccagccctcccagctggtgtcactctgcctctaaggccaaggcctcaggagagcatcaccaccacacccctgccggccttggccttggggccagactggctgcacagcccaaccaggaggggtctgcctcccacgctgggacacagaccggccgcatgtctgcatggcagaagcgtctcccttggccacggcctgggagggtggttcctgttctcagcatccactaatattcagtcctgtatattttaataaaataaacttgacaaagga

SEQ ID NO: 176524 - DNA, 2732 bp, Artificial Sequence
  derived and/or modified sequence
atgcagccccggaaggaagtgacaaaggcgtcggacggcagcctcctgggggacctcgggcacacaccacttagcaagaaggagggtatcaagtggcagaggccgaggctcagccgccaggctttgatgagatgctgcctggtcaagtggatcctgtccagcacagccccacagggctcagatagcagcgacagtgagctggagctgtccacggtgcgccaccagccagaggggctggaccagctgcaggcccagaccaagttcaccaagaaggagctgcagtctctctacaggggctttaagaatggagatgccaccacctatgcacacttcctcttcaacgcctttgatgcggacgggaacggggccatccactttgaggactttgtggttggcctctccatcctgctgcggggcacagtccacgagaagctcaagtgggcctttaatctctacgacattaacaaggatggctacatcaccaaagaggagatgctggccatcatgaagtccatctatgacatgatgggccgccacacctaccccatcctgcgggaggacgcgccggcggagcacgtggagaggttcttcgagaaaatggaccggaaccaggatggggtagtgaccattgaagagttcctggaggcctgtcagaaggatgagaacatcatgagctccatgcagctgtttgagaatgtcatctaggacacgtccaaaggagtgcatggccacagccacctccacccccaagaaacctccatcctgccaggagcagcctccaagaaacttttaaaaaatagatttgcaaaaagtgaacagattgctacacacacacacacacacacacacacacacacacacagccattcatctgggctggcagaggggacagagttcagggaggggctgagtctggctaggggccgagtccaggagccccagccagcccttcccaggccagcgaggcgaggctgcctctgggtgagtggctgacagagcaggtctgcaggccaccagctgctggatgtcaccaagaaggggctcgagtgcccctgcaggggagggtccaatctccggtgtgagcccacctcgtcccgttctccattctgctttcttgccacacagtgggccggccccaggctcccctggtctcctccccgtagccactctctgcccactacctatgcttctagaaagcccctcacctcaggaccccagagggaccagctggggggcaggggggagagggggtaatggaggccaagcctgcagctttctggaaattcttccctgggggtcccaggatcccctgctactccactgacctggaagagctgggtaccaggccacccactgtggggcaagcctgagtggtgaggggccactgggccccattctccctccatggcaggaaggcgggggatttcaagtttagggattgggtcgtggtggagaatctgagggcactctctgccagctccacagggtgggatgagcctctccttgccccagtcctggttcagtgggaatgcagtgggtggggctgtacacaccctccagcacagactgttccctccaaggtcctcttaggtcccgggaggaacgtggttcagagactggcagccagggagcccggggcagagctcagaggagtctgggaaggggcgtgtccctcctcttcctgtagtgcccctcccatggcccagcagcttggctgagccccctctcctgaagcagtgtcgccgtccctctgccttgcacaaaaagcacaagcattccttagcagctcaggcgcagccctagtgggagcccagcacactgcttctcggaggccaggccctcctgctggctgaggcttgggcccagtagccccaatatggtggccctggggaagaggccttgggggtctgctctgtgcctgggatcagtggggccccaaagcccagcccggctgaccaacattcaaaagcacaaaccctggggactctgcttggctgtcccctccatctggggatggagaatgccagcccaaagctggagccaatggtgagggctgagagggctgtggctgggtggtcagcagaaacccccaggaggagagagatgctgctcccgcctgattggggcctcacccagaaggaacccggtcccaggccgcatggcccctccaggaacattcccacataatacattccatcacagccagcccagctccactcagggctggcccggggagtccccgtgtgccccaagaggctagccccagggtgagcagggccctcagaggaaaggcagtatggcggaggccatgggggcccctcggcattcacacacagcctggcctcccctgcggagctgcatggacgcctggctccaggctccaggctgactgggggcctctgcctccaggagggcatcagctttccctggctcagggatcttctccctcccctcacccgctgcccagccctcccagctggtgtcactctgcctctaaggccaaggcctcaggagagcatcaccaccacacccctgccggccttggccttggggccagactggctgcacagcccaaccaggaggggtctgcctcccacgctgggacacagaccggccgcatgtctgcatggcagaagcgtctcccttggccacggcctgggagggtggttcctgttctcagcatccactaatattcagtcctgtatattttaataaaataaacttgacaaagg

SEQ ID NO: 176525 - DNA, 771 bp, Artificial Sequence
  derived and/or modified sequence
atgcagcctgccaaggaggtgaccaaggccagtgatggcagcctgctgggggacctgggccacacccccctgagcaagaaggagggcatcaagtggcagaggccccggctgagccggcaggccctgatgcgctgctgcctggtgaagtggatcctgagcagcacagccccccagggcagtgacagcagtgacagcgagctggagctgagcacagtgcgccaccagcctgagggcctggaccagctgcaggcccagaccaagttcaccaagaaggagctgcagagcctgtaccggggcttcaagaatgaatgtcccaccggcctggtggatgaggacaccttcaagctgatctatgcccagttcttcccccagggagatgccaccacctacgcccacttcctgttcaatgcctttgatgctgatggaaatggagccatccactttgaagattttgtggtgggcctgagcatcctgctgcggggcaccgtgcatgagaagctgaagtgggccttcaacctgtatgacatcaacaaggatggctacatcaccaaggaggagatgctggccatcatgaagagcatctatgacatgatgggccgccacacctaccccatcctgcgggaggatgccccagctgagcacgtggagcgcttctttgagaagatggacaggaaccaggatggagtggtgaccatcgaggagttcctggaggcctgccagaaggatgagaacatcatgagctccatgcagctgtttgaaaatgtcatctag

SEQ ID NO: 176526 - DNA, 705 bp, Artificial Sequence
  derived and/or modified sequence
atgcagcccaggaaggaggtgaccaaggccagtgatggcagcctgctgggggacctgggccacacccccctgagcaagaaggagggcatcaagtggcagaggccccggctgagccggcaggccctgatgcgctgctgcctggtgaagtggatcctgagcagcacagccccccagggcagtgacagcagtgacagcgagctggagctgagcacagtgcgccaccagcctgagggcctggaccagctgcaggcccagaccaagttcaccaagaaggagctgcagagcctgtaccggggcttcaagaatggagatgccaccacctacgcccacttcctgttcaatgcctttgatgctgatggaaatggagccatccactttgaagattttgtggtgggcctgagcatcctgctgcggggcaccgtgcatgagaagctgaagtgggccttcaacctgtatgacatcaacaaggatggctacatcaccaaggaggagatgctggccatcatgaagagcatctatgacatgatgggccgccacacctaccccatcctgcgggaggatgccccagctgagcacgtggagcgcttctttgagaagatggacaggaaccaggatggagtggtgaccatcgaggagttcctggaggcctgccagaaggatgagaacatcatgagctccatgcagctgtttgaaaatgtcatctag

SEQ ID NO: 176527 - DNA, 771 bp, Artificial Sequence
  derived and/or modified sequence
atgcagcccgccaaggaggtgaccaaggccagcgacggcagcctgcttggcgatctcggccatactcccctaagcaaaaaggaaggtattaaatggcagcggccaaggctctcacgccaagcactgatgcgctgctgcctcgtgaaatggatcttgtcatccaccgctccacaaggcagtgattctagcgacagcgagctggaattgtcaacagtgcggcaccagccggagggcctggatcagctgcaggcccaaacaaaatttacgaagaaggagctccagtccctctacagagggtttaagaacgagtgtcctaccgggcttgtcgacgaggataccttcaaacttatatatgctcaattcttcccacagggcgatgccacaacatatgcacactttctgttcaacgcctttgatgccgatgggaacggtgccatccactttgaagacttcgtagttggcctctcaatactgctacgcggaacggtgcatgaaaaactgaagtgggccttcaacctctacgacatcaacaaagatgggtacatcacaaaggaggagatgctcgcgatcatgaagtcgatatatgacatgatgggccggcacacttaccctatcctgagagaagatgccccggctgaacacgtggaaaggttttttgagaagatggaccggaatcaggacggggtcgtgaccattgaggagttcctggaggcttgccaaaaggacgagaatatcatgtcatctatgcagttgtttgagaacgtcatctag

SEQ ID NO: 176528 - DNA, 705 bp, Artificial Sequence
  derived and/or modified sequence
atgcagccccggaaggaggtgaccaaggccagcgacggcagcctgctgggggacctgggccacactccgctctcaaagaaagagggcatcaagtggcagcggccaaggctgagtcgccaagcccttatgcggtgttgtctagtgaagtggatactgtcatccaccgcaccacaggggtccgatagtagtgatagcgagctggagttgagcacagtgcgacatcagcctgaaggcctggaccaactccaggctcagaccaagtttacgaagaaagaacttcagtccctgtacagaggatttaagaatggcgatgctaccacttacgctcactttcttttcaatgcattcgatgctgacgggaatggcgcgatacacttcgaggactttgtggtgggcttgagcattctcctgaggggcactgtacatgagaagctgaaatgggccttcaacctctacgacatcaataaggacgggtacataaccaaggaggaaatgctggccatcatgaagtctatctacgatatgatggggaggcacacctatcccatcctccgcgaggacgcgccggccgagcatgttgagcgcttctttgaaaaaatggaccggaatcaggacggcgtagtgaccattgaggaattcctggaggcctgccagaaggatgaaaacatcatgagcagcatgcagctcttcgaaaacgtgatttag

SEQ ID NO: 176529 - DNA, 771 bp, Artificial Sequence
  derived and/or modified sequence
atgcagccagccaaggaagtgactaaggcttccgacggctctctgctgggcgaccttggacacactccgctcagcaagaaagaagggatcaaatggcaaagacccaggttatctagacaggcgctgatgcgctgttgcctggtgaagtggatactgagtagcaccgcccctcaagggtcagatagttcagatagcgagctggagttatcaacggtcagacaccagccagaaggtttggaccagctccaggcccaaactaagttcacaaaaaaggagctccagtccttgtatcgtggcttcaaaaatgaatgtccaactggcctggttgatgaagacacattcaaactcatttatgcccagttctttccgcagggtgatgccacaacttatgcccactttttatttaatgcgttcgacgctgatggaaacggagctattcacttcgaagacttcgtcgtgggactctccatcttgctcaggggaacagtccacgaaaagctgaagtgggccttcaatctgtatgacatcaacaaggacggctatatcacaaaggaggaaatgctggcaataatgaaaagcatctacgatatgatgggccgtcacacatacccaatcctaagggaggatgcaccggctgagcacgttgagcgtttttttgagaaaatggaccgcaatcaggacggagttgtgactattgaggaattccttgaggcatgccagaaggatgaaaacatcatgtcatccatgcagctttttgagaacgtcatctag

SEQ ID NO: 176530 - DNA, 705 bp, Artificial Sequence
  derived and/or modified sequence
atgcaacccagaaaggaggttacgaaggccagcgatgggagcctgctcggggacctgggccacacccccctgtcaaaaaaagaggggattaagtggcagcgtccacgtttgagccgacaggccctaatgcgatgctgccttgtcaagtggatactctccagtaccgccccacaggggagtgactccagcgattctgagctcgaactttcaaccgtgaggcaccagcctgaaggcttggatcagctccaggctcagacaaaattcaccaagaaagagctccagtctctttatcgcggatttaaaaatggcgacgcgactacatatgcccattttctctttaacgcatttgacgcagatggaaatggagctatccactttgaggatttcgtggtgggtttgagtatcttactacgcggaaccgttcacgaaaagctgaagtgggcctttaatctgtatgatattaacaaagacggctatattacgaaagaagagatgctggccattatgaagtctatctacgatatgatgggtagacacacttaccccatcctgcgagaagatgctcctgcagaacacgtagagaggtttttcgagaaaatggacaggaaccaggacggcgtggtgactatcgaagaatttctggaagcgtgccagaaggacgaaaacattatgtcctccatgcagctgtttgagaatgtgatctag

SEQ ID NO: 176531 - DNA, 771 bp, Artificial Sequence
  derived and/or modified sequence
atgcagcccgccaaggaggtgaccaaggccagcgacggcagcctgctgggcgacctgggccacacccccctgagcaagaaggagggcatcaagtggcagagacccagactgagcagacaggccctgatgagatgctgcctggtgaagtggatcctgagcagcaccgccccccagggcagcgacagcagcgacagcgagctggagctgagcaccgtgagacaccagcccgagggcctggaccagctgcaggcccagaccaagttcaccaagaaggagctgcagagcctgtacagaggcttcaagaacgagtgccccaccggcctggtggacgaggacaccttcaagctgatctacgcccagttcttcccccagggcgacgccaccacctacgcccacttcctgttcaacgccttcgacgccgacggcaacggcgccatccacttcgaggacttcgtggtgggcctgagcatcctgctgagaggcaccgtgcacgagaagctgaagtgggccttcaacctgtacgacatcaacaaggacggctacatcaccaaggaggagatgctggccatcatgaagagcatctacgacatgatgggcagacacacctaccccatcctgagagaggacgcccccgccgagcacgtggagagattcttcgagaagatggacagaaaccaggacggcgtggtgaccatcgaggagttcctggaggcctgccagaaggacgagaacatcatgagcagcatgcagctgttcgagaacgtgatctag

SEQ ID NO: 176532 - DNA, 705 bp, Artificial Sequence
  derived and/or modified sequence
atgcagcccagaaaggaggtgaccaaggccagcgacggcagcctgctgggcgacctgggccacacccccctgagcaagaaggagggcatcaagtggcagagacccagactgagcagacaggccctgatgagatgctgcctggtgaagtggatcctgagcagcaccgccccccagggcagcgacagcagcgacagcgagctggagctgagcaccgtgagacaccagcccgagggcctggaccagctgcaggcccagaccaagttcaccaagaaggagctgcagagcctgtacagaggcttcaagaacggcgacgccaccacctacgcccacttcctgttcaacgccttcgacgccgacggcaacggcgccatccacttcgaggacttcgtggtgggcctgagcatcctgctgagaggcaccgtgcacgagaagctgaagtgggccttcaacctgtacgacatcaacaaggacggctacatcaccaaggaggagatgctggccatcatgaagagcatctacgacatgatgggcagacacacctaccccatcctgagagaggacgcccccgccgagcacgtggagagattcttcgagaagatggacagaaaccaggacggcgtggtgaccatcgaggagttcctggaggcctgccagaaggacgagaacatcatgagcagcatgcagctgttcgagaacgtgatctag

SEQ ID NO: 176533 - protein, 346 aa, Artificial Sequence
  derived and/or modified sequence
MHLPGCAPAMADGSFSLAGHLLRSPGGSTSRLHSIEAILGFTKDDGILGTFPAERGARGAKERDRRLGARPACPKAPEEGSEPSPPPAPAPAPEYEAPRPYCPKEPGEARPSPGLPVGPATGEAKLSEEEQPKKKHRRNRTTFTTYQLHELERAFEKSHYPDVYSREELAGKVNLPEVRVQVWFQNRRAKWRRQEKLEVSSMKLQDSPLLSFSRSPPSATLSPLGAGPGSGGGPAGGALPLESWLGPPLPGGGATALQSLPGFGPPAQSLPASYTPPPPPPPFLNSPPLGPGLQPLAPPPPSYPCGPGFGDKFPLDEADPRNSSIAALRLKAKEHIQAIGKPWQAL

SEQ ID NO: 176534 - protein, 74 aa, Artificial Sequence
  derived and/or modified sequence
MHLPGCAPAMADGSFSLAGHLLRSPGGSTSRLHSIEAILGFTKDDGILGTFPAERGARGAKERDRRLGARPACP

SEQ ID NO: 176535 - DNA, 3197 bp, Artificial Sequence
  derived and/or modified sequence
ctgggactaaggcggcagcgggctgagcgctcggccacccccagcgtgcgcagcccgggcgggcttcgcccgcggagcttgacctagggtcgggacccgtcgggttgcaccgccgcactcgggaagacccggcttcgagcctctcctctccgtctccaaagcgccctcccgcctcccggcgctccccatgcacctgccgggctgcgcgccagccatggccgacgggagcttctcgcttgccggccacctgctccgcagcccgggcgggagcacctcgcgacttcacagcatcgaggccatcctggggtttaccaaggacgacgggatcctcggcaccttcccggcggagcggggcgcccggggcgcgaaggagcgggataggaggctgggcgcgcggcccgcctgccccaaggcgcccgaggaaggctccgagccctccccgccgccagccccggcgcccgcccccgagtacgaagcccctcgaccctactgccccaaggagcccggggaggcacggccgagcccagggctgcccgtcgggccagccaccggcgaagcgaaactgtcagaggaggaacagcccaagaaaaagcatcggcggaaccgcacgactttcaccacgtaccagctgcatgagctggagcgcgcgttcgagaagtcccactacccggacgtgtacagccgcgaggagctggccggcaaggtcaacctaccagaggtccgggtccaggtgtggttccagaaccgacgggctaagtggcggcggcaggagaagctggaagtgtcctccatgaagctgcaggactcgcccctcctctccttcagccgctccccgccctccgcgacgctgtcgcccctcggggcgggcccgggcagcggtggcgggccggctgggggcgcgctgccgctggagtcctggctcgggccgccgctgccgggcgggggcgccacggcgctgcagagcctgccgggcttcgggccgccggcgcagagcctgcctgccagctacacgccaccgccgccgcctccgcccttcctgaactccccgccgttgggccccggcctgcaacctctcgcgccgccgccgccctcctacccgtgcgggcccggcttcggggacaagttcccgctggacgaggcggacccgcgcaacagcagcatcgcggcgctgcgtctgaaagccaaggagcacatccaggccatcgggaagccgtggcaggccctctaggggcactggggaacgtcttgggatccgaccccgggccgaccgcaccgtacccgcatcctctctcccagggacaacccccctccccagctcggcccctctttccctgtcgcctgcagccacccgccaagcatagttcagggccacgcgcctgctcccgatgcacggggagaagggcgactttcaggcctgaggagaggccctctggccgcctcaacgcacttcgcggacctcagccctgcagctggagggcaacaggctgccgggccccgctggccacgccgctcccatcaccgcaggcgctggagcctccaggcccaaacaggctgaagctcctaaacttggccattcccaggaggcttggagacccccagataaccataacagggaagcaggggaggcggaaaaatagagtttgagaaacttttgtataagtagtttcaaactatttgagaggagaattaaagacatgcttgttttgtttcgactctgtttaagcacgctcaggacttggggagaggagtgaatattggggtacgggaggagggtgcgttgacggacagggtgggtcagggaaagaggaggactgagaagaagctcagggtttccttgtgaaaattctagggacacttcgctgcagcagagaatcgtccccattccgaacgcttcggcggcctagaccagaggcgcccttccctggagccggcgtgcgcgcttggggtccggagtggatggggctaaggctcagatgctagcgcgctcccagttcccccgctagccccatagtccagcggcagctgatattttcaagtttgacttcaatagaaagcgtcaagaccaccttccctagggcgagagcgaagtgtcccccggcccctggcgtccccgctctcctaaggactcctctcagttcaccaagcagatctccggttcggtgccagtccctaacacccaaggttgatcaccagcggtacaagaactgaggcaaagagatgcttttccttttcggagccgcgagactctctaacctccccaactcgctccacactcgccaacccagagttcggtaaaaggcgcgtctggtgaggtgccgcgctcggagagtgtcctggagcgccctacgccaccgccccgagagctagttcttgcgggcgtgccctggacagtatctgcagttctttggcgccggctctagggcgaggaaggaatctcgaaatctcagcccgcttcacaatctcctgagactctctgaagaaggagagtcccggactcccgcctgagcgtgctcgatatccaccgttgacactggaagctgggcgaccgccagcagaacctggatgcccgccaacaggtcctggcacggggggggggggggcgtccaccccacaacccccgtccctaagcgtgctttcaggatgatgcccccagagccttaattagcatcaactggctactgtctgtcggtcctgagcaaattagtgaagctcccagtcccctttcctcgtctaaataaactctgtctctctggaaggtgggaaagatggaataagatcacctgtaaaggctttgtggaaagtaccaagaccctggcatgacgcaatatggattgtaatcatcgtccccatttccccgaaattccctggctgttctccggttcctgaaaccgacttgggaaaaggatgaccacgctggagctgggaatatgggaagcctcatcatagtttccagtcctttctctgcgggtctaagaggctattgcataaccagggctgtgtacccctagacctccagatggtgccttgcacacagtaggctgatcagtaaaaatgtactgaataaattattcccccccaagaggtagggagtaatatctgcacttttcctcacaaggatgtctccttgggggaggaggatggagcagcccgtgtgttatcaccttttagcaagaaaacaaaacaaaacaaaaccagaa

SEQ ID NO: 176536 - DNA, 384 bp, Artificial Sequence
  derived and/or modified sequence
atgtggcgggaactcaggggttgccccggtggggatgtggaaactgcacagagactcagccagagaaggcgagggaaatcttctgaggcggtacctgagaagacctggcgcgcgcaaagaatgtcccaaaggcggagaggtgaatcatccgaagccgtacccgaaaaaacctggaaggagctacgaaattccgaaaccgtgcccgagaaaacctggaagcagctaaggcgatgtctgcaggaagacgtggagcgggttcagagactcagcttgctcctccatctagcagttttcttgtggataataatcgctattaatttcagcaattctggagtgaaatcacagagttcaacatacttgccgtcagggaaaattctaaagtag

SEQ ID NO: 176537 - DNA, 450 bp, Artificial Sequence
  derived and/or modified sequence
atgcggctgctgccccggaccagcatcccccggcggcagcccttctctcgctggcgaaagcagaaccttaaaacccctgtgtctctgaactgctcacgctcttgcaagctgcttgaggggcgaggaatgcctgccattttcataattgccctgcctcctcctaacacaatcgggggccctgccctcatcatttcattacaggtgtacccagccgcacctgagagacagagacctgcgagacgtggacacgatgatggcgggggcttcgtgaagaccaagatgggaatctgtcgagaaaagaaggagaggtctgactgttattgtgtttacatagaacgggaggacatcagagacagtatactgaaaaaaacatgcacgttgaacaactgcttcgctgagatgctgcttatatgcagttttgccccagcaaccttaccccaacccttatag

SEQ ID NO: 176538 - DNA, 1041 bp, Artificial Sequence
  derived and/or modified sequence
atgcacctgccgggatgtgcgcccgcgatggccgatgggagcttctctctcgccggtcacctcttacggtccccaggggggtccacctctagacttcactccatcgaggccatcttggggttcactaaggatgacggcatactcgggacctttcccgctgaacggggtgcccgcggggccaaggaacgagacaggcgcctcggcgctcgcccagcatgtcccaaagccccagaagagggctccgaaccgtcaccccctcctgcacccgccccggctccggaatacgaggcacctcgcccttactgtcctaaagaacctggggaggcaagaccttctcctggcttacctgtaggacctgctactggcgaggcaaagctgtccgaagaggagcagccaaaaaagaagcataggcgcaaccggaccacttttaccacctaccagctgcatgagcttgagcgggcgttcgagaaatcacactaccccgatgtgtattccagggaagagctggcgggcaaggtgaatcttccggaggtgcgtgttcaggtttggtttcaaaaccgcagagccaagtggcggaggcaggaaaagctggaggtctccagcatgaagctgcaggacagcccgctgctgagcttctcacgctctcctcccagcgcgacactgagtccgctgggagctggcccaggttccggggggggccctgccggtggggcgctgccactagagtcctggctgggacctcccctgccaggcgggggagccaccgcactgcagagcctgcccggattcggcccgccagcacagtctttacctgccagctataccccccccccgcccccaccgccattcttgaactccccgcctctgggacctggcctgcagcccttggcccccccccccccttcctatccatgcggtccggggtttggggataaattccccttggatgaagcggaccctaggaatagcagcatcgcggccctgcgtcttaaggcaaaggagcacatccaagcgattggcaagccctggcaggcgctgtag

SEQ ID NO: 176539 - DNA, 225 bp, Artificial Sequence
  derived and/or modified sequence
atgcacctgcccggctgtgcgccagctatggccgatggctccttttcattggccgggcaccttctgagatcacccggagggagtacgagtcgcttacactcaatcgaggctatacttggattcaccaaagatgatgggattctcgggactttccctgcagagagaggagccagaggggcgaaagaacgggaccgcaggttgggcgcgagacctgcatgcccctag

SEQ ID NO: 176540 - DNA, 1041 bp, Artificial Sequence
  derived and/or modified sequence
atgcacctgcccggctgtgccccagccatggctgatggcagcttcagcctggccggccacctgctgcggagccctgggggcagcaccagccggctgcacagcattgaggccatcctgggcttcaccaaggatgatggcatcctgggcaccttccctgctgagcggggggcccggggggccaaggagcgggaccggcggctgggcgcccggcctgcctgccccaaggcccctgaggagggcagcgagcccagccccccaccagccccagccccagccccagaatatgaggccccccggccctactgccccaaggagcccggggaggcccggcccagccctggcctgcctgtgggccctgccactggagaggccaagctgtctgaggaggagcagcccaagaagaagcacagaagaaacagaaccaccttcaccacctaccagctgcacgagctggagcgggcctttgagaagagccactacccagatgtgtacagccgggaggagctggccggcaaggtgaacctgcctgaggtgcgggtgcaggtgtggttccagaacagaagagccaagtggaggcggcaggagaagctggaggtgtcctccatgaagctgcaggacagccccctgctgtccttcagccgcagcccccccagcgccaccctgagccccctgggcgccggccctggcagcggcggcggccctgctggaggagccctgcccctggagagctggctgggcccccccctgcccggcggcggggccacagccctgcagagcctgcccggctttggacctccagcccagagcctgcctgccagctacaccccacctcctcctcctccacccttcctgaacagcccccccctgggccctggcctgcagcccctggcccctcctccacccagctacccctgtggccctggctttggagacaagttccccctggatgaggccgaccccaggaacagcagcattgctgccctgcggctgaaggccaaggagcacatccaggccatcggcaagccctggcaggccctgtag

SEQ ID NO: 176541 - DNA, 225 bp, Artificial Sequence
  derived and/or modified sequence
atgcacctgcccggctgtgccccagccatggctgatggcagcttcagcctggccggccacctgctgcggagccctgggggcagcaccagccggctgcacagcattgaggccatcctgggcttcaccaaggatgatggcatcctgggcaccttccctgctgagcggggggcccggggggccaaggagcgggaccggcggctgggcgcccggcctgcctgcccctag

SEQ ID NO: 176542 - DNA, 1041 bp, Artificial Sequence
  derived and/or modified sequence
atgcacctgcccggctgcgcccccgccatggccgacggcagcttctctcttgccggccacctactgcgttcccctgggggctctacttcgaggctccacagtatcgaagccatcctgggttttactaaggacgacggaattctggggactttcccagcggaaagaggtgcacgcggagccaaggagcgggacagacgactaggagcgaggccagcatgcccaaaggcacccgaggaaggctcagaaccatctccacctcccgcccccgcccccgctcccgaatatgaggcgcctcggccttattgcccaaaggaacctggggaggcgaggcctagccccggcctgccagtgggaccagccaccggcgaggctaagctctctgaggaggaacagcccaaaaaaaaacatagacgcaatcggactaccttcacaacttaccaattacacgagctagagcgggccttcgaaaagtctcattacccagatgtgtactctcgggaggagcttgctgggaaggttaacttgccagaggtccgcgtccaggtgtggttccagaaccggcgggctaagtggcgacggcaggagaagctcgaagtgagtagcatgaagctccaggactcccccctcctgagtttcagccggagccccccatccgccacactatccccactcggcgcgggccctggcagtgggggtggccctgctggcggggccctgcctctggaaagctggctgggcccccccctgccgggggggggagcaaccgcgctccagagcttaccaggttttggtccccctgctcagagtctgcccgcctcttacaccccacctccgcctcctcccccctttctgaattcacctccactgggccccgggttacagccactggccccaccccctccatcctacccatgtggccccggctttggggataaattcccactggacgaagcggatcctagaaacagttccatcgcagcgctccggcttaaggcgaaagagcatatacaagccattggcaagccttggcaggctctatag

SEQ ID NO: 176543 - DNA, 225 bp, Artificial Sequence
  derived and/or modified sequence
atgcacctgcccggctgcgcccccgccatggccgacggcagcttctctctcgcaggccacctgctgcgaagcccaggtggtagcacctcaagactacatagcattgaggccatcctcggatttaccaaggacgatggtatacttgggacttttcccgctgagaggggggctcgaggcgccaaggagcgggacagaaggttaggggcaaggcctgcttgcccatag

SEQ ID NO: 176544 - DNA, 1041 bp, Artificial Sequence
  derived and/or modified sequence
atgcacctcccaggctgcgcgccagcaatggctgacggatccttcagtctggccggacatctgctgcgttcccctgggggatccacttctcggctccactcaattgaggcaatattgggtttcactaaagacgatggaatcctcggtacttttcctgctgaacggggagctaggggtgccaaggagagggatcggagattgggggctcgaccagcttgccccaaggctcctgaagagggatccgagcccagccccccaccagccccagctcctgcacctgaatacgaggcacccaggccctattgtcctaaagagcctggcgaggcacggccaagccctggccttcctgtagggcctgctaccggcgaggccaaactctctgaggaggaacagccaaaaaaaaagcataggcgtaatcgcactacttttaccacttaccaactgcatgagctcgagcgcgcattcgagaagtcgcattaccctgacgtctactctcgggaagagctggctggtaaggtaaacctgcctgaggtcagggtgcaagtttggtttcagaaccgtcgagcaaaatggagaagacaggagaagttggaggtgtcctctatgaagctccaggattcacctcttctcagcttctcgcggagccccccaagcgcgaccctgagcccgcttggtgcaggtccgggttcaggcggaggaccagcagggggtgcactcccgctggaatcttggctgggccctcctttacccggtgggggtgcaacagccctgcagagtttgcccggttttggccctcctgcacagtctctgcccgcatcctatactccaccgcctcctccccctccattcctgaacagcccccctctgggcccaggcctgcaaccgctggccccacctccccctagctacccttgtggccctggctttggagacaaattccccctggatgaggcagatccacgcaacagctcgatagctgcattgcgtctcaaggccaaggagcacattcaggcaattggtaaaccctggcaggctctctag

SEQ ID NO: 176545 - DNA, 225 bp, Artificial Sequence
  derived and/or modified sequence
atgcatctgcccggatgcgctcctgccatggcagatgggtcgttcagcctcgccggtcacctactgcggagccccggtggcagcacgagccgcctccattcaatagaggctattcttggctttacaaaggacgatggcatcctcgggacttttcctgctgagaggggcgcaaggggtgcaaaggagcgggatagacgcctgggggcacggccagcatgcccttag

SEQ ID NO: 176546 - DNA, 473 bp, Artificial Sequence
  derived and/or modified sequence
gccggcgctcaagtccgaggggactgggaggagttacaacagatatagacggacaaactaaacgcgaggtccgggacttcgtacaacccagccaagaaaggagtgggtcccgaaaagggagccagcgaggggaaattcaaactgcgacgagtgcggggctgggaagccttcggctgggtctcggcgcttccagggggcacaggccagggtggcggccccgcggagcgccctcccgcctcccggcgctccccatgcacctgccgggctgcgcgccagccatggccgacgggagcttctcgcttgccggccacctgctccgcagcccgggcgggagcacctcgcgacttcacagcatcgaggccatcctggggtttaccaaggacgacgggatcctcggcaccttcccggcggagcggggcgcccggggcgcgaaggagcgggataggaggctgggcgcgcggcccgcctgcccc

SEQ ID NO: 176547 - DNA, 1041 bp, Artificial Sequence
  derived and/or modified sequence
atgcacctgcccggctgcgcccccgccatggccgacggcagcttcagcctggccggccacctgctgagaagccccggcggcagcaccagcagactgcacagcatcgaggccatcctgggcttcaccaaggacgacggcatcctgggcaccttccccgccgagagaggcgccagaggcgccaaggagagagacagaagactgggcgccagacccgcctgccccaaggcccccgaggagggcagcgagcccagccccccccccgcccccgcccccgcccccgagtacgaggcccccagaccctactgccccaaggagcccggcgaggccagacccagccccggcctgcccgtgggccccgccaccggcgaggccaagctgagcgaggaggagcagcccaagaagaagcacagaagaaacagaaccaccttcaccacctaccagctgcacgagctggagagagccttcgagaagagccactaccccgacgtgtacagcagagaggagctggccggcaaggtgaacctgcccgaggtgagagtgcaggtgtggttccagaacagaagagccaagtggagaagacaggagaagctggaggtgagcagcatgaagctgcaggacagccccctgctgagcttcagcagaagcccccccagcgccaccctgagccccctgggcgccggccccggcagcggcggcggccccgccggcggcgccctgcccctggagagctggctgggcccccccctgcccggcggcggcgccaccgccctgcagagcctgcccggcttcggcccccccgcccagagcctgcccgccagctacacccccccccccccccccccccccttcctgaacagcccccccctgggccccggcctgcagcccctggccccccccccccccagctacccctgcggccccggcttcggcgacaagttccccctggacgaggccgaccccagaaacagcagcatcgccgccctgagactgaaggccaaggagcacatccaggccatcggcaagccctggcaggccctgtag

SEQ ID NO: 176548 - DNA, 225 bp, Artificial Sequence
  derived and/or modified sequence
atgcacctgcccggctgcgcccccgccatggccgacggcagcttcagcctggccggccacctgctgagaagccccggcggcagcaccagcagactgcacagcatcgaggccatcctgggcttcaccaaggacgacggcatcctgggcaccttccccgccgagagaggcgccagaggcgccaaggagagagacagaagactgggcgccagacccgcctgcccctag

SEQ ID NO: 176549 - protein, 1128 aa, Artificial Sequence
  derived and/or modified sequence
MSRSVLQPSQQKLAEKLTILNDRGVGMLTRLYNIKKACGDPKAKPSYLIDKNLESAVKFIVRKFPAVETRNNNQQLAQLQKEKSEILKNLALYYFTFVDVMEFKDHVCELLNTIDVCQVFFDITVNFDLTKNYLDLIITYTTLMILLSRIEERKAIIGLYNYAHEMTHGASDREYPRLGQMIVDYENPLKKMMEEFVPHSKSLSDALISLQMVYPRRNLSADQWRNAQLLSLISAPSTMLNPAQSDTMPCEYLSLDAMEKWIIFGFILCHGILNTDATALNLWKLALQSSSCLSLFRDEVFHIHKAAEDLFVNIRGYNKRINDIRECKEAAVSHAGSMHRERRKFLRSALKELATVLSDQPGLLGPKALFVFMALSFARDEIIWLLRHADNMPKKSADDFIDKHIAELIFYMEELRAHVRKYGPVMQRYYVQYLSGFDAVVLNELVQNLSVCPEDESIIMSSFVNTMTSLSVKQVEDGEVFDFRGMRLDWFRLQAYTSVSKASLGLADHRELGKMMNTIIFHTKMVDSLVEMLVETSDLSIFCFYSRAFEKMFQQCLELPSQSRYSIAFPLLCTHFMSCTHELCPEERHHIGDRSLSLCNMFLDEMAKQARNLITDICTEQCTLSDQLLPKHCAKTISQAVNKKSKKQTGKKGEPEREKPGVESMRKNRLVVTNLDKLHTALSELCFSINYVPNMVVWEHTFTPREYLTSHLEIRFTKSIVGMTMYNQATQEIAKPSELLTSVRAYMTVLQSIENYVQIDITRVFNNVLLQQTQHLDSHGEPTITSLYTNWYLETLLRQVSNGHIAYFPAMKAFVNLPTENELTFNAEEYSDISEMRSLSELLGPYGMKFLSESLMWHISSQVAELKKLVVENVDVLTQMRTSFDKPDQMAALFKRLSSVDSVLKRMTIIGVILSFRSLAQEALRDVLSYHIPFLVSSIEDFKDHIPRETDMKVAMNVYELSSAAGLPCEIDPALVVALSSQKSENISPEEEYKIACLLMVFVAVSLPTLASNVMSQYSPAIEGHCNNIHCLAKAINQIAAALFTIHKGSIEDRLKEFLALASSSLLKIGQETDKTTTRNRESVYLLLDMIVQESPFLTMDLLESCFPYVLLRNAYHAVYKQSVTSSA

SEQ ID NO: 176550 - DNA, 3387 bp, Artificial Sequence
  derived and/or modified sequence
atgagtagatccgtattgcagccaagtcaacagaagcttgcagagaagctgaccattttgaacgacaggggcgtcggaatgctgacccggctttataacattaaaaaagcctgtggtgacccaaaggccaagcccagttacctcatcgataaaaatttggagagcgctgttaagtttattgtcaggaaattccctgcagtggaaaccaggaataataatcaacaactggcacagctgcagaaagagaagagcgaaatcctcaagaacctggcactttattatttcacatttgttgacgttatggagtttaaggaccacgtgtgtgaactgttgaatacgatcgatgtgtgccaggtgttttttgacatcacagtaaacttcgacctcactaagaattatctggacttgatcattacctataccactttgatgatcttactgtcccggatcgaagagcggaaagcaattattggactatacaactatgcccatgaaatgacccacggcgcttcagacagggagtatccccgcctaggccagatgattgtggattacgagaatccactcaagaaaatgatggaggagtttgtccctcactctaaatccctcagtgatgccctgatatcactccagatggtgtatccaagacgcaatctgagcgccgaccaatggaggaacgcccagctgttgtccttaatatccgcccccagtaccatgttaaacccagcacagagcgatacgatgccctgtgaatatctgtcactcgacgctatggaaaagtggataattttcggatttattctctgtcacggcatactaaatacagacgcgaccgcactgaatctttggaaattggccctccagtccagttcctgtctcagcctcttccgggacgaggtcttccatatacacaaggcagcagaggatctatttgtgaatatcagaggatacaataagcgtatcaacgatattcgtgagtgcaaagaagcagctgtgtcacacgctggcagtatgcacagggaaaggcgaaagtttctgcgcagtgccctaaaagagctcgccactgtcctctccgatcagccagggctgctcggtcccaaagctctgtttgtgtttatggccctcagcttcgctcgggacgagataatttggctcctcaggcacgccgataatatgccgaagaagtcagctgatgactttatcgataaacatatagctgaactgattttctatatggaggagctccgggcacatgtgagaaagtatggacccgtcatgcagcgttactacgtgcaatatctcagcggatttgacgccgttgtactgaatgagcttgtgcagaacctgtccgtgtgccccgaggatgagtcaatcataatgtcctccttcgtgaataccatgacttctctgtctgtaaagcaggttgaggacggcgaagtgttcgactttaggggaatgcgcttagattggtttcggctacaggcttacacatccgtctctaaagcgagtctgggcctggccgatcatagagagctcggcaagatgatgaataccatcatcttccacacaaaaatggtggatagcctcgtggaaatgctggtcgagacatctgacttgtctattttttgtttttattcccgggcatttgagaagatgtttcaacagtgtctggagctgcctagccagtcccggtactctattgccttccccctgctgtgtacccatttcatgtcttgcacgcatgagctgtgtcccgaagagaggcaccacataggcgatcgcagtctgtcactgtgtaacatgtttctggacgaaatggccaagcaggccaggaatctcattacagatatttgcactgaacaatgtactttaagcgaccagctgctgcctaaacactgtgcgaaaactatcagtcaagccgtgaacaagaaaagcaaaaagcagaccggcaagaagggggagccagaaagagagaagccaggagtggaaagcatgagaaaaaaccggctcgtggtgaccaacctcgataagctgcacacagctctgagtgaactctgcttctcaatcaattacgtcccaaatatggtggtctgggagcatacattcactccccgcgaatatcttacctcgcacctcgaaatccggtttaccaagagtatagtcggcatgaccatgtataaccaggcgactcaggagattgctaaaccttcagaattactgacttcagtgcgagcctatatgacagtgctacagagtatagagaattacgtgcaaattgatattacccgcgtgttcaacaatgtgctgcttcaacagactcagcacctagacagtcatggagaacctactatcactagtctctacacgaattggtaccttgaaacattgctccgacaggtgagcaacggtcatatcgcctatttcccggctatgaaagcttttgtgaatttaccaactgagaatgaactgactttcaatgccgaagagtattcggatatctctgaaatgagatctctgtccgagctcctggggccctatggcatgaaatttctgtctgaaagcctgatgtggcatatttccagccaggtggctgaacttaagaagcttgtggttgaaaatgtagacgtgctgactcagatgagaaccagcttcgataagcccgaccagatggccgccctgtttaagagactctcgtcggtcgattccgttttgaaaaggatgaccattatcggcgtgatcttgtctttccggagtctggctcaggaagcacttagggacgtcttgtcctatcacatacccttcctggtgtctagtatcgaggacttcaaggatcacatcccacgggagactgacatgaaggtcgccatgaacgtgtacgagttgagttccgccgcaggtttaccatgtgagatagacccagctctcgtcgtagctctctcctcacaaaagtcggagaacatttctcccgaggaagaatacaaaatcgcatgtctgctaatggtcttcgtcgctgtgtcactcccgacactggccagcaatgttatgagtcaatacagcccggctattgaaggacactgtaacaacatacactgcctcgccaaagcaataaatcagatcgctgccgcgctcttcactatccacaaaggctctatagaagacagactgaaagagttcttggccctggcaagctcctcactcttgaaaatcggtcaagaaacagacaaaacaaccacccgcaatagagagtctgtgtaccttcttctggacatgatcgtccaggaatcgccgtttctaaccatggatctcctcgagtcttgtttcccatacgtactgctccgcaacgcctaccatgcagtgtataagcaatcggttaccagtagtgcttag

SEQ ID NO: 176551 - DNA, 3387 bp, Artificial Sequence
  derived and/or modified sequence
atgagccgctctgtgctgcagcccagccagcagaagctggccgagaagctgaccatcctgaatgaccggggcgtgggcatgctgacccggctgtacaacatcaagaaggcctgtggggaccccaaggccaagcccagctacctgattgacaagaacctggagagcgctgtgaagttcatcgtgaggaagtttcctgctgtggagaccaggaacaacaaccagcagctggcccagctgcagaaggagaagtctgagatcctgaagaacctggccctgtactacttcacctttgtggatgtgatggagttcaaggaccacgtgtgtgagctgctgaacaccattgatgtgtgccaggtgttctttgacatcaccgtgaactttgacctgaccaagaactacctggacctgatcatcacctacaccaccctgatgatcctgctgagccgcatcgaggagaggaaggccatcatcggcctgtacaactatgcccacgagatgacccacggggccagtgaccgggagtacccccggctgggccagatgattgtggactatgagaaccccctgaagaagatgatggaggagtttgtgccccacagcaagagcctgagtgatgccctgatcagcctgcagatggtgtaccccaggaggaacctgtctgctgaccagtggagaaatgcccagctgctgagcctcatcagcgcccccagcaccatgctgaacccagcccagagcgacaccatgccctgtgagtacctgagcctggatgccatggagaagtggatcatcttcggcttcatcctgtgccacggcatcctgaacacagatgccacagccctgaacctgtggaagctggccctgcagagcagcagctgcctgagcctcttcagagatgaggtgttccacatccacaaggctgctgaggacctgtttgtgaacatccggggctacaacaagaggatcaatgacatccgggagtgcaaggaggccgctgtgtcccatgctggctccatgcaccgggagaggaggaagttcctgcggagcgccctgaaggagctggccaccgtgctgagtgaccagcccggcctgctgggccccaaggccctgtttgtgttcatggccctgagctttgccagagatgagatcatctggctgctgcggcatgctgacaacatgcccaagaagtctgcagatgacttcatcgacaagcacatcgccgagctgatcttctacatggaggagctgcgggcccacgtgaggaaatatggccctgtgatgcagcgctactacgtgcagtacctgagcggctttgatgctgtggtgctgaatgagctggtgcagaacctgtctgtgtgcccagaagatgagagcatcatcatgagcagctttgtgaacaccatgaccagcctgtctgtgaagcaggtggaggatggagaggtgtttgacttccggggcatgaggctggactggttccggctgcaggcctacacctctgtgtccaaggccagcctgggcctggccgaccaccgggagctgggcaagatgatgaacaccatcatcttccacaccaagatggtggacagcctggtggagatgctggtggagaccagtgacctgagcatcttctgcttctacagccgggcctttgagaagatgttccagcagtgcctggagctgcccagccagagccgctacagcatcgccttccccctgctgtgcacccacttcatgagctgcacccatgagctgtgcccagaggagcggcaccacatcggggacaggagcctgagcctgtgcaacatgttcctggatgagatggccaagcaggccaggaacctgatcacagacatctgcacagagcagtgcaccctgagtgaccagctgctgcccaagcactgtgccaagaccatcagccaggccgtgaacaagaagagcaagaagcagacaggcaagaagggggagcctgagcgggagaagccaggagtggagagcatgaggaagaaccggctggtggtgaccaacctggacaagctgcacacagccctgtctgagctgtgcttcagcatcaactacgtgcccaacatggtggtgtgggagcacaccttcaccccccgggagtacctgaccagccacctggagatccgcttcaccaagagcatcgtgggcatgaccatgtacaaccaggccacccaggagatcgccaagcccagcgagctgctgacctctgtgcgggcctacatgacagtgctgcagagcattgagaactacgtgcagattgacatcaccagggtcttcaacaacgtgctgctgcagcagacccagcacctggacagccatggagagcccaccatcaccagcctgtacaccaactggtacctggagaccctgctgcggcaggtgtccaatggccacatcgcctacttccctgccatgaaggcctttgtgaacctgcccacagaaaatgagctgaccttcaatgctgaggagtacagcgacatcagcgagatgaggagcctgtctgagctgctgggcccctacggcatgaagttcctgtctgagagcctgatgtggcacatcagcagccaggtggccgagctgaagaagctggtggtggagaatgtggatgtgctgacccagatgaggaccagctttgacaagccagaccagatggccgccctcttcaagaggctgagctctgtggacagcgtgctgaagaggatgaccatcatcggggtcatcctgtccttccgcagcctggcccaggaggccctgagagatgtgctgagctaccacatccccttcctggtgagcagcattgaggacttcaaggaccacatcccccgggagacagacatgaaggtggccatgaatgtgtatgagctgagcagcgctgctggcctgccctgtgaaattgatcctgccctggtggtggccctgagcagccagaagtctgagaacatcagccctgaggaggagtacaagatcgcctgcctgctgatggtgtttgtggccgtgtccctgcccaccctggccagcaatgtgatgagccagtacagccctgccatcgagggccactgcaacaacatccactgcctggccaaggccatcaaccagattgctgctgccctcttcaccatccacaagggcagcattgaggaccggctgaaggagttcctggccctggccagcagcagcctgctgaagattggccaggagacagacaagaccaccaccaggaaccgggagagcgtgtacctgctgctggacatgattgtgcaggagagccccttcctgaccatggacctgctggagagctgcttcccctacgtgctgctgagaaatgcctaccacgctgtgtacaagcagagcgtgaccagcagcgcctag

SEQ ID NO: 176552 - DNA, 4585 bp, Artificial Sequence
  derived and/or modified sequence
ggaagcggcctcgttctcagccgccggagacgccgccgccgccgccgccgccgccacacctagtggagcagccggggaaggcggctcgttgggggctggggcggagagcgccgggggtgggggcggaagggcggcgggcggaaggcaggaggctgccggggcgcgggctgctgcgggagaaggggctccgaggagtccgccgcggctcgctctgtcgccggcgcgggattggggcgcgagggccatgggcgcgctctcctaaggcggaggtcgcgggcgggaggggaggaggcccgagagaggctgctgcgaaggccgcgggcccgtgactgggcgcgaggcggccggcggcggcggcggcaccagcaccaccatgtcgcgctcagtgctgcagcccagtcagcagaagctggcggagaagctcaccatcctcaacgaccggggcgtcggcatgctcacccgcctctacaacatcaagaaggcatgtggagaccccaaggcaaaaccatcctatcttatcgacaaaaacctggaatctgctgtgaaattcatagtcagaaaattccctgctgtagaaacccgcaacaacaatcaacagcttgcacaactacagaaagaaaaatcagagattctgaaaaatctggcattatattacttcacatttgtagatgttatggaatttaaggaccatgtttgtgaattgctgaatactattgacgtttgccaagtcttctttgatattactgtaaactttgatttaacaaagaactacttagatttaattataacctatacaacactaatgatactgctgtctcgaattgaagaaaggaaggcaatcattggattatacaactatgcccatgaaatgactcatggagcaagtgacagagaatacccacgccttggccagatgattgtggattatgaaaaccctttaaagaagatgatggaagaatttgtaccccatagcaagtctctttcagatgcactaatttctcttcaaatggtatatcctcgaaggaatctttcagctgaccagtggagaaatgcccagttattgagcctcatcagtgcacctagtacaatgcttaatccagcacagtccgacactatgccttgtgaatacctctctttggatgcaatggaaaagtggattatctttggctttattttgtgccatgggatcctaaatactgacgctacagcactgaacctttggaaactagctcttcaaagtagctcttgcctctctctctttcgggatgaagttttccacattcacaaagctgcagaagacttatttgtaaacatacgaggctataataaacgtattaatgacataagagaatgcaaggaggcagccgtgtcacatgctggttcaatgcacagagaaagacgcaagtttttaagatctgcactgaaggaattggctactgtcctctctgatcaacctggattgctaggtcccaaggcactttttgtttttatggcattatcctttgcccgtgatgaaatcatctggctacttcgtcatgcagataacatgccaaagaagagtgcagacgactttatagataagcacattgctgaattaatattttacatggaagaacttagagcacatgtgaggaaatacggacctgtaatgcagaggtattacgtgcagtacctttctggctttgatgctgttgtcctcaatgaactcgtgcagaatctttctgtttgccctgaagatgaatcaatcatcatgtcctcttttgttaacactatgacttccctaagtgtaaaacaagttgaagatggggaagtatttgatttcagaggaatgagattagattggtttaggttacaggcatatactagtgtctcaaaggcttcacttggccttgcagatcacagagaacttggaaagatgatgaatacaataatttttcatacaaaaatggtagattccttggtggaaatgttggtggaaacatcagatctctccatattttgtttttatagtcgtgcttttgagaagatgtttcaacagtgtttggagttaccctctcaatcaagatactcaattgcatttccactactttgcactcattttatgagttgcacgcatgaactatgtccagaagagcgacatcatattggagatcgcagtctttccttatgtaatatgttcctagatgaaatggccaaacaagctcgaaatctcatcactgatatttgcacagaacagtgtacccttagtgaccagttgctacccaagcattgtgccaaaactatcagtcaagcagtgaataagaaatcaaaaaagcagactggtaagaaaggggaacctgaaagggagaaaccaggtgttgagagcatgaggaaaaacaggctggttgtgaccaaccttgataaattgcacactgcactttctgagttatgcttctctataaattatgtaccaaacatggtggtatgggaacatacctttaccccacgagaatatttgacttctcatctggaaatacgctttaccaagtcaattgttgggatgactatgtataatcaagccacacaggaaattgcaaaaccttcagaacttctaacaagtgtaagagcatacatgaccgtactccagtcaatagaaaactatgtgcagattgatattacaagagtatttaataatgtgcttcttcaacaaacacaacatttagacagtcatggagagccaaccattacaagtctatacacaaattggtatttggaaactttgttacgacaagtcagcaatggccatatagcatattttcctgcaatgaaagcgtttgtgaacttacctacagaaaatgaattaacattcaatgcagaggaatattctgacatatcagaaatgaggtcattatcagaactactaggcccatatggtatgaagtttctaagtgaaagccttatgtggcatatttcatcacaagttgctgaacttaagaaacttgtggtggagaatgttgatgtgttaacacaaatgaggaccagctttgacaaaccagaccagatggctgcactgtttaaaagattatcatctgttgacagtgtcttgaagaggatgacaataattggtgtaattttatccttccgatcattggcacaagaagcacttagagatgtcttatcctaccacattccttttcttgtaagttcaattgaagattttaaggatcacattccaagggaaactgatatgaaggttgcaatgaatgtgtatgagttatcatcagctgccggattaccttgtgagattgatcctgcattggtcgtagctctttcttcacaaaaatcggaaaacattagtccagaagaagagtataaaattgcctgccttctcatggtgtttgtggcagtttctttgccaacactggccagtaatgtgatgtctcagtacagccctgctatagaagggcattgcaacaacatacattgcttggccaaagccatcaaccagattgctgcagctttgtttacaattcacaaaggaagcattgaagaccgtcttaaagaatttctggcgcttgcatcctccagtctactgaaaattggccaggagacagataaaactacaacaagaaatagagaatctgtttatttactgctagatatgattgtacaagaatctccattccttacaatggatcttttggaatcttgttttccttatgtcttgctgagaaatgcataccatgctgtctacaaacaaagtgttacatcttctgcataaaattacctacttaatcaagataagcacgcatttttgttgccttggttttacctgtagactgtggaactattttaccttaagacctgaaaaagttttgtggattataaatttctttcatacggttgtattttctgatcattggtttcttaatatggttgtactacagtatacttggttgatttaggttgcacattcactgaattcactgagattattcctataattttaaagtatcatttatttgaaaaacatacattatcaacatgtttttgatatttgataatgaaaaaaatctttgcttgtttatttctgaaaaagaactgtatttagtgattattttagatagtgatattatagtattcatctgtgtgtaaattatttcatatagggaagagttctgatctgtacctatggttcttattgaaaacaacattggatgtgcatttctgtgatgttatgaatacatttctactttattttgaaacatttgccaaactaaatactgtaacactgtataacatttaaaaatgttaaagaactgcttagtattagaagcagatcatttcccaaaattctaagagcagcagcatatgttgttgcttgtataaagcctagcgataatttttagactaacttccatggtgccctgttggcattagcactaccattgtaccctgctgtataataaacaatcttagacatttatcaactgttgatacaaatgttagtccctaaccactttttatatatgttttaaatttttgaaattcaagtgtacctgccataacataaaataaacactagactgtatcacacttcgattga

SEQ ID NO: 176553 - DNA, 3387 bp, Artificial Sequence
  derived and/or modified sequence
atgagccggagcgtgctgcagcccagccagcagaagctggccgagaagctcacgattcttaacgatagaggagtgggaatgctgacaagactgtacaatatcaagaaggcttgtggcgaccctaaggctaagcctagctacttaatcgataagaatttagaaagcgcagtcaagttcatcgtgaggaagttcccagcagtggaaaccagaaacaacaaccaacagctggctcagctacagaaagagaagtccgaaatcctcaaaaatctggcactctattattttacgtttgtggatgtgatggagttcaaggatcatgtgtgtgagttgttgaacaccatcgacgtgtgccaggtgttttttgacataacagtaaacttcgacctaactaagaactatctggatctcattatcacatatacaactctaatgattcttcttagccgaatagaggagcggaaggccatcatcggtttatataactacgcccatgagatgacccatggcgcgtccgatagagagtacccaaggctgggccaaatgattgtggattatgagaatcctctgaaaaaaatgatggaggagtttgtgcctcatagcaagtcactgtccgatgcactaatttccttgcagatggtatatccgagacggaacttgagcgcagatcagtggaggaacgcgcagctgctcagtcttatctccgcgcctagcaccatgctcaaccccgctcagagtgacactatgccctgcgagtatctcagccttgacgcgatggagaagtggatcatattcgggtttattctttgccacggcatcctcaatacagatgcaacagctctgaatctgtggaagttagccctgcagtcctcatcttgcctgagcctgttccgtgacgaagtatttcacatacataaggctgctgaggacctttttgtgaatatcagagggtacaacaagagaatcaatgacatacgggagtgtaaagaggccgcagtgtctcacgccggcagtatgcatcgcgagcgccgcaagtttttgaggtctgcgctgaaggagctcgctaccgtcctgagtgaccaacccggcctcctgggacccaaagcgctgttcgtttttatggccctcagctttgcccgggacgagattatctggttgctgcggcacgccgataacatgccaaaaaagtcagcggacgacttcatcgacaagcacatcgcagagctcatcttctacatggaagaattgagggcccacgtaaggaagtacgggcccgtgatgcagcggtactacgttcagtatctatctggcttcgacgcggtcgttttgaacgagctggtccaaaaccttagcgtgtgtccagaggatgagtctattatcatgtcgagcttcgtcaataccatgacaagcttaagcgttaagcaggtagaggacggagaagtctttgacttccgaggcatgcggctcgactggttccgcctccaggcgtacacctctgtgagcaaggcctcactgggcctggcagatcatagggaactgggaaagatgatgaatactattattttccataccaagatggttgactcactggtggaaatgttggtggaaacttctgatctgtcaattttctgcttctacagtcgggcattcgagaaaatgttccagcaatgcttagaacttccatcacagtcgcgctacagcattgcttttccactcctttgtactcactttatgtcatgtacacatgaactgtgtcctgaagaacgccaccatataggagaccgatcgctgagcctatgtaacatgttcctggacgaaatggctaagcaggctcggaatcttataactgacatatgtaccgagcagtgtacactttctgaccagctgttgcccaagcactgtgccaagaccattagtcaggccgtgaataagaagtccaagaaacagaccggaaaaaagggggagccagagagagagaagccaggcgtggaatcaatgcggaaaaaccgcctggtggtgacaaatctcgataagctgcacacagccctgagcgaattgtgttttagcatcaactacgtacctaatatggtcgtgtgggaacatacgtttacccccagggagtacttgacatcccaccttgagattagattcacgaagtccattgtgggcatgactatgtacaaccaggctacacaagaaatagcaaagcctagtgaactgttaaccagcgtgcgcgcgtacatgacagtcctgcagagtatcgagaactacgttcaaattgacattacacgcgtgtttaataatgttctgctgcagcaaacccaacatttagacagccatggcgaacccactatcaccagcctgtataccaactggtatttagaaactttacttcgtcaggtcagtaacggacatattgcgtacttccccgccatgaaagccttcgtcaatctgccaaccgaaaatgagctgactttcaatgctgaagagtattccgacatctcagagatgcgaagtctcagcgagctcctgggaccatacggtatgaaatttctctccgaatccctgatgtggcacatttcaagccaagtcgccgagctcaaaaaactggtggtggaaaacgttgatgtactgacacaaatgagaactagcttcgataagcctgaccagatggccgcactgttcaagcgtctctcgtctgtcgacagcgtactgaaaagaatgacgataatcggggttattttaagctttagatccctggctcaggaagcgttaagagatgtgctctcatatcatattcccttcctcgtgagctcgatagaggacttcaaggaccatatcccacgggagacagacatgaaagtggccatgaatgtttacgaactgagcagcgctgcaggactgccttgcgagatcgacccagccttggtcgtcgctctctctagccagaagagcgagaacatttcccctgaggaggaatacaagatcgcgtgtttgcttatggtttttgtggcagtttcattacccaccctggcctcaaacgtgatgagccagtattcacccgcaattgagggtcattgcaataatattcattgcctggccaaagccatcaaccaaattgccgccgccctctttaccatccataagggctccattgaggacaggctgaaggagttcctggctcttgcaagcagctctttgttaaagatcggacaagagactgataagaccaccacaaggaaccgagaaagcgtgtacctgctgctggatatgatcgtgcaagagtccccttttttgacaatggaccttttggaatcgtgcttcccgtatgttcttttgagaaatgcttatcacgccgtatataagcaatcagtgacatctagcgcctag

SEQ ID NO: 176554 - DNA, 3387 bp, Artificial Sequence
  derived and/or modified sequence
atgtcgcgcagcgtgttgcagccatctcaacagaagctggcagaaaagctcaccattttaaacgacagaggtgtgggcatgcttactcgcctgtacaacatcaaaaaggcatgtggggatcccaaggccaagccatcttatttaattgataaaaatctggagagcgccgtgaagttcatcgttcggaaatttccagccgtggaaacacgcaataacaatcaacagctggctcagctccaaaaagaaaagtccgagattctcaaaaatctagctttgtactatttcaccttcgtggatgtgatggagttcaaagatcacgtttgcgagcttctgaatactattgacgtgtgtcaggtgtttttcgatataactgtgaacttcgacctcacaaagaattatttggacttgatcatcacctataccacgctcatgatccttctgagccgtatcgaggaaagaaaagctatcatcgggctgtacaactatgcgcacgagatgacccatggtgcgtccgatagggagtatccccgactgggccaaatgatcgttgactatgagaaccccctgaagaagatgatggaggaattcgtcccgcattcgaaatccttgtccgatgcgcttatcagcctgcagatggtgtacccgaggaggaacctgagcgccgaccagtggaggaacgcccagcttctgtccttgatttcagcgccatctaccatgctgaacccagcccagtccgacaccatgccctgcgaatatctatccctcgacgctatggagaaatggataatattcggattcattctttgtcatggtatcctcaacaccgatgccaccgcccttaacctctggaagctcgcgttacagtctagcagctgcttatctctgtttagagatgaggtgtttcacattcacaaggcagcggaagatctgtttgtcaacattcggggatacaacaagaggatcaatgacatcagggaatgtaaagaagccgcagtcagccatgcgggatcgatgcatagggagcggcgaaagttcttacggtctgcactcaaagagctggccacagttctcagcgaccagcctggacttctggggcctaaggctctgttcgtttttatggcgctcagttttgccagggatgaaattatctggctcttacggcatgcagataatatgccgaaaaagtccgccgatgattttattgacaagcacatcgctgaactgatcttctacatggaggaactgagggcccatgtaaggaaatacggcccagttatgcagcggtactatgtccagtacctgagcggattcgacgctgtcgtgctcaacgagttagtgcagaacctctccgtctgtcctgaggatgagagcattattatgtcttctttcgtaaacaccatgactagcctgagtgtgaagcaggttgaggacggcgaggtcttcgacttccggggtatgcggctggactggttcagactccaggcatacaccagcgtcagcaaggccagtctcggactcgccgaccacagagagctgggaaagatgatgaatacaatcatcttccatactaagatggtggacagtctggtcgaaatgcttgtggagacaagtgatctgtccatcttctgtttttatagcagggcctttgagaaaatgttccaacagtgcctggaacttcctagccagagcagatactccatcgccttccctctgctctgcacgcattttatgtcgtgcacacatgaattgtgtccggaggagcgacatcacatcggagatagaagtctttccctatgcaatatgttccttgatgagatggcgaaacaggctaggaatctgatcaccgatatctgtaccgaacagtgcacactttcagatcagcttcttcctaaacattgcgcaaagaccatctctcaggccgtgaataagaagagcaagaagcagacagggaaaaaaggagagcctgagcgcgagaaacccggtgtcgaaagcatgcggaaaaaccgcttagttgtgacaaacctggacaagctgcacacagccctgtctgaactctgtttctccatcaactacgtgcccaacatggtggtgtgggagcacacctttacaccgagagagtacctgacctcccatctcgaaatccggtttaccaagagcattgttgggatgaccatgtacaatcaagcaacccaggaaatcgccaagccttcagagctcttgacttctgtccgcgcttacatgactgtgctgcagagcatcgagaactatgtccagatcgatatcacaagagtgttcaataacgtgcttctccagcagacacagcaccttgattcccacggcgagcccactattacctccctgtatactaattggtatctggagaccctactgcgacaggtgtctaatggtcatatcgcctattttccggcaatgaaggcttttgtgaacttacccaccgagaatgagcttaccttcaacgccgaggagtattcggatatcagcgagatgcggtccctgtccgagctgcttggcccttatggcatgaagttcctgtccgagagtcttatgtggcatattagctcccaagtagccgagctgaagaagctggtggtcgagaacgtagacgtacttactcaaatgcggacctccttcgacaaacccgaccagatggccgctctgtttaaaagactgtcctcagtggatagtgtactcaagaggatgactatcatcggagtgattctgtcctttcggagcctggcacaggaggccttgagggatgtgctctcctaccacattcccttcctagttagcagcatcgaagactttaaggaccatatccctcgcgagaccgatatgaaggtggccatgaatgtgtatgaactgtcctccgccgctggtctcccatgtgagattgacccagctctcgtggtggccctgagtagccagaagtctgaaaatatcagccccgaggaggagtataagattgcttgtttacttatggttttcgtggcggtgtcactccccaccctcgctagcaacgtcatgtcccagtactccccagctatcgagggccattgcaataatattcattgcctcgcgaaggccataaaccaaatagcagccgctctttttaccatccataaaggatctattgaggatcgtctaaaggaattcctcgccctggcttcaagttctctgctcaagatcggccaagaaacagacaagactacaaccaggaaccgggaaagcgtttacctcctcctggacatgatcgtgcaggagtcccctttcctgacaatggacctgctggagtcctgctttccctatgtgctgttgcgtaatgcctatcacgccgtgtataaacaaagcgtgacttcctctgcctag

SEQ ID NO: 176555 - DNA, 3387 bp, Artificial Sequence
  derived and/or modified sequence
atgagcagaagcgtgctgcagcccagccagcagaagctggccgagaagctgaccatcctgaacgacagaggcgtgggcatgctgaccagactgtacaacatcaagaaggcctgcggcgaccccaaggccaagcccagctacctgatcgacaagaacctggagagcgccgtgaagttcatcgtgagaaagttccccgccgtggagaccagaaacaacaaccagcagctggcccagctgcagaaggagaagagcgagatcctgaagaacctggccctgtactacttcaccttcgtggacgtgatggagttcaaggaccacgtgtgcgagctgctgaacaccatcgacgtgtgccaggtgttcttcgacatcaccgtgaacttcgacctgaccaagaactacctggacctgatcatcacctacaccaccctgatgatcctgctgagcagaatcgaggagagaaaggccatcatcggcctgtacaactacgcccacgagatgacccacggcgccagcgacagagagtaccccagactgggccagatgatcgtggactacgagaaccccctgaagaagatgatggaggagttcgtgccccacagcaagagcctgagcgacgccctgatcagcctgcagatggtgtaccccagaagaaacctgagcgccgaccagtggagaaacgcccagctgctgagcctgatcagcgcccccagcaccatgctgaaccccgcccagagcgacaccatgccctgcgagtacctgagcctggacgccatggagaagtggatcatcttcggcttcatcctgtgccacggcatcctgaacaccgacgccaccgccctgaacctgtggaagctggccctgcagagcagcagctgcctgagcctgttcagagacgaggtgttccacatccacaaggccgccgaggacctgttcgtgaacatcagaggctacaacaagagaatcaacgacatcagagagtgcaaggaggccgccgtgagccacgccggcagcatgcacagagagagaagaaagttcctgagaagcgccctgaaggagctggccaccgtgctgagcgaccagcccggcctgctgggccccaaggccctgttcgtgttcatggccctgagcttcgccagagacgagatcatctggctgctgagacacgccgacaacatgcccaagaagagcgccgacgacttcatcgacaagcacatcgccgagctgatcttctacatggaggagctgagagcccacgtgagaaagtacggccccgtgatgcagagatactacgtgcagtacctgagcggcttcgacgccgtggtgctgaacgagctggtgcagaacctgagcgtgtgccccgaggacgagagcatcatcatgagcagcttcgtgaacaccatgaccagcctgagcgtgaagcaggtggaggacggcgaggtgttcgacttcagaggcatgagactggactggttcagactgcaggcctacaccagcgtgagcaaggccagcctgggcctggccgaccacagagagctgggcaagatgatgaacaccatcatcttccacaccaagatggtggacagcctggtggagatgctggtggagaccagcgacctgagcatcttctgcttctacagcagagccttcgagaagatgttccagcagtgcctggagctgcccagccagagcagatacagcatcgccttccccctgctgtgcacccacttcatgagctgcacccacgagctgtgccccgaggagagacaccacatcggcgacagaagcctgagcctgtgcaacatgttcctggacgagatggccaagcaggccagaaacctgatcaccgacatctgcaccgagcagtgcaccctgagcgaccagctgctgcccaagcactgcgccaagaccatcagccaggccgtgaacaagaagagcaagaagcagaccggcaagaagggcgagcccgagagagagaagcccggcgtggagagcatgagaaagaacagactggtggtgaccaacctggacaagctgcacaccgccctgagcgagctgtgcttcagcatcaactacgtgcccaacatggtggtgtgggagcacaccttcacccccagagagtacctgaccagccacctggagatcagattcaccaagagcatcgtgggcatgaccatgtacaaccaggccacccaggagatcgccaagcccagcgagctgctgaccagcgtgagagcctacatgaccgtgctgcagagcatcgagaactacgtgcagatcgacatcaccagagtgttcaacaacgtgctgctgcagcagacccagcacctggacagccacggcgagcccaccatcaccagcctgtacaccaactggtacctggagaccctgctgagacaggtgagcaacggccacatcgcctacttccccgccatgaaggccttcgtgaacctgcccaccgagaacgagctgaccttcaacgccgaggagtacagcgacatcagcgagatgagaagcctgagcgagctgctgggcccctacggcatgaagttcctgagcgagagcctgatgtggcacatcagcagccaggtggccgagctgaagaagctggtggtggagaacgtggacgtgctgacccagatgagaaccagcttcgacaagcccgaccagatggccgccctgttcaagagactgagcagcgtggacagcgtgctgaagagaatgaccatcatcggcgtgatcctgagcttcagaagcctggcccaggaggccctgagagacgtgctgagctaccacatccccttcctggtgagcagcatcgaggacttcaaggaccacatccccagagagaccgacatgaaggtggccatgaacgtgtacgagctgagcagcgccgccggcctgccctgcgagatcgaccccgccctggtggtggccctgagcagccagaagagcgagaacatcagccccgaggaggagtacaagatcgcctgcctgctgatggtgttcgtggccgtgagcctgcccaccctggccagcaacgtgatgagccagtacagccccgccatcgagggccactgcaacaacatccactgcctggccaaggccatcaaccagatcgccgccgccctgttcaccatccacaagggcagcatcgaggacagactgaaggagttcctggccctggccagcagcagcctgctgaagatcggccaggagaccgacaagaccaccaccagaaacagagagagcgtgtacctgctgctggacatgatcgtgcaggagagccccttcctgaccatggacctgctggagagctgcttcccctacgtgctgctgagaaacgcctaccacgccgtgtacaagcagagcgtgaccagcagcgcctag

SEQ ID NO: 176556 - protein, 859 aa, Artificial Sequence
  derived and/or modified sequence
MACRWSTKESPRWRSALLLLFLAGVYGNGALAEHSENVHISGVSTACGETPEQIRAPSGIITSPGWPSEYPAKINCSWFIRANPGEIITISFQDFDIQGSRRCNLDWLTIETYKNIESYRACGSTIPPPYISSQDHIWIRFHSDDNISRKGFRLAYFSGKSEEPNCACDQFRCGNGKCIPEAWKCNNMDECGDSSDEEICAKEANPPTAAAFQPCAYNQFQCLSRFTKVYTCLPESLKCDGNIDCLDLGDEIDCDVPTCGQWLKYFYGTFNSPNYPDFYPPGSNCTWLIDTGDHRKVILRFTDFKLDGTGYGDYVKIYDGLEENPHKLLRVLTAFDSHAPLTVVSSSGQIRVHFCADKVNAARGFNATYQVDGFCLPWEIPCGGNWGCYTEQQRCDGYWHCPNGRDETNCTMCQKEEFPCSRNGVCYPRSDRCNYQNHCPNGSDEKNCFFCQPGNFHCKNNRCVFESWVCDSQDDCGDGSDEENCPVIVPTRVITAAVIGSLICGLLLVIALGCTCKLYSLRMFERRSFETQLSRVEAELLRREAPPSYGQLIAQGLIPPVEDFPVCSPNQASVLENLRLAVRSQLGFTSVRLPMAGRSSNIWNRIFNFARSRHSGSLALVSADGDEVVPSQSTSREPERNHTHRSLFSVESDDTDTENERRDMAGASGGVAAPLPQKVPPTTAVEATVGACASSSTQSTRGGHADNGRDVTSVEPPSVSPARHQLTSALSRMTQGLRWVRFTLGRSSSLSQNQSPLRQLDNGVSGREDDDDVEMLIPISDGSSDFDVNDCSRPLLDLASDQGQGLRQPYNATNPGVRPSNRDGPCERCGIVHTAQIPDTCLEVTLKNETSDDEALLLC

SEQ ID NO: 176557 - DNA, 2580 bp, Artificial Sequence
  derived and/or modified sequence
atggcctgcagatggagcaccaaggagagccccagatggagaagcgccctgctgctgctgttcctggccggcgtgtacggcaacggcgccctggccgagcacagcgagaacgtgcacatcagcggcgtgagcaccgcctgcggcgagacccccgagcagatcagagcccccagcggcatcatcaccagccccggctggcccagcgagtaccccgccaagatcaactgcagctggttcatcagagccaaccccggcgagatcatcaccatcagcttccaggacttcgacatccagggcagcagaagatgcaacctggactggctgaccatcgagacctacaagaacatcgagagctacagagcctgcggcagcaccatcccccccccctacatcagcagccaggaccacatctggatcagattccacagcgacgacaacatcagcagaaagggcttcagactggcctacttcagcggcaagagcgaggagcccaactgcgcctgcgaccagttcagatgcggcaacggcaagtgcatccccgaggcctggaagtgcaacaacatggacgagtgcggcgacagcagcgacgaggagatctgcgccaaggaggccaacccccccaccgccgccgccttccagccctgcgcctacaaccagttccagtgcctgagcagattcaccaaggtgtacacctgcctgcccgagagcctgaagtgcgacggcaacatcgactgcctggacctgggcgacgagatcgactgcgacgtgcccacctgcggccagtggctgaagtacttctacggcaccttcaacagccccaactaccccgacttctacccccccggcagcaactgcacctggctgatcgacaccggcgaccacagaaaggtgatcctgagattcaccgacttcaagctggacggcaccggctacggcgactacgtgaagatctacgacggcctggaggagaacccccacaagctgctgagagtgctgaccgccttcgacagccacgcccccctgaccgtggtgagcagcagcggccagatcagagtgcacttctgcgccgacaaggtgaacgccgccagaggcttcaacgccacctaccaggtggacggcttctgcctgccctgggagatcccctgcggcggcaactggggctgctacaccgagcagcagagatgcgacggctactggcactgccccaacggcagagacgagaccaactgcaccatgtgccagaaggaggagttcccctgcagcagaaacggcgtgtgctaccccagaagcgacagatgcaactaccagaaccactgccccaacggcagcgacgagaagaactgcttcttctgccagcccggcaacttccactgcaagaacaacagatgcgtgttcgagagctgggtgtgcgacagccaggacgactgcggcgacggcagcgacgaggagaactgccccgtgatcgtgcccaccagagtgatcaccgccgccgtgatcggcagcctgatctgcggcctgctgctggtgatcgccctgggctgcacctgcaagctgtacagcctgagaatgttcgagagaagaagcttcgagacccagctgagcagagtggaggccgagctgctgagaagagaggccccccccagctacggccagctgatcgcccagggcctgatcccccccgtggaggacttccccgtgtgcagccccaaccaggccagcgtgctggagaacctgagactggccgtgagaagccagctgggcttcaccagcgtgagactgcccatggccggcagaagcagcaacatctggaacagaatcttcaacttcgccagaagcagacacagcggcagcctggccctggtgagcgccgacggcgacgaggtggtgcccagccagagcaccagcagagagcccgagagaaaccacacccacagaagcctgttcagcgtggagagcgacgacaccgacaccgagaacgagagaagagacatggccggcgccagcggcggcgtggccgcccccctgccccagaaggtgccccccaccaccgccgtggaggccaccgtgggcgcctgcgccagcagcagcacccagagcaccagaggcggccacgccgacaacggcagagacgtgaccagcgtggagccccccagcgtgagccccgccagacaccagctgaccagcgccctgagcagaatgacccagggcctgagatgggtgagattcaccctgggcagaagcagcagcctgagccagaaccagagccccctgagacagctggacaacggcgtgagcggcagagaggacgacgacgacgtggagatgctgatccccatcagcgacggcagcagcgacttcgacgtgaacgactgcagcagacccctgctggacctggccagcgaccagggccagggcctgagacagccctacaacgccaccaaccccggcgtgagacccagcaacagagacggcccctgcgagagatgcggcatcgtgcacaccgcccagatccccgacacctgcctggaggtgaccctgaagaacgagaccagcgacgacgaggccctgctgctgtgctag

SEQ ID NO: 176558 - DNA, 2580 bp, Artificial Sequence
  derived and/or modified sequence
atggcctgtcgctggagcacaaaggagtccccacgctggcggtctgccttattactgcttttcttggccggagtttacggcaacggggcgcttgcagagcattcagagaatgtccatatctccggcgtgtctactgcttgcggcgagacaccagagcagattagggcgccttcaggaattataacgagccctggctggccaagtgagtatccagccaaaataaactgtagctggttcatacgcgccaacccaggagagattataactatttcttttcaggactttgacattcagggatctcggcggtgtaatctggattggttgaccatagagacttataagaacatagagagttaccgcgcctgcggctccactattcccccaccttacatctcttcacaggatcacatatggatcaggttccatagtgatgataatattagccgcaagggattccgattagcctacttctcagggaaatcagaggaacctaattgcgcctgcgaccagtttcggtgcggaaatgggaaatgcatccctgaagcttggaagtgtaacaatatggacgaatgtggggattcgtctgacgaagaaatctgtgccaaggaggctaacccacccactgctgccgcctttcaaccttgcgcttacaaccagttccagtgcctgtctcgattcacgaaggtgtacacttgtctgccagaatcccttaaatgcgatggaaacatagactgtctcgatctcggggatgaaatcgactgcgatgtgcctacatgtgggcagtggcttaagtatttttatggcacattcaattctcccaactatcctgatttctatcctccgggctctaattgcacatggctgatagacacgggtgaccaccgaaaggtcatcctgcgctttacagacttcaagcttgatgggacagggtatggcgattacgtcaaaatctacgacggactcgaagaaaacccacacaaactcctgcgcgttctgacagcatttgactcacatgcccctctgaccgtggttagctcttcaggccagatacgggtccacttttgcgctgacaaagttaatgcggcacgaggattcaatgctacttatcaagtggacgggttctgcttgccatgggagattccctgcgggggtaactgggggtgttataccgagcagcagaggtgtgatggttactggcattgcccaaacggccgggatgaaactaattgtaccatgtgccaaaaagaggaattcccatgcagtcggaatggggtgtgttacccacggagtgaccgatgcaactaccagaaccactgcccgaacggatctgacgaaaaaaactgcttcttttgtcagcccgggaatttccactgcaagaacaataggtgtgttttcgaatcttgggtttgcgacagtcaggacgactgtggcgatggatctgacgaagagaattgtccggtgattgtcccgactcgggtgattactgccgccgtgattggtagtcttatttgtgggcttcttctggtgatcgcactcgggtgtacatgcaagctttactctttgcgcatgttcgaaagacgctcattcgagacgcagttaagtcgtgtggaagctgaactgttgaggagggaagctccccctagctacggccagcttattgcgcagggcctgatccctccagtcgaagactttcctgtgtgcagccccaatcaggcttcagtgctggaaaatctgagactcgcggtccggtcccagctggggtttacaagcgttcggctgcctatggctggaagatctagcaacatttggaaccgtatcttcaattttgcccggtctcgccatagtggctctctggcgttagtcagtgcagacggtgacgaagtcgtgccatcacaaagcactagccgggaaccggagcgaaaccatacacatcgctcacttttttcagtagagagcgacgatacagacacggaaaacgagaggcgcgacatggccggcgccagtggaggtgttgctgctccacttccccaaaaggtcccaccaacgactgccgtggaggctaccgttggagcttgtgcaagttcatcgacacaatcaacacgtggcggccacgcagataatggcagagatgtcacatcggtggagcctcctagcgtgtctccagccaggcatcagctgaccagcgcactctctcgcatgacacaaggactgcgttgggttcggttcacactgggccgttcctccagcttaagtcagaaccagagtcctttgcgtcaactggataacggggtgagcgggcgtgaagatgatgatgacgtggaaatgttgatacccatttccgacgggagcagcgattttgatgtcaatgactgctcaaggcccctcctggacctggcgagcgatcaggggcaaggcctacgccagccttataacgccactaaccccggggtgaggccctctaacagagacgggccctgcgaacgctgtggcattgtgcatacagctcagataccggatacttgcctggaagtgaccctaaaaaatgagacctctgatgacgaagctctgctcttgtgctag

SEQ ID NO: 176559 - DNA, 4112 bp, Artificial Sequence
  derived and/or modified sequence
ggtggctcggcggcggcggcggcggcggcggcggcgtcggcgtcgtctacctccagcttctcctccctcctcctccgtctcctcctctctctctccatctgctgtggttatggcctgtcgctggagcacaaaagagtctccgcggtggaggtctgcgttgctcttgcttttcctcgctggggtgtacggaaatggtgctcttgcagaacattctgaaaatgtgcatatttcaggagtgtcaactgcttgtggagagactccagagcaaatacgagcaccaagtggcataatcacaagcccaggctggccttctgaatatcctgcaaaaatcaactgtagctggttcataagggcaaacccaggcgaaatcattactataagttttcaggattttgatattcaaggatccagaaggtgcaatttggactggttgacaatagaaacatacaagaatattgaaagttacagagcttgtggttccacaattccacctccgtatatctcttcacaagaccacatctggattaggtttcattcggatgacaacatctctagaaagggtttcagactggcatatttttcagggaaatctgaggaaccaaattgtgcttgtgatcagtttcgttgtggtaatggaaagtgtataccagaagcctggaaatgtaataacatggatgaatgtggagatagttccgatgaagagatctgtgccaaagaagcaaatcctccaactgctgctgcttttcaaccctgtgcttacaaccagttccagtgtttatcccgttttaccaaagtttacacttgcctccccgaatctttaaaatgtgatgggaacattgactgccttgacctaggagatgagatagactgtgatgtgccaacatgtgggcaatggctaaaatatttttatggtacttttaattctcccaattatccagacttttatcctcctggaagcaattgcacctggttaatagacactggtgatcaccgtaaagtcattttacgcttcactgactttaaacttgatggtactggttatggtgattatgtcaaaatatatgatggattagaggagaatccacacaagcttttgcgtgtgttgacagcttttgattctcatgcacctcttacagttgtttcttcttctggacagataagggtacatttttgtgctgataaagtgaatgctgcaaggggatttaatgctacttaccaagtagatgggttctgtttgccatgggaaataccctgtggaggtaactgggggtgttatactgagcagcagcgttgtgatgggtattggcattgcccaaatggaagggatgaaaccaattgtaccatgtgccagaaggaagaatttccatgttcccgaaatggtgtctgttatcctcgttctgatcgctgcaactaccagaatcattgcccaaatggctcagatgaaaaaaactgctttttttgccaaccaggaaatttccattgtaaaaacaatcgttgtgtgtttgaaagttgggtgtgtgattctcaagatgactgtggtgatggcagcgatgaagaaaattgcccagtaatcgtgcctacaagagtcatcactgctgccgtcatagggagcctcatctgtggcctgttactcgtcatagcattgggatgtacttgtaagctttattctctgagaatgtttgaaagaagatcatttgaaacacagttgtcaagagtggaagcagaattgttaagaagagaagctcctccctcgtatggacaattgattgctcagggtttaattccaccagttgaagattttcctgtttgttcacctaatcaggcttctgttttggaaaatctgaggctagcggtacgatctcagcttggatttacttcagtcaggcttcctatggcaggcagatcaagcaacatttggaaccgtatttttaattttgcaagatcacgtcattctgggtcattggctttggtctcagcagatggagatgaggttgtccctagtcagagtaccagtagagaacctgagagaaatcatactcacagaagtttgttttccgtggagtctgatgatacagacacagaaaatgagagaagagatatggcaggagcatctggtggggttgcagctcctttgcctcaaaaagtccctcccacaacggcagtagaagcgacagtaggagcatgtgcaagttcctcaactcagagtacccgaggtggtcatgcagataatggaagggatgtgacaagtgtggaacccccaagtgtgagtccagcacgtcaccagcttacaagtgcactcagtcgtatgactcaggggctacgctgggtacgttttacattaggacgatcaagttccctaagtcagaaccagagtcctttgagacaacttgataatggggtaagtggaagagaagatgatgatgatgttgaaatgctaattccaatttctgatggatcttcagactttgatgtgaatgactgctccagacctcttcttgatcttgcctcagatcaaggacaagggcttagacaaccatataatgcaacaaatcctggagtaaggccaagtaatcgagatggcccctgtgagcgctgtggtattgtccacactgcccagataccagacacttgcttagaagtaacactgaaaaacgaaacgagtgatgatgaggctttgttactttgttaggtacgaatcacataagggagattgtatacaagttggagcaatatccatttattattttgtaactttacagttaaactagttttagtttaaaaagaaaaaatgcagggtgatttcttattattatatgttagcctgcatggttaaattcgacaacttgtaactctatgaacttagagtttactattttagcagctaaaaatgcatcacatattcatattgttcaataatgtcctttcatttgtttctgattgttttcatcctgatactgtagttcactgtagaaatgtggctgctgaaactcatttgattgtcatttttatctatcctatgttaaatggtttgtttttacaaaataataccttattttaattgaaacgtttatgcttttgccaacacatcttgtaacttaatatactagatgttaaggttgttaatgtacaaaaaaaaaacccttatactcacctgcgttttcatttgtttgacatttgtctattattggatttcattatcatatgaacttgtcagtgggaaacaaactgtctaaaaatttttctcttacgtttaacatacaatcatgtgaaatttaggcagagttcgataaattactggcaaaaacaaaactcttttataaagattttctaatgttgactttaatactctaacatggtacaaaccaaatggtaaaatcccaagtcatttcttttttcatctctatttagcaacagaattaagtggatgaagatattctactatgcattaaatcttgaactttataaaacatgtacaaaaattgtacaagataagttccacctggtaatgtctttccctaatacagggttgcgcttgcattggaccctagggatttgcactaaaattatatcaaggtctcagatgagcttagtgcacaagcactatcactttaaatactattatttgctaccacagcaactatatatttccatagcttttggctgggggcgggggacatttttattacaacttgaaattgctttgctggtttcatatttatttgttgtatttaaaaaatacattgttgtaagagtgattttttcaatatattttattcctgggggggatcatgctacactctcaaaagaaaattaagaaatcattcagatcatcccccctttttaagtagtgtgaattgcaaaacccaacatattttttttactgtcagttgcggtttatttattctttaactgtctgttttagtagtttaatgattatgaaaaatgtatctgtgtgtgatttgctatttattaaattttaagtactttgctgaatgtcattttaaagcatgtttgaagtcttgtgtatttgtctgtgttaatgctgtcaggaggaactgactaagatgttttaatatgtatcaaaaattaaaatgattttttttattgccttg

SEQ ID NO: 176560 - DNA, 2580 bp, Artificial Sequence
  derived and/or modified sequence
atggcctgccgctggagcaccaaggagagcccccgctggaggtctgccctgctgctgctcttcctggccggcgtgtatggaaatggagccctggccgagcacagtgaaaatgtgcacatctctggagtgtccacagcctgtggggagaccccagagcagatccgggcccccagcggcatcatcaccagccctggctggcccagcgagtacccagccaagatcaactgctcctggttcatccgggccaaccctggagagatcatcaccatctccttccaggactttgacatccagggcagccgccgctgcaacctggactggctgaccatcgagacctacaagaacatcgagagctaccgggcctgtggcagcaccatccccccaccctacatcagcagccaggaccacatctggatccgcttccacagtgatgacaacatcagcaggaagggcttccggctggcctacttcagcggcaagtctgaggagcccaactgtgcctgtgaccagttccgctgtggaaatggcaagtgcatccctgaggcctggaagtgcaacaacatggatgaatgtggggacagcagtgatgaggagatctgtgccaaggaggccaaccccccaacagctgctgccttccagccctgtgcctacaaccagttccagtgcctgagccgcttcaccaaggtgtacacctgcctgcctgagagcctgaagtgtgatggcaacatcgactgcctggacctgggagatgaaattgactgtgatgtgcccacctgtggccagtggctgaagtacttctacggcaccttcaacagccccaactacccagacttctacccacctggcagcaactgcacctggctgattgacacaggagaccacaggaaggtgatcctgcgcttcacagacttcaagctggatggcaccggctatggagactatgtgaagatctatgatggcctggaggagaacccccacaagctgctgcgggtgctgacagcctttgacagccacgcccccctgactgtggtgagcagcagcggccagatccgggtgcacttctgtgccgacaaggtgaatgctgcccggggcttcaatgccacctaccaggtggatggcttctgcctgccctgggagatcccctgtggcggcaactggggctgctacacagagcagcagagatgtgatggctactggcactgccccaacggcagagatgagaccaactgcaccatgtgccagaaggaggagttcccctgcagcagaaatggagtgtgctaccccaggagtgaccgctgcaactaccagaaccactgccccaatggaagtgatgagaagaactgcttcttctgccagcccggcaacttccactgcaagaacaacagatgtgtgtttgagagctgggtgtgtgacagccaggatgactgtggagatggcagtgatgaggagaactgccctgtgattgtgcccaccagggtcatcacagctgctgtgattggcagcctcatctgtggcctgctgctggtgattgccctgggctgcacctgcaagctgtacagcctgaggatgtttgagcggcgcagctttgagacccagctgagccgggtggaggccgagctgctgcggcgggaggccccacccagctatggccagctgattgcccagggcctcatcccccctgtggaggacttccctgtgtgcagccccaaccaggcctctgtgctggagaacctgcggctggccgtgcgcagccagctgggcttcacctctgtgcggctgcccatggccggccgcagcagcaacatctggaaccgcatcttcaactttgcccggagccgccacagcggcagcctggccctggtgtctgcagatggagatgaggtggtgcccagccagagcaccagccgggagcctgagaggaaccacacccacaggagcctcttctctgtggagagtgatgacacagacacagaaaatgaaagaagagacatggccggggccagcggcggcgtggccgcccccctgccccagaaggtgccccccaccacagctgtggaggccaccgtgggcgcctgtgccagcagcagcacccagagcacccggggcggccatgctgacaatggaagagatgtgacctctgtggagccccccagcgtgtccccagcccggcaccagctgaccagcgccctgagcaggatgacccagggcctgcgctgggtgcgcttcaccctgggccgcagcagcagcctgagccagaaccagagccccctgcggcagctggacaacggggtgtctggccgggaggatgatgatgatgtggagatgctgatccccatcagtgatggcagcagtgactttgatgtgaatgactgcagccggcccctgctggacctggccagtgaccagggccagggcctgcggcagccctacaatgccaccaaccctggggtgcggcccagcaacagagatggcccctgtgagcgctgtggcatcgtgcacacagcccagatcccagacacctgcctggaggtgaccctgaagaatgagaccagtgatgatgaggccctgctgctgtgctag

SEQ ID NO: 176561 - DNA, 2580 bp, Artificial Sequence
  derived and/or modified sequence
atggcctgccggtggagcaccaaggagagcccccggtggcggagcgccctgttactgctgttcctggctggcgtctatggcaatggggctctggcagaacactcggaaaatgtgcacatctcaggtgtgtccaccgcttgtggggaaacaccggagcaaatcagagccccatccggaattatcacatcccctgggtggcccagtgagtacccagccaagattaactgtagctggttcattcgggccaatcctggtgagattatcacaatttcatttcaggactttgatattcaaggctcccgcaggtgcaacctggattggcttacaattgagacctataagaatatcgagagctaccgcgcttgcggtagcaccatcccacccccatatatctcatctcaggatcacatctggattaggtttcactccgatgataacatctctagaaagggatttagacttgcctattttagtggtaagtccgaggagccaaactgcgcctgtgaccaatttagatgtggcaatggtaagtgcatacccgaggcctggaaatgcaacaatatggatgagtgtggcgattcatccgacgaggaaatttgcgctaaagaagcaaatcccccaacagccgccgcttttcagccttgtgcctataaccagttccagtgccttagtaggtttacgaaggtgtacacatgcctcccagagtccttgaagtgtgacggtaatattgactgcctggacctgggcgacgaaatcgactgtgacgttccgacctgtggccagtggctgaagtatttctacgggacctttaactctccaaactatccggacttttatcctcccggttctaactgcacctggctcattgacactggagaccaccgcaaggtgatactgcgattcacagacttcaaactcgacggcacaggctatggtgactatgtaaaaatatacgacggactggaggagaacccacacaagctcctacgcgtgttaacagctttcgatagccacgcgccgctgacagtagtatcctccagcgggcagatcagggtgcatttctgcgctgataaagttaatgccgcccgcgggtttaacgcgacctatcaggttgacggcttctgtctgccttgggagattccctgcggcggaaattgggggtgttacaccgagcagcagagatgcgatggttactggcattgcccaaacggcagggacgagacaaactgcacgatgtgtcagaaggaggaatttccctgttccaggaatggggtgtgttacccccgctctgacagatgcaattatcaaaaccattgccctaatgggagcgatgaaaagaactgcttcttttgccagcccgggaacttccactgtaaaaataaccgatgcgtgtttgaatcatgggtgtgcgattctcaggatgattgtggcgatggttcagatgaggagaactgtccggtcatcgttcctacacgagtgataacagcggcagtcatcggctctctgatctgcgggctgctattggtaatcgctctcggatgtacatgcaagctttactctctgcggatgtttgaacggagatctttcgaaacccagcttagccgggtggaggccgagctacttaggcgggaagccccaccatcctacgggcaactaattgcacagggactgatcccgcctgtggaggattttcctgtgtgctcccccaatcaagcaagtgttctggagaatttacggctggccgtgagatcacaactcggtttcaccagcgtccgccttccgatggcggggcgtagctctaatatctggaatcgaattttcaattttgctcgctcccgacattcaggatctttagcactggtgtctgcggacggtgacgaagtagtaccttctcaaagcacgtcacgggaacccgaaagaaatcacacccaccgaagcctgttttcggtagagagcgacgacactgacaccgaaaacgagcgacgggacatggctggggcgtccgggggcgttgcagcacccctgccccagaaagtgccaccgacaactgctgtggaggccacggtgggggcatgtgccagttctagcacacagagtacccgcggcggtcacgctgataacggcagagacgttacttccgtggagccgccctcagtgagccctgcccggcaccagttaaccagcgccctatcgaggatgactcaggggctgcgctgggtgcgcttcacactcggacgctcgagttctctatcacagaatcaatcacctctgagacagctggataacggggtctctggaagggaggatgacgatgatgttgagatgttgatccccataagcgacggatcctcggacttcgatgtgaatgactgttcacggccccttttggacctggccagcgatcaggggcagggccttcgacaaccctataacgccacaaatcccggcgtgaggccatcgaatcgcgacggtccatgtgaaagatgtggcatagtgcacactgcccagatacccgatacgtgtttggaggtgactctgaaaaatgagactagcgacgacgaggctctcctgctgtgctag

SEQ ID NO: 176562 - DNA, 2580 bp, Artificial Sequence
  derived and/or modified sequence
atggcatgtcgatggtccaccaaagaatctcctaggtggcgcagtgcactgcttttgttgtttctagcaggtgtgtatggcaacggggcacttgcagagcatagcgaaaacgtgcatatttcgggagtgtcaaccgcctgtggcgaaacacccgaacagattagagccccatctggaatcatcacctcacccggatggccctctgagtaccctgctaagattaattgtagttggtttattcgagccaaccctggggagatcatcactatatctttccaggattttgacatacagggcagccgtaggtgcaatctggactggctgacgattgaaacttacaaaaacattgagtcataccgcgcttgtggaagcacaatccctccaccatacattagttcacaagatcacatttggataaggttccattccgatgacaacatttcccggaaaggattccgcctggcatactttagtggaaaaagcgaggagccaaattgtgcttgcgaccagtttcggtgtggtaacggcaaatgtatccctgaggcctggaagtgtaataacatggacgagtgtggcgattcatccgatgaggaaatttgcgccaaggaggcaaacccacccacagccgcagctttccagccatgcgcttacaatcagtttcagtgccttagcagattcaccaaggtgtacacctgcttacccgaatctctcaagtgcgatgggaacatcgactgcctggacttgggcgatgagattgactgcgatgtaccgacctgcggccagtggttaaaatatttttatggcactttcaattctcctaactatcccgacttttatccgccaggatctaactgcacttggctaatcgataccggagatcataggaaagttattctcagatttaccgacttcaaattagacggcacaggatatggggactacgtgaagatctacgacggactggaggagaatccccataaactgcttagagtcctcaccgccttcgactctcacgcccctctgaccgtcgtgtcatcaagtgggcagattagggtgcacttctgcgccgacaaggtcaacgctgccagaggtttcaacgccacctaccaggtggatggcttttgtctcccttgggagatcccatgcggcggtaactgggggtgctataccgagcagcagcgctgcgacggctactggcactgtccaaacggcagggacgaaacaaactgcaccatgtgtcagaaagaggagttcccctgctcacggaatggcgtgtgttatccaaggagcgatcggtgcaattatcagaatcactgcccgaacggaagcgatgaaaagaactgcttcttctgtcagcctggcaatttccattgtaaaaataatagatgcgttttcgaaagctgggtttgcgactcacaagatgactgcggcgacggtagtgatgaggagaattgccctgttattgtccctaccagggtcatcactgccgcagttatcgggagcctgatttgtggcctgttactggtgattgccctgggatgtacttgtaagttgtattctctgaggatgtttgaaagacggtcgtttgaaacacagctcagccgggtggaagctgagttgttaagacgcgaggccccaccatcctatgggcagctgatcgcccaaggactcatcccccctgtggaggatttcccggtctgttcacccaaccaggcctccgtattagagaacctgcggcttgccgtgcggagccagttaggcttcacgtccgtccgcctgcccatggctggacggagctccaatatctggaatcgcatctttaactttgcccgttcgcgacacagcggttctcttgctctggtgtcagcagatggcgatgaggttgtcccctcccaatcaactagccgcgagccagagcggaaccacactcatcgatctcttttcagcgtggagtcagacgacacagatactgaaaacgaaaggcgagatatggcgggagcctctggtggggtcgccgctcctttgcctcaaaaagtcccaccgaccaccgccgtagaagctaccgtgggtgcctgtgcatcctctagcacgcagagcaccagagggggacacgccgacaatggccgtgacgtgacttctgtggaaccccctagcgtctcccctgctcgccaccagctgacaagtgctctgagtcggatgactcagggactccgctgggtgagattcaccctgggacggtctagtagcttgagtcagaaccagagtcccctgaggcagctcgacaacggtgtaagtgggcgtgaggatgatgatgatgttgagatgctgatccccataagcgacggctccagcgacttcgacgtcaacgattgctctagacccctgctcgatttagccagcgatcaggggcaggggctccgccagccatataacgccaccaatccgggagtccgaccttctaatagagacgggccatgtgaaagatgcggcatcgtgcatacagcccaaattccggatacctgcctggaagtgactctaaagaacgagactagtgacgatgaggccctgctgctttgttag

SEQ ID NO: 176563 - protein, 589 aa, Artificial Sequence
  derived and/or modified sequence
MAESGESGGPPGSQDSAAGAEGAGAPAAAASAEPKIMKVTVKTPKEKEEFAVPENSSVQQFKEEISKRFKSHTDQLVLIFAGKILKDQDTLSQHGIHDGLTVHLVIKTQNRPQDHSAQQTNTAGSNVTTSSTPNSNSTSGSATSNPFGLGGLGGLAGLSSLGLNTTNFSELQSQMQRQLLSNPEMMVQIMENPFVQSMLSNPDLMRQLIMANPQMQQLIQRNPEISHMLNNPDIMRQTLELARNPAMMQEMMRNQDRALSNLESIPGGYNALRRMYTDIQEPMLSAAQEQFGGNPFASLVSNTSSGEGSQPSRTENRDPLPNPWAPQTSQSSSASSGTASTVGGTTGSTASGTSGQSTTAPNLVPGVGASMFNTPGMQSLLQQITENPQLMQNMLSAPYMRSMMQSLSQNPDLAAQMMLNNPLFAGNPQLQEQMRQQLPTFLQQMQNPDTLSAMSNPRAMQALLQIQQGLQTLATEAPGLIPGFTPGLGALGSTGGSSGTNGSNATPSENTSPTAGTTEPGHQQFIQQMLQALAGVNPQLQNPEVRFQQQLEQLSAMGFLNREANLQALIATGGDINAAIERLLGSQPS

SEQ ID NO: 176564 - DNA, 1770 bp, Artificial Sequence
  derived and/or modified sequence
atggccgagagcggcgagagcggcggcccccccggcagccaggacagcgccgccggcgccgagggcgccggcgcccccgccgccgccgccagcgccgagcccaagatcatgaaggtgaccgtgaagacccccaaggagaaggaggagttcgccgtgcccgagaacagcagcgtgcagcagttcaaggaggagatcagcaagagattcaagagccacaccgaccagctggtgctgatcttcgccggcaagatcctgaaggaccaggacaccctgagccagcacggcatccacgacggcctgaccgtgcacctggtgatcaagacccagaacagaccccaggaccacagcgcccagcagaccaacaccgccggcagcaacgtgaccaccagcagcacccccaacagcaacagcaccagcggcagcgccaccagcaaccccttcggcctgggcggcctgggcggcctggccggcctgagcagcctgggcctgaacaccaccaacttcagcgagctgcagagccagatgcagagacagctgctgagcaaccccgagatgatggtgcagatcatggagaaccccttcgtgcagagcatgctgagcaaccccgacctgatgagacagctgatcatggccaacccccagatgcagcagctgatccagagaaaccccgagatcagccacatgctgaacaaccccgacatcatgagacagaccctggagctggccagaaaccccgccatgatgcaggagatgatgagaaaccaggacagagccctgagcaacctggagagcatccccggcggctacaacgccctgagaagaatgtacaccgacatccaggagcccatgctgagcgccgcccaggagcagttcggcggcaaccccttcgccagcctggtgagcaacaccagcagcggcgagggcagccagcccagcagaaccgagaacagagaccccctgcccaacccctgggccccccagaccagccagagcagcagcgccagcagcggcaccgccagcaccgtgggcggcaccaccggcagcaccgccagcggcaccagcggccagagcaccaccgcccccaacctggtgcccggcgtgggcgccagcatgttcaacacccccggcatgcagagcctgctgcagcagatcaccgagaacccccagctgatgcagaacatgctgagcgccccctacatgagaagcatgatgcagagcctgagccagaaccccgacctggccgcccagatgatgctgaacaaccccctgttcgccggcaacccccagctgcaggagcagatgagacagcagctgcccaccttcctgcagcagatgcagaaccccgacaccctgagcgccatgagcaaccccagagccatgcaggccctgctgcagatccagcagggcctgcagaccctggccaccgaggcccccggcctgatccccggcttcacccccggcctgggcgccctgggcagcaccggcggcagcagcggcaccaacggcagcaacgccacccccagcgagaacaccagccccaccgccggcaccaccgagcccggccaccagcagttcatccagcagatgctgcaggccctggccggcgtgaacccccagctgcagaaccccgaggtgagattccagcagcagctggagcagctgagcgccatgggcttcctgaacagagaggccaacctgcaggccctgatcgccaccggcggcgacatcaacgccgccatcgagagactgctgggcagccagcccagctag

SEQ ID NO: 176565 - DNA, 1770 bp, Artificial Sequence
  derived and/or modified sequence
atggctgagtcgggagaatccgggggccctcccggctcacaagacagcgcggccggggccgagggcgctggggcacccgcagcagcagcatcggccgagccaaagattatgaaagtcacagtgaagacccccaaggaaaaggaagaattcgccgtgcccgaaaattctagcgtgcagcagttcaaagaggaaattagcaaacggttcaaatcacatacagaccagctggtcctgatcttcgctggaaagattctgaaagatcaggacacgctatcccaacacggcatacatgacggcctgacggtgcatctggtcatcaagacccagaatcgccctcaggaccactccgcgcaacaaactaataccgctggttccaatgtgacaacatccagcactcccaactcaaacagcacctcaggctcggcaaccagcaatcctttcggtttgggcgggcttggcggcctggccggactctctagtcttgggctcaatacgacgaatttttctgaactgcaaagccagatgcagaggcagctgctctcaaatcctgagatgatggtgcagattatggagaacccattcgtgcagtccatgttgtccaaccctgatttgatgcggcagctgattatggcgaacccccagatgcaacagctcatacagagaaatcccgagatcagccacatgctgaataacccagacattatgcgtcaaacactggagcttgcgcggaaccccgctatgatgcaggagatgatgagaaatcaggaccgagccctgtcaaacctcgagtcaattcccggcggctataacgccctgcgaaggatgtacaccgatatccaggagccgatgcttagcgcagcccaggagcagtttgggggcaatccttttgccagcttagtctctaacacctcctccggcgaaggatcgcagcctagtaggacagaaaacagggatccactgccgaacccttgggccccacagacgagccagtcatcttctgccagtagcgggactgcatccacggtcggaggcactacaggcagcacagccagcggcacatctggccagtctaccacagcacctaacctcgtgcccggggtcggggcatccatgttcaacacccccgggatgcagtccctcctacagcagatcactgagaatcctcaactaatgcagaacatgctttccgctccatatatgaggtccatgatgcagtcactctcacaaaaccctgatctggctgcgcagatgatgctaaacaatccactgtttgccggaaacccacagctgcaagaacagatgcgtcagcagcttcctactttcctgcagcagatgcagaaccccgataccctcagcgctatgtctaatccaagagctatgcaggccctgcttcagatccagcagggcttgcagacactggctaccgaggcccccggactgatccccgggtttacccccggtctgggcgcactgggctcaaccggaggtagttccgggactaacggcagcaacgccactccttctgagaacaccagccctactgctgggaccaccgagccaggacaccaacagttcatccagcagatgctccaagcccttgccggagtcaacccacaattacagaacccagaggtgcgctttcagcagcagttggagcagctctcggcaatgggcttcctcaacagggaagccaatctccaagcgttgatagccactggaggcgatattaatgctgcgatcgagcgccttttgggctcgcagccttcttag

SEQ ID NO: 176566 - DNA, 1770 bp, Artificial Sequence
  derived and/or modified sequence
atggccgagagcggggagagcggcggccccccaggcagccaggacagcgctgctggagctgagggcgctggggccccagctgctgctgccagcgctgagcccaagatcatgaaggtgacagtgaagacccccaaggagaaggaggagtttgctgtgcctgagaacagctctgtgcagcagttcaaggaggagatcagcaagcgcttcaagagccacacagaccagctggtgctgatctttgctgggaagatcctgaaggaccaggacaccctgagccagcacggcatccatgatggcctgactgtgcacctggtgatcaagacccagaaccggccccaggaccacagcgcccagcagaccaacacagctggcagcaatgtgaccaccagcagcacccccaacagcaacagcaccagcggcagcgccaccagcaaccccttcggcctgggcggcctgggcggcctggccggcctgagcagcctgggcctgaacaccaccaacttcagcgagctgcagagccagatgcagaggcagctgctgagcaaccctgagatgatggtgcagatcatggagaacccctttgtgcagagcatgctgagcaacccagacctgatgaggcagctgatcatggccaacccccagatgcagcagctgatccagagaaatcctgagatcagccacatgctgaacaacccagacatcatgaggcagaccctggagctggccagaaatcctgccatgatgcaggagatgatgaggaaccaggaccgggccctgagcaacctggagagcatccctgggggctacaatgccctgcggaggatgtacacagacatccaggagcccatgctgtctgctgcccaggagcagtttggaggcaacccctttgccagcctggtgagcaacaccagcagtggagagggcagccagcccagcaggacagaaaatagagaccccctgcccaacccctgggccccccagaccagccagagcagcagcgccagcagcggcacagccagcacagtgggcggcaccaccggcagcacagccagcggcaccagcggccagagcaccacagcccccaacctggtgcctggggtgggcgcctccatgttcaacaccccaggcatgcagagcctgctgcagcagatcacagagaacccccagctgatgcagaacatgctgagcgccccctacatgaggtccatgatgcagagcctgagccagaacccagacctggccgcccagatgatgctgaacaaccccctgtttgctggcaacccccagctgcaggagcagatgaggcagcagctgcccaccttcctgcagcagatgcagaacccagacaccctgagcgccatgagcaacccccgggccatgcaggccctgctgcagatccagcagggcctgcagaccctggccacagaggcccctggcctcatccctggcttcaccccaggcctgggcgccctgggcagcactggaggcagcagcggcaccaacggcagcaatgccacccccagcgagaacaccagccccacagctggcaccacagagcccggccaccagcagttcatccagcagatgctgcaggccctggccggcgtgaacccccagctgcagaaccctgaggtgcgcttccagcagcagctggagcagctgagcgccatgggcttcctgaaccgggaggccaacctgcaggccctgattgccaccggcggggacatcaatgctgccatcgagcggctgctgggcagccagcccagctag

SEQ ID NO: 176567 - DNA, 1770 bp, Artificial Sequence
  derived and/or modified sequence
atggccgagagcggcgagagcggcggcccccccggcagccaggactcagcagccggagctgaaggtgcaggagctccggctgccgcggcgagcgcggaaccaaagatcatgaaggtgacagttaaaacacctaaagagaaagaggagtttgctgttccagaaaactctagcgtacagcagttcaaagaagagatcagcaagcgattcaagagtcatacagaccagctggtgttgatcttcgctggaaagattctcaaagatcaggatactttgagccagcacggaatccacgacggattgactgtacatctggtgatcaagactcagaaccgaccccaagaccacagtgcacagcagactaacacagcgggctctaacgtgaccaccagctctactcccaacagcaactcgacatccggtagcgccacatcaaatccctttggtcttggcggactaggcggactagcaggtctttcatccctgggcctcaacacaaccaatttctcagaactgcagagccagatgcagcgccaactgctgagtaatcccgagatgatggtgcagatcatggagaacccattcgtgcaatctatgcttagtaacccagatctgatgaggcagttaataatggcgaatcctcagatgcaacagctgatccaacggaatccagagatcagccatatgctgaataatcctgatatcatgcgtcagacactcgaactggccagaaacccggctatgatgcaggaaatgatgcgtaaccaggaccgggctttgagcaacttagaatccatacctggcggctataacgctcttaggcgaatgtacactgacatacaagaacccatgctgtcagccgcacaggagcagtttggggggaacccattcgcttcactggtgagtaacactagctcaggcgaggggtctcagccgtccaggacagagaatagggacccgctgcctaacccatgggcgccccaaacgagccagtcttcttctgccagtagtggcaccgcttctacagtgggaggaacaacaggttcaaccgcctccggaacatccggccagagtacaaccgccccgaacttggtgcccggcgtcggcgcctcaatgttcaataccccaggtatgcagtcactgctgcagcagatcacggagaacccacagttgatgcagaatatgctgagcgcaccttatatgaggtctatgatgcagtccttatcacagaaccctgacctcgctgctcagatgatgctaaataaccctctgttcgcaggcaacccacagttgcaggaacagatgagacagcaactgcctacctttctgcagcaaatgcagaaccccgacactctcagtgctatgagtaacccccgcgcaatgcaggctcttctgcagattcagcaagggctgcagacgctcgcaaccgaggcccccggattgatccccgggtttacccccggcctgggggccttgggctcaacagggggaagctcagggaccaacggtagtaatgctacaccaagcgaaaacacgagcccaactgccggcacaacggaacctggccaccagcagttcattcagcagatgctgcaggccctcgccggagtgaatcctcaattgcagaaccccgaggtgcgttttcagcagcaactggaacagctctcagccatgggcttcttaaatcgcgaagcaaacctgcaggccctgatcgctactggaggtgacatcaatgccgctatcgagcgcctcctgggctctcagccttcttag

SEQ ID NO: 176568 - DNA, 1770 bp, Artificial Sequence
  derived and/or modified sequence
atggctgagagtggagagtctggcggtccccctgggtcccaggacagcgccgcaggggcagaaggggctggtgcacctgcagctgctgcttccgccgagcccaagatcatgaaggtcaccgttaagacaccaaaggagaaggaggaattcgccgtgccagagaacagctccgttcagcaattcaaggaagagatctcaaagcggttcaagtcacataccgatcaactggtgcttatattcgccggtaaaatccttaaggaccaggatactctgtctcagcacgggatccatgacgggttgacagtacatctggtgataaagacccagaaccgaccacaggatcatagcgcccagcaaacgaatacggctggctctaacgtgaccacatcttctaccccaaactccaactcaactagcggcagcgctacctctaacccttttggcttgggaggacttggtggtctcgctgggctgagttctctaggactgaacaccaccaacttcagcgaactccagagccaaatgcagcgtcagctgttgtcaaatcctgagatgatggtccagattatggaaaatcccttcgtgcagtctatgctgtcaaaccccgacctcatgagacagctgatcatggcgaacccacaaatgcagcagctaattcagcgtaatccagaaatctcacacatgttaaacaatcccgacatcatgcgacaaacgctggagctggccagaaatccagcaatgatgcaagagatgatgcgcaaccaggacagagcgctttctaaccttgagtcaattcctgggggttacaacgcactccgacggatgtacaccgatattcaggagcccatgttatccgccgctcaagaacagttcggaggtaatccctttgcttcactcgtgagcaacactagctccggagagggttcccagccatcccgaaccgagaatagagatcccctccctaacccttgggccccacagacaagccagtcatccagcgcaagttctggtactgcctcaactgtcggagggacaaccggcagcacggcttccggtacatccgggcagagcacgacagcacctaatcttgtcccaggagtgggcgcaagcatgttcaatactccaggcatgcagtctctcttacaacagatcactgaaaatcctcaactgatgcaaaatatgttatcagccccatacatgcggtccatgatgcagagcctttcgcaaaacccagatctggccgctcagatgatgctcaataaccctttgtttgccggaaatccccagttgcaggagcagatgagacagcaactgcctaccttcctccagcaaatgcagaatcccgacaccctttccgcgatgtctaatcctagggccatgcaggcattgctgcagatccagcagggtctgcagacacttgccacagaggcgccaggcttgattcccggattcacccccggactcggagccctgggctcaacagggggttcgtccggaactaacggttcaaatgccactcccagcgaaaatacaagcccaaccgccggaaccacagaacctgggcatcaacaatttatacaacagatgctccaggcactggccggagtcaacccacagctgcagaacccagaggttcggtttcagcagcagttggagcagctttcagccatgggtttcttaaaccgagaagcaaatttgcaggctctgatcgcaactggcggtgacatcaacgcagcaattgaacgacttctcgggagccagccctcttag

SEQ ID NO: 176569 - DNA, 4118 bp, Artificial Sequence
  derived and/or modified sequence
ggaaactgcgatttagtttttggtgaaaggagtggaaaaaaaccatgaactgacctaccccgccccattttgcttttagtccttcacactggcttcgcctgcactttgggcaatggagcgggaaaggaaaaggcacgcaggctgagctcaaagtcgcgccagccggggatgactcggcgacgccgccaggcgcgttacccggcgtgctccgcgcggcgccggcgaagggacgtgggggaaggggcagggaggaggaagcggtggctgctgcggatgtcggtgtgagcgagcggcgcctgaacacacggcggctgccgagcgcctgacccgggcctgcgccagagcctgcaccgagctccggggccccacacccgctacggtggccctgcgcccgttgctactgaggcggcgtgctctgcattcttcgctgtccaggcctgccggctctggtgtctgctggctcctccttgctcgcctgctccctcctgcttgcctgagtcaccgccgccgccgccgccacagccatggccgagagtggtgaaagcggcggtcctccgggctcccaggatagcgccgccggagccgaaggtgctggcgcccccgcggccgctgcctccgcggagcccaaaatcatgaaagtcaccgtgaagaccccgaaggaaaaggaggaattcgccgtgcccgagaatagctccgtccagcagtttaaggaagaaatctctaaacgttttaaatcacatactgaccaacttgtgttgatatttgctggaaaaattttgaaagatcaagataccttgagtcagcatggaattcatgatggacttactgttcaccttgtcattaaaacacaaaacaggcctcaggatcattcagctcagcaaacaaatacagctggaagcaatgttactacatcatcaactcctaatagtaactctacatctggttctgctactagcaacccttttggtttaggtggccttgggggacttgcaggtctgagtagcttgggtttgaatactaccaacttctctgaactacagagtcagatgcagcgacaacttttgtctaaccctgaaatgatggtccagatcatggaaaatccctttgttcagagcatgctctcaaatcctgacctgatgagacagttaattatggccaatccacaaatgcagcagttgatacagagaaatccagaaattagtcatatgttgaataatccagatataatgagacaaacgttggaacttgccaggaatccagcaatgatgcaggagatgatgaggaaccaggaccgagctttgagcaacctagaaagcatcccagggggatataatgctttaaggcgcatgtacacagatattcaggaaccaatgctgagtgctgcacaagagcagtttggtggtaatccatttgcttccttggtgagcaatacatcctctggtgaaggtagtcaaccttcccgtacagaaaatagagatccactacccaatccatgggctccacagacttcccagagttcatcagcttccagcggcactgccagcactgtgggtggcactactggtagtactgccagtggcacttctgggcagagtactactgcgccaaatttggtgcctggagtaggagctagtatgttcaacacaccaggaatgcagagcttgttgcaacaaataactgaaaacccacaactgatgcaaaacatgttgtctgccccctacatgagaagcatgatgcagtcactaagccagaatcctgaccttgctgcacagatgatgctgaataatcccctatttgctggaaatcctcagcttcaagaacaaatgagacaacagctcccaactttcctccaacaaatgcagaatcctgatacactatcagcaatgtcaaaccctagagcaatgcaggccttgttacagattcagcagggtttacagacattagcaacggaagccccgggcctcatcccagggtttactcctggcttgggggcattaggaagcactggaggctcttcgggaactaatggatctaacgccacacctagtgaaaacacaagtcccacagcaggaaccactgaacctggacatcagcagtttattcagcagatgctgcaggctcttgctggagtaaatcctcagctacagaatccagaagtcagatttcagcaacaactggaacaactcagtgcaatgggatttttgaaccgtgaagcaaacttgcaagctctaatagcaacaggaggtgatatcaatgcagctattgaaaggttactgggctcccagccatcatagcagcatttctgtatcttgaaaaaatgtaatttatttttgataacggctcttaaactttaaaatacctgctttatttcattttgactcttggaattctgtgctgttataaacaaacccaatatgatgcattttaaggtggagtacagtaagatgtgtgggtttttctgtatttttcttttctggaacagtgggaattaaggctactgcatgcatcacttctgcatttattgtaattttttaaaaacatcaccttttatagttgggtgaccagattttgtcctgcatctgtccagtttatttgctttttaaacattagcctatggtagtaatttatgtagaataaaagcattaaaaagaagcaaatcatttgcactctataatttgtggtacagtattgcttattgtgactttggcatgcatttttgcaaacaatgctgtaagatttatactactgataattttgttttatttgtatacaatatagagtatgcacatttgggactgcatttctggaaacatactgcaataggctctctgagcaaaacacctgtaactaaaaaagtgaagataagaaaatactcttaaagctgagtatttcctaattgtatagaatcttacagcatctttgacaaacatctcccagcaaaagtgccggttagtcaggtttgttgaaaatacagtagaaaagctgattctggttatctctttaaggacaattaattgtacagacacataatgtaacattgtctcaacattcattcacagattgactgtaaattaccttaatctttgtgcagactgaaggaacactgtagtataccccaaagtgcatttgcctaggacttctcagcttctcccataggtagtttaacaggcattaaaatttgtaattgaaatgttgctttcactgaaaaagtgtcttgatgtttcagttatttttaatcgccataaaaaaatagaactatcttttgggtttatctgttttctcatgcacaggcaatacacaaatttaaaatgagttgtgagccaattgtttctgaagtgttttggtagttctattaagaaatagttaaatattgtgcttttcagagcctcagagaaagggggacggggtgggggggtggggcagcggaatctgtcctggatggggccagcttaaataatactggcaaccaagattctgttaggatttctgtgcatatagtgtagtaaagaagtatcattcaggggtgaaaaacaaagagccgttttaatgatgttgagtacatttggctgttttatagcctttttcttccctcccccaaagaattctgtttgcctaactcccaaactgttggggtggtacattcctttaggaccaattaaaacataattgagggtcagtgatacatttggctgactctggttcagtattctcttaggtgattatattctctcatgtacagttacaggaaattaaaatgttaaagtaacctaaaatgaattcagaccaataaaatcaagggaaatacaagttgattgcattacttctgtatgttgcttgctattaaaaaggttaagaggccaggttacccaccagtccttgcactgttctgacactttccccaggaggaaaacaagtacaaaggttacggtggaggcataagtagaagagattgttaagaagggtattcatgtgtctttgctctttctgctttatgcctcagtttggtttaaaaacttctgtactggcaaatggtggtattcagtgtgggatagtgtcataactaatttgacaatttattaatcataaaataacaataaatctctagcttttacacttga

SEQ ID NO: 176570 - protein, 303 aa, Artificial Sequence
  derived and/or modified sequence
MGRPLLLPLLPLLLPPAFLQPSGSTGSGPSYLYGVTQPKHLSASMGGSVEIPFSFYYPWELATAPDVRISWRRGHFHRQSFYSTRPPSIHKDYVNRLFLNWTEGQKSGFLRISNLQKQDQSVYFCRVELDTRSSGRQQWQSIEGTKLSITQAVTTTTQRPSSMTTTWRLSSTTTTTGLRVTQGKRRSDSWHISLETAVGVAVAVTVLGIMILGLICLLRWRRRKGQQRTKATTPAREPFQNTEEPYENIRNEGQNTDPKLNPKDDGIVYASLALSSSTSPRAPPSHRPLKSPQNETLYSVLKA

SEQ ID NO: 176571 - protein, 108 aa, Artificial Sequence
  derived and/or modified sequence
MGRASYGGSPVGHQSSSDHPRAKTCRSPVRDGPRTLCGVPTVALSLHFLREASSGSRTCGRRTSLCTSAKSSWTYRSGRLSWQSIKGTHLTITQALRQPLHRAPLLPG

SEQ ID NO: 176572 - DNA, 912 bp, Artificial Sequence
  derived and/or modified sequence
atgggaagacctttgctgttaccactgctcccattgcttctgcctcccgcgttcttgcaaccaagcgggtccactggctctggtccttcttatttgtatggggtgacccagccgaagcatctgtctgcgagcatgggtggcagtgtcgagatccccttctcattttattacccttgggagctggctactgccccagatgtcagaataagctggcggcgcgggcacttccaccggcagagcttttatagtactagacccccctccatccacaaggattacgtgaaccggttgttcctgaattggacagaaggtcagaaatccggctttctgagaatctcgaacctgcagaaacaggaccagtcagtgtacttttgtagggtggagttggatactcggagtagtggcaggcagcagtggcagagtattgagggtactaagctaagtatcacacaagccgtaacaactaccacgcagcgccccagctctatgactacaacatggcggttgagctccacaaccacaaccacaggactgcgtgtgactcagggaaagaggcgcagcgatagctggcatatcagtctagagacagccgtcggggtggctgtggccgtgaccgtcctaggcatcatgatcttgggactgatatgcctgctccgctggcgtagacgcaaaggccagcagagaactaaggccacaactcccgcccgtgaacctttccagaataccgaggagccttacgagaatatcagaaatgagggccaaaacacggatcccaaactaaaccccaaggacgacgggatcgtttacgcatccttggccctcagcagctccacaagcccgcgagcccccccctctcatagaccactgaagagcccacaaaatgagacactctatagcgtgttgaaggcctag

SEQ ID NO: 176573 - DNA, 912 bp, Artificial Sequence
  derived and/or modified sequence
atgggccggcccctgctgctgcccctgctgcccctgctgctgcccccagccttcctgcagcccagcggcagcactggaagtggccccagctacctgtatggagtgacccagcccaagcacctgagcgcctccatgggcggctctgtggagatccccttctccttctactacccctgggagctggccacagccccagatgtgcgcatctcctggaggcggggccacttccaccggcagagcttctacagcacccggccccccagcatccacaaggactatgtgaacagactcttcctgaactggacagagggccagaagagcggcttcctgcgcatcagcaacctgcagaagcaggaccagagcgtgtacttctgccgggtggagctggacaccaggagcagcggccggcagcagtggcagagcattgagggcaccaagctgagcatcacccaggccgtgaccaccaccacccagaggcccagctccatgaccaccacctggaggctgagcagcaccaccaccaccaccggcctgcgggtgacccagggcaagagaagaagtgacagctggcacatcagcctggagacagctgtgggcgtggccgtggccgtgacagtgctgggcatcatgatcctgggcctcatctgcctgctgcgctggaggaggaggaagggccagcagaggaccaaggccaccaccccagcccgggagcccttccagaacacagaggagccctatgagaacatcagaaatgaaggccagaacacagaccccaagctgaaccccaaggatgatggcatcgtgtatgccagcctggccctgagcagcagcaccagcccccgggccccacccagccaccggcccctgaagagcccccagaatgagaccctgtacagcgtgctgaaggcctag

SEQ ID NO: 176574 - DNA, 912 bp, Artificial Sequence
  derived and/or modified sequence
atgggccggcccctgctgctgcccctgctgcccctgctgctgccccctgctttcttgcaaccaagtggatccacggggtcaggacctagctatctctacggagtgacccaacctaagcacctgagtgccagtatggggggctctgtggaaattccatttagcttttattacccatgggaactggctaccgcaccagatgtaagaatttcttggcgccggggacacttccaccgccagtctttctactccaccaggccgccctctattcacaaagactatgtgaaccggctttttttgaactggaccgaaggacagaaaagcggctttctacggatctccaatctgcagaagcaggatcaatccgtttacttttgccgcgtggaactggatacgagaagctcaggacgccagcagtggcagtccatagaaggaaccaaactgagcattacccaagcggtcaccaccacaactcaaagaccctcttccatgactaccacttggcggctgtcttcgacgacaacaacaaccggtctgagggtgacccagggcaaaaggaggtccgatagctggcacatttctttagaaacggctgtgggagtcgccgtggccgtcactgtcctgggtattatgatactcgggcttatctgcctgctcagatggcgcagaaggaagggtcaacaacgtactaaggcaaccactcccgcaagggagccatttcagaacactgaagagccctacgaaaacatcaggaacgaaggccagaatactgatcccaagttaaatccgaaggatgacggcatcgtctatgcctcactggccctgagtagttcgacttccccccgagccccaccctcacaccggcctttgaagtccccgcagaacgaaaccctctactccgttttaaaagcctag

SEQ ID NO: 176575 - DNA, 1313 bp, Artificial Sequence
  derived and/or modified sequence
aataggggaaaataagccagatggataaaggaagtgctggtcaccctggaggtgcactggtttggggaaggctcctggcccccacagccctcttcggagcctgagcccggctctcctcactcacctcaacccccaggcggcccctccacagggcccctctcctgcctggacggctctgctggtctccccgtcccctggagaagaacaaggccatgggtcggcccctgctgctgcccctactgcccttgctgctgccgccagcatttctgcagcctagtggctccacaggatctggtccaagctacctttatggggtcactcaaccaaaacacctctcagcctccatgggtggctctgtggaaatccccttctccttctattacccctgggagttagccacagctcccgacgtgagaatatcctggagacggggccacttccacaggcagtccttctacagcacaaggccgccttccattcacaaggattatgtgaaccggctctttctgaactggacagagggtcagaagagcggcttcctcaggatctccaacctgcagaagcaggaccagtctgtgtatttctgccgagttgagctggacacacggagctcagggaggcagcagtggcagtccatcgaggggaccaaactctccatcacccaggctgtcacgaccaccacccagaggcccagcagcatgactaccacctggaggctcagtagcacaaccaccacaaccggcctcagggtcacacagggcaaacgacgctcagactcttggcacataagtctggagactgctgtgggggtggcagtggctgtcactgtgctcggaatcatgattttgggactgatctgcctcctcaggtggaggagaaggaaaggtcagcagcggactaaagccacaaccccagccagggaacccttccaaaacacagaggagccatatgagaatatcaggaatgaaggacaaaatacagatcccaagctaaatcccaaggatgacggcatcgtctatgcttcccttgccctctccagctccacctcacccagagcacctcccagccaccgtcccctcaagagcccccagaacgagaccctgtactctgtcttaaaggcctaaccaatggacagccctctcaagactgaatggtgaggccaggtacagtggcgcacacctgtaatcccagctactctgaagcctgaggcagaatcaagtgagcccaggagttcagggccagctttgataatggagcgagatgccatctctagttaaaaatatatattaacaataaagtaacaaatttaaaaa

SEQ ID NO: 176576 - DNA, 912 bp, Artificial Sequence
  derived and/or modified sequence
atgggtcgaccgcttctgctgcctctgcttcccttactgctcccgccagcctttttacagcctagtggttctaccggaagtgggcctagttacctgtacggagtcacccagcccaaacatctgtctgcttcaatgggcggttcagtggagatccccttttctttctattacccgtgggagctcgccactgcccctgatgtgagaatttcttggcgccgtgggcactttcatcgtcagagcttttactcaacccgacctccctctatacacaaggactatgtgaaccgcctgtttttgaactggacagagggtcagaagtcagggtttttgcggatatctaatcttcagaaacaggatcagagtgtttacttctgtagggtggagctagatacacggtcaagtggcaggcaacagtggcagagcattgaagggacaaagctgagtataactcaggccgtcaccaccaccactcagcggccatcaagcatgacaactacttggcggctttcttctacgactacaaccacaggactgcgcgtcacgcagggcaaacgaagatctgattcttggcacatttctctggaaactgccgtgggggtggccgttgctgtaaccgttcttgggatcatgatcctgggactgatatgtctcctgcggtggcggcgacgcaagggtcagcagagaacaaaggcaacaactcccgctcgcgaaccattccaaaatacggaggagccctatgagaacatccggaatgaaggtcaaaataccgacccaaaacttaacccaaaggacgatgggatcgtctatgcatctcttgccttgtcgtccagcacgtccccgagagctccacccagccatcggcctctgaagtcgcctcaaaatgagaccttgtatagtgtgttgaaagcctag

SEQ ID NO: 176577 - DNA, 912 bp, Artificial Sequence
  derived and/or modified sequence
atgggcagacccctgctgctgcccctgctgcccctgctgctgccccccgccttcctgcagcccagcggcagcaccggcagcggccccagctacctgtacggcgtgacccagcccaagcacctgagcgccagcatgggcggcagcgtggagatccccttcagcttctactacccctgggagctggccaccgcccccgacgtgagaatcagctggagaagaggccacttccacagacagagcttctacagcaccagaccccccagcatccacaaggactacgtgaacagactgttcctgaactggaccgagggccagaagagcggcttcctgagaatcagcaacctgcagaagcaggaccagagcgtgtacttctgcagagtggagctggacaccagaagcagcggcagacagcagtggcagagcatcgagggcaccaagctgagcatcacccaggccgtgaccaccaccacccagagacccagcagcatgaccaccacctggagactgagcagcaccaccaccaccaccggcctgagagtgacccagggcaagagaagaagcgacagctggcacatcagcctggagaccgccgtgggcgtggccgtggccgtgaccgtgctgggcatcatgatcctgggcctgatctgcctgctgagatggagaagaagaaagggccagcagagaaccaaggccaccacccccgccagagagcccttccagaacaccgaggagccctacgagaacatcagaaacgagggccagaacaccgaccccaagctgaaccccaaggacgacggcatcgtgtacgccagcctggccctgagcagcagcaccagccccagagccccccccagccacagacccctgaagagcccccagaacgagaccctgtacagcgtgctgaaggcctag

SEQ ID NO: 176578 - protein, 356 aa, Artificial Sequence
  derived and/or modified sequence
MLARAARGTGALLLRGSLLASGRAPRRASSGLPRNTVVLFVPQQEAWVVERMGRFHRILEPGLNILIPVLDRIRYVQSLKEIVINVPEQSAVTLDNVTLQIDGVLYLRIMDPYKASYGVEDPEYAVTQLAQTTMRSELGKLSLDKVFRERESLNASIVDAINQAADCWGIRCLRYEIKDIHVPPRVKESMQMQVEAERRKRATVLESEGTRESAINVAEGKKQAQILASEAEKAEQINQAAGEASAVLAKAKAKAEAIRILAAALTQHNGDAAASLTVAEQYVSAFSKLAKDSNTILLPSNPGDVTSMVAQAMGVYGALTKAPVPGTPDSLSSGSSRDVQGTDASLDEELDRVKMS

SEQ ID NO: 176579 - DNA, 1071 bp, Artificial Sequence
  derived and/or modified sequence
atgctggccagagccgccagaggcaccggcgccctgctgctgagaggcagcctgctggccagcggcagagcccccagaagagccagcagcggcctgcccagaaacaccgtggtgctgttcgtgccccagcaggaggcctgggtggtggagagaatgggcagattccacagaatcctggagcccggcctgaacatcctgatccccgtgctggacagaatcagatacgtgcagagcctgaaggagatcgtgatcaacgtgcccgagcagagcgccgtgaccctggacaacgtgaccctgcagatcgacggcgtgctgtacctgagaatcatggacccctacaaggccagctacggcgtggaggaccccgagtacgccgtgacccagctggcccagaccaccatgagaagcgagctgggcaagctgagcctggacaaggtgttcagagagagagagagcctgaacgccagcatcgtggacgccatcaaccaggccgccgactgctggggcatcagatgcctgagatacgagatcaaggacatccacgtgccccccagagtgaaggagagcatgcagatgcaggtggaggccgagagaagaaagagagccaccgtgctggagagcgagggcaccagagagagcgccatcaacgtggccgagggcaagaagcaggcccagatcctggccagcgaggccgagaaggccgagcagatcaaccaggccgccggcgaggccagcgccgtgctggccaaggccaaggccaaggccgaggccatcagaatcctggccgccgccctgacccagcacaacggcgacgccgccgccagcctgaccgtggccgagcagtacgtgagcgccttcagcaagctggccaaggacagcaacaccatcctgctgcccagcaaccccggcgacgtgaccagcatggtggcccaggccatgggcgtgtacggcgccctgaccaaggcccccgtgcccggcacccccgacagcctgagcagcggcagcagcagagacgtgcagggcaccgacgccagcctggacgaggagctggacagagtgaagatgagctag

SEQ ID NO: 176580 - DNA, 1071 bp, Artificial Sequence
  derived and/or modified sequence
atgctcgcaagagccgctcggggaaccggtgcgctccttcttcgtgggagtctcctcgcatccggacgcgctccccgccgtgcatcatctggcctgcctaggaatacggtggtgctgtttgttccacagcaggaggcatgggtcgtcgagagaatgggccgcttccacaggattctcgagcctggcttgaatatattgattccagtattggacaggatccgttatgtgcagtccttgaaagaaatcgtgatcaatgtcccagagcagtccgccgtgacattggacaatgtgacgctgcagatcgatggcgtgctgtacctgcgcatcatggatccttacaaggcctcttatggtgtggaagacccagagtacgcagtaactcaactggctcagaccaccatgcggagcgaactgggaaaactctcacttgacaaagtgtttcgcgaacgagagtctctcaatgccagcatcgttgacgctattaaccaggccgctgattgctgggggatccgctgtcttaggtacgagatcaaagatatccatgtaccacctagggtgaaggaaagcatgcagatgcaggtggaagcagaacgtcggaaacgcgccactgttctggaatcagagggtacccgggagagcgcaattaacgtggcagagggtaaaaagcaggcccaaatcttagcgtccgaggccgagaaggctgaacagataaaccaggccgcgggggaagcttctgctgtcctggcgaaagcaaaggccaaggcagaggcgatacgtatcctcgcagcggccctcacccagcataacggcgacgctgctgccagcttgacggtggcagagcaatacgtgagtgcattttctaaacttgccaaagactcaaacactattctgctcccctctaacccgggcgacgtaacctctatggtggcacaggccatgggtgtatacggtgcgctgactaaggctcctgtacccgggacacctgattcgctgtcttccgggtcgtctagggacgttcagggcacagacgcgagcttggatgaagaactggacagagtaaagatgtcatag

SEQ ID NO: 176581 - DNA, 1071 bp, Artificial Sequence
  derived and/or modified sequence
atgctggcccgggccgcccggggcactggagccctgctgctgcggggcagcctgctggccagcggccgggccccccggcgggccagcagcggcctgcccaggaacacagtggtgctgtttgtgccccagcaggaggcctgggtggtggagaggatgggccgcttccaccgcatcctggagcccggcctgaacatcctgatccctgtgctggaccgcatccgctacgtgcagagcctgaaggagatcgtcatcaacgtgcctgagcagagcgctgtgaccctggacaacgtgaccctgcagattgatggagtgctgtacctgcgcatcatggacccctacaaggccagctatggagtggaggaccctgaatatgctgtgacccagctggcccagaccaccatgaggtctgagctgggcaagctgagcctggacaaggtgttccgggagcgggagagcctgaatgccagcatcgtggatgccatcaaccaggccgctgactgctggggcatccgctgcctgcgctatgagatcaaggacatccacgtgcccccccgggtgaaggagagcatgcagatgcaggtggaggccgagaggaggaagagggccaccgtgctggagagcgagggcacccgggagagcgccatcaacgtggccgagggcaagaagcaggcccagatcctggccagcgaggccgagaaggccgagcagatcaaccaggccgccggggaggccagcgctgtgctggccaaggccaaggccaaggccgaggccatccgcatcctggccgccgccctgacccagcacaatggagatgctgctgccagcctgactgtggccgagcagtatgtgtctgccttcagcaagctggccaaggacagcaacaccatcctgctgcccagcaaccctggagatgtgacctccatggtggcccaggccatgggcgtgtatggagccctgaccaaggcccctgtgcccggcaccccagacagcctgagcagcggcagcagcagagatgtgcagggcacagatgccagcctggatgaggagctggacagagtgaagatgtcctag

SEQ ID NO: 176582 - DNA, 1071 bp, Artificial Sequence
  derived and/or modified sequence
atgctggcccgggccgcccggggcaccggcgccctgctgctgcggggctcattgctggctagtgggcgggctcccaggagggcttcctctggcctgccgcggaacaccgtcgtgcttttcgtgcctcagcaggaagcatgggtggtggagaggatggggcggttccatcgtatcctcgagccaggactgaatattctgattcccgtcctggatcgaattaggtatgtgcagagtctcaaggagattgtgattaacgtgcctgagcagtccgcagtgaccctcgacaatgtcacactgcagatcgatggagtgttgtatcttcgcatcatggacccgtataaagctagctatggagtcgaagacccagagtatgcagtgactcagctggcccagactactatgaggagcgagctcggcaagctgagcctggataaagtgtttagggagcgggaatcactcaacgcttcgatagtggacgctattaatcaagccgcagactgctggggcatccggtgcctgcgatacgagattaaggatatccatgttcccccgcgagtgaaggaatcaatgcaaatgcaggtcgaagcagaacgccgtaagcgcgccacagtcttagagtccgagggtacaagggagtcagccataaacgtggccgaaggtaaaaagcaggctcagatcttagcatcagaggcagaaaaggcagaacaaatcaatcaggcagctggagaggcgtcggccgttctggcaaaagctaaagccaaggctgaggctataagaattctggcggcggcattgacccagcacaacggcgatgctgccgcctccctgaccgtggccgagcagtacgtgtctgcattctccaaactggcaaaagactccaacaccatactgctgcccagtaatcccggcgatgtgaccagtatggtagcacaggctatgggagtttacggtgcccttactaaggcaccagtaccaggaacgccagatagtctcagctccggcagcagccgcgacgtgcagggcacagatgcatctttagatgaggaactggatcgggtgaagatgagttag

SEQ ID NO: 176583 - DNA, 1071 bp, Artificial Sequence
  derived and/or modified sequence
atgctcgctcgagcagcccgaggaacgggggctctgctgctccgaggctctctgctggcatctggtcgagctcccagacgggcatcatccggcctgccaaggaataccgtggtcttgtttgtcccgcaacaggaggcatgggtagtggaacggatgggtagattccaccgcattctcgaacccggactgaacattctgattcctgtcctggacagaatacgctatgtacagtcactgaaggagatcgtgattaacgtgccagaacagtcagccgtgaccctggataatgtgactctgcaaatcgacggtgtcctgtatcttcgcataatggatccttataaagcctcatacggtgtggaagacccggaatacgccgtaacccaactcgcgcaaaccaccatgcgcagtgaactggggaagctgagcttggacaaagtgttccgcgagcgcgagagcctgaacgcctcaatcgttgacgcaatcaatcaggccgcagactgctggggaattcgttgtcttcgatacgagatcaaggacatccacgtcccccctcgcgtaaaagagagcatgcagatgcaggtggaggctgaacggagaaaacgggctaccgtgcttgaatcggaaggcacccgcgagtccgctatcaatgtcgccgagggcaagaaacaggctcagatcctggcttctgaagccgaaaaggccgaacagattaatcaggccgcaggcgaagcctcagcagtccttgctaaggcaaaagcaaaggctgaagctattagaatcctggccgctgcactgacccagcacaacggcgacgctgccgcatccctgacagtggccgagcagtatgtgtccgcctttagcaagcttgctaaagattctaacacaatcctgctgccaagtaaccctggtgatgttacaagcatggtggcgcaggctatgggagtttacggtgctctcaccaaggcgccagtcccgggaacaccggactcgttgtcttcgggatctagtcgcgacgtccagggcacagacgcgagtctggatgaagaattggatcgtgttaaaatgtcctag

SEQ ID NO: 176584 - DNA, 1278 bp, Artificial Sequence
  derived and/or modified sequence
ggcttctgggagcgaccgctccgctcgtctcgttggttccggaggtcgctgcggcggtgggaaatgctggcgcgcgcggcgcggggcactggggcccttttgctgaggggctctctactggcttctggccgcgctccgcgccgcgcctcctctggattgccccgaaacaccgtggtactgttcgtgccgcagcaggaggcctgggtggtggagcgaatgggccgattccaccggatcctggagcctggtttgaacatcctcatccctgtgttagaccggatccgatatgtgcagagtctcaaggaaattgtcatcaacgtgcctgagcagtcggctgtgactctcgacaatgtaactctgcaaatcgatggagtcctttacctgcgcatcatggacccttacaaggcaagctacggtgtggaggaccctgagtatgccgtcacccagctagctcaaacaaccatgagatcagagctcggcaaactctctctggacaaagtcttccgggaacgggagtccctgaatgccagcattgtggatgccatcaaccaagctgctgactgctggggtatccgctgcctccgttatgagatcaaggatatccatgtgccaccccgggtgaaagagtctatgcagatgcaggtggaggcagagcggcggaaacgggccacagttctagagtctgaggggacccgagagtcggccatcaatgtggcagaagggaagaaacaggcccagatcctggcctccgaagcagaaaaggctgaacagataaatcaggcagcaggagaggccagtgcagttctggcgaaggccaaggctaaagctgaagctattcgaatcctggctgcagctctgacacaacataatggagatgcagcagcttcactgactgtggccgagcagtatgtcagcgcgttctccaaactggccaaggactccaacactatcctactgccctccaaccctggcgatgtcaccagcatggtggctcaggccatgggtgtatatggagccctcaccaaagccccagtgccagggactccagactcactctccagtgggagcagcagagatgtccagggtacagatgcaagtcttgatgaggaacttgatcgagtcaagatgagttagtggagctgggcttggccagggagtctgggaacaaggaagcagattttcctgattctggctctagcttccctgccaagattttggtttttatttttttatttgaactttagtcgtgtaataaactcaccagtggcaaaccagaaa

SEQ ID NO: 176585 - protein, 333 aa, Artificial Sequence
  derived and/or modified sequence
MACSRPPSQCEPTSLPPGPPAGRRHLPLSRRRREMSSNKEQRSAVFVILFALITILILYSSNSANEVFHYGSLRGRSRRPVNLKKWSITDGYVPILGNKTLPSRCHQCVIVSSSSHLLGTKLGPEIERAECTIRMNDAPTTGYSADVGNKTTYRVVAHSSVFRVLRRPQEFVNRTPETVFIFWGPPSKMQKPQGSLVRVIQRAGLVFPNMEAYAVSPGRMRQFDDLFRGETGKDREKSHSWLSTGWFTMVIAVELCDHVHVYGMVPPNYCSQRPRLQRMPYHYYEPKGPDECVTYIQNEHSRKGNHHRFITEKRVFSSWAQLYGITFSHPSWT

SEQ ID NO: 176586 - DNA, 1002 bp, Artificial Sequence
  derived and/or modified sequence
atggcctgcagcagaccccccagccagtgcgagcccaccagcctgccccccggcccccccgccggcagaagacacctgcccctgagcagaagaagaagagagatgagcagcaacaaggagcagagaagcgccgtgttcgtgatcctgttcgccctgatcaccatcctgatcctgtacagcagcaacagcgccaacgaggtgttccactacggcagcctgagaggcagaagcagaagacccgtgaacctgaagaagtggagcatcaccgacggctacgtgcccatcctgggcaacaagaccctgcccagcagatgccaccagtgcgtgatcgtgagcagcagcagccacctgctgggcaccaagctgggccccgagatcgagagagccgagtgcaccatcagaatgaacgacgcccccaccaccggctacagcgccgacgtgggcaacaagaccacctacagagtggtggcccacagcagcgtgttcagagtgctgagaagaccccaggagttcgtgaacagaacccccgagaccgtgttcatcttctggggcccccccagcaagatgcagaagccccagggcagcctggtgagagtgatccagagagccggcctggtgttccccaacatggaggcctacgccgtgagccccggcagaatgagacagttcgacgacctgttcagaggcgagaccggcaaggacagagagaagagccacagctggctgagcaccggctggttcaccatggtgatcgccgtggagctgtgcgaccacgtgcacgtgtacggcatggtgccccccaactactgcagccagagacccagactgcagagaatgccctaccactactacgagcccaagggccccgacgagtgcgtgacctacatccagaacgagcacagcagaaagggcaaccaccacagattcatcaccgagaagagagtgttcagcagctgggcccagctgtacggcatcaccttcagccaccccagctggacctag

SEQ ID NO: 176587 - DNA, 1002 bp, Artificial Sequence
  derived and/or modified sequence
atggcttgctcccgaccgccatcccagtgtgagcccacatctctgccaccaggacctcctgcaggccggaggcatcttcctctgagcagacggaggcgcgaaatgtcaagtaataaagaacagagatccgccgtttttgtcatcctctttgctctcatcaccattttgattttgtattccagcaacagcgcaaacgaagtcttccactacggaagcttgcgaggtagatccagaagacctgtaaacttgaagaagtggagcattacagacggctacgttccaatcctgggaaacaagaccctgcctagtaggtgtcaccagtgcgttatcgtgtctagctcttcccatcttcttggaactaagttaggaccagaaattgaacgtgcggaatgtaccatccggatgaacgatgctcccaccacaggctacagcgctgacgtgggcaacaaaactacatatcgcgtggtggctcactctagtgtctttagagtgctgcgtaggccgcaggagttcgtgaacaggacaccagagaccgttttcattttttggggtccgccatcaaagatgcagaagccccagggcagtcttgttagggtcatccaaagggccggtctggtctttcctaacatggaagcttacgccgtgtcgccaggccgcatgcgccaatttgacgatctgtttaggggagagaccggcaaagatcgtgagaaatcacacagttggctttcgactggctggttcacaatggtgatcgctgttgagctgtgtgatcacgtgcacgtgtatggcatggtgcctccaaactattgctcacaacggcccagactgcagaggatgccatatcactattatgagccgaagggccctgacgagtgtgtgacctatatccaaaacgaacactccaggaaggggaaccatcaccgctttataacagaaaagcgtgtctttagctcttgggcacagttgtatggaatcacgttttctcaccccagctggacctag

SEQ ID NO: 176588 - DNA, 1002 bp, Artificial Sequence
  derived and/or modified sequence
atggcgtgctcacgacctcctagtcagtgcgagcctacctctctgcccccaggcccaccagccggccgtagacacttacctctcagtcgtaggcggcgtgagatgtcaagcaacaaggaacaacgctccgctgtttttgtgatactgtttgccttaatcacgattctcatactttactcaagcaactcagccaacgaagtgttccactacggctcactcaggggtcgctccaggaggcccgtaaacctgaaaaagtggagtatcaccgatggttacgtcccaatcctgggtaacaagacgctgccctcaagatgtcaccagtgtgttatcgttagtagttcatctcatctgctcggaaccaaattaggccccgagatagagagagctgaatgtacaatcaggatgaatgatgccccaactactggatattcagctgatgtggggaataagacaacgtaccgcgtcgtcgcccatagtagtgttttccgcgtcctgcggcgccctcaggagtttgtcaaccgcaccccagagacggttttcatattttggggccctccctcaaaaatgcagaagccacagggaagtctggtgagggtcatccagagagctggcctcgtgttccccaacatggaggcatacgctgtcagccccggccgtatgcgtcaatttgatgacttattcagaggcgagaccggaaaggatcgcgaaaagtcacattcgtggctctcaaccggttggtttacaatggtgattgcagtcgagctgtgtgaccacgtacatgtgtatgggatggtaccacccaattattgctcccaaaggccacggctccaaaggatgccttaccattactacgagccgaaggggccagacgaatgtgtgacatacattcagaacgaacattctcgtaaagggaatcatcaccgatttatcacagagaaaagggtcttcagcagctgggctcaactttacggaattaccttcagtcacccatcttggacttag

SEQ ID NO: 176589 - DNA, 1002 bp, Artificial Sequence
  derived and/or modified sequence
atggcctgcagccggccccccagccagtgtgagcccaccagcctgcccccaggccccccagctggaagaagacacctgcccctgagcagaagaagaagagagatgagcagcaacaaggagcagaggtctgctgtgtttgtgatcctgtttgccctgatcaccatcctgatcctgtacagcagcaacagcgccaatgaggtgttccactacggcagcctgcggggccgcagccggcggcctgtgaacctgaagaagtggagcatcacagatggctacgtgcccatcctgggcaacaagaccctgcccagccgctgccaccagtgtgtgattgtgagcagcagcagccacctgctgggcaccaagctgggccctgagattgaaagagctgagtgcaccatccgcatgaatgatgcccccaccaccggctacagcgcagatgtgggcaacaagaccacctacagagtggtggcccacagcagcgtcttccgggtgctgcggcggccccaggagtttgtgaacagaacacctgagaccgtcttcatcttctggggcccccccagcaagatgcagaagccccagggcagcctggtgcgggtcatccagagagctggcctggtgttccccaacatggaggcctatgctgtgtccccaggccgcatgaggcagtttgatgacctcttccggggggagaccgggaaggaccgggagaagagccacagctggctgagcacaggctggttcaccatggtgattgctgtggagctgtgtgaccacgtgcacgtgtatggcatggtgccccccaactactgcagccagaggccccggctgcagaggatgccctaccactactatgagcccaagggcccagatgaatgtgtgacctacatccagaatgagcacagcaggaaaggaaaccaccaccgcttcatcacagagaagagggtcttcagctcctgggcccagctgtatggcatcaccttcagccaccccagctggacctag

SEQ ID NO: 176590 - DNA, 1002 bp, Artificial Sequence
  derived and/or modified sequence
atggcctgcagccggccccccagccagtgcgagcccaccagcctgccacccgggcctcccgctggccgaagacatctaccactgagccgccggagaagggagatgagctccaataaagagcagagatctgctgtgtttgtgatccttttcgccttgatcaccatcttgatcctctactccagtaatagtgctaacgaggtgtttcactatggctccctgcgtggacggtctcggagaccagtcaacttgaagaagtggagcataaccgacgggtacgttcccatcctgggtaacaaaaccctgccgagtagatgccatcagtgtgtgattgtgagcagttctagtcacctgttggggacaaaattaggccctgaaattgagagagccgagtgtacaattcggatgaacgatgcccctaccactggctatagtgccgatgttggcaataagaccacataccgcgtggtggctcacagcagtgtcttccgggtgttgaggcggcctcaggagttcgtcaacagaaccccggagacggtattcattttttggggcccaccttcgaagatgcagaaacctcagggttccctcgtaagggtgatccagagagccggtctagtgttccctaatatggaagcctatgcagtgagcccaggaagaatgcggcagttcgacgacctgttccgtggggagactggaaaagatagagagaaatcacactcctggctgtcaaccggctggtttacaatggtgatcgctgtggagctctgcgatcacgttcacgtgtacggcatggtgccccctaactactgttcccaaaggcctcgcttacagcgaatgccttaccactactacgagcctaaaggaccagacgagtgtgttacctatatccagaacgaacatagccgaaaggggaatcaccatcgcttcatcactgagaagagagtcttctccagctgggcacagctgtacggcatcacattctctcaccccagctggacatag

SEQ ID NO: 176591 - DNA, 1002 bp, Artificial Sequence
  derived and/or modified sequence
atggcctgcagccggccccccagccagtgcgagcccaccagcctgcctccagggcctcccgctggaagaagacaccttcctttatcacggcgaaggcgtgagatgtcgtccaataaagagcagcgatctgccgtatttgttatactatttgcgctcatcacaattctaattttgtactccagcaattctgcaaacgaggttttccactatggatctctcagagggcggtccagaagacctgtgaatctgaagaagtggtcaatcacagacggttacgtgcctatccttgggaacaagacactgccaagccggtgtcatcagtgcgtgatcgtgtcatcttccagccacctcctcggcactaagttgggccccgagattgaaagagccgaatgtactattcgcatgaatgatgctccaacaacagggtacagcgctgacgtggggaacaagacgacatacagggtcgtcgctcactcctccgtgtttcgcgttttgcggcgcccccaggaatttgttaatcgaactcctgagactgtcttcatattttggggtccaccctctaaaatgcagaaaccacagggctcacttgtgcgtgttatccagcgggcagggttggtcttccctaacatggaggcctacgcagtgagccccgggcgcatgcgccaattcgatgacctgttccgcggggaaacaggaaaagaccgggagaagtctcacagttggctgtctactggctggtttacaatggtgattgctgttgaactgtgtgaccatgtccacgtgtacggaatggtgccccccaactattgttcacagaggccgcgtctgcagagaatgccttatcactactatgagcctaaggggcctgacgaatgcgtcacatatatccagaacgagcactcgagaaagggtaatcaccatagattcataactgaaaagagagtattttcttcctgggcacaactctacggcatcacattttcccatcccagctggacatag

SEQ ID NO: 176592 - DNA, 1002 bp, Artificial Sequence
  derived and/or modified sequence
atggcgtgctcgaggcccccatcacagtgcgagcccacctcgctccccccaggtccaccagccggacggagacacctgccactatcccgccgtcgtagggagatgagttcaaacaaggagcagcggtcggccgtattcgttattctcttcgccctgattacaatccttattttatactcttcaaattccgccaatgaggttttccactacggatccctgaggggacggagccgcaggcccgtgaatctgaagaagtggagcattacagacgggtatgtgcccatcttggggaacaagacattgccatccagatgccatcagtgcgttattgtatcatcatcatcgcacctactggggacgaaactgggaccagaaatcgagagggcagagtgtacaatccgcatgaacgacgctccaaccaccgggtactccgctgacgtggggaataaaaccacctatagagtagtggctcacagcagcgtgtttcgggttcttcgcagaccccaggagttcgtcaatcgcacaccagaaactgtctttattttttggggtcctccttcaaagatgcagaaaccccaagggtccttagtgcgagtcatacaacgcgctggactggtcttcccaaatatggaagcatatgcagtatcgcctggtaggatgagacagtttgacgatctgttcagaggagaaaccggtaaggatcgcgagaagtcccactcctggttatccacagggtggtttactatggtgatcgccgtggaattatgcgaccatgtccatgtgtacgggatggtgcctcctaattactgctcccagcgccctagactccaaagaatgccataccactattacgaacccaaggggccagacgagtgcgtaacttatatccaaaatgagcatagccgcaaaggaaatcatcaccgctttattaccgagaagcgggtgttttcatcttgggctcagctgtatggaattacatttagccacccctcatggacctag

SEQ ID NO: 176593 - DNA, 1002 bp, Artificial Sequence
  derived and/or modified sequence
atggcctgcagccggcctccttcacagtgcgaaccgacatccctcccccctggcccacctgcgggacggaggcacctcccgttatccagaagacgccgagagatgtctagtaataaggagcaaagatccgctgtctttgtgatcctctttgccctaattacgatcctcatcctgtactcgagcaatagtgctaacgaggtattccactacggctcattacggggaagaagtaggcgaccagtgaacttgaagaaatggagcatcacggatggatacgtgcccatcttaggtaataaaactttaccaagcaggtgtcaccagtgcgtgattgttagtagctcaagccacctgcttggcacgaaactcggcccagagatagaacgcgctgaatgcacaattcgtatgaatgatgcccctactaccgggtactctgccgacgtcgggaataagactacttaccgcgtagtcgcacatagcagtgttttcagggtgttgcgcaggcctcaggaattcgtgaatcggactcccgaaactgtcttcattttctgggggccacctagcaaaatgcagaaaccacaggggagcctcgtacgcgtgatccaacgtgccggactggtctttccgaatatggaagcttatgcggtgagcccaggtaggatgcgacaatttgatgacttgtttcggggagaaaccggtaaggacagggagaagtcccattcttggctttccactgggtggttcacgatggttatagccgtggaattgtgcgatcatgtgcatgtctatggaatggtgcctcccaactactgctcccagcggccaagactccaacggatgccctatcactactacgagcccaaaggtcccgatgagtgcgtcacctatatccagaacgagcactcacgcaagggaaatcatcatagattcatcacagaaaaaagggtcttcagtagctgggcccagctgtatggtattacatttagccacccaagctggacctag

SEQ ID NO: 176594 - DNA, 2310 bp, Artificial Sequence
  derived and/or modified sequence
agatgaggaaactgaggctcagagaggtcacatggcttgctcgaggccccccagccagtgtgaacccacatccctgcccccagggccacctgcaggacgccgacacctacccctcagcagacgccggagagaaatgagtagcaacaaagagcagcggtcagcagtgttcgtgatcctctttgccctcatcaccatcctcatcctctacagctccaacagtgccaatgaggtcttccattacggctccctgcggggccgtagccgccgacctgtcaacctcaagaagtggagcatcactgacggctatgtccccattctcggcaacaagacactgccctctcggtgccaccagtgtgtgattgtcagcagctccagccacctgctgggcaccaagctgggccctgagatcgagcgggctgagtgtacaatccgcatgaatgatgcacccaccactggctactcagctgatgtgggcaacaagaccacctaccgcgtcgtggcccattccagtgtgttccgcgtgctgaggaggccccaggagtttgtcaaccggacccctgaaaccgtgttcatcttctgggggcccccgagcaagatgcagaagccccagggcagcctcgtgcgtgtgatccagcgagcgggcctggtgttccccaacatggaagcatatgccgtctctcccggccgcatgcggcaatttgacgacctcttccggggtgagacgggcaaggacagggagaagtctcattcgtggttgagcacaggctggtttaccatggtgatcgcggtggagttgtgtgaccacgtgcatgtctatggcatggtcccccccaactactgcagccagcggccccgcctccagcgcatgccctaccactactacgagcccaaggggccggacgaatgtgtcacctacatccagaatgagcacagtcgcaagggcaaccaccaccgcttcatcaccgagaaaagggtcttctcatcgtgggcccagctgtatggcatcaccttctcccacccctcctggacctaggccacccagcctgtgggacctcaggagggtcagaggagaagcagcctccgcccagccgctaggccagggaccatcttctggccaatcaaggcttgctggagtgtctcccagccaatcagggccttgaggaggatgtatcctccagccaatcagggcctggggaatctgttggcgaatcagggatttgggagtctatgcggttaatcaggggtgtctttcttgtgcagtcagggtctgcgcacagtcaatcagggtagagggggtatttctgagtcaatctgaggctaaggacatgtcctttcccatgaggccttggttcagagccccaggaatggaccccccaatcactccccactctcctgggataatggggtcctgtcccaaggagctgggaacttggtgttgccccctcaatttccagcaccagaaagagagattgtgtgggggtagaagctgtctggaggcccggccagagaatttgtggggttgtggaggttgtgggggcggtggggaggtcccagaggtgggaggccggcatccaggtcttggctctgccctgagaccttggacaaacccttccccctctctgggcacccttctgcccacaccagtttccagtgcggagtctgagaccctttccacctcccctacaagtgccctcgggtctgtcctccccgtctggaccctcccagccactatcccttgctggaaggctcagctctttggggggtctggggtgacctccccacctcctggaaaactttagggtatttttgcgcaaactccttcagggttgggggactctgaaggaaacgggacaaaaccttaagctgttttcttagcccctcagccagctgccattagcttggctcttaaagggccaggcctccttttctgccctctagcagggaggttttccaactgttggaggcgcctttggggctgcccctttgtctggagtcactgggggcttccgagggtctccctcgaccctctgtcgtcctgggatggctgtcgggagctgtatcacctgggttctgtcccctggctctgtatcaggcactttattaaagctgggcctcagtggggtgtgtttgtctcctgctcttctggagcctggaaggaaagggcttcaggaggaggctgtgaggctggagggaccagatggaggaggccagcagctagccattgcacactggggtgatgggtgggggcggtgactgccccagacttggttttgtaatgatttgtacaggaataaacacacctacgctccg

SEQ ID NO: 176595 - DNA, 2424 bp, Artificial Sequence
  derived and/or modified sequence
ggctattcctggtggccgtgtaggagtaaacagcggctaggtcaaagggctcagagaatacaggaactgagaggcccctggagcaggggacggagctgaggagggccccctaagccccagtttcttccctctgcactcctgcccgccctgcccccggcctgtctgctggaggtgtgaacccacatccctgcccccagggccacctgcaggacgccgacacctacccctcagcagacgccggagagaaatgagtagcaacaaagagcagcggtcagcagtgttcgtgatcctctttgccctcatcaccatcctcatcctctacagctccaacagtgccaatgaggtcttccattacggctccctgcggggccgtagccgccgacctgtcaacctcaagaagtggagcatcactgacggctatgtccccattctcggcaacaagacactgccctctcggtgccaccagtgtgtgattgtcagcagctccagccacctgctgggcaccaagctgggccctgagatcgagcgggctgagtgtacaatccgcatgaatgatgcacccaccactggctactcagctgatgtgggcaacaagaccacctaccgcgtcgtggcccattccagtgtgttccgcgtgctgaggaggccccaggagtttgtcaaccggacccctgaaaccgtgttcatcttctgggggcccccgagcaagatgcagaagccccagggcagcctcgtgcgtgtgatccagcgagcgggcctggtgttccccaacatggaagcatatgccgtctctcccggccgcatgcggcaatttgacgacctcttccggggtgagacgggcaaggacagggagaagtctcattcgtggttgagcacaggctggtttaccatggtgatcgcggtggagttgtgtgaccacgtgcatgtctatggcatggtcccccccaactactgcagccagcggccccgcctccagcgcatgccctaccactactacgagcccaaggggccggacgaatgtgtcacctacatccagaatgagcacagtcgcaagggcaaccaccaccgcttcatcaccgagaaaagggtcttctcatcgtgggcccagctgtatggcatcaccttctcccacccctcctggacctaggccacccagcctgtgggacctcaggagggtcagaggagaagcagcctccgcccagccgctaggccagggaccatcttctggccaatcaaggcttgctggagtgtctcccagccaatcagggccttgaggaggatgtatcctccagccaatcagggcctggggaatctgttggcgaatcagggatttgggagtctatgcggttaatcaggggtgtctttcttgtgcagtcagggtctgcgcacagtcaatcagggtagagggggtatttctgagtcaatctgaggctaaggacatgtcctttcccatgaggccttggttcagagccccaggaatggaccccccaatcactccccactctcctgggataatggggtcctgtcccaaggagctgggaacttggtgttgccccctcaatttccagcaccagaaagagagattgtgtgggggtagaagctgtctggaggcccggccagagaatttgtggggttgtggaggttgtgggggcggtggggaggtcccagaggtgggaggccggcatccaggtcttggctctgccctgagaccttggacaaacccttccccctctctgggcacccttctgcccacaccagtttccagtgcggagtctgagaccctttccacctcccctacaagtgccctcgggtctgtcctccccgtctggaccctcccagccactatcccttgctggaaggctcagctctttggggggtctggggtgacctccccacctcctggaaaactttagggtatttttgcgcaaactccttcagggttgggggactctgaaggaaacgggacaaaaccttaagctgttttcttagcccctcagccagctgccattagcttggctcttaaagggccaggcctccttttctgccctctagcagggaggttttccaactgttggaggcgcctttggggctgcccctttgtctggagtcactgggggcttccgagggtctccctcgaccctctgtcgtcctgggatggctgtcgggagctgtatcacctgggttctgtcccctggctctgtatcaggcactttattaaagctgggcctcagtggggtgtgtttgtctcctgctcttctggagcctggaaggaaagggcttcaggaggaggctgtgaggctggagggaccagatggaggaggccagcagctagccattgcacactggggtgatgggtgggggcggtgactgccccagacttggttttgtaatgatttgtacaggaataaacacacctacgctccg

SEQ ID NO: 176596 - DNA, 2406 bp, Artificial Sequence
  derived and/or modified sequence
ctgggccgggccgtgacggcggcgctaggacccggcgggccgcgggtgcggcgaggcctgggcggcctgaggagcgcggaccccggcgctcggctcccggcgccatgtgagggggctcgggggccgcggggggccgggcgctccccgccggaggtgtgaacccacatccctgcccccagggccacctgcaggacgccgacacctacccctcagcagacgccggagagaaatgagtagcaacaaagagcagcggtcagcagtgttcgtgatcctctttgccctcatcaccatcctcatcctctacagctccaacagtgccaatgaggtcttccattacggctccctgcggggccgtagccgccgacctgtcaacctcaagaagtggagcatcactgacggctatgtccccattctcggcaacaagacactgccctctcggtgccaccagtgtgtgattgtcagcagctccagccacctgctgggcaccaagctgggccctgagatcgagcgggctgagtgtacaatccgcatgaatgatgcacccaccactggctactcagctgatgtgggcaacaagaccacctaccgcgtcgtggcccattccagtgtgttccgcgtgctgaggaggccccaggagtttgtcaaccggacccctgaaaccgtgttcatcttctgggggcccccgagcaagatgcagaagccccagggcagcctcgtgcgtgtgatccagcgagcgggcctggtgttccccaacatggaagcatatgccgtctctcccggccgcatgcggcaatttgacgacctcttccggggtgagacgggcaaggacagggagaagtctcattcgtggttgagcacaggctggtttaccatggtgatcgcggtggagttgtgtgaccacgtgcatgtctatggcatggtcccccccaactactgcagccagcggccccgcctccagcgcatgccctaccactactacgagcccaaggggccggacgaatgtgtcacctacatccagaatgagcacagtcgcaagggcaaccaccaccgcttcatcaccgagaaaagggtcttctcatcgtgggcccagctgtatggcatcaccttctcccacccctcctggacctaggccacccagcctgtgggacctcaggagggtcagaggagaagcagcctccgcccagccgctaggccagggaccatcttctggccaatcaaggcttgctggagtgtctcccagccaatcagggccttgaggaggatgtatcctccagccaatcagggcctggggaatctgttggcgaatcagggatttgggagtctatgcggttaatcaggggtgtctttcttgtgcagtcagggtctgcgcacagtcaatcagggtagagggggtatttctgagtcaatctgaggctaaggacatgtcctttcccatgaggccttggttcagagccccaggaatggaccccccaatcactccccactctcctgggataatggggtcctgtcccaaggagctgggaacttggtgttgccccctcaatttccagcaccagaaagagagattgtgtgggggtagaagctgtctggaggcccggccagagaatttgtggggttgtggaggttgtgggggcggtggggaggtcccagaggtgggaggccggcatccaggtcttggctctgccctgagaccttggacaaacccttccccctctctgggcacccttctgcccacaccagtttccagtgcggagtctgagaccctttccacctcccctacaagtgccctcgggtctgtcctccccgtctggaccctcccagccactatcccttgctggaaggctcagctctttggggggtctggggtgacctccccacctcctggaaaactttagggtatttttgcgcaaactccttcagggttgggggactctgaaggaaacgggacaaaaccttaagctgttttcttagcccctcagccagctgccattagcttggctcttaaagggccaggcctccttttctgccctctagcagggaggttttccaactgttggaggcgcctttggggctgcccctttgtctggagtcactgggggcttccgagggtctccctcgaccctctgtcgtcctgggatggctgtcgggagctgtatcacctgggttctgtcccctggctctgtatcaggcactttattaaagctgggcctcagtggggtgtgtttgtctcctgctcttctggagcctggaaggaaagggcttcaggaggaggctgtgaggctggagggaccagatggaggaggccagcagctagccattgcacactggggtgatgggtgggggcggtgactgccccagacttggttttgtaatgatttgtacaggaataaacacacctacgctccg

SEQ ID NO: 176597 - DNA, 2460 bp, Artificial Sequence
  derived and/or modified sequence
gggccgggccgtgacggcggcgctaggacccggcgggccgcgggtgcggcgaggcctgggcggcctgaggagcgcggaccccggcgctcggctcccggcgccatgtgagggggctcgggggccgcggggggccgggcgctccccgccggagatgaggaaactgaggctcagagaggtcacatggcttgctcgaggccccccagccagtgtgaacccacatccctgcccccagggccacctgcaggacgccgacacctacccctcagcagacgccggagagaaatgagtagcaacaaagagcagcggtcagcagtgttcgtgatcctctttgccctcatcaccatcctcatcctctacagctccaacagtgccaatgaggtcttccattacggctccctgcggggccgtagccgccgacctgtcaacctcaagaagtggagcatcactgacggctatgtccccattctcggcaacaagacactgccctctcggtgccaccagtgtgtgattgtcagcagctccagccacctgctgggcaccaagctgggccctgagatcgagcgggctgagtgtacaatccgcatgaatgatgcacccaccactggctactcagctgatgtgggcaacaagaccacctaccgcgtcgtggcccattccagtgtgttccgcgtgctgaggaggccccaggagtttgtcaaccggacccctgaaaccgtgttcatcttctgggggcccccgagcaagatgcagaagccccagggcagcctcgtgcgtgtgatccagcgagcgggcctggtgttccccaacatggaagcatatgccgtctctcccggccgcatgcggcaatttgacgacctcttccggggtgagacgggcaaggacagggagaagtctcattcgtggttgagcacaggctggtttaccatggtgatcgcggtggagttgtgtgaccacgtgcatgtctatggcatggtcccccccaactactgcagccagcggccccgcctccagcgcatgccctaccactactacgagcccaaggggccggacgaatgtgtcacctacatccagaatgagcacagtcgcaagggcaaccaccaccgcttcatcaccgagaaaagggtcttctcatcgtgggcccagctgtatggcatcaccttctcccacccctcctggacctaggccacccagcctgtgggacctcaggagggtcagaggagaagcagcctccgcccagccgctaggccagggaccatcttctggccaatcaaggcttgctggagtgtctcccagccaatcagggccttgaggaggatgtatcctccagccaatcagggcctggggaatctgttggcgaatcagggatttgggagtctatgcggttaatcaggggtgtctttcttgtgcagtcagggtctgcgcacagtcaatcagggtagagggggtatttctgagtcaatctgaggctaaggacatgtcctttcccatgaggccttggttcagagccccaggaatggaccccccaatcactccccactctcctgggataatggggtcctgtcccaaggagctgggaacttggtgttgccccctcaatttccagcaccagaaagagagattgtgtgggggtagaagctgtctggaggcccggccagagaatttgtggggttgtggaggttgtgggggcggtggggaggtcccagaggtgggaggccggcatccaggtcttggctctgccctgagaccttggacaaacccttccccctctctgggcacccttctgcccacaccagtttccagtgcggagtctgagaccctttccacctcccctacaagtgccctcgggtctgtcctccccgtctggaccctcccagccactatcccttgctggaaggctcagctctttggggggtctggggtgacctccccacctcctggaaaactttagggtatttttgcgcaaactccttcagggttgggggactctgaaggaaacgggacaaaaccttaagctgttttcttagcccctcagccagctgccattagcttggctcttaaagggccaggcctccttttctgccctctagcagggaggttttccaactgttggaggcgcctttggggctgcccctttgtctggagtcactgggggcttccgagggtctccctcgaccctctgtcgtcctgggatggctgtcgggagctgtatcacctgggttctgtcccctggctctgtatcaggcactttattaaagctgggcctcagtggggtgtgtttgtctcctgctcttctggagcctggaaggaaagggcttcaggaggaggctgtgaggctggagggaccagatggaggaggccagcagctagccattgcacactggggtgatgggtgggggcggtgactgccccagacttggttttgtaatgatttgtacaggaataaacacacctacgctccgg

SEQ ID NO: 176598 - DNA, 802 bp, Artificial Sequence
  derived and/or modified sequence
ccaggcagatggagatgatccttgacaggtctggtggctggttcggggtctactgaaggctgtcttgatcaggaaactgaagactctctgcttttgccacagcagttcctgcagcttccttgaggtgtgaacccacatccctgcccccagggccacctgcaggacgccgacacctacccctcagcagacgccggagagaaatgagtagcaacaaagagcagcggtcagcagtgttcgtgatcctctttgccctcatcaccatcctcatcctctacagctccaacagtgccaatgaggtcttccattacggctccctgcggggccgtagccgccgacctgtcaacctcaagaagtggagcatcactgacggctatgtccccattctcggcaacaagacactgccctctcggtgccaccagtgtgtgattgtcagcagctccagccacctgctgggcaccaagctgggccctgagatcgagcgggctgagtgtacaatccgcatgaatgatgcacccaccactggctactcagctgatgtgggcaacaagaccacctaccgcgtcgtggcccattccagtgtgttccgcgtgctgaggaggccccaggagtttgtcaaccggacccctgaaaccgtgttcatcttctgggggcccccgagcaagatgcagaagccccagggcagcctcgtgcgtgtgatccagcgagcgggcctggtgttccccaacatggaagcatatgccgtctctcccggccgcatgcggcaatttgacgacctcttccggggtgagacgggcaaggacag

SEQ ID NO: 176599 - protein, 624 aa, Artificial Sequence
  derived and/or modified sequence
MAENGESSGPPRPSRGPAAAQGSAAAPAEPKIIKVTVKTPKEKEEFAVPENSSVQQFKEAISKRFKSQTDQLVLIFAGKILKDQDTLIQHGIHDGLTVHLVIKSQNRPQGQSTQPSNAAGTNTTSASTPRSNSTPISTNSNPFGLGSLGGLAGLSSLGLSSTNFSELQSQMQQQLMASPEMMIQIMENPFVQSMLSNPDLMRQLIMANPQMQQLIQRNPEISHLLNNPDIMRQTLEIARNPAMMQEMMRNQDLALSNLESIPGGYNALRRMYTDIQEPMLNAAQEQFGGNPFASVGSSSSSGEGTQPSRTENRDPLPNPWAPPPATQSSATTSTTTSTGSGSGNSSSNATGNTVAAANYVASIFSTPGMQSLLQQITENPQLIQNMLSAPYMRSMMQSLSQNPDLAAQMMLNSPLFTANPQLQEQMRPQLPAFLQQMQNPDTLSAMSNPRAMQALMQIQQGLQTLATEAPGLIPSFTPGVGVGVLGTAIGPVGPVTPIGPIGPIVPFTPIGPIGPIGPTGPAAPPGSTGSGGPTGPTVSSAAPSETTSPTSESGPNQQFIQQMVQALAGANAPQLPNPEVRFQQQLEQLNAMGFLNREANLQALIATGGDINAAIERLLGSQPS

SEQ ID NO: 176600 - protein, 488 aa, Artificial Sequence
  derived and/or modified sequence
MAENGESSGPPRPSRGPAAAQGSAAAPAEPKIIKVTVKTPKEKEEFAVPENSSVQQFKEAISKRFKSQTDQLVLIFAGKILKDQDTLIQHGIHDGLTVHLVIKSQNRPQGQSTQPSNAAGTNTTSASTPRSNSTPISTNSNPFGLGSLGGLAGLSSLGLSSTNFSELQSQMQQQLMASPEMMIQIMENPFVQSMLSNPDLMRQLIMANPQMQQLIQRNPEISHLLNNPDIMRQTLEIARNPAMMQEMMRNQDLALSNLESIPGGYNALRRMYTDIQEPMLNAAQEQFGGNPFASVGSSSSSGEGTQPSRTENRDPLPNPWAPPPATQSSATTSTTTSTGSGSGNSSSNATGNTVAAANYVASIFSTPGMQSLLQQITENPQLIQNMLSAPYMRSMMQSLSQNPDLAAQMMLNSPLFTANPQLQEQMRPQLPAFLQQMQNPDTLSAMSNPTSSSFSKWCRPWLEQMLHSCRIQKSDFSNNWNSSTQWGS

SEQ ID NO: 176601 - DNA, 1875 bp, Artificial Sequence
  derived and/or modified sequence
atggccgagaacggcgagagcagcggcccccccagacccagcagaggccccgccgccgcccagggcagcgccgccgcccccgccgagcccaagatcatcaaggtgaccgtgaagacccccaaggagaaggaggagttcgccgtgcccgagaacagcagcgtgcagcagttcaaggaggccatcagcaagagattcaagagccagaccgaccagctggtgctgatcttcgccggcaagatcctgaaggaccaggacaccctgatccagcacggcatccacgacggcctgaccgtgcacctggtgatcaagagccagaacagaccccagggccagagcacccagcccagcaacgccgccggcaccaacaccaccagcgccagcacccccagaagcaacagcacccccatcagcaccaacagcaaccccttcggcctgggcagcctgggcggcctggccggcctgagcagcctgggcctgagcagcaccaacttcagcgagctgcagagccagatgcagcagcagctgatggccagccccgagatgatgatccagatcatggagaaccccttcgtgcagagcatgctgagcaaccccgacctgatgagacagctgatcatggccaacccccagatgcagcagctgatccagagaaaccccgagatcagccacctgctgaacaaccccgacatcatgagacagaccctggagatcgccagaaaccccgccatgatgcaggagatgatgagaaaccaggacctggccctgagcaacctggagagcatccccggcggctacaacgccctgagaagaatgtacaccgacatccaggagcccatgctgaacgccgcccaggagcagttcggcggcaaccccttcgccagcgtgggcagcagcagcagcagcggcgagggcacccagcccagcagaaccgagaacagagaccccctgcccaacccctgggcccccccccccgccacccagagcagcgccaccaccagcaccaccaccagcaccggcagcggcagcggcaacagcagcagcaacgccaccggcaacaccgtggccgccgccaactacgtggccagcatcttcagcacccccggcatgcagagcctgctgcagcagatcaccgagaacccccagctgatccagaacatgctgagcgccccctacatgagaagcatgatgcagagcctgagccagaaccccgacctggccgcccagatgatgctgaacagccccctgttcaccgccaacccccagctgcaggagcagatgagaccccagctgcccgccttcctgcagcagatgcagaaccccgacaccctgagcgccatgagcaaccccagagccatgcaggccctgatgcagatccagcagggcctgcagaccctggccaccgaggcccccggcctgatccccagcttcacccccggcgtgggcgtgggcgtgctgggcaccgccatcggccccgtgggccccgtgacccccatcggccccatcggccccatcgtgcccttcacccccatcggccccatcggccccatcggccccaccggccccgccgccccccccggcagcaccggcagcggcggccccaccggccccaccgtgagcagcgccgcccccagcgagaccaccagccccaccagcgagagcggccccaaccagcagttcatccagcagatggtgcaggccctggccggcgccaacgccccccagctgcccaaccccgaggtgagattccagcagcagctggagcagctgaacgccatgggcttcctgaacagagaggccaacctgcaggccctgatcgccaccggcggcgacatcaacgccgccatcgagagactgctgggcagccagcccagctag

SEQ ID NO: 176602 - DNA, 1467 bp, Artificial Sequence
  derived and/or modified sequence
atggccgagaacggcgagagcagcggcccccccagacccagcagaggccccgccgccgcccagggcagcgccgccgcccccgccgagcccaagatcatcaaggtgaccgtgaagacccccaaggagaaggaggagttcgccgtgcccgagaacagcagcgtgcagcagttcaaggaggccatcagcaagagattcaagagccagaccgaccagctggtgctgatcttcgccggcaagatcctgaaggaccaggacaccctgatccagcacggcatccacgacggcctgaccgtgcacctggtgatcaagagccagaacagaccccagggccagagcacccagcccagcaacgccgccggcaccaacaccaccagcgccagcacccccagaagcaacagcacccccatcagcaccaacagcaaccccttcggcctgggcagcctgggcggcctggccggcctgagcagcctgggcctgagcagcaccaacttcagcgagctgcagagccagatgcagcagcagctgatggccagccccgagatgatgatccagatcatggagaaccccttcgtgcagagcatgctgagcaaccccgacctgatgagacagctgatcatggccaacccccagatgcagcagctgatccagagaaaccccgagatcagccacctgctgaacaaccccgacatcatgagacagaccctggagatcgccagaaaccccgccatgatgcaggagatgatgagaaaccaggacctggccctgagcaacctggagagcatccccggcggctacaacgccctgagaagaatgtacaccgacatccaggagcccatgctgaacgccgcccaggagcagttcggcggcaaccccttcgccagcgtgggcagcagcagcagcagcggcgagggcacccagcccagcagaaccgagaacagagaccccctgcccaacccctgggcccccccccccgccacccagagcagcgccaccaccagcaccaccaccagcaccggcagcggcagcggcaacagcagcagcaacgccaccggcaacaccgtggccgccgccaactacgtggccagcatcttcagcacccccggcatgcagagcctgctgcagcagatcaccgagaacccccagctgatccagaacatgctgagcgccccctacatgagaagcatgatgcagagcctgagccagaaccccgacctggccgcccagatgatgctgaacagccccctgttcaccgccaacccccagctgcaggagcagatgagaccccagctgcccgccttcctgcagcagatgcagaaccccgacaccctgagcgccatgagcaaccccaccagcagcagcttcagcaagtggtgcagaccctggctggagcagatgctgcacagctgcagaatccagaagagcgacttcagcaacaactggaacagcagcacccagtggggcagctag

SEQ ID NO: 176603 - DNA, 1875 bp, Artificial Sequence
  derived and/or modified sequence
atggccgagaacggtgagagttcaggacctccgaggccatcccggggccccgccgcagcccagggctcagccgccgcccctgccgagcccaaaattattaaagtaacggtcaaaacacccaaggagaaggaagagtttgcggtgccggaaaacagctccgttcaacagtttaaggaggcaatatcaaaacgattcaaatcccagacagatcagctggtgctgatatttgctggcaagatactcaaggaccaggacactttgatccaacacggcatccacgatggactgacggtccatctggtcattaagtctcagaacaggccacagggacaatccacccagccatccaacgcagccgggaccaatacaacaagtgccagcaccccacgctccaacagtactcctatcagtactaacagcaacccttttgggctgggcagtctgggggggctggctggtctgtccagcctcgggctgtcttccacaaacttcagcgaattgcagtcccagatgcagcaacaactgatggctagtccggagatgatgattcagatcatggagaatcccttcgttcagagcatgctctctaatcctgatctgatgcgccagctgatcatggctaaccctcagatgcagcaattgatacagcgcaatccagaaatttctcacctgctcaacaaccctgacatcatgcgccagacattagaaatcgcgagaaatcctgccatgatgcaggaaatgatgcggaaccaagatctggccctcagcaacctggaatccattcccggggggtacaacgctttgagaagaatgtacactgatatccaggagcccatgctgaatgcagcccaggaacaatttggaggaaatcccttcgcttcagtcggatcctcaagcagcagcggggagggaactcaaccatctaggaccgaaaatcgcgatcccctccctaatccctgggcccccccccctgccactcagtcctccgctaccaccagcaccaccaccagtacgggcagtgggtctgggaatagtagcagtaatgcgacagggaatacagtggccgctgcaaactatgtggctagcatcttctctacccctggtatgcagagtttgctccaacagattacggaaaatccacagcttatccaaaacatgctgtcggcaccatatatgcgcagtatgatgcagtctctttcacaaaacccggacctggcggcacaaatgatgttgaatagccccctgtttacggccaatcctcaactgcaggagcagatgaggcctcaactgcctgcctttctgcagcaaatgcagaacccggacacgctgagtgctatgagtaacccacgggccatgcaagcgctgatgcagattcagcaaggattgcagaccctagctactgaggcccccggcctgattccatctttcactcccggagtcggggtaggggttctgggcacagccatagggcccgtcggccccgtgaccccgattggcccgataggaccgatcgttcccttcacgccaataggccccattggccccatcgggccgaccggccctgccgccccccctggatcaacaggcagcggcggccctacgggtccaaccgtgagcagtgccgcacccagtgagacaacatcacccaccagtgagagcgggccaaatcaacagttcattcagcagatggtgcaggctcttgcgggcgccaacgcccctcaactgcccaatccggaggtgagattccagcagcagctggagcagctgaatgccatgggctttcttaatagagaagcgaacttacaagcgctcattgccaccggcggagatatcaacgcagctatagaacggttactgggttctcagccttcctag

SEQ ID NO: 176604 - DNA, 1467 bp, Artificial Sequence
  derived and/or modified sequence
atggccgagaatggcgagtcctctgggcctccacggccctctcgcggtcctgctgccgcccaggggtccgccgcagcccctgctgagcctaagatcattaaggttaccgtaaaaacgcccaaggaaaaagaggaattcgcagtgcctgagaactcctctgtccaacagtttaaagaagcgatttcaaagcgctttaaaagtcagacagaccagctagtccttatttttgccggtaaaatactgaaggaccaggataccctgatccagcatgggatccatgatggattaacggtgcatctggtgattaaaagccaaaaccgcccgcagggccaaagcacccagcccagcaacgccgcaggaacgaacacaacttcggcgagcacccctagatcaaattctaccccaatttccaccaatagcaaccccttcggcttagggtcactggggggactggcggggctgagctccctggggctctcgtcaactaattttagcgagttgcaaagtcaaatgcagcagcagttgatggcttctccagaaatgatgattcaaatcatggagaacccattcgtgcaatcgatgctgtcgaacccggacctgatgaggcagctgatcatggccaacccccagatgcagcagctgatccagcgaaatccagaaatcagtcatcttctaaacaatccggacatcatgcggcagacactggagatcgctcggaatcctgcaatgatgcaggagatgatgagaaaccaggacctagccctatccaatttagaatcaattcctggcggatacaatgccctgcggcgaatgtacactgacatccaagagcccatgctaaatgcggcccaggaacaattcggaggcaatccattcgcctctgtaggcagcagttcctcatccggggaaggtactcagccctcacgcacagagaatcgcgatcctctgccaaacccgtgggcccctccccctgccacgcaatcttctgccacaacctccactacaacttccactggcagtggcagtggaaattcatcttctaatgccaccggcaatactgtggcagcggctaattatgttgcaagcatcttttctacccccggcatgcagagtttgctgcagcagattactgaaaacccacaactcatacaaaacatgctgtccgcaccctacatgagatctatgatgcagtctttgtctcagaatccagatctagccgcacagatgatgctgaactcccccctcttcaccgctaacccgcagctccaagaacaaatgaggccacagctgccagcctttctccaacaaatgcagaatccagacactctgagcgcgatgagtaatcccacgtcttccagcttctctaaatggtgcagaccttggttagagcaaatgctgcatagctgccgcattcaaaaaagtgatttcagcaataattggaatagttccacccaatgggggagttag

SEQ ID NO: 176605 - DNA, 1875 bp, Artificial Sequence
  derived and/or modified sequence
atggctgaaaatggagagagcagcggccccccccggcccagccggggccctgctgctgcccagggcagcgctgctgccccagctgagcccaagatcatcaaggtgacagtgaagacccccaaggagaaggaggagtttgctgtgcctgagaacagctctgtgcagcagttcaaggaggccatcagcaagcgcttcaagagccagacagaccagctggtgctgatctttgctgggaagatcctgaaggaccaggacaccctcatccagcacggcatccatgatggcctgactgtgcacctggtgatcaagagccagaaccggccccagggccagagcacccagcccagcaatgctgctggcaccaacaccaccagcgccagcacccccaggagcaacagcacccccatcagcaccaacagcaaccccttcggcctgggcagcctgggcggcctggccggcctgagcagcctgggcctgagcagcaccaacttcagcgagctgcagagccagatgcagcagcagctgatggccagccctgagatgatgatccagatcatggagaacccctttgtgcagagcatgctgagcaacccagacctgatgaggcagctgatcatggccaacccccagatgcagcagctgatccagagaaatcctgagatcagccacctgctgaacaacccagacatcatgaggcagaccctggagatcgccagaaatcctgccatgatgcaggagatgatgaggaaccaggacctggccctgagcaacctggagagcatccctgggggctacaatgccctgcggaggatgtacacagacatccaggagcccatgctgaatgctgcccaggagcagtttggaggcaacccctttgcctctgtgggcagcagcagcagcagtggagagggcacccagcccagcaggacagaaaatagagaccccctgcccaacccctgggcccctcctccagccacccagagcagcgccaccaccagcaccaccaccagcacaggcagcggcagcggcaacagcagcagcaatgccaccggcaacacagtggccgccgccaactacgtggccagcatcttcagcaccccaggcatgcagagcctgctgcagcagatcacagagaacccccagctgatccagaacatgctgagcgccccctacatgaggtccatgatgcagagcctgagccagaacccagacctggccgcccagatgatgctgaacagccccctcttcaccgccaacccccagctgcaggagcagatgaggccccagctgcctgccttcctgcagcagatgcagaacccagacaccctgagcgccatgagcaacccccgggccatgcaggccctgatgcagatccagcagggcctgcagaccctggccacagaggcccctggcctcatccccagcttcaccccaggagtgggcgtgggcgtgctgggcacagccatcggccctgtgggccctgtgacccccatcggccccatcggccccatcgtgcccttcacccccatcggccccatcggccccatcggccccactggacctgctgcccctcctggcagcacaggcagcggcggccccaccggccccaccgtgagcagcgctgcccccagcgagaccaccagccccaccagcgagagcggccccaaccagcagttcatccagcagatggtgcaggccctggccggggccaatgccccccagctgcccaaccctgaggtgcgcttccagcagcagctggagcagctgaatgccatgggcttcctgaaccgggaggccaacctgcaggccctgattgccactggaggagacatcaatgctgccatcgagcggctgctgggcagccagcccagctag

SEQ ID NO: 176606 - DNA, 1467 bp, Artificial Sequence
  derived and/or modified sequence
atggctgaaaatggagagagcagcggccccccccggcccagccggggccctgctgctgcccagggcagcgctgctgccccagctgagcccaagatcatcaaggtgacagtgaagacccccaaggagaaggaggagtttgctgtgcctgagaacagctctgtgcagcagttcaaggaggccatcagcaagcgcttcaagagccagacagaccagctggtgctgatctttgctgggaagatcctgaaggaccaggacaccctcatccagcacggcatccatgatggcctgactgtgcacctggtgatcaagagccagaaccggccccagggccagagcacccagcccagcaatgctgctggcaccaacaccaccagcgccagcacccccaggagcaacagcacccccatcagcaccaacagcaaccccttcggcctgggcagcctgggcggcctggccggcctgagcagcctgggcctgagcagcaccaacttcagcgagctgcagagccagatgcagcagcagctgatggccagccctgagatgatgatccagatcatggagaacccctttgtgcagagcatgctgagcaacccagacctgatgaggcagctgatcatggccaacccccagatgcagcagctgatccagagaaatcctgagatcagccacctgctgaacaacccagacatcatgaggcagaccctggagatcgccagaaatcctgccatgatgcaggagatgatgaggaaccaggacctggccctgagcaacctggagagcatccctgggggctacaatgccctgcggaggatgtacacagacatccaggagcccatgctgaatgctgcccaggagcagtttggaggcaacccctttgcctctgtgggcagcagcagcagcagtggagagggcacccagcccagcaggacagaaaatagagaccccctgcccaacccctgggcccctcctccagccacccagagcagcgccaccaccagcaccaccaccagcacaggcagcggcagcggcaacagcagcagcaatgccaccggcaacacagtggccgccgccaactacgtggccagcatcttcagcaccccaggcatgcagagcctgctgcagcagatcacagagaacccccagctgatccagaacatgctgagcgccccctacatgaggtccatgatgcagagcctgagccagaacccagacctggccgcccagatgatgctgaacagccccctcttcaccgccaacccccagctgcaggagcagatgaggccccagctgcctgccttcctgcagcagatgcagaacccagacaccctgagcgccatgagcaaccccaccagcagcagcttcagcaagtggtgccggccctggctggagcagatgctgcacagctgccgcatccagaagagtgacttcagcaacaactggaacagcagcacccagtggggcagctag

SEQ ID NO: 176607 - DNA, 1875 bp, Artificial Sequence
  derived and/or modified sequence
atggccgagaacggcgagagcagcggccccccccggcccagccggggcccagccgccgcccagggtagcgcggccgctcccgccgagcctaagataatcaaggtaaccgtaaaaacgcccaaagagaaggaagagttcgcggtgccagaaaatagctcggtccaacagttcaaggaggccatctcaaaacgtttcaagtcacaaactgatcagcttgtgctgatattcgctggcaagatattaaaggaccaagataccctgatccagcacggcattcacgatgggttaaccgtccatctggtgataaagtctcagaaccggccccaaggccagtcaacacagcccagcaatgcggccgggactaatacaacgagtgcctctaccccaagatccaactccactcctatcagcaccaattccaacccttttggcctcggctccctggggggtttggcgggactgtcaagcttgggactaagctcgaccaacttttcggagcttcagtctcagatgcagcagcaactcatggcatccccagaaatgatgatccaaatcatggaaaaccctttcgtgcaatcaatgctctccaacccagatctgatgcgccagcttatcatggccaacccacaaatgcagcagctgattcaaaggaatcctgagatttctcatctcctgaacaatccagacatcatgaggcagactttggagatcgccaggaacccagcaatgatgcaggaaatgatgcgcaaccaggatcttgcactgtccaacttggaaagcatcccgggcggttacaacgccctgcgtaggatgtataccgacatccaggagccaatgctcaacgccgcccaggaacagtttgggggcaaccctttcgcatctgtgggcagtagctcctcatcaggagaaggcactcagccctctcggaccgagaacagggacccactcccaaacccatgggctccaccgccagccacacaatctagcgccacgacttcaacaactacttctactgggagcggatctggtaactcttcaagcaacgccacgggaaataccgttgccgctgccaactacgttgcatctattttttctaccccggggatgcagtctctgctgcagcagattaccgagaatccacagctcatccaaaacatgctttccgcaccttacatgaggagcatgatgcagagtctaagccagaatcctgatctagcggctcaaatgatgcttaacagcccactgttcacggctaacccacaactccaggagcagatgaggccacagcttcctgcgtttctacagcagatgcagaacccggacacattgtccgccatgagcaacccccgagctatgcaggccctgatgcagatccagcagggactgcagacgttggccaccgaagccccggggctgattccatctttcaccccaggcgttggtgttggagtgttgggaacagcgataggccccgtgggccctgtcactcccatagggccgatcggcccaattgttcctttcaccccaattggaccaattgggccaatcgggccaacgggccctgctgctccaccaggctcaacaggcagcgggggtcctacgggccctacagtgtctagcgccgctcccagcgagacaacctctcccacctctgagtcaggacctaaccagcagttcatccagcagatggtgcaagcgctggccggcgcgaacgccccccagcttccaaaccctgaagtgagatttcaacagcagttagaacagttgaatgccatgggtttcctcaatagggaggctaacctacaggcactcattgccacggggggggacatcaatgctgccatcgagcggttgctgggcagtcagccttcgtag

SEQ ID NO: 176608 - DNA, 1467 bp, Artificial Sequence
  derived and/or modified sequence
atggccgagaacggcgagagcagcggccccccccggcccagccggggacccgccgccgctcaaggttcggctgctgcccctgccgaacccaagataataaaagtcaccgtgaaaacaccaaaggaaaaggaggaatttgccgtcccagagaacagctccgtgcagcagttcaaggaagcaatttctaagcggttcaaaagccagacagatcagctcgtcttgatttttgcaggcaaaatattgaaagatcaggacacactcattcagcacggcattcatgacggcctcactgtacatctcgtcattaaatcccagaacaggccccagggacaatcaactcagcctagtaacgcagcggggacaaacactaccagtgcgagcactccaagaagcaattcaacacctatatcaactaacagcaaccctttcgggcttggcagtttagggggtcttgccggcttgtccagtctgggtctgtctagtactaacttcagcgaactgcagtcacagatgcagcaacagctgatggcctcccccgaaatgatgatccagatcatggagaacccttttgtgcaaagcatgctctctaaccctgacctcatgcgccagttgattatggctaacccccagatgcaacaactgatccagaggaatcctgagatcagccatcttcttaacaatcctgacatcatgcgtcagactctcgagattgctcgaaaccccgcaatgatgcaggagatgatgcgaaaccaggaccttgccctcagcaacctcgagtcgattcccggcgggtacaatgccctcagacgaatgtataccgacattcaggagcccatgcttaacgccgctcaggagcagtttggcggaaatccttttgcttccgtggggtcctcatcttccagcggggagggtacgcagccgtctcgaacagaaaaccgtgaccccctgccgaacccttgggctcccccacctgcgacgcaatcttcggccaccacgagcaccactaccagcacaggatccggctctggcaatagtagctccaatgctactggcaacaccgtagcggctgccaattatgtcgcaagcatcttcagcacccctggcatgcagtctctgctccagcagatcacagaaaatccacaattgattcagaatatgctgagcgcaccatatatgaggagcatgatgcagagcttgtcccaaaatccagacttggccgctcagatgatgctcaattctcccctatttacagcgaatccgcagttgcaggagcagatgcgccctcagctgccggcatttcttcaacagatgcagaacccggatacattaagtgcgatgtccaatccaacttcaagttctttttcaaagtggtgtcgcccttggcttgagcagatgcttcattcctgccggattcagaagtccgacttttctaacaactggaatagctccactcagtggggtagctag

SEQ ID NO: 176609 - DNA, 1875 bp, Artificial Sequence
  derived and/or modified sequence
atggcggagaacggggagagtagcggccctccacggcctagtcggggtcccgcagcagcccaaggcagtgccgctgcaccggcagaacccaaaattattaaagtgaccgtcaaaactcctaaagaaaaggaagagttcgcagtgccagagaattctagcgtccagcagtttaaagaggcaatcagtaaacggttcaagtcccagactgaccaacttgtattaatttttgctgggaaaatactgaaagaccaagatacgctgatccaacatgggatacatgacggactgaccgtgcacctggtgatcaaatcacaaaaccgaccccagggtcaatccacccagccctcgaacgccgctggaaccaacacaacctctgcatctacaccaagatccaactcgaccccaatctctaccaattccaatcccttcggactcggcagtctcggaggcctggctgggctgtcttccctgggcctttcctccacgaatttctcagaactacagtcccaaatgcagcagcagctgatggcctcccctgaaatgatgattcaaatcatggaaaaccccttcgtgcagtccatgttgagtaatcctgacctgatgcgccagctgattatggctaatccgcagatgcagcagcttattcagcgcaatccagagattagccatctgctgaacaaccccgacattatgcgccaaaccctagagatcgctcggaatccagccatgatgcaggagatgatgcgaaaccaagacctggctttatcaaacctcgaaagcattcccggaggctataacgccctgcgcagaatgtacaccgatatccaagagcccatgctcaatgctgcccaggagcagtttggcggaaatcccttcgcctcagtcggaagtagctcatccagtggtgagggcacacagcctagccgtactgagaatcgcgatcctcttcccaatccctgggctcctccccctgcgactcaaagcagcgccacaacgtctaccaccaccagtactggctccggctcagggaattcgtcctccaatgcaactggcaacactgtagccgcagcaaattatgtggcgagcatctttagtactcctggtatgcaatctctcctacagcaaatcacagaaaatccccagctcatccaaaacatgctgagcgccccatatatgcgctccatgatgcagagtctgagccagaacccagatctggccgctcagatgatgttgaactctcctttgtttaccgccaacccacagcttcaggagcagatgcggccacagctacctgcatttttgcaacaaatgcagaacccagatacccttagtgcaatgtccaaccccagggcgatgcaggctctgatgcaaatccagcaaggattgcaaacattggccaccgaagcaccaggcctgataccgtcctttactcccggtgtgggagtgggagtgctgggcacagcaatcgggcctgtaggtccagttactcctataggacccattgggccaatcgttcctttcacccccattgggcctatcgggcctatcggcccaactggtcctgcagcccctcctggctctactgggtccggaggccctaccggccctacggtgagcagtgccgcaccttctgagacaaccagccccacatctgaatccggccctaatcagcagttcatccagcagatggtccaggcattggccggtgcaaatgcaccgcagttacccaatcccgaggtgcgcttccagcaacagctggagcagctgaatgccatgggcttcttgaaccgcgaggctaacctccaggcactgatcgccacaggcggagacatcaatgctgcaattgaaaggctgctcgggagtcaaccttcgtag

SEQ ID NO: 176610 - DNA, 1467 bp, Artificial Sequence
  derived and/or modified sequence
atggccgagaacggtgagtcttccggcccacctcgcccttcacggggtcccgcagctgcccagggatcagctgcggctccagctgagccaaaaattattaaggttactgtgaaaacccccaaggagaaagaagaattcgcagtgcccgaaaatagttcggtgcagcagtttaaggaggccatcagcaaacgcttcaagtcacagactgaccagctggtgctgatttttgctggaaaaattctcaaagatcaggacacactgatccagcacggtattcacgacggcctcacagtccacctcgtgattaagagccaaaataggccccagggccagtctacgcaaccaagtaatgcagccggaaccaacaccacctccgcatctacccctaggtccaacagtacccctatctcaactaatagtaacccgttcggactgggaagtctgggtggtctggcgggtctgagctccctcggactctcttcaacgaacttcagcgaactccagtcccaaatgcagcagcagctcatggcgtcgccagagatgatgattcaaatcatggagaacccatttgttcagtcaatgctttctaacccagacctgatgaggcaactcataatggctaacccacaaatgcagcagctgattcagcggaacccagagatttctcatttattgaacaaccctgatattatgaggcagacccttgaaattgccagaaacccagcgatgatgcaagaaatgatgcgcaatcaggaccttgcactttctaatctggagtccattcccggagggtataatgctctgagacggatgtataccgacatccaagaaccaatgttgaacgcagcacaggagcagtttggcggaaatccgttcgcctccgtggggtcgtcatccagcagtggtgaaggaacacaacccagtaggaccgagaaccgtgacccattgcccaatccttgggctccaccccctgctacacagagttctgctaccacctccacaactacctcaacagggtctggaagcggtaatagttcttctaacgccactggcaataccgtggcggcagccaattatgtggcttctatcttcagtactcctggcatgcagagtcttttacagcagatcacagagaacccacaacttatacaaaacatgttatccgctccgtatatgcggagcatgatgcagagcctctcacaaaatcccgaccttgcagcacagatgatgttgaacagtcctttgtttacagccaatccacagctccaggagcagatgagaccacaactcccagcattcttgcaacagatgcagaatcctgataccctttccgccatgtccaaccctaccagttcatctttctctaaatggtgtaggccttggctggaacaaatgctccactcttgtcggatccagaaaagtgacttttcaaacaattggaacagtagcactcagtggggcagttag

SEQ ID NO: 176611 - DNA, 3418 bp, Artificial Sequence
  derived and/or modified sequence
tgccagagttgctgggagtgcgcgcggtcggatcacaaggcggcggcggaggaggcccagagaccggagcgcggagacctcagccagcggcctacgcccaggcctttctccaccggaggaccagggaaccgcagtcttcatcacagaggtaccgtgctccgcgctccccgcctgacccggcccagcccgctgcggcggtgcctccttccttcctccttccctcgcgctctctctttcgcccgcccgcgccttccctgcccgcctgcgtcaccgcggccgccatggctgagaatggcgagagcagcggccccccgcgcccctcccgcggccctgctgcggcccaaggctcggctgctgccccggctgagcctaaaatcatcaaagtcacggtgaagactcccaaagagaaagaggagttcgcggtgcccgagaacagctcggttcagcagtttaaggaagcgatttcgaaacgcttcaaatcccaaaccgatcagctagtgctgatttttgccggaaaaatcttaaaagatcaagataccttgatccagcatggcatccatgatgggctgactgttcaccttgtcatcaaaagccagaaccgacctcagggccagtccacgcagcctagcaatgccgcgggaactaacactacctcggcgtcgactcccaggagtaactccacacctatttccacaaatagcaacccgtttgggttggggagcctgggaggacttgcaggccttagcagcctgggcttgagctcgaccaacttctctgagctccagagccagatgcagcagcagcttatggccagccctgagatgatgatccaaataatggaaaatccctttgttcagagcatgctttcgaatcccgatctgatgaggcagctcattatggctaatccacagatgcagcaattgattcagagaaacccagaaatcagtcacctgctcaacaacccagacataatgaggcagacactcgaaattgccaggaatccagccatgatgcaagagatgatgagaaatcaagacctggctcttagcaatctagaaagcatcccaggtggctataatgctttacggcgcatgtacactgacattcaagagccgatgctgaatgccgcacaagagcagtttgggggtaatccatttgcctccgtggggagtagttcctcctctggggaaggtacgcagccttcccgcacagaaaatcgcgatccactacccaatccatgggcaccaccgccagctacccagagttctgcaactaccagcacgaccacaagcactggtagtgggtctggcaatagttccagcaatgctactgggaacaccgttgctgccgctaattatgtcgccagcatctttagtaccccaggcatgcagagcctgctgcaacagataactgaaaacccccagctgattcagaatatgctgtcggcgccctacatgagaagcatgatgcagtcgctgagccagaatccagatttggctgcacagatgatgctgaatagcccgctgtttactgcaaatcctcagctgcaggagcagatgcggccacagctcccagccttcctgcagcagatgcagaatccagacacactatcagccatgtcaaacccaagagcaatgcaggctttaatgcagatccagcaggggctacagacattagccactgaagcacctggcctgattccgagcttcactccaggtgtgggggtgggggtgctgggaaccgctataggccctgtaggcccagtcacccccataggccccataggccctatagtcccttttacccccataggccccattgggcccataggacccactggccctgcagccccccctggctccaccggctctggtggccccacggggcctactgtgtccagcgctgcacctagtgaaaccacgagtcctacatcagaatctggacccaaccagcagttcattcagcaaatggtgcaggccctggctggagcaaatgctccacagctgccgaatccagaagtcagatttcagcaacaactggaacagctcaacgcaatggggttcttaaaccgtgaagcaaacttgcaggccctaatagcaacaggaggcgacatcaatgcagccattgaaaggctgctgggctcccagccatcgtaatcacatttctgtacctggaaaaaaaatgtatcttatttttgataatggctcttaaatctttaaacacacacacaaaatcgttctttactttcattttgattcttttaaatctgtctagttgtaagtctaatatgatgcattttaagatggagtccctccctcctacttccctcactccctttctcctttgcttatttttcctaccttcccttcctcttgtctccccactccctccctctttgtttccttccttccttatttcctttagtttccttccttagccgttttgagtggtgggaatcaatgctgtttcactcaaaagtgttgcatgcaaacacttctctttattctgcatttattgtgatttttggaaacaggtatcaaccttcacagttgggtgaacaagtgttgtcctacagatgtccaatttatttgcatttttaaacattagcctatgatagtaatttaatgtagaatgaagatattaaaaacagaagcaaattatttgaagctctctaatttgtggtacgatattgcttattgtgactttggcatgtatttttgctagcaaaatgctgtaagatttataccattgatcttttttgctatatttgtatacagtacagtaagcacaattggcactgtacatctaaaaatattacagtagaatctgagtgtaatatgtgtaaccaaaatgagaaagaatacaagaaatgtttctggagctagttatgtctcacaattttgtagaatcttacagcatctttgataaacttctcagtgaaaatgttggctaggcaagttcagttaaaatatagtagaaatgtttatcctggtatctctaagtatacatttaattgtacagaaaatttacagtgtaacattgtgtcaacatttgcagattgactgtatatgaccttaatctttgtgcagcctgaaggatcagtgtagtaatgccaggaaagtgctttttacctaagacttccttctcagcttctcccataaagagaccctaatatgcattttgatttgtaattggaaatgtaactttcactgaaagtgtcatgtgatgtttgcattacttttaactgctatgtataaaggaaagtgtgtcttttgacttcatcagttatttctcttgtgcacagagaaaaatgcattaaaaatgactaaaaaaaataaaaaattaaaaaatggataaatcttttctttttgccttttggccctaggatcgtgtttaggaggattatcccaccccgaga

SEQ ID NO: 176612 - DNA, 2167 bp, Artificial Sequence
  derived and/or modified sequence
acaaggcggcggcggaggaggcccagagaccggagcgcggagacctcagccagcggcctacgcccaggcctttctccaccggaggaccagggaaccgcagtcttcatcacagaggtaccgtgctccgcgctccccgcctgacccggcccagcccgctgcggcggtgcctccttccttcctccttccctcgcgctctctctttcgcccgcccgcgccttccctgcccgcctgcgtcaccgcggccgccatggctgagaatggcgagagcagcggccccccgcgcccctcccgcggccctgctgcggcccaaggctcggctgctgccccggctgagcctaaaatcatcaaagtcacggtgaagactcccaaagagaaagaggagttcgcggtgcccgagaacagctcggttcagcagtttaaggaagcgatttcgaaacgcttcaaatcccaaaccgatcagctagtgctgatttttgccggaaaaatcttaaaagatcaagataccttgatccagcatggcatccatgatgggctgactgttcaccttgtcatcaaaagccagaaccgacctcagggccagtccacgcagcctagcaatgccgcgggaactaacactacctcggcgtcgactcccaggagtaactccacacctatttccacaaatagcaacccgtttgggttggggagcctgggaggacttgcaggccttagcagcctgggcttgagctcgaccaacttctctgagctccagagccagatgcagcagcagcttatggccagccctgagatgatgatccaaataatggaaaatccctttgttcagagcatgctttcgaatcccgatctgatgaggcagctcattatggctaatccacagatgcagcaattgattcagagaaacccagaaatcagtcacctgctcaacaacccagacataatgaggcagacactcgaaattgccaggaatccagccatgatgcaagagatgatgagaaatcaagacctggctcttagcaatctagaaagcatcccaggtggctataatgctttacggcgcatgtacactgacattcaagagccgatgctgaatgccgcacaagagcagtttgggggtaatccatttgcctccgtggggagtagttcctcctctggggaaggtacgcagccttcccgcacagaaaatcgcgatccactacccaatccatgggcaccaccgccagctacccagagttctgcaactaccagcacgaccacaagcactggtagtgggtctggcaatagttccagcaatgctactgggaacaccgttgctgccgctaattatgtcgccagcatctttagtaccccaggcatgcagagcctgctgcaacagataactgaaaacccccagctgattcagaatatgctgtcggcgccctacatgagaagcatgatgcagtcgctgagccagaatccagatttggctgcacagatgatgctgaatagcccgctgtttactgcaaatcctcagctgcaggagcagatgcggccacagctcccagccttcctgcagcagatgcagaatccagacacactatcagccatgtcaaacccaaccagcagttcattcagcaaatggtgcaggccctggctggagcaaatgctccacagctgccgaatccagaagtcagatttcagcaacaactggaacagctcaacgcaatggggttcttaaaccgtgaagcaaacttgcaggccctaatagcaacaggaggcgacatcaatgcagccattgaaaggctgctgggctcccagccatcgtaatcacatttctgtacctggaaaaaaaatgtatcttatttttgataatggctcttaaatctttaaacacacacacaaaatcgttctttactttcattttgattcttttaaatctgtctagttgtaagtctaatatgatgcattttaagatggagtccctccctcctacttccctcactccctttctcctttgcttatttttcctaccttcccttcctcttgtctccccactccctccctctttgtttccttccttccttatttcctttagtttccttccttagccgttttgagtggtgggaatcaatgctgtttcactcaaaagtgttgcatgcaaacacttctctttattctgcatttattgtga

SEQ ID NO: 176613 - protein, 224 aa, Artificial Sequence
  derived and/or modified sequence
MASSTPSSSATSSNAGADPNTTNLRPTTYDTWCGVAHGCTRKLGLKICGFLQRTNSLEEKSRLVSAFKERQSSKNLLSCENSDRDARFRRTETDFSNLFARDLLPAKNGEEQTVQFLLEVVDILLNYVRKTFDRSTKVLDFHHPHQLLEGMEGFNLELSDHPESLEQILVDCRDTLKYGVRTGHPRFFNQLSTGLDIIGLAGEWLTSTANTNMPSDMRECWLLR

SEQ ID NO: 176614 - DNA, 675 bp, Artificial Sequence
  derived and/or modified sequence
atggcatccagcacacccagcagtagcgccaccagcagcaacgcgggcgcagaccctaataccaccaatctgaggcccactacctacgacacatggtgcggcgtcgcccatgggtgcacccgtaagctggggttgaaaatctgcggcttccttcaacgaacaaatagcttggaagagaagtctcgtctggtctccgcctttaaggagcgacagtctagcaaaaacctactgtcctgcgagaattctgatcgcgatgcacgcttcaggagaactgagacagatttttctaatttgttcgcccgcgatctcctgcccgctaaaaatggcgaggaacaaactgtgcagttcctgctggaggttgtggacattttgctcaactatgtcaggaagacgttcgatagatcaacaaaggtgctggattttcaccatccacaccagctcctggaggggatggaaggatttaacttggaactgtccgatcatccggaatctcttgagcagatccttgtggactgccgggacactctcaaatacggggtgcgaaccggtcatccacggtttttcaaccagttatccaccgggcttgacattataggattggcaggggagtggctgactagcacagcgaatacgaacatgccatcagacatgagggaatgctggctgctgagatag

SEQ ID NO: 176615 - DNA, 675 bp, Artificial Sequence
  derived and/or modified sequence
atggcgtcttctaccccaagctcctctgcaactagctctaacgcaggggcagaccccaataccactaatctgcgcccgactacttatgatacatggtgcggtgtggcccacggatgtacccgtaagttgggtttgaagatctgtggcttcctgcagcggacaaactcactggaggagaaaagtagacttgtgagcgcgttcaaagaacggcagtctagtaagaatcttctatcctgcgagaactcagatcgcgacgcccggtttcgccgcaccgagacagacttctcaaatttgttcgccagggatctgctccccgcgaagaacggtgaggagcagaccgtgcagttcttgctggaagtggttgacattctgttgaactacgtaagaaagaccttcgatcggagcaccaaggttctagattttcatcacccacatcagctcctggaggggatggaaggctttaaccttgaactttccgatcaccccgagtcactggagcagattctagtcgattgccgcgatacactaaaatacggcgtgcggaccggacaccctcgattcttcaaccagctgtctaccggtctggacattattggcctcgcgggagaatggctgacatctaccgccaatactaatatgccttcagacatgagggagtgttggctgctaaggtag

SEQ ID NO: 176616 - DNA, 114 bp, Artificial Sequence
  derived and/or modified sequence
atggccagctccaccccgagctcatctgcgacatcctccaatgctggggccgacccaaacacaacaaacctaagacccaccacatatgatacttggtgtggtgtggcgcactag

SEQ ID NO: 176617 - DNA, 258 bp, Artificial Sequence
  derived and/or modified sequence
atggcgtcctcaacgccctccagttcagcaacctcaagcaatgccggcgccgaccccaatacaactaaccttagacccacaacctatgacacatggtgtggcgtcgcgcacgggtgcacacggaaacttggtctcaagatttgtggatttctccagcggactaattcactcgaggaaaagtcccgactggtctccgcttttaaggagcggcagtccagtaagaatctgttgtcatgcgaaaattcggaccgcgactag

SEQ ID NO: 176618 - DNA, 348 bp, Artificial Sequence
  derived and/or modified sequence
atggccagcagtactccttcgagttcagcaacctcatcaaacgccggcgctgaccccaacactacgaatctcaggcccaccacctatgacacatggtgcggtgtcgcccatgggtgcactcgtaagctgggtctgaagatatgcgggttcctccaaaggactaatagtctcgaggagaagtctcgcctggtctctgcttttaaagagcggcagtcctcaaagaatctcctaagttgcgaaaattctgaccgtgacgccaggtttaggaggaccgagaccgacttttctaacctgttcgcccgtgacctcttaccagccaaaaacggtgaagagcagacggtgcagtag

SEQ ID NO: 176619 - DNA, 366 bp, Artificial Sequence
  derived and/or modified sequence
atggcgagcagtacaccgtcctcttcggccacaagtagtaacgcaggggcagatccaaacacaacaaatttgaggccaacaacctatgatacctggtgcggcgtggcacatggctgtaccagaaagctgggtctgaagatttgcggcttcttgcagagaacgaactcactagaagagaagtctcgccttgtgtcagccttcaaggaacgccagtctagcaagaatttgttaagttgtgaaaacagtgacagggatgcgaggttccgacggaccgagactgactttagcaacctgttcgcccgggatttgctgccagcgaaaaacggcgaggaacaaacagtccagtttctgctcgaggtagtgtag

SEQ ID NO: 176620 - DNA, 1029 bp, Artificial Sequence
  derived and/or modified sequence
gagggaactagcgagaacgaggaagcagctggaggtgacgccgggcagattacgcctgtcagggccgagccgagcggatcgctgggcgctgtgcagaggaaaggcgggagtgcccggctcgctgtcgcagagccgagcctgtttctgcgccggaccagtcgaggactctggacagtagaggccccgggacgaccgagctgatggcgtcttcgaccccatcttcgtccgcaacctcctcgaacgcgggagcggaccccaataccactaacctgcgccccacaacgtacgatacctggtgcggcgtggcccatggatgcaccagaaaactggggctcaagatctgcggcttcttgcaaaggaccaacagcctggaagagaagagtcgccttgtgagtgccttcaaggagaggcaatcctccaagaacctgctttcctgtgaaaacagcgaccgggatgcccgcttccggcgcacagagactgacttctctaatctgtttgctagagatctgcttccggctaagaacggtgaggagcaaaccgtgcaattcctcctggaagtggtggacatactcctcaactatgtccgcaagacatttgatcgctccaccaaggtgctggactttcatcacccacaccagttgctggaaggcatggagggcttcaacttggagctctctgaccaccccgagtccctggagcagatcctggttgactgcagagacaccttgaagtatggggttcgcacaggtcatcctcgatttttcaaccagctctccactggattggatattattggcctagctggagaatggctgacatcaacggccaataccaacatgccatcagacatgagggagtgttggttgctacggtgatggggctcagagcagaaccaaagcatgattgtgacctccagaggtgatggtaactgcacacatggtttccaagggtcttcctcctaaatttccaggggcctcccaaggaaaatggacatattctttttggaaataaaatacttctaccaacata

SEQ ID NO: 176621 - DNA, 1252 bp, Artificial Sequence
  derived and/or modified sequence
gcaaaaccgtgagctggatttataatcgccctataaagctccagaggcggtcaggcacctgcagaggagccccgccgctccgccgactagctgcccccgcgagcaacggcctcgtgatttccccgccgatccggtccccgcctccccactctgcccccgcctaccccggagccgtgcagccgcctctccgaatctctctcttctcctggcgctcgcgtgcgagagggaactagcgagaacgaggaagcagctggaggtgacgccgggcagattacgcctgtcagggccgagccgagcggatcgctgggcgctgtgcagaggaaaggcgggagtgcccggctcgctgtcgcagagccgaggtggcctgtttctgcgccggaccagtcgaggactctggacagtagaggccccgggacgaccgagctgatggcgtcttcgaccccatcttcgtccgcaacctcctcgaacgcgggagcggaccccaataccactaacctgcgccccacaacgtacgatacctggtgcggcgtggcccatggatgcaccagaaaactggggctcaagatctgcggcttcttgcaaaggaccaacagcctggaagagaagagtcgccttgtgagtgccttcaaggagaggcaatcctccaagaacctgctttcctgtgaaaacagcgaccgggatgcccgcttccggcgcacagagactgacttctctaatctgtttgctagagatctgcttccggctaagaacggtgaggagcaaaccgtgcaattcctcctggaagtggtggacatactcctcaactatgtccgcaagacatttgatcgctccaccaaggtgctggactttcatcacccacaccagttgctggaaggcatggagggcttcaacttggagctctctgaccaccccgagtccctggagcagatcctggttgactgcagagacaccttgaagtatggggttcgcacaggtcatcctcgatttttcaaccagctctccactggattggatattattggcctagctggagaatggctgacatcaacggccaataccaacatgccatcagacatgagggagtgttggttgctacggtgatggggctcagagcagaaccaaagcatgattgtgacctccagaggtgatggtaactgcacacatggtttccaagggtcttcctcctaaatttccaggggcctcccaaggaaaatggacatattctttttggaaataaaatacttctaccaac

SEQ ID NO: 176622 - DNA, 639 bp, Artificial Sequence
  derived and/or modified sequence
gtgcgtgtcatcaaccttcaaacgtgattaatcaggaggccttcttttcccatcaccaagggggccaaagcgaggagcgagcgcatagcaaaagggacgcggggtccttttctctgccggtggcactgggtagctgtggccagctccagaggcggtcaggcacctgcagaggagccccgccgctccgccgactagctgcccccgcgagcaacggcctcgtgatttccccgccgatccggtccccgcctccccactctgcccccgcctaccccggagccgtgcagccgcctctccgaatctctctcttctcctggcgctcgcgtgcgagagggaactagcgagaacgaggaagcagctggaggtgacgccgggcagattacgcctgtcagggccgagccgagcggatcgctgggcgctgtgcagaggaaaggcgggagtgcccggctcgctgtcgcagagccgagcctgtttctgcgccggaccagtcgaggactctggacagtagaggccccgggacgaccgagctgatggcgtcttcgaccccatcttcgtccgcaacctcctcgaacgcgggagcggaccccaataccactaacctgcgccccacaacgtacgatacctggtgcggcgtggcccatg

SEQ ID NO: 176623 - DNA, 529 bp, Artificial Sequence
  derived and/or modified sequence
attttcctgcctcccagctgtgagtgttgtgtggtctgttgggatgggggtgtggatttagctatgatccttcaaaaaagtccagaataattcagggaactatctttaaagtacaaaaacagcaaatggaccttagctccgacttaagcagaatgaaaggttaagtaacgcttcccccagttctcgtctcgggagacagacgtttaaccgcctgtttctgcgccggaccagtcgaggactctggacagtagaggccccgggacgaccgagctgatggcgtcttcgaccccatcttcgtccgcaacctcctcgaacgcgggagcggaccccaataccactaacctgcgccccacaacgtacgatacctggtgcggcgtggcccatggatgcaccagaaaactggggctcaagatctgcggcttcttgcaaaggaccaacagcctggaagagaagagtcgccttgtgagtgccttcaaggagaggcaatcctccaagaacctgctttcctgtgaaaacagcgaccgggatg

SEQ ID NO: 176624 - DNA, 571 bp, Artificial Sequence
  derived and/or modified sequence
ttcttatccctgccctccggattcacgccccggggaagcacggaggctgaggctctagttgaagtggggcaagagcgattttcccttgagcttccatgctgcgagcgcctgtccctccaaagggcgcctgggcagcagcagccgaaggcgctactaggaacgcctgtttctgcgccggaccagtcgaggactctggacagtagaggccccgggacgaccgagctgatggcgtcttcgaccccatcttcgtccgcaacctcctcgaacgcgggagcggaccccaataccactaacctgcgccccacaacgtacgatacctggtgcggcgtggcccatggatgcaccagaaaactggggctcaagatctgcggcttcttgcaaaggaccaacagcctggaagagaagagtcgccttgtgagtgccttcaaggagaggcaatcctccaagaacctgctttcctgtgaaaacagcgaccgggatgcccgcttccggcgcacagagactgacttctctaatctgtttgctagagatctgcttccggctaagaacggtgaggagcaaaccgtgcaat

SEQ ID NO: 176625 - DNA, 556 bp, Artificial Sequence
  derived and/or modified sequence
aggtagaggagaaacgctgaaaccggaccgaaacctcgccctaggcttagcgatggctaaaaaccggctgggataagagggaggcaagcaacattccgactcgctgctttctggctgtctggagtgcaagcctgtttctgcgccggaccagtcgaggactctggacagtagaggccccgggacgaccgagctgatggcgtcttcgaccccatcttcgtccgcaacctcctcgaacgcgggagcggaccccaataccactaacctgcgccccacaacgtacgatacctggtgcggcgtggcccatggatgcaccagaaaactggggctcaagatctgcggcttcttgcaaaggaccaacagcctggaagagaagagtcgccttgtgagtgccttcaaggagaggcaatcctccaagaacctgctttcctgtgaaaacagcgaccgggatgcccgcttccggcgcacagagactgacttctctaatctgtttgctagagatctgcttccggctaagaacggtgaggagcaaaccgtgcaattcctcctggaagtggtg

SEQ ID NO: 176626 - DNA, 675 bp, Artificial Sequence
  derived and/or modified sequence
atggccagcagcacccccagcagcagcgccaccagcagcaatgctggagctgaccccaacaccaccaacctgcggcccaccacctatgacacctggtgtggggtggcccacggctgcaccaggaagctgggcctgaagatctgtggcttcctgcagaggaccaacagcctggaggagaagagccggctggtgtctgccttcaaggagcggcagagcagcaagaacctgctgagctgtgagaacagcgacagagatgcccgcttcagaagaacagaaacagacttcagcaacctgtttgcccgggacctgctgcctgccaagaatggagaggagcagacagtgcagttcctgctggaggtggtggacatcctgctgaactacgtgaggaagacctttgacaggagcaccaaggtgctggacttccaccacccccaccagctgctggagggcatggagggcttcaacctggagctgagtgaccaccctgagagcctggagcagatcctggtggactgccgggacaccctgaagtatggagtgaggacaggccacccccgcttcttcaaccagctgagcacaggcctggacatcatcggcctggccggggagtggctgaccagcacagccaacaccaacatgcccagcgacatgagggagtgctggctgctgaggtag

SEQ ID NO: 176627 - DNA, 114 bp, Artificial Sequence
  derived and/or modified sequence
atggccagcagcacccccagcagcagcgccaccagcagcaatgctggagctgaccccaacaccaccaacctgcggcccaccacctatgacacctggtgtggggtggcccactag

SEQ ID NO: 176628 - DNA, 258 bp, Artificial Sequence
  derived and/or modified sequence
atggccagcagcacccccagcagcagcgccaccagcagcaatgctggagctgaccccaacaccaccaacctgcggcccaccacctatgacacctggtgtggggtggcccacggctgcaccaggaagctgggcctgaagatctgtggcttcctgcagaggaccaacagcctggaggagaagagccggctggtgtctgccttcaaggagcggcagagcagcaagaacctgctgagctgtgagaacagcgaccgggactag

SEQ ID NO: 176629 - DNA, 348 bp, Artificial Sequence
  derived and/or modified sequence
atggccagcagcacccccagcagcagcgccaccagcagcaatgctggagctgaccccaacaccaccaacctgcggcccaccacctatgacacctggtgtggggtggcccacggctgcaccaggaagctgggcctgaagatctgtggcttcctgcagaggaccaacagcctggaggagaagagccggctggtgtctgccttcaaggagcggcagagcagcaagaacctgctgagctgtgagaacagcgacagagatgcccgcttcagaagaacagaaacagacttcagcaacctgtttgcccgggacctgctgcctgccaagaatggagaggagcagacagtgcagtag

SEQ ID NO: 176630 - DNA, 366 bp, Artificial Sequence
  derived and/or modified sequence
atggccagcagcacccccagcagcagcgccaccagcagcaatgctggagctgaccccaacaccaccaacctgcggcccaccacctatgacacctggtgtggggtggcccacggctgcaccaggaagctgggcctgaagatctgtggcttcctgcagaggaccaacagcctggaggagaagagccggctggtgtctgccttcaaggagcggcagagcagcaagaacctgctgagctgtgagaacagcgacagagatgcccgcttcagaagaacagaaacagacttcagcaacctgtttgcccgggacctgctgcctgccaagaatggagaggagcagacagtgcagttcctgctggaggtggtgtag

SEQ ID NO: 176631 - DNA, 675 bp, Artificial Sequence
  derived and/or modified sequence
atggccagcagcacccccagcagcagcgccaccagcagcaacgccggggcagatccgaacacaacaaacctgcgccccaccacatatgatacctggtgtggcgtcgcgcatgggtgcacccgcaaacttggcctgaaaatatgtggctttctgcagcgcacaaatagcctggaggaaaagtcccggctggttagcgcctttaaagagcgtcagtccagtaagaatctcctctcttgcgaaaactcagacagagatgcccgcttcaggcgcaccgaaaccgacttctccaatctgtttgcacgggacctgctgccggccaagaacggggaagagcagaccgttcaatttctgctcgaggtggtggatatccttctgaactatgtgcgcaagacattcgacagatctaccaaagttctagactttcaccacccacatcagctactggaggggatggaggggtttaacctagagctgtcagaccatccggagtccctggagcagatcctcgtcgattgtcgggacacgcttaaatacggcgtgcgaaccggtcacccccgctttttcaaccagctttccaccggactggacattattggactcgccggggaatggctgacctctactgctaacactaacatgcctagtgacatgcgcgagtgttggttgcttcggtag

SEQ ID NO: 176632 - DNA, 675 bp, Artificial Sequence
  derived and/or modified sequence
atggccagcagcacccccagcagcagcgccaccagcagcaacgccggggctgatcccaacactactaatctgcgacccaccacctacgatacatggtgtggagtagcccatggctgcactcgaaagctgggcctcaaaatttgcggatttctgcagcggacgaattcactagaggagaagagccggctggtttctgctttcaaggagcgacaatcgagcaagaacttgctgtcttgcgaaaactccgatagagatgcacgctttagaaggacagaaactgacttttccaacctcttcgcacgggatctgctgcccgcaaagaacggcgaggaacaaactgtacaatttctgctggaagtcgtggatatcctactgaattatgtgaggaagaccttcgaccgatccaccaaagtgctggatttccaccatcctcaccagctgctggaggggatggagggctttaatctcgagctgtcagatcatccggaatccctcgaacaaattctcgttgattgtcgagacaccttgaagtatggggtccgtacgggacacccacggttcttcaatcagctaagcaccggccttgacattattggcttggcaggagagtggctgacgagtactgctaatacgaacatgccaagcgacatgcgtgagtgttggttgttacgatag

SEQ ID NO: 176633 - DNA, 114 bp, Artificial Sequence
  derived and/or modified sequence
atggccagcagcacccccagcagcagcgccaccagcagcaacgccggggccgaccctaataccaccaacctgcgccctacaacgtacgatacgtggtgtggcgtggcccactag

SEQ ID NO: 176634 - DNA, 258 bp, Artificial Sequence
  derived and/or modified sequence
atggccagcagcacccccagcagcagcgccaccagcagcaacgccggcgcggatccaaacacaacaaacctccggcctacaacgtacgacacctggtgtggcgttgcgcacggatgtacccggaagctgggcctgaaaatatgcgggttcctgcagcgcaccaactcattggaggagaaaagccggcttgtgtctgcttttaaagagaggcagtccagcaagaatctcctgtcatgcgaaaactcagaccgtgattag

SEQ ID NO: 176635 - DNA, 348 bp, Artificial Sequence
  derived and/or modified sequence
atggccagcagcacccccagcagcagcgccaccagcagcaacgccggcgccgacccgaataccactaatctgcgtcctaccacgtacgatacttggtgtggtgttgcacatggttgcacacgaaaacttggtctgaaaatctgtggatttttacagcggaccaacagcctagaggagaagtctagactggtgagcgcctttaaagaacggcagtctagtaaaaacctgctgagctgtgagaactctgacagggatgcccgctttaggagaacggagaccgactttagcaacctctttgctagagatctacttccagccaaaaatggcgaggagcaaacagtccagtag

SEQ ID NO: 176636 - DNA, 366 bp, Artificial Sequence
  derived and/or modified sequence
atggccagcagcacccccagcagcagcgccaccagcagcaacgccggcgccgaccctaatactacgaatctgcgtccgaccacttatgatacatggtgcggggtggcgcacggatgtacacgtaagctgggcctcaaaatatgcggattccttcaacgaaccaacagcttggaggaaaaatctcgattggtaagcgcctttaaagagcggcagagtagtaaaaacttactgtcctgcgaaaactccgacagggacgcccggttcaggcgcacggagaccgacttctcaaatttgtttgcgcgcgatcttttacctgccaagaatggggaagagcagactgtccaattcctgttggaagtggtctag

SEQ ID NO: 176637 - DNA, 675 bp, Artificial Sequence
  derived and/or modified sequence
atggcatccagtactccatcgtcatctgctacttcttccaatgctggtgcggaccctaatacaacaaatttaaggccaacaacatacgacacttggtgtggagtggcacacggctgtacacgtaagctcggactgaagatttgtggtttcttgcagcgaacgaactccctggaggagaagagtcgcctggtctcagcctttaaagagcgtcaatcatcaaaaaatctgctgtcttgcgaaaactccgacagagatgcccgtttcagacggactgaaacagatttctctaatttattcgcgagggacctgcttcctgctaaaaatggagaggagcagacggtgcagtttctcctggaggtagtcgatatcctgctcaattatgtgcgcaaaacgtttgacaggagtacaaaagtccttgactttcatcatccccatcagctactggaaggaatggagggttttaaccttgaactgagtgaccatcctgagagcctggagcaaatcctcgtggactgccgtgacaccttgaaatatggagtacggacagggcacccccgattctttaaccagctctccaccggcctggacatcatcggcttagcaggcgaatggttgacgtccacagctaataccaacatgccttctgatatgcgcgagtgctggttgttgcggtag

SEQ ID NO: 176638 - DNA, 675 bp, Artificial Sequence
  derived and/or modified sequence
atggcatcgagcacgccctcctcttctgcaacttcttccaatgccggagctgaccctaatacaactaacctgagacctacaacgtatgatacgtggtgtggagtcgcccatgggtgtactcgtaagctgggcctgaagatttgcggcttcctccagaggaccaatagcctggaggagaagagtcgactggtttccgcctttaaggaaaggcagtcatcaaagaacctgctgagttgcgagaatagcgatagggatgccagattccgccgaactgagacggatttctcaaatctcttcgcgcgtgatctactcccagccaagaatggagaggagcagactgttcagtttttgctggaagtggtggatatccttttgaactacgtgaggaaaactttcgataggagcactaaggtgctcgatttccaccatccgcatcagctgttggagggtatggagggttttaacctagaacttagcgatcaccctgaaagcctggaacagattttggtggactgcagggatactctgaagtatggtgtaagaactggccatccacgctttttcaaccagctgtctaccgggctggacataattggccttgcaggggaatggttgacctccacggcgaataccaatatgccatctgatatgagagaatgttggctgctgcgctag

SEQ ID NO: 176639 - DNA, 114 bp, Artificial Sequence
  derived and/or modified sequence
atggcctcgtcaaccccgtcgagtagtgccacctcctcaaacgctggagcggaccccaatacgactaaccttagaccgacaacttacgacacttggtgcggtgtcgcccattag

SEQ ID NO: 176640 - DNA, 258 bp, Artificial Sequence
  derived and/or modified sequence
atggcaagctctacccctagctcatcagctacgtcgtccaacgctggggctgatcccaacacaacaaacctgaggcctactacctacgatacgtggtgcggcgtcgcacatggttgcacccggaagctcggccttaagatatgcggatttctgcagagaacaaactcgcttgaagagaagtcaagactcgtgtcagcatttaaggaacgacaaagctccaagaacttgctttcttgtgaaaacagcgacagagattag

SEQ ID NO: 176641 - DNA, 348 bp, Artificial Sequence
  derived and/or modified sequence
atggcctcaagcaccccatccagcagcgctactagctccaatgccggagcagacccgaacacgaccaaccttcggccaactacatacgatacctggtgtggcgtggcccacggttgcacaagaaagctgggccttaaaatctgcggcttcctgcagagaactaacagcctggaggagaaatctagactggtatctgcttttaaggagagacagagcagcaaaaacctcctctcttgcgaaaatagtgaccgcgacgcccgattcaggaggacagagacggatttttctaacctatttgccagagacctgcttccggcaaagaatggggaggagcaaactgtgcaatag

SEQ ID NO: 176642 - DNA, 366 bp, Artificial Sequence
  derived and/or modified sequence
atggcttcttccacgcccagtagctcagcgacaagtagtaatgccggagcagacccgaataccactaatttgcggcctaccacttatgacacgtggtgcggcgtggcacacggatgtacccgcaaactcgggctgaaaatttgtgggtttcttcagcgcacaaactccttggaggagaagtctaggctcgtttcggcgtttaaggaaaggcaaagtagcaagaacttgctgtcctgcgagaacagcgatcgagatgccaggtttcggaggactgaaactgattttagtaatctgtttgcccgtgatctgctgccagccaagaacggtgaagaacagaccgtgcagttcctgctggaagtggtctag

SEQ ID NO: 176643 - DNA, 675 bp, Artificial Sequence
  derived and/or modified sequence
atggccagcagcacccccagcagcagcgccaccagcagcaacgccggcgccgaccccaacaccaccaacctgagacccaccacctacgacacctggtgcggcgtggcccacggctgcaccagaaagctgggcctgaagatctgcggcttcctgcagagaaccaacagcctggaggagaagagcagactggtgagcgccttcaaggagagacagagcagcaagaacctgctgagctgcgagaacagcgacagagacgccagattcagaagaaccgagaccgacttcagcaacctgttcgccagagacctgctgcccgccaagaacggcgaggagcagaccgtgcagttcctgctggaggtggtggacatcctgctgaactacgtgagaaagaccttcgacagaagcaccaaggtgctggacttccaccacccccaccagctgctggagggcatggagggcttcaacctggagctgagcgaccaccccgagagcctggagcagatcctggtggactgcagagacaccctgaagtacggcgtgagaaccggccaccccagattcttcaaccagctgagcaccggcctggacatcatcggcctggccggcgagtggctgaccagcaccgccaacaccaacatgcccagcgacatgagagagtgctggctgctgagatag

SEQ ID NO: 176644 - DNA, 114 bp, Artificial Sequence
  derived and/or modified sequence
atggccagcagcacccccagcagcagcgccaccagcagcaacgccggcgccgaccccaacaccaccaacctgagacccaccacctacgacacctggtgcggcgtggcccactag

SEQ ID NO: 176645 - DNA, 258 bp, Artificial Sequence
  derived and/or modified sequence
atggccagcagcacccccagcagcagcgccaccagcagcaacgccggcgccgaccccaacaccaccaacctgagacccaccacctacgacacctggtgcggcgtggcccacggctgcaccagaaagctgggcctgaagatctgcggcttcctgcagagaaccaacagcctggaggagaagagcagactggtgagcgccttcaaggagagacagagcagcaagaacctgctgagctgcgagaacagcgacagagactag

SEQ ID NO: 176646 - DNA, 348 bp, Artificial Sequence
  derived and/or modified sequence
atggccagcagcacccccagcagcagcgccaccagcagcaacgccggcgccgaccccaacaccaccaacctgagacccaccacctacgacacctggtgcggcgtggcccacggctgcaccagaaagctgggcctgaagatctgcggcttcctgcagagaaccaacagcctggaggagaagagcagactggtgagcgccttcaaggagagacagagcagcaagaacctgctgagctgcgagaacagcgacagagacgccagattcagaagaaccgagaccgacttcagcaacctgttcgccagagacctgctgcccgccaagaacggcgaggagcagaccgtgcagtag

SEQ ID NO: 176647 - DNA, 366 bp, Artificial Sequence
  derived and/or modified sequence
atggccagcagcacccccagcagcagcgccaccagcagcaacgccggcgccgaccccaacaccaccaacctgagacccaccacctacgacacctggtgcggcgtggcccacggctgcaccagaaagctgggcctgaagatctgcggcttcctgcagagaaccaacagcctggaggagaagagcagactggtgagcgccttcaaggagagacagagcagcaagaacctgctgagctgcgagaacagcgacagagacgccagattcagaagaaccgagaccgacttcagcaacctgttcgccagagacctgctgcccgccaagaacggcgaggagcagaccgtgcagttcctgctggaggtggtgtag

SEQ ID NO: 176648 - protein, 482 aa, Artificial Sequence
  derived and/or modified sequence
MAEAATPGTTATTSGAGAAAATAAAASPTPIPTVTAPSLGAGGGGGGSDGSGGGWTKQVTCRYFMHGVCKEGDNCRYSHDLSDSPYSVVCKYFQRGYCIYGDRCRYEHSKPLKQEEATATELTTKSSLAASSSLSSIVGPLVEMNTGEAESRNSNFATVGAGSEDWVNAIEFVPGQPYCGRTAPSCTEAPLQGSVTKEESEKEQTAVETKKQLCPYAAVGECRYGENCVYLHGDSCDMCGLQVLHPMDAAQRSQHIKSCIEAHEKDMELSFAVQRSKDMVCGICMEVVYEKANPSERRFGILSNCNHTYCLKCIRKWRSAKQFESKIIKSCPECRITSNFVIPSEYWVEEKEEKQKLILKYKEAMSNKACRYFDEGRGSCPFGGNCFYKHAYPDGRREEPQRQKVGTSSRYRAQRRNHFWELIEERENSNPFDNDEEEVVTFELGEMLLMLLAAGGDDELTDSEDEWDLFHDELEDFYDLDL

SEQ ID NO: 176649 - DNA, 1449 bp, Artificial Sequence
  derived and/or modified sequence
atggccgaggccgccacccccggcaccaccgccaccaccagcggcgccggcgccgccgccgccaccgccgccgccgccagccccacccccatccccaccgtgaccgcccccagcctgggcgccggcggcggcggcggcggcagcgacggcagcggcggcggctggaccaagcaggtgacctgcagatacttcatgcacggcgtgtgcaaggagggcgacaactgcagatacagccacgacctgagcgacagcccctacagcgtggtgtgcaagtacttccagagaggctactgcatctacggcgacagatgcagatacgagcacagcaagcccctgaagcaggaggaggccaccgccaccgagctgaccaccaagagcagcctggccgccagcagcagcctgagcagcatcgtgggccccctggtggagatgaacaccggcgaggccgagagcagaaacagcaacttcgccaccgtgggcgccggcagcgaggactgggtgaacgccatcgagttcgtgcccggccagccctactgcggcagaaccgcccccagctgcaccgaggcccccctgcagggcagcgtgaccaaggaggagagcgagaaggagcagaccgccgtggagaccaagaagcagctgtgcccctacgccgccgtgggcgagtgcagatacggcgagaactgcgtgtacctgcacggcgacagctgcgacatgtgcggcctgcaggtgctgcaccccatggacgccgcccagagaagccagcacatcaagagctgcatcgaggcccacgagaaggacatggagctgagcttcgccgtgcagagaagcaaggacatggtgtgcggcatctgcatggaggtggtgtacgagaaggccaaccccagcgagagaagattcggcatcctgagcaactgcaaccacacctactgcctgaagtgcatcagaaagtggagaagcgccaagcagttcgagagcaagatcatcaagagctgccccgagtgcagaatcaccagcaacttcgtgatccccagcgagtactgggtggaggagaaggaggagaagcagaagctgatcctgaagtacaaggaggccatgagcaacaaggcctgcagatacttcgacgagggcagaggcagctgccccttcggcggcaactgcttctacaagcacgcctaccccgacggcagaagagaggagccccagagacagaaggtgggcaccagcagcagatacagagcccagagaagaaaccacttctgggagctgatcgaggagagagagaacagcaaccccttcgacaacgacgaggaggaggtggtgaccttcgagctgggcgagatgctgctgatgctgctggccgccggcggcgacgacgagctgaccgacagcgaggacgagtgggacctgttccacgacgagctggaggacttctacgacctggacctgtag

SEQ ID NO: 176650 - DNA, 1449 bp, Artificial Sequence
  derived and/or modified sequence
atggccgaggctgccactcctggtactaccgctaccacaagtggcgccggcgcagctgcagcaaccgcagcagctgctagtcccacgcctattcctaccgtaactgccccgagcctcggcgctggaggggggggaggcgggagcgacggttccggtggtgggtggaccaagcaggttacgtgccgttacttcatgcatggagtgtgcaaggaaggcgacaattgccgttacagtcacgacctaagtgattcaccctacagtgtggtctgcaagtattttcagaggggttattgtatatacggggatcggtgtcggtacgagcactctaaacccctgaagcaagaggaagcaactgctaccgagctgaccacaaaatctagtctcgccgcatcgagctccctgagtagcattgtcggaccattggtggagatgaacactggtgaggccgagagtaggaatagtaattttgccaccgttggggctggaagcgaagactgggtcaatgcaattgaatttgtccctgggcagccttattgtggtcggacagctccttcttgtactgaggccccactgcagggaagcgtcaccaaggaagaatcagagaaggaacaaacagcagttgaaaccaaaaagcagctgtgtccttacgcagcagtaggcgagtgccggtacggcgaaaattgtgtgtatctgcacggagacagctgtgacatgtgcgggctgcaagtcttacaccctatggatgcagcccagaggagtcagcacatcaagagttgcattgaggcacacgaaaaggacatggagctcagtttcgccgtgcaacgctcaaaagatatggtatgcggtatctgcatggaagtagtctacgaaaaggctaatccttccgagcggagatttggaatacttagtaattgcaaccacacttactgccttaaatgcatccgcaagtggagatctgccaagcagttcgaatccaaaataataaaatcatgccctgagtgccgcatcacgtcaaatttcgtgatcccctcggagtattgggtggaagagaaggaagagaagcagaagctcatcttgaaatataaagaagccatgtctaataaggcatgccgttactttgacgagggacggggctcctgtcccttcggcggtaactgcttttataaacacgcctatcccgatgggaggagagaagagccacagcggcagaaggtcggcactagtagcagataccgagcacaacggaggaatcatttctgggaactgatcgaggagcgcgagaatagtaatcctttcgacaacgatgaagaagaagtggtaacatttgaactgggagaaatgctgctgatgctgcttgcagctggaggtgacgatgagctgaccgattctgaggatgaatgggatctgttccacgatgagcttgaagacttctacgatttagatttgtag

SEQ ID NO: 176651 - DNA, 1449 bp, Artificial Sequence
  derived and/or modified sequence
atggccgaggccgccaccccaggcaccacagccaccaccagcggggccggggctgctgctgccacagctgctgctgccagccccacccccatccccaccgtgacagcccccagcctgggcgccggcggcggcggcggcggcagtgatggcagcggcggcggctggaccaagcaggtgacctgccgctacttcatgcacggcgtgtgcaaggagggggacaactgccgctacagccatgacctgagtgacagcccctacagcgtggtgtgcaagtacttccagaggggctactgcatctacggggaccgctgccgctatgagcacagcaagcccctgaagcaggaggaggccacagccacagagctgaccaccaagagcagcctggccgccagcagcagcctgagcagcatcgtgggccccctggtggagatgaacacaggagaggccgagagcaggaacagcaactttgccaccgtgggcgccggcagcgaggactgggtgaatgccatcgagtttgtgcccggccagccctactgcggccgcacagcccccagctgcacagaggcccccctgcagggctctgtgaccaaggaggagagcgagaaggagcagacagctgtggagaccaagaagcagctgtgcccctatgctgctgtgggagaatgtcgctacggggagaactgtgtgtacctgcacggggacagctgtgacatgtgtggcctgcaggtgctgcaccccatggatgctgcccagaggagccagcacatcaagagctgcatcgaggcccacgagaaggacatggagctgagctttgctgtgcagaggagcaaggacatggtgtgtggcatctgcatggaggtggtgtatgagaaggccaaccccagcgagaggagatttggcatcctgagcaactgcaaccacacctactgcctgaagtgcatcaggaagtggaggtctgccaagcagtttgagagcaagatcatcaagagctgcccagaatgtcgcatcaccagcaacttcgtcatccccagcgagtactgggtggaggagaaggaggagaagcagaagctgatcctgaagtacaaggaggccatgagcaacaaggcctgccgctactttgatgagggccggggcagctgcccctttggaggcaactgcttctacaagcacgcctacccagatggccggcgggaggagccccagaggcagaaggtgggcaccagcagccgctaccgggcccagaggaggaaccacttctgggagctgattgaggagcgggagaacagcaacccctttgacaatgatgaggaggaggtggtgacctttgagctgggggagatgctgctgatgctgctggccgctggaggagatgatgagctgacagattctgaagatgagtgggacctcttccatgatgagctggaggacttctatgacctggacctgtag

SEQ ID NO: 176652 - DNA, 3151 bp, Artificial Sequence
  derived and/or modified sequence
accaatgagcggcgccgtgggcgggccgcgggcgcgcatgctctgggcccgcagttgaagtggcgagagcgctcagatacgcgacgcgtagcaggcggggaccgaacgggtgcctcagtgtccttcccctcccctcgcctggcctcgccgtcctctccccgcagccggaccggaactatgtgatcccggaagttccggggcctttgctgtgtgggataaacagtaatggcggaggctgcaactcccggaacaacagccacaacatcaggagcaggagcggcagcggcgacggcggcagcagcctcccccaccccgatccccacagtcaccgccccgtccctgggggcgggcggagggggcggcggcagcgacggcagcggcggcggctggactaaacaggtcacctgcaggtattttatgcatggggtttgtaaggaaggagacaactgtcgctactcgcatgacctctctgacagtccgtatagtgtagtgtgcaagtattttcagcgagggtactgtatttatggagaccgctgcagatatgaacatagcaaaccattgaaacaggaagaagcaactgctacagagctaactacaaagtcatcccttgctgcttcctcaagtctctcatcgatagttggaccacttgttgaaatgaatacaggcgaagctgagtcaagaaattcaaactttgcaactgtaggagcaggttcagaggactgggtgaatgctattgagtttgttcctgggcaaccctactgtggccgtactgcgccttcctgcactgaagcacccctgcagggctcagtgaccaaggaagaatcagagaaagagcaaaccgccgtggagacaaagaagcagctgtgcccctatgctgcagtgggagagtgccgatacggggagaactgtgtgtatctccacggagattcttgtgacatgtgtgggctgcaggtcctgcatccaatggatgctgcccagagatcgcagcatatcaaatcgtgcattgaggcccatgagaaggacatggagctctcatttgccgtgcagcgcagcaaggacatggtgtgtgggatctgcatggaggtggtctatgagaaagccaaccccagtgagcgccgcttcgggatcctctccaactgcaaccacacctactgtctcaagtgcattcgcaagtggaggagtgctaagcaatttgagagcaagatcataaagtcctgcccagaatgccggatcacatctaactttgtcattccaagtgagtactgggtggaggagaaagaagagaagcagaaactcattctgaaatacaaggaggcaatgagcaacaaggcgtgcaggtattttgatgaaggacgtgggagctgcccatttggagggaactgtttttacaagcatgcgtaccctgatggccgtagagaggagccacagagacagaaagtgggaacatcaagcagataccgggcccaacgaaggaaccacttctgggaactcattgaggaaagagagaacagcaacccctttgacaacgatgaagaagaggttgtcacctttgagctgggcgagatgttgcttatgcttttggctgcaggtggggacgacgaactaacagactctgaagatgagtgggacttgtttcatgatgagctggaagatttttatgacttggatctatagcaaccttgcgtggcgtgtgaactggtctgctgacctcagacagcagctgtcccctgtggtggtgtggcagtgcctgtgttctctcctaggcaggcctctcaactccaggtgctgtcctaagaatttttacccagggcctgtcttctcaacccctcacctttccctgaggagtgtgttgttttccctgttgaaaaaagttacaaaaataaatcttaaagttagttttttgtaacacgaatttaactgtcagacagttagtgtaggtgtgttgcgtcatctgttttcaaccagattgcatttatggacttttcacacactcattttgaggaccccaggttcaaaagtaaaagcagtggccctgctttggggtccaagaataggagtgatgggtgaagggacctaagctggccaatagccctctgccccagacatgggatgtggatccttgaggtttctggtgaaatctgcacatctgtgtttttatatctgttccctaccctgtaatccctaccacgtgcacttgttctgtggttttggtctcttgtttaattgcacacaagtaatactactgggtaaccagaatcaggtgtgaatgtgttgagattttttactgttttgcatgataggaaaattgagaaagaatacgtataaaagatagagaggcataacatcaatgcagagttggaagttggctcccaagggctgacatggtgtgagtgtgtgggtgtgtgataagcttctcatccctgcatagatgcagtattcttagccttagtagaaaaacctggtttagtggtttaagccttgtgtggcagatagatcttaaagggcaaagcagtatattggtagttgtcaatatagcagtgctagctctgtctatataaatagagaaatggggttagccatagaggttaaaactacctggttatcccatataataacacaaactgggtcttggatacacagttgtatttaatgttttacgatctagcctttccagtacaggcactttctgagaaacctttgtcctcacttgaggcattttgttgtcgggtttttgtgtttgtttttgtgggtatttgcctcattccacccctgagctttcaggtagacagacgtgattcaaaactctgttctaaggtgtttattgtagtggagtaatgggtttgcagtgataagtcatacttttccaccgaaagggagggcttgggaatccctgagattagctaaagttaagttgttggaagaattccttgattggaaattgtacctttgtgttttgttgctctgtttcctgaaaataactcggggatgctcctggtttgtccatctactgctttgattccttggatcccacccattctttcactttaagaaaaaacaaataattgttgcagaggtctctgtattttgcagctgcccttttgtaagaagcacttttcccaaataaaacaattaaaaaaaaagttggctgttc

SEQ ID NO: 176653 - DNA, 3745 bp, Artificial Sequence
  derived and/or modified sequence
agtagagacgggctttctccgtgttggtcaggctggtcttgaactcccgacctcaggtgatctgccggcctcagcctcccaaagtgctgggattagaggcgtgagccaccgcacccggtctatgatccttatcgttcactttgagctctctgagaagagtagggccctattttatctgcagggctttctttcctcagttcctcagtttctttcctcagttccagtatcatgaacaggatactcagttactgagtatcctgagcagatactgagtaaatgcttgagtgatgttgataaagtcatatacctagaattacccactttaacaggaactttgtaagattcctctgctttcattaaaaaaaaaaaaaacaaaacttgtaaattaccaaagacaaagtacttaacagaacacatgtgtatcttccttttttttttttttttttgagatggagtgtcgctctgtcgcccaggctggagtgcagtggcgagatctcagctcactgcaacctctgcctcctgggttcaagcgattctcctgcctcagcctcctgagtaggtgggattacgcccggccacatgtatattttttctggaactaccttattcaatcattcagtaagtaaacattgcactccagcctgggtgacagagtgagatttcgtctcaaaaaaaaaaaaaaagaaagaaggaaatccttcagaaattctttatctgagtgctgtgacgtccatagtgaaatttattacttggaaactacatagtggttgtgagaggaaataagtaataaatattaaatggtattaaaaagattatgcaactgggaaagaaaaattaatttgctatcgctaccatgattcaccatcacatctagctgtcttctacagccttttatttatttattttttttttgagacggagtctcagtggcgtgatcctggttcactgcaacctctgggccccccccaacccactgcgagttcaagcaattctgcctcagcctcccaagtagctgggactacaggtattttatgcatggggtttgtaaggaaggagacaactgtcgctactcgcatgacctctctgacagtccgtatagtgtagtgtgcaagtattttcagcgagggtactgtatttatggagaccgctgcagatatgaacatagcaaaccattgaaacaggaagaagcaactgctacagagctaactacaaagtcatcccttgctgcttcctcaagtctctcatcgatagttggaccacttgttgaaatgaatacaggcgaagctgagtcaagaaattcaaactttgcaactgtaggagcaggttcagaggactgggtgaatgctattgagtttgttcctgggcaaccctactgtggccgtactgcgccttcctgcactgaagcacccctgcagggctcagtgaccaaggaagaatcagagaaagagcaaaccgccgtggagacaaagaagcagctgtgcccctatgctgcagtgggagagtgccgatacggggagaactgtgtgtatctccacggagattcttgtgacatgtgtgggctgcaggtcctgcatccaatggatgctgcccagagatcgcagcatatcaaatcgtgcattgaggcccatgagaaggacatggagctctcatttgccgtgcagcgcagcaaggacatggtgtgtgggatctgcatggaggtggtctatgagaaagccaaccccagtgagcgccgcttcgggatcctctccaactgcaaccacacctactgtctcaagtgcattcgcaagtggaggagtgctaagcaatttgagagcaagatcataaagtcctgcccagaatgccggatcacatctaactttgtcattccaagtgagtactgggtggaggagaaagaagagaagcagaaactcattctgaaatacaaggaggcaatgagcaacaaggcgtgcaggtattttgatgaaggacgtgggagctgcccatttggagggaactgtttttacaagcatgcgtaccctgatggccgtagagaggagccacagagacagaaagtgggaacatcaagcagataccgggcccaacgaaggaaccacttctgggaactcattgaggaaagagagaacagcaacccctttgacaacgatgaagaagaggttgtcacctttgagctgggcgagatgttgcttatgcttttggctgcaggtggggacgacgaactaacagactctgaagatgagtgggacttgtttcatgatgagctggaagatttttatgacttggatctatagcaaccttgcgtggcgtgtgaactggtctgctgacctcagacagcagctgtcccctgtggtggtgtggcagtgcctgtgttctctcctaggcaggcctctcaactccaggtgctgtcctaagaatttttacccagggcctgtcttctcaacccctcacctttccctgaggagtgtgttgttttccctgttgaaaaaagttacaaaaataaatcttaaagttagttttttgtaacacgaatttaactgtcagacagttagtgtaggtgtgttgcgtcatctgttttcaaccagattgcatttatggacttttcacacactcattttgaggaccccaggttcaaaagtaaaagcagtggccctgctttggggtccaagaataggagtgatgggtgaagggacctaagctggccaatagccctctgccccagacatgggatgtggatccttgaggtttctggtgaaatctgcacatctgtgtttttatatctgttccctaccctgtaatccctaccacgtgcacttgttctgtggttttggtctcttgtttaattgcacacaagtaatactactgggtaaccagaatcaggtgtgaatgtgttgagattttttactgttttgcatgataggaaaattgagaaagaatacgtataaaagatagagaggcataacatcaatgcagagttggaagttggctcccaagggctgacatggtgtgagtgtgtgggtgtgtgataagcttctcatccctgcatagatgcagtattcttagccttagtagaaaaacctggtttagtggtttaagccttgtgtggcagatagatcttaaagggcaaagcagtatattggtagttgtcaatatagcagtgctagctctgtctatataaatagagaaatggggttagccatagaggttaaaactacctggttatcccatataataacacaaactgggtcttggatacacagttgtatttaatgttttacgatctagcctttccagtacaggcactttctgagaaacctttgtcctcacttgaggcattttgttgtcgggtttttgtgtttgtttttgtgggtatttgcctcattccacccctgagctttcaggtagacagacgtgattcaaaactctgttctaaggtgtttattgtagtggagtaatgggtttgcagtgataagtcatacttttccaccgaaagggagggcttgggaatccctgagattagctaaagttaagttgttggaagaattccttgattggaaattgtacctttgtgttttgttgctctgtttcctgaaaataactcggggatgctcctggtttgtccatctactgctttgattccttggatcccacccattctttcactttaagaaaaaacaaataattgttgcagaggtctctgtattttgcagctgcccttttgtaagaagcacttttcccaaataaaacaatt

SEQ ID NO: 176654 - DNA, 1449 bp, Artificial Sequence
  derived and/or modified sequence
atggccgaggccgccacccccggcaccaccgccaccaccagcggcgccggcgctgcagccgctacggccgcggcggcttcacccaccccgatcccgactgtaaccgccccgtccctaggcgccgggggagggggcggcggtagcgatggatctggcggagggtggaccaagcaggtgacatgcaggtattttatgcatggggtgtgtaaggaaggcgataactgccggtactcccacgatctttcagattccccttactcagtggtatgcaaatactttcagagaggatactgtatatatggtgatcggtgtcggtacgaacattcgaagcctctgaagcaggaagaggctaccgcaacggagctgacaactaaaagtagcctcgctgcgagttcctctctgtcctctatcgtgggcccgctggtggaaatgaataccggcgaggcggaaagtagaaactctaactttgccacagtcggcgccgggtccgaagattgggttaatgccatcgaattcgtccccggacagccttattgtggaagaaccgcgccttcctgtaccgaggcgccccttcagggatccgtgacaaaagaggagtccgagaaagaacaaactgcagtcgagacaaagaagcagttgtgcccatacgccgccgtcggagagtgcaggtacggggaaaactgtgtgtatctgcacggcgactcatgtgacatgtgtggcctgcaagtactccacccgatggatgcagcacaacggtctcagcacataaagtcctgtattgaagcccacgaaaaggacatggagctgagtttcgccgtgcagaggagtaaggatatggtctgtggtatttgcatggaggtggtgtatgagaaagctaatccgagcgaaaggaggtttggcattttgtcaaattgtaatcacacatactgtctgaaatgtatacgtaagtggagatccgccaagcagtttgaaagtaaaattatcaagtcctgccccgagtgcagaatcacttcaaattttgtcattcctagcgagtactgggtcgaggaaaaggaggaaaagcagaagctaattctgaagtacaaagaggccatgtcaaataaggcatgcagatatttcgacgagggaagagggagttgcccgtttgggggcaattgcttttacaagcatgcctaccccgatggccgtcgggaagaacctcaacggcagaaggtgggcacgtcctctcggtaccgcgcccagcgccgcaaccacttctgggagttgatagaagagcgagagaacagtaacccctttgacaacgacgaagaagaggtagtgacttttgagttaggcgagatgttactgatgctgctcgctgccggtggggacgatgagttgacagacagtgaggacgagtgggacctgtttcacgacgaacttgaagatttctatgacctcgatttatag

SEQ ID NO: 176655 - DNA, 1449 bp, Artificial Sequence
  derived and/or modified sequence
atggccgaggccgctactcctggcacaactgcaaccacctccggtgctggggcagctgccgcaacggctgcagcagcctcccctacacccatccctacagtcaccgcaccatctctgggggctggtggaggtggcggaggtagcgatggaagcgggggaggttggacaaagcaggtcacctgtcgatactttatgcacggggtgtgcaaagaaggagataattgcaggtactcacatgacttatcagattccccatacagcgttgtgtgtaagtacttccaaaggggatattgcatctatggggatcgctgcaggtacgaacattctaaacccttaaagcaggaagaggctacagccaccgaactgactaccaagagcagtctcgctgcaagcagtagcctcagcagcatagtcgggccactcgtcgagatgaataccggggaggccgaaagtcggaattccaattttgcaacggtgggcgcaggttcagaggattgggtcaatgcaatagagttcgtacccggtcagccctattgcgggagaacggctccttcctgtacagaagctcccttgcagggaagtgtaaccaaggaagaaagtgaaaaggagcagaccgccgtggaaacaaagaaacagctttgcccgtatgctgctgtgggagagtgcagatatggcgaaaattgtgtgtatctccacggagactcatgtgatatgtgcggcctccaggtactacatcctatggatgcagctcagcgatctcagcacataaagtcctgtatagaggcacatgaaaaagacatggagttgagtttcgcggtccagcgatccaaggacatggtatgcggaatatgcatggaggttgtctacgagaaggctaatccatcagagagacgttttggcatcctctcaaactgcaaccatacttattgcctcaaatgcatccggaaatggaggagcgcaaagcagttcgaaagtaagatcatcaaatcctgtccggagtgtaggattacctctaacttcgtgattccatcagagtactgggtggaagagaaggaggagaagcagaaactgattctcaaatacaaagaggccatgtctaataaagcatgtcggtattttgacgaagggcgaggatcttgccccttcggcggtaattgcttttacaaacacgcctaccccgatggcagacgcgaggaaccccagagacagaaagtggggacctccagtaggtatagggcgcagagaaggaaccacttttgggaactcatcgaagagcgtgaaaacagcaacccatttgacaatgacgaagaagaggttgtgacctttgaactgggcgagatgctgctgatgcttctggcagctggtggcgacgacgaattgaccgacagcgaagatgaatgggatctatttcatgatgaactggaagatttttatgatctagatctatag

SEQ ID NO: 176656 - protein, 823 aa, Artificial Sequence
  derived and/or modified sequence
MGGRVFLVFLAFCVWLTLPGAETQDSRGCARWCPQDSSCVNATACRCNPGFSSFSEIITTPMETCDDINECATLSKVSCGKFSDCWNTEGSYDCVCSPGYEPVSGAKTFKNESENTCQDVDECQQNPRLCKSYGTCVNTLGSYTCQCLPGFKLKPEDPKLCTDVNECTSGQNPCHSSTHCLNNVGSYQCRCRPGWQPIPGSPNGPNNTVCEDVDECSSGQHQCDSSTVCFNTVGSYSCRCRPGWKPRHGIPNNQKDTVCEDMTFSTWTPPPGVHSQTLSRFFDKVQDLGRDYKPGLANNTIQSILQALDELLEAPGDLETLPRLQQHCVASHLLDGLEDVLRGLSKNLSNGLLNFSYPAGTELSLEVQKQVDRSVTLRQNQAVMQLDWNQAQKSGDPGPSVVGLVSIPGMGKLLAEAPLVLEPEKQMLLHETHQGLLQDGSPILLSDVISAFLSNNDTQNLSSPVTFTFSHRSVIPRQKVLCVFWEHGQNGCGHWATTGCSTIGTRDTSTICRCTHLSSFAVLMAHYDVQEEDPVLTVITYMGLSVSLLCLLLAALTFLLCKAIQNTSTSLHLQLSLCLFLAHLLFLVAIDQTGHKVLCSIIAGTLHYLYLATLTWMLLEALYLFLTARNLTVVNYSSINRFMKKLMFPVGYGVPAVTVAISAASRPHLYGTPSRCWLQPEKGFIWGFLGPVCAIFSVNLVLFLVTLWILKNRLSSLNSEVSTLRNTRMLAFKATAQLFILGCTWCLGILQVGPAARVMAYLFTIINSLQGVFIFLVYCLLSQQVREQYGKWSKGIRKLKTESEMHTLSSSAKADTSKPSTVN

SEQ ID NO: 176657 - DNA, 2472 bp, Artificial Sequence
  derived and/or modified sequence
atgggcggcagagtgttcctggtgttcctggccttctgcgtgtggctgaccctgcccggcgccgagacccaggacagcagaggctgcgccagatggtgcccccaggacagcagctgcgtgaacgccaccgcctgcagatgcaaccccggcttcagcagcttcagcgagatcatcaccacccccatggagacctgcgacgacatcaacgagtgcgccaccctgagcaaggtgagctgcggcaagttcagcgactgctggaacaccgagggcagctacgactgcgtgtgcagccccggctacgagcccgtgagcggcgccaagaccttcaagaacgagagcgagaacacctgccaggacgtggacgagtgccagcagaaccccagactgtgcaagagctacggcacctgcgtgaacaccctgggcagctacacctgccagtgcctgcccggcttcaagctgaagcccgaggaccccaagctgtgcaccgacgtgaacgagtgcaccagcggccagaacccctgccacagcagcacccactgcctgaacaacgtgggcagctaccagtgcagatgcagacccggctggcagcccatccccggcagccccaacggccccaacaacaccgtgtgcgaggacgtggacgagtgcagcagcggccagcaccagtgcgacagcagcaccgtgtgcttcaacaccgtgggcagctacagctgcagatgcagacccggctggaagcccagacacggcatccccaacaaccagaaggacaccgtgtgcgaggacatgaccttcagcacctggacccccccccccggcgtgcacagccagaccctgagcagattcttcgacaaggtgcaggacctgggcagagactacaagcccggcctggccaacaacaccatccagagcatcctgcaggccctggacgagctgctggaggcccccggcgacctggagaccctgcccagactgcagcagcactgcgtggccagccacctgctggacggcctggaggacgtgctgagaggcctgagcaagaacctgagcaacggcctgctgaacttcagctaccccgccggcaccgagctgagcctggaggtgcagaagcaggtggacagaagcgtgaccctgagacagaaccaggccgtgatgcagctggactggaaccaggcccagaagagcggcgaccccggccccagcgtggtgggcctggtgagcatccccggcatgggcaagctgctggccgaggcccccctggtgctggagcccgagaagcagatgctgctgcacgagacccaccagggcctgctgcaggacggcagccccatcctgctgagcgacgtgatcagcgccttcctgagcaacaacgacacccagaacctgagcagccccgtgaccttcaccttcagccacagaagcgtgatccccagacagaaggtgctgtgcgtgttctgggagcacggccagaacggctgcggccactgggccaccaccggctgcagcaccatcggcaccagagacaccagcaccatctgcagatgcacccacctgagcagcttcgccgtgctgatggcccactacgacgtgcaggaggaggaccccgtgctgaccgtgatcacctacatgggcctgagcgtgagcctgctgtgcctgctgctggccgccctgaccttcctgctgtgcaaggccatccagaacaccagcaccagcctgcacctgcagctgagcctgtgcctgttcctggcccacctgctgttcctggtggccatcgaccagaccggccacaaggtgctgtgcagcatcatcgccggcaccctgcactacctgtacctggccaccctgacctggatgctgctggaggccctgtacctgttcctgaccgccagaaacctgaccgtggtgaactacagcagcatcaacagattcatgaagaagctgatgttccccgtgggctacggcgtgcccgccgtgaccgtggccatcagcgccgccagcagaccccacctgtacggcacccccagcagatgctggctgcagcccgagaagggcttcatctggggcttcctgggccccgtgtgcgccatcttcagcgtgaacctggtgctgttcctggtgaccctgtggatcctgaagaacagactgagcagcctgaacagcgaggtgagcaccctgagaaacaccagaatgctggccttcaaggccaccgcccagctgttcatcctgggctgcacctggtgcctgggcatcctgcaggtgggccccgccgccagagtgatggcctacctgttcaccatcatcaacagcctgcagggcgtgttcatcttcctggtgtactgcctgctgagccagcaggtgagagagcagtacggcaagtggagcaagggcatcagaaagctgaagaccgagagcgagatgcacaccctgagcagcagcgccaaggccgacaccagcaagcccagcaccgtgaactag

SEQ ID NO: 176658 - DNA, 3081 bp, Artificial Sequence
  derived and/or modified sequence
ggtctgctctgtgcggtgaagcttctcttcttggcacctgcctggcatcggaagagggccccttctccctccctgggcttttatgtggacactgtaatgcctcagttttctttctttctttttgtttttgacacagggtctcactctatcacccaagctggagtgcagtggcaccatcttagctcaccgcagcctcaaactccccagctcgggtgattcttcctgcctcagcctcctgagtagtagcagctgggaccacagacgtctgccaccaagcccagctgcaccgccagttccggggagggccctgggccagcggctgtccgccccccctcctttataaagtcctggcctcgggacagcccgcacagctgcccagcctgcggagacgggacagccctgtcccactcactctttcccctgctgctcctgccggcagctcagctggaaccatgggaggccgcgtctttctcgtctttctcgcattctgtgtctggctgactctgccgggagctgaaacccaggactccaggggctgtgcccggtggtgccctcaggactcctcgtgtgtcaatgccaccgcctgtcgctgcaatccagggttcagctctttttctgagatcatcaccacccccatggagacttgtgacgacatcaacgagtgtgcaacactgtcgaaagtgtcatgcggaaaattctcggactgctggaacacagaggggagctacgactgcgtgtgcagcccaggatatgagcctgtttctggggcaaaaacattcaagaatgagagcgagaacacgtgtcaagatgtggacgaatgtcagcagaacccaaggctctgtaaaagctacggcacctgcgtcaacaccctcggcagctacacgtgccagtgcctgcctggcttcaagctcaaacctgaggacccgaagctctgcacagatgtgaatgaatgcacctccggacaaaacccatgccacagctccacccactgcctcaacaacgtgggcagctatcagtgccgctgccgcccgggctggcaaccgattccggggtcccccaatggcccaaacaataccgtctgtgaagatgtggacgagtgcagctccgggcagcatcagtgtgacagctccaccgtctgcttcaacaccgtgggttcatacagctgccgctgccgcccaggctggaagcccagacacggaatcccgaataaccaaaaggacactgtctgtgaagatatgactttctccacctggaccccgccccctggagtccacagccagacgctttcccgattcttcgacaaagtccaggacctgggcagagactacaagccaggcttggccaataacaccatccagagcatcttacaggcgctggatgagctgctggaggcccctggggacctggagaccctgccccgcttacagcagcactgtgtggccagtcacctgctggatggcctagaggatgtcctcagaggcctgagcaagaacctttccaatgggctgttgaacttcagttatcctgcaggcacagaattgtccctggaggtgcagaagcaagtagacaggagtgtcaccttgagacagaatcaggcagtgatgcagctcgactggaatcaggcacagaaatctggtgacccaggcccttctgtggtgggccttgtctccattccagggatgggcaagttgctggctgaggcccctctggtcctggaacctgagaagcagatgcttctgcatgagacacaccagggcttgctgcaggacggctcccccatcctgctctcagatgtgatctctgcctttctgagcaacaacgacacccaaaacctcagctccccagttaccttcaccttctcccaccgttcagtgatcccgagacagaaggtgctctgtgtcttctgggagcatggccagaatggatgtggtcactgggccaccacaggctgcagcacaataggcaccagagacaccagcaccatctgccgttgcacccacctgagcagctttgccgtcctcatggcccactacgatgtgcaggaggaggatcccgtgctgactgtcatcacctacatggggctgagcgtctctctgctgtgcctcctcctggcggccctcacttttctcctgtgtaaagccatccagaacaccagcacctcactgcatctgcagctctcgctctgcctcttcctggcccacctcctcttcctcgtggcaattgatcaaaccggacacaaggtgctgtgctccatcatcgccggtaccttgcactatctctacctggccaccttgacctggatgctgctggaggccctgtacctcttcctcactgcacggaacctgacggtggtcaactactcaagcatcaacagattcatgaagaagctcatgttccctgtgggctacggagtcccagctgtgacagtggccatttctgcagcctccaggcctcacctttatggaacaccttcccgctgctggctccaaccagaaaagggatttatatggggcttccttggacctgtctgcgccatcttctctgtgaatttagttctctttctggtgactctctggattttgaaaaacagactctcctccctcaatagtgaagtgtccaccctccggaacacaaggatgctggcatttaaagcgacagctcagctgttcatcctgggctgcacgtggtgtctgggcatcttgcaggtgggtccggctgcccgggtcatggcctacctcttcaccatcatcaacagcctgcagggtgtcttcatcttcctggtgtactgcctcctcagccagcaggtccgggagcaatatgggaaatggtccaaagggatcaggaaattgaaaactgagtctgagatgcacacactctccagcagtgctaaggctgacacctccaaacccagcacggttaactagaaaaatcttctgaataagatcttccctctttgcccgtggaaaatctgaacaatctttgagccatctagaggggaaagaaaagactttgttctgtgtgtttcaagaaattcaccatgtcagcaatatgaaggatgttatggaaggcgtgctaggcatt

SEQ ID NO: 176659 - DNA, 6771 bp, Artificial Sequence
  derived and/or modified sequence
ggggggtctgctctgtgcggtgaagcttctcttcttggcacctgcctggcatcggaagagggccccttctccctccctgggcttttatgtggacactgtaatgcctcagttttctttctttctttttgtttttgacacagggtctcactctatcacccaagctggagtgcagtggcaccatcttagctcaccgcagcctcaaactccccagctcgggtgattcttcctgcctcagcctcctgagtagtagcagctgggaccacagacgtctgccaccaagcccagctgcaccgccagttccggggagggccctgggccagcggctgtccgccccccctcctttataaagtcctggcctcgggacagcccgcacagctgcccagcctgcggagacgggacagccctgtcccactcactctttcccctgctgctcctgccggcagctcagctggaaccatgggaggccgcgtctttctcgtctttctcgcattctgtgtctggctgactctgccgggagctgaaacccaggactccaggggctgtgcccggtggtgccctcaggactcctcgtgtgtcaatgccaccgcctgtcgctgcaatccagggttcagctctttttctgagatcatcaccacccccatggagacttgtgacgacatcaacgagtgtgcaacactgtcgaaagtgtcatgcggaaaattctcggactgctggaacacagaggggagctacgactgcgtgtgcagcccaggatatgagcctgtttctggggcaaaaacattcaagaatgagagcgagaacacgtgtcaagatgtggacgaatgtcagcagaacccaaggctctgtaaaagctacggcacctgcgtcaacaccctcggcagctacacgtgccagtgcctgcctggcttcaagctcaaacctgaggacccgaagctctgcacagatgtgaatgaatgcacctccggacaaaacccatgccacagctccacccactgcctcaacaacgtgggcagctatcagtgccgctgccgcccgggctggcaaccgattccggggtcccccaatggcccaaacaataccgtctgtgaagatgtggacgagtgcagctccgggcagcatcagtgtgacagctccaccgtctgcttcaacaccgtgggttcatacagctgccgctgccgcccaggctggaagcccagacacggaatcccgaataaccaaaaggacactgtctgtgaagatatgactttctccacctggaccccgccccctggagtccacagccagacgctttcccgattcttcgacaaagtccaggacctgggcagagactacaagccaggcttggccaataacaccatccagagcatcttacaggcgctggatgagctgctggaggcccctggggacctggagaccctgccccgcttacagcagcactgtgtggccagtcacctgctggatggcctagaggatgtcctcagaggcctgagcaagaacctttccaatgggctgttgaacttcagttatcctgcaggcacagaattgtccctggaggtgcagaagcaagtagacaggagtgtcaccttgagacagaatcaggcagtgatgcagctcgactggaatcaggcacagaaatctggtgacccaggcccttctgtggtgggccttgtctccattccagggatgggcaagttgctggctgaggcccctctggtcctggaacctgagaagcagatgcttctgcatgagacacaccagggcttgctgcaggacggctcccccatcctgctctcagatgtgatctctgcctttctgagcaacaacgacacccaaaacctcagctccccagttaccttcaccttctcccaccgttcagtgatcccgagacagaaggtgctctgtgtcttctgggagcatggccagaatggatgtggtcactgggccaccacaggctgcagcacaataggcaccagagacaccagcaccatctgccgttgcacccacctgagcagctttgccgtcctcatggcccactacgatgtgcaggaggaggatcccgtgctgactgtcatcacctacatggggctgagcgtctctctgctgtgcctcctcctggcggccctcacttttctcctgtgtaaagccatccagaacaccagcacctcactgcatctgcagctctcgctctgcctcttcctggcccacctcctcttcctcgtggcaattgatcaaaccggacacaaggtgctgtgctccatcatcgccggtaccttgcactatctctacctggccaccttgacctggatgctgctggaggccctgtacctcttcctcactgcacggaacctgacggtggtcaactactcaagcatcaacagattcatgaagaagctcatgttccctgtgggctacggagtcccagctgtgacagtggccatttctgcagcctccaggcctcacctttatggaacaccttcccgctgctggctccaaccagaaaagggatttatatggggcttccttggacctgtctgcgccatcttctctgtgaatttagttctctttctggtgactctctggattttgaaaaacagactctcctccctcaatagtgaagtgtccaccctccggaacacaaggatgctggcatttaaagcgacagctcagctgttcatcctgggctgcacgtggtgtctgggcatcttgcaggtgggtccggctgcccgggtcatggcctacctcttcaccatcatcaacagcctgcagggtgtcttcatcttcctggtgtactgcctcctcagccagcaggtccgggagcaatatgggaaatggtccaaagggatcaggaaattgaaaactgagtctgagatgcacacactctccagcagtgctaaggctgacacctccaaacccagcacggttaactagaaaaatcttctgaataagatcttccctctttgcccgtggaaaatctgaacaatctttgagccatctagaggggaaagaaaagactttgttctgtgtgtttcaagaaattcaccatgtcagcaatatgaaggatgttatggaaggcgtgctaggcattcaattcctgcagaaaccggaaatcttccatgccctgcaatgtgctcatcaaactctcagcatatggacggccagctgtggcccatatcttggtcactctgaagcacaatatttatgaagctatagaacgttaagacctctttcacagcctctccttcctacaaagactcctccaaatcttaaaatgaagcaggaaaacgagcctaagaggactttcataccgacaacatctgaaaggactagaatgttcacaccacgatctggatttcttaattttttgtttttgtttttgttgttctctagttctacgggtttgattatttagtcatgtgaaaaatattgattactcacacatagatcaagagagacacggctcctgccttcatggagcttttaggggaaaatgaagtggctcttgcagctagagttgactcagaagccgaaattcctagaaatcaggtttctactgctaggcaattgaagtataaactattttataaacactgtcttctttcgtcttcacaccaacatgcagaaaagtttctaatctcagatcggggatgtgcaacaaattccatttcaaaggaatgacctgcaaaactcctaaatattccaagcaaatgcccttaaccctgtctgttatctgctttccttgaacagaaattctacatgaccataaaacctcgaagatgggtatggcacagttcatgccctgtaatcctagcactttgggagggtgaggcaggaggatggctcaagcccaggagtttgagaccagtgtgggcaacagagtgagaaccatctctacccaaaaaaaaaattaaaaattagccaagcatggtgatgatataggagttaaggagaaatcatttaggcaaatagcaagggtaggaagtcctcagtaaggttttccatttaatgaaaagcagcccccaaaatcattttcttttctaacaaagaacagcctgtaaaatcgagctgcagacatagacaagcaagctggaagcttccacgggtgaatgccggcagctgtgccaataggaaaaagctacctagactaggcatgtccaaaatggcggctccaagttcccttctctttgccagccatgtgtacagtaaaaagcaggcaacatagtgtcagccaaagctcatttgcataataagattagggtggggtggccagctcacataggggtaggccctaggtaaatcagacaccgccttctcaagcctgtctataaaatctggtacactatgacgagggtcagatttcccattcagacgcccctctcccatgcaagagaaagagctgttctcctttctctttcttttgcctattaaacctctgctcctggccaggcacagtggctcacgcctataatcccagcactttgggaggctgaggtggtcagatcacctaaggtcaggagttcaagaccagcctggtcaacatggtgaaatcttgtctctagtaaaaatacaaaaatatatgaaatctcacatagatgataatattaagttccaaaagcaactcaacctggtagattctaattttttttgaggcagggtcttgctttgtcacccatgctggagtacaatggcacaaacactgctcactgcagcctcgacctcccaaggcctaagcaatcctcctgcctcagtccccctccaggtatttgaaactacaggtgtgtaccaccacaccgggctaatttttgtattttttgtagagacgtgggtctcactatgctgcccaggctcaggtcttaatctcctgagctcaggcaatccgcaggcctcagcctccctaagtgcggggattacaggcttgagccactgcacctagcctctatttgttttacaaaagagaaattgagatcctgaatgttaagtgacttgcctgaggccatcccactaacaggagccagggttaggattcaaaccccatccaactggtcccagagctggagcttcttgcactgccctacactacctaccatctccatcctctgggcacctttttataagaaccaaaacattacagagcattgctttgtcaactcagctgggaacatttcccagtgcaactcacatttttcactgctctgtgcctgtccgtataagctcaatgagtattgatttaggggctttggagaactttgaatgctaccccccaagtaaccattgttggcaacctggtacctctacttttagccatttctccttctctataaatagtgcagaagtaacccacttggtaacaggcatccttgccaagcctccaccactaggtcagtgtaagaattaaagaaagaggaaagaaacacaaaaagtggcttgatggttaagacaggtttattttagagaaaacacacctgagaggggctgctggctgaattaggttagagtcttttctacagactaagagtgtttaaggatttagggtgggagagtttcttagaggcttggactgcttctgtgttttttttgttgtgcttatatgggagggagagtggtgtgtttgcttttatacatttttctgcagctgtaggcataccccccaagtctgcttttagcttccctattttagtgcacctggagggaaaggaatgtgcttattaaggcccactgttttactggggcccattgtatgagggtgaagtttggcagttacccaagagacttttcctccaccttcctctgtgcccgagctgttttatctgcattttactgtctgctttttttggctgcttatagtttttaaaaaagtaatttccttaaatccagaaggctaaaaatgaagctgaaacttaaagtggcggtgtttgtccaaaataacggggctcctgctctgccagtcagtaccctcaagtcactcctgatcctcaacctccatgcctaaggctggttcaagagaccacataatatctgccttttattacatacatgatgggtgcatgggattctgcgtgccctttgcttgatatagactgctaaggtgagatggggaatatcagagtcagctgctgcttgaggaagcagaacacacagctggaggcttggaacatgtgggtccctatgagtgtagagcccatatccccatagagtctacctagagcaggggtcgccaaatgttttcttaaagagcctgatagtgtatatgttaggctttgtgagccaggtatttacagcaactcaattctaccactgtggtatgaaaacagctatagacaatcataaatgaatgatcatggctatgttttaataaaactttacagacactgaacttgaacttccattgtgatatgaaaacagctatagacaatcataaatgaatgatcatggctatgttttaataaaactttatggacactgagcttgaacttcatatatcagtcatgtgacacaaaatatcattcttctttttatttgttttcacccatttgaaaaatgtaaaaactattcttagctgtacagaaacagatggtgggtcagatttgactcactgcccatagtttccagaccatgatgttcaggttcatggaagcacttcactctacactaatttattcatccattcatcacatatgtgatgagcacatacagacacacctcagagatattgcaggctccactccagatcaccacaataatgtgaatattgcaataaagcaagtcatacacatt

SEQ ID NO: 176660 - DNA, 2472 bp, Artificial Sequence
  derived and/or modified sequence
atggggggccgggtcttcctggtgtttctggccttctgcgtatggcttactctccctggcgctgaaacacaggattcaaggggatgtgcccgatggtgccctcaagacagtagttgcgtaaatgctaccgcatgccgttgtaatccaggattttcaagcttcagcgagattatcacaacgcccatggagacttgtgatgacatcaacgagtgtgcgaccctgagtaaggtgagctgcgggaagttttcagattgctggaacacagagggaagctacgattgcgtgtgttcgccaggctatgagcccgtgtcaggggctaagacttttaaaaacgaaagtgaaaatacatgtcaggatgtagatgaatgccagcagaaccccaggctatgcaaatcatacggaacatgcgtgaacacactcggatcttacacgtgtcaatgcctgcctggattcaagctgaaaccagaggaccctaagctttgcacagatgtaaacgagtgcacatctgggcagaatccttgtcactcaagcacccattgcctgaataacgtgggctcttatcagtgtagatgcaggcctgggtggcagcccatccccggatcacccaatggacctaataacaccgtctgcgaggacgtggacgagtgttccagtgggcagcaccagtgcgattctagtaccgtctgtttcaacacagtcggctcctatagctgcaggtgccggcctggctggaagccacggcacggaattccaaataaccagaaggacactgtttgcgaggacatgaccttctccacttggacacctcctcccggagtacactcacaaaccctatccaggttttttgacaaggttcaagacctcggcagagattataagccagggctggcaaacaacaccattcagtcaatcctgcaggctctggacgagctgctcgaagcgcctggagacctcgagaccctgccgcgcttacagcaacattgtgtggcaagtcacctgttggacggcctcgaagatgttctgcgcggcttgagtaaaaacttgtcaaacggactcctaaacttctcgtatcccgccggtaccgagctctcgttagaggttcagaaacaagttgatagatctgtcacactgcggcaaaatcaggcagttatgcaactggactggaaccaggcacaaaagtccggcgatcccggccccagtgtggtcggcttggtttctatcccgggcatggggaaactgctggcagaggcaccactggttcttgaacccgaaaagcagatgcttctccacgagacccaccaaggactgctgcaggatgggtctcctatcttgcttagcgatgtcatctctgcgtttctgagcaataacgatacgcagaacctatcgtcaccagtcacttttacgttctctcacaggtctgtcatcccaaggcagaaggtgctgtgcgtgttttgggaacatggacagaacggctgcggacattgggccaccaccggctgcagtactattggaactagagacacttctaccatatgccgttgcacacatctatcatcctttgctgtgctcatggcacattacgacgtacaagaggaagatccggtcttgacggtcattacgtacatgggcctgtcagtcagtctcctgtgcctcctactcgccgcccttacctttctgctgtgcaaagccattcagaatacaagtacttccctccacctgcagctctctttatgtctgttcctggctcacctgctgtttttggtcgcaatcgaccagactggccataaagtgctgtgcagcatcattgctggaaccctgcactacctgtacctggccaccctgacatggatgctgttggaagctctctatttatttctaacagcacgaaatcttactgtcgtgaattattcctcaatcaaccggttcatgaagaagctgatgttccccgtgggctacggcgtgccggccgtaactgtcgccatcagtgctgcctcacgaccacacttgtacggcactccctcacggtgttggcttcagcccgagaaagggtttatctggggcttcctaggaccagtgtgtgcaatcttcagcgtgaatcttgtgctgttcttggtgaccttgtggattctgaaaaatagactgtcgagcctgaattcggaggtcagcacgctgcggaatacaagaatgctcgcattcaaagcaacggcccagctgtttatcctgggctgcacctggtgtctgggaatcctgcaagtcgggccggctgctagggtgatggcctatttatttacaatcattaactccttacaaggtgtcttcatctttctggtatattgtctgcttagccagcaagtcagagagcagtacgggaagtggtctaagggaatcagaaagcttaagactgagtcagaaatgcacacgctctcttctagcgcaaaagcagataccagcaagccatcaacggtgaactag

SEQ ID NO: 176661 - DNA, 2472 bp, Artificial Sequence
  derived and/or modified sequence
atgggaggtcgggtgttcctggtcttcttagccttctgcgtctggctgacattgcccggcgccgagacacaagattctcggggctgcgcaaggtggtgcccccaagattcctcatgtgtaaacgccaccgcctgcagatgtaatccagggttttcgagctttagtgagataatcaccacacctatggagacctgcgacgatattaacgagtgtgccacgttgagcaaggtctcctgtggcaaattctcggattgttggaacactgagggatcctatgactgtgtctgttctccaggatatgaaccggtgtctggagccaaaactttcaaaaacgagagcgaaaatacgtgtcaggatgttgatgagtgtcaacagaatcctcggttgtgtaaaagttacgggacatgcgtgaacacccttgggagttatacctgccagtgcttgccaggtttcaagttgaagccagaggatcccaagctctgtacagacgttaatgaatgtactagcggccagaacccatgccattcatcgacccactgcctgaataacgtgggaagctaccagtgccgctgtcgacctggatggcagcctatccctggatccccaaacggtcccaacaacacagtctgtgaggatgttgatgaatgtagttcaggtcagcaccaatgcgattcttcaaccgtatgcttcaatactgtgggcagttacagttgtcggtgtcgccctggatggaaaccccggcatggcattcctaataaccagaaggacacggtgtgcgaggacatgacattttccacatggactcccccaccaggcgtccattctcagacactaagccgtttttttgacaaggtgcaagatctggggagggactacaagcccgggctagccaataacaccattcagtcaattctgcaggctttggatgagctgctagaggcaccaggcgatctcgagaccctgcccaggttgcaacagcattgcgtggcttctcatcttttggacggcctcgaggatgtactgagaggcctctctaagaatctgtccaatggcctgctgaacttctcataccctgctggaaccgaactttcattggaagtacagaaacaggtcgacaggtccgtgacactgagacagaaccaggctgttatgcaactggactggaatcaggcacagaaatctggcgatcccggaccatcagtggtgggtttggtctctatccctggaatgggaaagctattggcagaagcccccctcgtcctcgagcccgagaaacagatgctgttgcacgaaacccatcagggcctgctccaggacggcagccctattttactgagtgacgtgatctcagcctttttgagcaataatgatacccagaatctgagtagtccagtcacttttaccttctcacatcgctctgttataccccggcagaaggtgttatgtgtcttctgggagcacggtcagaatgggtgtggacactgggctactaccggatgctcaacaatcggcacccgcgatacatctacaatatgccgatgtacccatctttcgtcttttgctgtactgatggcgcactacgatgtgcaggaggaggacccagtcctgacagttattacctatatgggcctgtcagtatcactcctgtgcctcctacttgccgctctgacattccttctgtgcaaggctattcagaacacctctacttctctgcacctgcaattgtcactctgcctgttcctcgcccatcttctgtttctggtcgctattgaccagacagggcacaaggttctctgttccattatagcagggactctgcattatctatatctcgctacccttacctggatgctcctggaagccctgtacctgttcctaactgctcgcaacctgactgttgtaaactactctagcatcaatcgctttatgaagaaactcatgtttcccgtggggtatggtgtccccgccgtgacagtcgccatcagcgctgcttcccggccacacctgtatggtacccccagcaggtgttggctccagcctgagaaagggttcatctggggctttcttgggccagtgtgtgctatcttcagtgtgaatctcgtgttattcctcgtgactctgtggatcctgaagaaccgcctgtcctctcttaacagtgaagtcagcaccctgcgtaataccagaatgctggccttcaaggcaacagcccagttattcatcttgggctgcacatggtgcctgggaatcctacaggttggacctgcagcacgtgtgatggcatacctctttactattattaatagcctgcagggagtattcatctttctcgtgtattgtttgctgtcccagcaggtcagggagcagtacggaaaatggtcgaaaggcattagaaagctgaagaccgagtccgagatgcacacactgagtagctccgccaaagcggatacatctaaaccaagcactgtgaattag

SEQ ID NO: 176662 - DNA, 2472 bp, Artificial Sequence
  derived and/or modified sequence
atgggcggccgggtcttcctggtgttcctggccttctgtgtgtggctgaccctgcctggagctgagacccaggacagccggggctgtgcccgctggtgcccccaggacagcagctgtgtgaatgccacagcctgccgctgcaaccctggcttcagcagcttcagcgagatcatcaccacccccatggagacctgtgatgacatcaatgaatgtgccaccctgagcaaggtgtcctgtgggaagttcagtgactgctggaacacagagggcagctatgactgtgtgtgcagccctggctatgagcctgtgtctggggccaagaccttcaagaatgaaagtgagaacacctgccaggatgtggatgagtgccagcagaacccccggctgtgcaagagctatggcacctgtgtgaacaccctgggcagctacacctgccagtgcctgcccggcttcaagctgaagccagaggaccccaagctgtgcacagatgtgaatgaatgtaccagcggccagaacccctgccacagcagcacccactgcctgaacaacgtgggcagctaccagtgccgctgcaggcctggctggcagcccatccctggcagccccaacggccccaacaacacagtgtgtgaagatgtggatgaatgtagcagcggccagcaccagtgtgacagcagcacagtgtgcttcaacacagtgggcagctacagctgccgctgccggcccggctggaagcccaggcatggcatccccaacaaccagaaggacacagtgtgtgaggacatgaccttcagcacctggaccccacctcctggggtgcacagccagaccctgagccgcttctttgacaaggtgcaggacctgggccgggactacaagccaggcctggccaacaacaccatccagagcatcctgcaggccctggatgagctgctggaggcccctggggacctggagaccctgccccggctgcagcagcactgtgtggccagccacctgctggatggcctggaggatgtgctgcggggcctgagcaagaacctgagcaatggcctgctgaacttctcctacccagctggaacagagctgagcctggaggtgcagaagcaggtggacagatctgtgaccctgcggcagaaccaggccgtgatgcagctggactggaaccaggcccagaagagcggggaccccggccccagcgtggtgggcctggtgtccatccctggcatgggcaagctgctggccgaggcccccctggtgctggagcctgagaagcagatgctgctgcacgagacccaccagggcctgctgcaggacggcagccccatcctgctgagtgatgtgatcagcgccttcctgagcaacaatgacacccagaacctgagcagccctgtgaccttcaccttcagccacaggagcgtcatcccccggcagaaggtgctgtgtgtgttctgggagcacggccagaatggctgcggccactgggccaccaccggctgcagcaccatcggcacccgggacaccagcaccatctgccgctgcacccacctgagcagctttgctgtgctgatggcccactatgatgtgcaggaggaggaccctgtgctgaccgtcatcacctacatgggcctgtctgtgtccctgctgtgcctgctgctggccgccctgaccttcctgctgtgcaaggccatccagaacaccagcaccagcctgcacctgcagctgagcctgtgcctcttcctggcccacctgctcttcctggtggccatcgaccagacaggccacaaggtgctgtgcagcatcatcgccggcaccctgcactacctgtacctggccaccctgacctggatgctgctggaggccctgtacctgttcctgacagccaggaacctgactgtggtgaactacagcagcatcaaccgcttcatgaagaagctgatgtttcctgtgggctacggcgtgcctgctgtgacagtggccatctctgctgccagccggccccacctgtatggcacccccagccgctgctggctgcagcctgagaagggcttcatctggggcttcctgggccctgtgtgtgccatcttctctgtgaacctggtgctcttcctggtgaccctgtggatcctgaagaaccggctgagcagcctgaacagcgaggtgtccaccctgaggaacaccaggatgctggccttcaaggccacagcccagctgttcatcctgggctgcacctggtgcctgggcatcctgcaggtgggccctgctgcccgggtgatggcctacctgttcaccatcatcaacagcctgcagggcgtcttcatcttcctggtgtactgcctgctgagccagcaggtgcgggagcagtatggcaagtggagcaagggcatcaggaagctgaagacagaaagtgagatgcacaccctgagcagcagcgccaaggctgacaccagcaagcccagcacagtgaactag

SEQ ID NO: 176663 - DNA, 2472 bp, Artificial Sequence
  derived and/or modified sequence
atgggcggccgggtgttcctggtgttcctggccttctgcgtgtggctcaccttgccaggagccgagacacaggacagccggggctgcgcccgctggtgcccccaggactcttcctgtgtgaatgcaaccgcttgtcgttgtaacccaggcttttcgtctttttctgagatcattacgacgccaatggaaacgtgcgacgacatcaacgaatgcgcaactctcagtaaggtcagctgtgggaaattttcagactgttggaacacagaaggaagctatgactgcgtgtgctcccccggatacgagcctgtctcaggagctaaaacgtttaagaatgagagcgaaaatacttgccaggatgtggacgagtgtcagcaaaaccccagactgtgcaagagttacgggacatgtgtgaacaccctcggaagttatacgtgccagtgcctgcccggttttaagcttaagcctgaggatcctaagttatgcactgatgtaaacgagtgtacgtctggacagaacccatgtcactcaagcacccattgcctcaataatgtgggatcttaccaatgtcggtgtcgccccggatggcagcccatcccaggcagccctaatggacctaataacacagtgtgcgaggacgtggacgaatgcagttcagggcagcatcaatgtgattcatcgaccgtgtgctttaatactgtcggctcctatagctgtaggtgtaggcccgggtggaagcctcgtcacggcattccaaataaccagaaagacacagtgtgcgaagatatgacattcagcacttggacaccacctccaggtgttcattcgcagaccctctcgcgcttttttgataaagtccaggatctcggaagagactacaaacccggtcttgccaacaataccattcagagtatccttcaagcactcgacgaactgctggaagctccaggggacttggaaactcttcctcgcctccagcagcactgtgttgcttcacacctcctggatgggctggaagacgtgctgcggggtctgtccaagaatctgagcaatggcttactcaacttctcctatcctgccggcaccgagctgtccctagaggtccagaaacaagttgacagatctgttacgctgcgccagaaccaagctgtcatgcaattggactggaaccaggcccaaaagagcggggatcccggcccaagcgtggtaggtctagtcagcatacccggcatggggaagcttttagcagaagccccattggttctggagccggagaaacagatgttgctgcacgagacacatcagggactgctacaggatggttcaccaattctcctgtccgacgtcattagcgctttcctgagcaataatgatacccagaacctgtcttctccagtgacttttaccttttcacatcgctccgtgattccaagacagaaggtgctgtgcgtgttctgggagcacggccaaaatggatgcgggcactgggcaactacaggctgttccaccatcggaactcgggacacctcaacaatctgccgatgcacgcacttgagctcttttgcagtgcttatggcccactatgatgtgcaggaagaggatccggtgttgactgtaatcacttacatgggtctctctgttagtcttctctgtcttttgttagctgctctgacttttctgctttgtaaggcaatccagaatacatctacctcccttcatctccagcttagcttgtgtctcttcctggcccatctcctctttctcgtggccattgatcagactggccataaggtgctctgcagcataatcgcgggcacactgcactatctgtacctcgccactctgacttggatgctccttgaagccctgtacttgttcctcactgcccgcaaccttacagtagtaaactacagtagcatcaatagattcatgaaaaagctgatgtttcccgttggatacggcgtgccagccgtgaccgttgctatctccgccgcaagtagacctcacctttatggcacccccagcagatgttggctgcagcccgagaaagggttcatatgggggttcctaggccccgtgtgcgcaatcttttctgtgaacctggttttgtttctggtcaccctgtggattctgaaaaatcgccttagttccctaaattctgaagtctctacactacggaatacaaggatgcttgcatttaaggctactgcacaactgttcatactgggctgcacctggtgtctcgggatcttacaggttggaccggccgcacgcgtgatggcctacctgttcacgatcataaacagcctgcagggcgtattcatatttcttgtgtattgcctattgtcacaacaggtccgtgaacagtatggtaaatggtccaagggcatcagaaagcttaaaactgaatctgagatgcacactctgtcctccagcgctaaagctgacacttccaagccaagcactgtcaattag

SEQ ID NO: 176664 - DNA, 2472 bp, Artificial Sequence
  derived and/or modified sequence
atgggcggccgggtgttcctggtgttcctggccttctgcgtgtggctgactctgccaggcgccgagacccaggatagccgtggctgcgccagatggtgccctcaagattcatcctgtgtgaatgccactgcatgccgctgcaaccccggcttttcatcctttagcgaaatcataaccacaccgatggaaacatgtgatgatatcaacgaatgtgcaaccctatctaaagtttcttgcggcaaatttagtgactgctggaataccgagggttcatacgactgcgtgtgttcaccaggatatgagccagtgagtggggcaaaaacatttaagaatgaatctgagaacacctgccaggatgtggatgagtgtcagcaaaaccctcgtctgtgtaagtcctatggaacttgtgtgaataccctgggatcttacacatgtcagtgtttgccaggcttcaagctgaaacccgaggatccgaagctatgtaccgacgtcaatgagtgcacctctggccaaaacccttgtcacagcagcactcactgtctgaacaatgttggttcataccaatgcaggtgtagacctggatggcagcccatccctggatccccaaatggaccgaataatacagtgtgtgaggacgttgatgagtgtagttcaggacagcaccagtgtgattccagcacggtgtgcttcaatactgttggctcgtattcctgtaggtgtcggcccgggtggaagcctcggcacgggatcccaaacaaccagaaggatacagtctgtgaagatatgacattcagcacttggaccccccctcccggcgttcatagccaaactctttcaagattttttgataaggttcaagatctgggtcgtgactacaaaccaggcctggccaataatactattcagagtatcttgcaagcgctagacgagctcctggaggccccaggcgatctagagacactcccccgtctgcagcagcactgcgtggcctcacacctgctggatgggctggaggacgtgctgcggggcttatctaagaacctgtctaacggactgcttaactttagctatcccgctggaaccgagctctctctcgaggtacaaaaacaggtggataggtccgtgaccctgcgacagaaccaggcagtgatgcaactggactggaatcaagcacagaaatcgggggatcccgggccatctgtggttggactggtttctatacctggaatggggaagttactcgccgaggcacccctggttctggaacccgaaaagcagatgctcctccacgaaacacatcaggggctgctacaggatggatctcctattctgctcagcgatgttatttctgccttcctgagcaacaacgatacacagaatctcagcagcccagtgacatttacattttcacatcgttctgtgattcctaggcagaaagtgctgtgtgttttctgggaacatggacagaatggctgcgggcactgggccaccaccggatgttcgaccatcggtaccagagatacctccactatctgtagatgcactcatctgagctcattcgccgtgctgatggcccactatgacgtccaagaagaagatccagttctgaccgtcatcacttatatgggcctatctgtctcattactctgtctgctgctggccgccctgacattcctgttgtgtaaggccatccagaataccagcacaagccttcacctccagctgtccctgtgtctgttcctggcacacctgctgttcctagttgccattgaccagacaggtcacaaggtgctctgtagtattatcgcggggaccctacattatctgtacctggccacgcttacttggatgcttttggaagccctttatctgttcctgactgcaaggaatctgaccgtggtgaactactctagcatcaatagattcatgaagaagctcatgtttcccgtgggctacggggttccagctgtgaccgttgccatctcggccgcatcacggccgcatctatacgggaccccatccaggtgctggctgcagcccgagaaaggattcatctggggcttcctgggccctgtatgcgcaatcttttccgtgaacctggtgttgttcctcgtgacactgtggattttaaagaatcggctttcaagtctgaactctgaggtcagcacactgagaaatactcggatgctcgctttcaaggcaacagctcagctgttcatcttgggatgcacctggtgtcttgggattttgcaggtgggcccagccgcgagagttatggcctacttgttcaccattattaacagcctacagggcgtttttatttttttagtgtattgtctgctctcacaacaggtgagggaacagtatggaaaatggtcgaaagggattcggaagctgaaaacggaaagcgaaatgcacaccctgtcctcctcagctaaagctgacaccagcaaaccgtcaaccgtgaattag

SEQ ID NO: 176665 - DNA, 2472 bp, Artificial Sequence
  derived and/or modified sequence
atgggcggtagagtttttctggttttccttgccttctgcgtatggctgaccctgccgggagctgaaacccaggactcccgaggctgcgcgaggtggtgcccacaagatagcagctgcgtgaacgccacagcctgccgctgcaacccagggttctcaagcttttctgagattatcacaacccctatggagacatgtgatgatataaacgaatgtgcaacactgtctaaggtgagttgcggtaagttcagcgactgctggaacactgagggaagctatgactgcgtgtgttcaccgggatacgagccagtcagtggtgccaagacctttaagaacgaaagcgagaacacctgccaggacgtcgatgagtgccagcaaaaccctcggctttgtaaatcttatgggacatgcgttaacaccttaggctcctatacctgccagtgtctgccaggctttaagctgaagcccgaagacccaaaactgtgcactgatgtgaatgagtgtacaagcggacagaacccctgccactctagtactcattgtctgaacaacgttggaagctatcagtgtaggtgtcggcctggttggcagccgatcccgggatccccaaacggacccaacaacaccgtgtgcgaggacgttgatgagtgcagcagcggtcagcatcagtgtgatagttctacggtttgtttcaatactgtcggcagctactcatgtcggtgccgcccaggctggaaaccacggcacggtatccctaacaatcagaaagacaccgtctgcgaagatatgacatttagcacctggactccccctccaggggtgcattcacagactctgagcagattcttcgacaaggtgcaagacctggggcgtgattataagcctggcctcgctaataacacgatccagagcattctgcaagcactagacgaactactcgaagcacctggtgatttagagactctcccacgcttgcagcaacattgtgtcgccagccacttgcttgatggcttggaggatgtgctgaggggactcagcaaaaatctttcaaatggcctgcttaacttctcctatccagcaggtactgaactgagccttgaggttcaaaagcaagtcgatagatccgtgacactgcggcagaatcaggctgtcatgcagctggattggaaccaggctcagaagagcggagacccaggaccatcagtcgtcggactggtgagcatccccggaatgggcaaattactagccgaggcccctctcgttcttgagccagagaaacagatgttgctccatgagacacatcagggtctgctccaggacggaagcccgattcttctttcagacgttatttccgctttcctgtctaataatgatactcagaatttatcttctccagtcactttcaccttctcccataggtcggtcattcctcgccagaaggtgctgtgtgtcttctgggagcatgggcagaatgggtgcgggcattgggctaccaccggatgttcaacaatcggaacacgggatacgagtaccatctgcaggtgtacgcatctgagctctttcgccgtattgatggcccattacgatgtgcaggaagaagaccccgttctgactgtgattacctacatggggctgtctgtctcattgctctgtctgctgctcgcggctctcacattcctgttgtgtaaagcgatccaaaatacttccacatctctgcacctccagctctctttgtgcttgtttctggcccatttgctcttcctggtggcgatcgaccagaccggccacaaggtcctgtgctccattattgccggaaccctgcattatctatatctggccaccctgacttggatgctcctggaggcgctgtatctgttcctaacggcccgaaatcttacagtggttaattattcgagcatcaatagattcatgaaaaaactgatgttcccggtgggctacggggtcccagccgtgaccgttgctatatctgccgcaagtaggccccatttgtacggtaccccctccagatgctggctgcaaccagagaaaggcttcatatgggggtttctgggcccagtgtgtgctatattctcggtgaacctggttctctttctcgtgaccctttggattcttaagaacagactgtcaagcctgaacagcgaggtctcaaccctgaggaatactcggatgctggcgttcaaagcaaccgcccagctgtttatcttggggtgtacctggtgcctgggcatcttgcaggtgggccctgccgcaagagttatggcatacttgttcaccattatcaactctttacaaggtgtttttatcttcctcgtgtattgcctgctgtcgcagcaggttagagagcagtatggaaagtggagcaaaggtattaggaaactgaagacagaaagtgaaatgcacacactgtcatcgtcagccaaggcggacacctctaaaccatccactgttaattag

SEQ ID NO: 176666 - DNA, 2472 bp, Artificial Sequence
  derived and/or modified sequence
atgggtggaagggtgtttcttgtgtttctggccttttgcgtatggctgacattaccgggagccgagactcaggactcaaggggctgcgcgagatggtgtcctcaagacagctcttgtgtgaatgcaacagcttgccgctgtaacccgggattcagctctttttctgagatcatcactactccaatggaaacatgtgatgatataaacgagtgtgccacactatctaaggtctcctgtggcaaattctcagattgttggaacacggagggatcgtatgattgtgtgtgtagtcctggctatgagcctgtgtcgggtgcaaaaaccttcaagaacgagtcagaaaatacttgtcaggacgtcgacgagtgccagcagaatcctcggctatgtaaaagttatgggacttgtgtaaatactcttggatcctacacctgccagtgtctgcctggtttcaaactgaaacctgaggatcctaaattgtgcactgacgtaaacgagtgtaccagtggccagaatccctgccactcctccacgcattgcctgaataatgtgggcagctaccagtgccggtgccgcccagggtggcagcctattccagggtcaccaaacgggccaaataatacggtctgcgaggacgtcgatgaatgctcatctggccagcatcagtgcgattcgtcaacggtttgcttcaatactgtaggctcttatagctgtcgctgtcgtcccggttggaaacctcgccacggcattcctaacaaccaaaaggacaccgtgtgtgaggacatgacattttcaacttggacacccccacctggtgtgcattctcagacactgtcacgtttttttgacaaagtccaggacctcggccgtgactataagccgggacttgctaacaataccatccagagtatcctgcaagccctcgacgaactactcgaagcaccaggtgacctcgagacccttcccagactccagcagcattgcgttgcgagtcaccttctagatggactggaggacgtgctgcggggtctctcgaaaaacctttcaaacggtctcctgaatttttcgtaccccgctggaaccgaactcagtcttgaagttcaaaaacaggtcgaccgctctgtcacactccgccagaatcaagccgtgatgcagcttgactggaatcaggcacaaaaaagcggggatccaggcccaagcgtcgttggcctagtaagcattccgggtatggggaagttattggcagaggcgcctctggtgttagagccggaaaaacaaatgttgctccacgagacccatcagggcctgttgcaggatggtagccctatcctgctgtcggacgtcatctctgcatttttatccaacaacgacacgcaaaatctctcttctcctgtcacctttacttttagtcacaggagtgttatccctcgccaaaaagtcttgtgcgttttctgggaacatggccagaacgggtgcgggcactgggccactacagggtgctcaacaattggaacacgcgatacatcgaccatctgcagatgtacccacctttcctctttcgctgtgttaatggctcactatgacgtccaggaagaagaccccgtgctcacagtcataacatatatgggcctttctgtcagtctcctgtgtctgttactcgcagcgctgaccttcttattatgcaaagccatccaaaacaccagcacttctctacacctccagttatctctctgtctgttcctcgcacatctacttttcctggtcgccatcgatcaaactgggcacaaggttttgtgcagtattatcgccggaaccctgcattacctctaccttgcaacattgacttggatgctgctcgaggctctttacctttttctaacagcaaggaatttgaccgtagtgaactactcatccataaataggttcatgaaaaagttaatgtttccagtggggtatggcgttcccgcagtaaccgtagcgattagcgccgctagtcgcccacatctatacgggacaccctcccgctgctggctgcagcctgaaaagggcttcatctggggctttctgggccctgtctgtgccatcttttcagttaatttggtactcttcctggtgaccctttggatcttgaagaatcgtctgtcatcacttaattccgaggtaagtacactgagaaacacgaggatgctggcttttaaggctacagcccaactcttcatcctgggatgtacatggtgccttggcatcctacaggtagggcctgcggctcgggttatggcatatttattcaccattataaacagcctgcagggagtgtttattttcctggtctattgcttgctgtctcagcaggtcagggagcagtatggcaaatggagtaagggcatcaggaagctcaagaccgagtcagagatgcacaccttatcttcctctgctaaagcagatacctcgaagccttccaccgtgaactag

SEQ ID NO: 176667 - protein, 1556 aa, Artificial Sequence
  derived and/or modified sequence
MPLLHRKPFVRQKPPADLRPDEEVFYCKVTNEIFRHYDDFFERTILCNSLVWSCAVTGRPGLTYQEALESEKKARQNLQSFPEPLIIPVLYLTSLTHRSRLHEICDDIFAYVKDRYFVEETVEVIRNNGARLQCRILEVLPPSHQNGFANGHVNSVDGETIIISDSDDSETQSCSFQNGKKKDAIDPLLFKYKVQPTKKELHESAIVKATQISRRKHLFSRDKLKLFLKQHCEPQDGVIKIKASSLSTYKIAEQDFSYFFPDDPPTFIFSPANRRRGRPPKRIHISQEDNVANKQTLASYRSKATKERDKLLKQEEMKSLAFEKAKLKREKADALEAKKKEKEDKEKKREELKKIVEEERLKKKEEKERLKVEREKEREKLREEKRKYVEYLKQWSKPREDMECDDLKELPEPTPVKTRLPPEIFGDALMVLEFLNAFGELFDLQDEFPDGVTLEVLEEALVGNDSEGPLCELLFFFLTAIFQAIAEEEEEVAKEQLTDADTKDLTEALDEDADPTKSALSAVASLAAAWPQLHQGCSLKSLDLDSCTLSEILRLHILASGADVTSANAKYRYQKRGGFDATDDACMELRLSNPSLVKKLSSTSVYDLTPGEKMKILHALCGKLLTLVSTRDFIEDYVDILRQAKQEFRELKAEQHRKEREEAAARIRKRKEEKLKEQEQKMKEKQEKLKEDEQRNSTADISIGEEEREDFDTSIESKDTEQKELDQDMVTEDEDDPGSHKRGRRGKRGQNGFKEFTRQEQINCVTREPLTADEEEALKQEHQRKEKELLEKIQSAIACTNIFPLGRDRMYRRYWIFPSIPGLFIEEDYSGLTEDMLLPRPSSFQNNVQSQDPQVSTKTGEPLMSESTSNIDQGPRDHSVQLPKPVHKPNRWCFYSSCEQLDQLIEALNSRGHRESALKETLLQEKSRICAQLARFSEEKFHFSDKPQPDSKPTYSRGRSSNAYDPSQMCAEKQLELRLRDFLLDIEDRIYQGTLGAIKVTDRHIWRSALESGRYELLSEENKENGIIKTVNEDVEEMEIDEQTKVIVKDRLLGIKTETPSTVSTNASTPQSVSSVVHYLAMALFQIEQGIERRFLKAPLDASDSGRSYKTVLDRWRESLLSSASLSQVFLHLSTLDRSVIWSKSILNARCKICRKKGDAENMVLCDGCDRGHHTYCVRPKLKTVPEGDWFCPECRPKQRSRRLSSRQRPSLESDEDVEDSMGGEDDEVDGDEEEGQSEEEEYEVEQDEDDSQEEEEVSLPKRGRPQVRLPVKTRGKLSSSFSSRGQQQEPGRYPSRSQQSTPKTTVSSKTGRSLRKINSAPPTETKSLRIASRSTRHSHGPLQADVFVELLSPRRKRRGRKSANNTPENSPNFPNFRVIATKSSEQSRSVNIASKLSLQESESKRRCRKRQSPEPSPVTLGRRSSGRQGGVHELSAFEQLVVELVRHDDSWPFLKLVSKIQVPDYYDIIKKPIALNIIREKVNKCEYKLASEFIDDIELMFSNCFEYNPRNTSEAKAGTRLQAFFHIQAQKLGLHVTPSNVDQVSTPPAAKKSRI

SEQ ID NO: 176668 - DNA, 6031 bp, Artificial Sequence
  derived and/or modified sequence
cttttcccatcgtgtagtcaagagtctgtgccagacttgaaggctttactttgttagccatgtgtttatgaacccccagcgctttccctagatcttttggctgataatctcaaacatggaggatgcttctgaatcttcacgaggggttgctccattaattaataatgtagttctcccaggctctccgctgtctcttcctgtatcagtgacaggctgtaaaagtcatcgagtagccaataaaaaggtagaagcgaggagtgaaaagctcctcccaacagctcttcctccttcagagccgaaagtagatcagaaacttcccaggagctccgagaggcggggaagtggcggtgggacgcaattccccgcgcggagtcgggcagtggcagcgggagaagcggcagccaggggcgcggcggggccggagagaggcggtcccctgggaggacggggtctcccctcgttgcctttgtagtggagaaggtggacaagtggcagtcggcgtgatcgcagggaagcggggccggcgcgggcggccgagggtccaggcgagcccgcgggcggacgggagatgccgctgctacaccgaaagccgtttgtgagacagaagccgcccgcggacctgcggcccgacgaggaagttttctactgtaaagtcaccaacgagatcttccgccactacgatgacttttttgaacgaaccattctgtgcaacagccttgtgtggagttgtgctgtgacgggtagacctggactgacgtatcaggaagcacttgagtcagaaaaaaaagcaagacagaatcttcagagttttccagaaccactaattattccagttttatacttgaccagccttacccatcgttcgcgcttacatgaaatttgtgatgatatctttgcatatgtcaaggatcgatattttgtcgaagaaactgtggaagtcattaggaacaatggtgcaaggttgcagtgtaggattttggaagtcctccctccatcacatcaaaatggttttgctaatggacatgttaacagtgtggatggagaaactattatcatcagtgatagtgatgattcagaaacacaaagctgttcttttcaaaatgggaagaaaaaagatgcaattgatcccttactattcaagtataaagtgcaacccactaaaaaagaattacatgagtctgctattgttaaagcaacacaaatcagccggagaaaacacctattttctcgtgataaactaaagctttttctgaagcaacactgtgaaccacaagatggagtcattaaaataaaggcatcatctctttcaacgtataaaatagcagaacaagatttttcttatttcttccctgatgatccacccacatttatcttcagtcctgctaacagacgaagagggagacctcccaaacgaatacatattagtcaagaggacaatgttgctaataaacagactcttgcaagttataggagcaaagctactaaagaaagagataaacttttgaaacaagaagaaatgaagtcactggcttttgaaaaggctaaattaaaaagagaaaaagcagatgccctagaagcgaagaaaaaagaaaaagaagataaagagaaaaagagggaagaattgaaaaaaattgttgaagaagagagactaaagaaaaaagaagaaaaagagaggcttaaagtagaaagagaaaaggaaagagagaagttacgtgaagaaaagcgaaagtatgtggaatacttaaaacagtggagtaaacctagagaagatatggaatgtgatgaccttaaggaacttccagaaccaacaccagtgaaaactagactacctcctgaaatctttggtgatgctctgatggttttggagttccttaatgcatttggggaactttttgatcttcaagatgagtttcctgatggagtaaccctagaagtattagaggaagctcttgtaggaaatgacagtgaaggcccactgtgtgaattgctttttttcttcctgactgcaatcttccaggcaatagctgaagaagaagaggaagtagccaaagagcaactaactgatgctgacaccaaagatttaacagaggctttggatgaagatgcagaccccacaaaatctgcactgtctgcagttgcatctttggcagctgcatggccacagttacaccagggctgcagtttgaaaagtttggatcttgatagctgcactctttcagaaatcctcagactgcacatcttagcttcaggtgctgatgtaacatcagcaaatgcaaagtatagatatcaaaaacgaggaggatttgatgctacagatgatgcttgtatggagcttcgtttgagcaatcccagtctagtgaagaaactgtcaagcacctcagtgtatgatttgacaccaggagaaaaaatgaagatactccatgctctctgtggaaagctactgaccctagtttcaactagggattttattgaagattatgttgatatattacgacaggcaaagcaggagttccgggaattaaaagcagaacaacatcgaaaagagagggaagaagcagctgccagaattcgtaaaaggaaggaagaaaaacttaaggagcaagaacaaaaaatgaaagagaaacaagaaaaactgaaagaagatgagcaaagaaattcaacggcagatatatctattggggaggaagaaagggaagattttgatactagcattgagagcaaagacacagagcaaaaggaattagatcaagatatggtcactgaagatgaagatgacccaggatcacataaaagaggcagaagggggaaaagaggacaaaatggatttaaagaatttacaaggcaagaacagatcaactgtgtaacaagagagcctcttactgctgatgaggaagaagcattaaaacaggaacaccaacgaaaagagaaagagctcttagaaaaaatccaaagtgccatagcctgtaccaatatctttcccttgggtcgcgaccgcatgtatagacgatactggattttcccttctattcctggactctttattgaagaggattattctggtcttactgaagacatgctgttgcctagaccttcatcatttcagaataatgtacagtctcaagatcctcaggtatccactaaaactggagagcctttgatgtctgaatctacctccaacattgaccaaggtccacgtgaccattctgtgcagctgccaaaaccagtgcataagccaaatcggtggtgcttttacagttcttgtgaacagctagaccagcttattgaagctcttaattctagaggacatagagaaagtgccttaaaagaaactttgttacaagagaaaagcagaatatgtgcacagctagcccgtttttctgaagagaaatttcatttttcagacaaacctcagcctgatagcaaaccaacatatagtcggggaagatcttccaatgcatatgatccatctcagatgtgtgcagaaaagcaacttgaactaaggctgagagattttcttttagatattgaagatagaatctaccaaggaacattaggagccatcaaggttacagatcgacatatctggagatcagcattagaaagtggacggtatgagctgttaagtgaggaaaacaaggaaaatgggataattaaaactgtgaatgaagacgtagaagagatggaaattgatgaacaaacaaaggtcatagtaaaagacagacttttggggataaaaacagaaactccaagtactgtatcaacaaatgcaagtacaccacaatcagtgagcagtgtggttcattatctggcaatggcactctttcaaatagagcagggcattgagcggcgttttctgaaagctccacttgatgccagtgacagtgggcgttcttataaaacagttctggaccgttggagagagtctctcctttcttctgctagtctatcccaagtttttcttcacctatccaccttggatcgtagcgtgatatggtctaaatctatactgaatgcgcgttgcaagatatgtcgaaagaaaggcgatgctgaaaacatggttctttgtgatggctgtgataggggtcatcatacctactgtgttcgaccaaagctcaagactgtgcctgaaggagactggttttgtccagaatgtcgaccaaagcaacgttctagaagactctcctctagacagagaccatccttggaaagtgatgaagatgtggaagacagtatgggaggtgaggatgatgaagttgatggcgatgaagaagaaggtcaaagtgaggaggaagagtatgaggtagaacaagatgaagatgactctcaagaagaggaagaagtcagcctacccaaacgaggaagaccacaagttagattgccagttaaaacaagagggaaacttagctcttctttctcaagtcgtggccaacaacaagaacctggaagatacccttcaaggagtcagcagagcacacccaaaacaactgtttcttctaaaactggtagaagcctaagaaagataaactctgctcctcctacagaaacaaaatctttaagaattgccagtcgttctactcgccacagtcatggcccactgcaagcagatgtatttgtggaattgcttagtcctcgtagaaaacgcagaggcaggaaaagtgctaataatacaccagaaaatagtcccaacttccctaacttcagagtcattgccacaaagtcaagtgaacagtcaagatctgtaaatattgcttcaaaactttctctccaagagagtgaatccaaaagaagatgcagaaaaagacaatctccagagccatcgcctgtgacactgggtcgaaggagttctggccgacagggaggagttcatgaattgtctgcttttgaacaacttgttgtagaattggtacgacatgatgacagctggccttttttgaaacttgtttctaaaatccaggtcccagactactatgacatcatcaaaaagcccattgccttaaatataattcgtgaaaaagtgaataagtgtgaatataaattagcatctgagtttattgatgacattgagttaatgttttcgaactgctttgaatacaaccctcgtaacacaagtgaagcaaaagctggaactaggcttcaagcattttttcatattcaggctcaaaagcttggactccacgtcacacccagtaatgtggaccaagttagcacaccaccggctgcgaaaaagtcacgaatctgactttgtccttctaaaggatatatttgaagaaaaacaaattgttcatgaaaatggaacattaaatcatgctgtataaagcaataacaattgattgaccacatgaaagtgtggcctgcactatattctcaattttaatattaagcactcaggagaatgtaggaaagatatcctttgctacagttttgttcagtatctaataagtttgatagatgtattggatacagtactggtttacagaggtttttgtacatttttgagatcattcatgtgtccagagatcttggaaaatattttttcacccacgatttattttgttattgatgatttttttttaaagtggtggtattaagggagagttatctacatggatgagtcttccgctatagcacagtttagaaaaggtgtttatgtcttaattaattgtttgagtacattctttcaacactacacatgaatgaatccaatcttataaccttgaagtgctgtaccagtgctggctgcaggtattaagtccaagtttattaactagatatttatttagtattgagagtaatttgtgaatttgttttgtatttataaaatttatacctgaaaaatgttccttaatgttttaaaccttttactgtgtttttattcctctaacttccttaatgatcaatcaaaaaaagtaacaccctccctttttcctgacagttctttcagctttacagaactgtattataagtttctatgtataactttttaactgtacaaataaaataacattttttcaaataaaaaaaaaaaaaaaaa

SEQ ID NO: 176669 - DNA, 4671 bp, Artificial Sequence
  derived and/or modified sequence
atgccactgttgcaccgaaagccatttgtccggcagaaaccccccgcagatctgcgacccgatgaagaagttttttattgcaaggtcacaaacgagatattcaggcactatgacgactttttcgagcggactatcctgtgtaactcactagtctggtcctgcgcagtcacaggccgacccgggctgacttaccaagaggcactagagagcgagaaaaaagcccgccagaacctgcagtcattccccgaacccttgattatccccgtcctatacctgacttcgcttacacaccggtcccggctccatgagatttgtgacgatatttttgcatatgtgaaggatagatacttcgtcgaagagaccgtggaagtcatccgaaacaacggagcccgcctccagtgtcgcatcctggaagtcctgccaccctcacaccaaaatggcttcgccaacggacacgtgaatagcgtcgatggagagactatcatcatttcagattccgacgactccgaaactcagtcttgtagttttcagaacggcaaaaagaaagatgccattgatcctctgctttttaagtataaggtacagccgaccaagaaggagctccacgagtctgccatcgtgaaggcaacccagattagcagaaggaagcacctgttctcccgggataagctgaaactgtttctgaagcagcattgtgagcctcaggacggcgtaatcaagataaaagcgagctcattgagcacctacaaaattgccgagcaagatttctcgtatttttttcccgacgatccccccacattcattttttccccggcgaatcgcaggcgcggcagaccacctaaacgaatacacatttcacaggaagacaacgttgctaacaagcagaccctcgcttcttacagatcaaaggcaaccaaggagagggataaactcctcaaacaagaggagatgaaatccctggcattcgagaaggcaaagctgaaacgcgagaaggcagatgccttagaggcaaaaaagaaagagaaggaagataaagagaaaaaacgtgaggaattaaagaagatcgtcgaagaggaaagactgaaaaagaaggaggaaaaggaacgactaaaggtggaaagagagaaagaacgcgaaaaactgagagaggagaagaggaagtatgtggaatacctcaagcagtggagtaaaccacgagaggatatggagtgtgacgatttaaaagagttgcccgaacccaccccggtgaagacgaggcttcccccggagatctttggcgacgccctcatggtgctggaatttctgaatgccttcggagagctgttcgatctgcaggacgagttccctgatggggtgacccttgaagtgctcgaagaggcccttgtgggcaatgacagcgagggacctttgtgtgagctcctgttcttctttctgactgccatttttcaggcaatcgctgaggaggaggaagaagttgcaaaagagcagctgacagatgccgacacgaaagacttgactgaagctctggacgaggatgccgacccaacgaagtccgctctcagtgcggtagcatcactggccgctgcatggccccaactccatcaaggatgctctttgaagtcactcgacctggactcatgcaccctcagcgagatactgcggctgcatatccttgcctctggtgcggacgtgacctcggcaaatgcaaagtatagatatcaaaaaagaggggggtttgacgccacagacgatgcttgtatggagctgcggctgtcgaacccatccctcgtgaaaaagttgtccagtacctcggtttatgacttgacaccaggcgaaaagatgaagatcttgcacgcactgtgtggaaagttgctcaccctggtgagtacacgcgattttattgaggactacgtagatatcctgcgacaggccaaacaggaatttcgggagctgaaagcggaacaacacaggaaggaaagggaagaggccgcagctaggatcaggaaacgcaaggaggagaagctgaaagagcaagagcagaagatgaaggagaagcaggaaaagctgaaagaagatgaacagaggaactctactgccgatattagcatcggcgaggaggagagagaggatttcgataccagcatagagtctaaggacactgagcagaaagaattggatcaagacatggtgaccgaggacgaggacgatccgggatcccacaaaagggggcggaggggcaagcggggccagaacggttttaaggaattcactaggcaggagcagatcaactgcgtcactagagagccacttaccgctgacgaagaagaagcactcaagcaagaacaccagaggaaagagaaagagctcttagaaaaaatccagagcgccatcgcttgcacaaacatttttcctttgggtagggatagaatgtatagacgttactggatctttccttccatccctggcctgtttatcgaagaagactattccggcttgaccgaagatatgttgctgccacgcccaagcagttttcagaacaatgtgcaatctcaggatccacaggtttcaacaaaaactggtgaaccacttatgtcggaaagcaccagtaatatagatcaggggccaagggatcatagcgtgcagctgccgaagccagtgcacaagcccaatagatggtgcttttatagcagctgtgaacagcttgaccaactcatcgaggctttgaattcccgaggccaccgagaatctgcgttgaaagaaaccctcctccaggaaaaaagccggatctgcgcacagctcgctcgattttcagaggaaaagtttcatttttcagataaaccacagcctgatagcaagccaacctactcacgcgggcggtcgagcaatgcttacgatcccagtcagatgtgtgccgaaaagcagctcgagttgcggctccgtgatttcctgctggacatcgaggacaggatctaccaaggcacccttggtgccatcaaagtgaccgatcggcacatatggcgcagtgctttagaatcaggtaggtacgagctactgagcgaggagaacaaggaaaacgggatcatcaagaccgtgaacgaagacgtggaagagatggaaatagacgaacagaccaaggtcattgtgaaagatcggctgctgggaatcaaaacggagactccaagcacagtgagcaccaacgcctcaacccctcaatccgtgagctcagtggtgcattatctggccatggccctcttccaaattgagcaggggatagaacgcagatttctgaaagcacccttggatgcttctgatagcggacggtcctacaagacagtcttggaccggtggcgagagtcactgttgtcatcagccagcctcagccaagtgttcctgcacctttccaccctggatcggagcgttatctggtctaagagcatcctgaacgcccgttgcaagatttgccgcaaaaagggcgatgcggagaacatggtgttatgcgatggctgtgacaggggccaccacacatactgcgtgcgaccaaagctgaagaccgttccagaaggggactggttttgtcctgagtgtcgacccaagcagaggagccgcagactcagctccagacagaggccttctctggagagcgatgaagatgttgaagattctatgggcggagaggatgacgaagttgacggcgatgaggaggagggacaaagcgaagaagaagagtacgaggtagagcaggatgaagatgattctcaggaggaggaggaggtttcactgccaaagcgggggcgacctcaagtgaggcttcctgtgaagacccggggaaagctttcttccagcttcagtagcaggggacagcagcaggaaccaggacgttatccatctcgcagtcagcaaagtaccccaaaaaccaccgtgtccagcaaaacaggtagatctctgcgcaaaatcaacagtgccccgccaacggaaactaagagcctgcggatagcatctaggagcacacgccactcacacggccctttgcaggcagatgtgtttgttgaactgctctctccgaggcgcaagcgccgcggaaggaaaagtgcaaataatacccccgagaatagccctaacttccccaatttcagagtcatagcgaccaaatcatctgagcaatccagaagtgtgaacatcgcctccaagctgagtctgcaggagagcgaaagcaagagacgttgtcgcaagcgacagagcccagagccctctcccgtgacactgggacgacgcagttctggccgtcagggcggcgttcacgagttgtcagcattcgagcaactggttgtggagctggtgagacatgacgactcttggccatttctcaaactcgtgtcgaagattcaggtgcccgactactatgatattatcaagaaaccgatagcattgaatatcattcgggagaaggtgaacaaatgcgaatacaaattggcgtccgaatttatcgatgatattgagctgatgttttccaattgcttcgagtacaatccaaggaacacttccgaagcgaaggccggaactaggcttcaagccttcttccacattcaggcccagaagctaggcctgcatgtcactccatccaatgtggaccaagtgagcacaccccccgccgccaagaaaagtagaatatag

SEQ ID NO: 176670 - DNA, 4671 bp, Artificial Sequence
  derived and/or modified sequence
atgcctctattgcataggaaaccctttgtgcggcagaaaccccctgcagatttgcgtcctgacgaggaggtattctactgtaaagtgacaaacgagattttccgtcattacgatgattttttcgagaggaccatcctgtgcaatagcctcgtctggtcctgcgccgtgaccggtaggccaggcctcacgtaccaggaggcattggagagcgagaaaaaggcaagacagaacttgcagtctttccctgaacccctcatcatccccgtgctatatctgacgtctctgacccatcgctcgcgcctccacgagatctgcgacgatatcttcgcctacgtgaaagaccggtatttcgtggaggagacagttgaggtcattcggaataacggcgctcgcctccagtgcaggatcctcgaagtgctgccaccctctcaccagaatggcttcgcgaacggtcacgttaactctgtcgacggggaaactattatcatctcagacagcgacgatagtgagacccaaagctgctccttccagaatgggaagaaaaaggacgccattgaccctcttctcttcaaatacaaggtgcagccaacaaaaaaagagctgcacgaatccgcgatcgtcaaagccacccaaatcagtagaagaaagcacctgttctcccgggataaattgaaactgttcctcaagcagcattgcgagcctcaggatggagtaataaagattaaggcatcgtcactctctacctacaaaattgccgaacaggacttcagttactttttccccgacgacccaccaacttttatcttttccccagcgaacagacgtcggggcagaccccccaaacgcattcatattagtcaggaggacaatgtggccaataagcaaaccctagcgtcctataggagtaaggccacaaaggaaagagacaagcttcttaaacaagaagagatgaagtccctagcttttgagaaggcaaagctgaagagagagaaagccgatgcattggaggctaagaagaaagagaaagaggacaaagagaagaagagggaagagctaaaaaagattgtagaggaagaaagactgaaaaaaaaagaggaaaaggagcgcctcaaggtggaacgagaaaaagagcgtgagaagcttagggaggagaagaggaaatacgtggaatatctaaagcagtggagcaagccacgtgaggacatggaatgcgatgatcttaaggagttgcctgagcccaccccggttaagaccaggttgcccccggagatttttggtgacgcgcttatggtccttgaattcttgaatgcctttggcgagctgtttgatctgcaggacgaatttcctgatggggtgacactcgaggtccttgaggaagccctagtggggaacgactctgaaggccccttgtgtgagctcctgttcttcttcctgactgccatcttccaggctatcgccgaggaggaggaggaagtggctaaagagcagctgaccgatgcggataccaaggacttaacggaggctctggacgaggacgcagaccctaccaagtcggccctgtctgcagtggctagcctagccgccgcttggcctcaactgcatcagggatgttcacttaagagtctggacctcgatagctgcacactgtctgagattctccggctgcatatcctcgcatcaggcgccgacgtgacaagtgccaacgcaaaatacaggtaccaaaaaagaggagggttcgacgcaaccgacgatgcttgtatggaactccgcctttctaacccctcactggtgaaaaaactttcctcaaccagcgtttatgatttgaccccgggcgaaaagatgaaaatcctgcatgccctttgcggcaagcttcttacactcgttagcacaagggactttatcgaagattatgtagacattctgcgccaagcgaagcaggagtttcgcgagctgaaggccgagcaacaccgcaaagaaagggaggaggctgctgctcgcattcggaagcggaaggaagaaaaactgaaagagcaggagcaaaaaatgaaggagaagcaggagaaactgaaagaagacgagcagaggaacagcactgctgacatctctataggagaggaagagagggaggatttcgacacttccatcgagagtaaggatactgaacagaaggagctggaccaggatatggtaaccgaggatgaagatgatcctggatcccacaaaaggggcaggaggggaaagagggggcaaaatgggttcaaagagttcacccggcaggaacagatcaactgtgtcaccagggagcctctgaccgccgatgaagaagaggcactaaaacaggagcaccaacgcaaagaaaaggagttactggaaaagatccagagtgccatcgcttgcaccaatatttttcctttaggccgagacaggatgtatcgacgttattggatattccctagcatccccgggctttttattgaagaggactattcaggtctcactgaagacatgctgcttccccggccatcttcgtttcagaataacgtgcaaagccaggacccccaggtgtcaaccaaaactggagaaccgctgatgagcgaaagtacttccaatatcgaccaaggccctcgcgaccactcagtgcagcttccaaagcccgtccacaagcccaaccgttggtgcttctacagcagttgcgagcagttagatcagttgatcgaggccctgaattcccgtggacaccgggagtctgccctcaaagagacattgctgcaggagaaatcgaggatttgtgcccagctggctagatttagcgaggagaagttccactttagtgacaaacctcaaccggattccaagcctacctacagcagaggcaggtcaagcaacgcatatgatccaagccagatgtgtgctgaaaagcagttggagctgcggttgcgggatttcctgctcgacattgaagatagaatttaccagggaacacttggagctatcaaagtcactgatcgccacatctggcgttcagctctagagagcgggagatacgagttgcttagcgaggagaataaagaaaatggcatcataaagactgttaacgaggacgtggaggaaatggaaatagacgaacagactaaagtcatcgtgaaggatcgcctgctgggtataaagaccgagacaccctcaacagtgagcaccaacgccagcactcctcagtcggtctcctcagtcgtgcattatctggctatggccctatttcaaatcgagcagggcatcgagagacggttcttaaaagcacccctagatgcttccgactcggggcgatcctacaagaccgtgctggatcggtggcgagaatcactgctgtccagtgccagtctgtcacaggtattcctgcacctgagtactctcgaccggtctgtaatttggagcaaaagcattctcaatgccagatgtaagatctgtagaaagaagggtgacgctgaaaacatggtcctctgtgacggttgtgatcgggggcatcatacttattgcgtgcgtcccaagctcaagacagttcccgagggcgactggttctgccccgaatgcagaccaaaacagaggagccgcagactgagctctcgacaaaggccgtccctggagagtgacgaggatgtcgaggattctatgggaggcgaggacgatgaagtggatggggatgaagaggagggccaatccgaggaggaggagtacgaagtggagcaggacgaagacgacagccaggaagaggaggaagtctctcttcctaaaagaggaaggcctcaagtccgactgccggttaaaacccggggcaaactgtctagctccttttcctcaaggggccagcaacaagagccaggccgatatcctagcagatcccagcagtcgacccccaaaaccacagtcagctctaaaactggtcgcagcctgcgcaaaatcaacagcgcacctccaaccgaaaccaagtcactgcgaatcgctagtcgaagtacccgccatagtcacggtccgctgcaggcggatgtgttcgtagagctgctgagcccaagacggaagcgcagggggagaaaatccgccaataatacccccgaaaattctcccaatttccccaacttcagggttattgccacgaaatcttccgaacagtcccggtcggttaacatcgcctcaaagctttcccttcaggagagcgagagcaagcggcggtgtcggaagcgccagagccccgagccttcacccgttacattgggtcgccgttcctctggaagacaaggaggcgtgcatgaactctccgcttttgagcaactcgtggtggagctggtccgtcacgacgactcatggcctttcctgaagctggtgtccaagatccaggtgcccgattattatgatattattaagaaaccaatagccctgaacatcattagggagaaagtgaataaatgtgagtacaaactggctagtgagtttattgatgacatcgagctcatgttctctaactgtttcgaatataacccccgaaacacaagcgaagccaaagctggtacacggcttcaggccttttttcatatacaagcccagaagctcggccttcacgtaacccctagtaacgttgatcaggtttcaacgccccccgctgcaaaaaagtccagaatctag

SEQ ID NO: 176671 - DNA, 4671 bp, Artificial Sequence
  derived and/or modified sequence
atgcccctgctgcacaggaagccctttgtgcggcagaagcccccagctgacctgcggccagatgaggaggtgttctactgcaaggtgaccaatgagatcttccgccactatgatgacttctttgagaggaccatcctgtgcaacagcctggtgtggagctgtgctgtgacaggccggcccggcctgacctaccaggaggccctggagagcgagaagaaggcccggcagaacctgcagagcttccctgagcccctcatcatccctgtgctgtacctgaccagcctgacccacaggagccggctgcacgagatctgtgatgacatctttgcctacgtgaaggaccgctactttgtggaggagaccgtggaggtgatccggaacaacggggcccggctgcagtgccgcatcctggaggtgctgccccccagccaccagaatggatttgccaacggccacgtgaacagcgtggatggagagaccatcatcatcagtgacagtgatgattctgagacccagagctgcagcttccagaatggcaagaagaaggatgccatcgaccccctgctcttcaagtacaaggtgcagcccaccaagaaggagctgcacgagagcgccatcgtgaaggccacccagatcagcaggaggaagcacctgttcagccgggacaagctgaagctgttcctgaagcagcactgtgagccccaggatggagtcatcaagatcaaggccagcagcctgagcacctacaagattgctgagcaggacttctcctacttcttcccagatgacccccccaccttcatcttctccccagccaacagaagaagaggccggccccccaagaggatccacatcagccaggaggacaacgtggccaacaagcagaccctggccagctaccgcagcaaggccaccaaggagcgggacaagctgctgaagcaggaggagatgaagagcctggcctttgagaaggccaagctgaagcgggagaaggcagatgccctggaggccaagaagaaggagaaggaggacaaggagaagaagcgggaggagctgaagaagatcgtggaggaggagcggctgaagaagaaggaggagaaggagcggctgaaggtggagcgggagaaggagcgggagaagctgcgggaggagaagaggaaatatgtggagtacctgaagcagtggagcaagccccgggaggacatggagtgtgatgacctgaaggagctgcctgagcccacccctgtgaagacccggctgcccccagagatctttggagatgccctgatggtgctggagttcctgaatgccttcggggagctgtttgacctgcaggatgagttcccagatggagtgaccctggaggtgctggaggaggccctggtgggcaatgacagcgagggccccctgtgtgagctgctcttcttcttcctgacagccatcttccaggccatcgccgaggaggaggaggaggtggccaaggagcagctgacagatgctgacaccaaggacctgacagaggccctggatgaagatgctgaccccaccaagagcgccctgtctgctgtggccagcctggccgccgcctggccccagctgcaccagggctgcagcctgaagagcctggacctggacagctgcaccctgtctgagatcctgcggctgcacatcctggccagcggggctgatgtgaccagcgccaatgccaagtaccgctaccagaagagaggaggctttgatgccacagatgatgcctgcatggagctgcggctgagcaaccccagcctggtgaagaagctgagcagcacctctgtgtatgacctgaccccaggagagaagatgaagatcctgcacgccctgtgtgggaagctgctgaccctggtgtccacccgggacttcattgaagattatgtggacatcctgcggcaggccaagcaggagttccgggagctgaaggccgagcagcacaggaaggagcgggaggaggccgccgcccgcatcaggaagaggaaggaggagaagctgaaggagcaggagcagaagatgaaggagaagcaggagaagctgaaggaggatgagcagaggaacagcacagctgacatcagcattggagaggaggagagagaagattttgacaccagcattgagagcaaggacacagagcagaaggagctggaccaggacatggtgacagaagatgaagatgatcctggcagccacaagaggggccggcggggcaagaggggccagaatggcttcaaggagttcacccggcaggagcagatcaactgtgtgacccgggagcccctgacagcagatgaggaggaggccctgaagcaggagcaccagaggaaggagaaggagctgctggagaagatccagagcgccatcgcctgcaccaacatcttccccctgggccgggacaggatgtaccgccgctactggatcttccccagcatccctggcctcttcatcgaggaggactacagcggcctgacagaggacatgctgctgccccggcccagcagcttccagaacaacgtgcagagccaggacccccaggtgtccaccaagacaggagagcccctgatgtctgagagcaccagcaacatcgaccagggcccccgggaccacagcgtgcagctgcccaagcctgtgcacaagcccaaccgctggtgcttctacagcagctgtgagcagctggaccagctgattgaggccctgaacagccggggccaccgggagagcgccctgaaggagaccctgctgcaggagaagagccgcatctgtgcccagctggcccgcttcagcgaggagaagttccacttcagtgacaagccccagcctgacagcaagcccacctacagccggggccgcagcagcaatgcctatgaccccagccagatgtgtgccgagaagcagctggagctgcggctgcgggacttcctgctggacattgaagatcgcatctaccagggcaccctgggcgccatcaaggtgacagacagacacatctggaggtctgccctggagagcggccgctatgagctgctgtctgaggagaacaaggaaaatggcatcatcaagacagtgaatgaagatgtggaggagatggagattgatgagcagaccaaggtgattgtgaaggaccggctgctgggcatcaagacagagacccccagcacagtgtccaccaatgccagcaccccccagagcgtgtcctctgtggtgcactacctggccatggccctcttccagatcgagcagggcattgaaagacgcttcctgaaggcccccctggatgccagtgacagcggccgcagctacaagacagtgctggaccgctggagggagagcctgctgagcagcgccagcctgagccaggtgttcctgcacctgagcaccctggacagaagtgtcatctggagcaagagcatcctgaatgcccgctgcaagatctgcaggaagaagggagatgctgagaacatggtgctgtgtgatggctgtgaccggggccaccacacctactgtgtgcggcccaagctgaagacagtgcctgagggggactggttctgcccagagtgccggcccaagcagaggagccggcggctgagcagccggcagaggcccagcctggagagtgatgaagatgtggaggacagcatgggaggagaagatgatgaggtggatggagatgaggaggagggccagagcgaggaggaggagtatgaggtggagcaggatgaagatgacagccaggaggaggaggaggtgtccctgcccaagaggggccggccccaggtgcggctgcctgtgaagacccggggcaagctgagcagcagcttcagcagccggggccagcagcaggagcccggccgctaccccagccgcagccagcagagcacccccaagaccaccgtgagcagcaagacaggccgcagcctgaggaagatcaacagcgccccacccacagagaccaagagcctgagaattgccagccgcagcaccaggcacagccacggccccctgcaggctgatgtgtttgtggagctgctgagccccaggaggaagaggcggggcaggaagagcgccaacaacaccccagagaacagccccaacttccccaacttccgggtcatcgccaccaagagcagcgagcagagccgctctgtgaacatcgccagcaagctgagcctgcaggagagcgagagcaagaggcgctgcaggaagaggcagagccctgagcccagccctgtgaccctgggcagaagaagcagcggccggcagggcggcgtgcatgagctgagcgcctttgagcagctggtggtggagctggtgagacatgatgacagctggcccttcctgaagctggtgtccaagatccaggtgcctgactactatgacatcatcaagaagcccatcgccctgaacatcatccgggagaaggtgaacaagtgtgagtacaagctggccagcgagttcattgatgacatcgagctgatgttcagcaactgctttgagtacaaccccaggaacaccagcgaggccaaggccggcacccggctgcaggccttcttccacatccaggcccagaagctgggcctgcacgtgacccccagcaatgtggaccaggtgtccaccccacctgctgccaagaagagccgcatctag

SEQ ID NO: 176672 - DNA, 4671 bp, Artificial Sequence
  derived and/or modified sequence
atgcccctgctgcaccggaagcccttcgtgcggcagaagccccccgccgaccttcgacccgatgaggaagtgttctactgtaaggtcactaacgagatatttcggcactatgacgacttcttcgagcgtactatcttgtgcaacagcttggtatggtcttgcgctgtgaccgggcggccaggattaacgtatcaggaagctctggagagcgaaaagaaggctcgtcagaatttacaatcgtttcctgaaccactgatcatccctgtattgtacctgacttctctcacccatcggtcccgtttacacgagatttgtgacgacatctttgcctatgtaaaggacaggtatttcgtggaagagactgtggaggtgattcggaataacggagccaggctgcagtgtcgtattctcgaagtgttaccaccttctcaccagaacggctttgccaacggacacgtgaattctgtggatggggagaccattatcatctctgattcggacgacagcgagacacaatcctgtagtttccagaacggtaaaaaaaaagacgctatcgacccgcttttgttcaagtacaaggtgcagccaacaaagaaggaactgcatgaatcagccattgtgaaggcaacccagattagcagacggaaacatctgttctccagagataaattgaagttatttctgaagcagcactgcgagccccaggacggcgtgataaaaattaaggctagttccctgagcacgtataagatcgcagagcaggacttttcgtattttttcccggatgatccaccaaccttcattttttcccctgcaaataggaggcgggggagaccccccaagaggattcacatctcacaggaggacaacgtcgccaacaagcaaacactcgcttcctatcggtctaaagccactaaggagcgcgacaaacttctcaagcaggaagagatgaaatctctggcgtttgagaaggctaaactgaaacgtgagaaagctgatgcactggaggctaaaaaaaaggagaaagaagataaggaaaagaagcgggaagagctaaaaaagatcgtggaagaagagcggctcaagaagaaagaggagaaagaacggctgaaagttgagagggagaaggagagagagaaactacgcgaggaaaagcgcaagtacgtggagtatcttaagcagtggtccaaaccacgagaggacatggagtgtgatgacctgaaagaactgcctgaacccactcccgtcaaaactcggcttcctccagagatattcggggatgcgctgatggtgctcgagtttttgaacgcatttggcgaactgtttgatctgcaggatgagttccccgatggcgtgacactcgaagtgttggaagaagcactggtgggcaacgactccgagggcccactgtgcgagctactgtttttcttcctgacagccatcttccaggctatcgcagaagaagaagaagaggtggctaaggagcagctgaccgatgcggatacgaaggacctgactgaagcactggatgaggatgccgaccctacaaaatccgccttgtctgccgtcgcttcattagccgctgcctggccacagctgcaccaggggtgctccctgaagtcactagacttggacagttgcacgctgtctgagatcctgcgactgcacatactcgcatcgggggccgatgtgacttctgccaacgctaaataccggtatcagaaacggggaggcttcgatgctactgacgatgcttgcatggagctgcgtctgtcaaacccatcactcgtcaaaaaactgagctccacgtcagtctacgacctgacaccaggtgaaaagatgaagatcctgcacgcattgtgtggaaaactgctaaccttggtgtctactagagattttattgaagactacgtcgacatcctccgtcaggccaagcaggagttccgagagctgaaggctgagcaacatagaaaggagcgcgaggaagcagcagctaggatcagaaaaaggaaagaagagaagctgaaggaacaggaacaaaagatgaaagaaaagcaggagaagctaaaagaagatgaacagagaaatagtactgctgacatttctataggagaggaagaacgggaggatttcgatacctcaattgagtcaaaagacacagagcagaaagagttagatcaagacatggttactgaagacgaggacgaccctggctctcacaagcgcggaagaaggggcaaacggggccagaatggtttcaaagaatttactcggcaggaacagattaactgcgtaacacgggaacctcttaccgcagacgaggaggaggctttaaagcaggagcaccagcggaaagaaaaagagctcttagagaaaattcagagcgcaattgcttgcactaatatcttcccactggggagagatcgtatgtacaggcgatattggatatttccaagcatccccgggctgttcatcgaggaggactattccggccttacggaagacatgcttctgccccggccgagctccttccagaataatgtgcagtctcaagatcctcaggtgtcgaccaagacaggggaacctctgatgtctgagagcacatcgaatattgatcagggccccagagatcacagcgtacagctccctaaaccagtccacaagcccaaccgatggtgcttctattctagctgcgagcagctggaccaactgatcgaggccctgaactcccgggggcatagagagagtgccttgaaagagacacttctgcaagagaaatcacggatatgcgcacaattggcacggttcagcgaagagaaatttcatttctctgataaaccgcagccggactctaagcccacttattcaaggggcagaagtagtaacgcatacgatccatcacaaatgtgtgccgagaaacagctggaattaaggctgcgggactttctgctcgatatcgaagacaggatttaccaaggtacactgggcgccattaaggtgactgaccggcacatctggaggtcagcgctagagagtggtcgttatgaactccttagtgaggagaataaggagaacgggattataaaaaccgtcaatgaagatgttgaggaaatggagatagatgaacagaccaaagtgattgtgaaggataggttgctgggcataaagactgaaactcctagtacggtgtcaaccaacgcctcaaccccacagagtgtgtctagcgttgtgcactacctggcgatggctctcttccagatcgagcaaggtattgagcggaggttcctgaaggccccacttgatgcttcggactccggaagaagctataaaacagtcctggatcgctggagagagagtttgttgtcttcagcgtccctgtctcaggtctttctgcacctttctacactggacagatccgttatatggtcaaagtctatcctcaacgcacgatgtaaaatatgtcgaaaaaaaggagacgccgagaacatggtgctttgtgacggctgcgacaggggccatcacacatactgcgttcgtcctaaattaaaaaccgtcccagagggtgactggttctgtcccgagtgtaggcccaagcagaggagcagaagactgtccagcagacagagaccctccctggaatcggacgaggatgtggaggatagcatgggcggcgaggacgacgaagtggatggcgatgaagaggagggccagtctgaggaggaagagtatgaagttgagcaggatgaagatgactcccaggaggaagaagaggtttcgttgcccaagaggggccgccctcaagtcaggctgcccgtgaaaacacgagggaagcttagctcgtcattttccagcaggggtcagcagcaggaaccgggccgatatccctcccggtctcagcagtcaacccctaaaaccaccgtaagctcgaagacaggccgtagcctgaggaaaattaattcagcgccccccactgagacgaaatcactgaggatagcaagtaggagcaccaggcactcccacggtcctctccaggccgacgtattcgttgaactactctctccacgcaggaaaagacgtggccgcaagtcagctaataacactcctgagaactcacctaactttccaaacttccgggtaattgcgacaaaatcaagtgagcagtccagatctgtgaacattgccagcaagctctcgctacaggagtcagaaagtaagagacgatgccggaagcgtcaaagccctgagccatctccggtcactttgggaagaaggagttctggccggcagggcggggtgcacgaactctcagcttttgagcagctggtggtcgagttggtgcgtcacgatgactcctggccattcctaaaactcgtcagcaaaattcaggtgccagactactacgatatcataaagaaacccatcgcattgaatatcatcagggaaaaggtcaataagtgcgaatataagttggcatccgagttcatcgacgacattgagctgatgttctctaattgtttcgagtataacccccgcaatactagcgaggctaaggccggtaccaggctgcaggccttcttccatattcaggctcagaagctcgggctgcatgtgacccctagcaacgttgatcaggtttctaccccacctgccgccaagaaatctcgtatctag

SEQ ID NO: 176673 - DNA, 4671 bp, Artificial Sequence
  derived and/or modified sequence
atgcccctgctgcaccggaagcccttcgtgcggcagaagccccccgcagacctccgcccagacgaggaggttttttactgtaaggtaaccaacgagattttcagacattacgatgatttttttgagcgaactatactgtgcaactctctcgtgtggagctgcgctgtcacaggccggccgggactgacgtatcaagaggcgctagaatcggagaaaaaagccaggcagaacctgcagtcttttcccgaaccgttaatcatccctgtcctatacttgacctcactcactcatcgctcccggcttcacgagatttgtgacgacatctttgcatatgtcaaggacaggtactttgttgaagagactgtagaggtcattagaaataacggggctcggttgcaatgcagaatcctcgaggtcctgcctccgagccaccagaatgggtttgctaatgggcatgtgaactccgttgatggggaaactatcattatcagtgactcagacgactctgagacacaaagctgcagcttccagaacgggaagaaaaaggacgcaatcgatccactcctttttaaatacaaagttcaaccaactaagaaagaacttcatgagtctgccatcgtaaaagcaacccaaatcagcagaagaaagcacctttttagtcgtgataaactgaagctgttcctgaaacaacactgtgaaccacaggacggcgtaattaaaatcaaggcctcctctttatccacctataagatcgccgagcaagattttagctacttttttcctgatgatccgcccactttcattttctctcctgccaacaggcgaagggggcggccacccaagcggattcacatttcacaggaagacaacgtggccaacaagcagacccttgccagctaccgatccaaggccaccaaggagcgggacaagctgctcaagcaggaggaaatgaagagcctggcattcgaaaaggccaaactcaagagagaaaaggcagacgcgcttgaagcaaagaaaaaggagaaagaagacaaagagaagaagcgcgaagagctgaaaaagatagtggaagaggagcgcctgaagaagaaagaagaaaaggagcgtctgaaggttgaacgcgaaaaggaaagggaaaagctgcgagaggagaagaggaaatatgttgagtatctgaaacagtggagcaaacctcgggaggacatggagtgtgacgacctaaaagagctgcctgaacctacccccgtgaaaaccaggctccctccagaaattttcggtgacgcactcatggtgctggagtttctcaacgcgttcggagaactgtttgatctccaggatgagttccctgatggtgtcaccctggaggtcctagaggaagccctggtgggaaatgactccgagggccccctctgcgaacttcttttcttttttctgacagccattttccaagccatagccgaggaggaagaagaagtggctaaagagcagctcactgacgcagacacaaaggatctcactgaagccctggatgaagacgctgacccaacgaaatccgccttgtctgctgttgcctccctggccgctgcatggccccagcttcaccagggatgctcactgaaatccctggacttggattcttgtacactatctgagatactcaggctgcatatcctggcttctggtgcagacgtcacctccgccaacgccaagtatcgctatcagaaacgcggaggcttcgacgccaccgatgatgcctgcatggagttacggctttcaaacccttcactggtcaaaaaattaagcagtaccagtgtgtacgacctcactcccggcgaaaagatgaagatccttcacgcgctgtgtggcaagctgttaactctggtgtctacacgggacttcatagaggactatgtggacatccttagacaggccaaacaggagttccgagaactgaaggccgaacagcatcgcaaagagagggaggaggccgccgcgcgaatacgtaaacggaaagaggagaaactgaaggagcaggagcagaaaatgaaagaaaagcaggagaaactgaaggaggatgaacagcgcaatagcaccgccgatattagtattggagaagaggaacgagaggacttcgatactagcatcgagagcaaagacaccgagcagaaggaactcgaccaagacatggtgacagaggatgaggatgatcccggttcccataagagggggaggcggggcaaaaggggccagaatgggtttaaggagttcaccaggcaggagcagatcaattgtgtcactagagagcctctgacggccgatgaagaggaggccctgaaacaggagcatcaaaggaaagagaaggagctgttagagaaaatccagagtgcaattgcttgtaccaacattttcccactggggagggacagaatgtaccgccggtattggatcttcccaagcatccctggtctgttcattgaagaggattatagcggcctgaccgaggacatgctgctgccccgaccgagttcctttcagaacaacgtgcaaagccaagatccacaggtctccacaaaaactggagagccactgatgtcagaatccacaagcaatatcgaccaggggccccgagatcattccgtgcagttgccaaagccggtccacaaaccaaatagatggtgcttctatagctcctgcgagcaactcgatcagcttattgaggccttgaattcacgggggcatagagagtccgccctcaaggagacactgctgcaggagaaatcacgcatctgcgcccagttagcacgtttttcagaagaaaaattccattttagtgacaagccccagcccgattcaaagcccacatatagcagaggcaggagttccaacgcctatgatccttcgcaaatgtgcgctgaaaaacaacttgagctgaggttgcgcgatttcttgctcgatatcgaagacagaatttaccagggtaccctgggggctataaaagttacagatcggcacatttggagaagcgcgctggaaagcggtcggtacgagttactatcagaggagaacaaggaaaatggtatcataaagacagttaacgaagatgttgaagaaatggagatcgacgaacagacgaaggttattgtgaaggaccgactcctaggcataaaaactgaaaccccttccaccgtgtctactaacgcctccaccccgcagtcggtctcctcggtagtgcactatttggccatggccttgttccaaatcgaacaagggattgagcgtcggttcttgaaagctcccctggacgcttcagactccggccggtcctataagaccgtgctggaccgatggcgtgaatctctgttatcctccgcctccctgtctcaggtgttcttacatctcagcaccctggaccggtcagtaatctggtctaaaagtatcctgaacgctaggtgcaagatttgtcgtaaaaagggcgatgctgaaaacatggtcctgtgtgacgggtgcgacagggggcaccacacatactgcgtccggcctaaactgaagactgtgccggagggggactggttctgcccagaatgccgcccaaagcaacgaagccgacgactttccagtcgtcagcggccttccttggaatctgatgaggacgtggaagattccatgggcggggaagatgatgaggtggacggggatgaagaggaggggcagagcgaggaagaggagtacgaagtcgagcaggatgaagacgacagccaggaagaggaggaagtgtccttacctaaaagaggtagaccacaagttcgactgcctgtgaaaacgagaggaaagctctcatcttctttttcgtcgagaggacaacagcaggaacccgggcgttatccaagtagaagtcagcagtctacccccaagactacagtcagctccaagactgggcgaagcctgcggaaaatcaacagtgcccctcctactgaaaccaagtcattgcgcatcgcctcacgctccacccggcactctcatggacccctgcaggccgatgttttcgttgaattgctgagcccccgccggaagcgacggggtaggaaatctgctaataacacgcccgaaaattccccaaactttccaaattttagggttattgctactaagtcctctgaacagtcacggtcggtcaatatcgcgtctaaactaagtcttcaggagtccgagagcaaacggcgatgccggaaaaggcagtcacctgagccgtcaccagtaactttgggtagacggtccagcggacgtcagggtggtgttcacgaattgagtgcgttcgaacaactagtggtggagttggtgcgacacgatgattcctggccattcctaaaactcgtgagtaaaatccaggtgccggactattacgatatcattaaaaaacctatcgctctgaatataatccgtgagaaagtgaataagtgcgagtacaagctggcatccgaatttatcgatgacattgagttaatgttcagcaattgctttgagtacaatccgaggaatacaagcgaggccaaggccggcacgcgtctgcaggcgttttttcacatccaagcgcaaaagttaggactacacgtgacaccctccaatgtggatcaggtgagtactccgccagccgccaaaaagtcgagaatttag

SEQ ID NO: 176674 - DNA, 4671 bp, Artificial Sequence
  derived and/or modified sequence
atgcctctcttgcatcgtaagcccttcgtgagacagaaacccccagccgacttgagacccgacgaggaggtcttctactgtaaagtgacaaacgaaatttttagacactacgacgactttttcgagcgtaccatcctttgcaacagcctggtttggtcctgcgcggtgaccgggcgacctggtctcacgtatcaggaggccctggagtctgagaagaaagctcgtcagaatctgcaatcctttcctgagcctctgattatccctgtgctctatctgacaagcctgactcaccgcagccggctccatgagatctgtgacgacattttcgcttatgtgaaagaccgctacttcgtggaggagacagtcgaagttatacggaataacggagccaggctacagtgcagaatattggaagtgctgccgccttcccatcagaacgggttcgccaacggacatgtgaatagtgttgacggtgaaactatcatcatttcagattctgacgatagcgagacccagagctgctcctttcagaatggtaagaagaaggatgctattgacccacttctttttaagtataaagtccaaccgactaaaaaggagctccacgaatccgccatcgtaaaagcaacccagattagtaggcgtaagcatctgttttctcgggataaacttaagctgtttctaaaacagcattgtgagccccaggatggggtgattaaaatcaaggctagtagcctgtccacatacaagatagccgagcaggatttctcctacttttttcctgacgatcctcccactttcatctttagccccgctaaccggagacgtggaaggccgccaaaacgaatacatatttctcaggaggacaatgtggctaacaagcaaactttagcaagctacaggtccaaagccacgaaggaacgcgacaagttacttaaacaggaagagatgaaatcgctagcctttgagaaagccaaactcaagagagagaaggccgacgccctggaggctaagaagaaggagaaggaggacaaggagaagaaaagggaggaattgaaaaagatcgtcgaggaagagcgtctgaagaaaaaagaggagaaagaaaggctgaaggttgaaagagagaaagagcgtgagaaacttagagaagagaagaggaagtacgtcgaatacctgaaacaatggagcaagcctagggaggacatggaatgtgatgatctgaaagaactgccagagccaacacctgttaagacacggctgcctcctgagattttcggggatgccctgatggtgctcgaattcctgaacgcgtttggcgaattattcgatcttcaggacgaattccctgacggggtcaccctggaggtgctcgaagaagctctggtaggcaacgacagcgagggccctctttgtgagctcttgttcttctttctcacagcgatcttccaggccattgcagaggaggaggaagaggtcgcaaaagaacagctgactgacgccgacactaaagacctcacggaagccttagacgaggatgctgatcccaccaagagtgcattatccgctgttgcgtcattggcagcagcatggccacaacttcaccaggggtgttcactgaagtcattggatctggacagctgcaccctttctgaaatcctcaggctgcacatcctcgcgtcaggcgctgatgtgacctccgccaatgcaaaataccggtatcaaaagaggggcggttttgacgccaccgacgatgcctgtatggaactgcggttatccaacccgagccttgtcaagaaactgagctccactagtgtctacgacctgacccccggagagaagatgaaaatcctgcatgcgttatgcggaaagctgctgaccctggtctccacaagagactttatagaagactatgtggacattctgcgtcaagcaaaacaggagtttcgggagctaaaagcagagcagcacaggaaggagagagaggaggcagcggctcggattagaaagcgcaaagaggaaaagttaaaagagcaggagcagaaaatgaaagaaaagcaggaaaagcttaaggaagacgaacagagaaactcgactgctgacatcagcattggcgaagaggagagggaggattttgacacctcgatcgaaagtaaggacacagaacagaaggaactggatcaggacatggtcacggaagacgaagatgaccctggtagccataagagaggacgacggggaaaacggggacaaaacgggttcaaagagtttaccaggcaggagcagattaattgtgtaacaagagagcccctaacagccgatgaggaagaggccctgaaacaggaacatcagcggaaagagaaagagctgttggagaaaatccagtccgcaatcgcgtgcacaaatattttcccactcggaagggataggatgtatcgcagatattggatctttccctccatcccaggattgttcattgaggaagattatagcggattaacagaggacatgctgctgcctcggccatcttctttccagaacaacgttcaatctcaagacccgcaggtgtctacaaagacgggtgaaccgctaatgtcagagtcgacttctaatattgatcagggccctagggaccacagtgtgcagctgcccaagccagtccataagcccaacaggtggtgcttctacagcagttgtgaacagttagaccaactgatcgaggcactcaactcccgagggcaccgtgagagcgcgttgaaggagactctgttgcaggagaaatctcggatctgcgcccagctggcacgcttctcagaagaaaagttccacttctctgacaagcctcagccggactccaagccaacctatagtcgcggacggtctagtaacgcctacgatccttcccagatgtgtgccgaaaagcagttagaactgcgacttcgggacttccttctagacatagaagatcgcatctaccagggaacactaggcgcaatcaaggtcacagatcggcacatttggaggtcagccctcgagtcgggtcgatatgagcttctaagtgaagagaacaaggaaaatgggattattaaaaccgtaaacgaggatgtcgaggagatggagatcgatgaacagacaaaggttatcgttaaggacaggctcctgggcattaaaaccgagacgccctcaactgtgtccaccaatgcctcgactccacagagcgtgtcttcagttgtccattacctggccatggctctctttcagatagagcaggggatcgaaaggcggttcctgaaagcgcctttagatgcctccgacagcgggagatcttacaagactgtgctcgaccgctggagagagagcctgctttctagtgcgagcctgagccaagtcttcctgcacttatccacgttggaccgcagtgtcatttggtccaaatcaattctcaacgcccgatgcaaaatctgccgcaaaaagggtgacgccgaaaatatggtgctgtgcgacggctgcgatcgagggcaccacacatattgtgtgaggcctaagttgaagactgtgcccgagggggactggttctgtccagaatgtaggccaaagcagcgctcccgacgcctgtcctctagacagcggccaagtttggagagcgacgaagacgtggaggacagtatgggaggcgaggacgacgaggtggatggggacgaagaagaggggcaaagtgaggaagaggaatatgaagtcgagcaagacgaggacgacagccaggaagaggaggaagtttcactcccaaagagagggagaccacaggttaggctccctgttaagaccaggggtaaactgagcagctccttttcctcgcgtgggcaacaacaggaacccggtcgataccccagtaggagtcaacagagcactcctaagaccactgtctcctcgaaaaccggtagaagccttaggaagataaactctgcgcctcccactgaaacaaagtcattgcgcatcgcgagtcgcagcactcggcactcccatgggcctctacaggctgacgttttcgtggagttgctgtccccaagaagaaagagaaggggtcgcaagagtgcaaataacactcctgagaactccccaaattttcctaactttagggtcatcgccaccaagtcgagtgaacaaagcagaagtgtgaatatcgcgagcaagctgagcctgcaggaatccgaaagcaaaaggagatgcagaaagcgccagtccccagagccatctcccgtcaccttgggaagacggtcatcagggaggcaaggtggagtacatgagctcagtgcctttgagcagctggtagtggagttagtgcgccatgacgattcatggcctttcctgaaattggtgtccaagatccaagttcccgactattatgatatcattaagaagcccattgccctgaacataattcgcgaaaaggtgaataaatgtgaatacaagctcgcctcagagttcattgacgacatcgaactcatgttctctaactgctttgagtacaacccgcgaaacacatctgaggccaaggccggaaccagactgcaggcctttttccacatccaggcacagaagttagggctccacgtcaccccttctaatgtcgatcaggtttcgacaccacccgcagccaaaaagtcacggatttag

SEQ ID NO: 176675 - DNA, 4671 bp, Artificial Sequence
  derived and/or modified sequence
atgcccttgctgcatcgcaagcccttcgtccggcagaaacctccagcggacctgcgtcccgatgaggaagtcttctactgcaaggtcacaaacgaaatatttaggcactatgatgacttctttgaacggaccattctgtgtaacagccttgtctggagttgcgccgttacgggtcggcctggacttacttaccaagaggcgttggagtccgagaaaaaagctaggcagaatttgcagtcttttcccgagcctctcatcattccggtgttgtacttaacatctctcactcaccggagtcgtttacatgagatctgcgacgatattttcgcctatgttaaagaccgctactttgtggaggagaccgtggaggttataaggaataatggcgctcgcctccagtgccgcatcttagaggtcttgccacctagtcaccaaaacgggtttgctaacgggcacgtcaactcagttgacggcgagaccattatcattagcgatagtgacgattccgaaactcagtcctgcagctttcagaacggcaaaaagaaggatgccattgaccctctgctgttcaagtacaaagttcagccgactaaaaaggagcttcacgagtctgccatcgtgaaggcaacccagatctcacgtagaaagcacctgttttccagggataagctaaaattattcctgaaacagcattgtgagcctcaggacggtgttataaaaatcaaggccagctcacttagcacttataagatagccgagcaagattttagctacttttttcccgatgatcctcccacatttatcttcagtccagcgaatagaagaaggggaagaccaccaaagagaattcatatctctcaggaggacaacgtcgccaacaaacagacactggccagttatcggtcaaaggccacgaaggagcgcgacaagctcctgaaacaggaagagatgaagagcctggcttttgagaaggctaaactcaaacgagaaaaagctgatgcacttgaggccaagaaaaaggaaaaggaagataaggaaaagaaaagagaggagctgaaaaagattgtagaagaggagaggttgaaaaagaaggaggagaaggagaggctgaaggtcgaaagagagaaagaacgtgagaagctgagggaagagaaacggaagtacgtggagtacttgaagcagtggagtaagccccgagaagacatggaatgtgacgacctgaaggagctgcctgaaccaacaccagtcaaaactaggctgccgccagagatttttggcgatgccttgatggtactcgagtttttgaacgcttttggcgagttgtttgacctgcaggatgagtttccggatggagtgacactggaagtacttgaagaggccctcgtcggaaacgattccgaggggccactttgtgagctgctgtttttcttcctgaccgcgatttttcaggcaatcgcagaagaggaagaagaggtggccaaggaacaattaaccgatgccgatactaaggacctgactgaagccctggacgaagatgctgacccaactaaatccgcccttagtgcagtagcttccctggccgctgcttggcctcagctccatcagggatgtagcctgaaaagcctcgacctggattcatgcactctcagcgaaatcctcaggcttcacatcttggcatccggcgctgatgtcacctccgcgaacgcaaagtacaggtaccagaaaagaggaggcttcgatgccactgacgatgcttgcatggagctcagacttagcaacccttcacttgtgaaaaagctgtcaagtacctctgtgtatgaccttacccccggtgagaagatgaagatcttgcacgccctgtgcgggaagttactgaccttagtgtcaacccgcgatttcatcgaggattacgttgatattctgaggcaggccaagcaggagtttcgcgaattgaaggcagagcaacaccggaaggagagagaggaggcggctgctaggatccgcaagaggaaagaggagaagctgaaagagcaagaacagaaaatgaaagagaaacaagaaaaactgaaagaagacgagcagagaaacagtaccgccgatatatccattggcgaagaggagagagaagatttcgacacaagcattgagtccaaagacacggaacagaaggagctggatcaagatatggtgacagaggacgaggacgaccccggatcccacaaaagaggaagacggggaaaaaggggacagaatgggtttaaggagtttactagacaagaacagattaattgtgtcacccgggaaccgctcactgcggatgaggaagaggccctaaaacaagaacaccaacgcaaagaaaaagaactccttgagaagatccagtcagccatagcgtgcactaacatcttcccccttggcagggaccggatgtaccgcaggtactggattttcccaagcattcccggactgtttattgaagaagactacagcggtttgaccgaagatatgttgctgccacgtcctagctcttttcagaataatgtgcaatcacaggacccccaagttagtaccaagactggagaaccactgatgtccgagagtactagtaatatcgaccaggggccaagggaccactcagtacagctgcccaagcctgtacacaaacccaatcggtggtgcttctatagttcttgcgaacagctggaccaattgatcgaggcactgaattcgcggggacaccgggagtctgctcttaaagaaaccctcctgcaagaaaagtcgcgtatatgcgcccagctggcacgattctccgaggaaaagtttcacttttctgataaaccacaacccgactccaagccaacctactctcggggaaggtcctctaacgcttatgacccgagtcaaatgtgcgcagagaaacagctggagctgagactcagggacttcctgcttgatatcgaggaccgcatctaccaaggcactctcggcgctattaaagtcacggatcggcatatctggcgaagtgctcttgagtctggtcgatacgaacttctctccgaagaaaacaaagaaaacggaatcatcaaaacagtaaacgaggatgtcgaagaaatggaaattgatgagcagaccaaagtgatcgtgaaggacagactgttgggtataaagaccgagactccgtctacagtgagtacgaacgcaagcactccacagagcgtcagctccgtagttcattacctagcaatggccttgttccagattgagcagggaatcgagcgccgatttcttaaagccccactggatgctagtgacagtggacggagttataagactgtcctggatcgctggcgggagagcttgttatcctctgctagcctgagccaagtgttcctgcacctgtctacgctcgaccgctctgtcatctggtccaagagcattttgaacgccaggtgcaagatatgtcggaaaaaaggcgacgcagaaaacatggtgctgtgcgacggctgcgatcgaggtcaccatacgtactgtgttcggccaaaactgaaaactgtgccggagggcgattggttctgccccgaatgccggcctaaacagcgttctcggagactcagctcacggcagaggccctctctggaatctgatgaggacgtcgaggatagcatgggtggagaagatgatgaggtcgacggcgatgaagaggagggccagtctgaggaagaagagtacgaagttgagcaggacgaggatgattcccaggaagaggaggaagtcagtctgcctaaaagaggcaggccgcaagttcgattacctgttaagactcgcggaaagttgagcagctcttttagcagtcggggtcagcaacaggagccgggaaggtacccgagtcgttcccagcaatccactccgaagaccaccgtgagttctaaaaccggccgaagtctgcgtaaaataaattctgcccctccgaccgaaactaagtcattaaggatcgctagcagatctactcggcactcccatgggcctctgcaggccgacgtattcgtagaactgctgtcccccagaagaaaacgcaggggcaggaagtctgctaataataccccagagaactcccccaactttccgaattttagggtcatcgcaactaaatcctccgagcagagcaggtctgtcaatatcgcctccaagcttagccttcaagaaagcgagtcaaaacgaaggtgccgcaagagacagagtccagagccctccccagttacgctaggccgacgaagcagtggtcgacagggtggcgtgcatgaactttcggcttttgaacagcttgtggtggagctggtgcgccacgacgactcttggccattccttaagctggtgtccaaaattcaggtgcctgattactacgatatcatcaagaagccaatcgccctgaatataatccgagaaaaagtgaacaagtgcgagtataagctcgctagtgaattcatagatgacattgagttaatgttctctaattgcttcgagtacaatccccgaaacaccagtgaggctaaagcgggaactcggcttcaggctttttttcacatacaggcccaaaaactcggactacacgtaacacctagcaacgtcgatcaggtgagcaccccacctgccgctaagaagtcacggatatag

SEQ ID NO: 176676 - DNA, 6010 bp, Artificial Sequence
  derived and/or modified sequence
cttttcccatcgtgtagtcaagagtctgtgccagacttgaaggctttactttgttagccatgtgtttatgaacccccagcgctttccctagatcttttggctgataatctcaaacatggaggatgcttctgaatcttcacgaggggttgctccattaattaataatgtagttctcccaggctctccgctgtctcttcctgtatcagtgacaggctgtaaaagtcatcgagtagccaataaaaaggtagaagcgaggagtgaaaagctcctcccaacagctcttcctccttcagagccgaaagtagatcagaaacttcccaggagctccgagaggcggggaagtggcggtgggacgcaattccccgcgcggagtcgggcagtggcagcgggagaagcggcagccaggggcgcggcggggccggagagaggcggtcccctgggaggacggggtctcccctcgttgcctttgtagtggagaaggtggacaagtggcagtcggcgtgatcgcagggaagcggggccggcgcgggcggccgagggtccaggcgagcccgcgggcggacgggagatgccgctgctacaccgaaagccgtttgtgagacagaagccgcccgcggacctgcggcccgacgaggaagttttctactgtaaagtcaccaacgagatcttccgccactacgatgacttttttgaacgaaccattctgtgcaacagccttgtgtggagttgtgctgtgacgggtagacctggactgacgtatcaggaagcacttgagtcagaaaaaaaagcaagacagaatcttcagagttttccagaaccactaattattccagttttatacttgaccagccttacccatcgttcgcgcttacatgaaatttgtgatgatatctttgcatatgtcaaggatcgatattttgtcgaagaaactgtggaagtcattaggaacaatggtgcaaggttgcagtgtaggattttggaagtcctccctccatcacatcaaaatggttttgctaatggacatgttaacagtgtggatggagaaactattatcatcagtgatagtgatgattcagaaacacaaagctgttcttttcaaaatgggaagaaaaaagatgcaattgatcccttactattcaagtataaagtgcaacccactaaaaaagaattacatgagtctgctattgttaaagcaacacaaatcagccggagaaaacacctattttctcgtgataaactaaagctttttctgaagcaacactgtgaaccacaagatggagtcattaaaataaaggcatcatctctttcaacgtataaaatagcagaacaagatttttcttatttcttccctgatgatccacccacatttatcttcagtcctgctaacagacgaagagggagacctcccaaacgaatacatattagtcaagaggacaatgttgctaataaacagactcttgcaagttataggagcaaagctactaaagaaagagataaacttttgaaacaagaagaaatgaagtcactggcttttgaaaaggctaaattaaaaagagaaaaagcagatgccctagaagcgaagaaaaaagaaaaagaagataaagagaaaaagagggaagaattgaaaaaaattgttgaagaagagagactaaagaaaaaagaagaaaaagagaggcttaaagtagaaagagaaaaggaaagagagaagttacgtgaagaaaagcgaaagtatgtggaatacttaaaacagtggagtaaacctagagaagatatggaatgtgatgaccttaaggaacttccagaaccaacaccagtgaaaactagactacctcctgaaatctttggtgatgctctgatggttttggagttccttaatgcatttggggaactttttgatcttcaagatgagtttcctgatggagtaaccctagaagtattagaggaagctcttgtaggaaatgacagtgaaggcccactgtgtgaattgctttttttcttcctgactgcaatcttccaggcaatagctgaagaagaagaggaagtagccaaagagcaactaactgatgctgacaccaaagatttaacagaggctttggatgaagatgcagaccccacaaaatctgcactgtctgcagttgcatctttggcagctgcatggccacagttacaccagggctgcagtttgaaaagtttggatcttgatagctgcactctttcagaaatcctcagactgcacatcttagcttcaggtgctgatgtaacatcagcaaatgcaaagtatagatatcaaaaacgaggaggatttgatgctacagatgatgcttgtatggagcttcgtttgagcaatcccagtctagtgaagaaactgtcaagcacctcagtgtatgatttgacaccaggagaaaaaatgaagatactccatgctctctgtggaaagctactgaccctagtttcaactagggattttattgaagattatgttgatatattacgacaggcaaagcaggagttccgggaattaaaagcagaacaacatcgaaaagagagggaagaagcagctgccagaattcgtaaaaggaaggaagaaaaacttaaggagcaagaacaaaaaatgaaagagaaacaagaaaaactgaaagaagatgagcaaagaaattcaacggcagatatatctattggggaggaagaaagggaagattttgatactagcattgagagcaaagacacagagcaaaaggaattagatcaagatatggtcactgaagatgaagatgacccaggatcacataaaagaggcagaagggggaaaagaggacaaaatggatttaaagaatttacaaggcaagaacagatcaactgtgtaacaagagagcctcttactgctgatgaggaagaagcattaaaacaggaacaccaacgaaaagagaaagagctcttagaaaaaatccaaagtgccatagcctgtaccaatatctttcccttgggtcgcgaccgcatgtatagacgatactggattttcccttctattcctggactctttattgaagaggattattctggtcttactgaagacatgctgttgcctagaccttcatcatttcagaataatgtacagtctcaagatcctcaggtatccactaaaactggagagcctttgatgtctgaatctacctccaacattgaccaaggtccacgtgaccattctgtgcagctgccaaaaccagtgcataagccaaatcggtggtgcttttacagttcttgtgaacagctagaccagcttattgaagctcttaattctagaggacatagagaaagtgccttaaaagaaactttgttacaagagaaaagcagaatatgtgcacagctagcccgtttttctgaagagaaatttcatttttcagacaaacctcagcctgatagcaaaccaacatatagtcggggaagatcttccaatgcatatgatccatctcagatgtgtgcagaaaagcaacttgaactaaggctgagagattttcttttagatattgaagatagaatctaccaaggaacattaggagccatcaaggttacagatcgacatatctggagatcagcattagaaagtggacggtatgagctgttaagtgaggaaaacaaggaaaatgggataattaaaactgtgaatgaagacgtagaagagatggaaattgatgaacaaacaaaggtcatagtaaaagacagacttttggggataaaaacagaaactccaagtactgtatcaacaaatgcaagtacaccacaatcagtgagcagtgtggttcattatctggcaatggcactctttcaaatagagcagggcattgagcggcgttttctgaaagctccacttgatgccagtgacagtgggcgttcttataaaacagttctggaccgttggagagagtctctcctttcttctgctagtctatcccaagtttttcttcacctatccaccttggatcgtagcgtgatatggtctaaatctatactgaatgcgcgttgcaagatatgtcgaaagaaaggcgatgctgaaaacatggttctttgtgatggctgtgataggggtcatcatacctactgtgttcgaccaaagctcaagactgtgcctgaaggagactggttttgtccagaatgtcgaccaaagcaacgttctagaagactctcctctagacagagaccatccttggaaagtgatgaagatgtggaagacagtatgggaggtgaggatgatgaagttgatggcgatgaagaagaaggtcaaagtgaggaggaagagtatgaggtagaacaagatgaagatgactctcaagaagaggaagaagtcagcctacccaaacgaggaagaccacaagttagattgccagttaaaacaagagggaaacttagctcttctttctcaagtcgtggccaacaacaagaacctggaagatacccttcaaggagtcagcagagcacacccaaaacaactgtttcttctaaaactggtagaagcctaagaaagataaactctgctcctcctacagaaacaaaatctttaagaattgccagtcgttctactcgccacagtcatggcccactgcaagcagatgtatttgtggaattgcttagtcctcgtagaaaacgcagaggcaggaaaagtgctaataatacaccagaaaatagtcccaacttccctaacttcagagtcattgccacaaagtcaagtgaacagtcaagatctgtaaatattgcttcaaaactttctctccaagagagtgaatccaaaagaagatgcagaaaaagacaatctccagagccatcgcctgtgacactgggtcgaaggagttctggccgacagggaggagttcatgaattgtctgcttttgaacaacttgttgtagaattggtacgacatgatgacagctggccttttttgaaacttgtttctaaaatccaggtcccagactactatgacatcatcaaaaagcccattgccttaaatataattcgtgaaaaagtgaataagtgtgaatataaattagcatctgagtttattgatgacattgagttaatgttttcgaactgctttgaatacaaccctcgtaacacaagtgaagcaaaagctggaactaggcttcaagcattttttcatattcaggctcaaaagcttggactccacgtcacacccagtaatgtggaccaagttagcacaccaccggctgcgaaaaagtcacgaatctgactttgtccttctaaaggatatatttgaagaaaaacaaattgttcatgaaaatggaacattaaatcatgctgtataaagcaataacaattgattgaccacatgaaagtgtggcctgcactatattctcaattttaatattaagcactcaggagaatgtaggaaagatatcctttgctacagttttgttcagtatctaataagtttgatagatgtattggatacagtactggtttacagaggtttttgtacatttttgagatcattcatgtgtccagagatcttggaaaatattttttcacccacgatttattttgttattgatgatttttttttaaagtggtggtattaagggagagttatctacatggatgagtcttccgctatagcacagtttagaaaaggtgtttatgtcttaattaattgtttgagtacattctttcaacactacacatgaatgaatccaatcttataaccttgaagtgctgtaccagtgctggctgcaggtattaagtccaagtttattaactagatatttatttagtattgagagtaatttgtgaatttgttttgtatttataaaatttatacctgaaaaatgttccttaatgttttaaaccttttactgtgtttttattcctctaacttccttaatgatcaatcaaaaaaagtaacaccctccctttttcctgacagttctttcagctttacagaactgtattataagtttctatgtataactttttaactgtacaaataaaataacattttttc

SEQ ID NO: 176677 - DNA, 5775 bp, Artificial Sequence
  derived and/or modified sequence
cccgcactgccccccgcggcggggcgtcctgccccattgtgaggcggcggcaggacgagaggaggtagggcgcgctcggggggcaggggcggcggcggctccgctcgctcgacacccgggcagcggcaggaacgaactcggctccggtagcggccgcggcgcgtcagtcacacaaaaggcagccgagcttctcccagcgcgcggaccggcccacgctgccgccgagggctccccaccttaccggctttcctttccctccaattttgatagggaagcggggccggcgcgggcggccgagggtccaggcgagcccgcgggcggacgggagatgccgctgctacaccgaaagccgtttgtgagacagaagccgcccgcggacctgcggcccgacgaggaagttttctactgtaaagtcaccaacgagatcttccgccactacgatgacttttttgaacgaaccattctgtgcaacagccttgtgtggagttgtgctgtgacgggtagacctggactgacgtatcaggaagcacttgagtcagaaaaaaaagcaagacagaatcttcagagttttccagaaccactaattattccagttttatacttgaccagccttacccatcgttcgcgcttacatgaaatttgtgatgatatctttgcatatgtcaaggatcgatattttgtcgaagaaactgtggaagtcattaggaacaatggtgcaaggttgcagtgtaggattttggaagtcctccctccatcacatcaaaatggttttgctaatggacatgttaacagtgtggatggagaaactattatcatcagtgatagtgatgattcagaaacacaaagctgttcttttcaaaatgggaagaaaaaagatgcaattgatcccttactattcaagtataaagtgcaacccactaaaaaagaattacatgagtctgctattgttaaagcaacacaaatcagccggagaaaacacctattttctcgtgataaactaaagctttttctgaagcaacactgtgaaccacaagatggagtcattaaaataaaggcatcatctctttcaacgtataaaatagcagaacaagatttttcttatttcttccctgatgatccacccacatttatcttcagtcctgctaacagacgaagagggagacctcccaaacgaatacatattagtcaagaggacaatgttgctaataaacagactcttgcaagttataggagcaaagctactaaagaaagagataaacttttgaaacaagaagaaatgaagtcactggcttttgaaaaggctaaattaaaaagagaaaaagcagatgccctagaagcgaagaaaaaagaaaaagaagataaagagaaaaagagggaagaattgaaaaaaattgttgaagaagagagactaaagaaaaaagaagaaaaagagaggcttaaagtagaaagagaaaaggaaagagagaagttacgtgaagaaaagcgaaagtatgtggaatacttaaaacagtggagtaaacctagagaagatatggaatgtgatgaccttaaggaacttccagaaccaacaccagtgaaaactagactacctcctgaaatctttggtgatgctctgatggttttggagttccttaatgcatttggggaactttttgatcttcaagatgagtttcctgatggagtaaccctagaagtattagaggaagctcttgtaggaaatgacagtgaaggcccactgtgtgaattgctttttttcttcctgactgcaatcttccaggcaatagctgaagaagaagaggaagtagccaaagagcaactaactgatgctgacaccaaagatttaacagaggctttggatgaagatgcagaccccacaaaatctgcactgtctgcagttgcatctttggcagctgcatggccacagttacaccagggctgcagtttgaaaagtttggatcttgatagctgcactctttcagaaatcctcagactgcacatcttagcttcaggtgctgatgtaacatcagcaaatgcaaagtatagatatcaaaaacgaggaggatttgatgctacagatgatgcttgtatggagcttcgtttgagcaatcccagtctagtgaagaaactgtcaagcacctcagtgtatgatttgacaccaggagaaaaaatgaagatactccatgctctctgtggaaagctactgaccctagtttcaactagggattttattgaagattatgttgatatattacgacaggcaaagcaggagttccgggaattaaaagcagaacaacatcgaaaagagagggaagaagcagctgccagaattcgtaaaaggaaggaagaaaaacttaaggagcaagaacaaaaaatgaaagagaaacaagaaaaactgaaagaagatgagcaaagaaattcaacggcagatatatctattggggaggaagaaagggaagattttgatactagcattgagagcaaagacacagagcaaaaggaattagatcaagatatggtcactgaagatgaagatgacccaggatcacataaaagaggcagaagggggaaaagaggacaaaatggatttaaagaatttacaaggcaagaacagatcaactgtgtaacaagagagcctcttactgctgatgaggaagaagcattaaaacaggaacaccaacgaaaagagaaagagctcttagaaaaaatccaaagtgccatagcctgtaccaatatctttcccttgggtcgcgaccgcatgtatagacgatactggattttcccttctattcctggactctttattgaagaggattattctggtcttactgaagacatgctgttgcctagaccttcatcatttcagaataatgtacagtctcaagatcctcaggtatccactaaaactggagagcctttgatgtctgaatctacctccaacattgaccaaggtccacgtgaccattctgtgcagctgccaaaaccagtgcataagccaaatcggtggtgcttttacagttcttgtgaacagctagaccagcttattgaagctcttaattctagaggacatagagaaagtgccttaaaagaaactttgttacaagagaaaagcagaatatgtgcacagctagcccgtttttctgaagagaaatttcatttttcagacaaacctcagcctgatagcaaaccaacatatagtcggggaagatcttccaatgcatatgatccatctcagatgtgtgcagaaaagcaacttgaactaaggctgagagattttcttttagatattgaagatagaatctaccaaggaacattaggagccatcaaggttacagatcgacatatctggagatcagcattagaaagtggacggtatgagctgttaagtgaggaaaacaaggaaaatgggataattaaaactgtgaatgaagacgtagaagagatggaaattgatgaacaaacaaaggtcatagtaaaagacagacttttggggataaaaacagaaactccaagtactgtatcaacaaatgcaagtacaccacaatcagtgagcagtgtggttcattatctggcaatggcactctttcaaatagagcagggcattgagcggcgttttctgaaagctccacttgatgccagtgacagtgggcgttcttataaaacagttctggaccgttggagagagtctctcctttcttctgctagtctatcccaagtttttcttcacctatccaccttggatcgtagcgtgatatggtctaaatctatactgaatgcgcgttgcaagatatgtcgaaagaaaggcgatgctgaaaacatggttctttgtgatggctgtgataggggtcatcatacctactgtgttcgaccaaagctcaagactgtgcctgaaggagactggttttgtccagaatgtcgaccaaagcaacgttctagaagactctcctctagacagagaccatccttggaaagtgatgaagatgtggaagacagtatgggaggtgaggatgatgaagttgatggcgatgaagaagaaggtcaaagtgaggaggaagagtatgaggtagaacaagatgaagatgactctcaagaagaggaagaagtcagcctacccaaacgaggaagaccacaagttagattgccagttaaaacaagagggaaacttagctcttctttctcaagtcgtggccaacaacaagaacctggaagatacccttcaaggagtcagcagagcacacccaaaacaactgtttcttctaaaactggtagaagcctaagaaagataaactctgctcctcctacagaaacaaaatctttaagaattgccagtcgttctactcgccacagtcatggcccactgcaagcagatgtatttgtggaattgcttagtcctcgtagaaaacgcagaggcaggaaaagtgctaataatacaccagaaaatagtcccaacttccctaacttcagagtcattgccacaaagtcaagtgaacagtcaagatctgtaaatattgcttcaaaactttctctccaagagagtgaatccaaaagaagatgcagaaaaagacaatctccagagccatcgcctgtgacactgggtcgaaggagttctggccgacagggaggagttcatgaattgtctgcttttgaacaacttgttgtagaattggtacgacatgatgacagctggccttttttgaaacttgtttctaaaatccaggtcccagactactatgacatcatcaaaaagcccattgccttaaatataattcgtgaaaaagtgaataagtgtgaatataaattagcatctgagtttattgatgacattgagttaatgttttcgaactgctttgaatacaaccctcgtaacacaagtgaagcaaaagctggaactaggcttcaagcattttttcatattcaggctcaaaagcttggactccacgtcacacccagtaatgtggaccaagttagcacaccaccggctgcgaaaaagtcacgaatctgactttgtccttctaaaggatatatttgaagaaaaacaaattgttcatgaaaatggaacattaaatcatgctgtataaagcaataacaattgattgaccacatgaaagtgtggcctgcactatattctcaattttaatattaagcactcaggagaatgtaggaaagatatcctttgctacagttttgttcagtatctaataagtttgatagatgtattggatacagtactggtttacagaggtttttgtacatttttgagatcattcatgtgtccagagatcttggaaaatattttttcacccacgatttattttgttattgatgatttttttttaaagtggtggtattaagggagagttatctacatggatgagtcttccgctatagcacagtttagaaaaggtgtttatgtcttaattaattgtttgagtacattctttcaacactacacatgaatgaatccaatcttataaccttgaagtgctgtaccagtgctggctgcaggtattaagtccaagtttattaactagatatttatttagtattgagagtaatttgtgaatttgttttgtatttataaaatttatacctgaaaaatgttccttaatgttttaaaccttttactgtgtttttattcctctaacttccttaatgatcaatcaaaaaaagtaacaccctccctttttcctgacagttctttcagctttacagaactgtattataagtttctatgtataactttttaactgtacaaataaaataacattttttcaaata

SEQ ID NO: 176678 - DNA, 4671 bp, Artificial Sequence
  derived and/or modified sequence
atgcccctgctgcacagaaagcccttcgtgagacagaagccccccgccgacctgagacccgacgaggaggtgttctactgcaaggtgaccaacgagatcttcagacactacgacgacttcttcgagagaaccatcctgtgcaacagcctggtgtggagctgcgccgtgaccggcagacccggcctgacctaccaggaggccctggagagcgagaagaaggccagacagaacctgcagagcttccccgagcccctgatcatccccgtgctgtacctgaccagcctgacccacagaagcagactgcacgagatctgcgacgacatcttcgcctacgtgaaggacagatacttcgtggaggagaccgtggaggtgatcagaaacaacggcgccagactgcagtgcagaatcctggaggtgctgccccccagccaccagaacggcttcgccaacggccacgtgaacagcgtggacggcgagaccatcatcatcagcgacagcgacgacagcgagacccagagctgcagcttccagaacggcaagaagaaggacgccatcgaccccctgctgttcaagtacaaggtgcagcccaccaagaaggagctgcacgagagcgccatcgtgaaggccacccagatcagcagaagaaagcacctgttcagcagagacaagctgaagctgttcctgaagcagcactgcgagccccaggacggcgtgatcaagatcaaggccagcagcctgagcacctacaagatcgccgagcaggacttcagctacttcttccccgacgacccccccaccttcatcttcagccccgccaacagaagaagaggcagaccccccaagagaatccacatcagccaggaggacaacgtggccaacaagcagaccctggccagctacagaagcaaggccaccaaggagagagacaagctgctgaagcaggaggagatgaagagcctggccttcgagaaggccaagctgaagagagagaaggccgacgccctggaggccaagaagaaggagaaggaggacaaggagaagaagagagaggagctgaagaagatcgtggaggaggagagactgaagaagaaggaggagaaggagagactgaaggtggagagagagaaggagagagagaagctgagagaggagaagagaaagtacgtggagtacctgaagcagtggagcaagcccagagaggacatggagtgcgacgacctgaaggagctgcccgagcccacccccgtgaagaccagactgccccccgagatcttcggcgacgccctgatggtgctggagttcctgaacgccttcggcgagctgttcgacctgcaggacgagttccccgacggcgtgaccctggaggtgctggaggaggccctggtgggcaacgacagcgagggccccctgtgcgagctgctgttcttcttcctgaccgccatcttccaggccatcgccgaggaggaggaggaggtggccaaggagcagctgaccgacgccgacaccaaggacctgaccgaggccctggacgaggacgccgaccccaccaagagcgccctgagcgccgtggccagcctggccgccgcctggccccagctgcaccagggctgcagcctgaagagcctggacctggacagctgcaccctgagcgagatcctgagactgcacatcctggccagcggcgccgacgtgaccagcgccaacgccaagtacagataccagaagagaggcggcttcgacgccaccgacgacgcctgcatggagctgagactgagcaaccccagcctggtgaagaagctgagcagcaccagcgtgtacgacctgacccccggcgagaagatgaagatcctgcacgccctgtgcggcaagctgctgaccctggtgagcaccagagacttcatcgaggactacgtggacatcctgagacaggccaagcaggagttcagagagctgaaggccgagcagcacagaaaggagagagaggaggccgccgccagaatcagaaagagaaaggaggagaagctgaaggagcaggagcagaagatgaaggagaagcaggagaagctgaaggaggacgagcagagaaacagcaccgccgacatcagcatcggcgaggaggagagagaggacttcgacaccagcatcgagagcaaggacaccgagcagaaggagctggaccaggacatggtgaccgaggacgaggacgaccccggcagccacaagagaggcagaagaggcaagagaggccagaacggcttcaaggagttcaccagacaggagcagatcaactgcgtgaccagagagcccctgaccgccgacgaggaggaggccctgaagcaggagcaccagagaaaggagaaggagctgctggagaagatccagagcgccatcgcctgcaccaacatcttccccctgggcagagacagaatgtacagaagatactggatcttccccagcatccccggcctgttcatcgaggaggactacagcggcctgaccgaggacatgctgctgcccagacccagcagcttccagaacaacgtgcagagccaggacccccaggtgagcaccaagaccggcgagcccctgatgagcgagagcaccagcaacatcgaccagggccccagagaccacagcgtgcagctgcccaagcccgtgcacaagcccaacagatggtgcttctacagcagctgcgagcagctggaccagctgatcgaggccctgaacagcagaggccacagagagagcgccctgaaggagaccctgctgcaggagaagagcagaatctgcgcccagctggccagattcagcgaggagaagttccacttcagcgacaagccccagcccgacagcaagcccacctacagcagaggcagaagcagcaacgcctacgaccccagccagatgtgcgccgagaagcagctggagctgagactgagagacttcctgctggacatcgaggacagaatctaccagggcaccctgggcgccatcaaggtgaccgacagacacatctggagaagcgccctggagagcggcagatacgagctgctgagcgaggagaacaaggagaacggcatcatcaagaccgtgaacgaggacgtggaggagatggagatcgacgagcagaccaaggtgatcgtgaaggacagactgctgggcatcaagaccgagacccccagcaccgtgagcaccaacgccagcaccccccagagcgtgagcagcgtggtgcactacctggccatggccctgttccagatcgagcagggcatcgagagaagattcctgaaggcccccctggacgccagcgacagcggcagaagctacaagaccgtgctggacagatggagagagagcctgctgagcagcgccagcctgagccaggtgttcctgcacctgagcaccctggacagaagcgtgatctggagcaagagcatcctgaacgccagatgcaagatctgcagaaagaagggcgacgccgagaacatggtgctgtgcgacggctgcgacagaggccaccacacctactgcgtgagacccaagctgaagaccgtgcccgagggcgactggttctgccccgagtgcagacccaagcagagaagcagaagactgagcagcagacagagacccagcctggagagcgacgaggacgtggaggacagcatgggcggcgaggacgacgaggtggacggcgacgaggaggagggccagagcgaggaggaggagtacgaggtggagcaggacgaggacgacagccaggaggaggaggaggtgagcctgcccaagagaggcagaccccaggtgagactgcccgtgaagaccagaggcaagctgagcagcagcttcagcagcagaggccagcagcaggagcccggcagataccccagcagaagccagcagagcacccccaagaccaccgtgagcagcaagaccggcagaagcctgagaaagatcaacagcgccccccccaccgagaccaagagcctgagaatcgccagcagaagcaccagacacagccacggccccctgcaggccgacgtgttcgtggagctgctgagccccagaagaaagagaagaggcagaaagagcgccaacaacacccccgagaacagccccaacttccccaacttcagagtgatcgccaccaagagcagcgagcagagcagaagcgtgaacatcgccagcaagctgagcctgcaggagagcgagagcaagagaagatgcagaaagagacagagccccgagcccagccccgtgaccctgggcagaagaagcagcggcagacagggcggcgtgcacgagctgagcgccttcgagcagctggtggtggagctggtgagacacgacgacagctggcccttcctgaagctggtgagcaagatccaggtgcccgactactacgacatcatcaagaagcccatcgccctgaacatcatcagagagaaggtgaacaagtgcgagtacaagctggccagcgagttcatcgacgacatcgagctgatgttcagcaactgcttcgagtacaaccccagaaacaccagcgaggccaaggccggcaccagactgcaggccttcttccacatccaggcccagaagctgggcctgcacgtgacccccagcaacgtggaccaggtgagcaccccccccgccgccaagaagagcagaatctag

SEQ ID NO: 176679 - protein, 1905 aa, Artificial Sequence
  derived and/or modified sequence
MEMEANDHFNFTGLPPAPAASGLKPSPSSGEGLYTNGSPMNFPQQGKSLNGDVNVNGLSTVSHTTTSGILNSAPHSSSTSHLHHPSVAYDCLWNYSQYPSANPGSNLKDPPLLSQFSGGQYPLNGILGGSRQPSSPSHNTNLRAGSQEFWANGTQSPMGLNFDSQELYDSFPDQNFEVMPNGPPSFFTSPQTSPMLGSSIQTFAPSQEVGSGIHPDEAAEKEMTSVVAENGTGLVGSLELEEEQPELKMCGYNGSVPSVESLHQEVSVLVPDPTVSCLDDPSHLPDQLEDTPILSEDSLEPFNSLAPEPVSGGLYGIDDTELMGAEDKLPLEDSPVISALDCPSLNNATAFSLLADDSQTSTSIFASPTSPPVLGESVLQDNSFDLNNGSDAEQEEMETQSSDFPPSLTQPAPDQSSTIQLHPATSPAVSPTTSPAVSLVVSPAASPEISPEVCPAASTVVSPAVFSVVSPASSAVLPAVSLEVPLTASVTSPKASPVTSPAAAFPTASPANKDVSSFLETTADVEEITGEGLTASGSGDVMRRRIATPEEVRLPLQHGWRREVRIKKGSHRWQGETWYYGPCGKRMKQFPEVIKYLSRNVVHSVRREHFSFSPRMPVGDFFEERDTPEGLQWVQLSAEEIPSRIQAITGKRGRPRNTEKAKTKEVPKVKRGRGRPPKVKITELLNKTDNRPLKKLEAQETLNEEDKAKIAKSKKKMRQKVQRGECQTTIQGQARNKRKQETKSLKQKEAKKKSKAEKEKGKTKQEKLKEKVKREKKEKVKMKEKEEVTKAKPACKADKTLATQRRLEERQRQQMILEEMKKPTEDMCLTDHQPLPDFSRVPGLTLPSGAFSDCLTIVEFLHSFGKVLGFDPAKDVPSLGVLQEGLLCQGDSLGEVQDLLVRLLKAALHDPGFPSYCQSLKILGEKVSEIPLTRDNVSEILRCFLMAYGVEPALCDRLRTQPFQAQPPQQKAAVLAFLVHELNGSTLIINEIDKTLESMSSYRKNKWIVEGRLRRLKTVLAKRTGRSEVEMEGPEECLGRRRSSRIMEETSGMEEEEEEESIAAVPGRRGRRDGEVDATASSIPELERQIEKLSKRQLFFRKKLLHSSQMLRAVSLGQDRYRRRYWVLPYLAGIFVEGTEGNLVPEEVIKKETDSLKVAAHASLNPALFSMKMELAGSNTTASSPARARGRPRKTKPGSMQPRHLKSPVRGQDSEQPQAQLQPEAQLHAPAQPQPQLQLQLQSHKGFLEQEGSPLSLGQSQHDLSQSAFLSWLSQTQSHSSLLSSSVLTPDSSPGKLDPAPSQPPEEPEPDEAESSPDPQALWFNISAQMPCNAAPTPPPAVSEDQPTPSPQQLASSKPMNRPSAANPCSPVQFSSTPLAGLAPKRRAGDPGEMPQSPTGLGQPKRRGRPPSKFFKQMEQRYLTQLTAQPVPPEMCSGWWWIRDPEMLDAMLKALHPRGIREKALHKHLNKHRDFLQEVCLRPSADPIFEPRQLPAFQEGIMSWSPKEKTYETDLAVLQWVEELEQRVIMSDLQIRGWTCPSPDSTREDLAYCEHLSDSQEDITWRGRGREGLAPQRKTTNPLDLAVMRLAALEQNVERRYLREPLWPTHEVVLEKALLSTPNGAPEGTTTEISYEITPRIRVWRQTLERCRSAAQVCLCLGQLERSIAWEKSVNKVTCLVCRKGDNDEFLLLCDGCDRGCHIYCHRPKMEAVPEGDWFCTVCLAQQVEGEFTQKPGFPKRGQKRKSGYSLNFSEGDGRRRRVLLRGRESPAAGPRYSEEGLSPSKRRRLSMRNHHSDLTFCEIILMEMESHDAAWPFLEPVNPRLVSGYRRIIKNPMDFSTMRERLLRGGYTSSEEFAADALLVFDNCQTFNEDDSEVGKAGHIMRRFFESRWEEFYQGKQANL

SEQ ID NO: 176680 - DNA, 8934 bp, Artificial Sequence
  derived and/or modified sequence
agtctgtcacacagggacatcaccctacagcagttcaggctgtgtggttcgcaggaagcatacactggctttttgattcttgctagttcccagctcacagtttgggaggatccaacaccaacctttacgtgaagtggaggcccaaggacagtgaggagctgggtggtcccagcctggagctgtgccagcctgacatggaaatggaggcaaacgaccattttaactttactggccttccccctgcacctgctgcctcaggactgaaaccctctccttcctcaggggagggcctctacactaacgggtctcccatgaacttcccccagcaagggaaaagtttgaatggggatgtgaatgttaatggcttatctactgtatctcacactactacttcagggattttgaactctgctccccactcctccagcacctcacacctccatcaccccagcgtggcctacgactgtctctggaactactcacagtacccatctgccaatcctggcagcaacctcaaggacccaccccttctctcccagttctcggggggacaatacccactcaacggcatccttgggggcagccggcaaccttcatccccaagtcataacactaaccttcgggctgggagccaagagttctgggccaacggtacccagagtcccatggggcttaactttgattcacaagaactgtatgattcctttcctgaccagaattttgaggtgatgcccaatggaccccctagttttttcacctccccacagacttctcctatgttgggatctagcattcaaacctttgcaccctcccaggaggtaggcagtggtatccatcctgatgaggcagcagaaaaggagatgacttcagttgtggcagagaatggcactggcttggtaggcagcttggagctggaagaagagcagccagaactgaagatgtgtggctacaatggctctgtcccttctgtggaatcgttacaccaagaggtctcagtcctggtccctgaccccacagtgagctgtttagatgatccttcacatcttcctgatcaactggaagacactccaatcctcagtgaagactctctggagcccttcaactctctggcaccagagccagtgagtggaggactatatggtattgatgacacggagctgatgggtgcagaggacaagctgcctcttgaggacagccctgtgatttctgcccttgattgcccttccctcaataatgctactgccttcagtctcctggcagatgatagtcaaacatcaacctctatctttgccagtcccacctctccacctgtcctaggggagtctgtcctgcaagataacagctttgacctgaataatggtagtgacgctgaacaggaagaaatggaaactcaatcttcagacttcccaccatccctgacccagccagctcctgatcagtcatccactattcagctacatccagcaacctcaccagcagtctcgccaacaacctccccagcagtctccctagtggtttctccagcagcctccccagaaatctctccagaagtttgtcccgcagcttctacagttgtctctccagcagtcttctcagtggtctctccagcttcctcagcagtcctcccagcagtctccttagaagtcccgttgacggcttcagtgacatccccaaaagcctctcccgtaacttccccagcagctgcctttccaacagcctccccagcaaataaggatgtcagcagctttctagaaaccactgctgacgtggaagagatcactggagaaggactcactgcttctggtagtggtgatgtcatgaggagacgtattgctaccccagaagaagttcgtcttcccctccaacatgggtggcggagagaggtgcgcatcaagaagggcagccaccgatggcagggggagacctggtattatggcccctgtgggaagaggatgaagcaatttccagaagtgatcaagtacctgagccgcaacgtggtacacagtgtccgccgagagcacttcagcttcagtccccgtatgcctgttggagatttctttgaagaaagagacacgccagagggcttgcagtgggtgcagctctcagcagaggagatcccgtcgaggattcaggcaattactggcaaacggggtcgacctcgaaacactgagaaggctaagactaaggaagtccccaaggtgaaacggggtcgaggtcggccacctaaggtcaaaatcactgagctattgaacaagacagacaaccgccccctaaagaaactggaggcccaagaaacattgaatgaggaggataaagcaaagattgctaaaagcaagaagaagatgaggcagaaggttcaacggggagagtgtcagactactatccaagggcaggccagaaataagcggaaacaagagaccaagagcttaaagcagaaggaagctaagaagaaatccaaggctgagaaagaaaaaggaaagacaaagcaggaaaaactgaaggaaaaagtcaagagggaaaagaaggagaaggtaaaaatgaaggaaaaggaggaggtgaccaaagccaagccagcctgtaaagcagataagaccctggccacacagaggcgcttggaggaacggcagaggcagcagatgatcttggaggaaatgaagaagccgacagaggatatgtgtctgactgaccaccagcccctgcctgacttctcacgagtccctggtctgacattgcccagtggagccttctcagactgcttgaccattgtggagttcctgcatagctttggcaaggtgctgggctttgatcctgccaaagatgtgcctagcctgggggtcctgcaggagggactcctgtgtcaaggtgacagcttgggtgaggtgcaagacctgctggtcaggctgctgaaggctgcactccatgatcctggctttccctcctactgtcagtccctaaagatcttgggggagaaggtgtctgagatcccactgacaagagacaatgtgtcagagatcctgcgctgcttccttatggcatatggagtagagccagccctctgtgaccgcctgcgcacccagccttttcaggcccagccaccccagcagaaggctgctgtcctggccttccttgtgcatgagctcaatggctccaccctcatcatcaatgagattgacaagactctggagagtatgtccagctacaggaaaaacaagtggattgttgaaggccggctccggaggctgaaaactgttctggccaagcgaactgggcggtctgaagtagagatggaagggccagaggaatgcctgggacggaggcgcagttctcggatcatggaggagaccagtggcatggaagaagaggaagaagaggagtctatagcagctgtccctggccgcaggggtcgaagagatggagaggttgatgccacagcatctagcatcccagagctagagcgccagatagaaaaactcagcaagcgtcagcttttctttcgcaaaaagctgcttcactcatcccagatgcttcgggcggtctccctgggtcaggaccgctacagacgtcgctactgggtattgccgtatttggctggtatctttgtagaaggaacagaggggaacttagttcctgaggaggtgataaagaaggaaactgactccttaaaagtggcagcccatgcgtcactcaaccctgccctcttctctatgaagatggagttagctggctccaacaccactgccagttctcctgcccgggcccgaggccgacctcgaaaaactaagcccgggtctatgcaacctaggcatcttaagtcccctgtcaggggtcaggattcagaacagccccaggcccagcttcagcctgaggctcagcttcatgctcctgcccagccccagcctcagcttcagcttcagcttcagtcccataaggggttcctggagcaagaaggctcccctttgtcactgggtcagagccagcatgacctcagccagtcagccttcctgtcttggctgagccagactcagagccatagctccctgttgagcagctcagtcctcacacctgatagcagtccgggaaaactagacccagctccatcacaacccccggaggagccagagcctgatgaggcagaatccagccctgatcctcaagcactctggtttaacatctcagcccagatgccctgcaatgctgcccccacaccgccccctgcagtttctgaggaccaacccactccctcccctcagcagcttgcctcctccaagccaatgaatagacctagtgctgccaacccttgttctccagtgcagttctcttccacgcccttggctgggttggcccctaagaggcgagcaggagaccctggagaaatgccacagagtcccacagggctgggacagcccaaacggagagggagacctcccagtaagttcttcaaacagatggaacagcgttacctaacccagctgacagcccagcctgtcccacctgagatgtgctcaggctggtggtggatacgagatcctgagatgttggatgccatgctcaaggccctacacccccgaggtatccgggagaaggcacttcacaaacaccttaacaagcacagggacttcttgcaggaagtctgcctgcggccctcagctgaccccatctttgagcccaggcaactacctgcctttcaagaagggattatgagctggtcccccaaagagaagacatacgagacagacctagcagtgcttcaatgggtagaggagctggagcagcgggttatcatgtctgatctgcagattcggggctggacatgtcctagcccagactctacccgtgaagacttggcctactgtgagcacctctccgactcccaggaggatatcacctggcgaggtcggggcagggagggactggcacctcagcgtaaaactaccaaccctttggacctggctgtgatgcggctggctgccctggaacagaatgtagaacggcggtacctgcgggagcccctctggccaactcatgaggttgtgctggagaaggccctgcttagcacacctaatggtgcccctgagggcaccactacagagatatcatatgagatcacccctcgcattcgtgtctggcgccagaccctcgagcggtgccggagcgcagcccaggtgtgcttgtgcctgggccagctggagaggtccattgcctgggagaagtctgtcaacaaagtgacatgtctagtctgccggaagggtgacaatgatgagtttcttctgctttgtgatgggtgtgaccgtggctgccacatttactgccatcgtcccaagatggaggctgtcccagaaggagattggttctgtactgtctgtttggctcagcaggtggagggagaattcactcagaagcctggtttcccaaagcgtggccagaagcggaaaagtggttattcgctgaacttctcagagggtgatggccgccgacgccgggtactgttgaggggccgagaaagcccagcagcagggcctcggtactcggaagaagggctctccccctccaagcggcggcgactctctatgcggaaccaccacagtgatctcacattttgcgagattatcctgatggagatggagtcccatgatgcagcctggcctttcctagagcctgtgaacccacgtttggtgagtgggtaccggcgcatcatcaaaaatcctatggatttttccaccatgcgggagcggctgctcaggggagggtacaccagctcagaggagtttgcggctgatgccctcctggtatttgacaactgccagactttcaacgaggatgactctgaagtaggcaaggctgggcacatcatgcgccgcttcttcgagagccgctgggaggagttttatcagggaaaacaggccaatctgtgaggcaagggaggtggggagtcaccttgtggcatctccccccaccttccaaacaaaaacctgccattttcacctgctgatgctgccctgggtccagactcaagtcagatacaaccctgatttttgaccttgcccttggcagtgccccacatcctcttattcctacatccctttctcccttccctcctcttgctcctcaagtaagaggtgcagagatgaggtccttctggactaaaagccaaaaaaagaaagaaaaaaataatttttcttttctgttttatttgctaattaaaaatggggagggggaaagtcgtccctacttcctcctccctgcttcctctcctcccctgtacgtgccccagcattctggggttatttaacaatagcaatagttctagtgaatgtgtgaaaccaagaaacactctgtactgtgtgcggacccgcagtgacggccagtaaagtggacttaactcccaagtgtgtcgcgccggacaccgggccctggacatgctgcttccatgttcagtcccttccctgcttctcgctgtctttcttttcccacctcccaccccccagttttcagattttctctcatccaataatgtaaaactatcgtgtacgggttcctccctccttttctcttctcccaaatcttttcccttcaaaggaaaaaaaaatgttcagaggtccctgtcttctgtccccatcttcctgccgatagctatcccctgtatgatgttggatgctcctcacatgctgagtttccagccttttctgaaactcagtagctggggagagggcagggaggcttcctgggccttccagcctccttccccacctccttcccaaaccctcttgggaactcctcagggacaactactgctgagtttgggtgcaccctaagatggaggccaggtagcaatggggccggcctcagagagagcgctgtgtgtgtgtgtgtgtgtgtgtgtgtgtgtgtgtgtcggcctcagagcgcgctgtgtgtgtgtgtgtgtgtgtcagcctcagagcgcgcgctgtgtgtgtgtgtgtgtgtgcgtgcttgtgaccctgtattgtttgataggatccattcagtttccccaagtacctgttttcattcccatttttcccattgtttaaaaccatcacttttttgtctttgggaaaccacaggaacaatttctctggagacaaggctgtgtctctctcctggtcatttttgttccagcctcttcagactgtgcaatctttcagcaggaactccctctcttctcggtagctttgaatcttaagcttctacgggagagtggtagaactggatcatttcctaatcccatttagttgtgcttttcttcatttacttcataccccaggaccccttccccagcagcagagaccctggagcacaggagagtagggaggaggggttctgggtccatcactgccctacatgtgactatgtccaagttaagcccccaacacgagaggaaagctgctgactcccagctatagccatgggcacttggccccctgcttttcctgctcagcagagcccctcccttcagagattacgggtacttgcactggggaggtggctgctggctggcccaagcagagagctgaggcatccaagaaatgttccattggggggtgggggtgccaggtgaggtggagcattccttgtattctggcagcactgaagagccactgaagggggtaggggcagtgtaggtcctggggcagcccctttattcctttatgccccttctccctcatagcctatttctaaagtcgccttttctgtcagataaacctcaaaacttttaattttatttgagatttttttttgcttttaagaggtggattgaagaatatttgaattgactttatattatgcataaatatttatattttatctaaataactgcgctgtaacaaactttgtgttagacagttgaaactgttagagttgggggctctgctttttccccctggcaattttcccctggtataagatgtgctagattaatttcattgtgaggtggatgggggagtgaaattgtgaggtggatgggggagtgaaatctccatggttcctgctttgtgttcctctcccagctccatctctttccctagggaccaggcactcatatggcggggtggggtcctagcctcagtttgaagaagtgggggctggagcggggttgggggtggtagggatagggcatgatcaaaggggccatttcttgcttttctttcctcatcttcactgcccccttgagctaggtggattttctcttcatgacaagagtatttggtagggaaagcaggtttaaaataaaaagacaacccaccccctgcccttttgcttccctcccatcagtctggttgacaggaagaaaccacaccatcaacaccaacaagtttctgtgttccttttacagcaaaagggactttttatataaccaaatgtggtgttttagtgactttttgataatgtacagttttttgtgaatttaaatttatttctttctatatttttaggaccaatctcatttttaataaggttaaaaagaaaaaaaaagtctagcgaaaaaactcctgtttttgccatgtgatgttccacaagtgcagctgtagaaaagtgcttgtcagttgttgaataaaaaaaaccacatttgatagagattcaaaagactctgtgtattcatcttcccttctacacacctgagggggagacggcgttgggataggtatgactggcttaagagaccacaggcaagggaacaacaggggctcctgttccataccctctgtgtggatggaaagggtcattagtgctcctgcctaaatgtctggctgagttgctggagcaaagggggattcagtgcatccaggtcctgccttgtgagatgtggccccagcttcctaagctgccacctctgtgttcctgtcatagcaaatatgggaccatcaccagcttaccacttcccactcacggataagacaccaagacgtagac

SEQ ID NO: 176681 - DNA, 5718 bp, Artificial Sequence
  derived and/or modified sequence
atggagatggaggctaacgatcactttaattttactggactcccgccagctccagccgcgagtggcctgaaaccttctcccagcagtggagaaggactgtacacaaacggatcaccgatgaattttccacagcagggaaaaagcctaaatggggatgtgaacgtgaacggcttatctactgtaagccatacgacaacctctggaatcctcaatagtgcaccacactcctccagcacaagccacctccatcacccctctgtagcctatgactgcctttggaactacagccagtacccttctgctaatcctggttctaatctgaaagaccctccattactgagtcagtttagtgggggacagtaccctctgaacggcattctcgggggaagtcggcagccctccagtccctcccacaataccaacttgcgagccggctctcaggagttctgggcaaacggcacacagtctcccatgggcttaaacttcgactctcaagagctatatgactctttcccagatcagaatttcgaggtcatgcctaatggaccccccagcttttttacaagtccacagacatccccgatgctgggttcttccatccaaacatttgcaccctctcaagaggtcgggtccggtatccatccagacgaggctgctgagaaggaaatgacaagcgtcgtggccgagaacgggactggcctcgtagggagcctcgaactggaggaggagcagcccgagctcaagatgtgcggatataacggttctgtgcccagcgtggagagcctgcatcaggaggtcagcgtgctggtgcctgacccgactgtgagttgtctggatgacccgtcccacctgcccgatcaactcgaggacactccaatcctctccgaggacagcctggagccatttaattctctcgctccagagccagtgtccggaggtttatatggtattgatgatacagagcttatgggtgccgaagataagcttccactggaggacagccctgtgatctccgcactggattgtccgtccctgaataacgccaccgcttttagtctgcttgccgacgactctcagacctctacttcaatttttgcctcccccacttctccccccgtactaggtgaaagcgtgctgcaagataactcattcgatctcaacaatggctccgacgcggaacaagaagagatggaaactcagagttcagactttcccccatctctgacacaaccagcacccgaccagagctccacaatccagttgcatcccgccacaagtccagccgtatctccaaccacctcgcccgccgtgtcattggtcgtaagtccagcagcctctccagaaatctctccagaagtgtgcccagctgcctcaacagtggtctcaccagcagtctttagtgtggtgagcccagcttcttccgccgtcctgccagctgtgtctctggaggttcccctgacagcttccgtcaccagccccaaagcctctcctgttactagccccgcagccgcattccctactgctagtccagcaaacaaagacgtcagctctttcctcgaaactaccgccgatgtagaagaaatcacaggtgaggggttgactgccagcggaagtggcgacgtcatgagacggagaatcgccacacccgaagaggtgcgactcccccttcagcatgggtggcgccgtgaagtccgcatcaagaaaggaagccaccgctggcagggagaaacatggtattacggaccctgtgggaaaagaatgaagcagttccccgaggttatcaaatacctcagccggaacgtggtccactccgtcaggcgtgagcatttctctttcagccctcggatgccagtcggggacttttttgaagagagggatacaccggaggggctccagtgggtgcaactgagcgccgaagaaatcccatccagaattcaagccattaccggcaagagaggccggcccagaaacacggagaaagcaaagaccaaggaggtgcccaaggtcaaaagaggccgggggcggcctccgaaggttaagatcacggagctcctaaacaagacggataatcgccctctgaagaaattggaggcgcaggaaacattaaatgaagaggacaaggccaaaatcgcaaagagtaaaaagaagatgcggcaaaaagttcagcgaggagagtgccaaacgacaattcagggtcaggctcgaaataagcggaaacaggagaccaagtccctgaagcagaaagaagcaaaaaagaaatcaaaggccgaaaaagaaaagggtaagaccaaacaggagaaactcaaggagaaagttaagagagagaagaaggagaaggtaaaaatgaaggagaaagaagaggtcaccaaagccaagccagcctgtaaggccgacaagacactagcaactcagcgaagactcgaggagaggcagcgtcaacagatgatcctcgaggagatgaaaaagcctaccgaagatatgtgccttacagaccatcagccactgccggacttcagtcgggtgcccgggctcacccttcccagcggagcattcagcgattgtctgaccattgtggagtttctacactcctttggcaaggtgctgggcttcgaccctgcgaaagacgtcccgtctctcggcgtgttgcaggaaggcctgctctgccaaggcgattcgctgggggaagttcaggacttactggtccgtctgctgaaagccgctcttcatgatcccggcttcccaagctattgccaatcattaaaaatccttggagaaaaggtttcggagatacctctgacacgcgataacgtgagcgagatcctgcggtgtttcctaatggcctatggcgtcgaacccgccctgtgcgacagattgcgtacccaaccctttcaagcccagccacctcaacaaaaagctgctgtgcttgcattcttagtacacgagctgaacggaagcacactcatcatcaatgagattgacaagacgctggaaagcatgagctcctaccgcaaaaataaatggatcgtggaagggcggttgcggcggctcaaaaccgtgcttgctaaacgaaccggacggagcgaagtggagatggagggacccgaggagtgcctgggtagaaggcgcagttcgaggatcatggaggagacctctgggatggaggaagaggaagaggaggagagtattgccgcggttccagggcgaagaggccgaagggatggagaagttgacgctacagcttcctcaattcctgaactagaacggcagatcgaaaagctgtcaaagcgtcaactcttttttaggaagaagcttttgcactcatcccagatgctaagagccgtttcactcggtcaggatcggtacagacgccggtactgggtgttaccatatctcgcgggtattttcgtcgaaggcacagaggggaatctcgtgcctgaagaggttataaaaaaagaaactgatagtctgaaggtggccgcacatgcatcactaaacccagccctgttttcaatgaagatggagttagctggtagcaatactacagccagctccccagctcgggctcgcggcagaccgcggaagaccaagcctggttctatgcaacccagacacctcaaaagcccagtgcgggggcaagatagtgaacagcctcaggctcagctgcagccggaagcccagttacatgcccctgcccagccacagccacaactgcagctccagttgcagtcacacaaaggatttctggagcaagagggctctccactgtctctgggacagtcccagcatgacctgagtcagtctgctttcctgagctggctgagtcagactcagtctcattcgtcactcctctcatcaagcgttctcacacccgatagtagtcccggcaaactcgatccggcccccagccaacccccagaagagcccgagcccgatgaggctgagtcctctccagatccgcaggctctttggttcaatatcagcgctcagatgccatgcaacgctgccccaactcctccacctgccgtcagcgaggaccagccgacgcccagcccacagcagcttgcttcctccaagccaatgaacaggcctagtgccgctaacccatgctctccagtacagttttcatccacacctttggccgggctcgctcctaagaggagagctggcgacccgggagagatgccccaatctcctacgggattgggccagccaaaacgcaggggacggcccccttctaagtttttcaaacagatggagcagcgatacctcacacagctcacggcgcagcctgttccaccggaaatgtgtagtggctggtggtggatacgagatcctgagatgttggacgccatgctgaaagcccttcacccacggggaatacgagaaaaggccctgcataagcatctcaacaagcatcgagacttcttacaggaggtgtgtctacgtccctctgcggatcccatttttgagccaagacagctccccgcatttcaagagggtattatgagttggtcacccaaggaaaagacttatgagacagacttagctgttctgcagtgggtagaagaactggaacagcgcgttattatgagcgatctacagatacgcggttggacatgcccatcccccgacagcacaagggaggacctcgcatactgcgaacatctttcggactcacaggaggatattacgtggagggggcggggacgcgagggccttgctccgcagaggaaaaccacaaaccccctggatctcgccgtgatgcggctcgctgcattagaacagaacgtggaaaggcggtatttaagggaaccattgtggccgacccacgaagtagtgctagaaaaggcactgctgtcgactccaaatggggctcccgaaggaacgaccaccgaaatcagctacgaaattacaccccggataagagtttggcgccagaccctggagcggtgtcgatctgcggcccaggtatgcctctgtctgggacaactggagcgcagcattgcctgggagaaatcagttaataaagtcacttgcctcgtctgcaggaagggagataatgacgaattcctcctgctgtgcgatggctgtgataggggttgccatatctactgccatcgccctaaaatggaagccgttcctgagggtgattggttctgcacagtgtgcctggcacaacaggtcgaaggtgagttcacccagaaaccagggtttccaaagcgcggccagaagcgcaaatccggctacagtttgaattttagcgaaggcgacggaagacgtaggcgcgttcttctgcgcggcagggaaagtcccgctgccggtcctcggtactcagaggaaggactctcacccagtaaaaggagacgcttaagcatgcgcaatcaccatagcgatctaaccttctgcgagatcatcctgatggaaatggagtcacacgatgcagcctggcccttcctggagcccgtaaatcctcggttggttagcggatatcgtagaattatcaaaaacccaatggactttagcacaatgcgggagcggctcctgcgtggaggctatacgtctagcgaagaatttgccgctgacgcacttctggtttttgacaactgccagaccttcaatgaagacgatagcgaagtaggaaaagcggggcacattatgcgccgctttttcgaaagtcgctgggaggaattttaccagggtaagcaagccaacctttag

SEQ ID NO: 176682 - DNA, 5718 bp, Artificial Sequence
  derived and/or modified sequence
atggagatggaggccaatgaccacttcaacttcaccggcctgcccccagccccagctgccagcggcctgaagcccagccccagcagtggagagggcctgtacaccaacggcagccccatgaacttcccccagcagggcaagagcctgaatggagatgtgaatgtgaatggcctgagcacagtgagccacaccaccaccagcggcatcctgaacagcgccccccacagcagcagcaccagccacctgcaccaccccagcgtggcctatgactgcctgtggaactacagccagtaccccagcgccaaccctggcagcaacctgaaggacccccccctgctgagccagttcagcggcggccagtaccccctgaatggcatcctgggcggcagccggcagcccagcagccccagccacaacaccaacctgcgggccggcagccaggagttctgggccaacggcacccagagccccatgggcctgaactttgacagccaggagctgtatgacagcttcccagaccagaactttgaggtgatgcccaatggacctccttccttcttcaccagcccccagaccagccccatgctgggcagcagcatccagacctttgcccccagccaggaggtgggcagcggcatccacccagatgaggccgctgagaaggagatgacctctgtggtggctgaaaatggcaccggcctggtgggcagcctggagctggaggaggagcagcctgagctgaagatgtgtggctacaatggatctgtgcccagcgtggagagcctgcaccaggaggtgtctgtgctggtgcctgaccccaccgtgtcctgcctggatgaccccagccacctgcctgaccagctggaggacacccccatcctgtctgaggacagcctggagcccttcaacagcctggcccctgagcctgtgtctgggggcctgtatggaattgatgacacagagctgatgggcgctgaggacaagctgcccctggaggacagccctgtgatcagcgccctggactgccccagcctgaacaatgccacagccttcagcctgctggctgatgacagccagaccagcaccagcatctttgccagccccaccagcccccctgtgctgggggagagcgtgctgcaggacaacagctttgacctgaacaacggcagtgatgctgagcaggaggagatggagacccagagcagtgacttcccccccagcctgacccagcctgccccagaccagagcagcaccatccagctgcacccagccaccagccctgctgtgagccccaccaccagccctgctgtgtccctggtggtgtccccagctgccagccctgagatcagccctgaggtgtgcccagctgccagcacagtggtgtccccagctgtgttttctgtggtgtccccagccagcagcgctgtgctgcctgctgtgtccctggaggtgcccctgacagcctctgtgaccagccccaaggccagccctgtgaccagccctgctgctgccttccccacagccagccctgccaacaaggatgtgtcctccttcctggagaccacagcagatgtggaggagatcactggagagggcctgacagccagcggcagcggagatgtgatgagaagacgcatcgccaccccagaggaggtgcggctgcccctgcagcacggctggaggcgggaggtgcgcatcaagaagggcagccaccgctggcagggcgagacctggtactacggcccctgtgggaagaggatgaagcagtttcctgaggtgatcaagtacctgagcagaaatgtggtgcacagcgtgcggcgggagcacttctccttcagccccaggatgcctgtgggggacttctttgaggagcgggacaccccagagggcctgcagtgggtgcagctgtctgctgaggagatccccagccgcatccaggccatcaccgggaagaggggccggcccaggaacacagagaaggccaagaccaaggaggtgcccaaggtgaagaggggccggggccggccccccaaggtgaagatcacagagctgctgaacaagacagacaaccggcccctgaagaagctggaggcccaggagaccctgaatgaggaggacaaggccaagatcgccaagagcaagaagaagatgaggcagaaggtgcagagaggagagtgccagaccaccatccagggccaggccaggaacaagaggaagcaggagaccaagagcctgaagcagaaggaggccaagaagaagagcaaggccgagaaggagaagggcaagaccaagcaggagaagctgaaggagaaggtgaagcgggagaagaaggagaaggtgaagatgaaggagaaggaggaggtgaccaaggccaagccagcctgcaaggctgacaagaccctggccacccagaggcggctggaggagcggcagaggcagcagatgatcctggaggagatgaagaagcccacagaggacatgtgcctgacagaccaccagcccctgcctgacttcagccgggtgcccggcctgaccctgcccagcggggccttcagtgactgcctgaccatcgtggagttcctgcacagctttgggaaggtgctgggctttgatcctgccaaggatgtgcccagcctgggcgtgctgcaggagggcctgctgtgccagggcgacagcctgggggaggtgcaggacctgctggtgcggctgctgaaggccgccctgcatgaccccggcttccccagctactgccagagcctgaagatcctgggggagaaggtgtctgagatccccctgacccgggacaacgtgtctgagatcctgcgctgcttcctgatggcctacggcgtggagcccgccctgtgtgaccggctgcggacccagcccttccaggcccagcccccccagcagaaggctgctgtgctggccttcctggtgcatgagctgaatggcagcaccctcatcatcaatgaaattgacaagaccctggagagcatgagcagctacaggaagaacaagtggatcgtggagggccgcctgcggcggctgaagacagtgctggccaagaggacaggccgctctgaggtggagatggagggccctgaggagtgcctgggcagaagaagaagcagccgcatcatggaggagaccagcggcatggaggaggaggaggaggaggagagcattgctgctgtgcccggccggcggggcagaagagatggagaggtggatgccacagccagcagcatccctgagctggagcggcagatcgagaagctgagcaagaggcagctgttcttcaggaagaagctgctgcacagcagccagatgctgcgggctgtgtccctgggccaggaccgctacagaagacgctactgggtgctgccctacctggccggcatctttgtggagggcacagagggcaacctggtgcctgaggaggtgatcaagaaggagacagacagcctgaaggtggccgcccacgccagcctgaacccagccctcttctccatgaagatggagctggccggcagcaacaccacagccagcagccctgcccgggcccggggccggcccaggaagaccaagccaggctccatgcagcccaggcacctgaagagccctgtgcggggccaggacagcgagcagccccaggcccagctgcagcctgaggcccagctgcacgccccagcccagccccagccccagctgcagctgcagctgcagagccacaagggcttcctggagcaggagggcagccccctgagcctgggccagagccagcacgacctgagccagagcgccttcctgtcctggctgagccagacccagagccacagcagcctgctgagcagctctgtgctgaccccagacagcagccctgggaagctggaccctgcccccagccagcccccagaggagcctgagccagatgaagctgagagcagcccagacccccaggccctgtggttcaacatcagcgcccagatgccctgcaatgctgcccccaccccacctcctgctgtgtctgaggaccagcccacccccagcccccagcagctggccagcagcaagcccatgaaccggcccagcgctgccaacccctgcagccctgtgcagttcagcagcacccccctggccggcctggcccccaagaggcgggccggggaccctggagagatgccccagagccccaccggcctgggccagcccaagaggcggggccggccccccagcaagttcttcaagcagatggagcagcgctacctgacccagctgacagcccagcctgtgcccccagagatgtgcagcggctggtggtggatccgggaccctgagatgctggatgccatgctgaaggccctgcacccccggggcatccgggagaaggccctgcacaagcacctgaacaagcaccgggacttcctgcaggaggtgtgcctgcggcccagcgctgaccccatctttgagccccggcagctgcctgccttccaggagggcatcatgtcctggagccccaaggagaagacctatgaaacagacctggccgtgctgcagtgggtggaggagctggagcagagggtcatcatgtctgacctgcagatccggggctggacctgccccagcccagacagcacccgggaggacctggcctactgtgagcacctgagtgacagccaggaggacatcacctggaggggccggggccgggagggcctggccccccagaggaagaccaccaaccccctggacctggccgtgatgaggctggccgccctggagcagaatgtggagcggcgctacctgcgggagcccctgtggcccacccatgaggtggtgctggagaaggccctgctgagcaccccaaatggagcccctgagggcaccaccacagagatctcctatgagatcaccccccgcatccgggtgtggaggcagaccctggagcgctgccgctctgctgcccaggtgtgcctgtgcctgggccagctggagaggagcatcgcctgggagaagtctgtgaacaaggtgacctgcctggtgtgcaggaagggggacaatgatgagttcctgctgctgtgtgatggctgtgaccggggctgccacatctactgccaccggcccaagatggaggccgtgcctgagggggactggttctgcaccgtgtgcctggcccagcaggtggagggggagttcacccagaagccaggcttccccaagaggggccagaagaggaagagcggctacagcctgaacttctctgaaggagatggaagaagaagaagagtgctgctgcggggccgggagagccctgctgctggcccccgctacagcgaggagggcctgagccccagcaagagaagaaggctgtccatgaggaaccaccacagcgacctgaccttctgtgagatcatcctgatggagatggagagccatgatgctgcctggcccttcctggagcctgtgaacccccggctggtgtctggctaccgccgcatcatcaagaaccccatggacttcagcaccatgagggagcggctgctgcggggcggctacaccagcagcgaggagtttgctgctgatgccctgctggtgtttgacaactgccagaccttcaatgaagatgattctgaggtgggcaaggccggccacatcatgaggcgcttctttgagagccgctgggaggagttctaccagggcaagcaggccaacctgtag

SEQ ID NO: 176683 - DNA, 5718 bp, Artificial Sequence
  derived and/or modified sequence
atggagatggaggccaacgaccacttcaacttcaccggcctgccccctgcaccagctgcttccggcttgaaaccctctccatctagtggagagggtttgtacaccaacggtagcccgatgaactttccccagcagggtaagtccttgaacggggacgttaacgtgaatggcttgtcaaccgttagccatacaactaccagcggcattctgaactcagctccccactcgagtagcacgtcacaccttcaccatccaagcgtcgcctacgattgcctttggaattactctcagtacccttccgccaaccccggatctaacttgaaggaccctccactgttatcccaattctcaggaggtcagtaccctcttaacgggatccttggagggtccaggcaacctagttcacctagccacaacacaaacctccgcgcaggctcccaggagttttgggcgaacggtactcagagcccaatgggacttaatttcgattcacaggagctctatgatagcttcccagaccagaatttcgaagtcatgccaaacggtccaccgtcattctttacgagtcctcagacctccccaatgcttggctcgagtattcagacttttgcaccgtcacaagaggtcgggtccgggattcacccagacgaagctgctgaaaaggagatgacatctgtggttgctgaaaacggcacgggcctggtcggtagcctggagctagaagaagaacaacctgagctcaagatgtgcgggtataatggctcggttccctccgttgagtctttgcaccaggaggtttctgtcctggtccctgatccaaccgtgtcctgtctggatgacccttcacacctgcccgatcagctggaggacactcctatcctcagcgaagatagcctcgagccattcaactcactagcccccgaaccagtcagcggaggactgtacggaatcgatgacaccgaactgatgggggccgaggataagttgcctctggaggattcccctgtgattagcgcgctagactgcccttcactaaataatgccactgcattctcactgctggctgacgatagtcagacttcgacgtccatctttgcctcacctacctctcctcccgtacttggggaatcagtgttgcaggacaacagctttgatctaaacaatggatcagacgccgaacaagaagaaatggagacccagtcatctgacttccctcccagcttaacccagcctgcccccgaccagagtagtaccattcaacttcatcctgcgacctcccctgcagtgtcacctactacctctccagctgtcagtctcgtcgttagccctgccgcctcaccagagattagcccggaggtttgcccagccgcttctaccgttgtgtcacccgcggtgttttctgtggtaagtcctgcatcttccgccgtgctcccagcggtgtctttggaggttcctctgacagcctcagtgacctctcctaaagcctctcccgtgacgtccccagccgctgcattcccgacagctagtccagcaaacaaagacgtgagtagcttccttgagaccaccgctgatgtagaggagatcactggtgaaggcctcacagcctcgggatccggagacgtcatgcgccggcgcatcgccacacccgaggaagtgcggttgcccctgcagcatggttggcgacgggaggtgcgtatcaagaaggggagtcacaggtggcagggcgagacgtggtactatgggccttgcgggaaacggatgaagcagttcccagaagtcatcaagtatctgtcacgaaacgtcgtacactccgtgcggcgcgagcacttctctttcagtcccagaatgccagtgggggacttctttgaagagagagatacccccgaaggtctgcaatgggttcaactgtctgccgaggaaatcccaagccgtatacaggctataaccggaaagaggggccggcccaggaatacagagaaagctaaaacaaaggaagtgcctaaggtgaagcgtgggcgcgggcgaccaccaaaggtgaagatcacagaacttctgaataaaaccgacaacaggccccttaaaaagctggaggcccaggaaacactcaacgaagaagataaggccaagatagccaaaagtaagaagaaaatgcgacagaaggtgcagagaggggagtgccagactacaatccaggggcaggcacgtaacaaaagaaaacaggaaacaaaatcacttaagcaaaaggaggcaaagaagaaatcgaaagcagaaaaggagaagggcaagacaaagcaggagaaattaaaggagaaggtgaagagagaaaaaaaagaaaaggtgaaaatgaaagagaaagaggaagttacaaaagcaaaacctgcgtgtaaagccgacaaaaccctggccacgcaaagaaggctcgaggagcgacagcggcagcagatgattctcgaggagatgaagaaaccgaccgaggatatgtgcctgactgatcaccagccacttcccgacttctcccgtgtacccggcctgaccctcccaagcggagccttctctgattgtctcacaattgttgaattcctgcattccttcggcaaagtattgggatttgatccagccaaggatgtgccgtccctgggcgtcctccaggaggggcttctctgccaaggcgactcactgggcgaagtgcaagacctactcgtgcggcttctaaaagcagctctgcatgaccccggctttcccagttattgccaaagtcttaagatcctgggagagaaagttagcgagatccctttaacgcgggacaatgtgtctgagattctgagatgcttcctcatggcctatggggtggaacccgccttatgcgaccgcttacgcacccaaccatttcaggctcagccacctcagcagaaggccgcagtgctcgctttcttagtccatgaactcaatggaagtaccctcattattaacgagattgataaaacgctggaaagcatgtcctcataccgaaagaataagtggatcgttgagggacgcctcagaaggctgaaaaccgttctggccaagaggactggtaggtctgaagtggagatggaagggccggaggaatgtctcggaagaaggcggtcttcacgtattatggaggagacatccgggatggaggaagaggaagaggaggagtccatcgcagctgtccccgggcgccgagggcggcgggacggagaagtggatgccacagcgtctagtatccctgagctggaacgacaaatcgagaagctctccaagcgtcagctgtttttccgaaagaagctattgcattctagccagatgctgcgggcagtgagtctggggcaagaccgatataggcgtcgctattgggtccttccatatcttgccgggatattcgtggagggcacagagggcaatctggttcctgaagaggtgatcaagaaagagacggattcactcaaagtggctgcccacgcctcgcttaacccggctctgttcagcatgaagatggagctggccggctcgaacactacagctagctcccccgccagggcacggggtcggcctagaaagacaaagccaggttccatgcagccccggcacctgaagtctccagtccgcggccaggattctgagcagcctcaggctcagttgcaacctgaagcccagttgcacgctcccgcacagccacagccgcagctgcagttacaattacagtcccacaagggctttttggaacaagagggctcgcctctttctctgggtcaatcgcaacacgatctgtcacagtccgctttcctgagctggctctctcagacacagtctcactccagtttgctgagttcgagcgtgctgacaccagacagcagccctggcaagctcgaccccgctccatcgcagcctcctgaggagccggagcccgatgaagctgagagcagtcccgacccccaggcattgtggtttaacatatcagctcagatgccttgtaatgctgcaccaacccctccacccgccgtgtcagaggaccaaccaacaccctccccccagcagctggcttcttctaagcccatgaaccggccatctgccgctaacccctgctcccccgtgcaattcagctcaacacctctggcaggacttgcacccaagcgtagagcgggggatcccggtgagatgcctcagtcacccacaggacttggccagcccaaacggaggggcaggccgcctagcaaattcttcaagcagatggagcagcggtatctaacacagctgacagcccagccggtgcccccagaaatgtgctctggatggtggtggatccgcgatcccgaaatgctggatgctatgttaaaagccttacacccacgagggatccgggagaaagctcttcataagcatttgaataaacatcgggacttcttgcaagaggtatgcttgcgcccaagcgcagaccccatattcgaaccccgtcagctccctgctttccaggagggaattatgtcatggtctccgaaggagaaaacatatgagactgacctggccgtgctccaatgggtcgaggaacttgaacaaagggtgattatgagcgacctgcagattaggggttggacttgcccctcccctgatagcacaagggaggatcttgcatactgtgagcacctgagcgattcccaagaggacatcacctggcgtggccgggggcgagaaggcttggcaccgcagagaaaaactacgaatccactggacctggctgtcatgcggctcgccgctttagaacagaatgtggagaggcggtacttgcgcgagcccttgtggcccacgcatgaggttgtgctcgagaaagcattattaagcactcctaatggtgcaccagagggcactaccacagagatcagctatgagataaccccaaggatacgagtgtggaggcagacactcgagcgatgtagatctgccgcacaggtctgtctttgccttggccagttagaacgctcaatagcctgggagaagagcgtcaacaaggtcacatgtctggtctgtaggaaaggagacaacgatgagtttcttctgttgtgtgatggatgtgacagaggatgccatatctattgccacaggcctaaaatggaggctgttcccgaaggcgattggttctgcactgtttgcttagctcagcaggtggaaggcgaatttacccaaaagccgggcttccccaagagagggcagaaaagaaaatctggctacagcctgaatttttcggagggggatggccgtcgaagaagggttctgcttaggggtagagagagccctgccgctggacctaggtacagtgaggaaggtttgtcaccctccaagaggaggcggctgtccatgagaaatcaccactctgatctgaccttttgcgagataatcctgatggagatggagtctcacgacgcggcatggccttttttagagcctgttaatccacgtctcgtctccggatataggcgcatcataaagaacccaatggacttttcaactatgagggagcgcctgttaaggggcgggtacacttcctcagaggaatttgccgccgatgctctgttggtatttgataactgccagacattcaatgaggacgatagcgaagtcggcaaggcaggccacattatgaggagatttttcgaaagtagatgggaagagttctatcaaggaaagcaagccaacctgtag

SEQ ID NO: 176684 - DNA, 5717 bp, Artificial Sequence
  derived and/or modified sequence
atggaaatggaggcaaatgaccactttaatttcaccggcctgccacccgctcccgctgcgtctggcctgaagccgtcaccatcctctggggaaggattgtacactaacggaagtcctatgaatttccctcagcaggggaagtcattaaacggcgacgttaatgtgaacggtttaagtacagtctcgcatactacaacaagtggcattctgaacagcgcgccacatagctcttctacctcccacctgcatcatccaagcgttgcctatgactgcctgtggaactacagtcagtacccctccgccaaccccggaagcaatttaaaggatcctccattgctgagtcaattcagcgggggacagtatcctctgaacggcattttaggcggaagccgccagccctcgagcccaagccacaacacaaaccttagagcgggatctcaggagttctgggctaacggaacacagagcccaatgggcctcaactttgacagccaggaactgtacgatagctttcctgaccagaacttcgaagttatgcctaacggccctccaagttttttcacttcgcctcagacctcccctatgctgggatcctcgatccaaacgtttgcacctagtcaggaagtgggatctgggatacatccggatgaagccgcagaaaaagaaatgacctctgtggtggccgaaaacgggaccggactggtcggctcactcgaattggaagaggagcagcccgagttgaaaatgtgcggttacaatggctcggtgccgtctgtagaatcactgcatcaggaggtatctgtgcttgtcccagacccgactgtctcttgcttggatgatcccagccaccttcccgatcagctcgaagacacccccatcctgtcagaagattcacttgaaccatttaattcgttagcacctgaaccagtgtctggcggactgtatggaattgatgacacagagctgatgggggcagaagataaattaccccttgaagactcgcccgtaattagtgccttggattgtccgagtctcaacaacgctactgccttctcccttctggctgacgacagccagacctccactagtatttttgcgagtcccactagccccccagtccttggagaatccgtgcttcaagataactcatttgacctcaacaatgggagcgacgcggaacaggaggagatggaaacacagagctctgatttcccaccttccctcacacaacccgcacctgatcagagctcaacaatccagctgcacccggcaacaagtcctgccgtgagtcccaccaccagtcccgctgtctctctggttgtatcccccgcagcgagtcccgagatttcgccagaggtgtgccctgccgctagtaccgtcgtaagcccagcagtgttctccgtggtgagcccagcctcttcagctgtgttacctgccgtcagcctcgaagttccattaacagcctcagtgactagtcctaaggcctctcccgtaacgagccctgccgctgcatttcctactgcctcaccggcaaacaaggatgtcagctcatttcttgagacgaccgccgacgtagaggaaatcaccggcgaggggctgactgccagtggctcaggagacgtgatgcgcagacgcattgcaacccctgaagaagtccggctgcccctgcagcacggctggcgtcgagaggtgaggataaaaaaaggtagccatagatggcagggagaaacctggtattatggcccatgtggcaaacgcatgaagcagttccccgaggtgattaagtatctgtcacgcaatgtagtacattccgtgcgcagggagcatttctccttctctccccgaatgccagtgggtgacttcttcgaggagagagatacacctgagggattgcagtgggtccagttatccgcggaagagatcccttcaaggatacaggcgatcactgggaagcgtggccgacctagaaataccgagaaagccaaaactaaggaagtaccaaaggtaaagagggggagggggcgtcccccaaaggtgaaaattaccgagctgctgaataaaacggacaaccggccactcaagaagctggaagctcaggagaccctcaacgaggaagacaaagccaagatcgctaagtctaagaaaaaaatgcgacagaaggtgcaacgcggagaatgccagactaccattcagggccaggcgaggaataaaaggaaacaagaaacaaagtccctaaaacagaaggaggctaagaaaaagtccaaagccgagaaggaaaaggggaagaccaagcaggaaaagctgaaagaaaaagttaaacgagagaagaaggagaaggtcaagatgaaggagaaagaggaggtgacgaaggcaaaaccagcttgcaaagccgacaaaacactggcaacacagagaaggctggaagagcgacagaggcagcagatgatcctggaggagatgaagaagccaaccgaggacatgtgcctgacagaccaccagccactcccagatttttctagggttccaggtctcactctgcctagtggggcattttcagattgcctcacaatcgtagagtttttacacagctttgggaaggtgcttggcttcgaccccgcaaaagatgtgcccagcctgggcgttctgcaggaaggactcctctgccagggcgactctctaggtgaagtgcaagacctactcgtgcgattgcttaaagcagctctccatgatcctgggtttcccagttactgtcagtcactcaaaatccttggggagaaggtatcggaaattccgttaacccgtgacaacgtatccgaaattctgaggtgttttctcatggcctacggggtagagccagctctatgtgatcgcttgcgcacacagccatttcaagcacagccgcctcagcagaaagcagccgtgctggcgttccttgtccatgagttgaatggtagcactctgatcatcaacgaaatagataagaccctcgaatctatgtcctcttacagaaaaaacaaatggatcgtggaaggtcgtctgagaaggctgaaaacagtgctggcaaagaggaccggccgtagcgaagtagaaatggaagggccagaagagtgcctgggcagacgacgcagcagtcggatcatggaggagacttcgggcatggaggaggaagaagaagaggagtcaattgctgcagtgcctggacgtcgcggtagacgcgacggggaggtggatgccacggcctcctccatcccagaactcgaaaggcaaatcgaaaagctctcaaagaggcaactgttctttaggaagaaactgctgcactccagtcagatgctgcgcgctgtttcgctaggtcaggatcgctacaggcgtaggtattgggtgctgccttacctggccggtatctttgtcgaaggtaccgaaggtaacctggtacctgaggaggtgattaaaaaagagacggattccctcaaggtcgcagctcatgcgtctctcaacccagctctgttctctatgaaaatggaacttgccggaagcaacactaccgcatcaagcccggcacgagcgagaggccgtccaagaaagactaagcctggctctatgcagcccagacatctaaagagccccgtgcggggacaggattccgagcagccgcaggctcagttgcagcccgaggcccagttacacgctccggcacaaccgcagccccagcttcagctgcaactgcaaagccacaagggctttctcgagcaagaaggatcaccactgagcctgggccagtcccaacatgacctgtcacagtccgccttcctcagctggctgagtcagacccagagtcactctagtctcttgtctagctctgtgctgacccccgattccagcccgggtaagctggaccctgctccttcccagcccccagaagaacctgaacctgacgaggctgaaagtagcccggacccccaggccctgtggtttaacatttctgcacagatgccctgtaacgccgctcccactccccctcctgctgtgtcagaggaccagcctaccccgtcaccacagcaacttgcttctagtaagccaatgaacaggccaagtgccgcaaatccatgcagtccagtccagttcagctcaactccactggctggtctggcccctaagaggagggccggagatccaggcgagatgcctcagagcccaacaggtttgggacagccaaagaggcggggtaggcccccttccaagtttttcaagcagatggaacagcgctatctaacccagttaacagcacagcctgtgccccctgaaatgtgttcaggctggtggtggatcagagacccagaaatgctggacgccatgctgaaggccttgcacccccgagggatcagggaaaaggcacttcataaacacctcaacaagcatcgcgatttcctccaagaggtttgcctgaggcccagtgcagaccccatctttgaacccagacagcttcccgctttccaggaggggatcatgtcttggtcccctaaggaaaagacatacgaaaccgacctggccgtgctacagtgggtcgaggagctcgagcagcgcgttattatgtccgacttgcagattcgcggatggacatgtccttcccctgatagcacaagggaggacttggcatattgcgagcacctgtctgatagtcaggaagacatcacatggcgtgggcgtggtagagaggggctggcaccccagaggaagactaccaaccccctggatctggcagtcatgcggctggccgctttggagcagaatgtggagcgacggtatctcagagaacctctctggcctacccacgaggtggtgctggagaaggcgttgctgtccacgccgaacggcgctccggaagggacgaccaccgaaatttcctatgaaatcacacctcgcatcagagtgtggcgacagacactggagcggtgccgcagcgccgcacaagtgtgcttatgcctggggcagctcgagagatccatagcctgggagaagtctgtgaacaaagtgacttgtctcgtgtgtcgaaagggagacaatgatgagttcctcctcctgtgtgatggctgtgaccggggatgccacatttactgccaccgacccaaaatggaagcagtacctgagggggactggttctgtaccgtgtgtctggcacaacaggtggaaggcgagtttacccaaaaaccaggtttcccaaagcgcggacaaaagcgaaaatccggttactccttgaacttctctgagggggatgggagacgcagacgggtcctcctgcgcggaagggaaagccctgcagctggtccccgatattcagaagagggtctgagcccctcaaagagaagaaggctcagtatgaggaatcaccacagcgacttgacgttttgtgagattatcttgatggagatggagtcccacgacgcggcttggcctttcctcgaacccgttaacccccgtctggtatcgggctatcgccgaatcatcaagaaccccatggactttagtaccatgcgagaacggctcctgcggggtggatatactagttctgaggagtttgctgccgacgcactgcttgtgtttgacaactgccagaccttcaatgaggatgattctgaggtgggcaaggcaggtcacattatgagacgattcttcgaatcacgctgggaagaattttatcaaggaaaacaggcaaatctgta

SEQ ID NO: 176685 - DNA, 8600 bp, Artificial Sequence
  derived and/or modified sequence
agtctgtcacacagggacatcaccctacagcagttcaggctgtgtggttcgcaggaagcatacactggctttttgattcttgctagttcccagctcacagtttgggaggatccaacaccaacctttacgtgaagtggaggcccaaggacagtgaggagctgggtggtcccagcctggagctgtgccagcctgacatggaaatggaggcaaacgaccattttaactttactggccttccccctgcacctgctgcctcaggactgaaaccctctccttcctcaggggagggcctctacactaacgggtctcccatgaacttcccccagcaagggaaaagtttgaatggggatgtgaatgttaatggcttatctactgtatctcacactactacttcagggattttgaactctgctccccactcctccagcacctcacacctccatcaccccagcgtggcctacgactgtctctggaactactcacagtacccatctgccaatcctggcagcaacctcaaggacccaccccttctctcccagttctcggggggacaatacccactcaacggcatccttgggggcagccggcaaccttcatccccaagtcataacactaaccttcgggctgggagccaagagttctgggccaacggtacccagagtcccatggggcttaactttgattcacaagaactgtatgattcctttcctgaccagaattttgaggtgatgcccaatggaccccctagttttttcacctccccacagacttctcctatgttgggatctagcattcaaacctttgcaccctcccaggaggtaggcagtggtatccatcctgatgaggcagcagaaaaggagatgacttcagttgtggcagagaatggcactggcttggtaggcagcttggagctggaagaagagcagccagaactgaagatgtgtggctacaatggctctgtcccttctgtggaatcgttacaccaagaggtctcagtcctggtccctgaccccacagtgagctgtttagatgatccttcacatcttcctgatcaactggaagacactccaatcctcagtgaagactctctggagcccttcaactctctggcaccagagccagtgagtggaggactatatggtattgatgacacggagctgatgggtgcagaggacaagctgcctcttgaggacagccctgtgatttctgcccttgattgcccttccctcaataatgctactgccttcagtctcctggcagatgatagtcaaacatcaacctctatctttgccagtcccacctctccacctgtcctaggggagtctgtcctgcaagataacagctttgacctgaataatggtagtgacgctgaacaggaagaaatggaaactcaatcttcagacttcccaccatccctgacccagccagctcctgatcagtcatccactattcagctacatccagcaacctcaccagcagtctcgccaacaacctccccagcagtctccctagtggtttctccagcagcctccccagaaatctctccagaagtttgtcccgcagcttctacagttgtctctccagcagtcttctcagtggtctctccagcttcctcagcagtcctcccagcagtctccttagaagtcccgttgacggcttcagtgacatccccaaaagcctctcccgtaacttccccagcagctgcctttccaacagcctccccagcaaataaggatgtcagcagctttctagaaaccactgctgacgtggaagagatcactggagaaggactcactgcttctggtagtggtgatgtcatgaggagacgtattgctaccccagaagaagttcgtcttcccctccaacatgggtggcggagagaggtgcgcatcaagaagggcagccaccgatggcagggggagacctggtattatggcccctgtgggaagaggatgaagcaatttccagaagtgatcaagtacctgagccgcaacgtggtacacagtgtccgccgagagcacttcagcttcagtccccgtatgcctgttggagatttctttgaagaaagagacacgccagagggcttgcagtgggtgcagctctcagcagaggagatcccgtcgaggattcaggcaattactggcaaacggggtcgacctcgaaacactgagaaggctaagactaaggaagtccccaaggtgaaacggggtcgaggtcggccacctaaggtcaaaatcactgagctattgaacaagacagacaaccgccccctaaagaaactggaggcccaagaaacattgaatgaggaggataaagcaaagattgctaaaagcaagaagaagatgaggcagaaggttcaacggggagagtgtcagactactatccaagggcaggccagaaataagcggaaacaagagaccaagagcttaaagcagaaggaagctaagaagaaatccaaggctgagaaagaaaaaggaaagacaaagcaggaaaaactgaaggaaaaagtcaagagggaaaagaaggagaaggtaaaaatgaaggaaaaggaggaggtgaccaaagccaagccagcctgtaaagcagataagaccctggccacacagaggcgcttggaggaacggcagaggcagcagatgatcttggaggaaatgaagaagccgacagaggatatgtgtctgactgaccaccagcccctgcctgacttctcacgagtccctggtctgacattgcccagtggagccttctcagactgcttgaccattgtggagttcctgcatagctttggcaaggtgctgggctttgatcctgccaaagatgtgcctagcctgggggtcctgcaggagggactcctgtgtcaaggtgacagcttgggtgaggtgcaagacctgctggtcaggctgctgaaggctgcactccatgatcctggctttccctcctactgtcagtccctaaagatcttgggggagaaggtgtctgagatcccactgacaagagacaatgtgtcagagatcctgcgctgcttccttatggcatatggagtagagccagccctctgtgaccgcctgcgcacccagccttttcaggcccagccaccccagcagaaggctgctgtcctggccttccttgtgcatgagctcaatggctccaccctcatcatcaatgagattgacaagactctggagagtatgtccagctacaggaaaaacaagtggattgttgaaggccggctccggaggctgaaaactgttctggccaagcgaactgggcggtctgaagtagagatggaagggccagaggaatgcctgggacggaggcgcagttctcggatcatggaggagaccagtggcatggaagaagaggaagaagaggagtctatagcagctgtccctggccgcaggggtcgaagagatggagaggttgatgccacagcatctagcatcccagagctagagcgccagatagaaaaactcagcaagcgtcagcttttctttcgcaaaaagctgcttcactcatcccagatgcttcgggcggtctccctgggtcaggaccgctacagacgtcgctactgggtattgccgtatttggctggtatctttgtagaaggaacagaggggaacttagttcctgaggaggtgataaagaaggaaactgactccttaaaagtggcagcccatgcgtcactcaaccctgccctcttctctatgaagatggagttagctggctccaacaccactgccagttctcctgcccgggcccgaggccgacctcgaaaaactaagcccgggtctatgcaacctaggcatcttaagtcccctgtcaggggtcaggattcagaacagccccaggcccagcttcagcctgaggctcagcttcatgctcctgcccagccccagcctcagcttcagcttcagcttcagtcccataaggggttcctggagcaagaaggctcccctttgtcactgggtcagagccagcatgacctcagccagtcagccttcctgtcttggctgagccagactcagagccatagctccctgttgagcagctcagtcctcacacctgatagcagtccgggaaaactagacccagctccatcacaacccccggaggagccagagcctgatgaggcagaatccagccctgatcctcaagcactctggtttaacatctcagcccagatgccctgcaatgctgcccccacaccgccccctgcagtttctgaggaccaacccactccctcccctcagcagcttgcctcctccaagccaatgaatagacctagtgctgccaacccttgttctccagtgcagttctcttccacgcccttggctgggttggcccctaagaggcgagcaggagaccctggagaaatgccacagagtcccacagggctgggacagcccaaacggagagggagacctcccagtaagttcttcaaacagatggaacagcgttacctaacccagctgacagcccagcctgtcccacctgagatgtgctcaggctggtggtggatacgagatcctgagatgttggatgccatgctcaaggccctacacccccgaggtatccgggagaaggcacttcacaaacaccttaacaagcacagggacttcttgcaggaagtctgcctgcggccctcagctgaccccatctttgagcccaggcaactacctgcctttcaagaagggattatgagctggtcccccaaagagaagacatacgagacagacctagcagtgcttcaatgggtagaggagctggagcagcgggttatcatgtctgatctgcagattcggggctggacatgtcctagcccagactctacccgtgaagacttggcctactgtgagcacctctccgactcccaggaggatatcacctggcgaggtcggggcagggagggactggcacctcagcgtaaaactaccaaccctttggacctggctgtgatgcggctggctgccctggaacagaatgtagaacggcggtacctgcgggagcccctctggccaactcatgaggttgtgctggagaaggccctgcttagcacacctaatggtgcccctgagggcaccactacagagatatcatatgagatcacccctcgcattcgtgtctggcgccagaccctcgagcggtgccggagcgcagcccaggtgtgcttgtgcctgggccagctggagaggtccattgcctgggagaagtctgtcaacaaagtgacatgtctagtctgccggaagggtgacaatgatgagtttcttctgctttgtgatgggtgtgaccgtggctgccacatttactgccatcgtcccaagatggaggctgtcccagaaggagattggttctgtactgtctgtttggctcagcaggtggagggagaattcactcagaagcctggtttcccaaagcgtggccagaagcggaaaagtggttattcgctgaacttctcagagggtgatggccgccgacgccgggtactgttgaggggccgagaaagcccagcagcagggcctcggtactcggaagaagggctctccccctccaagcggcggcgactctctatgcggaaccaccacagtgatctcacattttgcgagattatcctgatggagatggagtcccatgatgcagcctggcctttcctagagcctgtgaacccacgtttggtgagtgggtaccggcgcatcatcaaaaatcctatggatttttccaccatgcgggagcggctgctcaggggagggtacaccagctcagaggagtttgcggctgatgccctcctggtatttgacaactgccagactttcaacgaggatgactctgaagtaggcaaggctgggcacatcatgcgccgcttcttcgagagccgctgggaggagttttatcagggaaaacaggccaatctgtgaggcaagggaggtggggagtcaccttgtggcatctccccccaccttccaaacaaaaacctgccattttcacctgctgatgctgccctgggtccagactcaagtcagatacaaccctgatttttgaccttgcccttggcagtgccccacatcctcttattcctacatccctttctcccttccctcctcttgctcctcaagtaagaggtgcagagatgaggtccttctggactaaaagccaaaaaaagaaagaaaaaaataatttttcttttctgttttatttgctaattaaaaatggggagggggaaagtcgtccctacttcctcctccctgcttcctctcctcccctgtacgtgccccagcattctggggttatttaacaatagcaatagttctagtgaatgtgtgaaaccaagaaacactctgtactgtgtgcggacccgcagtgacggccagtaaagtggacttaactcccaagtgtgtcgcgccggacaccgggccctggacatgctgcttccatgttcagtcccttccctgcttctcgctgtctttcttttcccacctcccaccccccagttttcagattttctctcatccaataatgtaaaactatcgtgtacgggttcctccctccttttctcttctcccaaatcttttcccttcaaaggaaaaaaaaatgttcagaggtccctgtcttctgtccccatcttcctgccgatagctatcccctgtatgatgttggatgctcctcacatgctgagtttccagccttttctgaaactcagtagctggggagagggcagggaggcttcctgggccttccagcctccttccccacctccttcccaaaccctcttgggaactcctcagggacaactactgctgagtttgggtgcaccctaagatggaggccaggtagcaatggggccggcctcagagagagcgctgtgtgtgtgtgtgtgtgtgtgtgtgtgtgtgtgtgtcggcctcagagcgcgctgtgtgtgtgtgtgtgtgtgtcagcctcagagcgcgcgctgtgtgtgtgtgtgtgtgtgcgtgcttgtgaccctgtattgtttgataggatccattcagtttccccaagtacctgttttcattcccatttttcccattgtttaaaaccatcacttttttgtctttgggaaaccacaggaacaatttctctggagacaaggctgtgtctctctcctggtcatttttgttccagcctcttcagactgtgcaatctttcagcaggaactccctctcttctcggtagctttgaatcttaagcttctacgggagagtggtagaactggatcatttcctaatcccatttagttgtgcttttcttcatttacttcataccccaggaccccttccccagcagcagagaccctggagcacaggagagtagggaggaggggttctgggtccatcactgccctacatgtgactatgtccaagttaagcccccaacacgagaggaaagctgctgactcccagctatagccatgggcacttggccccctgcttttcctgctcagcagagcccctcccttcagagattacgggtacttgcactggggaggtggctgctggctggcccaagcagagagctgaggcatccaagaaatgttccattggggggtgggggtgccaggtgaggtggagcattccttgtattctggcagcactgaagagccactgaagggggtaggggcagtgtaggtcctggggcagcccctttattcctttatgccccttctccctcatagcctatttctaaagtcgccttttctgtcagataaacctcaaaacttttaattttatttgagatttttttttgcttttaagaggtggattgaagaatatttgaattgactttatattatgcataaatatttatattttatctaaataactgcgctgtaacaaactttgtgttagacagttgaaactgttagagttgggggctctgctttttccccctggcaattttcccctggtataagatgtgctagattaatttcattgtgaggtggatgggggagtgaaattgtgaggtggatgggggagtgaaatctccatggttcctgctttgtgttcctctcccagctccatctctttccctagggaccaggcactcatatggcggggtggggtcctagcctcagtttgaagaagtgggggctggagcggggttgggggtggtagggatagggcatgatcaaaggggccatttcttgcttttctttcctcatcttcactgcccccttgagctaggtggattttctcttcatgacaagagtatttggtagggaaagcaggtttaaaataaaaagacaacccaccccctgcccttttgcttccctcccatcagtctggttgacaggaagaaaccacaccatcaacaccaacaagtttctgtgttccttttacagcaaaagggactttttatataaccaaatgtggtgttttagtgactttttgataatgtacagttttttgtgaatttaaatttatttctttctatatttttaggaccaatctcatttttaataaggttaaaaagaaaaaaaaagtctagcgaaaaaactcctgtttttgccatgtgatgttccacaagtgcagctgtagaaaagtgcttgtcagttgttgaataaaaaaaaccacatttgatagaga

SEQ ID NO: 176686 - DNA, 5718 bp, Artificial Sequence
  derived and/or modified sequence
atggagatggaggccaacgaccacttcaacttcaccggcctgccccccgcccccgccgccagcggcctgaagcccagccccagcagcggcgagggcctgtacaccaacggcagccccatgaacttcccccagcagggcaagagcctgaacggcgacgtgaacgtgaacggcctgagcaccgtgagccacaccaccaccagcggcatcctgaacagcgccccccacagcagcagcaccagccacctgcaccaccccagcgtggcctacgactgcctgtggaactacagccagtaccccagcgccaaccccggcagcaacctgaaggacccccccctgctgagccagttcagcggcggccagtaccccctgaacggcatcctgggcggcagcagacagcccagcagccccagccacaacaccaacctgagagccggcagccaggagttctgggccaacggcacccagagccccatgggcctgaacttcgacagccaggagctgtacgacagcttccccgaccagaacttcgaggtgatgcccaacggcccccccagcttcttcaccagcccccagaccagccccatgctgggcagcagcatccagaccttcgcccccagccaggaggtgggcagcggcatccaccccgacgaggccgccgagaaggagatgaccagcgtggtggccgagaacggcaccggcctggtgggcagcctggagctggaggaggagcagcccgagctgaagatgtgcggctacaacggcagcgtgcccagcgtggagagcctgcaccaggaggtgagcgtgctggtgcccgaccccaccgtgagctgcctggacgaccccagccacctgcccgaccagctggaggacacccccatcctgagcgaggacagcctggagcccttcaacagcctggcccccgagcccgtgagcggcggcctgtacggcatcgacgacaccgagctgatgggcgccgaggacaagctgcccctggaggacagccccgtgatcagcgccctggactgccccagcctgaacaacgccaccgccttcagcctgctggccgacgacagccagaccagcaccagcatcttcgccagccccaccagcccccccgtgctgggcgagagcgtgctgcaggacaacagcttcgacctgaacaacggcagcgacgccgagcaggaggagatggagacccagagcagcgacttcccccccagcctgacccagcccgcccccgaccagagcagcaccatccagctgcaccccgccaccagccccgccgtgagccccaccaccagccccgccgtgagcctggtggtgagccccgccgccagccccgagatcagccccgaggtgtgccccgccgccagcaccgtggtgagccccgccgtgttcagcgtggtgagccccgccagcagcgccgtgctgcccgccgtgagcctggaggtgcccctgaccgccagcgtgaccagccccaaggccagccccgtgaccagccccgccgccgccttccccaccgccagccccgccaacaaggacgtgagcagcttcctggagaccaccgccgacgtggaggagatcaccggcgagggcctgaccgccagcggcagcggcgacgtgatgagaagaagaatcgccacccccgaggaggtgagactgcccctgcagcacggctggagaagagaggtgagaatcaagaagggcagccacagatggcagggcgagacctggtactacggcccctgcggcaagagaatgaagcagttccccgaggtgatcaagtacctgagcagaaacgtggtgcacagcgtgagaagagagcacttcagcttcagccccagaatgcccgtgggcgacttcttcgaggagagagacacccccgagggcctgcagtgggtgcagctgagcgccgaggagatccccagcagaatccaggccatcaccggcaagagaggcagacccagaaacaccgagaaggccaagaccaaggaggtgcccaaggtgaagagaggcagaggcagaccccccaaggtgaagatcaccgagctgctgaacaagaccgacaacagacccctgaagaagctggaggcccaggagaccctgaacgaggaggacaaggccaagatcgccaagagcaagaagaagatgagacagaaggtgcagagaggcgagtgccagaccaccatccagggccaggccagaaacaagagaaagcaggagaccaagagcctgaagcagaaggaggccaagaagaagagcaaggccgagaaggagaagggcaagaccaagcaggagaagctgaaggagaaggtgaagagagagaagaaggagaaggtgaagatgaaggagaaggaggaggtgaccaaggccaagcccgcctgcaaggccgacaagaccctggccacccagagaagactggaggagagacagagacagcagatgatcctggaggagatgaagaagcccaccgaggacatgtgcctgaccgaccaccagcccctgcccgacttcagcagagtgcccggcctgaccctgcccagcggcgccttcagcgactgcctgaccatcgtggagttcctgcacagcttcggcaaggtgctgggcttcgaccccgccaaggacgtgcccagcctgggcgtgctgcaggagggcctgctgtgccagggcgacagcctgggcgaggtgcaggacctgctggtgagactgctgaaggccgccctgcacgaccccggcttccccagctactgccagagcctgaagatcctgggcgagaaggtgagcgagatccccctgaccagagacaacgtgagcgagatcctgagatgcttcctgatggcctacggcgtggagcccgccctgtgcgacagactgagaacccagcccttccaggcccagcccccccagcagaaggccgccgtgctggccttcctggtgcacgagctgaacggcagcaccctgatcatcaacgagatcgacaagaccctggagagcatgagcagctacagaaagaacaagtggatcgtggagggcagactgagaagactgaagaccgtgctggccaagagaaccggcagaagcgaggtggagatggagggccccgaggagtgcctgggcagaagaagaagcagcagaatcatggaggagaccagcggcatggaggaggaggaggaggaggagagcatcgccgccgtgcccggcagaagaggcagaagagacggcgaggtggacgccaccgccagcagcatccccgagctggagagacagatcgagaagctgagcaagagacagctgttcttcagaaagaagctgctgcacagcagccagatgctgagagccgtgagcctgggccaggacagatacagaagaagatactgggtgctgccctacctggccggcatcttcgtggagggcaccgagggcaacctggtgcccgaggaggtgatcaagaaggagaccgacagcctgaaggtggccgcccacgccagcctgaaccccgccctgttcagcatgaagatggagctggccggcagcaacaccaccgccagcagccccgccagagccagaggcagacccagaaagaccaagcccggcagcatgcagcccagacacctgaagagccccgtgagaggccaggacagcgagcagccccaggcccagctgcagcccgaggcccagctgcacgcccccgcccagccccagccccagctgcagctgcagctgcagagccacaagggcttcctggagcaggagggcagccccctgagcctgggccagagccagcacgacctgagccagagcgccttcctgagctggctgagccagacccagagccacagcagcctgctgagcagcagcgtgctgacccccgacagcagccccggcaagctggaccccgcccccagccagccccccgaggagcccgagcccgacgaggccgagagcagccccgacccccaggccctgtggttcaacatcagcgcccagatgccctgcaacgccgcccccacccccccccccgccgtgagcgaggaccagcccacccccagcccccagcagctggccagcagcaagcccatgaacagacccagcgccgccaacccctgcagccccgtgcagttcagcagcacccccctggccggcctggcccccaagagaagagccggcgaccccggcgagatgccccagagccccaccggcctgggccagcccaagagaagaggcagaccccccagcaagttcttcaagcagatggagcagagatacctgacccagctgaccgcccagcccgtgccccccgagatgtgcagcggctggtggtggatcagagaccccgagatgctggacgccatgctgaaggccctgcaccccagaggcatcagagagaaggccctgcacaagcacctgaacaagcacagagacttcctgcaggaggtgtgcctgagacccagcgccgaccccatcttcgagcccagacagctgcccgccttccaggagggcatcatgagctggagccccaaggagaagacctacgagaccgacctggccgtgctgcagtgggtggaggagctggagcagagagtgatcatgagcgacctgcagatcagaggctggacctgccccagccccgacagcaccagagaggacctggcctactgcgagcacctgagcgacagccaggaggacatcacctggagaggcagaggcagagagggcctggccccccagagaaagaccaccaaccccctggacctggccgtgatgagactggccgccctggagcagaacgtggagagaagatacctgagagagcccctgtggcccacccacgaggtggtgctggagaaggccctgctgagcacccccaacggcgcccccgagggcaccaccaccgagatcagctacgagatcacccccagaatcagagtgtggagacagaccctggagagatgcagaagcgccgcccaggtgtgcctgtgcctgggccagctggagagaagcatcgcctgggagaagagcgtgaacaaggtgacctgcctggtgtgcagaaagggcgacaacgacgagttcctgctgctgtgcgacggctgcgacagaggctgccacatctactgccacagacccaagatggaggccgtgcccgagggcgactggttctgcaccgtgtgcctggcccagcaggtggagggcgagttcacccagaagcccggcttccccaagagaggccagaagagaaagagcggctacagcctgaacttcagcgagggcgacggcagaagaagaagagtgctgctgagaggcagagagagccccgccgccggccccagatacagcgaggagggcctgagccccagcaagagaagaagactgagcatgagaaaccaccacagcgacctgaccttctgcgagatcatcctgatggagatggagagccacgacgccgcctggcccttcctggagcccgtgaaccccagactggtgagcggctacagaagaatcatcaagaaccccatggacttcagcaccatgagagagagactgctgagaggcggctacaccagcagcgaggagttcgccgccgacgccctgctggtgttcgacaactgccagaccttcaacgaggacgacagcgaggtgggcaaggccggccacatcatgagaagattcttcgagagcagatgggaggagttctaccagggcaagcaggccaacctgtag

SEQ ID NO: 176687 - protein, 2168 aa, Artificial Sequence
  derived and/or modified sequence
MESGERLPSSAASSTTPTSSSTPSVASVVSKGGLSTGVASLSSTINPCGHLFRTAGDQPFNLSTVSSAFPMVSHPVFGLHSASSGHSEFGGLGTLGTPTALAAHPQLASFPGAEWWRTTDAHTRTGATFFPPLLGIPPLFAPPAQNHDSSSFHSRTSGKSNRNGPEKGVNGSINGSNTSSVIGINTSVLSTTASSSMGQTKSTSSGGGNRKCNQEQSKNQPLDARVDKIKDKKPRKKAMESSSNSDSDSGTSSDTSSEGISSSDSDDLEEDEEEEDQSIEESEDDDSDSESEAQHKSNNQVLLHGISDPKADGQKATEKAQEKRIHQPLPLASESQTHSFQSQQKQPQVLSQQLPFIFQSSQAKEESVNKHTSVIQSTGLVSNVKPLSLVNQAKKETYMKLIVPSPDVLKAGNKNTSEESSLLTSELRSKREQYKQAFPSQLKKQESSKSLKKVIAALSNPKATSSSPAHPKQTLENNHPNPFLTNALLGNHQPNGVIQSVIQEAPLALTTKTKMQSKINENIAAASSTPFSSPVNLSTSGRRTPGNQTPVMPSASPILHSQGKEKAVSNNVNPVKTQHHSHPAKSLVEQFRGTDSDIPSSKDSEDSNEDEEEDDEEEDEEDDEDDESDDSQSESDSNSESDTEGSEEEDDDDKDQDESDSDTEGEKTSMKLNKTTSSVKSPSMSLTGHSTPRNLHIAKAPGSAPAALCSESQSPAFLGTSSSTLTSSPHSGTSKRRRVTDERELRIPLEYGWQRETRIRNFGGRLQGEVAYYAPCGKKLRQYPEVIKYLSRNGIMDISRDNFSFSAKIRVGDFYEARDGPQGMQWCLLKEEDVIPRIRAMEGRRGRPPNPDRQRAREESRMRRRKGRPPNVGNAEFLDNADAKLLRKLQAQEIARQAAQIKLLRKLQKQEQARVAKEAKKQQAIMAAEEKRKQKEQIKIMKQQEKIKRIQQIRMEKELRAQQILEAKKKKKEEAANAKLLEAEKRIKEKEMRRQQAVLLKHQERERRRQHMMLMKAMEARKKAEEKERLKQEKRDEKRLNKERKLEQRRLELEMAKELKKPNEDMCLADQKPLPELPRIPGLVLSGSTFSDCLMVVQFLRNFGKVLGFDVNIDVPNLSVLQEGLLNIGDSMGEVQDLLVRLLSAAVCDPGLITGYKAKTALGEHLLNVGVNRDNVSEILQIFMEAHCGQTELTESLKTKAFQAHTPAQKASVLAFLINELACSKSVVSEIDKNIDYMSNLRRDKWVVEGKLRKLRIIHAKKTGKRDTSGGIDLGEEQHPLGTPTPGRKRRRKGGDSDYDDDDDDDSDDQGDEDDEDEEDKEDKKGKKTDICEDEDEGDQAASVEELEKQIEKLSKQQSQYRRKLFDASHSLRSVMFGQDRYRRRYWILPQCGGIFVEGMESGEGLEEIAKEREKLKKAESVQIKEEMFETSGDSLNCSNTDHCEQKEDLKEKDNTNLFLQKPGSFSKLSKLLEVAKMPPESEVMTPKPNAGANGCTLSYQNSGKHSLGSVQSTATQSNVEKADSNNLFNTGSSGPGKFYSPLPNDQLLKTLTEKNRQWFSLLPRTPCDDTSLTHADMSTASLVTPQSQPPSKSPSPTPAPLGSSAQNPVGLNPFALSPLQVKGGVSMMGLQFCGWPTGVVTSNIPFTSSVPSLGSGLGLSEGNGNSFLTSNVASSKSESPVPQNEKATSAQPAAVEVAKPVDFPSPKPIPEEMQFGWWRIIDPEDLKALLKVLHLRGIREKALQKQIQKHLDYITQACLKNKDVAIIELNENEENQVTRDIVENWSVEEQAMEMDLSVLQQVEDLERRVASASLQVKGWMCPEPASEREDLVYFEHKSFTKLCKEHDGEFTGEDESSAHALERKSDNPLDIAVTRLADLERNIERRIEEDIAPGLRVWRRALSEARSAAQVALCIQQLQKSIAWEKSIMKVYCQICRKGDNEELLLLCDGCDKGCHTYCHRPKITTIPDGDWFCPACIAKASGQTLKIKKLHVKGKKTNESKKGKKVTLTGDTEDEDSASTSSSLKRGNKDLKKRKMEENTSINLSKQESFTSVKKPKRDDSKDLALCSMILTEMETHEDAWPFLLPVNLKLVPGYKKVIKKPMDFSTIREKLSSGQYPNLETFALDVRLVFDNCETFNEDDSDIGRAGHNMRKYFEKKWTDTFKVS

SEQ ID NO: 176688 - DNA, 8145 bp, Artificial Sequence
  derived and/or modified sequence
acttggttcatgaagccttcgcctagaagtgaagctgctgaacaaaccttgagaagaatcatctcctgcttcaatctgctgctggataggaactaatcagagagagagaggcggaagacggagaaggagggagtcgaaggctttcccgatcacaaatctcacctccactacaactctctttatacttttcttgcagaaataataatagaaataaggaggtggtggggtttccaaaaatcttaaccttcaaccatctggggaaaaggcaaaaatcccatctaccgcaactctcagttcgagagtaaaggtttcccaacagtgatgtcacaagattgaccacattgatcacaatatggagtctggagaacggttaccatcctcagcagcctcctctactacaccaacttcatcttcgacaccttctgtggcttcagtagtttcaaaaggtggcctttccactggagttgcttcacttagctctacaatcaacccatgtggacatttattcagaacagctggggatcaaccgtttaacctgtccacagtgtcgagtgccttcccaatggtcagccacccagtctttggtctacattcagccagctcagggcattcagaatttggtggtttggggacacttggtacacccacagccttagccgcacatccccaactagcatcttttccaggtgcagaatggtggcgaacaactgatgctcatactcgtacaggagcaaccttctttccaccattactgggaattccaccactatttgctcccccagcccagaatcatgattcttcttcattccattcaaggacttcgggaaaaagtaatcgaaatggtcccgaaaaaggtgtaaatgggtcaataaatggaagtaatacatcatctgtaattggtatcaacacatctgtactatccactactgcttcaagttccatgggacaaactaaaagtacaagctcaggtggaggaaatcgaaaatgtaatcaggaacaaagcaaaaaccagcctttggatgctagagttgacaaaatcaaagataagaaaccaaggaagaaagcaatggaaagttctagcaacagtgatagtgattcaggcacatcatcagacacctcaagtgaaggcattagtagcagtgattcagatgatctagaagaagatgaagaagaagaagatcaaagtattgaagaaagtgaagatgatgattctgattcagagagtgaagcacaacataaaagtaacaaccaggtgctattacatggtatttcagacccaaaagcagatggacagaaagcaactgaaaaagcccaggaaaaaagaatacaccagccattacctcttgcgtctgaatcccagactcactcattccaatcccagcagaagcagcctcaggttttgtcacagcagcttccatttattttccaaagctctcaggcaaaggaggaatctgtgaacaaacacaccagtgtaatacagtctacgggattggtgtccaatgtgaaacctttatctttggtaaatcaagccaaaaaggaaacttacatgaaactcatagttccttctcctgatgttcttaaagcagggaataaaaatacctctgaagaatctagtttattgaccagtgaattgagatccaaacgggaacaatataaacaggcattcccatcacagttaaagaaacaagagtcatcgaagagcctgaagaaggttattgcagctttgtcaaatccaaaagcaacctctagttcaccagcacatccaaaacaaacattagaaaacaaccacccaaatccattcttgacaaatgcacttttaggtaatcaccaaccaaatggagttattcaaagtgtcattcaagaagctcctctagcacttactaccaaaactaaaatgcagagcaagattaatgaaaacattgctgctgcaagtagcacccctttttcctcacctgtaaatctgagtacaagtgggagaagaacccctggcaatcagacacctgtaatgccctctgcctctcccatcctgcatagtcaagggaaggaaaaagcagttagcaataatgtaaacccagtaaaaacacagcatcactcccatcctgcaaaatctttagtggaacaattcagaggaacagattcagacattcccagtagtaaagattctgaagattcaaatgaggatgaagaggaagatgatgaagaagaagatgaggaagatgatgaagatgatgaatctgatgacagccaatcagaatcagatagtaattcagaatcagatacagaaggatcagaagaagaagatgatgatgataaagaccaagatgaatcagatagtgatactgaaggagagaaaacttcaatgaaactgaataaaacaacttcctctgtcaaaagcccttccatgagtctcacaggtcactcaacacctcgtaacctccacatagcaaaagccccaggctctgctcctgctgccttatgttctgaatcccagtcacctgcttttcttggtacatcttcttccacacttacttcaagcccacactctggcacttccaaaagaagaagagtaacagatgaacgtgaactgcgtattccattggaatatggctggcagagagagacaagaataagaaactttggagggcgccttcaaggagaagtagcatattatgctccatgtggaaagaaacttaggcagtaccctgaagtaataaagtatctcagcagaaatggaataatggatatctcaagggacaatttcagcttcagtgcaaaaataagagtgggtgacttctatgaagccagagatggaccgcagggaatgcagtggtgtcttttgaaagaagaggatgtcattcctcgtatcagggcaatggaaggtcgtagaggaagaccaccaaatccagatagacaacgagcaagagaggaatccaggatgagacgtcggaaaggtcgacctccaaatgttggcaatgctgaattcctagataacgcagatgcaaagttgctaagaaaactgcaagctcaagaaatagccaggcaagcagcacaaataaagcttttgagaaaacttcaaaagcaggaacaggctcgggttgctaaagaagccaaaaaacaacaagcaataatggctgctgaggagaagcggaagcaaaaagaacagataaagattatgaaacagcaggaaaaaattaagagaatacagcaaatcagaatggaaaaagaacttcgagctcagcaaattctagaggctaaaaagaaaaagaaggaagaagcggcaaatgccaaattattggaggccgagaaacgaataaaggaaaaagaaatgagaagacaacaagctgttcttctgaaacatcaggaacgagagcgaaggcgacaacacatgatgcttatgaaagctatggaagctcgtaaaaaagcagaagaaaaagagcggttgaaacaagaaaaacgtgatgagaaaagattaaataaagagcgtaaactagagcagcgaagattagaattagaaatggcaaaggaactaaagaagcctaatgaagacatgtgcttagcagaccaaaagcctttgccagagttgcctcgtattccaggacttgttctctctggaagtacattttcagactgtctcatggtggtgcagttcttacgaaactttggtaaagttttgggctttgatgtgaatattgatgttccaaacctgagtgttcttcaagagggattgctaaatataggggacagcatgggtgaagtacaagacttgcttgtgaggctcctctcagctgctgtatgtgatccaggtctaataacaggatacaaggctaaaacagctcttggagaacatttgctgaatgttggtgtgaatcgagacaatgtttccgagattttacagatatttatggaagcccactgtggacaaactgagcttactgaaagtctgaagaccaaagcttttcaggctcacactccagcacagaaagcttcagtcctggctttcctgatcaatgaactggcatgcagcaagagtgtggtcagtgaaatcgacaagaacattgattatatgtcaaacttgaggagagataaatgggtggtagaaggtaaactccgcaagctcagaatcattcatgctaagaaaacaggcaaaagagacacttcaggtggcattgatctgggagaagagcagcatcccttgggcacacccactccaggacgcaagcgaagaaggaagggaggagacagtgattatgacgatgatgatgacgatgacagtgatgaccaaggggatgaagatgatgaggatgaagaagataaagaagacaaaaaaggaaaaaagactgatatctgtgaagatgaggatgaaggtgaccaagcagcaagtgttgaagagctggaaaaacagattgaaaaactgagtaaacaacagagtcagtacagaaggaagctctttgatgcgtctcactcattgcgttcagtgatgtttggccaagatcgttacagacgccggtactggattcttccccaatgtggggggatttttgtagaaggcatggagagtggtgaaggactagaagaaattgcaaaagaaagagaaaaactgaaaaaggcagaaagtgtccagatcaaagaagaaatgtttgagacttctggggacagtttaaattgttcaaatacagatcactgtgaacaaaaggaagatcttaaagaaaaagataacacaaatctattccttcagaaacctggctctttttccaaattaagcaagcttttggaagtagctaagatgcctcctgagtcagaggttatgacccccaaaccaaatgctggtgcaaatgggtgcacgttgtcttatcagaacagtggaaaacattcactgggcagcgttcagtcaacagcaacgcaaagcaatgtggaaaaggcagactctaataatctgtttaatactggttcaagtggtccagggaagttctacagtcctctccccaatgaccagttactaaaaacgctgactgaaaagaatagacaatggtttagtcttttgccacgaacaccctgtgatgacacttcacttactcatgccgatatgtcaactgcttctttggtgactcctcagtctcagccaccatctaagtcaccttcacctaccccagctcctcttggatcttctgctcagaatcctgttggcttaaatccatttgctttatcacctcttcaggtgaaaggtggagtatctatgatgggacttcagttttgtggatggcccactggtgtggttacttctaatattccatttacatcatctgtacctagtctaggatcggggttagggttatcagaaggaaatggtaattcattcttgacttccaatgttgcttcaagtaaaagtgaatctccagtaccacagaatgaaaaggccacttcagctcaacctgcagctgttgaagtagcaaaaccagtagattttcctagtccaaaacctattccagaagaaatgcagtttggttggtggagaattattgacccagaggacctaaaagctttgctcaaagtgctgcatctcagaggaataagagaaaaggcattacaaaaacaaattcagaaacatttggattatattactcaagcctgcctcaagaataaggatgttgctattattgaactgaatgaaaatgaagaaaaccaagtaactcgagatattgtggagaactggtcagtagaagaacaagcaatggaaatggatttgagtgtccttcaacaggtagaagatctagaaaggagagttgcatcagcaagtttgcaagtgaagggttggatgtgtccagagcctgcatcagaaagggaggacttggtatattttgaacataaatcatttactaaattgtgcaaggagcatgatggagaatttactggcgaagacgaaagcagtgcacatgcactagaacggaagagtgacaaccccctagatatagctgtaaccaggctggctgatttggagcggaacattgaaagaagaattgaagaggatattgctccagggctcagggtatggagaagggcattatcagaagctcgcagtgctgcacaggtagctctgtgcattcagcaattacagaaatcaatagcatgggaaaaatcaattatgaaagtttactgccaaatctgtcgaaagggagataatgaagaactgcttcttctttgtgatggctgtgacaaaggctgtcatacctactgccatagacccaagattacaacaatcccagatggagactggttttgtccagcttgcattgctaaggcaagtggtcaaactctaaaaatcaaaaaacttcatgtcaaaggaaaaaagactaatgagtcaaagaaaggcaagaaggtaactttaacaggagatactgaagatgaagactctgcatctacaagtagttcactaaaaagaggaaacaaagacctcaagaaaagaaaaatggaggaaaacacttctattaacttgtcaaaacaagaaagttttacttcagttaagaaacctaaaagagatgactccaaggacctagctctttgcagtatgattctgactgaaatggaaactcatgaggatgcatggccttttctacttcctgtaaacttgaaacttgttcctggttataagaaagttattaagaagcctatggatttttccacaattagagagaaactaagtagtggacagtatccaaaccttgaaacctttgctctagatgtcaggcttgtttttgacaactgtgaaacatttaatgaagatgattctgatataggcagagctggccacaatatgaggaagtattttgaaaaaaagtggacagatactttcaaagtgagctgaagttataataatctctttatttttttccttctaaacaaggacaaatgagaccagcaatgtgaactgtatttacataaacgtgcaaggcacatacataatgactttctttttccttaagtataaaaaaaaagtatcagaagaatgataccatttttaaaggcttcattcctacaacaaccaaggccctcggttattggtttgtgtgatttatcagctaatttaggtagaacagggaagcacacccaaagaattttcaaaggaaagggtgttatagtgcaatagcaattaaaatatatcaaatcgcactgaatactcaacaccagagctctaatgtgggaaatggttctcctttccctctcaataaatatctatttttcatttttttactttgtagtttattttttagtgaatgtatttaattttatgaattatttatgattaaaccacatccagaatcttcgttttctgtgaaaaggaagaactagaaaattgctttaaatcttgaaaatacaaggaatgttttaaaatataaaacaaagccaagttaaactgtttacactgatgtgctataaaagcaccaaaaagaaactttactgtagagttacaagtacatttatatatatatgttgctgcatcacttgtgtagttaaattgtatttcaaaacagtgaaaaaattgacatgtatatactgttcattcttgtttatattaagtcttgttttaaatatgtattatgtgtatatattgtttgcagacattattgttcatgccttagaggattgtagcattttattttcgtctgaaggtaatgatagctatacagtctgtacagtaattatcctctaccaacactgtggcgtctccttaatcttggtagtgcctgcctttgaaacagggtgtaggggatattagttttccatttttctattttgttatataattttaagccaccagggcctaaattaaagtataatcatttgtatccatgtggaataaaattgtgacaatttcctacgcacacagtattttttcatagaaacatttccctcccatttgccttgcctcagaaataaatttaaaagacgtttgtaaccactgtgttttatctactgtgtgttgtggtggcctgttggaggcaaatagatcagattttttttgtacctacgtaagagtacttgaagttttatttaaaataaaatgttgtggaaaaggtagcattctttttttaggagtgttatttttcactatgtgtggcacggatacaataaaagacttttacaaactaa

SEQ ID NO: 176689 - DNA, 6507 bp, Artificial Sequence
  derived and/or modified sequence
atggagagtggtgagagactgccatcttccgcggcaagctcgactactccaacgtccagcagcaccccatccgtcgctagcgtcgttagcaaggggggcctgtctactggggtagcctctttatcgtcaacaattaacccctgcggccatctcttcaggacagctggagaccagccctttaatctgagcaccgtgagctccgccttccccatggtaagccacccagtctttggcttacatagcgccagttcaggacattctgaattcggtggattgggcactttaggaacgccgaccgcactggctgcacacccccagctagcttcctttcctggggccgagtggtggcggactaccgacgcgcatacaaggacaggagctacatttttcccgcccttactaggtataccgcccctttttgcaccaccagcccagaaccacgattcatcctcctttcactcacggacaagcggaaaaagtaatagaaacggccctgagaagggtgttaatggatccatcaatggcagcaacacgagttcagtgatcggaataaatacatccgtgctttcgactacggcctcttcaagtatgggacagacgaagtctacctctagcggcggtgggaatcgaaagtgtaatcaggagcagtccaagaaccagcccctggatgcccgagtagataagatcaaggacaagaagcccaggaagaaagcaatggaatcctcatctaactccgactccgattcaggaacttcttcagacaccagtagcgaaggtatttcatcttcagactcggatgacctcgaagaggacgaagaggaggaggatcagtccattgaagagagcgaggacgacgacagcgatagcgaatcggaagctcagcataagtccaataatcaggttctgctccacgggatcagcgatcctaaagcagatgggcagaaggctacagagaaggcgcaagaaaagcggatccaccagccgttgccattggcttcagagtcacaaacccacagctttcagtcccagcagaagcagccccaagtgctgtcgcagcaactgcctttcatcttccaaagctcgcaggcaaaagaagaatctgtgaacaagcacacgagcgtaattcagtcgaccggacttgtgtcaaacgttaagccattaagcctggtgaaccaggctaaaaaggaaacatacatgaaactgatcgtgccttccccggatgtgcttaaagcagggaataaaaacacgtctgaggagtcctccctcctgaccagcgagctccgatccaagagagagcagtacaaacaggcctttccatcacagctgaagaagcaggagtcttccaagtctcttaagaaggttatagccgcgctctctaacccaaaagccactagcagctcacctgcccatcccaagcagaccctagaaaacaatcatccaaacccatttctgactaatgcattactgggcaaccaccagcccaatggcgtgatccagtctgtgatccaagaggccccattggccctaacgacaaaaaccaagatgcagtcaaagatcaatgagaatattgctgctgcctctagcactcccttctccagtccggtgaatctgtcaacgtccgggagacgcacacccggcaaccaaacccccgttatgccatccgcaagccccatcctgcatagccagggcaaagagaaagccgttagcaataacgttaatccagtcaaaacacagcaccactcccatcctgccaagtcactggtggaacagtttagggggactgattcagatatcccctccagcaaggactccgaggattccaatgaggacgaagaggaagacgacgaagaggaggacgaagaggacgacgaggacgacgaatctgacgactcccaatctgaatcagattccaatagcgaaagcgacacagaggggagcgaggaagaggacgatgatgacaaagaccaggacgagagtgacagtgatactgaaggagagaagacatcaatgaagctgaacaagacaaccagctcagttaagtcaccctctatgagcttgaccgggcattccacgccaaggaacctccacattgcaaaggcaccaggatcggctcctgccgcgttgtgctccgagagccaatcaccggcttttctcggcacctccagttccacgctgacctcatctccgcacagtggtacatcgaaaagaaggagagtgactgacgagagggagttgcggatacccctggagtatggatggcagagagaaacgcgtattagaaacttcggcggtcgattgcaaggggaagtggcctactacgcaccctgcggcaagaaacttaggcagtacccggaagtaatcaagtatctgtcccggaatggcatcatggatattagccgggataattttagtttttccgcaaagatccgagtcggcgacttttacgaggcacgggatggcccacagggcatgcaatggtgcctgctgaaggaagaggatgttatcccgagaatcagggcgatggaggggcgtcgtggtaggccacccaatcccgatcgccagcgggctagggaagaatcaaggatgagaaggcgaaaggggagaccacctaatgtgggaaacgccgagtttttggacaatgccgacgcgaagctgctacgcaaattgcaggcccaagaaatcgccagacaggcggcgcaaatcaagttactgaggaaacttcaaaaacaagaacaggccagggtggctaaagaggccaaaaagcagcaggcaatcatggccgcagaggaaaaacgtaaacagaaagagcagatcaaaattatgaagcagcaggagaagattaaacggatccagcagattcggatggagaaggagctccgcgctcagcaaatcctggaagcaaagaaaaaaaaaaaagaagaagcagcaaacgccaaactgctggaagccgaaaaacggattaaggaaaaagaaatgagaagacagcaggcagtcctccttaagcatcaagagagggaacggaggcggcagcatatgatgcttatgaaggccatggaagctcgcaaaaaagctgaggagaaagaacggcttaagcaagagaaaagggacgaaaagaggctgaataaggaaagaaagctggaacaaaggagactggagctagaaatggcaaaagagctcaagaaacccaacgaagatatgtgtctggctgatcagaagcccctccccgagttaccccgaatacctggccttgtcttgtctggcagtacgttcagcgactgtctgatggtcgtgcaattcctgcgcaatttcggaaaagtcctggggttcgacgtgaacatcgatgtccccaatctgagcgtgctgcaggagggtcttctcaacatcggggacagtatgggcgaagtccaggatctgctcgttcgcctgctctctgcagccgtgtgtgatcccgggctgatcactggatacaaggccaagaccgctctcggcgagcatctcctgaatgtcggagtcaatcgtgacaacgttagcgaaatcttacagatcttcatggaagcccattgtgggcagaccgaattgaccgagtctctgaaaacaaaagcattccaagcccataccccggcgcagaaggcaagtgtgcttgctttccttatcaatgagctcgcatgttctaagagtgtggttagtgaaattgacaagaacattgactacatgtctaatctgagaagagataagtgggtagtggaaggaaaattacgcaagctcaggataattcatgcaaaaaaaacaggcaagcgcgacacgagcgggggaatcgacctgggcgaggaacaacaccctctgggcacaccaactccaggcagaaagaggagacggaaaggtggtgactccgactatgatgacgacgatgacgacgacagcgacgatcagggagacgaagatgatgaagatgaagaagataaagaggacaagaagggcaaaaaaacagatatctgtgaggacgaggacgagggagatcaggccgcttctgtcgaggaacttgagaaacagatcgagaagcttagtaaacagcagtcgcagtatcggcggaaattgttcgatgcatcacacagtcttaggtcagtgatgtttgggcaggaccgctatcgtcgccgatactggattctgccacagtgtggggggattttcgtggaggggatggagtctggcgagggtctcgaagagatcgccaaagagcgagagaagctcaagaaggccgagtctgtgcagatcaaggaagaaatgtttgagaccagcggagattctcttaactgttccaacactgatcactgcgaacaaaaggaggatctgaaggaaaaggataatactaacttgttcctgcagaagccaggatccttttccaagctttccaagctcctggaggtggccaagatgcccccagagtcagaggtgatgacaccgaaaccgaacgctggagccaacggatgcacactctcttatcagaacagtggcaagcacagtctgggatcagtgcagtccaccgccacacagagtaacgttgaaaaggcagattctaacaacctgttcaatacagggtcaagcggacccggcaaattttatagccccctgcccaatgaccagctgctgaagacattaacagaaaagaatcgacagtggttttccctgttacctcggacaccttgcgacgacaccagcctaacccatgctgatatgtcaacagcttcgcttgtaacaccccagagtcagcctcccagtaagagtcctagcccaaccccagctcctctcgggtcttctgcgcagaatccagtcgggctcaacccatttgccctgtcaccactgcaggtcaaagggggcgtctcaatgatgggtttacagttctgcgggtggccaactggggtggtgaccagcaacataccatttacttcctctgtcccttcactcgggtcaggcctcgggctgagtgagggcaatggcaatagtttcctaacaagcaatgttgcctcttccaagagcgagtctcccgttcctcagaacgaaaaggctacttcggcccagccggcagccgtggaggtggctaagcctgtagattttcccagtcctaaaccaattccagaagagatgcagtttgggtggtggcggatcatcgaccccgaagaccttaaggccttgttaaaagtgctgcacttacgcggcattagagaaaaggctctgcagaaacagattcagaagcatctggattacattacccaggcttgtttgaaaaacaaggacgtggccattattgagttgaatgaaaatgaagaaaaccaggtcactagggatattgtggaaaattggagtgttgaagagcaagctatggaaatggacctctccgtcctgcagcaggtggaagacctggagagaagggttgctagcgctagcctgcaagtgaagggatggatgtgccccgagcccgcctctgagagggaggacctggtgtattttgagcataagtccttcaccaaactgtgcaaggagcatgatggagagttcaccggagaagatgaaagcagtgctcacgccctcgaacgcaaaagcgacaaccccttagatatcgcagtaactcggttagcagacctggagagaaatatagaaagacgcattgaggaagatattgcccccggcctccgggtgtggcggcgtgccctgagcgaagcccgctctgcagcccaagtcgcgctgtgtatacaacagctgcagaaatctatcgcatgggaaaagtcgattatgaaggtgtactgtcagatctgcaggaagggcgataatgaagaactgttactcctctgtgacggatgtgataaagggtgtcacacatattgccatcggccaaagatcacaaccattcctgacggagattggttctgccccgcttgcattgctaaagcttcgggccagacgctgaagatcaagaagctccacgtaaaaggcaagaaaaccaacgaaagtaaaaaagggaaaaaggtaacgctgactggcgataccgaagacgaggattccgccagcacatcttcatcgttgaaaaggggaaacaaagaccttaagaaaaggaagatggaagaaaatactagcattaatctttctaagcaggagtcctttacctcggttaagaagccgaaacgcgacgatagcaaagaccttgcactctgctcaatgatcctgacagagatggagacgcacgaagacgcctggcccttcctcctccctgtgaacctgaagctggtgccaggctacaagaaagttatcaagaaaccaatggatttctctactatcagggagaagctgtcaagcgggcagtatcctaacttggaaacattcgcccttgacgtccgcctggtttttgacaactgcgagactttcaatgaagacgattcagacatcggcagagcaggccacaacatgcgcaaatactttgagaaaaagtggaccgacacatttaaagtgagctag

SEQ ID NO: 176690 - DNA, 6507 bp, Artificial Sequence
  derived and/or modified sequence
atggagagcggggagcggctgcccagcagcgctgccagcagcaccacccccaccagcagcagcacccccagcgtggcctctgtggtgtccaaaggaggcctgagcactggagtggccagcctgagcagcaccatcaacccctgtggccacctgttcagaacagctggggaccagcccttcaacctgagcacagtgtcctctgccttccccatggtgagccaccctgtgtttggcctgcacagcgccagcagcggccacagcgagtttggaggcctgggcaccctgggcacccccacagccctggccgcccacccccagctggccagcttccctggagctgagtggtggaggaccacagatgcccacaccaggactggagccaccttcttcccccccctgctgggcatcccccccctgtttgcccccccagcccagaaccacgacagcagcagcttccacagcaggaccagcggcaagagcaacagaaatggacctgagaagggcgtgaatggcagcatcaatggcagcaacaccagcagcgtcatcggcatcaacacctctgtgctgagcaccacagccagcagctccatgggccagaccaagagcaccagcagcggcggcggcaacaggaagtgcaaccaggagcagagcaagaaccagcccctggatgcccgggtggacaagatcaaggacaagaagcccaggaagaaggccatggagagcagcagcaacagcgacagcgacagcggcaccagcagtgacaccagcagcgagggcatcagcagcagtgacagtgatgacctggaggaggatgaggaggaggaggaccagagcattgaggagagtgaagatgatgacagcgacagcgagagcgaggcccagcacaagagcaacaaccaggtgctgctgcacggcatcagtgaccccaaggcagatggccagaaggccacagagaaggcccaggagaagaggatccaccagcccctgcccctggccagcgagagccagacccacagcttccagagccagcagaagcagccccaggtgctgagccagcagctgcccttcatcttccagagcagccaggccaaggaggagagcgtgaacaagcacaccagcgtcatccagagcacaggcctggtgtccaatgtgaagcccctgagcctggtgaaccaggccaagaaggagacctacatgaagctgattgtgcccagcccagatgtgctgaaggccggcaacaagaacaccagcgaggagagcagcctgctgaccagcgagctgcggagcaagcgggagcagtacaagcaggccttccccagccagctgaagaagcaggagagcagcaagagcctgaagaaggtgattgctgccctgagcaaccccaaggccaccagcagcagccctgcccaccccaagcagaccctggagaacaaccaccccaaccccttcctgaccaatgccctgctgggcaaccaccagcccaatggagtcatccagagcgtcatccaggaggcccccctggccctgaccaccaagaccaagatgcagagcaagatcaatgaaaatattgctgctgccagcagcacccccttcagcagccctgtgaacctgagcaccagcggccgccgcaccccaggcaaccagacccctgtgatgcccagcgccagccccatcctgcacagccagggcaaggagaaggctgtgagcaacaacgtgaaccctgtgaagacccagcaccacagccacccagccaagagcctggtggagcagttccggggcacagacagcgacatccccagcagcaaggacagcgaggacagcaatgaagatgaggaggaggatgatgaggaggaggatgaagaagatgatgaagatgatgaaagtgatgacagccagagcgagagtgacagcaacagcgagagtgacacagagggcagcgaggaggaggatgatgatgacaaggaccaggatgaaagtgacagcgacacagaaggagagaagacctccatgaagctgaacaagaccaccagctctgtgaagagccccagcatgagcctgaccggccacagcaccccaagaaacctgcacatcgccaaggcccctggcagcgccccagctgccctgtgcagcgagagccagagccctgccttcctgggcaccagcagcagcaccctgaccagcagcccccacagcggcaccagcaagagaagaagagtgacagatgagcgggagctgcgcatccccctggagtatggctggcagcgggagacccgcatccggaactttggaggccgcctgcagggcgaggtggcctactatgccccctgtgggaagaagctgcggcagtacccagaggtgatcaagtacctgagcagaaatggcatcatggacatcagccgggacaacttctccttcagcgccaagatccgggtgggggacttctatgaggccagagatggcccccagggcatgcagtggtgcctgctgaaggaggaggatgtgatcccccgcatccgggccatggagggccggcggggccggccccccaacccagaccggcagagggcccgggaggagagcaggatgagaagaaggaagggccggcccccaaatgtgggcaatgctgagttcctggacaatgctgatgccaagctgctgaggaagctgcaggcccaggagatcgcccggcaggccgcccagatcaagctgctgaggaagctgcagaagcaggagcaggcccgggtggccaaggaggccaagaagcagcaggccatcatggctgctgaggagaagaggaagcagaaggagcagatcaagatcatgaagcagcaggagaagatcaagaggatccagcagatccgcatggagaaggagctgcgggcccagcagatcctggaggccaagaagaagaagaaggaggaggccgccaatgccaagctgctggaggccgagaagaggatcaaggagaaggagatgaggcggcagcaggccgtgctgctgaagcaccaggagcgggagcggcggcggcagcacatgatgctgatgaaggccatggaggccaggaagaaggccgaggagaaggagcggctgaagcaggagaagagagatgagaagaggctgaacaaggagaggaagctggagcagaggcggctggagctggagatggccaaggagctgaagaagcccaatgaagacatgtgcctggccgaccagaagcccctgcctgagctgccccgcatccctggcctggtgctgagcggcagcaccttcagtgactgcctgatggtggtgcagttcctgaggaactttgggaaggtgctgggctttgatgtgaacattgatgtgcccaacctgtctgtgctgcaggagggcctgctgaacatcggggacagcatgggagaggtgcaggacctgctggtgcggctgctgtctgctgctgtgtgtgaccccggcctcatcaccggctacaaggccaagacagccctgggggagcacctgctgaatgtgggcgtgaacagagacaacgtgtctgagatcctgcagatcttcatggaggcccactgcggccagacagagctgacagagagcctgaagaccaaggccttccaggcccacaccccagcccagaaggcctctgtgctggccttcctgatcaatgagctggcctgcagcaagtctgtggtgtctgaaattgacaagaacatcgactacatgagcaacctgcggcgggacaagtgggtggtggagggcaagctgaggaagctgcgcatcatccacgccaagaagacaggcaagagggacaccagcggcggcatcgacctgggggaggagcagcaccccctgggcacccccaccccaggcaggaagagaagaagaaaaggaggagacagcgactatgatgatgatgatgatgatgacagtgatgaccagggagatgaagatgatgaagatgaggaggacaaggaggacaagaagggcaagaagacagacatctgtgaagatgaagatgaaggagaccaggccgcctctgtggaggagctggagaagcagatcgagaagctgagcaagcagcagagccagtacagaaggaagctgtttgatgccagccacagcctgcggtctgtgatgtttggccaggaccgctacagaagacgctactggatcctgccccagtgtggcggcatctttgtggagggcatggagagcggggagggcctggaggagatcgccaaggagcgggagaagctgaagaaggccgagagcgtgcagatcaaggaggagatgtttgagaccagcggggacagcctgaactgcagcaacacagaccactgtgagcagaaggaggacctgaaggagaaggacaacaccaacctcttcctgcagaagccaggcagcttcagcaagctgagcaagctgctggaggtggccaagatgcctcctgagagcgaggtgatgacccccaagcccaatgctggggccaacggctgcaccctgagctaccagaacagcggcaagcacagcctgggctctgtgcagagcacagccacccagagcaatgtggagaaggctgacagcaacaacctcttcaacacaggcagcagcggccctgggaagttctacagccccctgcccaatgaccagctgctgaagaccctgacagagaagaaccggcagtggttcagcctgctgcccaggaccccctgtgatgacaccagcctgacccacgccgacatgagcacagccagcctggtgaccccccagagccagccccccagcaagagccccagccccaccccagcccccctgggcagcagcgcccagaaccctgtgggcctgaacccctttgccctgagccccctgcaggtgaagggcggcgtgtccatgatgggcctgcagttctgtggctggcccaccggggtggtgaccagcaacatccccttcaccagctctgtgcccagcctgggcagcggcctgggcctgtctgagggcaatggaaacagcttcctgaccagcaatgtggccagcagcaagtctgagagccctgtgccccagaatgagaaggccaccagcgcccagcctgctgctgtggaggtggccaagcctgtggacttccccagccccaagcccatccctgaggagatgcagtttggctggtggaggatcatcgaccctgaggacctgaaggccctgctgaaggtgctgcacctgcggggcatccgggagaaggccctgcagaagcagatccagaagcacctggactacatcacccaggcctgcctgaagaacaaggatgtggccatcatcgagctgaatgaaaatgaggagaaccaggtgacccgggacatcgtggagaactggagcgtggaggagcaggccatggagatggacctgtctgtgctgcagcaggtggaggacctggagcggcgggtggccagcgccagcctgcaggtgaagggctggatgtgcccagagcccgccagcgagcgggaggacctggtgtactttgagcacaagagcttcaccaagctgtgcaaggagcatgatggagagttcaccggggaggatgagagcagcgcccacgccctggagaggaagagtgacaaccccctggacattgctgtgacccggctggccgacctggagaggaacatcgagcggcgcatcgaggaggacatcgcccctggcctgcgggtgtggaggcgggccctgtctgaggcccggtctgctgcccaggtggccctgtgcatccagcagctgcagaagagcatcgcctgggagaagagcatcatgaaggtgtactgccagatctgcaggaaaggagacaatgaggagctgctgctgctgtgtgatggctgtgacaagggctgccacacctactgccaccggcccaagatcaccaccatcccagatggagactggttctgcccagcctgcatcgccaaggccagcggccagaccctgaagatcaagaagctgcacgtgaagggcaagaagaccaatgaaagcaagaagggcaagaaggtgaccctgactggagacacagaagatgaagattctgccagcaccagcagcagcctgaagaggggcaacaaggacctgaagaagaggaagatggaggagaacaccagcatcaacctgagcaagcaggagagcttcacctctgtgaagaagcccaagagagatgacagcaaggacctggccctgtgcagcatgatcctgacagagatggagacccatgaagatgcctggcccttcctgctgcctgtgaacctgaagctggtgcccggctacaagaaggtgatcaagaagcccatggacttcagcaccatccgggagaagctgagcagcggccagtaccccaacctggagacctttgccctggatgtgcggctggtgtttgacaactgtgagaccttcaatgaagatgacagcgacatcggccgggccggccacaacatgaggaagtactttgagaagaagtggacagacaccttcaaggtgtcctag

SEQ ID NO: 176691 - DNA, 6507 bp, Artificial Sequence
  derived and/or modified sequence
atggagagcggcgagcggctgcccagcagcgccgccagcagcaccactcccacctctagcagcacaccctctgtggcctctgtggtctctaaggggggcctatccaccggcgtagcctccctttcttccaccatcaacccatgtgggcacctgttccgcactgccggggaccaaccatttaacctttccaccgtgagcagtgccttccccatggtgagtcaccccgtattcggtctccatagtgctagttctggtcactcagaattcgggggcctcggcaccctgggcactccaactgcactggcagcccatcctcagttagcaagctttccaggagccgaatggtggcgtacaacggatgcccatacacgaaccggcgccactttcttccctccgctactggggataccacctctgtttgcgccccccgcacagaaccacgattcttctagcttccacagccgcacatcggggaaaagtaaccgcaacggccctgaaaaaggtgttaacgggtcgatcaatggctcaaatacatctagcgtgattggaatcaacacatcagtgctgtcaactaccgccagttcttctatgggccagactaagagcacatcatcaggtggtggcaatcgcaaatgcaaccaggagcagtctaaaaatcaacctctcgatgccagggtcgacaaaatcaaggacaaaaagccgcgcaaaaaagccatggagtcatcaagtaatagcgatagtgacagtggcacaagcagtgatacatctagtgaaggtatatcatcctcagacagcgatgatctggaagaggacgaagaggaggaggaccagtccatcgaggaaagtgaggacgatgactcagactccgaaagtgaggcccagcacaaatctaacaatcaagtgctgttgcacggcatctccgaccctaaagctgatggccagaaggcaaccgaaaaggcccaggagaagcgaatccatcaacccctccccctggcctcagaaagccagacgcacagttttcaatcgcaacagaagcagccacaggtgcttagccagcagctgccttttatctttcaatcgagtcaagccaaagaagaaagtgtgaacaagcacaccagtgtgattcagtccacagggttggttagcaacgtcaaacctctgagcttggttaaccaagcaaaaaaagaaacctacatgaaattgattgttccgtcccctgacgttctgaaggctggaaacaagaatacatccgaggaatccagcctgctgacaagcgagctgcggtcaaaaagagaacagtacaagcaggctttccccagtcaactaaagaagcaggagtcttcaaaatcgcttaagaaggtaattgcggcactgagcaatcccaaagctacctcatcctccccagctcatcctaagcaaactcttgagaacaatcaccctaatcctttcctgaccaatgcgctgctgggcaaccaccaacccaacggtgttatccagtctgttattcaagaagccccactggcactgaccactaagactaagatgcagtctaagattaacgaaaacattgcagccgctagcagtaccccattttctagccccgttaatctttctacctcaggtcgtcgcacaccgggaaatcaaacaccggttatgccatctgcaagcccaattctgcactctcagggtaaggaaaaggcagtgtcaaataatgttaacccagttaaaactcagcatcatagccaccctgcaaaatcccttgtcgaacagttcagagggacagactccgatatcccctcttctaaggactctgaggatagtaatgaggatgaggaggaggatgacgaggaggaagatgaagaggacgatgaggacgacgaatctgatgacagtcagtctgagtccgattctaattccgagtcagacactgagggctctgaagaagaggatgacgacgataaggaccaagacgagtccgactctgacactgaaggcgagaaaacatcgatgaagctcaacaagactaccagctccgtaaaatctccctcaatgtctctaacagggcactcaactccgaggaacctacatatcgccaaagctccagggtctgcccccgccgccctttgcagcgagagtcaatcccccgcattcctcggtaccagcagctctaccctgacctctagcccacatagtggtacaagcaagcggagacgcgtcacagacgaacgcgagttacgcatccccctggagtatgggtggcagcgcgagacgcgcattagaaatttcggcgggcgcttacagggcgaggtcgcatactatgccccctgcggcaagaagctccgccagtatccagaggtgattaagtacctgagtagaaatggaatcatggatatttcccgggacaatttcagcttctctgccaaaatccgggttggtgatttctatgaagctcgggatgggccacaaggaatgcagtggtgcctgctcaaagaggaggatgttattccacggataagggcgatggaaggtagaaggggccggccacctaacccggaccggcagagagctcgcgaggagtcccggatgcgcaggcggaagggcagaccaccaaacgtgggtaacgccgagttccttgacaacgctgacgccaagttgctgagaaagctgcaggcacaagagatcgctcgacaggcagcccagattaaacttctcaggaaactgcaaaagcaagaacaggcacgcgtggctaaagaagccaagaaacagcaggcaatcatggctgccgaggagaagagaaaacagaaagagcagatcaagataatgaaacaacaggagaagattaagaggattcagcagatcaggatggagaaagagctccgcgctcagcaaatcctcgaggccaaaaagaagaagaaagaagaggcagccaacgcaaaacttctggaagctgagaaacggatcaaggagaaagagatgcggaggcaacaggccgtgctgctcaagcatcaggagcgcgagaggagaaggcaacatatgatgcttatgaaggccatggaggctagaaaaaaggcggaagaaaaagagcgccttaaacaggaaaaaagagacgagaaaaggctgaacaaggaacgcaaacttgaacagagacggctggagctagaaatggcaaaagagcttaaaaaaccaaatgaagacatgtgcttggccgaccagaagcccctgccggagttaccacggattcctgggctggtgctgagcggaagtaccttcagtgactgtctcatggtcgtgcagtttcttaggaattttggaaaggtactgggatttgatgtcaatatagacgtgcctaatttatccgtgctgcaggaggggcttctcaatattggggactcaatgggggaagttcaggatctcctggtcagattactgtcggccgcagtttgcgatcccggactgataactggatacaaggccaagacagccctgggagagcacttgctgaacgtgggcgtcaatagagataacgttagtgaaatcctgcagatcttcatggaagcccactgcggccagacagagcttacagaatccctgaaaacgaaagcgtttcaggctcacacacctgcgcagaaggcctctgttttagcattcctgatcaacgaattagcctgctctaaaagtgtggtgagtgaaatcgacaaaaacattgactatatgagtaatttgcgacgggacaagtgggtagtggagggcaaattgcgcaagttgagaatcattcacgctaagaaaaccggcaaaagggatacctccggagggatcgacctgggcgaggagcagcacccacttggaaccccaacacctggccgcaagcggaggcgcaaagggggagactctgactacgacgatgatgatgacgatgactcagatgatcagggcgacgaggatgatgaggatgaagaagataaggaggacaaaaaggggaaaaagacggacatttgcgaggacgaggatgaaggggatcaagccgctagcgtggaagagctcgagaaacagattgagaagctgagtaaacagcagtcccaatatcggcgaaaactctttgacgcctcccacagcttgagatccgtgatgtttggacaggataggtatagacgtagatattggattcttcctcagtgtgggggcatctttgtggaaggaatggagtccggcgagggcctggaggagattgcaaaggaaagggagaagctgaaaaaggctgagtctgtccaaattaaagaagagatgtttgagacatctggagactccttgaattgcagtaatacagaccattgtgagcagaaggaagatttgaaggaaaaagataacactaatcttttccttcaaaagccggggagttttagtaagctttccaaactcctggaagtggcaaaaatgccaccggagagcgaagtgatgacgcctaagcccaacgccggagccaacggttgcactctctcttaccaaaactcaggaaagcattccctgggctccgtgcagagtactgcaacacagtctaacgtcgagaaggccgatagtaataatctgttcaacacaggaagctcagggccaggcaaattttactctcccctgcccaacgaccagttgctcaaaacactgaccgagaagaacaggcaatggttttcactgctgcctcgcaccccctgtgatgatacctccctgacgcacgccgatatgagtacagcctccctggtcactccccagtctcagcctcctagcaagtcacctagtccaactccagccccgttgggttcatcggcacagaacccggtcgggctgaatcccttcgcactcagtccactccaggtaaaaggtggggtgtctatgatgggtctccagttttgcggctggccaactggcgtggtcacttctaacataccttttacgagtagcgtcccaagcctgggctcaggcttggggcttagcgagggaaacggaaactccttcttgacgtctaacgtagcctcatccaaatccgagtcccctgtgcctcagaacgaaaaggcaacctccgcgcagcccgctgctgtggaggtggctaaaccggtggattttccaagccctaagcccatccctgaggagatgcagttcggatggtggcgtataatcgatccagaagacttgaaggcgcttttaaaggtcctgcacctgcgtggcatccgcgaaaaagctcttcagaaacagatccagaaacatctggattatatcacccaagcttgtctcaaaaacaaagacgtggcaattatcgagctgaatgagaacgaagagaaccaagtgacaagggacattgtggagaactggtctgtagaagaacaggctatggaaatggatctctctgtccttcaacaagtagaagatcttgaacgaagagttgcttccgccagcctgcaggttaaggggtggatgtgtcctgaacctgcttcggagcgggaggacctggtttattttgagcataagtctttcaccaagctatgtaaggaacacgatggcgaattcaccggggaggatgaatcttctgcccacgcactcgaacggaaaagtgacaatcccctggacatcgccgtgacacgactggccgaccttgaacggaacatagagcgaagaatcgaagaagatatagcacccggcctccgagtttggcgcagagccttatccgaagcgagatctgccgctcaggtcgcgctctgcatacagcagttacagaagagcattgcctgggaaaaaagcattatgaaagtctattgtcagatatgcaggaagggagacaatgaggagttgttgcttctgtgtgatgggtgtgacaaggggtgtcacacatattgccacagaccaaaaattactaccatcccagatggggactggttctgtcctgcatgcattgcgaaagccagtggacagactcttaagattaaaaaattacatgtgaaagggaaaaagaccaatgaaagcaagaaaggaaaaaaggtcactctgacgggagacaccgaggacgaggattcagcctcaacgagcagttctctgaagcggggcaacaaagacctcaagaaacggaaaatggaagaaaacacctctatcaatctgtccaagcaggaatccttcacaagtgtcaagaagcctaagcgcgatgactccaaggatctggcgctctgctccatgatccttaccgagatggagacacatgaggacgcgtggcccttcctattgcctgtcaacctgaagctcgtcccaggctataagaaagtgattaagaagcctatggatttctccactattagagagaaactgtcctctggtcagtaccctaatttggagactttcgcactggatgtgcggcttgttttcgataattgtgagacattcaacgaggatgactctgacatcgggcgagcagggcacaatatgagaaaatatttcgagaagaaatggactgatacatttaaagtgtcttag

SEQ ID NO: 176692 - DNA, 6506 bp, Artificial Sequence
  derived and/or modified sequence
atggagtcaggcgaacgcctgccatcgtccgccgcttccagcacgactccaacgtcttcttcaaccccaagtgtagcgagcgttgttagcaaaggcggtctaagcacgggggtggcctcactgtcctcaaccatcaatccttgtggccacctattcaggacagccggagatcaaccctttaatttgagcaccgtctcgtcggcatttcccatggtgagccaccccgtctttggtctgcattccgccagctccggtcactccgaatttggcggtctcggcaccctaggcacccccaccgccctcgctgcccacccacagttggcctcgttccccggagccgaatggtggcgaaccacagacgctcatacaagaaccggggctactttctttccccctctgctgggcattccccctctgttcgcaccccctgctcagaaccacgattccagctcctttcatagccgaacgtccgggaagagcaaccggaatggcccagaaaaaggcgtcaacggatccattaatgggtccaacacctccagcgtgatcgggattaacactagtgtgctctctactaccgcctcatcttcaatggggcagacaaagagtacctcgagcgggggtggaaaccggaagtgcaaccaggaacagagcaaaaaccagcccttagatgccagggttgataagataaaagacaaaaaaccgagaaagaaggccatggaaagcagcagcaactcagattcagattcagggacatccagtgatacttctagtgagggcatatccagtagcgactcagacgatttagaagaggacgaggaggaagaagaccagtcgatcgaagagtcagaggacgacgattcagatagtgagtctgaagcccagcataagagtaataatcaggtcctgttgcacggaattagcgacccgaaggccgatgggcagaaggccactgagaaggcacaggaaaagcgtatccatcagcctctgccgttagcatccgagtcacagactcacagcttccaatcacagcagaagcagcctcaggtcctgtcccagcagctgccatttatcttccagagcagccaagcaaaggaagagtccgttaataagcacactagcgtcatacagtcaacgggtctagttagtaacgtcaagcctctgtctcttgtgaatcaggcaaaaaaggaaacttacatgaagttaattgtcccatctcctgatgtgctcaaagcaggcaacaagaacacctccgaagagagctccctactgacttcagagctccgaagcaaaagagaacagtacaagcaggcttttccaagccagctcaagaagcaggaaagttcaaaatctctcaagaaagtcatcgcagcgctgagtaatccgaaggcaacctcctctagtccggctcaccctaagcagactctcgagaacaaccatccaaaccctttcttgacaaatgcccttctaggcaaccatcagcccaatggggttatacaaagcgttatccaggaggctcccttagccctcactactaaaacgaaaatgcagagcaagatcaacgagaacatcgcagccgcttcgtcgactcccttttccagcccagtcaacctgagcacgagcgggaggaggaccccaggtaaccagacgcctgtgatgccctcagcatctcccattctgcacagccaggggaaggagaaggctgtgtcaaataatgtgaatcccgtgaagacgcagcatcacagtcacccagcgaagagcttggtagagcagtttcgtgggaccgactcagacattcctagctcaaaagactcagaggactccaacgaggatgaagaagaggatgacgaggaagaggatgaggaagatgacgaagatgatgagtcagacgattcccaatcagagtccgactctaattctgaaagcgataccgaggggtctgaggaagaagacgatgatgataaggaccaagacgaatcggactctgataccgaaggcgagaaaacatctatgaaactgaataaaactacatcctccgtcaagtcgccatccatgtctctgacaggtcactccactccaagaaacttgcatattgccaaagctcctggctctgccccagcagcgttgtgctcagagagtcagtctccagccttcctcggaaccagctcgtccacgctaacgtcatccccgcattcaggcacctctaaaaggaggagagtgaccgatgagagagagctgcgtatccctctcgaatatggctggcagcgcgaaactaggatccgtaactttgggggacggttacaaggcgaggtggcgtactacgcgccttgcggcaaaaaactacggcagtaccccgaggtaatcaagtatttatcccgaaacgggatcatggatatctcacgggacaatttctcgtttagtgccaaaatcagagtgggagacttctacgaggccagggatgggcctcaggggatgcagtggtgcctcctgaaagaggaggatgtgatccccaggatccgcgctatggagggacgacgaggtaggccccctaatccggacagacaacgagcgcgtgaagaaagccgtatgcgcaggagaaagggaagacctcccaacgttggcaatgcagagtttctggataacgccgatgctaaactcctccgaaagctccaggcccaggagatcgctcggcaggcagctcagatcaaactcctccgcaagctccagaagcaggagcaggcacgagtagctaaggaggccaaaaaacagcaggccataatggccgcagaagagaaacggaagcaaaaggaacagatcaaaattatgaagcagcaggaaaagataaagaggatccagcagatccgtatggagaaggagctgcgggctcagcaaattcttgaagccaaaaaaaagaaaaaggaagaggccgcaaacgcaaaactccttgaagcagagaagcggattaaagaaaaggaaatgcgtcgccaacaggcggtgctcctcaagcaccaggaacgtgaaagaaggaggcaacatatgatgttgatgaaagcaatggaagcaaggaaaaaagcggaggaaaaggaacgactgaagcaggagaagagggatgagaagagactcaacaaggagcgaaaactcgagcagcggcgtctggagttagagatggcaaaagagctgaagaaacccaatgaagatatgtgtctcgctgatcaaaagcctctgcctgagctcccaaggatcccaggcttggtcctgagcggatccaccttctcggattgtcttatggtggttcagttccttcgtaacttcggcaaagtcttaggatttgacgtgaacatagacgtacccaacctctccgttttgcaggaggggctcctgaacattggtgattcgatgggtgaagtccaggatctgctggtccgactgctgagcgctgctgtctgtgatccgggactgattactggatataaagcaaaaactgctctgggggagcatttgctgaatgttggagtaaatcgtgacaacgtgtccgagattcttcagattttcatggaagctcattgtggtcaaacggagctcactgagtccctgaagacgaaggcctttcaggcgcacacaccagctcaaaaggcctcagtgcttgcttttttgatcaacgagctggcttgttctaaatctgtagtttctgagattgataaaaatattgactacatgtcaaacctacgcagagataaatgggtggtagaaggcaagctgcgaaaattaaggataattcacgcgaagaaaactggaaaaagggatacctcaggaggaattgatctgggtgaagagcagcaccccttgggaaccccaacccctggtagaaagcggaggcgaaagggaggagactcagattacgacgacgatgacgatgatgacagcgatgaccaaggcgacgaggacgacgaagacgaagaggacaaagaagataagaaaggtaaaaagacggacatatgtgaggatgaggacgaaggggatcaagccgcatctgttgaggaactggagaagcagatcgagaaactgtccaagcagcagtcacagtatcgcaggaaactattcgacgcaagccactcactccgttcagttatgtttggacaggatcggtacaggaggcggtattggattcttccccagtgtggcggtatcttcgttgaaggcatggagagcggtgagggactggaagaaatagctaaggagagggagaaactcaaaaaagctgaatctgttcagattaaagaagagatgttcgagacgagcggtgatagcttaaattgcagcaacacagatcattgtgagcagaaagaagatctgaaagagaaggataacaccaacctgttcttgcaaaagccgggatcattttctaaattgagcaaacttttggaagtggcaaagatgccccctgaatccgaagtcatgaccccgaagcctaacgctggcgctaacggctgcacacttagttaccaaaactctggcaaacatagcttgggctccgtgcagtcgacagccacccagagcaatgtagagaaggccgactcaaataacctgttcaacactggatcatctggtcccggaaagttctattcccccttgcctaacgaccagttgttaaaaacccttactgaaaagaatcgccaatggttttcgcttctgccaagaactccatgcgatgatacaagcctaacgcatgccgacatgtcgaccgctagcctggtcacaccccagtcacaacctccgtccaagtccccctctcccacccctgccccactaggtagcagcgcccagaacccagtggggctgaatcctttcgccttgagcccactgcaggtgaagggtggcgtttctatgatgggtctgcagttctgcggctggccgactggtgtggtcacaagcaatatccctttcacttcttctgtcccctctctagggtcaggcttagggctctctgaaggaaatggcaacagttttctcacctcaaatgttgcaagttccaagtccgagagtccagtgccgcagaatgagaaggcaacaagcgcacagcccgcagccgtggaagttgctaaaccagtagatttcccatcgcccaagcctatcccggaagaaatgcagttcggatggtggaggatcattgatcccgaagatctaaaggctctgttgaaggtgctgcacctgcgcggaatcagagaaaaggctctgcaaaaacaaattcagaaacacctcgattacatcacgcaggcttgcctaaaaaacaaggacgtcgctattatcgaattgaatgaaaacgaagagaaccaagttacccgggacattgtggagaattggagcgtggaggagcaggccatggaaatggatttgtccgtcctacagcaggttgaagacttggagaggagggttgcctctgcgtctctgcaggtgaaaggatggatgtgccccgaacccgcaagcgaacgggaagacttggtatactttgaacacaaaagctttactaaactttgcaaagaacatgacggggaattcactggagaggacgaatctagtgcacacgcactcgaaagaaaatctgacaatccgttggatattgcagtaactcgcctggctgatctggaacggaacatcgaaaggcgcattgaagaagatatcgcccctggtctgcgggtctggcgtcgggcactatccgaggcaagaagtgctgcacaagttgccctgtgtattcagcagctgcaaaaatctatcgcctgggagaagagcataatgaaagtgtattgtcaaatttgcagaaaaggtgacaatgaggagctgctcctgctgtgcgacggttgcgataaaggttgtcacacctattgtcatcggcctaaaatcaccacgattcccgatggggattggttctgtcccgcttgtatcgctaaagcaagcggccagaccctgaagatcaagaagctgcatgtgaaagggaagaagacaaatgaaagcaaaaaaggaaagaaggttacactgaccggggacaccgaggacgaagactctgcaagtacatctagttcactcaaaagagggaataaggacctcaagaagaggaaaatggaggagaataccagtattaacctgtccaagcaagaaagttttacttctgtcaaaaaaccgaagcgagacgattccaaagacttagccctctgttccatgatcctcacagaaatggagacacacgaagacgcgtggccgtttctgctgccagtgaacctcaagctagtgcctgggtacaagaaggtgatcaaaaagcctatggatttctcgacgattcgcgagaagctttctagcggtcagtacccaaacttggagacgtttgcattagatgtgcggctcgtctttgacaactgcgagacatttaatgaagacgatagcgatataggacgagcgggacataacatgagaaagtacttcgaaaagaagtggacagacaccttcaaggtgtccta

SEQ ID NO: 176693 - DNA, 8289 bp, Artificial Sequence
  derived and/or modified sequence
tcccttggctcctttaggagctgataggtcatttattattggaactgaaatggtataaacaattctctctctttttttcccttgttaacagcaactttcattgttagagagaggagagagagagaagccttgttggttgacgtcacttggttcatgaagccttcgcctagaagtgaagctgctgaacaaaccttgagaagaatcatctcctgcttcaatctgctgctggataggaactaatcagagagagagaggcggaagacggagaaggagggagtcgaaggctttcccgatcacaaatctcacctccactacaactctctttatacttttcttgcagaaataataatagaaataaggaggtggtggggtttccaaaaatcttaaccttcaaccatctggggaaaaggcaaaaatcccatctaccgcaactctcagttcgagagtaaaggtttcccaacagtgatgtcacaagattgaccacattgatcacaatatggagtctggagaacggttaccatcctcagcagcctcctctactacaccaacttcatcttcgacaccttctgtggcttcagtagtttcaaaaggtggcctttccactggagttgcttcacttagctctacaatcaacccatgtggacatttattcagaacagctggggatcaaccgtttaacctgtccacagtgtcgagtgccttcccaatggtcagccacccagtctttggtctacattcagccagctcagggcattcagaatttggtggtttggggacacttggtacacccacagccttagccgcacatccccaactagcatcttttccaggtgcagaatggtggcgaacaactgatgctcatactcgtacaggagcaaccttctttccaccattactgggaattccaccactatttgctcccccagcccagaatcatgattcttcttcattccattcaaggacttcgggaaaaagtaatcgaaatggtcccgaaaaaggtgtaaatgggtcaataaatggaagtaatacatcatctgtaattggtatcaacacatctgtactatccactactgcttcaagttccatgggacaaactaaaagtacaagctcaggtggaggaaatcgaaaatgtaatcaggaacaaagcaaaaaccagcctttggatgctagagttgacaaaatcaaagataagaaaccaaggaagaaagcaatggaaagttctagcaacagtgatagtgattcaggcacatcatcagacacctcaagtgaaggcattagtagcagtgattcagatgatctagaagaagatgaagaagaagaagatcaaagtattgaagaaagtgaagatgatgattctgattcagagagtgaagcacaacataaaagtaacaaccaggtgctattacatggtatttcagacccaaaagcagatggacagaaagcaactgaaaaagcccaggaaaaaagaatacaccagccattacctcttgcgtctgaatcccagactcactcattccaatcccagcagaagcagcctcaggttttgtcacagcagcttccatttattttccaaagctctcaggcaaaggaggaatctgtgaacaaacacaccagtgtaatacagtctacgggattggtgtccaatgtgaaacctttatctttggtaaatcaagccaaaaaggaaacttacatgaaactcatagttccttctcctgatgttcttaaagcagggaataaaaatacctctgaagaatctagtttattgaccagtgaattgagatccaaacgggaacaatataaacaggcattcccatcacagttaaagaaacaagagtcatcgaagagcctgaagaaggttattgcagctttgtcaaatccaaaagcaacctctagttcaccagcacatccaaaacaaacattagaaaacaaccacccaaatccattcttgacaaatgcacttttaggtaatcaccaaccaaatggagttattcaaagtgtcattcaagaagctcctctagcacttactaccaaaactaaaatgcagagcaagattaatgaaaacattgctgctgcaagtagcacccctttttcctcacctgtaaatctgagtacaagtgggagaagaacccctggcaatcagacacctgtaatgccctctgcctctcccatcctgcatagtcaagggaaggaaaaagcagttagcaataatgtaaacccagtaaaaacacagcatcactcccatcctgcaaaatctttagtggaacaattcagaggaacagattcagacattcccagtagtaaagattctgaagattcaaatgaggatgaagaggaagatgatgaagaagaagatgaggaagatgatgaagatgatgaatctgatgacagccaatcagaatcagatagtaattcagaatcagatacagaaggatcagaagaagaagatgatgatgataaagaccaagatgaatcagatagtgatactgaaggagagaaaacttcaatgaaactgaataaaacaacttcctctgtcaaaagcccttccatgagtctcacaggtcactcaacacctcgtaacctccacatagcaaaagccccaggctctgctcctgctgccttatgttctgaatcccagtcacctgcttttcttggtacatcttcttccacacttacttcaagcccacactctggcacttccaaaagaagaagagtaacagatgaacgtgaactgcgtattccattggaatatggctggcagagagagacaagaataagaaactttggagggcgccttcaaggagaagtagcatattatgctccatgtggaaagaaacttaggcagtaccctgaagtaataaagtatctcagcagaaatggaataatggatatctcaagggacaatttcagcttcagtgcaaaaataagagtgggtgacttctatgaagccagagatggaccgcagggaatgcagtggtgtcttttgaaagaagaggatgtcattcctcgtatcagggcaatggaaggtcgtagaggaagaccaccaaatccagatagacaacgagcaagagaggaatccaggatgagacgtcggaaaggtcgacctccaaatgttggcaatgctgaattcctagataacgcagatgcaaagttgctaagaaaactgcaagctcaagaaatagccaggcaagcagcacaaataaagcttttgagaaaacttcaaaagcaggaacaggctcgggttgctaaagaagccaaaaaacaacaagcaataatggctgctgaggagaagcggaagcaaaaagaacagataaagattatgaaacagcaggaaaaaattaagagaatacagcaaatcagaatggaaaaagaacttcgagctcagcaaattctagaggctaaaaagaaaaagaaggaagaagcggcaaatgccaaattattggaggccgagaaacgaataaaggaaaaagaaatgagaagacaacaagctgttcttctgaaacatcaggaacgagagcgaaggcgacaacacatgatgcttatgaaagctatggaagctcgtaaaaaagcagaagaaaaagagcggttgaaacaagaaaaacgtgatgagaaaagattaaataaagagcgtaaactagagcagcgaagattagaattagaaatggcaaaggaactaaagaagcctaatgaagacatgtgcttagcagaccaaaagcctttgccagagttgcctcgtattccaggacttgttctctctggaagtacattttcagactgtctcatggtggtgcagttcttacgaaactttggtaaagttttgggctttgatgtgaatattgatgttccaaacctgagtgttcttcaagagggattgctaaatataggggacagcatgggtgaagtacaagacttgcttgtgaggctcctctcagctgctgtatgtgatccaggtctaataacaggatacaaggctaaaacagctcttggagaacatttgctgaatgttggtgtgaatcgagacaatgtttccgagattttacagatatttatggaagcccactgtggacaaactgagcttactgaaagtctgaagaccaaagcttttcaggctcacactccagcacagaaagcttcagtcctggctttcctgatcaatgaactggcatgcagcaagagtgtggtcagtgaaatcgacaagaacattgattatatgtcaaacttgaggagagataaatgggtggtagaaggtaaactccgcaagctcagaatcattcatgctaagaaaacaggcaaaagagacacttcaggtggcattgatctgggagaagagcagcatcccttgggcacacccactccaggacgcaagcgaagaaggaagggaggagacagtgattatgacgatgatgatgacgatgacagtgatgaccaaggggatgaagatgatgaggatgaagaagataaagaagacaaaaaaggaaaaaagactgatatctgtgaagatgaggatgaaggtgaccaagcagcaagtgttgaagagctggaaaaacagattgaaaaactgagtaaacaacagagtcagtacagaaggaagctctttgatgcgtctcactcattgcgttcagtgatgtttggccaagatcgttacagacgccggtactggattcttccccaatgtggggggatttttgtagaaggcatggagagtggtgaaggactagaagaaattgcaaaagaaagagaaaaactgaaaaaggcagaaagtgtccagatcaaagaagaaatgtttgagacttctggggacagtttaaattgttcaaatacagatcactgtgaacaaaaggaagatcttaaagaaaaagataacacaaatctattccttcagaaacctggctctttttccaaattaagcaagcttttggaagtagctaagatgcctcctgagtcagaggttatgacccccaaaccaaatgctggtgcaaatgggtgcacgttgtcttatcagaacagtggaaaacattcactgggcagcgttcagtcaacagcaacgcaaagcaatgtggaaaaggcagactctaataatctgtttaatactggttcaagtggtccagggaagttctacagtcctctccccaatgaccagttactaaaaacgctgactgaaaagaatagacaatggtttagtcttttgccacgaacaccctgtgatgacacttcacttactcatgccgatatgtcaactgcttctttggtgactcctcagtctcagccaccatctaagtcaccttcacctaccccagctcctcttggatcttctgctcagaatcctgttggcttaaatccatttgctttatcacctcttcaggtgaaaggtggagtatctatgatgggacttcagttttgtggatggcccactggtgtggttacttctaatattccatttacatcatctgtacctagtctaggatcggggttagggttatcagaaggaaatggtaattcattcttgacttccaatgttgcttcaagtaaaagtgaatctccagtaccacagaatgaaaaggccacttcagctcaacctgcagctgttgaagtagcaaaaccagtagattttcctagtccaaaacctattccagaagaaatgcagtttggttggtggagaattattgacccagaggacctaaaagctttgctcaaagtgctgcatctcagaggaataagagaaaaggcattacaaaaacaaattcagaaacatttggattatattactcaagcctgcctcaagaataaggatgttgctattattgaactgaatgaaaatgaagaaaaccaagtaactcgagatattgtggagaactggtcagtagaagaacaagcaatggaaatggatttgagtgtccttcaacaggtagaagatctagaaaggagagttgcatcagcaagtttgcaagtgaagggttggatgtgtccagagcctgcatcagaaagggaggacttggtatattttgaacataaatcatttactaaattgtgcaaggagcatgatggagaatttactggcgaagacgaaagcagtgcacatgcactagaacggaagagtgacaaccccctagatatagctgtaaccaggctggctgatttggagcggaacattgaaagaagaattgaagaggatattgctccagggctcagggtatggagaagggcattatcagaagctcgcagtgctgcacaggtagctctgtgcattcagcaattacagaaatcaatagcatgggaaaaatcaattatgaaagtttactgccaaatctgtcgaaagggagataatgaagaactgcttcttctttgtgatggctgtgacaaaggctgtcatacctactgccatagacccaagattacaacaatcccagatggagactggttttgtccagcttgcattgctaaggcaagtggtcaaactctaaaaatcaaaaaacttcatgtcaaaggaaaaaagactaatgagtcaaagaaaggcaagaaggtaactttaacaggagatactgaagatgaagactctgcatctacaagtagttcactaaaaagaggaaacaaagacctcaagaaaagaaaaatggaggaaaacacttctattaacttgtcaaaacaagaaagttttacttcagttaagaaacctaaaagagatgactccaaggacctagctctttgcagtatgattctgactgaaatggaaactcatgaggatgcatggccttttctacttcctgtaaacttgaaacttgttcctggttataagaaagttattaagaagcctatggatttttccacaattagagagaaactaagtagtggacagtatccaaaccttgaaacctttgctctagatgtcaggcttgtttttgacaactgtgaaacatttaatgaagatgattctgatataggcagagctggccacaatatgaggaagtattttgaaaaaaagtggacagatactttcaaagtgagctgaagttataataatctctttatttttttccttctaaacaaggacaaatgagaccagcaatgtgaactgtatttacataaacgtgcaaggcacatacataatgactttctttttccttaagtataaaaaaaaagtatcagaagaatgataccatttttaaaggcttcattcctacaacaaccaaggccctcggttattggtttgtgtgatttatcagctaatttaggtagaacagggaagcacacccaaagaattttcaaaggaaagggtgttatagtgcaatagcaattaaaatatatcaaatcgcactgaatactcaacaccagagctctaatgtgggaaatggttctcctttccctctcaataaatatctatttttcatttttttactttgtagtttattttttagtgaatgtatttaattttatgaattatttatgattaaaccacatccagaatcttcgttttctgtgaaaaggaagaactagaaaattgctttaaatcttgaaaatacaaggaatgttttaaaatataaaacaaagccaagttaaactgtttacactgatgtgctataaaagcaccaaaaagaaactttactgtagagttacaagtacatttatatatatatgttgctgcatcacttgtgtagttaaattgtatttcaaaacagtgaaaaaattgacatgtatatactgttcattcttgtttatattaagtcttgttttaaatatgtattatgtgtatatattgtttgcagacattattgttcatgccttagaggattgtagcattttattttcgtctgaaggtaatgatagctatacagtctgtacagtaattatcctctaccaacactgtggcgtctccttaatcttggtagtgcctgcctttgaaacagggtgtaggggatattagttttccatttttctattttgttatataattttaagccaccagggcctaaattaaagtataatcatttgtatccatgtggaataaaattgtgacaatttcctacgcacacagtattttttcatagaaacatttccctcccatttgccttgcctcagaaataaatttaaaagacgtttgtaaccactgtgttttatctactgtgtgttgtggtggcctgttggaggcaaatagatcagattttttttgtacctacgtaagagtacttgaagttttatttaaaataaaatgttgtggaaaaggtagcattctttttttaggagtgttatttttcactatgtgtggcacggatacaataaaagacttttacaaactaa

SEQ ID NO: 176694 - DNA, 6507 bp, Artificial Sequence
  derived and/or modified sequence
atggagagcggcgagagactgcccagcagcgccgccagcagcaccacccccaccagcagcagcacccccagcgtggccagcgtggtgagcaagggcggcctgagcaccggcgtggccagcctgagcagcaccatcaacccctgcggccacctgttcagaaccgccggcgaccagcccttcaacctgagcaccgtgagcagcgccttccccatggtgagccaccccgtgttcggcctgcacagcgccagcagcggccacagcgagttcggcggcctgggcaccctgggcacccccaccgccctggccgcccacccccagctggccagcttccccggcgccgagtggtggagaaccaccgacgcccacaccagaaccggcgccaccttcttcccccccctgctgggcatcccccccctgttcgccccccccgcccagaaccacgacagcagcagcttccacagcagaaccagcggcaagagcaacagaaacggccccgagaagggcgtgaacggcagcatcaacggcagcaacaccagcagcgtgatcggcatcaacaccagcgtgctgagcaccaccgccagcagcagcatgggccagaccaagagcaccagcagcggcggcggcaacagaaagtgcaaccaggagcagagcaagaaccagcccctggacgccagagtggacaagatcaaggacaagaagcccagaaagaaggccatggagagcagcagcaacagcgacagcgacagcggcaccagcagcgacaccagcagcgagggcatcagcagcagcgacagcgacgacctggaggaggacgaggaggaggaggaccagagcatcgaggagagcgaggacgacgacagcgacagcgagagcgaggcccagcacaagagcaacaaccaggtgctgctgcacggcatcagcgaccccaaggccgacggccagaaggccaccgagaaggcccaggagaagagaatccaccagcccctgcccctggccagcgagagccagacccacagcttccagagccagcagaagcagccccaggtgctgagccagcagctgcccttcatcttccagagcagccaggccaaggaggagagcgtgaacaagcacaccagcgtgatccagagcaccggcctggtgagcaacgtgaagcccctgagcctggtgaaccaggccaagaaggagacctacatgaagctgatcgtgcccagccccgacgtgctgaaggccggcaacaagaacaccagcgaggagagcagcctgctgaccagcgagctgagaagcaagagagagcagtacaagcaggccttccccagccagctgaagaagcaggagagcagcaagagcctgaagaaggtgatcgccgccctgagcaaccccaaggccaccagcagcagccccgcccaccccaagcagaccctggagaacaaccaccccaaccccttcctgaccaacgccctgctgggcaaccaccagcccaacggcgtgatccagagcgtgatccaggaggcccccctggccctgaccaccaagaccaagatgcagagcaagatcaacgagaacatcgccgccgccagcagcacccccttcagcagccccgtgaacctgagcaccagcggcagaagaacccccggcaaccagacccccgtgatgcccagcgccagccccatcctgcacagccagggcaaggagaaggccgtgagcaacaacgtgaaccccgtgaagacccagcaccacagccaccccgccaagagcctggtggagcagttcagaggcaccgacagcgacatccccagcagcaaggacagcgaggacagcaacgaggacgaggaggaggacgacgaggaggaggacgaggaggacgacgaggacgacgagagcgacgacagccagagcgagagcgacagcaacagcgagagcgacaccgagggcagcgaggaggaggacgacgacgacaaggaccaggacgagagcgacagcgacaccgagggcgagaagaccagcatgaagctgaacaagaccaccagcagcgtgaagagccccagcatgagcctgaccggccacagcacccccagaaacctgcacatcgccaaggcccccggcagcgcccccgccgccctgtgcagcgagagccagagccccgccttcctgggcaccagcagcagcaccctgaccagcagcccccacagcggcaccagcaagagaagaagagtgaccgacgagagagagctgagaatccccctggagtacggctggcagagagagaccagaatcagaaacttcggcggcagactgcagggcgaggtggcctactacgccccctgcggcaagaagctgagacagtaccccgaggtgatcaagtacctgagcagaaacggcatcatggacatcagcagagacaacttcagcttcagcgccaagatcagagtgggcgacttctacgaggccagagacggcccccagggcatgcagtggtgcctgctgaaggaggaggacgtgatccccagaatcagagccatggagggcagaagaggcagaccccccaaccccgacagacagagagccagagaggagagcagaatgagaagaagaaagggcagaccccccaacgtgggcaacgccgagttcctggacaacgccgacgccaagctgctgagaaagctgcaggcccaggagatcgccagacaggccgcccagatcaagctgctgagaaagctgcagaagcaggagcaggccagagtggccaaggaggccaagaagcagcaggccatcatggccgccgaggagaagagaaagcagaaggagcagatcaagatcatgaagcagcaggagaagatcaagagaatccagcagatcagaatggagaaggagctgagagcccagcagatcctggaggccaagaagaagaagaaggaggaggccgccaacgccaagctgctggaggccgagaagagaatcaaggagaaggagatgagaagacagcaggccgtgctgctgaagcaccaggagagagagagaagaagacagcacatgatgctgatgaaggccatggaggccagaaagaaggccgaggagaaggagagactgaagcaggagaagagagacgagaagagactgaacaaggagagaaagctggagcagagaagactggagctggagatggccaaggagctgaagaagcccaacgaggacatgtgcctggccgaccagaagcccctgcccgagctgcccagaatccccggcctggtgctgagcggcagcaccttcagcgactgcctgatggtggtgcagttcctgagaaacttcggcaaggtgctgggcttcgacgtgaacatcgacgtgcccaacctgagcgtgctgcaggagggcctgctgaacatcggcgacagcatgggcgaggtgcaggacctgctggtgagactgctgagcgccgccgtgtgcgaccccggcctgatcaccggctacaaggccaagaccgccctgggcgagcacctgctgaacgtgggcgtgaacagagacaacgtgagcgagatcctgcagatcttcatggaggcccactgcggccagaccgagctgaccgagagcctgaagaccaaggccttccaggcccacacccccgcccagaaggccagcgtgctggccttcctgatcaacgagctggcctgcagcaagagcgtggtgagcgagatcgacaagaacatcgactacatgagcaacctgagaagagacaagtgggtggtggagggcaagctgagaaagctgagaatcatccacgccaagaagaccggcaagagagacaccagcggcggcatcgacctgggcgaggagcagcaccccctgggcacccccacccccggcagaaagagaagaagaaagggcggcgacagcgactacgacgacgacgacgacgacgacagcgacgaccagggcgacgaggacgacgaggacgaggaggacaaggaggacaagaagggcaagaagaccgacatctgcgaggacgaggacgagggcgaccaggccgccagcgtggaggagctggagaagcagatcgagaagctgagcaagcagcagagccagtacagaagaaagctgttcgacgccagccacagcctgagaagcgtgatgttcggccaggacagatacagaagaagatactggatcctgccccagtgcggcggcatcttcgtggagggcatggagagcggcgagggcctggaggagatcgccaaggagagagagaagctgaagaaggccgagagcgtgcagatcaaggaggagatgttcgagaccagcggcgacagcctgaactgcagcaacaccgaccactgcgagcagaaggaggacctgaaggagaaggacaacaccaacctgttcctgcagaagcccggcagcttcagcaagctgagcaagctgctggaggtggccaagatgccccccgagagcgaggtgatgacccccaagcccaacgccggcgccaacggctgcaccctgagctaccagaacagcggcaagcacagcctgggcagcgtgcagagcaccgccacccagagcaacgtggagaaggccgacagcaacaacctgttcaacaccggcagcagcggccccggcaagttctacagccccctgcccaacgaccagctgctgaagaccctgaccgagaagaacagacagtggttcagcctgctgcccagaaccccctgcgacgacaccagcctgacccacgccgacatgagcaccgccagcctggtgaccccccagagccagccccccagcaagagccccagccccacccccgcccccctgggcagcagcgcccagaaccccgtgggcctgaaccccttcgccctgagccccctgcaggtgaagggcggcgtgagcatgatgggcctgcagttctgcggctggcccaccggcgtggtgaccagcaacatccccttcaccagcagcgtgcccagcctgggcagcggcctgggcctgagcgagggcaacggcaacagcttcctgaccagcaacgtggccagcagcaagagcgagagccccgtgccccagaacgagaaggccaccagcgcccagcccgccgccgtggaggtggccaagcccgtggacttccccagccccaagcccatccccgaggagatgcagttcggctggtggagaatcatcgaccccgaggacctgaaggccctgctgaaggtgctgcacctgagaggcatcagagagaaggccctgcagaagcagatccagaagcacctggactacatcacccaggcctgcctgaagaacaaggacgtggccatcatcgagctgaacgagaacgaggagaaccaggtgaccagagacatcgtggagaactggagcgtggaggagcaggccatggagatggacctgagcgtgctgcagcaggtggaggacctggagagaagagtggccagcgccagcctgcaggtgaagggctggatgtgccccgagcccgccagcgagagagaggacctggtgtacttcgagcacaagagcttcaccaagctgtgcaaggagcacgacggcgagttcaccggcgaggacgagagcagcgcccacgccctggagagaaagagcgacaaccccctggacatcgccgtgaccagactggccgacctggagagaaacatcgagagaagaatcgaggaggacatcgcccccggcctgagagtgtggagaagagccctgagcgaggccagaagcgccgcccaggtggccctgtgcatccagcagctgcagaagagcatcgcctgggagaagagcatcatgaaggtgtactgccagatctgcagaaagggcgacaacgaggagctgctgctgctgtgcgacggctgcgacaagggctgccacacctactgccacagacccaagatcaccaccatccccgacggcgactggttctgccccgcctgcatcgccaaggccagcggccagaccctgaagatcaagaagctgcacgtgaagggcaagaagaccaacgagagcaagaagggcaagaaggtgaccctgaccggcgacaccgaggacgaggacagcgccagcaccagcagcagcctgaagagaggcaacaaggacctgaagaagagaaagatggaggagaacaccagcatcaacctgagcaagcaggagagcttcaccagcgtgaagaagcccaagagagacgacagcaaggacctggccctgtgcagcatgatcctgaccgagatggagacccacgaggacgcctggcccttcctgctgcccgtgaacctgaagctggtgcccggctacaagaaggtgatcaagaagcccatggacttcagcaccatcagagagaagctgagcagcggccagtaccccaacctggagaccttcgccctggacgtgagactggtgttcgacaactgcgagaccttcaacgaggacgacagcgacatcggcagagccggccacaacatgagaaagtacttcgagaagaagtggaccgacaccttcaaggtgagctag

SEQ ID NO: 176695 - protein, 2061 aa, Artificial Sequence
  derived and/or modified sequence
MLRVIVESASNIPKTKFGKPDPIVSVIFKDEKKKTKKVDNELNPVWNEILEFDLRGIPLDFSSSLGIIVKDFETIGQNKLIGTATVALKDLTGDQSRSLPYKLISLLNEKGQDTGATIDLVIGYDPPSAPHPNDLSGPSVPGMGGDGEEDEGDEDRLDNAVRGPGPKGPVGTVSEAQLARRLTKVKNSRRMLSNKPQDFQIRVRVIEGRQLSGNNIRPVVKVHVCGQTHRTRIKRGNNPFFDELFFYNVNMTPSELMDEIISIRVYNSHSLRADCLMGEFKIDVGFVYDEPGHAVMRKWLLLNDPEDTSSGSKGYMKVSMFVLGTGDEPPPERRDRDNDSDDVESNLLLPAGIALRWVTFLLKIYRAEDIPQMDDAFSQTVKEIFGGNADKKNLVDPFVEVSFAGKKVCTNIIEKNANPEWNQVVNLQIKFPSVCEKIKLTIYDWDRLTKNDVVGTTYLHLSKIAASGGEVEDFSSSGTGAASYTVNTGETEVGFVPTFGPCYLNLYGSPREYTGFPDPYDELNTGKGEGVAYRGRILVELATFLEKTPPDKKLEPISNDDLLVVEKYQRRRKYSLSAVFHSATMLQDVGEAIQFEVSIGNYGNKFDTTCKPLASTTQYSRAVFDGNYYYYLPWAHTKPVVTLTSYWEDISHRLDAVNTLLAMAERLQTNIEALKSGIQGKIPANQLAELWLKLIDEVIEDTRYTLPLTEGKANVTVLDTQIRKLRSRSLSQIHEAAVRMRSEATDVKSTLAEIEDWLDKLMQLTEEPQNSMPDIIIWMIRGEKRLAYARIPAHQVLYSTSGENASGKYCGKTQTIFLKYPQEKNNGPKVPVELRVNIWLGLSAVEKKFNSFAEGTFTVFAEMYENQALMFGKWGTSGLVGRHKFSDVTGKIKLKREFFLPPKGWEWEGEWIVDPERSLLTEADAGHTEFTDEVYQNESRYPGGDWKPAEDTYTDANGDKAASPSELTCPPGWEWEDDAWSYDINRAVDEKGWEYGITIPPDHKPKSWVAAEKMYHTHRRRRLVRKRKKDLTQTASSTARAMEELQDQEGWEYASLIGWKFHWKQRSSDTFRRRRWRRKMAPSETHGAAAIFKLEGALGADTTEDGDEKSLEKQKHSATTVFGANTPIVSCNFDRVYIYHLRCYVYQARNLLALDKDSFSDPYAHICFLHRSKTTEIIHSTLNPTWDQTIIFDEVEIYGEPQTVLQNPPKVIMELFDNDQVGKDEFLGRSIFSPVVKLNSEMDITPKLLWHPVMNGDKACGDVLVTAELILRGKDGSNLPILPPQRAPNLYMVPQGIRPVVQLTAIEILAWGLRNMKNFQMASITSPSLVVECGGERVESVVIKNLKKTPNFPSSVLFMKVFLPKEELYMPPLVIKVIDHRQFGRKPVVGQCTIERLDRFRCDPYAGKEDIVPQLKASLLSAPPCRDIVIEMEDTKPLLASKLTEKEEEIVDWWSKFYASSGEHEKCGQYIQKGYSKLKIYNCELENVAEFEGLTDFSDTFKLYRGKSDENEDPSVVGEFKGSFRIYPLPDDPSVPAPPRQFRELPDSVPQECTVRIYIVRGLELQPQDNNGLCDPYIKITLGKKVIEDRDHYIPNTLNPVFGRMYELSCYLPQEKDLKISVYDYDTFTRDEKVGETIIDLENRFLSRFGSHCGIPEEYCVSGVNTWRDQLRPTQLLQNVARFKGFPQPILSEDGSRIRYGGRDYSLDEFEANKILHQHLGAPEERLALHILRTQGLVPEHVETRTLHSTFQPNISQGKLQMWVDVFPKSLGPPGPPFNITPRKAKKYYLRVIIWNTKDVILDEKSITGEEMSDIYVKGWIPGNEENKQKTDVHYRSLDGEGNFNWRFVFPFDYLPAEQLCIVAKKEHFWSIDQTEFRIPPRLIIQIWDNDKFSLDDYLGFLELDLRHTIIPAKSPEKCRLDMIPDLKAMNPLKAKTASLFEQKSMKGWWPCYAEKDGARVMAGKVEMTLEILNEKEADERPAGKGRDEPNMNPKLDLPNRPETSFLWFTNPCKTMKFIVWRRFKWVIIGLLFLLILLLFVAVLLYSLPNYLSMKIVKPNV

SEQ ID NO: 176696 - protein, 445 aa, Artificial Sequence
  derived and/or modified sequence
MLRVIVESASNIPKTKFGKPDPIVSVIFKDEKKKTKKVDNELNPVWNEILEFDLRGIPLDFSSSLGIIVKDFETIGQNKLIGTATVALKDLTGDQSRSLPYKLISLLNEKGQDTGATIDLVIGYDPPSAPHPNDLSGPSVPGMGGDGEEDEGDEDRLDNAVRGPGPKGPVGTVSEAQLARRLTKVKNSRRMLSNKPQDFQIRVRVIEGRQLSGNNIRPVVKVHVCGQTHRTRIKRGNNPFFDELFFYNVNMTPSELMDEIISIRVYNSHSLRADCLMGEFKIDVGFVYDEPGHAVMRKWLLLNDPEDTSSGSKGYMKVSMFVLGTGDEPPPERRDRDNDSDDVESNLLLPAGIALRWVTFLLKIYRAEDIPQMDDAFSQTVKEIFGGNADKKNLVDPFVEVSFAGKKVCTNIIEKNANPEWNQVVNLQIKFPSVCEKIKLTIYDW

SEQ ID NO: 176697 - protein, 2061 aa, Artificial Sequence
  derived and/or modified sequence
MLRVIVESASNIPKTKFGKPDPIVSVIFKDEKKKTKKVDNELNPVWNEILEFDLRGIPLDFSSSLGIIVKDFETIGQNKLIGTATVALKDLTGDQSRSLPYKLISLLNEKGQDTGATIDLVIGYDPPSAPHPNDLSGPSVPGMGGDGEEDEGDEDRLDNAVRGPGPKGPVGTVSEAQLARRLTKVKNSRRMLSNKPQDFQIRVRVIEGRQLSGNNIRPVVKVHVCGQTHRTRIKRGNNPFFDELFFYNVNMTPSELMDEIISIRVYNSHSLRADCLMGEFKIDVGFVYDEPGHAVMRKWLLLNDPEDTSSGSKGYMKVSMFVLGTGDEPPPERRDRDNDSDDVESNLLLPAGIALRWVTFLLKIYRAEDIPQMDDAFSQTVKEIFGGNADKKNLVDPFVEVSFAGKKVCTNIIEKNANPEWNQVVNLQIKFPSVCEKIKLTIYDWDRLTKNDVVGTTYLHLSKIAASGGEVEDFSSSGTGAASYTVNTGETEVGFVPTFGPCYLNLYGSPREYTGFPDPYDELNTGKGEGVAYRGRILVELATFLEKTPPDKKLEPISNDDLLVVEKYQRRRKYSLSAVFHSATMLQDVGEAIQFEVSIGNYGNKFDTTCKPLASTTQYSRAVFDGNYYYYLPWAHTKPVVTLTSYWEDISHRLDAVNTLLAMAERLQTNIEALKSGIQGKIPANQLAELWLKLIDEVIEDTRYTLPLTEGKANVTVLDTQIRKLRSRSLSQIHEAAVRMRSEATDVKSTLAEIEDWLDKLMQLTEEPQNSMPDIIIWMIRGEKRLAYARIPAHQVLYSTSGENASGKYCGKTQTIFLKYPQEKNNGPKVPVELRVNIWLGLSAVEKKFNSFAEGTFTVFAEMYENQALMFGKWGTSGLVGRHKFSDVTGKIKLKREFFLPPKGWEWEGEWIVDPERSLLTEADAGHTEFTDEVYQNESRYPGGDWKPAEDTYTDANGDKAASPSELTCPPGWEWEDDAWSYDINRAVDEKGWEYGITIPPDHKPKSWVAAEKMYHTHRRRRLVRKRKKDLTQTASSTARAMEELQDQEGWEYASLIGWKFHWKQRSSDTFRRRRWRRKMAPSETHGAAAIFKLEGALGADTTEDGDEKSLEKQKHSATTVFGANTPIVSCNFDRVYIYHLRCYVYQARNLLALDKDSFSDPYAHICFLHRSKTTEIIHSTLNPTWDQTIIFDEVEIYGEPQTVLQNPPKVIMELFDNDQVGKDEFLGRSIFSPVVKLNSEMDITPKLLWHPVMNGDKACGDVLVTAELILRGKDGSNLPILPPQRAPNLYMVPQGIRPVVQLTAIEILAWGLRNMKNFQMASITSPSLVVECGGERVESVVIKNLKKTPNFPSSVLFMKVFLPKEELYMPPLVIKVIDHRQFGRKPVVGQCTIERLDRFRCDPYAGKEDIVPQLKASLLSAPPCRDIVIEMEDTKPLLASKLVSIEEEIVDWWSKFYASSGEHEKCGQYIQKGYSKLKIYNCELENVAEFEGLTDFSDTFKLYRGKSDENEDPSVVGEFKGSFRIYPLPDDPSVPAPPRQFRELPDSVPQECTVRIYIVRGLELQPQDNNGLCDPYIKITLGKKVIEDRDHYIPNTLNPVFGRMYELSCYLPQEKDLKISVYDYDTFTRDEKVGETIIDLENRFLSRFGSHCGIPEEYCVSGVNTWRDQLRPTQLLQNVARFKGFPQPILSEDGSRIRYGGRDYSLDEFEANKILHQHLGAPEERLALHILRTQGLVPEHVETRTLHSTFQPNISQGKLQMWVDVFPKSLGPPGPPFNITPRKAKKYYLRVIIWNTKDVILDEKSITGEEMSDIYVKGWIPGNEENKQKTDVHYRSLDGEGNFNWRFVFPFDYLPAEQLCIVAKKEHFWSIDQTEFRIPPRLIIQIWDNDKFSLDDYLGFLELDLRHTIIPAKSPEKCRLDMIPDLKAMNPLKAKTASLFEQKSMKGWWPCYAEKDGARVMAGKVEMTLEILNEKEADERPAGKGRDEPNMNPKLDLPNRPETSFLWFTNPCKTMKFIVWRRFKWVIIGLLFLLILLLFVAVLLYSLPNYLSMKIVKPNV

SEQ ID NO: 176698 - DNA, 6186 bp, Artificial Sequence
  derived and/or modified sequence
atgctgagagtgatcgtggagagcgccagcaacatccccaagaccaagttcggcaagcccgaccccatcgtgagcgtgatcttcaaggacgagaagaagaagaccaagaaggtggacaacgagctgaaccccgtgtggaacgagatcctggagttcgacctgagaggcatccccctggacttcagcagcagcctgggcatcatcgtgaaggacttcgagaccatcggccagaacaagctgatcggcaccgccaccgtggccctgaaggacctgaccggcgaccagagcagaagcctgccctacaagctgatcagcctgctgaacgagaagggccaggacaccggcgccaccatcgacctggtgatcggctacgacccccccagcgccccccaccccaacgacctgagcggccccagcgtgcccggcatgggcggcgacggcgaggaggacgagggcgacgaggacagactggacaacgccgtgagaggccccggccccaagggccccgtgggcaccgtgagcgaggcccagctggccagaagactgaccaaggtgaagaacagcagaagaatgctgagcaacaagccccaggacttccagatcagagtgagagtgatcgagggcagacagctgagcggcaacaacatcagacccgtggtgaaggtgcacgtgtgcggccagacccacagaaccagaatcaagagaggcaacaaccccttcttcgacgagctgttcttctacaacgtgaacatgacccccagcgagctgatggacgagatcatcagcatcagagtgtacaacagccacagcctgagagccgactgcctgatgggcgagttcaagatcgacgtgggcttcgtgtacgacgagcccggccacgccgtgatgagaaagtggctgctgctgaacgaccccgaggacaccagcagcggcagcaagggctacatgaaggtgagcatgttcgtgctgggcaccggcgacgagcccccccccgagagaagagacagagacaacgacagcgacgacgtggagagcaacctgctgctgcccgccggcatcgccctgagatgggtgaccttcctgctgaagatctacagagccgaggacatcccccagatggacgacgccttcagccagaccgtgaaggagatcttcggcggcaacgccgacaagaagaacctggtggaccccttcgtggaggtgagcttcgccggcaagaaggtgtgcaccaacatcatcgagaagaacgccaaccccgagtggaaccaggtggtgaacctgcagatcaagttccccagcgtgtgcgagaagatcaagctgaccatctacgactgggacagactgaccaagaacgacgtggtgggcaccacctacctgcacctgagcaagatcgccgccagcggcggcgaggtggaggacttcagcagcagcggcaccggcgccgccagctacaccgtgaacaccggcgagaccgaggtgggcttcgtgcccaccttcggcccctgctacctgaacctgtacggcagccccagagagtacaccggcttccccgacccctacgacgagctgaacaccggcaagggcgagggcgtggcctacagaggcagaatcctggtggagctggccaccttcctggagaagaccccccccgacaagaagctggagcccatcagcaacgacgacctgctggtggtggagaagtaccagagaagaagaaagtacagcctgagcgccgtgttccacagcgccaccatgctgcaggacgtgggcgaggccatccagttcgaggtgagcatcggcaactacggcaacaagttcgacaccacctgcaagcccctggccagcaccacccagtacagcagagccgtgttcgacggcaactactactactacctgccctgggcccacaccaagcccgtggtgaccctgaccagctactgggaggacatcagccacagactggacgccgtgaacaccctgctggccatggccgagagactgcagaccaacatcgaggccctgaagagcggcatccagggcaagatccccgccaaccagctggccgagctgtggctgaagctgatcgacgaggtgatcgaggacaccagatacaccctgcccctgaccgagggcaaggccaacgtgaccgtgctggacacccagatcagaaagctgagaagcagaagcctgagccagatccacgaggccgccgtgagaatgagaagcgaggccaccgacgtgaagagcaccctggccgagatcgaggactggctggacaagctgatgcagctgaccgaggagccccagaacagcatgcccgacatcatcatctggatgatcagaggcgagaagagactggcctacgccagaatccccgcccaccaggtgctgtacagcaccagcggcgagaacgccagcggcaagtactgcggcaagacccagaccatcttcctgaagtacccccaggagaagaacaacggccccaaggtgcccgtggagctgagagtgaacatctggctgggcctgagcgccgtggagaagaagttcaacagcttcgccgagggcaccttcaccgtgttcgccgagatgtacgagaaccaggccctgatgttcggcaagtggggcaccagcggcctggtgggcagacacaagttcagcgacgtgaccggcaagatcaagctgaagagagagttcttcctgccccccaagggctgggagtgggagggcgagtggatcgtggaccccgagagaagcctgctgaccgaggccgacgccggccacaccgagttcaccgacgaggtgtaccagaacgagagcagataccccggcggcgactggaagcccgccgaggacacctacaccgacgccaacggcgacaaggccgccagccccagcgagctgacctgcccccccggctgggagtgggaggacgacgcctggagctacgacatcaacagagccgtggacgagaagggctgggagtacggcatcaccatcccccccgaccacaagcccaagagctgggtggccgccgagaagatgtaccacacccacagaagaagaagactggtgagaaagagaaagaaggacctgacccagaccgccagcagcaccgccagagccatggaggagctgcaggaccaggagggctgggagtacgccagcctgatcggctggaagttccactggaagcagagaagcagcgacaccttcagaagaagaagatggagaagaaagatggcccccagcgagacccacggcgccgccgccatcttcaagctggagggcgccctgggcgccgacaccaccgaggacggcgacgagaagagcctggagaagcagaagcacagcgccaccaccgtgttcggcgccaacacccccatcgtgagctgcaacttcgacagagtgtacatctaccacctgagatgctacgtgtaccaggccagaaacctgctggccctggacaaggacagcttcagcgacccctacgcccacatctgcttcctgcacagaagcaagaccaccgagatcatccacagcaccctgaaccccacctgggaccagaccatcatcttcgacgaggtggagatctacggcgagccccagaccgtgctgcagaacccccccaaggtgatcatggagctgttcgacaacgaccaggtgggcaaggacgagttcctgggcagaagcatcttcagccccgtggtgaagctgaacagcgagatggacatcacccccaagctgctgtggcaccccgtgatgaacggcgacaaggcctgcggcgacgtgctggtgaccgccgagctgatcctgagaggcaaggacggcagcaacctgcccatcctgcccccccagagagcccccaacctgtacatggtgccccagggcatcagacccgtggtgcagctgaccgccatcgagatcctggcctggggcctgagaaacatgaagaacttccagatggccagcatcaccagccccagcctggtggtggagtgcggcggcgagagagtggagagcgtggtgatcaagaacctgaagaagacccccaacttccccagcagcgtgctgttcatgaaggtgttcctgcccaaggaggagctgtacatgccccccctggtgatcaaggtgatcgaccacagacagttcggcagaaagcccgtggtgggccagtgcaccatcgagagactggacagattcagatgcgacccctacgccggcaaggaggacatcgtgccccagctgaaggccagcctgctgagcgcccccccctgcagagacatcgtgatcgagatggaggacaccaagcccctgctggccagcaagctgaccgagaaggaggaggagatcgtggactggtggagcaagttctacgccagcagcggcgagcacgagaagtgcggccagtacatccagaagggctacagcaagctgaagatctacaactgcgagctggagaacgtggccgagttcgagggcctgaccgacttcagcgacaccttcaagctgtacagaggcaagagcgacgagaacgaggaccccagcgtggtgggcgagttcaagggcagcttcagaatctaccccctgcccgacgaccccagcgtgcccgccccccccagacagttcagagagctgcccgacagcgtgccccaggagtgcaccgtgagaatctacatcgtgagaggcctggagctgcagccccaggacaacaacggcctgtgcgacccctacatcaagatcaccctgggcaagaaggtgatcgaggacagagaccactacatccccaacaccctgaaccccgtgttcggcagaatgtacgagctgagctgctacctgccccaggagaaggacctgaagatcagcgtgtacgactacgacaccttcaccagagacgagaaggtgggcgagaccatcatcgacctggagaacagattcctgagcagattcggcagccactgcggcatccccgaggagtactgcgtgagcggcgtgaacacctggagagaccagctgagacccacccagctgctgcagaacgtggccagattcaagggcttcccccagcccatcctgagcgaggacggcagcagaatcagatacggcggcagagactacagcctggacgagttcgaggccaacaagatcctgcaccagcacctgggcgcccccgaggagagactggccctgcacatcctgagaacccagggcctggtgcccgagcacgtggagaccagaaccctgcacagcaccttccagcccaacatcagccagggcaagctgcagatgtgggtggacgtgttccccaagagcctgggcccccccggcccccccttcaacatcacccccagaaaggccaagaagtactacctgagagtgatcatctggaacaccaaggacgtgatcctggacgagaagagcatcaccggcgaggagatgagcgacatctacgtgaagggctggatccccggcaacgaggagaacaagcagaagaccgacgtgcactacagaagcctggacggcgagggcaacttcaactggagattcgtgttccccttcgactacctgcccgccgagcagctgtgcatcgtggccaagaaggagcacttctggagcatcgaccagaccgagttcagaatcccccccagactgatcatccagatctgggacaacgacaagttcagcctggacgactacctgggcttcctggagctggacctgagacacaccatcatccccgccaagagccccgagaagtgcagactggacatgatccccgacctgaaggccatgaaccccctgaaggccaagaccgccagcctgttcgagcagaagagcatgaagggctggtggccctgctacgccgagaaggacggcgccagagtgatggccggcaaggtggagatgaccctggagatcctgaacgagaaggaggccgacgagagacccgccggcaagggcagagacgagcccaacatgaaccccaagctggacctgcccaacagacccgagaccagcttcctgtggttcaccaacccctgcaagaccatgaagttcatcgtgtggagaagattcaagtgggtgatcatcggcctgctgttcctgctgatcctgctgctgttcgtggccgtgctgctgtacagcctgcccaactacctgagcatgaagatcgtgaagcccaacgtgtag

SEQ ID NO: 176699 - DNA, 6186 bp, Artificial Sequence
  derived and/or modified sequence
atgctgagagtgatcgtggagagcgccagcaacatccccaagaccaagttcggcaagcccgaccccatcgtgagcgtgatcttcaaggacgagaagaagaagaccaagaaggtggacaacgagctgaaccccgtgtggaacgagatcctggagttcgacctgagaggcatccccctggacttcagcagcagcctgggcatcatcgtgaaggacttcgagaccatcggccagaacaagctgatcggcaccgccaccgtggccctgaaggacctgaccggcgaccagagcagaagcctgccctacaagctgatcagcctgctgaacgagaagggccaggacaccggcgccaccatcgacctggtgatcggctacgacccccccagcgccccccaccccaacgacctgagcggccccagcgtgcccggcatgggcggcgacggcgaggaggacgagggcgacgaggacagactggacaacgccgtgagaggccccggccccaagggccccgtgggcaccgtgagcgaggcccagctggccagaagactgaccaaggtgaagaacagcagaagaatgctgagcaacaagccccaggacttccagatcagagtgagagtgatcgagggcagacagctgagcggcaacaacatcagacccgtggtgaaggtgcacgtgtgcggccagacccacagaaccagaatcaagagaggcaacaaccccttcttcgacgagctgttcttctacaacgtgaacatgacccccagcgagctgatggacgagatcatcagcatcagagtgtacaacagccacagcctgagagccgactgcctgatgggcgagttcaagatcgacgtgggcttcgtgtacgacgagcccggccacgccgtgatgagaaagtggctgctgctgaacgaccccgaggacaccagcagcggcagcaagggctacatgaaggtgagcatgttcgtgctgggcaccggcgacgagcccccccccgagagaagagacagagacaacgacagcgacgacgtggagagcaacctgctgctgcccgccggcatcgccctgagatgggtgaccttcctgctgaagatctacagagccgaggacatcccccagatggacgacgccttcagccagaccgtgaaggagatcttcggcggcaacgccgacaagaagaacctggtggaccccttcgtggaggtgagcttcgccggcaagaaggtgtgcaccaacatcatcgagaagaacgccaaccccgagtggaaccaggtggtgaacctgcagatcaagttccccagcgtgtgcgagaagatcaagctgaccatctacgactgggacagactgaccaagaacgacgtggtgggcaccacctacctgcacctgagcaagatcgccgccagcggcggcgaggtggaggacttcagcagcagcggcaccggcgccgccagctacaccgtgaacaccggcgagaccgaggtgggcttcgtgcccaccttcggcccctgctacctgaacctgtacggcagccccagagagtacaccggcttccccgacccctacgacgagctgaacaccggcaagggcgagggcgtggcctacagaggcagaatcctggtggagctggccaccttcctggagaagaccccccccgacaagaagctggagcccatcagcaacgacgacctgctggtggtggagaagtaccagagaagaagaaagtacagcctgagcgccgtgttccacagcgccaccatgctgcaggacgtgggcgaggccatccagttcgaggtgagcatcggcaactacggcaacaagttcgacaccacctgcaagcccctggccagcaccacccagtacagcagagccgtgttcgacggcaactactactactacctgccctgggcccacaccaagcccgtggtgaccctgaccagctactgggaggacatcagccacagactggacgccgtgaacaccctgctggccatggccgagagactgcagaccaacatcgaggccctgaagagcggcatccagggcaagatccccgccaaccagctggccgagctgtggctgaagctgatcgacgaggtgatcgaggacaccagatacaccctgcccctgaccgagggcaaggccaacgtgaccgtgctggacacccagatcagaaagctgagaagcagaagcctgagccagatccacgaggccgccgtgagaatgagaagcgaggccaccgacgtgaagagcaccctggccgagatcgaggactggctggacaagctgatgcagctgaccgaggagccccagaacagcatgcccgacatcatcatctggatgatcagaggcgagaagagactggcctacgccagaatccccgcccaccaggtgctgtacagcaccagcggcgagaacgccagcggcaagtactgcggcaagacccagaccatcttcctgaagtacccccaggagaagaacaacggccccaaggtgcccgtggagctgagagtgaacatctggctgggcctgagcgccgtggagaagaagttcaacagcttcgccgagggcaccttcaccgtgttcgccgagatgtacgagaaccaggccctgatgttcggcaagtggggcaccagcggcctggtgggcagacacaagttcagcgacgtgaccggcaagatcaagctgaagagagagttcttcctgccccccaagggctgggagtgggagggcgagtggatcgtggaccccgagagaagcctgctgaccgaggccgacgccggccacaccgagttcaccgacgaggtgtaccagaacgagagcagataccccggcggcgactggaagcccgccgaggacacctacaccgacgccaacggcgacaaggccgccagccccagcgagctgacctgcccccccggctgggagtgggaggacgacgcctggagctacgacatcaacagagccgtggacgagaagggctgggagtacggcatcaccatcccccccgaccacaagcccaagagctgggtggccgccgagaagatgtaccacacccacagaagaagaagactggtgagaaagagaaagaaggacctgacccagaccgccagcagcaccgccagagccatggaggagctgcaggaccaggagggctgggagtacgccagcctgatcggctggaagttccactggaagcagagaagcagcgacaccttcagaagaagaagatggagaagaaagatggcccccagcgagacccacggcgccgccgccatcttcaagctggagggcgccctgggcgccgacaccaccgaggacggcgacgagaagagcctggagaagcagaagcacagcgccaccaccgtgttcggcgccaacacccccatcgtgagctgcaacttcgacagagtgtacatctaccacctgagatgctacgtgtaccaggccagaaacctgctggccctggacaaggacagcttcagcgacccctacgcccacatctgcttcctgcacagaagcaagaccaccgagatcatccacagcaccctgaaccccacctgggaccagaccatcatcttcgacgaggtggagatctacggcgagccccagaccgtgctgcagaacccccccaaggtgatcatggagctgttcgacaacgaccaggtgggcaaggacgagttcctgggcagaagcatcttcagccccgtggtgaagctgaacagcgagatggacatcacccccaagctgctgtggcaccccgtgatgaacggcgacaaggcctgcggcgacgtgctggtgaccgccgagctgatcctgagaggcaaggacggcagcaacctgcccatcctgcccccccagagagcccccaacctgtacatggtgccccagggcatcagacccgtggtgcagctgaccgccatcgagatcctggcctggggcctgagaaacatgaagaacttccagatggccagcatcaccagccccagcctggtggtggagtgcggcggcgagagagtggagagcgtggtgatcaagaacctgaagaagacccccaacttccccagcagcgtgctgttcatgaaggtgttcctgcccaaggaggagctgtacatgccccccctggtgatcaaggtgatcgaccacagacagttcggcagaaagcccgtggtgggccagtgcaccatcgagagactggacagattcagatgcgacccctacgccggcaaggaggacatcgtgccccagctgaaggccagcctgctgagcgcccccccctgcagagacatcgtgatcgagatggaggacaccaagcccctgctggccagcaagctggtgagcatcgaggaggagatcgtggactggtggagcaagttctacgccagcagcggcgagcacgagaagtgcggccagtacatccagaagggctacagcaagctgaagatctacaactgcgagctggagaacgtggccgagttcgagggcctgaccgacttcagcgacaccttcaagctgtacagaggcaagagcgacgagaacgaggaccccagcgtggtgggcgagttcaagggcagcttcagaatctaccccctgcccgacgaccccagcgtgcccgccccccccagacagttcagagagctgcccgacagcgtgccccaggagtgcaccgtgagaatctacatcgtgagaggcctggagctgcagccccaggacaacaacggcctgtgcgacccctacatcaagatcaccctgggcaagaaggtgatcgaggacagagaccactacatccccaacaccctgaaccccgtgttcggcagaatgtacgagctgagctgctacctgccccaggagaaggacctgaagatcagcgtgtacgactacgacaccttcaccagagacgagaaggtgggcgagaccatcatcgacctggagaacagattcctgagcagattcggcagccactgcggcatccccgaggagtactgcgtgagcggcgtgaacacctggagagaccagctgagacccacccagctgctgcagaacgtggccagattcaagggcttcccccagcccatcctgagcgaggacggcagcagaatcagatacggcggcagagactacagcctggacgagttcgaggccaacaagatcctgcaccagcacctgggcgcccccgaggagagactggccctgcacatcctgagaacccagggcctggtgcccgagcacgtggagaccagaaccctgcacagcaccttccagcccaacatcagccagggcaagctgcagatgtgggtggacgtgttccccaagagcctgggcccccccggcccccccttcaacatcacccccagaaaggccaagaagtactacctgagagtgatcatctggaacaccaaggacgtgatcctggacgagaagagcatcaccggcgaggagatgagcgacatctacgtgaagggctggatccccggcaacgaggagaacaagcagaagaccgacgtgcactacagaagcctggacggcgagggcaacttcaactggagattcgtgttccccttcgactacctgcccgccgagcagctgtgcatcgtggccaagaaggagcacttctggagcatcgaccagaccgagttcagaatcccccccagactgatcatccagatctgggacaacgacaagttcagcctggacgactacctgggcttcctggagctggacctgagacacaccatcatccccgccaagagccccgagaagtgcagactggacatgatccccgacctgaaggccatgaaccccctgaaggccaagaccgccagcctgttcgagcagaagagcatgaagggctggtggccctgctacgccgagaaggacggcgccagagtgatggccggcaaggtggagatgaccctggagatcctgaacgagaaggaggccgacgagagacccgccggcaagggcagagacgagcccaacatgaaccccaagctggacctgcccaacagacccgagaccagcttcctgtggttcaccaacccctgcaagaccatgaagttcatcgtgtggagaagattcaagtgggtgatcatcggcctgctgttcctgctgatcctgctgctgttcgtggccgtgctgctgtacagcctgcccaactacctgagcatgaagatcgtgaagcccaacgtgtag

SEQ ID NO: 176700 - DNA, 6186 bp, Artificial Sequence
  derived and/or modified sequence
atgttacgagtgatagtcgagtccgcatccaacattcctaagacaaagtttggaaagcctgatccgatcgttagtgttatcttcaaagacgagaaaaagaagacgaagaaggtggataacgaactaaaccccgtgtggaatgaaattctggagtttgatctccgtggcattcctttagacttctcctctagcctcgggatcatcgttaaggatttcgaaacaatcggacagaataaactgattggcacagctacagtcgccctgaaagatttgacaggagatcaatcccggtcactgccctacaagctgataagtctccttaacgagaagggtcaagacactggcgccactattgatctggtcatcggctatgaccccccttccgcccctcaccctaatgatctctcgggaccgtcagtcccaggcatgggaggggacggggaggaggacgagggtgatgaggaccggctcgacaatgcagtcagagggcccggacccaaaggacctgtggggaccgttagcgaggcccaattggccaggagactcaccaaggtcaagaatagccggaggatgttgtctaacaagccccaggattttcagatccgagtgagagtcatagaggggagacaattgtctgggaataatattagacctgtcgtgaaagtgcatgtgtgcgggcagacccataggacaagaataaagagagggaataatccctttttcgacgagctgttcttctataacgttaacatgaccccctctgaactgatggatgaaattatttctattagggtctataattctcattctctccgcgccgactgcctgatgggcgagttcaaaatcgatgtcgggttcgtctatgacgaacctggacatgccgtcatgcggaagtggctactgctgaatgacccggaggacacatcttcgggcagtaagggctatatgaaggtaagcatgtttgtcctcgggaccggggatgaacctcctcctgaaaggagggatcgcgacaatgattccgatgatgtggaatcaaatctcctgctgccggctggtatcgctttacgttgggtgacctttctcttaaaaatatacagggctgaagacattccacagatggacgacgcatttagtcagacagtgaaggagatttttgggggtaacgcagataagaagaatctcgtagacccattcgtagaagtctctttcgcaggcaagaaggtctgcacaaatattattgagaagaatgctaatccggagtggaaccaggtcgtgaacctgcaaatcaaattccccagcgtttgcgagaagatcaaactgaccatttacgactgggacaggctcacaaaaaatgacgtcgtggggaccacatatcttcatctctcaaagatcgctgcatccgggggggaggttgaggacttctcctctagcggaacgggagccgccagctacacggtgaatacaggagaaacggaagttggattcgtcccaacctttggtccatgttatctgaacctgtacggtagtccccgcgaatatacagggtttccagacccttatgacgagctgaatacaggaaaaggcgagggggtcgcctacagagggcgtattctggtcgagttggccaccttcctcgagaagacccctcctgacaaaaaattagaacccatttccaacgatgacctactcgttgtggagaagtaccagcggagacggaaatactcactgagcgccgtgtttcattctgcaactatgcttcaggatgtgggagaagccatccagttcgaagtcagcatcggcaattacgggaacaaattcgacacaacctgcaagccgctcgcgtccaccacgcaatactcacgagcagtctttgacgggaattactattactacctcccctgggcccacacaaagcccgtggtcacattgacatcctactgggaggacattagtcacaggcttgatgcagtgaatacattgttagccatggctgagcggctccagacgaatatcgaagctcttaagtccggaatccagggcaagatcccagccaatcagttagccgagctgtggctgaagctgatagatgaagtgatagaagataccagatatactttacccctgacagaagggaaggccaatgtaaccgtgctcgatacccagattcgtaagctccggagtaggtccctgagccagattcacgaggcagctgtaaggatgagatcagaagctactgatgtgaagtccacactggctgaaatcgaagactggctggataagctgatgcagcttaccgaagaaccccagaattccatgcccgatatcattatctggatgatccgaggagaaaaacgcttggcctacgctagaattcccgcccatcaagtgctttacagcacaagcggagagaacgcctctgggaaatattgcgggaaaactcagactatatttctgaagtatccacaggaaaaaaataacggcccgaaagtgcccgtcgaattaagggttaatatctggctcggccttagcgcagtggagaaaaagtttaatagcttcgcggaaggaacgttcactgtattcgcagagatgtacgaaaaccaggcactgatgtttggaaagtggggtaccagcggtctagtggggcggcataagtttagcgatgtgactggaaagattaaactgaaaagagagtttttcctgccccccaaggggtgggagtgggaaggcgagtggatcgtcgatcccgaaagaagcctgcttactgaagcggatgccggccacaccgaattcactgacgaggtctatcaaaatgagtctagatatcctggcggcgactggaagcccgctgaggatacgtatactgacgccaatggagacaaggctgcatcacccagcgaactcacatgtccccccggatgggaatgggaggacgacgcatggagctatgatataaatagggcagtggatgagaagggctgggagtacggaattacaattccaccagaccacaagcccaagagctgggtggccgccgagaagatgtatcacactcaccgcagacgacggctcgtaaggaaaagaaaaaaagacctgacgcagaccgccagctcgaccgcacgggcaatggaggaattgcaggatcaggagggatgggagtatgctagccttattggttggaagtttcattggaaacagcgaagctctgacactttccggcggagaagatggagacgaaaaatggcaccgagtgaaacccatggcgctgctgctatattcaagcttgagggcgccttgggtgctgacactacagaagacggtgacgaaaaatccctcgaaaagcagaagcacagtgccaccacagtgttcggtgctaacacccccatcgtgagttgcaattttgacagggtatatatctatcacctgcgatgctatgtgtaccaggctcgcaatcttctcgccctggataaagactctttcagcgacccatacgcgcacatctgttttttacatagatcgaagacaaccgaaatcatccacagtacattgaaccccacatgggatcagaccatcatatttgacgaggttgaaatctatggcgagcctcagaccgtgctccagaacccccctaaggtgattatggaactgtttgataacgaccaggttggcaaagatgagtttttaggaagatcgatcttctctcctgtggttaaactcaactccgagatggatatcaccccaaaactgttgtggcatccggtgatgaacggcgacaaagcctgcggagatgttctggtgaccgccgagttaatccttagaggcaaggacggaagcaatctgccgatattgcctccccagagggctccaaatttgtatatggtacctcagggaatccgccccgttgtgcaactgaccgccattgaaattttggcatggggccttaggaacatgaaaaattttcagatggccagtattacctcccctagcctcgtggtagagtgtggcggcgaaagagtggagtctgttgtgattaaaaatttgaagaagactcccaattttccgtcatctgtgctgttcatgaaggtcttcctaccgaaagaagaactttacatgccacccctcgtcatcaaggtgatagaccaccggcaattcggtcgaaaacctgtagtcggccaatgtacaatcgaacgattagatcggtttcggtgtgatccctacgctggaaaggaggacattgtgccacaactgaaagcatcccttttgtcggctccgccttgccgcgatatcgtaatcgagatggaagacacaaagccactcctggcatctaaactgaccgaaaaggaagaggaaatcgtagattggtggtcaaaattttatgcctcaagcggcgagcacgaaaagtgtggacagtatattcagaagggctattctaagctaaagatttacaactgtgagctcgagaatgttgccgagttcgaaggactaacagatttcagcgatacctttaaactgtatcgcgggaaatctgatgaaaatgaggatcccagtgtggtgggcgaattcaagggctcatttcggatctatcctctgcctgatgatccatccgtgcccgccccccctcgtcagtttcgcgaactacctgactcagttccacaagagtgcactgtacggatatacatcgtgcgaggcctggagttgcagccacaggacaacaatggactctgcgacccctacataaaaatcacgctcggcaagaaagtgatcgaggatagagatcactacattccaaacactctgaaccccgtcttcggacgaatgtatgaactgagctgctatttgccccaggaaaaagacctcaagatcagcgtgtatgactatgatacgttcaccagagacgaaaaggtgggggagactatcattgatctggaaaataggtttctaagccgttttggttctcactgtggaatcccggaggagtattgtgtaagtggagtcaacacttggcgagaccagcttcggcctactcaacttttgcagaacgttgctaggttcaagggcttcccccaacccatcctgagcgaggatggttcacgcatcaggtacggtggacgggattatagcctggacgaatttgaagctaacaaaatcctacaccaacatctcggggccccagaggaacggctggctctgcacatcctccggacccagggcctggtgcctgagcacgtcgagacccggaccctgcatagcaccttccagcccaacatttctcaaggaaagctgcagatgtgggtggacgtcttcccgaagtctttgggcccacctgggccacctttcaatattacgccccgcaaagctaaaaagtactacctgcgggtgattatctggaatactaaggacgttatcctcgatgaaaaaagcatcacaggtgaggagatgtccgacatctacgttaaaggctggatccccggtaatgaggaaaataagcagaagacggacgttcactacagaagccttgatggagagggcaattttaactggcggtttgtatttcctttcgattacctgcctgccgagcagctctgtattgtggcgaagaaagaacatttctggagtatagatcagacagagttccggatcccccctcgtctgatcatacagatctgggacaacgacaagttttcccttgatgattacctagggtttttggaactggatctacgtcataccatcataccagccaagtcgcctgagaaatgcagactagacatgatcccagatctgaaggcaatgaaccctctaaaggccaagaccgcttcgcttttcgagcagaagtctatgaagggttggtggccgtgctatgcggaaaaggacggggcgagagtgatggctggcaaggttgaaatgactcttgagattttaaatgaaaaggaggctgatgagcgacccgccggaaagggccgagatgaacccaacatgaaccctaagctggatctgcccaaccgcccggaaactagctttctgtggttcactaatccatgtaagaccatgaaattcatagtttggcggcgcttcaaatgggttatcatcgggttgttgtttctactcatcctactgctctttgtggccgtgctactttactcgctccctaactacctctccatgaagatcgtaaaacccaatgtgtag

SEQ ID NO: 176701 - DNA, 6186 bp, Artificial Sequence
  derived and/or modified sequence
atgttgagagtgattgtggagagcgcttctaatatccctaagacgaaatttgggaagccagaccccattgtgagtgtaatctttaaggatgagaagaaaaagaccaagaaggtagacaacgagctgaaccccgtttggaacgagatcctggagtttgacctacgggggatccctcttgatttcagttcatctctgggaattatagtgaaggattttgagacgattggtcagaataaactcataggtactgctactgtggctctgaaggacctgacaggagatcagtcccggtcactgccgtataaactgatctccctcctgaacgaaaagggccaggacacaggtgcgacaatagacctggtaatcggctatgacccgcccagtgcaccccaccccaacgacctgagcggtcccagcgtaccgggcatgggcggcgacggggaggaagatgagggtgatgaggaccgcctggacaatgccgttcgagggcccggacctaagggacccgttggaactgttagcgaggctcagctggcaagacggctgacgaaagtcaagaactcacggcggatgctttccaataagccccaggacttccagatcagagtgcgcgtcatagaagggagacaattgtccgggaacaatattcgccccgtggttaaagtgcacgtgtgtggtcagacgcacagaacaagaattaaacggggcaacaacccgttctttgatgaattgttcttctataatgtgaacatgaccccatctgagctgatggatgaaataatctctatcagggtctacaattcccatagtttgcgtgcagactgtctcatgggagaatttaaaatcgacgttgggtttgtgtacgacgagcctggacacgcagtgatgagaaaatggctgctgcttaatgatcctgaagacaccagctctggttctaagggatatatgaaggtgtctatgtttgtcctgggaaccggcgacgaaccgcccccagagaggcgtgatcgtgacaacgactccgatgacgtagaatctaatctgctgctgcccgctggaattgccctgcggtgggtcacttttctgctgaagatctatagagctgaggacatcccccagatggatgacgcattcagccaaactgtgaaggagatttttgggggcaatgctgacaagaagaatttagtggatcctttcgtggaagtctccttcgctggtaagaaagtgtgtaccaatatcatcgagaaaaacgcaaacccagaatggaaccaagtagtaaatctccaaatcaagttcccgtcagtgtgcgaaaagatcaagctgaccatctacgattgggatcgcctgaccaaaaacgacgtggtgggaacaacatatctgcacctttctaagattgcagcctcgggcggtgaagtggaggatttctcatcctcaggaaccggcgccgcttcctacactgtgaataccggggaaacagaggtaggcttcgttccaacgttcgggccttgctacttgaacttgtatggttcaccaagggaatatacaggattcccagatccttatgatgagctcaacactggcaaaggggaaggtgtggcctaccggggtagaattttggtggagctggcaacctttctggaaaagaccccccctgataagaagctggaacctatttccaacgatgatctgcttgtagtggagaagtaccagcgaaggagaaagtacagtttatcagctgtctttcatagcgcaaccatgttgcaggatgtgggtgaagcgattcagttcgaagtgtccatcggcaattatggaaataagttcgacaccacctgcaaacccctggccagcactacccaatactcccgcgcagtgtttgatggcaactactactactaccttccctgggcccacactaaaccagtagtcacccttaccagttactgggaggacatcagtcataggcttgatgcagtgaataccctgctggccatggcagagcgccttcaaactaatatagaagcattaaagtctgggatccagggaaaaattcccgcaaatcagcttgctgaactgtggctaaagctaatcgatgaggtgattgaggatactagatacactctccctttaactgagggcaaggccaatgtcactgtgctcgacactcaaattcgcaaactacgctccaggtctctgtcacagattcatgaggctgcagtgcggatgagaagtgaggccacagatgtaaaatcaaccctggcagagatcgaggattggctggacaagctaatgcaattaaccgaggaacctcaaaatagtatgcctgacatcattatctggatgattcgaggggagaaacgcctggcctatgctcgcatacctgcccaccaagttttgtacagcacttctggcgagaacgcctctggaaaatactgcggtaagactcagacaatttttctgaagtacccccaggaaaagaacaacggtccaaaagtgcccgttgaattacgcgtgaacatttggctgggcctgtctgccgttgagaaaaaattcaattccttcgctgaaggcacatttaccgttttcgcagagatgtacgagaaccaagcattaatgttcgggaaatggggtacatccgggttggtggggaggcataagttctcagatgtcactggcaagattaagttaaagagggaattcttcctgcccccaaagggatgggaatgggaaggagagtggatcgttgatccagagcgcagtctcctcactgaagctgatgccggtcacaccgaattcactgatgaagtgtatcagaacgagtcccggtatcctggcggagattggaaaccagccgaggacacgtataccgacgccaatggcgacaaagcggcatcaccttccgaactcacctgtccccccggttgggagtgggaggacgatgcatggtcctatgatataaatagggcagtcgacgagaaaggctgggaatatgggattaccattccaccagatcacaagcccaagagctgggtggcagctgaaaaaatgtaccatacacaccgtcggcgacgactggtcagaaaacggaagaaagacctcactcaaacagcaagcagtacggctagagccatggaggagctgcaggatcaggagggatgggagtacgctagcctcattggttggaaattccactggaaacaaagatcatctgacactttccggcgccggcgttggcgaaggaagatggcgccctcagagactcatggggccgctgcaattttcaaactggagggagcccttggagccgacaccaccgaagacggcgacgaaaaaagcttagagaaacaaaagcatagcgcaacaactgtgtttggagcgaacacacctattgtttcgtgtaattttgatcgcgtttatatttatcatctgcggtgctatgtgtaccaggctcgcaatcttctggctttggataaggatagttttagcgacccctacgcccatatctgctttctgcaccgctctaagactacagagataattcactctaccctcaaccccacttgggaccagactattatcttcgacgaggtcgagatctacggtgaaccccagacggtgcttcagaacccaccaaaagtaatcatggagctgttcgataacgatcaggtgggcaaggacgagtttctcggtcgatctatcttttcccccgtcgtaaaactgaatagtgagatggatattacacccaagctgctatggcatcccgtgatgaatggcgataaagcctgtggagacgtactcgttacagctgaactgatcctccgcggaaaggacggcagtaacctccccatcctgccaccccagcgggcccctaacttgtatatggtgcctcaaggaatccggcctgttgtgcagcttacggcaattgagattttagcttggggtcttagaaacatgaagaactttcagatggcatctattacttctccgtctttggtggtggagtgcggaggcgaacgggtagaatccgtagtgatcaaaaacctcaagaagacacctaatttcccatcaagcgtgttatttatgaaggttttcctgccgaaggaggaactttatatgcctcctttagtgatcaaggtgattgaccataggcagtttggtaggaaacccgtagtagggcagtgcacaatcgaacggctggatagattccgctgtgacccttatgctggaaaagaggatatcgtgccacagttaaaagcctccctgctgtccgctcctccttgcagggacatcgtgatcgaaatggaggataccaaacccttgctggcctctaagctcgtaagcatagaggaagagatagtggactggtggagcaaattttatgcaagctccggagagcatgagaaatgcggccagtatatacaaaaaggatacagcaagctcaaaatttacaattgcgaactggagaatgtggccgagtttgaaggcctgacagacttctctgatacttttaaactctatcgaggcaaatccgatgagaacgaggacccctcagtggtgggtgaatttaaaggatcttttcgtatctacccactgcccgacgatccatccgtccccgcccccccacggcagtttagggagctgccagatagtgtcccccaggagtgcactgtgcggatttacatcgtgcgcggactggaactccaacctcaggacaataatggactgtgtgacccttatatcaagattaccctcggcaaaaaagtgattgaagatcgcgaccattacatacctaacaccctgaaccccgtgttcggtcgcatgtacgaactgagctgctatctgccccaagagaaagatctgaaaatctctgtgtacgattatgacacctttaccagggatgagaaggttggagagaccatcatcgacttggagaatcgatttctgtcgagattcggtagccactgcgggattccggaggagtactgcgtaagcggtgtgaatacctggcgcgatcagctcagacccacccaacttttgcagaatgtcgccagattcaagggctttccgcaacctatcctctccgaagatgggagcaggattcgctatggcggacgggattatagcctcgatgagtttgaggccaataagatcctgcaccagcacctgggcgcccccgaggaaaggctagcattacacattctgcggacccaagggctggtgcctgagcacgtcgaaacacgcactttgcactcaactttccagcccaacatctcccagggtaagctgcagatgtgggtggacgtgtttcccaaatccctggggccccccggacctcctttcaacatcacgccccgtaaagcaaaaaagtattacctcagggttattatttggaacactaaagacgtcatcttagacgagaagtcaattaccggggaggagatgtccgacatttatgttaaagggtggattccgggaaatgaggagaacaaacagaaaaccgacgtgcactatcgctctttagacggagagggcaacttcaattggagatttgtttttcctttcgactatctacccgccgagcagctatgcattgtcgccaagaaggagcacttctggagtatagatcagacagagtttcgaattccccccaggctgatcatccaaatctgggataacgacaagttttctctcgacgattatctgggatttctcgaattagacttaaggcatactattattcctgctaagagtccagaaaagtgtcgtttagatatgatcccagacctgaaggcgatgaaccctctgaaggctaaaacggccagtttattcgagcagaagagtatgaagggctggtggccctgctatgcagaaaaagatggagcccgagttatggctggaaaggtggagatgaccttggagattctgaatgagaaagaggcagatgaaagaccagcagggaaaggcagggacgagcctaatatgaatccaaagctggacctgccaaacaggcccgaaaccagcttcctgtggtttactaacccttgtaaaaccatgaaatttattgtctggcgaagattcaaatgggttattatcgggctacttttccttctaattcttctcctcttcgtggccgtactactgtactcccttcccaattacttgtccatgaaaatcgtcaagcctaatgtatag

SEQ ID NO: 176702 - DNA, 6186 bp, Artificial Sequence
  derived and/or modified sequence
atgctgcgggtgattgtggagagcgccagcaacatccccaagaccaagtttgggaagccagaccccatcgtgtctgtcatcttcaaggatgagaagaagaagaccaagaaggtggacaatgagctgaaccctgtgtggaatgagatcctggagtttgacctgcggggcatccccctggacttcagcagcagcctgggcatcatcgtgaaggactttgagaccatcggccagaacaagctgattggaacagccaccgtggccctgaaggacctgaccggggaccagagccgcagcctgccctacaagctgatcagcctgctgaatgagaagggccaggacaccggggccaccatcgacctggtgattggctatgacccccccagcgccccccaccccaatgacctgagcggccccagcgtgcccggcatgggaggagatggagaagaagatgaaggagatgaggaccggctggacaatgctgtgcggggccctggccccaagggccctgtgggcaccgtgtctgaggcccagctggcccggcggctgaccaaggtgaagaacagcaggaggatgctgagcaacaagccccaggacttccagatccgggtgcgggtcatcgagggccggcagctgagcggcaacaacatccggcctgtggtgaaggtgcacgtgtgtggccagacccacaggacccgcatcaagaggggcaacaaccccttctttgatgagctgttcttctacaacgtgaacatgacccccagcgagctgatggatgagatcatcagcatccgggtgtacaacagccacagcctgcgggctgactgcctgatgggagagttcaagattgatgtgggctttgtgtatgatgagcccggccatgctgtgatgaggaagtggctgctgctgaatgaccctgaggacaccagcagcggcagcaagggctacatgaaggtgtccatgtttgtgctgggcactggagatgagcccccacctgagcggcgggaccgggacaatgacagtgatgatgtggagagcaacctgctgctgcctgctggcatcgccctgcgctgggtgaccttcctgctgaagatctacagagctgaggacatcccccagatggatgatgccttcagccagacagtgaaggagatctttggaggaaatgctgacaagaagaacctggtggacccctttgtggaggtgtcctttgctgggaagaaggtgtgcaccaacatcatcgagaagaatgccaaccctgagtggaaccaggtggtgaacctgcagatcaagttccccagcgtgtgtgagaagatcaagctgaccatctatgactgggaccggctgaccaagaatgatgtggtgggcaccacctacctgcacctgagcaagattgctgccagcggcggggaggtggaggacttcagcagcagcggcactggagctgccagctacacagtgaacacaggagaaacagaggtgggctttgtgcccaccttcggcccctgctacctgaacctgtatggcagcccccgggagtacacaggcttcccagacccctatgatgagctgaacacaggaaaaggagagggcgtggcctaccggggccgcatcctggtggagctggccaccttcctggagaagaccccaccagacaagaagctggagcccatcagcaatgatgacctgctggtggtggagaagtaccagaggaggaggaagtacagcctgtctgctgtgttccacagcgccaccatgctgcaggatgtgggggaggccatccagtttgaggtgtccatcggcaactacggcaacaagtttgacaccacctgcaagcccctggccagcaccacccagtacagcagagctgtgtttgatggcaactactactactacctgccctgggcccacaccaagcctgtggtgaccctgaccagctactgggaggacatcagccaccggctggatgctgtgaacaccctgctggccatggccgagcggctgcagaccaacatcgaggccctgaagagcggcatccagggcaagatcccagccaaccagctggccgagctgtggctgaagctgattgatgaggtgattgaggacacccgctacaccctgcccctgacagagggcaaggccaacgtgacagtgctggacacccagatcaggaagctgcggagccgcagcctgagccagatccacgaggccgctgtgaggatgaggtctgaggccacagatgtgaagagcaccctggccgagattgaggactggctggacaagctgatgcagctgacagaggagccccagaacagcatgccagacatcatcatctggatgatccggggggagaagaggctggcctatgcccgcatcccagcccaccaggtgctgtacagcaccagcggagaaaatgccagcggcaagtactgtgggaagacccagaccatcttcctgaagtacccccaggagaagaacaacggccccaaggtgcctgtggagctgcgggtgaacatctggctgggcctgtctgctgtggagaagaagttcaacagctttgctgagggcaccttcaccgtgtttgctgagatgtatgagaaccaggccctgatgtttgggaagtggggcaccagcggcctggtgggccgccacaagttcagtgatgtgacaggcaagatcaagctgaagcgggagttcttcctgccccccaagggctgggagtgggagggggagtggatcgtggaccctgagaggagcctgctgacagaagcagatgctggccacacagagttcacagatgaggtgtaccagaatgaaagccgctacccaggaggagactggaagccagctgaggacacctacacagatgccaatggagacaaggccgccagccccagcgagctgacctgccccccaggctgggagtgggaggatgatgcctggagctatgacatcaacagagctgtggatgagaagggctgggagtatggcatcaccatccccccagaccacaagcccaagtcctgggtggccgctgagaagatgtaccacacccacagaagaagaaggctggtgaggaagaggaagaaggacctgacccagacagccagcagcacagcccgggccatggaggagctgcaggaccaggagggctgggagtatgccagcctgattggctggaagttccactggaagcagaggagcagtgacaccttcagaagaagacgctggaggaggaagatggcccccagcgagacccacggggctgctgccatcttcaagctggagggcgccctgggcgctgacaccacagaagatggagatgagaagagcctggagaagcagaagcacagcgccaccaccgtgtttggagccaacacccccatcgtgtcctgcaactttgacagagtgtacatctaccacctgcgctgctacgtgtaccaggccaggaacctgctggccctggacaaggacagcttcagtgacccctatgcccacatctgcttcctgcacaggagcaagaccacagagatcatccacagcaccctgaaccccacctgggaccagaccatcatctttgatgaggtggagatctacggggagccccagacagtgctgcagaacccccccaaggtgatcatggagctgtttgacaatgaccaggtgggcaaggatgagttcctgggccgcagcatcttcagccctgtggtgaagctgaacagcgagatggacatcacccccaagctgctgtggcaccctgtgatgaatggagacaaggcctgtggagatgtgctggtgacagctgagctgatcctgcggggcaaggatggcagcaacctgcccatcctgcccccccagagggcccccaacctgtacatggtgccccagggcatccggcctgtggtgcagctgacagccatcgagatcctggcctggggcctgaggaacatgaagaacttccagatggccagcatcaccagccccagcctggtggtggagtgtggcggggagcgggtggagagcgtggtgatcaagaacctgaagaagacccccaacttccccagctctgtgctcttcatgaaggtgttcctgcccaaggaggagctgtacatgccacccctggtgatcaaggtgattgaccaccggcagtttggaaggaagcctgtggtgggccagtgcaccatcgagcggctggaccgcttccgctgtgacccctatgctgggaaggaggacatcgtgccccagctgaaggccagcctgctgagcgccccaccctgccgggacatcgtcatcgagatggaggacaccaagcccctgctggccagcaagctgacagagaaggaggaggagatcgtggactggtggagcaagttctacgccagcagtggagagcacgagaagtgtggccagtacatccagaagggctacagcaagctgaagatctacaactgtgagctggagaatgtggccgagtttgagggcctgacagacttcagtgacaccttcaagctgtaccggggcaagagtgatgaaaatgaagaccccagcgtggtgggggagttcaagggcagcttccgcatctaccccctgcctgatgaccccagcgtgcctgccccaccccggcagttccgggagctgcctgacagcgtgccccaggagtgcaccgtgcgcatctacatcgtgcggggcctggagctgcagccccaggacaacaacggcctgtgtgacccctacatcaagatcaccctgggcaagaaggtgattgaggaccgggaccactacatccccaacaccctgaaccctgtgtttggccgcatgtatgagctgagctgctacctgccccaggagaaggacctgaagatctctgtgtatgactatgacaccttcaccagagatgagaaggtgggggagaccatcatcgacctggagaaccgcttcctgagcagatttggcagccactgcggcatccctgaggagtactgtgtgtctggagtgaacacctggagggaccagctgcggcccacccagctgctgcagaatgtggcccgcttcaagggcttcccccagcccatcctgtctgaagatggcagccgcatccgctatggaggccgggactacagcctggatgaatttgaggccaacaagatcctgcaccagcacctgggcgcccctgaggagcggctggccctgcacatcctgcggacccagggcctggtgcctgagcacgtggagaccaggaccctgcacagcaccttccagcccaacatcagccagggcaagctgcagatgtgggtggatgtgttccccaagagcctgggccccccaggcccccccttcaacatcacccccaggaaggccaagaagtactacctgcgggtcatcatctggaacaccaaggatgtgatcctggatgagaagagcatcaccggggaggagatgtctgacatctacgtgaagggctggatccctggaaatgaggagaacaagcagaagacagatgtgcactaccgcagcctggatggagagggcaacttcaactggaggtttgtgttcccctttgactacctgcctgctgagcagctgtgcatcgtggccaagaaggagcacttctggagcattgaccagacagagttccgcatcccccccaggctcatcatccagatctgggacaatgacaagttcagcctggatgactacctgggcttcctggagctggacctgcggcacaccatcatcccagccaagagccctgagaagtgccgcctggacatgatcccagacctgaaggccatgaaccccctgaaggccaagacagccagcctgtttgagcagaagtccatgaagggctggtggccctgctacgccgagaaggatggagcccgggtgatggccggcaaggtggagatgaccctggagatcctgaatgagaaggaggctgatgagaggcctgctgggaagggcagagatgagcccaacatgaaccccaagctggacctgcccaacagacctgagaccagcttcctgtggttcaccaacccctgcaagaccatgaagttcatcgtgtggaggcgcttcaagtgggtgatcatcggcctgctcttcctgctgatcctgctgctgtttgtggccgtgctgctgtacagcctgcccaactacctgtccatgaagatcgtgaagcccaacgtgtag

SEQ ID NO: 176703 - DNA, 6186 bp, Artificial Sequence
  derived and/or modified sequence
atgctgcgggtgattgtggagagcgccagcaacatccccaagaccaagtttgggaagccagaccccatcgtgtctgtcatcttcaaggatgagaagaagaagaccaagaaggtggacaatgagctgaaccctgtgtggaatgagatcctggagtttgacctgcggggcatccccctggacttcagcagcagcctgggcatcatcgtgaaggactttgagaccatcggccagaacaagctgattggaacagccaccgtggccctgaaggacctgaccggggaccagagccgcagcctgccctacaagctgatcagcctgctgaatgagaagggccaggacaccggggccaccatcgacctggtgattggctatgacccccccagcgccccccaccccaatgacctgagcggccccagcgtgcccggcatgggaggagatggagaagaagatgaaggagatgaggaccggctggacaatgctgtgcggggccctggccccaagggccctgtgggcaccgtgtctgaggcccagctggcccggcggctgaccaaggtgaagaacagcaggaggatgctgagcaacaagccccaggacttccagatccgggtgcgggtcatcgagggccggcagctgagcggcaacaacatccggcctgtggtgaaggtgcacgtgtgtggccagacccacaggacccgcatcaagaggggcaacaaccccttctttgatgagctgttcttctacaacgtgaacatgacccccagcgagctgatggatgagatcatcagcatccgggtgtacaacagccacagcctgcgggctgactgcctgatgggagagttcaagattgatgtgggctttgtgtatgatgagcccggccatgctgtgatgaggaagtggctgctgctgaatgaccctgaggacaccagcagcggcagcaagggctacatgaaggtgtccatgtttgtgctgggcactggagatgagcccccacctgagcggcgggaccgggacaatgacagtgatgatgtggagagcaacctgctgctgcctgctggcatcgccctgcgctgggtgaccttcctgctgaagatctacagagctgaggacatcccccagatggatgatgccttcagccagacagtgaaggagatctttggaggaaatgctgacaagaagaacctggtggacccctttgtggaggtgtcctttgctgggaagaaggtgtgcaccaacatcatcgagaagaatgccaaccctgagtggaaccaggtggtgaacctgcagatcaagttccccagcgtgtgtgagaagatcaagctgaccatctatgactgggaccggctgaccaagaatgatgtggtgggcaccacctacctgcacctgagcaagattgctgccagcggcggggaggtggaggacttcagcagcagcggcactggagctgccagctacacagtgaacacaggagaaacagaggtgggctttgtgcccaccttcggcccctgctacctgaacctgtatggcagcccccgggagtacacaggcttcccagacccctatgatgagctgaacacaggaaaaggagagggcgtggcctaccggggccgcatcctggtggagctggccaccttcctggagaagaccccaccagacaagaagctggagcccatcagcaatgatgacctgctggtggtggagaagtaccagaggaggaggaagtacagcctgtctgctgtgttccacagcgccaccatgctgcaggatgtgggggaggccatccagtttgaggtgtccatcggcaactacggcaacaagtttgacaccacctgcaagcccctggccagcaccacccagtacagcagagctgtgtttgatggcaactactactactacctgccctgggcccacaccaagcctgtggtgaccctgaccagctactgggaggacatcagccaccggctggatgctgtgaacaccctgctggccatggccgagcggctgcagaccaacatcgaggccctgaagagcggcatccagggcaagatcccagccaaccagctggccgagctgtggctgaagctgattgatgaggtgattgaggacacccgctacaccctgcccctgacagagggcaaggccaacgtgacagtgctggacacccagatcaggaagctgcggagccgcagcctgagccagatccacgaggccgctgtgaggatgaggtctgaggccacagatgtgaagagcaccctggccgagattgaggactggctggacaagctgatgcagctgacagaggagccccagaacagcatgccagacatcatcatctggatgatccggggggagaagaggctggcctatgcccgcatcccagcccaccaggtgctgtacagcaccagcggagaaaatgccagcggcaagtactgtgggaagacccagaccatcttcctgaagtacccccaggagaagaacaacggccccaaggtgcctgtggagctgcgggtgaacatctggctgggcctgtctgctgtggagaagaagttcaacagctttgctgagggcaccttcaccgtgtttgctgagatgtatgagaaccaggccctgatgtttgggaagtggggcaccagcggcctggtgggccgccacaagttcagtgatgtgacaggcaagatcaagctgaagcgggagttcttcctgccccccaagggctgggagtgggagggggagtggatcgtggaccctgagaggagcctgctgacagaagcagatgctggccacacagagttcacagatgaggtgtaccagaatgaaagccgctacccaggaggagactggaagccagctgaggacacctacacagatgccaatggagacaaggccgccagccccagcgagctgacctgccccccaggctgggagtgggaggatgatgcctggagctatgacatcaacagagctgtggatgagaagggctgggagtatggcatcaccatccccccagaccacaagcccaagtcctgggtggccgctgagaagatgtaccacacccacagaagaagaaggctggtgaggaagaggaagaaggacctgacccagacagccagcagcacagcccgggccatggaggagctgcaggaccaggagggctgggagtatgccagcctgattggctggaagttccactggaagcagaggagcagtgacaccttcagaagaagacgctggaggaggaagatggcccccagcgagacccacggggctgctgccatcttcaagctggagggcgccctgggcgctgacaccacagaagatggagatgagaagagcctggagaagcagaagcacagcgccaccaccgtgtttggagccaacacccccatcgtgtcctgcaactttgacagagtgtacatctaccacctgcgctgctacgtgtaccaggccaggaacctgctggccctggacaaggacagcttcagtgacccctatgcccacatctgcttcctgcacaggagcaagaccacagagatcatccacagcaccctgaaccccacctgggaccagaccatcatctttgatgaggtggagatctacggggagccccagacagtgctgcagaacccccccaaggtgatcatggagctgtttgacaatgaccaggtgggcaaggatgagttcctgggccgcagcatcttcagccctgtggtgaagctgaacagcgagatggacatcacccccaagctgctgtggcaccctgtgatgaatggagacaaggcctgtggagatgtgctggtgacagctgagctgatcctgcggggcaaggatggcagcaacctgcccatcctgcccccccagagggcccccaacctgtacatggtgccccagggcatccggcctgtggtgcagctgacagccatcgagatcctggcctggggcctgaggaacatgaagaacttccagatggccagcatcaccagccccagcctggtggtggagtgtggcggggagcgggtggagagcgtggtgatcaagaacctgaagaagacccccaacttccccagctctgtgctcttcatgaaggtgttcctgcccaaggaggagctgtacatgccacccctggtgatcaaggtgattgaccaccggcagtttggaaggaagcctgtggtgggccagtgcaccatcgagcggctggaccgcttccgctgtgacccctatgctgggaaggaggacatcgtgccccagctgaaggccagcctgctgagcgccccaccctgccgggacatcgtcatcgagatggaggacaccaagcccctgctggccagcaagctggtgtccattgaggaggagatcgtggactggtggagcaagttctacgccagcagtggagagcacgagaagtgtggccagtacatccagaagggctacagcaagctgaagatctacaactgtgagctggagaatgtggccgagtttgagggcctgacagacttcagtgacaccttcaagctgtaccggggcaagagtgatgaaaatgaagaccccagcgtggtgggggagttcaagggcagcttccgcatctaccccctgcctgatgaccccagcgtgcctgccccaccccggcagttccgggagctgcctgacagcgtgccccaggagtgcaccgtgcgcatctacatcgtgcggggcctggagctgcagccccaggacaacaacggcctgtgtgacccctacatcaagatcaccctgggcaagaaggtgattgaggaccgggaccactacatccccaacaccctgaaccctgtgtttggccgcatgtatgagctgagctgctacctgccccaggagaaggacctgaagatctctgtgtatgactatgacaccttcaccagagatgagaaggtgggggagaccatcatcgacctggagaaccgcttcctgagcagatttggcagccactgcggcatccctgaggagtactgtgtgtctggagtgaacacctggagggaccagctgcggcccacccagctgctgcagaatgtggcccgcttcaagggcttcccccagcccatcctgtctgaagatggcagccgcatccgctatggaggccgggactacagcctggatgaatttgaggccaacaagatcctgcaccagcacctgggcgcccctgaggagcggctggccctgcacatcctgcggacccagggcctggtgcctgagcacgtggagaccaggaccctgcacagcaccttccagcccaacatcagccagggcaagctgcagatgtgggtggatgtgttccccaagagcctgggccccccaggcccccccttcaacatcacccccaggaaggccaagaagtactacctgcgggtcatcatctggaacaccaaggatgtgatcctggatgagaagagcatcaccggggaggagatgtctgacatctacgtgaagggctggatccctggaaatgaggagaacaagcagaagacagatgtgcactaccgcagcctggatggagagggcaacttcaactggaggtttgtgttcccctttgactacctgcctgctgagcagctgtgcatcgtggccaagaaggagcacttctggagcattgaccagacagagttccgcatcccccccaggctcatcatccagatctgggacaatgacaagttcagcctggatgactacctgggcttcctggagctggacctgcggcacaccatcatcccagccaagagccctgagaagtgccgcctggacatgatcccagacctgaaggccatgaaccccctgaaggccaagacagccagcctgtttgagcagaagtccatgaagggctggtggccctgctacgccgagaaggatggagcccgggtgatggccggcaaggtggagatgaccctggagatcctgaatgagaaggaggctgatgagaggcctgctgggaagggcagagatgagcccaacatgaaccccaagctggacctgcccaacagacctgagaccagcttcctgtggttcaccaacccctgcaagaccatgaagttcatcgtgtggaggcgcttcaagtgggtgatcatcggcctgctcttcctgctgatcctgctgctgtttgtggccgtgctgctgtacagcctgcccaactacctgtccatgaagatcgtgaagcccaacgtgtag

SEQ ID NO: 176704 - DNA, 6719 bp, Artificial Sequence
  derived and/or modified sequence
atgctgcgagtgattgtggaatctgccagcaatatccctaaaacgaaatttggcaagccggatcctattgtttctgtcatttttaaggatgagaaaaagaaaacaaagaaagttgataatgaattgaaccctgtctggaatgagattttggagtttgacttgaggggtataccactggacttttcatcttcccttgggattattgtgaaagattttgagacaattggacaaaataaattaattggcacggcgactgtagccctgaaggacctgactggtgaccagagcagatccctgccgtacaagctgatctccctgctaaatgaaaaagggcaagatactggggccaccattgacttggtgatcggctatgatccgccttctgctccacatccaaatgacctgagcgggcccagcgtgccaggcatgggaggagatggggaagaagatgaaggtgatgaagacaggttggacaatgcagtcaggggccctgggcccaaggggccagttgggacggtgtcggaagctcagcttgctcggaggctcaccaaagtaaagaacagccggcggatgctgtcaaataagccacaggacttccagatccgcgtccgagtgattgagggccgacagttaagtggtaacaacataaggcctgtggtcaaagttcacgtctgtggccagacacaccgaacaagaatcaagagaggaaacaaccctttttttgatgagttgtttttctacaatgtcaacatgaccccttctgaattgatggatgagatcatcagcatccgggtttataattctcactctctgcgggcagattgtctgatgggggaatttaagattgatgttggatttgtttatgatgaacctggccatgctgtcatgagaaagtggcttcttctcaatgacccggaagataccagttcaggttctaaaggttatatgaaagtcagcatgtttgtcctgggaaccggagatgagcctcctcctgagagacgagatcgtgataatgacagtgatgatgtggagagtaatttgttactccctgctggcattgccctccggtgggtgaccttcttgctgaaaatctaccgagctgaggacatcccccagatggatgatgccttctcacagacagtaaaggaaatatttggaggcaatgcagataagaaaaatctcgtggatccttttgtagaagtttcctttgctggaaaaaaggtttgtacaaacataattgagaaaaatgcaaacccagagtggaatcaggtcgtcaatcttcagatcaagtttccttcagtgtgtgaaaaaataaaactaacaatatatgactgggaccgtcttactaaaaatgatgtagttggaacaacatatctacacctctctaaaattgctgcctctggtggggaagtggaagatttctcatcttcgggaactggggctgcatcatatacagtaaacacaggagaaacagaggtaggctttgttccaacgtttggaccttgttacctgaatctttatggaagccccagagagtacacgggattcccagacccctatgatgagctgaatactggaaagggggaaggagttgcctacagaggcaggatcttggttgaattagccacttttcttgagaagacaccaccagataaaaagcttgagcccatttcaaatgatgacctgctggttgttgagaaataccagcgaaggcggaagtacagcctgtctgccgtgtttcattcagccaccatgttgcaagatgttggtgaggccattcagtttgaagtcagcattgggaactatggcaacaagtttgacaccacctgtaagcctttggcatcaacaactcagtacagccgtgctgtatttgatggcaactactattattacttgccttgggcccacaccaagccagttgttaccctgacttcatactgggaggatattagtcatcgcctggatgcggtgaacactctcctagctatggcagaacggctgcaaacaaatatagaagctctaaaatcagggatacaaggtaaaattcctgcaaaccagctggctgaattgtggctgaagctgatagatgaagttatagaagacacgagatacacgttgcctctcacagaaggaaaagccaacgtcacagttctcgatactcagatccgaaagctgcggtccaggtctctctcccaaatacatgaggcggctgtgaggatgaggtcggaagccacagatgtgaagtccacactggcagaaattgaggactggcttgataaattaatgcagctgactgaagagccacagaacagcatgcctgacatcatcatctggatgatccggggagagaagagactggcctatgcacgaattcccgcacatcaggtcttgtactccaccagtggtgagaatgcatctggaaaatactgtgggaaaacccaaaccatctttctgaagtatccacaggagaaaaacaacgggccaaaggtgcctgtggagttgcgagtgaacatctggctaggcttaagtgctgtggagaagaagtttaacagcttcgcagaaggaactttcaccgtctttgctgaaatgtatgaaaatcaagctctcatgtttggaaaatggggtacttctggattagtaggacgtcataagttttctgatgtcacaggaaaaataaaactcaagagggaattttttctgcctccaaaaggctgggaatgggaaggagagtggatagttgatcctgaaagaagcttgctgactgaggcagatgcaggtcacacggagttcactgatgaagtctatcagaacgagagccgctaccccgggggcgactggaagccggccgaggacacctacacggatgcgaacggcgataaagcagcatcacccagcgagttgacttgtcctccaggttgggaatgggaagatgatgcatggtcttatgacataaatcgagcggtggatgagaaaggctgggaatatggaatcaccattcctcctgatcataagcccaaatcctgggttgcagcagagaaaatgtaccacactcatagacggcgaaggctggtccgaaaacgcaagaaagatttaacacagactgcttcaagcaccgcaagggccatggaggaattgcaagaccaagagggctgggaatatgcttctctaattggctggaaatttcactggaaacaacgtagttcagataccttccgccgcagacgctggaggagaaaaatggctccttcagaaacacatggtgcagctgccatctttaaacttgaaggtgcccttggggcagacactaccgaagatggggatgagaagagcctggagaaacagaagcacagtgccaccactgtgttcggagcaaacacccccattgtttcctgcaattttgacagagtctacatctaccatctgcgctgctatgtctatcaagccagaaacctcttggctttagataaggatagcttttcagatccatatgctcatatctgtttcctccatcggagcaaaaccactgagatcatccattcaaccctgaatcccacgtgggaccaaacaattatattcgatgaagttgaaatctatggggaaccccaaacagttctacagaatccacccaaagttatcatggaactttttgacaatgaccaagtgggcaaagatgaatttttaggacgaagcattttctctcctgtggtgaaactgaactcagaaatggacatcacacccaaacttctctggcacccagtaatgaatggagacaaagcctgcggggatgttcttgtaactgcagagctgattctgaggggcaaggatggctccaaccttcccattcttccccctcaaagggcgccaaatctatacatggtcccccaggggatcaggcctgtggtccagctcactgccattgagattctagcttggggcttaagaaatatgaaaaacttccagatggcttctatcacatcccccagtcttgttgtggagtgtggaggagaaagggtggaatcggtggtgatcaaaaaccttaagaagacacccaactttccaagttctgttctcttcatgaaagtgttcttgcccaaggaggaattgtacatgcccccactggtgatcaaggtcatcgaccacaggcagtttgggcggaagcctgtcgtcggccagtgcaccatcgagcgcctggaccgctttcgctgtgacccttatgcagggaaagaggacatcgtcccacagctcaaagcctcccttctgtctgccccaccatgccgggacatcgttatcgaaatggaagacaccaaaccattactggcttctaagctgacagaaaaggaggaagaaatcgtggactggtggagtaaattttatgcttcctcaggggaacatgaaaaatgcggacagtatattcagaaaggctattccaagctcaagatatataattgtgaactagaaaatgtagcagaatttgagggcctgacagacttctcagatacgttcaagttgtaccgaggcaagtcggatgaaaatgaagatccttctgtggttggagagtttaagggctcctttcggatctaccctctgccggatgaccccagcgtgccagcccctcccagacagtttcgggaattacctgacagcgtcccacaggaatgcacggttaggatttacattgttcgaggcttagagctccagccccaggacaacaatggcctgtgtgacccttacataaaaataacactgggcaaaaaagtcattgaagaccgagatcactacattcccaacactctcaacccagtctttggcaggatgtacgaactgagctgctacttacctcaagaaaaagacctgaaaatttctgtctatgattatgacacctttacccgggatgaaaaagtaggagaaacaattattgatctggaaaaccgattcctttcccgctttgggtcccactgcggcataccagaggagtactgtgtttctggagtcaatacctggcgagatcaactgagaccaacacagctgcttcaaaatgtcgccagattcaaaggcttcccacaacccatcctttccgaagatgggagtagaatcagatatggaggacgagactacagcttggatgaatttgaagccaacaaaatcctgcaccagcacctcggggcccctgaagagcggcttgctcttcacatcctcaggactcaggggctggtccctgagcacgtggaaacaaggactttgcacagcaccttccagcccaacatttcccagggaaaacttcagatgtgggtggatgttttccccaagagtttggggccaccaggccctcctttcaacatcacaccccggaaagccaagaaatactacctgcgtgtgatcatctggaacaccaaggacgttatcttggacgagaaaagcatcacaggagaggaaatgagtgacatctacgtcaaaggctggattcctggcaatgaagaaaacaaacagaaaacagatgtccattacagatctttggatggtgaagggaattttaactggcgatttgttttcccgtttgactaccttccagccgaacaactctgtatcgttgcgaaaaaagagcatttctggagtattgaccaaacggaatttcgaatcccacccaggctgatcattcagatatgggacaatgacaagttttctctggatgactacttgggtttcctagaacttgacttgcgtcacacgatcattcctgcaaaatcaccagagaaatgcagattggacatgattccggacctcaaagccatgaacccccttaaagccaagacagcctccctctttgagcagaagtccatgaaaggatggtggccatgctacgcagagaaagatggcgcccgcgtaatggctgggaaagtggagatgacattggaaatcctcaacgagaaggaggccgacgagaggccagccgggaaggggcgggacgaacccaacatgaaccccaagctggacttaccaaatcgaccagaaacctccttcctctggttcaccaacccatgcaagaccatgaagttcatcgtgtggcgccgctttaagtgggtcatcatcggcttgctgttcctgcttatcctgctgctcttcgtggccgtgctcctctactctttgccgaactatttgtcaatgaagattgtaaagccaaatgtgtaacaaaggcaaaggcttcatttcaagagtcatccagcaatgagagaatcctgcctctgtagaccaacatccagtgtgattttgtgtctgagaccacaccccagtagcaggttacgccatgtcaccgagccccattgattcccagagggtcttagtcctggaaagtcaggccaacaagcaacgtttgcatcatgttatctcttaagtattaaaagttttattttctaaagtttaaatcatgtttttcaaaatatttttcaaggtggctggttccatttaaaaatcatctttttatatgtgtcttcggttctagacttcagcttttggaaattgctaaatagaattcaaaaatctctgcatcctgaggtgatatacttcatatttgtaatcaactgaaagagctgtgcattataaaatcagttagaatagttagaacaattcttatttatgcccacaaccattgctatattttgtatggatgtcataaaagtctatttaacctctgtaatgaaactaaataaaaatgtttcaccttt

SEQ ID NO: 176705 - DNA, 6842 bp, Artificial Sequence
  derived and/or modified sequence
gccctgggagaaatcctcccttcactgggagagaacttctctcccagggcggtgcgacccggagctccagcgccctagtctccacttcgtttgctgaaacttgctttctaccagctaagaaccatgctgcgagtgattgtggaatctgccagcaatatccctaaaacgaaatttggcaagccggatcctattgtttctgtcatttttaaggatgagaaaaagaaaacaaagaaagttgataatgaattgaaccctgtctggaatgagattttggagtttgacttgaggggtataccactggacttttcatcttcccttgggattattgtgaaagattttgagacaattggacaaaataaattaattggcacggcgactgtagccctgaaggacctgactggtgaccagagcagatccctgccgtacaagctgatctccctgctaaatgaaaaagggcaagatactggggccaccattgacttggtgatcggctatgatccgccttctgctccacatccaaatgacctgagcgggcccagcgtgccaggcatgggaggagatggggaagaagatgaaggtgatgaagacaggttggacaatgcagtcaggggccctgggcccaaggggccagttgggacggtgtcggaagctcagcttgctcggaggctcaccaaagtaaagaacagccggcggatgctgtcaaataagccacaggacttccagatccgcgtccgagtgattgagggccgacagttaagtggtaacaacataaggcctgtggtcaaagttcacgtctgtggccagacacaccgaacaagaatcaagagaggaaacaaccctttttttgatgagttgtttttctacaatgtcaacatgaccccttctgaattgatggatgagatcatcagcatccgggtttataattctcactctctgcgggcagattgtctgatgggggaatttaagattgatgttggatttgtttatgatgaacctggccatgctgtcatgagaaagtggcttcttctcaatgacccggaagataccagttcaggttctaaaggttatatgaaagtcagcatgtttgtcctgggaaccggagatgagcctcctcctgagagacgagatcgtgataatgacagtgatgatgtggagagtaatttgttactccctgctggcattgccctccggtgggtgaccttcttgctgaaaatctaccgagctgaggacatcccccagatggatgatgccttctcacagacagtaaaggaaatatttggaggcaatgcagataagaaaaatctcgtggatccttttgtagaagtttcctttgctggaaaaaaggtttgtacaaacataattgagaaaaatgcaaacccagagtggaatcaggtcgtcaatcttcagatcaagtttccttcagtgtgtgaaaaaataaaactaacaatatatgactgggaccgtcttactaaaaatgatgtagttggaacaacatatctacacctctctaaaattgctgcctctggtggggaagtggaagatttctcatcttcgggaactggggctgcatcatatacagtaaacacaggagaaacagaggtaggctttgttccaacgtttggaccttgttacctgaatctttatggaagccccagagagtacacgggattcccagacccctatgatgagctgaatactggaaagggggaaggagttgcctacagaggcaggatcttggttgaattagccacttttcttgagaagacaccaccagataaaaagcttgagcccatttcaaatgatgacctgctggttgttgagaaataccagcgaaggcggaagtacagcctgtctgccgtgtttcattcagccaccatgttgcaagatgttggtgaggccattcagtttgaagtcagcattgggaactatggcaacaagtttgacaccacctgtaagcctttggcatcaacaactcagtacagccgtgctgtatttgatggcaactactattattacttgccttgggcccacaccaagccagttgttaccctgacttcatactgggaggatattagtcatcgcctggatgcggtgaacactctcctagctatggcagaacggctgcaaacaaatatagaagctctaaaatcagggatacaaggtaaaattcctgcaaaccagctggctgaattgtggctgaagctgatagatgaagttatagaagacacgagatacacgttgcctctcacagaaggaaaagccaacgtcacagttctcgatactcagatccgaaagctgcggtccaggtctctctcccaaatacatgaggcggctgtgaggatgaggtcggaagccacagatgtgaagtccacactggcagaaattgaggactggcttgataaattaatgcagctgactgaagagccacagaacagcatgcctgacatcatcatctggatgatccggggagagaagagactggcctatgcacgaattcccgcacatcaggtcttgtactccaccagtggtgagaatgcatctggaaaatactgtgggaaaacccaaaccatctttctgaagtatccacaggagaaaaacaacgggccaaaggtgcctgtggagttgcgagtgaacatctggctaggcttaagtgctgtggagaagaagtttaacagcttcgcagaaggaactttcaccgtctttgctgaaatgtatgaaaatcaagctctcatgtttggaaaatggggtacttctggattagtaggacgtcataagttttctgatgtcacaggaaaaataaaactcaagagggaattttttctgcctccaaaaggctgggaatgggaaggagagtggatagttgatcctgaaagaagcttgctgactgaggcagatgcaggtcacacggagttcactgatgaagtctatcagaacgagagccgctaccccgggggcgactggaagccggccgaggacacctacacggatgcgaacggcgataaagcagcatcacccagcgagttgacttgtcctccaggttgggaatgggaagatgatgcatggtcttatgacataaatcgagcggtggatgagaaaggctgggaatatggaatcaccattcctcctgatcataagcccaaatcctgggttgcagcagagaaaatgtaccacactcatagacggcgaaggctggtccgaaaacgcaagaaagatttaacacagactgcttcaagcaccgcaagggccatggaggaattgcaagaccaagagggctgggaatatgcttctctaattggctggaaatttcactggaaacaacgtagttcagataccttccgccgcagacgctggaggagaaaaatggctccttcagaaacacatggtgcagctgccatctttaaacttgaaggtgcccttggggcagacactaccgaagatggggatgagaagagcctggagaaacagaagcacagtgccaccactgtgttcggagcaaacacccccattgtttcctgcaattttgacagagtctacatctaccatctgcgctgctatgtctatcaagccagaaacctcttggctttagataaggatagcttttcagatccatatgctcatatctgtttcctccatcggagcaaaaccactgagatcatccattcaaccctgaatcccacgtgggaccaaacaattatattcgatgaagttgaaatctatggggaaccccaaacagttctacagaatccacccaaagttatcatggaactttttgacaatgaccaagtgggcaaagatgaatttttaggacgaagcattttctctcctgtggtgaaactgaactcagaaatggacatcacacccaaacttctctggcacccagtaatgaatggagacaaagcctgcggggatgttcttgtaactgcagagctgattctgaggggcaaggatggctccaaccttcccattcttccccctcaaagggcgccaaatctatacatggtcccccaggggatcaggcctgtggtccagctcactgccattgagattctagcttggggcttaagaaatatgaaaaacttccagatggcttctatcacatcccccagtcttgttgtggagtgtggaggagaaagggtggaatcggtggtgatcaaaaaccttaagaagacacccaactttccaagttctgttctcttcatgaaagtgttcttgcccaaggaggaattgtacatgcccccactggtgatcaaggtcatcgaccacaggcagtttgggcggaagcctgtcgtcggccagtgcaccatcgagcgcctggaccgctttcgctgtgacccttatgcagggaaagaggacatcgtcccacagctcaaagcctcccttctgtctgccccaccatgccgggacatcgttatcgaaatggaagacaccaaaccattactggcttctaagctagtgagtattgaggaagaaatcgtggactggtggagtaaattttatgcttcctcaggggaacatgaaaaatgcggacagtatattcagaaaggctattccaagctcaagatatataattgtgaactagaaaatgtagcagaatttgagggcctgacagacttctcagatacgttcaagttgtaccgaggcaagtcggatgaaaatgaagatccttctgtggttggagagtttaagggctcctttcggatctaccctctgccggatgaccccagcgtgccagcccctcccagacagtttcgggaattacctgacagcgtcccacaggaatgcacggttaggatttacattgttcgaggcttagagctccagccccaggacaacaatggcctgtgtgacccttacataaaaataacactgggcaaaaaagtcattgaagaccgagatcactacattcccaacactctcaacccagtctttggcaggatgtacgaactgagctgctacttacctcaagaaaaagacctgaaaatttctgtctatgattatgacacctttacccgggatgaaaaagtaggagaaacaattattgatctggaaaaccgattcctttcccgctttgggtcccactgcggcataccagaggagtactgtgtttctggagtcaatacctggcgagatcaactgagaccaacacagctgcttcaaaatgtcgccagattcaaaggcttcccacaacccatcctttccgaagatgggagtagaatcagatatggaggacgagactacagcttggatgaatttgaagccaacaaaatcctgcaccagcacctcggggcccctgaagagcggcttgctcttcacatcctcaggactcaggggctggtccctgagcacgtggaaacaaggactttgcacagcaccttccagcccaacatttcccagggaaaacttcagatgtgggtggatgttttccccaagagtttggggccaccaggccctcctttcaacatcacaccccggaaagccaagaaatactacctgcgtgtgatcatctggaacaccaaggacgttatcttggacgagaaaagcatcacaggagaggaaatgagtgacatctacgtcaaaggctggattcctggcaatgaagaaaacaaacagaaaacagatgtccattacagatctttggatggtgaagggaattttaactggcgatttgttttcccgtttgactaccttccagccgaacaactctgtatcgttgcgaaaaaagagcatttctggagtattgaccaaacggaatttcgaatcccacccaggctgatcattcagatatgggacaatgacaagttttctctggatgactacttgggtttcctagaacttgacttgcgtcacacgatcattcctgcaaaatcaccagagaaatgcagattggacatgattccggacctcaaagccatgaacccccttaaagccaagacagcctccctctttgagcagaagtccatgaaaggatggtggccatgctacgcagagaaagatggcgcccgcgtaatggctgggaaagtggagatgacattggaaatcctcaacgagaaggaggccgacgagaggccagccgggaaggggcgggacgaacccaacatgaaccccaagctggacttaccaaatcgaccagaaacctccttcctctggttcaccaacccatgcaagaccatgaagttcatcgtgtggcgccgctttaagtgggtcatcatcggcttgctgttcctgcttatcctgctgctcttcgtggccgtgctcctctactctttgccgaactatttgtcaatgaagattgtaaagccaaatgtgtaacaaaggcaaaggcttcatttcaagagtcatccagcaatgagagaatcctgcctctgtagaccaacatccagtgtgattttgtgtctgagaccacaccccagtagcaggttacgccatgtcaccgagccccattgattcccagagggtcttagtcctggaaagtcaggccaacaagcaacgtttgcatcatgttatctcttaagtattaaaagttttattttctaaagtttaaatcatgtttttcaaaatatttttcaaggtggctggttccatttaaaaatcatctttttatatgtgtcttcggttctagacttcagcttttggaaattgctaaatagaattcaaaaatctctgcatcctgaggtgatatacttcatatttgtaatcaactgaaagagctgtgcattataaaatcagttagaatagttagaacaattcttatttatgcccacaaccattgctatattttgtatggatgtcataaaagtctatttaacctctgtaatgaaactaaataaaaatgtttcaccttt

SEQ ID NO: 176706 - DNA, 6186 bp, Artificial Sequence
  derived and/or modified sequence
atgctgcgggtgatcgtggagagcgccagcaacatccccaagaccaagtttggcaagccagacccgatcgtgagcgtgatattcaaagatgagaagaagaagaccaagaaggttgataacgagttaaaccctgtgtggaacgaaatcctggaattcgatctgagggggattcccctggacttctcctccagcttgggtataatcgtcaaggactttgagactattggccagaataagttgatagggactgcaacagttgcgctgaaggatctgactggcgaccaaagccgctctctcccttataagctcatcagtctgcttaatgagaagggccaggatacaggggctacgattgatttagtgattggttacgaccccccgagtgcccctcatcccaatgatctgtcaggtcctagcgtccctggcatgggcggcgatggggaagaagacgagggggacgaagatcgactggacaacgccgtgagagggccaggacccaaagggccagtgggaaccgtgtcagaagcccagctggccagacggctaaccaaagttaagaactctcgccgtatgcttagtaacaaacctcaggacttccagatccgagttcgggtgatagagggccggcagctgagcggcaacaatatcaggccggtggtcaaggtccacgtgtgtggacagactcaccgcacaagaattaagcggggcaacaatcccttctttgacgagctgttcttttacaacgtcaacatgactcccagcgaattgatggacgaaattatctctattagggtgtataactcacacagtctgcgcgccgactgcttaatgggcgagttcaaaatcgacgtcgggtttgtgtatgatgagcccggacatgctgtcatgcgaaagtggcttctgctgaacgatcctgaggatacaagttctggatccaaggggtatatgaaagtgagtatgttcgtactgggcacaggggacgaacctcccccagaacggagggacagagacaacgattccgacgatgtggaatcaaacttgctgctacctgccggaatcgctttgagatgggtcacatttctcctcaagatctatagagccgaagatatccctcagatggatgacgccttttcacagactgtgaaggagatctttggcgggaatgctgataaaaagaacctcgtggatccattcgtcgaggtgtccttcgctgggaagaaggtttgtactaatatcattgagaaaaacgccaatcctgaatggaaccaggtcgtgaacctgcagattaagttcccatcagtttgtgagaagatcaagctgacaatttacgattgggatagactgactaaaaacgatgtcgtgggcactacataccttcacctttctaagattgccgctagcggaggagaggtcgaggacttttccagcagtggcaccggagcagccagctacacagtgaataccggggagacggaagttggatttgtgccaactttcggcccatgctaccttaacctgtacgggtcaccaagggaatacacaggatttccggacccgtacgatgagctgaacacaggaaagggagaaggggtggcttatcggggacgaatattggtggaactcgctacttttttagagaagaccccccctgataagaaattagaacccatcagtaacgacgacctgcttgtcgtcgaaaaatatcaaagacgtcgcaaatattcgttatccgccgtttttcatagcgctacgatgcttcaggacgtaggagaggccatccagttcgaagtctccataggtaactacggaaacaagttcgacacaacttgtaaaccactcgcctcgaccacacagtattcacgagcggtgttcgacggcaactactattactacctgccctgggcccatactaaaccagtggtaacccttacctcctattgggaggatatctcccacaggctggatgcggtgaatactctactggccatggccgagcgcctccaaacaaacatcgaggccctgaaatccggcattcagggcaaaattccggcaaaccaattggccgagctgtggctcaagcttatagatgaggtcatcgaagataccaggtataccctccctctgacagagggaaaagccaacgttaccgtacttgacacacagataagaaaactcagaagtcggagcctgtctcagatccacgaggccgccgttagaatgaggtctgaagccacagatgtgaagtccacgctcgccgagattgaagattggctggacaaacttatgcaactgacggaagagccgcaaaactccatgccagacataattatctggatgattcgcggagaaaagaggctcgcctatgctcgaatccctgctcaccaggtactctacagcacttccggcgagaacgcctccggcaagtactgcggtaaaacgcaaacaatttttctcaaatacccccaggaaaaaaataatggccctaaggtgcccgtggagctaagggtaaacatctggctgggcctcagcgccgtcgagaagaagttcaacagtttcgccgaagggacatttactgtttttgctgagatgtatgagaatcaggcactgatgtttggaaagtggggcacctccggtctcgtcggaagacataaattctccgacgtgacaggaaaaatcaagctgaaaagagaattcttcctgccacctaagggctgggagtgggaaggggagtggatcgtcgaccctgagcgtagcctgctcactgaggcagacgcaggccataccgagttcacggatgaggtttaccagaatgagtcaaggtatccgggtggggattggaaaccagcagaggatacatacaccgatgctaatggcgataaagctgcctcacccagcgagctgacatgtccgcccggatgggaatgggaggatgacgcctggtcttacgatatcaatcgagctgtggacgagaagggatgggagtatggaatcacgatccctccagaccacaagcccaagagctgggtggccgcggaaaagatgtaccacactcaccgaaggagaagattagtgagaaagaggaaaaaggacttaacgcagactgcttccagtaccgcacgggccatggaggaactccaggatcaggagggttgggagtacgcgtccctgattggctggaagttccactggaaacagcggtcctctgacaccttccggcgtaggcggtggaggcggaaaatggccccaagcgaaacacatggtgccgccgcaatctttaagctggagggtgctctcggcgcggataccacagaggatggggatgagaagtctctggaaaagcagaaacattccgcgaccacagtttttggcgccaatacccccatcgtgtcctgcaattttgatcgggtgtatatataccatctgcgctgttacgtgtatcaggccagaaacttgctggccctagacaaagatagcttttctgacccatacgcacacatttgctttctgcacagatccaagacaacagagatcatccacagcaccttgaaccctacatgggaccaaacaatcatttttgacgaagtagaaatatacggggagccccagacagtgttacagaatcctcctaaagttatcatggagcttttcgacaacgaccaggtgggcaaagacgaatttcttggtaggagcattttcagtcctgttgtgaaactaaattctgaaatggatatcaccccaaagcttttgtggcacccagttatgaatggcgacaaagcttgcggggacgtcttagtgaccgcagagcttatcctacgcggaaaggatgggtctaatctgcctatcttgccccctcaaagagctcccaacctgtacatggtgccacagggaatccgacctgtcgtgcagctgaccgcgatagaaattctagcatggggcctcagaaacatgaaaaattttcagatggcaagcatcacatcccctagcctggtggtggaatgcggaggagagcgagtggagtcagtggtgatcaagaatctgaagaagacacctaactttccatcctccgtgctctttatgaaagttttcttgcccaaggaggaactgtacatgcctcccctggtgattaaagtgatcgaccacaggcagtttgggcgaaagcccgttgtcggtcagtgtaccatagaacgtcttgacaggtttagatgtgatccctatgctgggaaggaggacattgtgccgcaattaaaagcctcattactctccgcccctccctgccgtgatatcgttatagagatggaagacaccaaaccactgttagcgtctaaactcactgagaaggaggaagaaattgttgactggtggtctaaattttacgcgtcatcaggcgagcatgaaaaatgtggtcaatatatacagaaaggctattctaaactgaagatctataactgcgaactggagaatgtggcagagtttgaggggctcaccgatttctccgataccttcaagttgtaccggggaaagagcgatgagaacgaggacccaagcgtagtgggagagttcaaggggagtttccgcatctatcccctgccagacgacccctcagtgccggcccccccccgccaattcagggaacttcctgattcagtgccacaggagtgtacggtgcgcatatacattgtgagaggtctggaacttcagcctcaggacaataacgggctatgcgacccatatatcaagataaccctcgggaaaaaggtgatcgaggacagggatcattacattccaaacacactgaatccagttttcgggaggatgtacgagttgagttgttacctgccccaggagaaggacctgaagatatctgtgtatgactacgatacattcacccgcgacgagaaggtcggtgaaactatcattgatcttgagaataggttcctgtcacgcttcggaagtcattgtggaattcctgaggagtactgcgtgagcggggtaaacacatggagagatcagctgcgccccacacagcttctccaaaatgtcgcaagatttaaggggttcccccagcccattctgtccgaggatgggtcgcggatccgctacggcggcagagattattccttggacgaatttgaggccaacaagatactgcaccaacatttgggggctcctgaggaacggctagctctgcacatcctgaggacccaaggcttggtacccgagcacgtcgagacacgcactctccactcgaccttccaacctaacattagtcaggggaagttacaaatgtgggtcgacgtgtttccgaaaagtctgggcccccccggaccaccgttcaatatcacacctaggaaggcaaagaaatactatcttcgtgtaattatatggaacactaaggatgtcattctggacgagaagtcaattaccggggaggaaatgtctgatatatacgtcaagggctggattccaggtaatgaggaaaataagcagaaaacagatgtgcattataggagtctggacggcgagggcaattttaactggcggttcgtgtttccttttgattatctgccagccgaacaactgtgtattgtagctaagaaggaacacttctggagtatcgaccagacagagttcagaatccccccacgtttaatcattcaaatatgggacaacgataagttttccttagacgactacctggggtttctggaattagacttgaggcatacgattatacccgccaagtcaccagagaagtgccggcttgacatgataccagatttgaaggctatgaatcctctaaaggcgaagaccgcctcactttttgaacagaaatcaatgaaaggctggtggccatgctatgctgagaaggatggagctcgggtgatggccgggaaggtcgagatgaccctcgaaatcttaaacgagaaggaagcagacgagaggcccgctgggaaaggccgggacgaaccgaatatgaaccccaagcttgatttacctaaccgccctgagacatcctttctgtggtttacaaatccctgtaagacaatgaagttcatcgtttggcggaggttcaagtgggttataattggtctgctatttttattgattttattgctttttgtcgctgtgttgctgtactcactgcctaactatctttcgatgaagatcgtcaaacctaacgtttag

SEQ ID NO: 176707 - DNA, 6186 bp, Artificial Sequence
  derived and/or modified sequence
atgctgcgggtgatcgtggagagcgccagcaacatccccaagaccaaatttggcaagcccgacccaatcgtcagcgtaatttttaaagacgaaaagaaaaagacaaaaaaggtagacaacgagctcaacccagtgtggaatgagattctggagttcgacttacgcggaattcctcttgatttttctagttctttgggcatcatcgttaaagacttcgagacaattgggcagaataaattgatcggaactgccactgtggctctcaaggaccttaccggagatcagagtcggtcgctgccctataagctgatcagcctactcaacgagaagggccaggataccggagcaactatcgacctggttatcggctacgatcccccctccgccccacatcctaacgatctttccggtccttccgtacccgggatggggggagacggagaagaggatgagggggatgaggatagactggacaatgcagtgagggggccggggcccaaaggacctgtgggcaccgtctccgaggcgcaactggcccgacgcctgactaaggtgaagaatagtcgcagaatgctcagcaacaaaccacaagactttcagatcagggtaagagtaatagaagggaggcagctaagtggcaataacatccgccccgtagttaaagtgcacgtgtgtgggcagacccatagaacacggataaagcgaggaaacaatcccttttttgatgaactcttcttttataatgtgaatatgacacccagcgagctgatggatgaaatcatctccatccgcgtgtacaactctcacagtctgcgggccgattgtctgatgggcgagtttaagatcgacgtggggttcgtctacgatgagcccggccacgctgtgatgagaaaatggctgctgcttaatgatcctgaggacacaagctcgggttccaaggggtacatgaaggtgagtatgtttgtgctcgggaccggggatgaaccccccccagaacggagggacagagataacgattctgatgacgtggagtcaaatctgctgctgcccgctgggatagcgttacggtgggtgacgtttcttttgaaaatctatagggctgaagacattccacagatggacgatgccttcagccagaccgtaaaagaaatttttggcgggaacgctgataaaaaaaatcttgtcgatcccttcgtggaggtttcttttgcaggcaaaaaagtttgtactaacataattgaaaagaatgctaatccagagtggaaccaggtggtgaatctgcagatcaaatttccatccgtctgtgagaagatcaagctgactatttacgactgggacagactcaccaaaaatgacgtggtgggtactacctacctccacctaagtaagattgcagcctccgggggtgaagtcgaagacttttcgagttctggcactggggctgcctcatatacagtaaacaccggagaaacggaggtcggattcgtgccaacatttgggccatgctaccttaacctttacggttcgccaagagaatatacaggttttccagatccctacgatgagcttaacactgggaagggcgagggggtggcatacaggggccgtatcctggtcgagctggccactttcctggaaaagacaccgcccgacaaaaagctggagcctatcagcaacgatgatctactcgtggtggagaaatatcagagacgcaggaagtactcattatctgccgtgttccatagcgctactatgctgcaggatgtgggtgaggcaatccagttcgaggtctctatcgggaattacggtaacaaatttgatacaacatgtaagccactggcctctaccactcagtattctagggccgtgtttgacgggaactactattattacctgccctgggcccacacgaagcctgtcgtgacactgacctcctattgggaggacatttcacataggctggatgctgttaacacgctcctggcgatggcagaacgactccaaacaaacatcgaggccctgaagtcgggcatccagggcaaaatacccgctaatcagctggctgaactttggctgaaactgattgatgaagtaatcgaggacaccagatataccctcccgttaactgaaggaaaggccaacgtgactgtgttagatacccagatacgaaagctgcgtagccggtccctgtcgcagattcacgaggctgccgttcggatgcgtagcgaggccaccgacgtgaaatcaacccttgcagaaattgaggactggttggacaaactcatgcagctcaccgaggaaccacaaaacagcatgcctgatatcatcatctggatgattagaggagaaaagagactggcatacgcgcggattcccgctcatcaagtgctctatagcacaagcggagaaaacgccagcggcaaatactgtggaaaaacacagacaatttttctcaagtaccctcaggagaagaacaatggccctaaagttcccgtcgagcttcgggtgaatatctggttgggcctgtccgcggtcgagaagaaatttaattcgttcgccgagggaaccttcactgtcttcgccgaaatgtacgagaatcaagccctaatgttcggaaaatggggcacctcgggactggttgggcgccacaaattttccgacgtaaccggcaaaatcaagctcaagcgggagttcttcctcccaccgaaaggctgggagtgggaaggcgaatggatcgtggaccccgaacggtctttgttgactgaggcagacgctggccatacggaattcaccgacgaagtgtaccagaatgaaagccggtacccaggcggggactggaagccagcagaggacacatatactgacgcaaacggcgacaaggcagcatctccctcagaactcacatgtccccccggatgggagtgggaggacgatgcttggtcctatgatattaatcgggccgttgacgagaagggctgggaatatggcattacaattccaccggaccacaagccaaaatcttgggtcgcagctgagaagatgtatcatacccatcggagacgtcgcttagtgcgaaagcggaagaaggacctgactcagactgcttctagtactgcccgtgccatggaagagctgcaagaccaggaagggtgggaatatgctagtctcatcggttggaagttccactggaaacagcgctcttcagacacctttcgacgccgacggtggcgacgtaagatggctccctcagaaactcatggggccgccgcaatttttaagttggaaggcgcactcggagccgacactacagaggatggggatgagaaaagtctcgaaaaacaaaagcattcagctactaccgtgttcggcgccaacactccaatcgtcagctgtaacttcgatcgtgtgtatatataccacctacggtgctatgtttaccaagccagaaatcttctcgccctggataaggactcattttctgacccgtatgcacacatctgctttctgcatcgcagcaagactactgagattattcactctacactgaatccaacgtgggaccagactataatatttgatgaggtagagatttatggcgaaccacagaccgtgctgcagaatccccctaaggttattatggagctgttcgacaacgatcaagtgggcaaggatgagttcttaggtcgcagcatattttctccagtcgtgaagcttaactctgagatggacataacccctaagttgctttggcatccggtcatgaatggtgataaggcctgcggtgatgtgctcgtcacagccgagctgattctccggggtaaggacgggtcaaatctacctattctgccgccccaacgcgcacctaacctatacatggtccctcagggcattaggccagtggtacagctaaccgctattgagatcctggcctggggcttacgtaacatgaaaaacttccaaatggccagcataacctccccctcactcgttgtcgagtgtgggggagagcgggttgagtccgtcgtaataaaaaatctgaagaagacccccaattttccgtcttccgtgttgttcatgaaggtgttcctgcctaaagaagaactgtacatgccaccgctggtgataaaggtgatcgaccaccgacagttcgggcgcaagcccgtggtaggtcagtgtaccattgagcgcttggatcgattcagatgcgatccttacgcagggaaggaggacattgtgcctcagctaaaggcatctctcctgtctgcgccaccctgcagggacatcgtcatcgaaatggaagacacaaagccgcttctcgcaagcaagttagtgagtatcgaggaggagattgtagattggtggtctaagttttatgcctccagtggagagcatgagaagtgcgggcagtacatacagaagggatacagcaaactgaagatttacaattgtgagcttgaaaatgttgcagagtttgagggcctgaccgacttcagcgacactttcaaactgtatagggggaaatctgacgagaacgaggatccatcggttgtgggtgagttcaagggatccttccgcatttatcccctgcctgatgatccctccgtgcctgccccccctagacagtttcgtgaactgcccgactccgtgccccaagaatgcacagtacgaatctacatcgtcagaggcctggagttacagccccaagataataacggcctgtgtgatccttatatcaaaatcaccctagggaagaaagttatcgaagatcgcgaccattatattcccaatacattaaaccctgttttcgggagaatgtacgaactcagctgctatttgcctcaggaaaaggacctgaaaattagcgtctacgactatgatacttttacaagggacgaaaaggtgggtgaaactattatcgacctggaaaacagattcctctcccgcttcgggagtcactgcggcatccccgaggagtactgcgtttctggagtcaacacctggagggaccagttaagaccaacccagttgcttcagaacgtcgcccgcttcaaaggcttcccgcaaccaattctatcagaagacgggagccggatcaggtacggggggcgagactactctctggacgagtttgaagccaataagatactgcatcaacatctaggggcccctgaggaaagattagcactgcacatactgagaacccagggcctggtccctgagcacgtggaaacacgcactttgcactcaacattccagcctaacattagtcaaggcaaactccagatgtgggtggacgttttccccaagagcctcgggcccccagggccgcctttcaacattacccctagaaaagccaagaagtattatctacgggttatcatctggaacaccaaagacgtaatactggacgagaaaagtatcacaggcgaggaaatgagcgatatctacgttaaagggtggattccaggcaacgaagaaaataaacagaagaccgatgtgcattataggagcctggatggagagggcaactttaattggcggtttgtctttccattcgattacttgcctgctgagcagctgtgcatcgttgcaaagaaggaacacttctggtccatcgatcagacagaattcagaattccccctagactgataatccaaatctgggataacgataagttttcgctcgatgattacctgggctttttagagttggacctgcggcataccatcattccagccaagagtccagaaaagtgtcgacttgatatgattcctgacttgaaggcgatgaatcccctcaaagctaagacggcttcactttttgaacaaaagtctatgaagggttggtggccatgctatgctgagaaagatggcgctagggtcatggctggtaaagttgagatgactctggaaatcctcaatgagaaggaggctgatgaacgacctgccggcaaaggccgcgatgagcctaacatgaatccaaagttggaccttccaaacaggcccgagaccagctttttgtggttcactaatccttgtaagactatgaagtttatcgtttggcggcgttttaaatgggttattattggtctcctctttcttctgattttgctgctgtttgttgccgtcttgctatattcgctccctaactatctcagcatgaaaattgtaaagccaaacgtttag

SEQ ID NO: 176708 - DNA, 6185 bp, Artificial Sequence
  derived and/or modified sequence
atgctgagagtgatcgttgagtccgccagcaacataccaaagactaagtttggcaaaccagacccgatcgtgtctgtcattttcaaagacgagaagaaaaagacgaaaaaggttgataacgaattaaatccagtgtggaacgagattctcgagttcgatctgcgcggtattcctttagacttcagctcatcactgggtattatcgtgaaggatttcgaaacaatcggacaaaataagctgatcggtacagccacggtcgccctcaaggacttgactggggaccaatctagaagcctgccctacaaactgatttccctactcaatgaaaaaggacaggacactggagctaccatcgacctggtcattgggtatgatccaccaagcgccccacaccccaacgacctgtccggcccttctgttcctgggatgggcggtgatggcgaggaggacgagggcgacgaagacagactggataacgcagtccgcggtccagggcctaaaggacccgtgggcacggtgagtgaagcccaactggctcgacggttgacaaaagttaaaaattcccgaagaatgctgagcaataaacctcaagacttccagattagggtgcgcgttatcgagggcagacagctctcaggcaataacatccgacccgtcgtgaaggtacatgtctgtggacagacccataggactagaattaagcgaggaaacaacccttttttcgacgaactgttcttttacaacgtgaacatgacgccatcagaacttatggacgaaattatctcaataagagtgtataacagccacagtttacgcgcagactgcctgatgggagagtttaaaatcgatgtgggattcgtttacgacgagcctggtcacgccgtcatgagaaagtggttgctgcttaacgacccggaggacaccagctccggctctaaaggatacatgaaggtgtcgatgttcgtacttggaacaggtgatgagccccctccagaacgcagagaccgggacaacgactcagacgatgtggaatctaacctgttactgcctgcaggcatagccttgagatgggtcacattcctgctcaaaatttatcgcgctgaggatatcccacagatggatgatgccttctcgcaaaccgttaaagaaatcttcgggggaaacgctgacaaaaaaaatttggtggacccttttgtggaggtgtcctttgcagggaagaaagtgtgcacaaatatcattgagaagaacgctaacccagaatggaaccaagtggtcaacctacaaattaaatttccgtccgtttgcgaaaagattaagctgacaatatacgactgggataggctgactaagaatgatgtcgtgggaacgacttatttgcatctgtccaagatcgccgcttctggcggagaagtcgaggacttctcatctagcggcactggagccgcttcatacaccgtgaataccggggaaacggaggtggggttcgttcccactttcgggccatgttacctgaatttgtacgggagtccccgtgagtatactggcttcccagacccctacgatgaactcaataccggaaagggcgagggtgtcgcttatagagggagaatccttgtggagctggccacttttttggagaagactccgccagacaagaaattggaacctatctccaacgatgatctgctggtagtcgaaaaataccagagaagacgcaaatatagcctctcagcggtgtttcacagcgccacgatgctgcaggatgtcggcgaagcgatccagtttgaggtctccattggaaattacggcaataaattcgatactacctgtaaacccttggcgagcactactcaatattctcgggctgtgttcgatggcaactactattattacctgccctgggcccatacaaagccagtcgtgactctgacatcatattgggaggacatttctcatagactggatgcagtcaacacactgctcgccatggccgaaaggctgcagacaaacatagaagcccttaaatctggcatccaaggcaagatccccgctaatcagctggccgagctctggttaaagttgatagatgaggttatcgaagacaccagatatacgctaccactgacggaagggaaggccaatgtgactgtgttagatacccagattcgtaaattgcgtagccgctcactgtcccagattcatgaggccgctgtccgcatgcgctccgaagccaccgatgtgaagagtactttagctgagattgaagactggcttgataagttgatgcaactgacagaagagcctcaaaactcaatgcccgacattattatctggatgattcgcggtgagaagcgcttggcctacgctcgcataccagctcaccaggttctgtactcaacgtccggcgagaacgcttcagggaagtattgtgggaaaacacagacgatctttctcaagtacccgcaggaaaagaacaatggaccaaaagttccagtggaactgagagtgaacatctggctaggacttagtgcggtggaaaaaaagtttaatagcttcgctgagggcacgtttaccgtgttcgcggaaatgtatgagaaccaggccctgatgtttggcaagtggggcacttccgggctggtaggcaggcataaattcagcgacgtgactggcaagatcaagctcaaaagggaattctttcttccccctaagggctgggaatgggaaggtgagtggattgtcgatcctgaacggagcctgctgactgaagctgacgctggacacaccgaatttaccgacgaggtataccagaacgagagtaggtaccccggtggtgattggaaacccgctgaagacacttacactgacgccaatggcgacaaagccgcttctccgtctgaacttacctgccctcccggatgggagtgggaggatgacgcttggtcttatgatatcaacagggcagtggacgagaaggggtgggaatacggcataacaatccctccggaccataagccaaagagctgggtggctgccgaaaagatgtaccatactcacagacgcaggaggttggttcggaaacggaagaaagacttgacacagactgccagctccaccgcaagagcaatggaagagctgcaggatcaggagggatgggaatatgcctcactcatcggatggaaatttcattggaagcagcgttcttcagataccttcaggcggcgtaggtggcgtcggaagatggctccttctgagacccatggagcagccgctatcttcaaactggagggtgccctcggcgcagacacaacagaagacggcgatgaaaaatctttagaaaaacaaaaacattcggccactaccgtgtttggggctaatactccaatcgtgagctgcaacttcgatcgcgtgtatatttaccatctccggtgttatgtgtaccaggcccgaaacctgctggcactcgacaaggactcttttagcgacccatacgctcatatctgctttctgcacagatccaaaaccacggagatcattcatagtacactgaaccctacatgggatcaaactattatctttgacgaggtcgagatctacggcgagccccagaccgtccttcaaaatcccccaaaggttattatggagctttttgacaatgaccaagtgggcaaggacgagttcctcggaaggtccattttctctcccgtagtcaagctgaacagcgagatggatattacacccaaactcctgtggcaccctgtaatgaacggtgataaggcctgtggggatgtgctcgtcactgccgagctgatcttgcgcggaaaggatgggtccaatctgcccatcttgcccccacagagggcgcctaatctgtatatggttccccaaggcatcagaccagtggtccagttaactgcgatcgaaattctggcttggggcctacgaaatatgaagaattttcaaatggcatctataacaagcccttccttagtcgtagagtgcggcggagaacgggttgaatctgtggtcatcaagaaccttaaaaagacccccaacttcccatcgtctgttttgttcatgaaagtttttcttcctaaagaggagctgtatatgccaccactggtcatcaaggtgattgatcatcggcagtttgggagaaagcccgtcgttggtcaatgtactatagaacgcttagatcgttttagatgtgatccatatgcaggaaaggaagatatcgtcccccagttgaaagcaagtctgcttagcgccccaccgtgtcgcgatatcgtgatcgagatggaggacactaagcctctcctggccagcaagctgaccgaaaaggaagaagaaatagttgattggtggtctaagttctatgcaagctctggcgagcacgagaagtgtgggcagtatattcaaaaggggtactccaagctgaagatctacaattgcgaactcgaaaatgtggcagaatttgagggattaaccgatttcagtgacacatttaaattgtacagaggaaagtcagatgagaacgaagaccctagcgtggtgggtgaatttaaaggctctttccggatatatccattgcccgacgacccaagcgtgcctgcccctcccagacagttcagagagctacctgacagcgttccgcaagagtgcaccgtgagaatttacatcgttcgtggcctggagctccagcctcaggataacaatggcctgtgtgacccctacattaagatcaccttgggaaaaaaggtgattgaggatcgcgatcactatattccaaatactctcaatcccgttttcgggagaatgtacgaactgtcctgctacctgcctcaggagaaggaccttaaaatcagtgtctacgactatgacacatttactagggacgaaaaagtaggtgaaacaatcatcgatttggagaatcggttcctctcacgatttgggagccactgtggcataccagaggaatactgtgtaagcggggttaacacatggcgggatcagctgcgaccaacccaactgttgcagaacgtggccaggttcaaaggcttcccccagcccattctgtctgaagatggttcaagaatccggtacggaggcagagactatagcctggatgaattcgaggcaaacaagatcctgcatcagcacttaggggctccggaagagaggctcgctctgcacatcttgcgcacccaggggctcgtgcccgagcacgtggaaacgaggacactgcactccacctttcaaccaaatatcagccaggggaaactgcagatgtgggttgacgtgttccccaagagcctcggtccacctggacccccattcaacatcactccgcgtaaagcaaagaaatactaccttcgggtgatcatctggaacacaaaagatgtcatcctcgacgagaaatctattacaggcgaggagatgtctgacatctacgtgaaaggatggattcccggaaacgaggagaataagcagaagacggacgttcactaccgctccctggacggagagggaaattttaattggagattcgttttcccattcgactatcttccagccgagcagctctgcattgtggccaagaaagagcacttttggtcaatagaccagacagagttccgcatccctccgagattgatcatacagatctgggataatgacaagttcagcttggatgattaccttggctttctcgagcttgacctgcgccacaccattatccccgcaaaatcccccgaaaaatgccgccttgatatgataccggatctgaaagcaatgaacccgcttaaggcaaaaacggcatcgctgttcgagcagaaaagcatgaagggctggtggccttgttacgccgagaaagatggcgctagagtaatggccggaaaagtggagatgacactggagatcctcaacgaaaaagaggccgacgaaaggcctgctggcaagggcagggatgaacctaacatgaatcctaagctggacctacctaatcgccctgagacctccttcctctggttcaccaacccctgcaaaacaatgaagtttatcgtttggcgccgattcaaatgggtgataatcggcctcttatttctgctgatcctcctgctgttcgtggctgttctgctctatagcctccctaactatttgtccatgaagatcgtcaaacccaacgtgta

SEQ ID NO: 176709 - DNA, 6185 bp, Artificial Sequence
  derived and/or modified sequence
atgttgagggtcattgtcgagtcagccagcaatattccaaaaactaagttcggcaaacccgacccaattgttagcgtgatatttaaagatgagaaaaagaaaaccaaaaaggtcgacaacgaacttaacccggtgtggaatgagattcttgaattcgatctgagagggattcccctcgacttttcttcctcgctcggtatcatagtcaaagattttgagaccataggacaaaacaaactgatcggaacggcgaccgttgccctgaaagacctgaccggggaccagtccagatcgctgccttataagttaatttctttgttgaatgagaaggggcaggatacgggggctacaatcgatttagtcatcggctatgatcctccctctgctccacatcccaacgacttgtcaggaccctccgtgcccggaatgggaggagatggcgaagaagacgagggcgatgaggacagactggacaacgccgtgagaggcccagggccaaagggcccagtcgggacagtgtccgaagctcaactcgctagacggctcaccaaggttaaaaatagtagaaggatgctgagtaataagcctcaagatttccagattcgagtgagagtgatagagggccgtcagctgagcgggaataacattaggcccgtggttaaagttcacgtttgcggacagacccacaggacaaggatcaaacggggaaataatcctttcttcgacgaactctttttctataacgtcaacatgacccctagcgagttgatggacgagattatttcaatccgcgtctacaactcccatagcctgagagctgattgtctgatgggcgagttcaaaatcgatgtgggcttcgtttatgatgagccgggtcatgccgtgatgcgcaagtggctgctactgaacgacccagaggacacaagctccgggtccaaaggatatatgaaggtcagtatgtttgtactgggaaccggtgatgaaccccctcccgaacggcgtgacagggacaatgatagcgatgacgtagagtctaatctccttctgccagcagggatcgctctcagatgggtaactttcttgctgaagatataccgggctgaagacattccccaaatggacgacgcatttagccagacagtcaaagagatatttgggggaaatgcggataaaaagaatctggtagatcccttcgtggaggtgtcctttgccggaaagaaggtgtgcacaaacataatcgagaaaaatgctaatcccgagtggaaccaagtcgtaaatcttcagatcaaattcccaagtgtgtgcgagaagattaagctcacaatctatgactgggaccggcttaccaagaacgacgttgtggggacaacctacctgcatttgtcaaaaatcgccgcaagtggaggagaggtcgaagatttctccagcagcggtacaggtgctgccagctacaccgtgaatacaggtgagaccgaagtcggcttcgtacccacttttggaccatgctatcttaatttgtatgggagtcccagggaatacacagggttcccagatccttacgacgagcttaataccggcaagggggaaggtgtagcctaccgcggaaggatcctggtcgagctggccacattcctggaaaaaacccccccagataagaagctcgagcccatcagcaatgatgatctcttagtggtggagaaataccagagacgcagaaagtactcattatcggcagtgttccactccgccacaatgttgcaggacgttggcgaggctattcaatttgaggtctcaattggaaattatggcaataaatttgatacaacttgcaagcctctcgcttccacaacccaatactcaagagctgtgttcgacgggaactactactattatttaccgtgggcacatacaaaacctgttgttacactgacaagttactgggaagacatttcacacagactcgacgccgtgaatacgctcctggctatggctgagcgtctccagaccaacatcgaggccctcaagtcgggaatccagggtaagatccctgccaaccagttggctgaactatggcttaaactgattgacgaagttatcgaggacactaggtacacccttcccctgactgagggcaaggcaaacgtcactgtgcttgacacacaaatcaggaagctacgtagcaggtccctgagccaaattcacgaggcggcagtaagaatgcggagcgaggccacagacgtcaagagtacactcgccgaaatagaggattggttggacaagcttatgcaactcacggaggagcctcagaactctatgcccgatattattatctggatgatacgcggtgagaagagactggcttacgcgagaatcccagcgcaccaggttctatatagtacctctggcgaaaacgcatccggcaagtattgtggtaaaactcaaaccatcttcctcaaatatccacaggaaaagaacaatggaccaaaggtgccagtcgaactccgagtgaacatctggttgggcctgtccgctgtggaaaaaaagtttaacagctttgccgaaggcacctttaccgtcttcgccgaaatgtacgaaaaccaggccctgatgtttggcaagtggggcaccagcggattggtgggcagacacaaattctcagacgttacaggtaaaattaagctcaagcgggagttcttcttacccccaaagggctgggaatgggaaggtgaatggatagtagatcccgagaggagcctgctgaccgaggcagatgcaggccacactgaattcacagacgaggtgtatcaaaacgaatccaggtaccctggaggagattggaagcctgctgaggacacgtataccgatgccaacggcgacaaggccgcatccccatccgagctcacctgtccccctggctgggaatgggaggacgacgcgtggtcttatgatatcaatagagccgttgatgagaagggctgggagtacgggattacgattccccctgatcacaaacccaagtcatgggttgccgctgagaaaatgtaccacacgcatagacgccgacggctggtccggaagcggaagaaggacttgacccagactgccagctccaccgcaagagcgatggaagagctgcaggatcaggaggggtgggagtatgcaagcctgattggttggaaatttcactggaagcaaaggtcatccgacacattcagaaggcggcgatggcggaggaagatggctccaagtgaaacccatggcgcagccgctatcttcaagctggagggggctctgggtgccgacaccacagaagatggcgacgaaaagtccttggaaaaacaaaaacattctgccaccacagtcttcggtgccaatacaccaatcgtttcctgtaactttgatcgggtgtatatttaccatctgaggtgctacgtttatcaggccaggaatctactggctcttgataaggactccttctcggatccctatgcccacatttgttttcttcacagatctaagaccacagagataattcatagcaccctgaacccaacttgggatcagaccatcattttcgacgaggtggaaatttacggcgaaccacaaacagtgctgcagaatccccctaaagttataatggagctgttcgataacgatcaagtcgggaaggatgagttcctcggacgctccattttttctccagtcgtaaagctgaactctgaaatggatattacacccaaactcctttggcaccctgtgatgaatggtgataaagcctgtggcgacgtgctcgtgactgcggagcttatcctgcgcggaaaggacggctccaacctacctatcttgccacctcaacgcgctccaaacttgtacatggtgccccagggcatcaggcccgttgtgcagctgaccgccatcgagattttggcctggggcctccgcaatatgaaaaattttcagatggcaagcattacatccccatccctagtggtggagtgtgggggagaaagggtcgagtcggtcgtcatcaagaatctgaaaaaaacccctaactttccgtcatcagtcctgttcatgaaggtcttccttcccaaagaggagctgtacatgccaccactggtgatcaaggtgattgaccaccgtcagttcggcagaaagcctgtcgtaggacagtgcaccatagaacgcctcgaccgttttaggtgcgacccctacgctggtaaagaggatatcgtcccgcagttgaaggccagccttctgtccgccccaccatgtagggatattgttatcgagatggaggacactaaaccccttcttgcaagcaagctggtatccatagaagaagaaatcgtggattggtggtccaaattctatgcgtcatcaggcgagcatgagaaatgtggccagtatatccaaaagggttactccaagttgaaaatatataactgcgagttggaaaatgtggctgaattcgagggcctaaccgacttctccgacacatttaagctgtataggggcaaatcagacgagaacgaggatcctagcgtggtcggagaattcaaaggatctttccgcatttacccactgcccgatgacccatctgtcccagcccctcccagacagtttcgcgagctgcccgactctgtcccacaagagtgtacagtgcgaatctatattgtgaggggactggagctccagccccaggataataacgggctatgtgacccatacatcaaaataaccctggggaagaaagttattgaagatcgagaccactacattcctaacacactaaatcccgtttttgggagaatgtacgagctatcttgctacctgccccaggagaaggacctcaaaattagtgtttatgattacgataccttcacccgcgacgaaaaagtcggtgaaaccattatcgatctcgaaaaccgcttcttatcgaggtttgggagtcactgcggaatccccgaggaatattgcgtgtctggggtcaacacgtggagagaccagctccggcctacgcagttgctgcagaatgtagcacgattcaagggtttcccccagccgatcctctctgaggatggctcacgaatccgatacgggggacgggactattcactggatgagttcgaagctaacaaaatactgcatcaacacctgggcgcaccagaagagcggttggcacttcacatcttaagaacccaggggctcgtgccggagcatgtggaaacacggacactgcattccacttttcaacctaacatctcacaagggaaattacagatgtgggtcgatgttttccccaagagcttaggtccacctggcccaccgttcaatatcacacctcgtaaagctaagaaatactacttgagggtcattatttggaatacaaaggatgtgatcctggacgaaaagagcattactggtgaagagatgagtgatatttacgttaagggttggataccgggaaatgaagaaaacaaacagaagactgacgtgcactatcgaagcctcgatggcgaaggaaactttaattggcgattcgtattcccttttgactaccttccagcggaacagctatgcattgtggctaaaaaagaacacttttggagcatcgatcagaccgaatttaggattcccccacggctgattattcaaatttgggataatgataaattttccctggacgattatctcggatttctggaattagatctgagacataccatcatccccgctaagtcaccagagaagtgtcgtctggacatgattcctgatctgaaggccatgaacccgctaaaagccaagactgccagcctgttcgagcagaaatcaatgaaaggttggtggccatgttacgccgaaaaggacggagctagggtcatggctggcaaggtcgagatgactctggagattctgaacgagaaagaagcggacgagcggccagctggtaaaggccgagacgagccaaatatgaatcctaagctggacctccccaaccgcccagagaccagcttcctgtggtttacaaacccctgcaaaaccatgaagttcattgtatggcgcaggtttaaatgggtgattatcggcctcctgttcctcttgattttacttctgttcgtggctgttctgctatactctctcccgaactatttgtccatgaaaatcgtcaagcctaacgtgta

SEQ ID NO: 176710 - protein, 216 aa, Artificial Sequence
  derived and/or modified sequence
MSPKPRASGPPAKAKEAGKRKSSSQPSPSDPKKKTTKVAKKGKAVRRGRRGKKGAATKMAAVTAPEAESGPAAPGPSDQPSQELPQHELPPEEPVSEGTQHDPLSQESELEEPLSQESEVEEPLSQESQVEEPLSQESEVEEPLSQESQVEEPLSQESEVEEPLSQESQVEEPLSQESEMEEPLSQESQVEEPLSQESEMEEPLSQESEMEELPSV

SEQ ID NO: 176711 - protein, 206 aa, Artificial Sequence
  derived and/or modified sequence
MSPKPRASGPPAKATEAGKRKSSSQPSPSDPKKKTTKVAKKGKAVRRGRRGKKGAATKMAAVTAPEAESAPAAPGPSDQPSQELPQHELPPEEPVSEGTQHDPLSQEAELEEPLSQESEVEEPLSQESQVEEPLSQESEVEEPLSQESQVEEPLSQESEVEEPLSQESQVEEPLSQESEMEEPLSQESQVEEPPSQESEMEELPSV

SEQ ID NO: 176712 - DNA, 913 bp, Artificial Sequence
  derived and/or modified sequence
cagagttgggagtgactccagagcctccagcgagatgctgctgattctgctgtcagtggccctgctggccctgagctcagctgagagttcaagtgaagatgtcagccaggaagaatctctcttcctaatatcaggaaagccagaaggacgacgcccacaaggaggaaaccagccccaacgtcccccacctcctccaggaaagccacaaggaccacccccacaaggaggaaaccagtcccaaggtcccccacctcctccaggaaagccagaaggacgacccccacaaggaggcaaccagtcccaaggtcccccacctcatccaggaaagccagaaagaccacccccacaaggaggaaaccagtcccaaggtaccccacctcctccaggaaagccagaaagaccacccccacaaggaggcaaccagtcccaccgtcccccacctcctccaggaaagccagaaagaccacccccacaaggaggtaaccagtcccaaggtcccccacctcatccaggaaagccagaaggaccacccccacaggaaggaaacaagtcccgaagtgcccgatctcctccaggaaagccacaaggaccaccccaacaagaaggcaacaagcctcaaggtcccccacctcctggaaagccacaaggcccacccccagcaggaggcaatccccagcagcctcaggcacctcctgctggaaagccccaggggccacctccacctcctcaagggggcaggccacccagacctgcccagggacaacagcctccccagtaatctaggattcaatgacaggaagtgaataagaagatatcagtgaattcaaataattcaattgctacaaatgccgtgacattggaacaaggtcatcatagctctaactttaatataccaataaaataatcagcttgc

SEQ ID NO: 176713 - DNA, 796 bp, Artificial Sequence
  derived and/or modified sequence
cagagttgggagtgactccagagcctccagcgagatgctgctgattctgctgtcagtggccctgctggccctgagctcagctgagagttcaagtgaagatgtcagccaggaagaatctctcttcctaatatcaggaaagccagaaggacgacgcccacaaggaggaaaccagccccaacgtcccccacctcctccaggaaagccacaaggaccacccccacaaggaggaaaccagtcccaaggtcccccacctcctccaggaaagccagaaggacgacccccacaaggaggcaaccagtcccaaggtcccccacctcatccaggaaagccagaaagaccacccccacaaggaggaaaccagtcccaaggtaccccacctcctccaggaaagccagaaagaccacccccacaaggaggcaaccagtcccaccgtcccccacctcctccaggaaagccagaaagaccacccccacaaggaggtaaccagtcccaaggtcccccacctcatccaggaaagccagaaggaccacccccacaggaaggaaacaagtcccgaagtgcccgatctcctccaggaaagccacaaggaccaccccaacaagaaggcaacaagcctcaaggtcccccacctcctggaaagccacaaggcccacccccagcaggaggcaatccccagcagcctcaggcacctcctgctggaaagccccaggggccacctccacctcctcaagggggcaggccacccagacctgcccagggacaacagcctccccagtaatctaggattcaatgacag

SEQ ID NO: 176714 - protein, 307 aa, Artificial Sequence
  derived and/or modified sequence
MLNTTSVTEFLLLGVTDIQELQPFLFVVFLTIYFISVTGNGAVLMIVISDPRLHSLMYFFLGNLSYLDICYSTVTLPKMLQNFLSTHKAISFLGCISQLHFFHSLGSTESMLFAVMAFDLSVAICKPLRYTVIMNPQLCTQMAITIWVIGFFHALLHSVMTSRLNFCGSNRIHHFLCDIKPLLKLACGNTELNQWLLSTVTGTIAMGPFFLTLLSYFYIITYLFFKTRSCSMLCKALSTCASHFMVVILFYAPVLFTYIHPALESFMDQDRIVAIMYTVVTPVLNPLIYTLRNKEVKGALGRVIRRL

SEQ ID NO: 176715 - protein, 307 aa, Artificial Sequence
  derived and/or modified sequence
MLNTTSVTEFLLLGVTDIQELQPFLFVVFLTIYFISVTGNGAVLMIFISDPRLHSPMYFFLGNLSYLDICYSTVTLPKMLQNFLSTHKAISFLGCISQLHFFHFLGSTESMLLAVMAFDRSVAICKPLRYTVIMNPQLCTQMAITIWVIGFFHALLHSIMTSRLNFCGSNRIHHFLCDIKPLLKLACGNTELNQWLLSTVTGTIAMGPFFLTLLSYFYIITYLFFKTRSCSMLCKALSTCASHFMVVILFYAPVLFTYIHPALESFMDQDRIVAIMYTVVTPVLNPLIYTLRNKEVKGALGRVIRRL

SEQ ID NO: 176716 - protein, 307 aa, Artificial Sequence
  derived and/or modified sequence
MLNTTSVTEFLLLGVTDIQELQPFLFVVFLTIYFISVTGNGAVLMIFISDPRLHSPMYFFLGNLSYLDICYSTVTLPKMLQNFLSTHKAISFLGCISQLHFFHFLGSTESMLLAVMAFDRCVAICKPLRYTVIMNPQLCTQMAITIWVIGFFHALLHSIMTSRLNFCGSNRIHHFLCDIKPLLKLACGNTELNQWLLSTVTGTIAMGPFFLTLLSYFYIITYLFFKTRSCSMLCKALSTCASHFMVVILFYAPVLFTYIHPALESFMDQDRIVAIMYTVVTPVLNPLIYTLRNKEVKGALGRVIRRL

SEQ ID NO: 176717 - protein, 307 aa, Artificial Sequence
  derived and/or modified sequence
MLNTTSVTEFLLLGVTDIQELQPFLFVVFLTIYFISVTGNGAVLMIVISDPRLHSLMYFFLGNLSYLDICYSTVTLPKMLQNFLSTHKAISFLGCISQLHFFHFLGSTESMLFAVMAFDLSVAICKPLRYTVIMNPQLCTQMAITIWVIGFFHALLHSVMTSRLNFCGSNRIHHFLCDIKPLLKLACGNTELNQWLLSTVTGTIAMGPFFLTLLSYFYIITYLFFKTRSCSMLCKALSTCASHFMVVILFYAPVLFTYIHPALESFMDQDRIVAIMYTVVTPVLNPLIYTLRNKEVKGALGRVIRRL

SEQ ID NO: 176718 - DNA, 924 bp, Artificial Sequence
  derived and/or modified sequence
atgctgaacaccaccagcgtgaccgagttcctgctgctgggcgtgaccgacatccaggagctgcagcccttcctgttcgtggtgttcctgaccatctacttcatcagcgtgaccggcaacggcgccgtgctgatgatcgtgatcagcgaccccagactgcacagcctgatgtacttcttcctgggcaacctgagctacctggacatctgctacagcaccgtgaccctgcccaagatgctgcagaacttcctgagcacccacaaggccatcagcttcctgggctgcatcagccagctgcacttcttccacagcctgggcagcaccgagagcatgctgttcgccgtgatggccttcgacctgagcgtggccatctgcaagcccctgagatacaccgtgatcatgaacccccagctgtgcacccagatggccatcaccatctgggtgatcggcttcttccacgccctgctgcacagcgtgatgaccagcagactgaacttctgcggcagcaacagaatccaccacttcctgtgcgacatcaagcccctgctgaagctggcctgcggcaacaccgagctgaaccagtggctgctgagcaccgtgaccggcaccatcgccatgggccccttcttcctgaccctgctgagctacttctacatcatcacctacctgttcttcaagaccagaagctgcagcatgctgtgcaaggccctgagcacctgcgccagccacttcatggtggtgatcctgttctacgcccccgtgctgttcacctacatccaccccgccctggagagcttcatggaccaggacagaatcgtggccatcatgtacaccgtggtgacccccgtgctgaaccccctgatctacaccctgagaaacaaggaggtgaagggcgccctgggcagagtgatcagaagactgtag

SEQ ID NO: 176719 - DNA, 924 bp, Artificial Sequence
  derived and/or modified sequence
atgctgaacaccaccagcgtgaccgagttcctgctgctgggcgtgaccgacatccaggagctgcagcccttcctgttcgtggtgttcctgaccatctacttcatcagcgtgaccggcaacggcgccgtgctgatgatcttcatcagcgaccccagactgcacagccccatgtacttcttcctgggcaacctgagctacctggacatctgctacagcaccgtgaccctgcccaagatgctgcagaacttcctgagcacccacaaggccatcagcttcctgggctgcatcagccagctgcacttcttccacttcctgggcagcaccgagagcatgctgctggccgtgatggccttcgacagaagcgtggccatctgcaagcccctgagatacaccgtgatcatgaacccccagctgtgcacccagatggccatcaccatctgggtgatcggcttcttccacgccctgctgcacagcatcatgaccagcagactgaacttctgcggcagcaacagaatccaccacttcctgtgcgacatcaagcccctgctgaagctggcctgcggcaacaccgagctgaaccagtggctgctgagcaccgtgaccggcaccatcgccatgggccccttcttcctgaccctgctgagctacttctacatcatcacctacctgttcttcaagaccagaagctgcagcatgctgtgcaaggccctgagcacctgcgccagccacttcatggtggtgatcctgttctacgcccccgtgctgttcacctacatccaccccgccctggagagcttcatggaccaggacagaatcgtggccatcatgtacaccgtggtgacccccgtgctgaaccccctgatctacaccctgagaaacaaggaggtgaagggcgccctgggcagagtgatcagaagactgtag

SEQ ID NO: 176720 - DNA, 924 bp, Artificial Sequence
  derived and/or modified sequence
atgctgaacaccaccagcgtgaccgagttcctgctgctgggcgtgaccgacatccaggagctgcagcccttcctgttcgtggtgttcctgaccatctacttcatcagcgtgaccggcaacggcgccgtgctgatgatcttcatcagcgaccccagactgcacagccccatgtacttcttcctgggcaacctgagctacctggacatctgctacagcaccgtgaccctgcccaagatgctgcagaacttcctgagcacccacaaggccatcagcttcctgggctgcatcagccagctgcacttcttccacttcctgggcagcaccgagagcatgctgctggccgtgatggccttcgacagatgcgtggccatctgcaagcccctgagatacaccgtgatcatgaacccccagctgtgcacccagatggccatcaccatctgggtgatcggcttcttccacgccctgctgcacagcatcatgaccagcagactgaacttctgcggcagcaacagaatccaccacttcctgtgcgacatcaagcccctgctgaagctggcctgcggcaacaccgagctgaaccagtggctgctgagcaccgtgaccggcaccatcgccatgggccccttcttcctgaccctgctgagctacttctacatcatcacctacctgttcttcaagaccagaagctgcagcatgctgtgcaaggccctgagcacctgcgccagccacttcatggtggtgatcctgttctacgcccccgtgctgttcacctacatccaccccgccctggagagcttcatggaccaggacagaatcgtggccatcatgtacaccgtggtgacccccgtgctgaaccccctgatctacaccctgagaaacaaggaggtgaagggcgccctgggcagagtgatcagaagactgtag

SEQ ID NO: 176721 - DNA, 924 bp, Artificial Sequence
  derived and/or modified sequence
atgctgaataccacaagcgtgacagagtttctccttctcggcgtgactgacattcaggaattgcaaccttttctgtttgtggtatttctgacgatatatttcatttccgttaccggcaatggcgctgtgctgatgatcgttatcagcgatccccgccttcattctcttatgtacttctttctagggaacttgtcttacctagatatatgttactccaccgtcacattaccgaagatgctgcagaatttcctgtctacccataaggccatctctttcctggggtgtatcagccaattgcatttctttcacagtctggggtcaaccgaatccatgctttttgccgtgatggccttcgaccttagtgtcgcgatctgtaagcccctgcgatacaccgtgattatgaacccccagctctgtactcagatggccattaccatctgggtgattggctttttccacgcattactgcactctgttatgacaagtaggctcaacttttgtggcagcaatcgaatacaccacttcttgtgcgatatcaaaccactcctgaagctcgcatgcggtaacaccgaactaaaccagtggctacttagcaccgttacaggcacaatcgcaatgggcccattctttctcactctgctttcctatttttatattattacctatctgtttttcaaaactcggagctgtagtatgctttgtaaggccctgtccacttgtgcttcacacttcatggtcgtgattctcttctacgctccagtcctgttcacgtatattcacccagcgctcgaaagcttcatggatcaggataggattgtggctattatgtacactgtagtgactcccgtcctgaacccgctgatatacaccctgcgcaataaagaagtgaaaggcgcactgggcagggtcatcaggcgcttgtag

SEQ ID NO: 176722 - DNA, 924 bp, Artificial Sequence
  derived and/or modified sequence
atgcttaacacgacatccgtaacggagttccttctgctcggcgtaactgatatccaggaactgcagccattcttattcgtcgtgtttctcactatatattttatcagcgtgactggaaacggagcagtactgatgatattcatctcagaccctagactgcattctcccatgtactttttcctgggtaacctgtcgtacctggatatttgttacagcacagtaaccctgcctaagatgttacagaacttcttaagcacacacaaagccatcagctttttaggatgcatatcacaactccactttttccacttcttagggtcaactgagtctatgctcttagcggtcatggctttcgatcggtcagtagcaatctgcaaacccctgcgatatactgtcataatgaatccacagctatgtacccagatggccatcacaatctgggtcatcgggtttttccatgcgttgctccatagcatcatgacctcaaggcttaatttttgcggctcaaatagaattcaccattttctttgcgatataaagcccctgcttaagctggcgtgcggtaatacggagctcaaccagtggctgttgagcaccgtgacaggcaccatagctatgggtcctttctttttaacacttctctcctatttctacatcataacctatctgttttttaaaacccggtcttgttcgatgctgtgtaaagctctttctacctgcgcatcccacttcatggtcgtaatccttttctatgccccagttcttttcacatatattcaccctgcgttagagagcttcatggatcaggataggatcgtggccatcatgtataccgtcgtgacaccagtgctgaatccccttatctatacgctgcgcaataaggaggtcaaaggggccctgggccgggttatacgacgtctctag

SEQ ID NO: 176723 - DNA, 924 bp, Artificial Sequence
  derived and/or modified sequence
atgctgaacaccacgtccgttaccgagtttctgctgctaggagtgacagatattcaagaattacagccgttcctctttgtggtctttcttacaatctatttcatttccgtgacaggcaatggcgccgtgctgatgatcttcattagcgatcctcggcttcatagtccaatgtacttttttctgggcaatctgtcttatctggacatttgctacagtactgtcacactgcccaaaatgttgcagaatttcctgtccacgcataaggccatatccttcttagggtgtattagccagcttcacttttttcacttccttgggtccacagagtccatgcttctggcagtgatggctttcgataggtgtgtggccatttgtaaacctcttcgctacaccgtgataatgaatccacagctgtgtactcagatggccattaccatatgggtaatcggcttctttcacgctttgcttcactccataatgacatccagactcaacttttgtgggagcaatcgaattcaccatttcttgtgcgacattaagccacttcttaagttggcctgcggaaatactgagctaaatcagtggttactttcaaccgtgactgggacaatcgcaatggggcccttttttctgactctgctctcttatttttatatcatcacttatctgttttttaagactagaagttgcagcatgctgtgcaaagcgctttctacttgtgccagccactttatggtggtgattctgttttatgctcctgttctttttacatacattcatcctgcgctggagagtttcatggaccaggacagaatagtagcaatcatgtacacagtcgttactccagtcctgaacccccttatctacacactgaggaataaagaagtcaagggcgccctgggaagggtaataaggcggttgtag

SEQ ID NO: 176724 - DNA, 924 bp, Artificial Sequence
  derived and/or modified sequence
atgctgaacaccacctctgtgacagagttcctgctgctgggcgtgacagacatccaggagctgcagcccttcctgtttgtggtgttcctgaccatctacttcatctctgtgactggaaatggagctgtgctgatgatcgtcatcagtgacccccggctgcacagcctgatgtacttcttcctgggcaacctgagctacctggacatctgctacagcacagtgaccctgcccaagatgctgcagaacttcctgagcacccacaaggccatctccttcctgggctgcatcagccagctgcacttcttccacagcctgggcagcacagagagcatgctgtttgctgtgatggcctttgacctgtctgtggccatctgcaagcccctgcgctacaccgtcatcatgaacccccagctgtgcacccagatggccatcaccatctgggtgattggcttcttccacgccctgctgcacagcgtgatgaccagccggctgaacttctgtggcagcaaccgcatccaccacttcctgtgtgacatcaagcccctgctgaagctggcctgtggcaacacagagctgaaccagtggctgctgagcacagtgacaggcaccatcgccatgggccccttcttcctgaccctgctgagctacttctacatcatcacctacctgttcttcaagaccaggagctgcagcatgctgtgcaaggccctgagcacctgtgccagccacttcatggtggtgatcctcttctacgcccctgtgctcttcacctacatccacccagccctggagagcttcatggaccaggaccgcatcgtggccatcatgtacacagtggtgacccctgtgctgaaccccctcatctacaccctgaggaacaaggaggtgaagggggccctgggccgggtcatccggcggctgtag

SEQ ID NO: 176725 - DNA, 924 bp, Artificial Sequence
  derived and/or modified sequence
atgctgaacaccacctctgtgacagagttcctgctgctgggcgtgacagacatccaggagctgcagcccttcctgtttgtggtgttcctgaccatctacttcatctctgtgactggaaatggagctgtgctgatgatcttcatcagtgacccccggctgcacagccccatgtacttcttcctgggcaacctgagctacctggacatctgctacagcacagtgaccctgcccaagatgctgcagaacttcctgagcacccacaaggccatctccttcctgggctgcatcagccagctgcacttcttccacttcctgggcagcacagagagcatgctgctggccgtgatggcctttgacagatctgtggccatctgcaagcccctgcgctacaccgtcatcatgaacccccagctgtgcacccagatggccatcaccatctgggtgattggcttcttccacgccctgctgcacagcatcatgaccagccggctgaacttctgtggcagcaaccgcatccaccacttcctgtgtgacatcaagcccctgctgaagctggcctgtggcaacacagagctgaaccagtggctgctgagcacagtgacaggcaccatcgccatgggccccttcttcctgaccctgctgagctacttctacatcatcacctacctgttcttcaagaccaggagctgcagcatgctgtgcaaggccctgagcacctgtgccagccacttcatggtggtgatcctcttctacgcccctgtgctcttcacctacatccacccagccctggagagcttcatggaccaggaccgcatcgtggccatcatgtacacagtggtgacccctgtgctgaaccccctcatctacaccctgaggaacaaggaggtgaagggggccctgggccgggtcatccggcggctgtag

SEQ ID NO: 176726 - DNA, 924 bp, Artificial Sequence
  derived and/or modified sequence
atgctgaacaccacctctgtgacagagttcctgctgctgggcgtgacagacatccaggagctgcagcccttcctgtttgtggtgttcctgaccatctacttcatctctgtgactggaaatggagctgtgctgatgatcttcatcagtgacccccggctgcacagccccatgtacttcttcctgggcaacctgagctacctggacatctgctacagcacagtgaccctgcccaagatgctgcagaacttcctgagcacccacaaggccatctccttcctgggctgcatcagccagctgcacttcttccacttcctgggcagcacagagagcatgctgctggccgtgatggcctttgacagatgtgtggccatctgcaagcccctgcgctacaccgtcatcatgaacccccagctgtgcacccagatggccatcaccatctgggtgattggcttcttccacgccctgctgcacagcatcatgaccagccggctgaacttctgtggcagcaaccgcatccaccacttcctgtgtgacatcaagcccctgctgaagctggcctgtggcaacacagagctgaaccagtggctgctgagcacagtgacaggcaccatcgccatgggccccttcttcctgaccctgctgagctacttctacatcatcacctacctgttcttcaagaccaggagctgcagcatgctgtgcaaggccctgagcacctgtgccagccacttcatggtggtgatcctcttctacgcccctgtgctcttcacctacatccacccagccctggagagcttcatggaccaggaccgcatcgtggccatcatgtacacagtggtgacccctgtgctgaaccccctcatctacaccctgaggaacaaggaggtgaagggggccctgggccgggtcatccggcggctgtag

SEQ ID NO: 176727 - DNA, 1033 bp, Artificial Sequence
  derived and/or modified sequence
gccggaaggattctgattgcgattagtgttccatagattattttgtcttttgtctgaagtgatgctgaatacaacctcagtcaccgaatttctcctcttgggagtgacagacattcaagaactgcagccttttctcttcgtggttttcctcaccatctacttcatcagtgtgactgggaatggagccgttctgatgattgtcatctccgatcctagactccattcccttatgtatttcttcctgggaaacctgtcctacctggatatctgttactctacggtgacactgccaaaaatgctgcagaactttctctctacacacaaagcaatttctttcttgggatgcataagccagcttcatttcttccactccctgggcagcacggagtccatgttgttcgccgtgatggcatttgacctctctgtggctatctgcaagccacttcgctacactgtcatcatgaaccctcagctctgtacccagatggccatcacaatctgggtcattggttttttccatgccctgctgcactccgtaatgacttctcgcttgaacttctgtggttccaaccgtatccatcattttctctgtgatattaagccattgctaaagctggcctgtgggaacactgagcttaatcagtggctactcagtactgtcacggggacaattgccatgggccccttctttctgacacttctctcctatttctacattatcacttatctcttcttcaagacccgttcttgtagcatgctctgtaaagcactgtccacttgtgcctcccacttcatggtagttattcttttctatgcacctgttcttttcacctatatccatcctgcgttagagagcttcatggaccaggaccggattgttgccatcatgtacactgtggtcactcctgtactaaacccactgatctatactttgaggaacaaggaagtgaagggggccttgggtagagtgatcagaaggctttgatttgaataaaccagagaactctactgaggcataaataaccagcaatga

SEQ ID NO: 176728 - DNA, 1033 bp, Artificial Sequence
  derived and/or modified sequence
gccggaaggattctgattgcgattagtgttccatagattattttgtcttttgtctgaagtgatgctgaatacaacctcagtcaccgaatttctcctcttgggagtgacagacattcaagaactgcagccttttctcttcgtggttttcctcaccatctacttcatcagtgtgactgggaatggagccgttctgatgattttcatctccgatcctagactccattcccctatgtatttcttcctgggaaacctgtcctacctggatatctgttactctacggtgacactgccaaaaatgctgcagaactttctctctacacacaaagcaatttctttcttgggatgcataagccagcttcatttcttccacttcctgggcagcacggagtccatgttgttggccgtgatggcatttgaccgctctgtggctatctgcaagccacttcgctacactgtcatcatgaaccctcagctctgtacccagatggccatcacaatctgggtcattggttttttccatgccctgctgcactccataatgacttctcgcttgaacttctgtggttccaaccgtatccatcattttctctgtgatattaagccattgctaaagctggcctgtgggaacactgagcttaatcagtggctactcagtactgtcacggggacaattgccatgggccccttctttctgacacttctctcctatttctacattatcacttatctcttcttcaagacccgttcttgtagcatgctctgtaaagcactgtccacttgtgcctcccacttcatggtagttattcttttctatgcacctgttctcttcacctatatccatcctgcgttagagagcttcatggaccaggaccggattgttgccatcatgtacactgtggtcactcctgtactaaacccactgatctatactttgaggaacaaggaagtgaagggggccttgggtagagtgatcagaaggctttgatttgaataaaccagagaactcttctgaggcataaataaccagcaatga

SEQ ID NO: 176729 - DNA, 1069 bp, Artificial Sequence
  derived and/or modified sequence
agcttctatacaacttctgaggtttggaagaagtacaacagtactctccttccaagtatctttggcttggtgagaaaattctgagccggaaggattctgattgcgattagtgttccatagattattttgtcttttgtctgaagtgatgctgaatacaacctcagtcaccgaatttctcctcttgggagtgacagacattcaagaactgcagccttttctcttcgtggttttcctcaccatctacttcatcagtgtgactgggaatggagccgttctgatgattttcatctccgatcctagactccattcccctatgtatttcttcctgggaaacctgtcctacctggatatctgttactctacggtgacactgccaaaaatgctgcagaactttctctctacacacaaagcaatttctttcttgggatgcataagccagcttcatttcttccacttcctgggcagcacggagtccatgttgttggccgtgatggcatttgaccgctgtgtggctatctgcaagccacttcgctacactgtcatcatgaaccctcagctctgtacccagatggccatcacaatctgggtcattggttttttccatgccctgctgcactccataatgacttctcgcttgaacttctgtggttccaaccgtatccatcattttctctgtgatattaagccattgctaaagctggcctgtgggaacactgagcttaatcagtggctactcagtactgtcacggggacaattgccatgggccccttctttctgacacttctctcctatttctacattatcacttatctcttcttcaagacccgttcttgtagcatgctctgtaaagcactgtccacttgtgcctcccacttcatggtagttattcttttctatgcacctgttctcttcacctatatccatcctgcgttagagagcttcatggaccaggaccggattgttgccatcatgtacactgtggtcactcctgtactaaacccactgatctatactttgaggaacaaggaagtgaagggggccttgggtagagtgatcagaaggctttga

SEQ ID NO: 176730 - DNA, 924 bp, Artificial Sequence
  derived and/or modified sequence
atgctgaacaccaccagcgtgaccgagttcctgctgctgggcgtgaccgatatccaggagttacagccatttctgttcgtggtgtttttaaccatttacttcatcagcgtgaccgggaatggagcggtgctgatgatcgtcatttccgacccaaggctccattctctcatgtacttctttctcgggaacctcagctaccttgacatttgctactctacagtgaccctccctaagatgctccaaaattttctgtccacccacaaagccattagttttttagggtgcatctctcaactgcatttcttccattctctaggatctaccgaatccatgctattcgcagttatggcattcgacttatcagtcgctatctgcaagccgctgaggtacacagtaattatgaatccacaattgtgtacccagatggccatcacaatttgggtcatcggcttctttcacgcgttgctgcatagcgtaatgacaagtcgcctaaacttttgtggttctaaccgcattcaccactttttatgcgatatcaaacccttgctgaagctggcctgtggcaatactgaactgaaccagtggctcctgagtaccgtaactggcacgatcgcaatgggaccttttttcttgactctcctgagctatttttatataatcacatacctgttctttaagactagatcctgttccatgctgtgcaaggccctatccacctgtgccagccattttatggttgttatcctgttctatgctccagtgctctttacctacatccacccagcattggagagcttcatggatcaggatcgaattgtcgcaatcatgtataccgtcgtgaccccagtgctcaacccactcatctacactctcagaaataaagaagtgaaaggtgcactgggccgcgttattagacggttatag

SEQ ID NO: 176731 - DNA, 924 bp, Artificial Sequence
  derived and/or modified sequence
atgctgaacaccaccagcgtgaccgagttcctgctgctgggcgtgacagacatccaagagctgcagccctttctgttcgtggtgtttttgaccatttattttatatccgtaacgggcaacggggcagtgttaatgatttttatcagcgacccgcgattacattctcctatgtacttcttcctgggaaatctgagttatctagacatctgctactccacggtaacccttccaaagatgttacagaacttcctgtcaacccacaaggccatctcgttcttagggtgcatcagccagctgcactttttccattttctggggtcaacagagtccatgctcctagctgtcatggcttttgatagatctgtagccatttgcaagcccctcaggtacacagttatcatgaatccccaattgtgcacacagatggccattaccatctgggtgattggtttttttcacgccctgcttcactctataatgacgagtcgcctgaacttttgcggctccaataggatccatcactttctgtgcgatattaaacccctcctcaaattggcgtgtggcaataccgaactcaaccagtggctgttatccaccgtgacaggcactatcgctatgggtcctttctttctgaccctgctttcgtacttctacatcattacatatctgttctttaaaacccgcagctgctcaatgctgtgcaaagccctgtcaacttgcgcctctcacttcatggtcgtgatactgttctacgcccctgtcctcttcacctacatccaccctgccctagagagctttatggaccaagacaggatcgtggccattatgtataccgtagtgacccctgtcctcaatcccctcatctacacccttcggaacaaggaggtgaaaggcgctcttggaagagtgattcggaggttatag

SEQ ID NO: 176732 - DNA, 924 bp, Artificial Sequence
  derived and/or modified sequence
atgctgaacaccaccagcgtgaccgagttcctgctgctgggcgtgacagatattcaggagctgcagcctttcctcttcgtggtattccttaccatctattttatctctgtcaccggaaatggcgctgtgcttatgattttcatttctgacccacgattgcacagtcctatgtatttctttctcggaaatctgagctacctcgatatttgttactcaacggtgacactaccaaaaatgttgcaaaattttctgagcacgcacaaggcgatttcatttttaggatgcatctcccagcttcatttttttcacttcctcggttccacggaaagtatgctgctggccgtgatggcctttgacaggtgtgttgctatttgcaaaccactgaggtacaccgtgatcatgaatccccagctctgcacccaaatggctatcactatttgggttatcggcttctttcacgcacttctgcattcaatcatgacttcccggctgaacttctgtggctccaaccggatccaccatttcctgtgtgacatcaaaccattactgaagttggcctgcgggaataccgaactgaatcagtggctgctgagcacagtgaccggtaccattgctatgggcccattcttcctgacattgctgtcttacttctatatcattacctatctcttctttaagaccagaagctgcagtatgctctgcaaggcattaagtacatgtgcaagccattttatggtggtcattctattctacgcacctgttttgttcacttacatccatccagctcttgaaagcttcatggatcaggatcggatcgtcgccataatgtacacggtagtgacaccagttctgaacccgctcatctataccctcagaaacaaggaagtcaaaggtgccttagggagagtgattcgcagactttag

SEQ ID NO: 176733 - DNA, 924 bp, Artificial Sequence
  derived and/or modified sequence
atgctgaacactacgagcgtcactgaattcctgcttctgggcgtgactgacatacaagagctgcaaccatttctgttcgttgtgtttctgactatttattttatttcagtgactgggaatggggcagtgttgatgattgtgatttccgatcccaggttgcattctttaatgtacttttttctgggcaaccttagctacctggatatttgttatagcacagtgactctgcctaagatgctgcagaattttctgagcacacacaaagcaatcagctttctcgggtgcattagccaattgcacttcttccactcactgggctctactgaatctatgctgttcgcagtgatggcatttgacctgagcgtggctatatgcaagccacttcgttacacagtaatcatgaaccctcagctgtgtacacagatggcgataactatctgggtcatcggctttttccatgctctcctgcattccgtgatgacatcaagactgaacttctgcggttctaatcgaatccatcattttctgtgtgatataaagcccctgttgaaattggcttgcggtaacactgagctcaaccagtggctccttagcactgtgaccggaacaattgccatgggtccctttttccttacgttactgtcatatttctacatcattacgtatttgtttttcaagacccgcagttgctccatgctgtgcaaagcgttgagcacctgtgcctctcactttatggtggtaatcctgttctacgctccagtgctgtttacgtacattcacccggctctcgaatcgttcatggaccaggacaggattgtggctattatgtataccgtcgtgacgcctgtgctcaaccccctgatttacacactcagaaacaaagaggtcaagggggcactcggcagagtgattcggagattgtag

SEQ ID NO: 176734 - DNA, 924 bp, Artificial Sequence
  derived and/or modified sequence
atgctgaatactaccagcgttacagaatttcttctgctgggagtcactgacattcaggagctgcagccatttctctttgtggtgttcctgacaatttactttatcagcgtcacaggcaatggggctgtactgatgatctttatctcggacccccgactccattctcccatgtatttctttttgggcaacctgtcttacctagatatctgttattccaccgtcacactgcctaagatgctgcagaactttctgtcaacacataaagcgatttctttcctggggtgtatctctcaactgcactttttccatttcttgggcagtacagagtctatgctgctggccgtgatggcctttgatagaagcgtcgccatctgcaagccactgcgatacaccgtgatcatgaatccccaactatgcacccagatggcaataactatttgggtgatcggcttctttcatgcgcttctgcattccatcatgacatcacgcctgaacttctgcggatcaaaccgcattcaccatttcctgtgcgacattaagcctctgctcaaactcgcatgtggcaacacagagctgaaccagtggctcctttccactgtgactggaaccatcgccatggggccatttttcctgactctgctttcatatttttacatcatcacctatcttttcttcaagaccagatcctgttccatgctatgtaaagccctatccacttgtgcaagtcactttatggttgtgatcctgttctatgcccctgtgctattcacctacatccatccagccttggagagcttcatggatcaggatcgaattgtggctattatgtacacagtggtcacaccagtcttgaacccactcatctacactttacggaacaaagaggtgaaaggggcactgggacgagtcataaggcgcctttag

SEQ ID NO: 176735 - DNA, 924 bp, Artificial Sequence
  derived and/or modified sequence
atgttgaacacgacgtcagtgaccgagtttctgctacttggtgttaccgacatccaggagttgcagcctttcctctttgttgtgtttctcactatatactttatctcagtgaccggcaacggcgctgtgctgatgatctttatctcagatcccagactgcattctcctatgtacttttttctcggcaatctgagctatcttgacatctgctacagcaccgtgactttacctaaaatgctgcagaattttctctcaacacataaggcgattagctttttgggctgcatcagccagctccactttttccatttcctgggttccaccgaaagtatgctgctggcggtgatggcgtttgatagatgtgtcgccatctgcaaaccattgcgttatacagtgataatgaaccctcagctctgcacccagatggccattactatttgggtaataggcttttttcacgcacttctgcatagtattatgaccagtcggttgaatttctgcggcagtaatcgcattcaccactttttatgtgacattaagcctctgctgaagctcgcatgtggtaatacagaactgaatcagtggctgctgtcaacagtcaccggtactatcgcaatgggtccctttttcctgaccctcctctcgtacttctacatcatcacgtacctcttctttaagacacgcagctgcagcatgctgtgcaaagccctcagcacatgtgcttcccacttcatggtcgtgattctattctacgcacctgtgcttttcacatatatccatccggctctggaaagttttatggaccaggaccgtatcgtcgcaatcatgtatacagtggtgacgcctgtgttaaatcccctcatctacactctcagaaacaaggaggtgaaaggtgctctgggtcgcgtcatacggcgtctgtag

SEQ ID NO: 176736 - DNA, 924 bp, Artificial Sequence
  derived and/or modified sequence
atgctgaacaccaccagcgtgaccgagttcctgctgctgggcgtgaccgacatccaggagctgcagcccttcctgttcgtggtgttcctgaccatctacttcatcagcgtgaccggcaacggcgccgtgctgatgatcgtgatcagcgaccccagactgcacagcctgatgtacttcttcctgggcaacctgagctacctggacatctgctacagcaccgtgaccctgcccaagatgctgcagaacttcctgagcacccacaaggccatcagcttcctgggctgcatcagccagctgcacttcttccacttcctgggcagcaccgagagcatgctgttcgccgtgatggccttcgacctgagcgtggccatctgcaagcccctgagatacaccgtgatcatgaacccccagctgtgcacccagatggccatcaccatctgggtgatcggcttcttccacgccctgctgcacagcgtgatgaccagcagactgaacttctgcggcagcaacagaatccaccacttcctgtgcgacatcaagcccctgctgaagctggcctgcggcaacaccgagctgaaccagtggctgctgagcaccgtgaccggcaccatcgccatgggccccttcttcctgaccctgctgagctacttctacatcatcacctacctgttcttcaagaccagaagctgcagcatgctgtgcaaggccctgagcacctgcgccagccacttcatggtggtgatcctgttctacgcccccgtgctgttcacctacatccaccccgccctggagagcttcatggaccaggacagaatcgtggccatcatgtacaccgtggtgacccccgtgctgaaccccctgatctacaccctgagaaacaaggaggtgaagggcgccctgggcagagtgatcagaagactgtag

SEQ ID NO: 176737 - DNA, 924 bp, Artificial Sequence
  derived and/or modified sequence
atgttgaacacgacctcggtcacagaattccttctgctgggtgtgaccgacattcaggagctccagcccttcctgttcgttgtgttccttacaatctatttcatctccgtgactgggaacggggccgtcctaatgatagtgatttcagacccaaggcttcactctctgatgtactttttccttgggaacctatcgtatttagatatttgctactctacagtgaccctcccaaaaatgctccagaacttcctgagcactcacaaggctatctcatttcttggatgcatctcacaactgcatttcttccactttctcggatcaactgagagcatgctctttgccgtaatggctttcgacctgtctgtggcaatttgtaaaccattgagatatacagttattatgaacccccaactctgcacccaaatggctatcactatctgggtcatcggatttttccatgcactgctacatagcgtcatgactagcagactgaacttctgtggctctaacagaattcaccattttctgtgcgatataaagcctttgctgaagctcgcctgcggcaacacagaactcaaccagtggcttctgtctacggtaacaggcacaatcgccatggggccgttttttctgaccctgttatcttacttctacatcataacctatctcttttttaaaaccagatcttgtagcatgttgtgtaaggccctgagcacttgtgcctctcactttatggtcgttatcctgttttatgccccggtgctgtttacttacatccacccagcactggagagctttatggatcaggatcgcatcgtggcgatcatgtacaccgtcgtgactccagtgttaaaccccctcatctacacactgcggaacaaggaggtgaagggagccttggggcgggtcatcaggcggctgtag

SEQ ID NO: 176738 - DNA, 924 bp, Artificial Sequence
  derived and/or modified sequence
atgttaaacacaacgagcgtcacagaattcctgctcctgggggttaccgacatccaagagctgcagccctttctgttcgtcgtgttcctgacgatctacttcatctccgtgacgggaaacggagccgtcctcatgatagtgatttctgatcctagactgcactctctgatgtatttttttctggggaatctgtcgtatctggacatatgttacagtacggtcactttacctaaaatgcttcagaatttcctttcaacccataaggcaatatcatttctggggtgtatatctcagctccactttttccactttttggggagtaccgagtctatgctgttcgccgtcatggccttcgacctctccgttgcaatctgcaagcctctccgctataccgttatcatgaacccccagctatgcacacagatggcgatcacaatatgggttatcggctttttccacgccctgctccacagcgtgatgacttctagattgaacttttgcggctccaacagaatccaccactttctgtgcgacattaagcctctgctgaaactggcgtgcggcaataccgagctaaatcagtggttgttgagcaccgtgaccggcacaatcgctatgggcccgttttttctgacactgctgagctatttctatattatcacataccttttcttcaaaactcggtcgtgcagtatgctctgcaaagctctgtctacatgcgcctctcactttatggtggttatcttattttacgccccagtgctgttcacctatattcaccccgccctagagtctttcatggaccaggatagaatagtggcaatcatgtacactgtggtgaccccagtcctgaacccactgatctacaccctgcgcaataaggaggtgaaaggtgctttgggccgtgtcatcagaaggctgtag

SEQ ID NO: 176739 - DNA, 924 bp, Artificial Sequence
  derived and/or modified sequence
atgctgaacactactagcgtcactgagttcctgcttctgggggtcaccgatattcaggagcttcagccgtttctattcgttgtgtttctgactatatattttatctctgtgacggggaacggcgcagtgcttatgatcgtgatttccgacccacggctgcatagcctgatgtactttttcttaggtaatctgtcgtatctcgacatttgttactctactgtgactctgccaaagatgctgcagaattttctctccactcacaaggccatcagttttctgggttgcattagtcagctccactttttccactttctcgggagtacggaatccatgctgttcgcagtgatggccttcgatctgtctgttgcaatctgcaaaccgctgcggtatactgtcataatgaatccccagttatgtacacagatggcaatcactatttgggttattggcttctttcatgcactcctccactctgttatgacatcaaggctgaatttctgcggatcaaaccggattcatcatttcctgtgcgacattaagcccctgctaaagctagcctgcggaaacaccgagctgaatcaatggttgctttccaccgtgacgggaacaattgccatggggccgttcttcctcactctattatcgtatttctatattattacttacctgtttttcaaaactcgaagctgtagcatgctctgcaaggccctcagcacttgcgcctcccattttatggtggtgatactgttttacgccccagtgctattcacgtatatccacccggctctggagtctttcatggaccaagacaggattgtggcaatcatgtatactgttgtgactccagtcctgaatcccctgatctatacgctgcgcaacaaagaggtgaaaggagcactcgggcgcgtgattagaaggctttag

SEQ ID NO: 176740 - DNA, 924 bp, Artificial Sequence
  derived and/or modified sequence
atgctgaacaccacctctgtgacagagttcctgctgctgggcgtgacagacatccaggagctgcagcccttcctgtttgtggtgttcctgaccatctacttcatctctgtgactggaaatggagctgtgctgatgatcgtcatcagtgacccccggctgcacagcctgatgtacttcttcctgggcaacctgagctacctggacatctgctacagcacagtgaccctgcccaagatgctgcagaacttcctgagcacccacaaggccatctccttcctgggctgcatcagccagctgcacttcttccacttcctgggcagcacagagagcatgctgtttgctgtgatggcctttgacctgtctgtggccatctgcaagcccctgcgctacaccgtcatcatgaacccccagctgtgcacccagatggccatcaccatctgggtgattggcttcttccacgccctgctgcacagcgtgatgaccagccggctgaacttctgtggcagcaaccgcatccaccacttcctgtgtgacatcaagcccctgctgaagctggcctgtggcaacacagagctgaaccagtggctgctgagcacagtgacaggcaccatcgccatgggccccttcttcctgaccctgctgagctacttctacatcatcacctacctgttcttcaagaccaggagctgcagcatgctgtgcaaggccctgagcacctgtgccagccacttcatggtggtgatcctcttctacgcccctgtgctcttcacctacatccacccagccctggagagcttcatggaccaggaccgcatcgtggccatcatgtacacagtggtgacccctgtgctgaaccccctcatctacaccctgaggaacaaggaggtgaagggggccctgggccgggtcatccggcggctgtag

SEQ ID NO: 176741 - DNA, 924 bp, Artificial Sequence
  derived and/or modified sequence
atgctgaacaccaccagcgtgaccgagttcctgctgctgggcgtgaccgatatacaggagctgcagccatttctgtttgttgtcttcctgaccatttattttatttctgtgaccggtaatggcgccgtcctcatgattgtgatctccgatcctaggctgcacagccttatgtactttttccttgggaacctgtcctacctcgacatctgctattccactgtgaccctgcccaagatgctgcagaatttcctctccacccataaagccatctcttttctcggctgtatctcccagctccatttcttccacttcctgggatccacagagagcatgctgtttgctgtgatggctttcgacctctcggttgccatttgcaaaccactccggtatactgtcatcatgaatccccaactttgcacccagatggccatcactatttgggtaattggattttttcatgcgttgttgcatagcgtaatgacctctagacttaacttctgcggatcaaaccgaatacaccatttcctatgcgacatcaagccgctgttgaagttagcatgtgggaacacggagcttaaccagtggctcttatccaccgtgaccggcacaatcgccatggggccatttttcctgacactgctgagctacttctatatcatcacctatttgttttttaagacccgctcgtgctcaatgctgtgtaaagcactgtccacgtgcgccagccattttatggtggtcattctcttttacgcccccgtactgtttacctacatccacccagcgttggagagctttatggatcaggaccggattgtggctataatgtatactgttgtgacccccgtcctcaatcctttgatctatactttgcggaataaagaggtgaagggggcactgggaagggtcattcggaggctgtag

SEQ ID NO: 176742 - DNA, 924 bp, Artificial Sequence
  derived and/or modified sequence
atgctgaacaccaccagcgtgaccgagttcctgctgctgggcgtgaccgacatccaggagctgcagcccttcctgtttgtggtcttcttgactatctactttatttcagtcactggtaatggagcggtcctcatgatagttatatccgacccaagactgcattccctgatgtattttttcctgggaaatctgtcatacttagatatctgttattccacagtgactttgcctaagatgctgcagaattttctgtcgactcacaaagcaataagtttcttaggctgcatcagccagcttcatttcttccactttctcggatctactgagagtatgctcttcgccgttatggcctttgacctgagtgtggcaatttgtaaacctctcagatacaccgttatcatgaatccacagctctgcacccagatggctattactatttgggtgattggcttctttcatgccttgctacatagtgtaatgaccagcaggctgaatttttgtggctcgaacaggattcaccacttcttgtgcgatattaaacccctgctgaagttggcctgcggaaataccgaattgaaccaatggctcctgagcaccgtcactggaacaattgcaatgggcccgttttttcttaccctattaagctacttctacatcattacctatctttttttcaagacacgatcctgtagcatgttgtgtaaggccttgtcaacatgtgcaagccacttcatggtggtcatcctcttctatgcccctgtgctgtttacctacattcatcccgcccttgagtcttttatggatcaggacagaatcgtggccattatgtataccgtggtgacaccagtcttgaatcctctaatctacactctgagaaataaagaagtgaaaggagctctgggccgggtgattcgccggttgtag

SEQ ID NO: 176743 - DNA, 924 bp, Artificial Sequence
  derived and/or modified sequence
atgctgaacaccaccagcgtgaccgagttcctgctgctgggcgtgaccgatatccaggagctccagccattcttgtttgttgtattcttgacaatttacttcattagcgtgaccggcaatggggcagtactgatgatcgttatctcagatccccgtctacattctttgatgtacttctttctagggaaccttagctacttagacatctgctatagtacagttactcttccaaagatgctgcagaatttcctatctacgcataaggccatctcatttctggggtgtatctcccaattgcattttttccatttcctgggtagtacagagtcaatgttgtttgcggttatggcatttgacttgtccgtggccatttgtaaacctctaagatacaccgtcattatgaatccccaactttgcacgcagatggcaattaccatctgggtgattgggttttttcatgcactgctgcattcggttatgacaagccgcctgaacttttgcggatccaaccgaatccatcacttcctgtgcgatattaagccactcttgaagctcgcctgcgggaatacagagctaaaccagtggttgctgagcactgttaccggcaccattgcaatgggtcccttcttccttactctgttgagctacttctatatcattacctatctgttttttaaaacccgaagttgctctatgctgtgcaaagcgctgtccacttgcgccagccactttatggtggtgatactgttttacgccccggttttgtttacttacatccatccagctctggagagctttatggaccaagaccgcattgtggccattatgtacaccgtagtgacgcctgtgctaaaccccctgatatacactctcaggaacaaagaagtgaagggcgccctgggtagggtgataaggcgtttgtag

SEQ ID NO: 176744 - DNA, 1033 bp, Artificial Sequence
  derived and/or modified sequence
gccggaaggattctgattgcgattagtgttccatagattattttgtcttttgtctgaagtgatgctgaatacaacctcagtcaccgaatttctcctcttgggagtgacagacattcaagaactgcagccttttctcttcgtggttttcctcaccatctacttcatcagtgtgactgggaatggagccgttctgatgattgtcatctccgatcctagactccattcccttatgtatttcttcctgggaaacctgtcctacctggatatctgttactctacggtgacactgccaaaaatgctgcagaactttctctctacacacaaagcaatttctttcttgggatgcataagccagcttcatttcttccacttcctgggcagcacggagtccatgttgttcgccgtgatggcatttgacctctctgtggctatctgcaagccacttcgctacactgtcatcatgaaccctcagctctgtacccagatggccatcacaatctgggtcattggttttttccatgccctgctgcactccgtaatgacttctcgcttgaacttctgtggttccaaccgtatccatcattttctctgtgatattaagccattgctaaagctggcctgtgggaacactgagcttaatcagtggctactcagtactgtcacggggacaattgccatgggccccttctttctgacacttctctcctatttctacattatcacttatctcttcttcaagacccgttcttgtagcatgctctgtaaagcactgtccacttgtgcctcccacttcatggtagttattcttttctatgcacctgttcttttcacctatatccatcctgcgttagagagcttcatggaccaggaccggattgttgccatcatgtacactgtggtcactcctgtactaaacccactgatctatactttgaggaacaaggaagtgaagggggccttgggtagagtgatcagaaggctttgatttgaataaaccagagaactctactgaggcataaataaccagcaatga

SEQ ID NO: 176745 - DNA, 924 bp, Artificial Sequence
  derived and/or modified sequence
atgctgaataccaccagcgtgacggagtttctgctgctgggggtcacagacatccaggaactacagccattcctcttcgtagtattcctgaccatctacttcatatctgtaactggtaacggtgcagtcctcatgattgtgataagcgatcctcggctccattcccttatgtactttttcctgggaaacttgtcctatttggatatttgttactctactgtgaccctgccaaagatgctgcaaaacttcctctctacgcataaggctatttcattcctggggtgcattagccaactgcacttcttccactttctagggagtaccgagtctatgctgttcgccgtcatggcattcgatctgtcagtagccatctgcaagcctctgcgctatacggttatcatgaaccctcaactctgcacacagatggccattactatctgggtgatcgggttctttcacgccctactccattccgttatgacaagccgtcttaatttttgtggctcgaatcgaatccaccacttcctctgcgacatcaaacctcttttgaagctggcctgtgggaatactgagctgaaccagtggttactgagtacagtcaccggcacgatcgccatgggtccattttttttgaccctgctcagttatttctacattattacctacttattttttaagaccaggagttgttctatgctatgtaaggcactctctacatgcgccagtcacttcatggtagttattctcttctatgcccctgttctgttcacctacatacaccctgccctggagagctttatggatcaggatcgtatcgtagccattatgtacaccgtggtcactccggtgctgaatcccctcatttacacactccgtaacaaagaggtaaaaggagccttgggcagagtcattcggagattgtag

SEQ ID NO: 176746 - DNA, 924 bp, Artificial Sequence
  derived and/or modified sequence
atgctaaacacaacaagcgttacagagtttctactgctgggggtgaccgacattcaagaacttcagcccttcctattcgttgtgtttctgacaatctacttcataagcgtcacaggcaacggggcagtgctaatgatcgttattagcgaccctcggctccactcccttatgtatttttttctcgggaatctgtcatacctggacatctgttatagcacagttacgctccccaaaatgctgcagaacttccttagcacccataaggccattagctttttagggtgcatttcacagttgcacttcttccacttcttagggtcgactgagtcgatgctgtttgcagttatggctttcgatctgtcggttgctatttgtaagcccctcagatacaccgtgatcatgaacccccaactgtgtacgcagatggccatcaccatatgggtcattggcttttttcatgccctcttgcattctgttatgacttcgaggctgaacttctgtggctccaatcgtatacatcattttctatgcgatatcaagccacttctgaaactcgcctgcggtaataccgaactcaaccaatggctcctgtctactgtgacaggcacaattgcaatgggaccattctttctgacattgttaagctacttttacataataacttatctgttctttaagactcgctcatgctctatgctttgcaaagccttatccacttgtgcctctcattttatggtcgtgatcctgttctacgcccctgtgctgttcacttatatccatccagccctggagagctttatggaccaagatagaatagtggctatcatgtatacagttgtcacaccagtgctgaaccctcttatctacactctacggaacaaggaggtgaagggagcacttggcagagttattcggaggctctag

SEQ ID NO: 176747 - DNA, 924 bp, Artificial Sequence
  derived and/or modified sequence
atgctaaacactacatcagtaaccgaattcttgctcctgggggtaacagacatccaggagttgcaaccttttctgttcgttgtattccttaccatttacttcatttccgttactgggaacggcgctgtactcatgatagtcatctcagatccacgcttgcacagcctgatgtattttttcttagggaacttatcatatctcgacatctgttacagtacggtcacattgccaaagatgcttcagaatttcctgagtacccataaagccatcagtttcctgggatgcatctcccaactccattttttccacttcctggggtcgaccgaatctatgctgttcgcagtgatggcctttgacctgtcagtagcgatatgtaaacccctgaggtatactgttatcatgaaccctcagctgtgtacccagatggcaatcacaatctgggtgatcggtttttttcatgccctgctgcactccgtgatgactagcagattgaacttttgcgggtctaatcgcatccaccacttcctgtgtgatatcaaacccctcctgaagttagcttgcggcaacacagagttgaaccagtggcttctgtcgacagtgaccggaacaatcgccatgggaccattctttttgaccctgctttcttatttctatattatcacctacctgttcttcaagacccggtcctgctccatgctatgtaaggcactttcaacctgcgcaagccacttcatggtggttatcctgttttatgctcccgttctgttcacatacattcatcctgcgttggaatcctttatggaccaggacagaattgtagcaataatgtacaccgtcgtgacacccgttctcaacccactgatttacacgctccgcaacaaggaggtaaagggcgctctcggcagggtgattcgccgtctctag

SEQ ID NO: 176748 - protein, 315 aa, Artificial Sequence
  derived and/or modified sequence
MEIVSTGNETITEFVLLGFYDIPELHFLFFIVFTAVYVFIIIGNMLIIVAVVSSQRLHKPMYIFLANLSFLDILYTSAVMPKMLEGFLQEATISVAGCLLQFFIFGSLATAECLLLAVMAYDRYLAICYPLHYPLLMGPRRYMGLVVTTWLSGFVVDGLVVALVAQLRFCGPNHIDQFYCDFMLFVGLACSDPRVAQVTTLILSVFCLTIPFGLILTSYARIVVAVLRVPAGASRRRAFSTCSSHLAVVTTFYGTLMIFYVAPSAVHSQLLSKVFSLLYTVVTPLFNPVIYTMRNKEVHQALRKILCIKQTETLD

SEQ ID NO: 176749 - protein, 315 aa, Artificial Sequence
  derived and/or modified sequence
MEIVSTGNETITEFVLLGFYDIPELHFLFFIVFTAVYVFIIIGNMLIIVAVVSSQRLHKPMYIFLANLSFLDILYTSAVMPKMLEGFLQEATISVAGCLLQFFIFGSLATAECLLLAVMAYDRYLAICYPLHYPLLMGPRRYMGLVVTTWLSGFVVDGLVVALVTQLRFCGPNHIDQFYCDFMLFVGLACSDPRVAQVTTLILSVFCLTIPFGLILTSYARIVVAVLRVPAGASRRRAFSTCSSHLAVVTTFYGTLMIFYVAPSAVHSQLLSKVFSLLYTVVTPLFNPVIYTMRNKEVHQALRKILCIKQTETLD

SEQ ID NO: 176750 - DNA, 948 bp, Artificial Sequence
  derived and/or modified sequence
atggagatcgtgagcaccggcaacgagaccatcaccgagttcgtgctgctgggcttctacgacatccccgagctgcacttcctgttcttcatcgtgttcaccgccgtgtacgtgttcatcatcatcggcaacatgctgatcatcgtggccgtggtgagcagccagagactgcacaagcccatgtacatcttcctggccaacctgagcttcctggacatcctgtacaccagcgccgtgatgcccaagatgctggagggcttcctgcaggaggccaccatcagcgtggccggctgcctgctgcagttcttcatcttcggcagcctggccaccgccgagtgcctgctgctggccgtgatggcctacgacagatacctggccatctgctaccccctgcactaccccctgctgatgggccccagaagatacatgggcctggtggtgaccacctggctgagcggcttcgtggtggacggcctggtggtggccctggtggcccagctgagattctgcggccccaaccacatcgaccagttctactgcgacttcatgctgttcgtgggcctggcctgcagcgaccccagagtggcccaggtgaccaccctgatcctgagcgtgttctgcctgaccatccccttcggcctgatcctgaccagctacgccagaatcgtggtggccgtgctgagagtgcccgccggcgccagcagaagaagagccttcagcacctgcagcagccacctggccgtggtgaccaccttctacggcaccctgatgatcttctacgtggcccccagcgccgtgcacagccagctgctgagcaaggtgttcagcctgctgtacaccgtggtgacccccctgttcaaccccgtgatctacaccatgagaaacaaggaggtgcaccaggccctgagaaagatcctgtgcatcaagcagaccgagaccctggactag

SEQ ID NO: 176751 - DNA, 948 bp, Artificial Sequence
  derived and/or modified sequence
atggagattgtcagcacgggcaatgagacaatcaccgaatttgtgttactcgggttctatgacatccctgagctgcactttttgttctttatcgtattcacagctgtgtatgtttttattatcattgggaacatgctgataattgtggccgtagtgtctagccagagattgcataagcctatgtacatctttctagctaacctttctttcctggacatcctctacacctctgcagtcatgcccaagatgctggaggggttcctgcaagaggcgacaattagtgtcgctggatgcctgcttcaattttttatattcggatccctggccacggccgagtgtctgctgctggccgtcatggcctacgaccgatatctggctatatgttacccattgcactatcctttgctcatggggcctcgaagatacatgggtctggtggttactacgtggctgtcaggttttgtagtcgacggattggtcgtggcattggtcgcccagcttaggttctgcgggcccaatcacatcgaccagttctattgcgattttatgcttttcgttggactggcttgctccgacccacgcgtggcacaggttaccactttgatcctgtccgttttctgccttacaatcccttttggattaattcttacgtcctatgctcggatcgtggtagctgtactgagagtgcctgctggcgcctctcgtagaagggcttttagcacgtgtagctcacacctggcagttgtgacaacattttacggcaccctgatgatcttttacgttgccccgagcgctgtacacagtcagctcttgtccaaagtttttagcctgctctacactgtggtgacaccactcttcaatcccgtaatctatacaatgcggaataaggaagtgcaccaggcattgagaaagattctgtgtatcaaacagaccgagacactggactag

SEQ ID NO: 176752 - DNA, 948 bp, Artificial Sequence
  derived and/or modified sequence
atggagatagtcagcaccggcaacgagacaataaccgaattcgtactgttgggcttctacgatatccctgagctgcatttcctgttctttatagttttcaccgctgtctatgtctttattatcataggaaatatgcttatcatcgtggccgtggtgtcctctcaacggctgcacaagccaatgtacatattcctcgcaaatctatccttcctggatattctttacaccagcgccgtgatgcccaaaatgctcgagggcttcctccaggaagctactatcagtgtcgctggatgcctgctgcagttcttcatcttcggctcccttgctaccgcggaatgtttactcctcgccgttatggcctatgaccggtaccttgccatatgctaccctctacactacccattgctgatggggccgcgaagatacatggggctcgtggtgacgacctggctgagcggatttgttgtagacggcctggtggtcgccctggtcgcccagctgcgtttttgcgggcctaaccatattgatcagttctattgtgattttatgttgtttgttggcctggcttgctcagatccacgcgtggctcaagtgaccaccctgattctcagcgtgttttgtctgaccatacccttcgggctcattctgacaagctatgcaaggatcgtggttgcggttctgcgggtgccagccggcgcctctcgacggcgggcctttagtacatgttcctcacacctggccgtggtaactacattttacggaaccctaatgatcttttatgtagctccatcagccgtccactctcaactcctgtcaaaggtgttcagtctcctgtataccgttgtcacacccctgtttaacccagtgatatacactatgcgtaataaggaagttcaccaagcccttcggaaaattctttgtatcaaacagaccgagactttagattag

SEQ ID NO: 176753 - DNA, 948 bp, Artificial Sequence
  derived and/or modified sequence
atggagattgtgtcaactgggaatgaaaccatcactgaatttgtgcttctggggttctatgacattcctgagctgcacttcctgtttttcattgtctttacagccgtttatgtgtttatcattatcggcaacatgctgatcattgtggctgtggtgagctcgcagcggcttcacaaaccgatgtacatcttcttggctaacctctccttcttggacatcctgtatacttccgccgtgatgcccaaaatgctcgagggattcctgcaagaagccaccatctccgtcgccggttgccttctccaatttttcatttttggatccctcgcaactgccgagtgtctgttgctggcggtaatggcctatgacaggtatctcgccatttgttaccccctacactatcccctgttgatgggcccacgccgttacatgggtttggtcgtgacaacctggttgtctggatttgtggtggatggcctcgtggtggccctggttgctcaattacgattctgcggacccaatcacattgatcaattttactgtgacttcatgctctttgtgggactggcctgcagcgacccccgcgtagcacaggtaactactctgattctcagcgtgttctgcttgacgattccgtttggccttattttaacctcctacgccaggattgtggtcgccgtgctccgagtacctgcaggggcctcacgcagacgggctttttcaacttgttccagccatctggcggtagtgaccaccttttacggtaccttgatgattttttacgtcgcccccagcgcggtacacagtcagctgctctctaaagtgtttagtctcctgtatacagtggtcacccccctgttcaatccagtgatttacacaatgagaaataaggaggtccaccaggctctgcgcaaaattctctgtatcaagcaaaccgaaaccctggattag

SEQ ID NO: 176754 - DNA, 948 bp, Artificial Sequence
  derived and/or modified sequence
atggagatcgtgagcaccgggaatgagaccatcacagagttcgtcttgctcgggttctatgatatccctgagctacattttttattcttcatagttttcactgccgtgtacgtgtttatcatcatcggcaatatgttgataatagtggccgtcgtctcttctcagaggctgcacaagcccatgtatattttccttgccaatctctcctttttagacatcctctatacatccgcagtcatgccaaagatgcttgaggggttcttacaggaagccactatttcagttgccgggtgcttactccaattcttcatctttggaagcctggctaccgcagagtgtttgcttctcgctgtaatggcatacgatcgctaccttgctatctgttatcccctccactacccacttttgatggggcctcggaggtatatgggtttggtggtaaccacttggctgagtggctttgttgtagacggactggtcgttgcactggttgcccagcttcggttttgtgggcctaaccatatcgatcagttttactgcgacttcatgctgtttgttggactggcttgcagtgatccaagagttgcacaggttactaccctgatcctgtccgtgttctgcctgaccataccgttcggactcattctcacatcctacgcccgtatcgtcgtcgccgtcctgcgcgttccagcgggggcatcgcgccgccgagcgttttcaacatgcagctctcacttagctgtcgtgactacattctatggcacactaatgattttttatgttgccccttcagcagtccattctcaactcttgtcaaaggtgttcagtcttctgtacactgtagttactccgttgtttaacccagtgatttacacaatgcggaataaagaggttcaccaggcactccggaaaattttgtgcattaaacaaacggagaccctcgactag

SEQ ID NO: 176755 - DNA, 948 bp, Artificial Sequence
  derived and/or modified sequence
atggagatcgtgtccacaggcaatgagacgattacggaattcgttctgttggggttctacgacattcccgagctgcatttccttttcttcatcgtgttcaccgcagtgtacgtctttatcataattgggaatatgctcataatcgtagcggtggtctccagtcagaggctgcataagcctatgtacatcttcttagctaacctgagctttctcgatatcctctacacaagcgccgtgatgccaaagatgctggaaggatttttgcaggaagcaaccatcagtgtggccggctgtcttttacagtttttcatttttggaagtctggctactgccgagtgtctgctgctcgccgtgatggcttatgaccgctacctagccatctgttacccacttcattaccctctgctcatggggcctaggagatacatgggtctagtggtaacaacatggctttccggattcgtcgtcgacggactggtggtagcgctagtggcacagctcagattttgcggacccaaccacattgatcagttctactgtgactttatgttatttgttggcctggcttgttccgacccgcgggtcgcgcaagtgaccactcttattttatccgttttctgcttgaccatcccatttggcctcatcctgacctcttatgctcgcatcgtcgtcgccgtcttgcgtgtgcctgcaggcgcttctcggcgaagggcatttagcacttgctctagccatctggctgttgttaccaccttctatggcacattaatgattttttacgtggccccctctgctgtgcatagccagctacttagtaaggtattcagtctgctgtacacagtggtcacaccattatttaaccccgtgatttacacaatgagaaacaaggaggtgcaccaggcactgcgaaaaatcctgtgtatcaagcagacggagacactggactag

SEQ ID NO: 176756 - DNA, 948 bp, Artificial Sequence
  derived and/or modified sequence
atggagatcgtcagcaccggaaacgagacaatcactgagttcgtactcctgggtttttatgatattccggagctccacttcttgtttttcatcgtctttacagcagtatatgtgttcatcatcataggtaacatgctgattatcgtggccgtcgtctccagccagaggctacacaagcccatgtatatttttcttgcaaacctgagcttcttggacatcctttacacctctgccgttatgccaaaaatgttggaaggatttctgcaggaggccaccattagcgtggcgggatgtttgctccagttctttatcttcggcagcctcgcgactgcagagtgtctgctcttggctgttatggcctatgacagatacctggctatctgctatccactccactatcctctgctgatggggccacggcgctacatgggcttagtcgtgacaacttggctgtccggatttgtggtcgatgggctagtggtcgccctggtggcccagctgcgcttctgtggccccaaccacatcgaccagttttactgcgatttcatgctattcgtaggcttagcttgcagtgatccccgagtagcccaggtgacgaccttgatactctctgtgttttgtctaacaataccattcgggctgattcttactagctatgccagaatcgtggtcgcggtacttcgcgtgcccgccggcgccagtcgcagaagggccttctccacttgctcttcccacctggccgtggttaccacgttttatgggacacttatgattttttacgtggcaccctcagccgtgcactcccaactgctctcaaaagtcttttcattattgtacacagtcgtcaccccactgttcaacccagtgatctatacgatgcgcaacaaggaggtgcaccaagccctgagaaagatattatgcattaagcaaacggaaacactcgactag

SEQ ID NO: 176757 - DNA, 948 bp, Artificial Sequence
  derived and/or modified sequence
atggaaatcgtttcaactggaaatgagaccattaccgagttcgttctgctggggttctacgacatccccgagctgcacttcttgttctttattgtattcactgcagtgtacgtgttcatcatcatcggcaatatgcttatcatcgtagccgtcgtgagtagccaacgattacataaaccaatgtacatcttccttgccaatttatcatttttggatatcttgtataccagcgccgtgatgcccaaaatgttggaaggttttttacaggaagctaccatctctgttgctggatgtcttctccagttctttatctttggatcccttgcgaccgcagaatgccttctgctggcagtcatggcctatgatcggtatctcgcgatatgctatcctttgcactacccactgcttatgggcccccgtcggtatatgggactcgtcgtaacaacatggttgtccggatttgttgtcgatggcttggtcgtggcgctggtcgctcagttaagattttgtggaccaaatcacattgaccaattttattgtgattttatgctatttgtcgggctcgcttgctctgatccacgagtcgcccaggtgactaccctgattctgagcgtcttttgtctgaccatcccattcggtttaatcttaacatcttacgctcgaatcgtcgtagccgtcctgcgggtgccagcaggcgccagccgtaggagggcctttagtacttgtagttcccacctcgctgtggtgacgacattttatgggactttgatgatcttttatgtggccccttctgccgtgcattctcagctgctttccaaggtgttcagcctactgtacacggtggtgacacctctgttcaatccagtcatttatacgatgaggaataaagaagtgcaccaagcactgcgcaagatcctgtgtattaagcagaccgaaacattggactag

SEQ ID NO: 176758 - DNA, 948 bp, Artificial Sequence
  derived and/or modified sequence
atggagatcgtgagcactggtaatgagaccataacagagttcgtcctgctcggattttacgatatcccagaattgcacttcctgttttttatcgtgtttaccgccgtttacgtgttcatcataatcgggaacatgcttataattgtggcggtggtgagtagtcaacgcttgcataaacctatgtatatttttttggctaacctgtcattcttagacatcctgtacacctccgccgtgatgccgaagatgttggaggggtttctgcaggaggctacaattagcgtggcagggtgccttctccaattttttatctttgggtcccttgccactgccgagtgcctgctcttggccgtcatggcctacgatcgctatctagcaatctgctaccccctccattaccctctgttgatggggccacgaagatacatggggcttgtcgtcactacatggctgagcggatttgtcgtggacgggctggtggtcgctctggtggcgcagctcaggttctgcggtcccaaccacatcgaccaattttattgtgacttcatgctttttgtgggacttgcgtgtagcgatccacgagttgcccaggtgacaactctgatcctgtctgttttctgcctgactattccctttggattgatcttaacttcgtatgccaggatagtggtggcagtgctgagagtgccagccggggcaagcagaagaagagctttctcgacttgctcatctcatttggcggtggtcacaacattttacgggacactcatgattttctatgtggcaccatccgccgtgcactctcaattgctgtcaaaggtgttttccttattatacaccgtggtaaccccgctgtttaatccggtgatatacaccatgcggaacaaagaggtccaccaggccctgcggaaaattttatgtataaaacagacagagactctggactag

SEQ ID NO: 176759 - DNA, 948 bp, Artificial Sequence
  derived and/or modified sequence
atggagatagtttctacagggaacgaaactattaccgagtttgttctactcggattctacgatatccctgagctccattttctctttttcatcgtcttcactgcagtgtatgtatttattatcattggaaacatgctaatcatcgtggccgttgtaagcagccaacggctgcataagccaatgtacatcttccttgcaaacttatctttcttagatatcctgtataccagcgccgtgatgccaaaaatgctcgaaggcttcctgcaggaagcaactatctccgtggctggctgtttgctgcagttcttcattttcggaagcctggccactgcggagtgtctgcttttagcagtgatggcttacgacagatacctggccatttgctatcccttacattatccgctgttgatgggacctcgccggtacatggggctcgtggtgacaacatggctcagcggattcgttgtggatgggttggtggttgctctagttgctcagctgcgcttctgcgggcccaatcacattgatcagttctactgcgattttatgctgttcgtcgggttggcttgtagcgatccgagggtggcccaggttacaacgttgatacttagcgtgttttgtctgaccatacctttcggcttaatactgaccagctacgctcggatcgtcgtcgccgtgctgagggtcccagcgggggcctctcgcagacgtgctttttcgacttgttcttcccacctggccgtggtgacaacgttctatggaaccctgatgatcttttacgttgccccaagcgcagtgcactcccagctcctgtctaaggtttttagtttgctgtataccgtggtcactccgttgttcaatcctgtaatctacaccatgcgcaacaaggaggttcaccaggccttgcgcaagatcctttgtataaagcagacagaaacactggattag

SEQ ID NO: 176760 - DNA, 948 bp, Artificial Sequence
  derived and/or modified sequence
atggagatcgtaagcacaggcaacgagaccataacagagtttgttctgctcgggttttatgacatccctgaacttcactttttgttctttattgtctttactgcagtgtacgtctttatcatcattgggaacatgctcataatcgtcgcggtggtgagttctcagcggctccacaaacccatgtacattttcctggccaatctctctttcctggacatactatatacttcagccgttatgcctaaaatgttggaggggttccttcaggaggccacaatttccgtcgcggggtgccttctgcagttcttcatctttggatccctggcaacagcagaatgcttgctccttgccgtgatggcctacgacaggtacctcgctatatgctacccattacactaccccctgttaatgggccctcgacgctatatggggttagtcgtgacgacttggctctccggcttcgtcgtggacgggctcgtggtggctctcgtagcccagctgcggttctgtgggcctaaccatatcgatcagttttattgcgactttatgctgttcgtgggcctggcctgttccgatccaagagtcgcccaggtgacaaccctgattctctccgttttctgtcttaccatccctttcggtctgatcctgaccagttacgcccgcatcgtggtcgccgttctgcgtgttcccgccggtgcgtcgcgtcgacgtgcgtttagcacatgtagctcccatctggcggtcgtgacaaccttttatggaaccctcatgatattttacgtagcccctagtgcggtacactcacagctattgagcaaggtattttctctattgtacacagtagtgacgcctctgtttaaccctgttatatatacaatgaggaataaggaagttcaccaggcgctgcgcaagatcctatgcattaagcagactgaaacactcgactag

SEQ ID NO: 176761 - DNA, 948 bp, Artificial Sequence
  derived and/or modified sequence
atggagatcgtatctactgggaacgagaccatcacagagttcgtccttctaggtttctacgacatccccgaactgcatttcctgtttttcatagtattcacagcagtgtacgtattcatcatcatcggcaacatgctgatcatcgttgccgtggtgagcagccaacggctccataagcctatgtatattttcctggccaacctgtccttcctggacattctgtacaccagcgctgtcatgcctaagatgcttgagggtttccttcaggaagcgacgatctcagtggccggctgcctcctgcagtttttcatttttggcagccttgccactgccgaatgcctgctcttggccgtcatggcatatgacaggtatctggctatttgctaccccttacactaccccctgctaatgggtccccggcggtatatgggcctggtggtcacaacgtggttgagcgggttcgttgtagacggcctggttgtggcactcgtggcgcaactccgtttttgcggacccaatcacatcgatcagttttactgtgactttatgctttttgtgggcctggcatgctccgatcccagggttgcgcaggtcactacccttatcctgtccgtgttttgcctgaccatcccatttggactgatactcacctcttacgcaaggattgtcgttgcagtcctcagggtccccgccggggcatcacgcaggagggcattcagtacatgttcctcgcatctggccgtggtcacaactttttatggaacactaatgattttctacgtggccccatctgcagtacatagccagctgttgtctaaagtgtttagcttgctttacaccgtagttacacctcttttcaaccccgtaatttacactatgaggaacaaggaggtccaccaggctctccggaaaatcctgtgtatcaaacaaaccgagacccttgactag

SEQ ID NO: 176762 - DNA, 948 bp, Artificial Sequence
  derived and/or modified sequence
atggaaatcgtgagcaccggcaatgagacaattactgaattcgtgctgctgggtttctatgatatacctgagctgcactttctattttttatagtgttcaccgccgtgtacgtattcattataatcggcaacatgctgataattgtagcagtggtgagtagccagcgtttacataagccaatgtacatcttcctcgctaatctgtcgttcttagacatcctgtacactagtgccgtaatgccaaaaatgctggaaggatttcttcaggaggctacaatctcagtagccggctgccttctgcagttctttatttttggaagtctggccaccgcagaatgcttgttactcgcagttatggcctacgatcggtatctggccatctgttaccctctccactacccgcttctgatggggccccggagatacatgggtctggtggtaaccacatggctgagtggtttcgttgtcgacgggctggtagtggccctagttgcgcagctgaggttctgcggtccgaatcacatcgatcagttttactgtgactttatgctctttgttgggttggcctgcagtgacccccgggtcgcacaggtgaccactctgattctcagtgtgttctgtctaactataccgttcggactgatactgaccagctatgctaggattgtggtggctgtgctacgggtcccagcgggtgcttctcgacgccgggccttttcaacctgctcatcacatctcgccgtggtgacgactttttatggtacgctgatgattttctacgtggcaccaagtgccgtgcattcacaactcctgtcaaaggtattctctcttctctatactgtcgtcacaccactctttaaccccgtgatctataccatgcgcaataaagaggtccaccaagcactcaggaaaattttatgcattaaacagaccgagacattagactag

SEQ ID NO: 176763 - DNA, 948 bp, Artificial Sequence
  derived and/or modified sequence
atggagatcgtgagtaccggcaacgagaccataaccgaattcgttctgctgggtttttacgacattcccgagctccacttccttttcttcatcgtctttaccgctgtgtatgttttcataatcatcgggaacatgttgattatcgttgccgttgtttcctcacagcgtttgcataagcccatgtacatattcctcgccaacctgagctttctggatatcctctacacctccgctgtgatgcctaaaatgctcgaaggattcctccaggaggccaccatctccgtagccggatgtctgttgcagttctttatcttcgggtcgctagccacagcagagtgtctgctactggctgtaatggcctatgatcggtatctggctatctgttatccgttacattatcccttgctgatgggtcctagacgttatatgggtttagtggtgacaacatggctgtctggatttgtggttgatggcctagtggttgccttggttgcacagttacggttctgtggtcccaatcacatagaccagttctactgcgattttatgttgtttgtgggattagcatgtagcgacccacgagtggcccaggttaccaccctgatactgtctgtgttttgcctaactatcccttttgggcttattcttacgtcgtacgcacgcattgtggttgcggtcctccgcgtgcccgcgggtgccagccgtcgccgggcgtttagcacatgcagcagtcatctggccgtcgtcaccacgttctacgggacactcatgatattttacgtcgcgccctccgccgtgcactcccagctgctcagcaaggtgttctccctgttatacaccgtcgtaactccactcttcaatcctgtaatttatacgatgcgcaacaaagaagtgcatcaggccctgagaaaaatcttatgcattaagcagactgagacccttgactag

SEQ ID NO: 176764 - DNA, 948 bp, Artificial Sequence
  derived and/or modified sequence
atggaaattgtgagtacaggaaacgagacaatcactgagttcgtcctgctcggcttctacgacattcccgagctgcacttcttgtttttcatcgtgttcactgccgtctacgtttttataatcattgggaacatgctgattattgtggcagtggtatcttctcagcgactgcataaacccatgtacatttttctcgccaatctttcattcctcgacatactgtacaccagtgccgtaatgcctaagatgctagaggggtttttgcaagaagccacgatcagcgttgctggctgtctcctccaatttttcattttcgggtcactggcaacagctgagtgcctcctgctggcagttatggcctatgaccggtatctggccatttgttatcctttacattatccccttctcatgggaccaaggcggtacatgggcctcgtggtgactacgtggttgtctgggttcgtggtggacggcctcgtggtggccctcgtggcgcagttgcggttttgtggacctaaccacatcgaccagttctattgtgacttcatgctgttcgtgggtctggcttgctcagatccccgagtcgcccaggtgacaactcttatactcagtgtattttgcttaacaatcccttttggactgattctgacctcctatgcccggattgtggtcgctgtgctgcgggtgcctgccggggcatccaggagacgcgcttttagtacgtgttccagtcacctcgccgtcgtcaccactttctacgggactttgatgatcttttatgtggcccctagcgcggttcacagtcagttactgagcaaagtgtttagtctcctttacacagttgtaacgccactatttaatcctgtgatttacaccatgaggaataaggaggtgcaccaggcactgagaaaaatcctgtgcatcaagcagactgagaccttagactag

SEQ ID NO: 176765 - DNA, 948 bp, Artificial Sequence
  derived and/or modified sequence
atggaaatcgtgagtaccgggaacgagaccatcacagaattcgtgttgctggggttttacgacattcccgaactgcacttcctattttttattgtattcactgcggtgtacgtcttcatcataatcggtaacatgcttattatcgtggccgtggttagtagccaacggctgcacaaacccatgtatatcttcttggcgaacctgtcattcctggacatcctgtacacttctgccgtaatgcctaagatgctcgagggcttcctccaggaggcgactatctctgtcgccggctgtctcctgcagttcttcatcttcggatctctggctacggccgagtgcctgcttctggccgtcatggcttacgaccgctacttagctatatgttatccactgcactaccccctgctcatgggccctcgaaggtacatgggcctagtcgtcacaacatggctgtctgggttcgtggtggacggactggtggtggcactggtggcccaattgcgtttttgcgggcccaaccatatcgaccagttttattgtgattttatgctgtttgttggactcgcatgctcagaccccagggtcgcccaggtcactactcttattctcagcgtgttctgtctgacaatcccattcggcttgatcctcacttcatatgctaggatcgtggtggcagtgttaagggtgcctgctggtgcttcacggcgccgggcctttagcacttgcagcagtcacttggcagtagtgacgactttctacgggacactgatgatcttttacgttgcccctagtgcagtgcattctcagctgcttagtaaggtgttcagcctgctgtacactgtggtcacccctctgtttaatcctgtgatctacactatgagaaataaggaggtacaccaggcactcaggaaaattttgtgcataaagcagaccgagacactcgactag

SEQ ID NO: 176766 - DNA, 948 bp, Artificial Sequence
  derived and/or modified sequence
atggagatcgtgtctactgggaatgagaccattaccgagttcgtgctgttaggcttctatgatataccagaacttcactttctcttttttatcgtattcacggctgtctacgtgttcataattatagggaacatgcttataatcgtggcagtggtgtcctcacagcgactgcacaaacccatgtacatcttcctggctaatctgtcattcctggatatactttatacttctgcagtgatgccgaagatgctcgaagggttccttcaggaggcgacaatttcagtggctggatgtctgttacagtttttcattttcggctcactagccaccgccgaatgcctgcttctcgccgtgatggcctatgaccggtaccttgctatttgttacccactgcattatcctcttctgatggggcctcgcagatatatgggtcttgtcgttaccacctggctgtctggttttgttgtcgacggcttggtggtggccttggtggcgcagctgaggttctgcgggccaaatcatatagaccagttctactgtgatttcatgctgttcgttggcctcgcatgttctgacccaagggtggctcaggtgaccaccttaatcctgagtgtattctgcctgacaattcctttcggcttgattttaacctcctacgcccgtatagttgttgccgttctgagggtccctgcaggcgcaagcagacggcgagcattttccacatgctcaagtcacctggctgtcgtcacaacattttacgggacactgatgatcttctacgtggcccctagtgccgttcatagtcaactgctgtcgaaagtcttttcacttctatacacagtcgtgactccactctttaatccagtgatctatacaatgaggaacaaggaggtccaccaggctctccgtaagatcctctgtattaagcagaccgagacactcgattag

SEQ ID NO: 176767 - DNA, 948 bp, Artificial Sequence
  derived and/or modified sequence
atggagattgtgtctactgggaatgagaccatcaccgagttcgtactcctgggcttctatgatatccccgagctgcatttcctcttctttatcgtgtttacagcagtatacgtcttcatcatcatcgggaacatgctcatcatcgtcgccgtggtcagctcccagcgacttcataagcccatgtatatcttcctggccaatctgtcatttctggatatcctgtacacaagtgcagtgatgcccaagatgctcgaagggtttcttcaagaagccacaataagcgtggcaggatgcctgctccagttctttattttcggtagcctagccacagcagaatgcctcctgctggcagtcatggcctatgatcgctacttggctatttgctacccacttcattaccccctgcttatgggcccgcggagatacatgggtttggtggttactacatggttaagcggattcgtcgtggacgggctggtagtcgctctggtcgcacagcttcggttttgtgggccgaatcatattgaccagttctactgcgactttatgctgttcgtgggcctggcttgcagcgatcctagagtggctcaggtaaccacactcattctttctgtgttctgtctgactattcctttcggccttattctgacttcttatgcccggattgtggtcgctgtgcttcgggtacctgcaggggcctcgcgaaggagggctttctctacatgcagctcccatctcgctgtggtgaccactttctacgggacactgatgattttttacgttgcaccctctgcagtgcacagccaactgctgtcgaaagtcttttccctactctatacagtggtcactccactcttcaaccctgtgatatacactatgagaaacaaggaagtgcatcaggcactccggaagattctgtgtatcaagcagaccgaaaccctcgactag

SEQ ID NO: 176768 - DNA, 948 bp, Artificial Sequence
  derived and/or modified sequence
atggaaattgtgtcaacaggcaacgaaactattactgagttcgttcttcttggcttttatgatattcctgagctgcacttcctttttttcattgtgtttactgctgtatatgtgttcatcatcatcggaaatatgctcatcatagtggcagtggtctcttcgcagcgacttcataaacccatgtatatttttctcgccaacctctcattcttagacattctatacaccagtgcagtcatgccaaagatgctggagggcttccttcaggaagcgaccatatcagtggctggatgcctgctccagtttttcatctttggttcgctcgcaactgcggagtgtctgctactggccgttatggcctacgacagatatctggcaatctgctatcctttgcattacccgctgctaatgggcccacggcggtacatggggctggtggtgactacatggttatccgggttcgtggttgacgggctagtcgtagcactcgttgctcagctccgcttctgtggaccaaaccacatcgatcagttttactgcgatttcatgctgttcgtcggcctggcttgttccgaccccagagtggctcaagtcacaaccttaattctctcagttttctgtctcacaattcctttcggcctgattctgacttcttacgcaagaattgtagtcgctgttttacgcgtacctgccggcgccagtagacgccgggccttctccacctgttcttcccatctggcagtggtgaccaccttctacggaacacttatgatcttctacgtggccccgagcgccgtgcatagccagctgctaagcaaagtcttttcactgctgtacaccgttgtcacacctctattcaacccagtgatttatacgatgagaaacaaagaggtgcatcaggccctgaggaaaattctctgtattaaacagacagagaccctggactag

SEQ ID NO: 176769 - DNA, 948 bp, Artificial Sequence
  derived and/or modified sequence
atggaaattgtttccactggtaacgaaaccatcacagagtttgtacttctgggattctatgatattcccgagttacattttctgttcttcatagtgtttaccgccgtatacgttttcatcatcatcggcaacatgttaattatcgtggccgttgtttcctcacagaggcttcacaaaccaatgtatatatttcttgccaatctctcattcctcgacatactgtacacatccgctgtgatgccgaaaatgcttgagggatttctccaggaggccacaatctctgttgcgggttgtttactgcagttttttatattcggctccctggccactgctgagtgccttctcctcgcggtgatggcctacgaccggtacttagcaatctgctatcctctgcactatcctctcttgatgggtccaaggcggtacatgggactggtagtaaccacgtggctttctggattcgtggtggacggattggtggttgcactggtcgctcagcttcggttttgcggcccaaaccatatcgaccagttttattgtgattttatgttgtttgttgggcttgcgtgctctgatccacgcgtggcacaagttacaacgcttattctgtctgtcttctgtttaacgattcccttcggtctgattctcacgagttatgcacgtatcgtggtggcagtgcttcgggtcccagctggtgcatctcgcagaagagctttttcgacctgtagcagccacctggctgtggtcacgaccttttacggcaccctgatgattttttacgttgctccatctgctgtccatagccaattgctctcaaaagtctttagcctgctgtacaccgtcgttaccccactgtttaatcccgtaatttacacaatgcggaacaaggaggtgcatcaggcgctccgcaagatcctgtgcattaagcagaccgaaactttggattag

SEQ ID NO: 176770 - DNA, 948 bp, Artificial Sequence
  derived and/or modified sequence
atggaaatcgtgtcaaccggtaatgagacaattaccgagtttgttttactcgggttctatgatatccccgagctacactttcttttcttcatcgtgttcaccgccgtgtacgtgttcatcatcattggaaatatgctgataatcgtggccgtagtatctagtcagcggctccataaacctatgtatatatttctggctaatctaagtttcctggacatcctgtacactagtgccgtaatgcccaagatgctggaagggtttttgcaagaagcgaccattagcgtggctgggtgcctgcttcaattcttcatctttggctcactggcaaccgctgagtgtctactgctggcagtgatggcctatgaccgatatctcgcaatctgttatcctctgcattatccattactgatgggccccagacggtatatgggcctagtcgtgaccacctggctgtctggctttgtggtcgacggactcgtggtggccctggtagcgcaactccgtttctgtgggcccaaccacatcgaccaattctactgcgatttcatgctgtttgtcggtctcgcttgctcagaccctagagtcgcacaggtgaccaccctgatattatctgtgttctgtctcactattccattcgggctcatcctgacttcttatgcacggatagtggtggccgtgttgagagttccagccggtgcttctaggaggagagcatttagtacctgctcctctcacctggctgtggttacaaccttttacggtaccctgatgattttctacgtcgcaccctctgcagtgcacagtcaactcctatctaaagttttctctttactgtatacagtcgtgacgcctctgttcaatccagtgatttacacgatgcgaaacaaggaggtgcaccaagctttgcgcaagattttgtgcatcaagcagaccgaaaccttggactag

SEQ ID NO: 176771 - DNA, 948 bp, Artificial Sequence
  derived and/or modified sequence
atggaaatagtgagcacgggcaatgagaccattacagagttcgtgctgcttgggttctacgacatacctgagctacatttccttttcttcattgtgttcaccgctgtatatgtcttcattatcatcggcaatatgctcattattgtcgcagtcgtcagcagccagagactgcataagcccatgtatatattcctggcgaacctgtcctttttagacatcctgtacacctctgcggtgatgcccaaaatgttggagggctttcttcaggaggctaccatcagtgttgccgggtgtctgttgcaattttttatcttcggcagtctcgcgacagccgagtgcctattattagctgtgatggcttatgatcgctacctggccatttgctaccccctacactaccccttgctgatgggtccacgtaggtatatgggcctggtggtcacgacctggttgtcagggttcgtcgtggacgggctggttgtcgctctggtggctcaactgcggttctgtgggcctaatcacattgatcagttttattgcgacttcatgctctttgtggggttggcctgcagtgatccgagggtggcccaagtgaccacgctgattctgtccgtcttctgtctgactattccgtttgggctcattttgactagctatgccaggatcgtggtggccgtgctgagagtgccagccggggcctcacgcagaagggccttttccacgtgcagttcccatctagctgtggtgacaactttttacggaactttgatgattttttatgtcgcaccctcagctgtgcattcccaactgctgtccaaggtgttctcattgctgtataccgtcgtcacacctctgttcaatccagtaatctacactatgcgcaacaaggaggtacaccaagcgctcagaaaaatcctgtgcattaaacagaccgaaaccctcgattag

SEQ ID NO: 176772 - DNA, 948 bp, Artificial Sequence
  derived and/or modified sequence
atggagatcgtgtccactggaaatgagaccatcacagaatttgtgctgctgggcttctatgacatccctgagctgcacttcctgttcttcatcgtgttcaccgctgtgtatgtgttcatcatcatcggcaacatgctgatcatcgtggccgtggtgagcagccagaggctgcacaagcccatgtacatcttcctggccaacctgtccttcctggacatcctgtacaccagcgctgtgatgcccaagatgctggagggcttcctgcaggaggccaccatctctgtggccggctgcctgctgcagttcttcatcttcggcagcctggccacagctgagtgcctgctgctggccgtgatggcctatgaccgctacctggccatctgctaccccctgcactaccccctgctgatgggcccccggcgctacatgggcctggtggtgaccacctggctgagcggctttgtggtggatggcctggtggtggccctggtggcccagctgcgcttctgtggccccaaccacatcgaccagttctactgtgacttcatgctgtttgtgggcctggcctgcagcgacccccgggtggcccaggtgaccaccctcatcctgagcgtcttctgcctgaccatccccttcggcctcatcctgaccagctatgcccgcatcgtggtggccgtgctgcgggtgcctgctggggccagcagaagaagagccttcagcacctgcagcagccacctggccgtggtgaccaccttctacggcaccctgatgatcttctacgtggcccccagcgctgtgcacagccagctgctgagcaaggtgttcagcctgctgtacacagtggtgacccccctcttcaaccctgtgatctacaccatgaggaacaaggaggtgcaccaggccctgaggaagatcctgtgcatcaagcagacagagaccctggactag

SEQ ID NO: 176773 - DNA, 2229 bp, Artificial Sequence
  derived and/or modified sequence
ctctaataacgttaggcttggtatagaagatgcagagacatgctaaaatttctcccccaattattgccaagcagaaacttggacgatcgacatggaaattgtctccacaggaaacgaaactattactgaatttgtcctccttggcttctatgacatccctgaactgcatttcttgttttttattgtattcactgctgtctatgtcttcatcatcatagggaatatgctgattattgtagcagtggttagctcccagaggctccacaaacccatgtatattttcttggcgaatctgtccttcctggatattctctacacctccgcagtgatgccaaaaatgctggagggcttcctgcaagaagcaactatctctgtggctggttgcttgctccagttctttatcttcggctctctagccacagctgaatgcttactgctggctgtcatggcatatgaccgctacctggcaatttgctacccactccactacccactcctgatggggcccagacggtacatggggctggtggtcacaacctggctctctggatttgtggtagatggactggttgtggccctggtggcccagctgaggttctgtggccccaaccacattgaccagttttactgtgactttatgcttttcgtgggcctggcttgctcggatcccagagtggctcaggtgacaactctcattctgtctgtgttctgcctcactattccttttggactgattctgacatcttatgccagaattgtggtggcagtgctgagagttcctgctggggcaagcaggagaagggctttctccacatgctcctcccacctagctgtagtgaccacattctatggaacgctcatgatcttttatgttgcaccctctgctgtccattcccagctcctctccaaggtcttctccctgctctacactgtggtcacccctctcttcaatcctgtgatctataccatgaggaacaaggaggtgcatcaggcacttcggaagattctctgtatcaaacaaactgaaacacttgattgaaggagagtaatgaagatgttattttggacttcggacacctccactggggactcttccaggatgggttggagaggagtaactttgtcttattcgaccattctctttgaactcttctgcagttatactaaaaatgaaaatgatagggcaacaattttttaacttttattttaagttcaagggtacatgtgcaggtttgttacataggtaaacttgtgtcatgggggtttactgtacagattatttcatcacccaggtattaagcctagtactcattaatcatttttcctgatcttctccctcctcccaacctccaccctcaagtaggattcagtgtgttgttcccctctatgtatccatatgttttcataatttagctcccacttatgagtgaagacatacggtatttgattttctgttcctgtgttagtttgcgaaggatagtagcctccaattccatccatgtcaaataatcaaaattatttaaactttgattagttctttattaaatatgtcataaatatttaaaaataatacagcaataccaaaataaacctagaaatattgttttttatattattgttgtatgacatttaaaaatttctttctatgtgtatttatatttatacatacaagttggatcatggagtttgtaatctggttttccactgaacactgtgtcacgaacaactttttctattaacaagcatctatttctttattcttctgggcttcatcgtatggctaaacatgatttgttattctattttgggaatttttagttgtattctattcttttactgtacattgtttacatctggattttcctgtaataaacttttagcacctaaattgcaagatctaaggatatgtgtttttaaaaatctaaagctgaattccttttcttttaaacttcttttcttgtagaacatttcaaacatacataaaagagaagagcacagtgaacccccatgtactccatgtagccaccatccagcttcaacatcaacattttgctaatcttattttaattagctacagctccttgtttgttagttttcatggaaaattttagggcaaattccagatgttgtataactattatgttgtgtaagttatgtatgtacatattccacatatgtatttagtataatctgtgactaataaagacattttaaaaaaccatgcccaca

SEQ ID NO: 176774 - DNA, 2482 bp, Artificial Sequence
  derived and/or modified sequence
caactcttaattggccctcaaaacttagcctacttgcttctatcttcagaaagccttccccgaccttgatcccacaccttctgccccacaaccccaggctgggtttggtccttctctgctcccatggcacctacttccttccctattaccatttaccacattttcactaccaactcctgaatgacttgatgaaactactatttaaggaaggcaataagtgaagaatatataagaattatccgaggaacagttgctctaataacgttaggcttggtatagaagatgcagagacatgctaaaatttctcccccaattattgccaagcagaaacttggacgatcgacatggaaattgtctccacaggaaacgaaactattactgaatttgtcctccttggcttctatgacatccctgaactgcatttcttgttttttattgtattcactgctgtctatgtcttcatcatcatagggaatatgctgattattgtagcagtggttagctcccagaggctccacaaacccatgtatattttcttggcgaatctgtccttcctggatattctctacacctccgcagtgatgccaaaaatgctggagggcttcctgcaagaagcaactatctctgtggctggttgcttgctccagttctttatcttcggctctctagccacagctgaatgcttactgctggctgtcatggcatatgaccgctacctggcaatttgctacccactccactacccactcctgatggggcccagacggtacatggggctggtggtcacaacctggctctctggatttgtggtagatggactggttgtggccctggtggcccagctgaggttctgtggccccaaccacattgaccagttttactgtgactttatgcttttcgtgggcctggcttgctcggatcccagagtggctcaggtgacaactctcattctgtctgtgttctgcctcactattccttttggactgattctgacatcttatgccagaattgtggtggcagtgctgagagttcctgctggggcaagcaggagaagggctttctccacatgctcctcccacctagctgtagtgaccacattctatggaacgctcatgatcttttatgttgcaccctctgctgtccattcccagctcctctccaaggtcttctccctgctctacactgtggtcacccctctcttcaatcctgtgatctataccatgaggaacaaggaggtgcatcaggcacttcggaagattctctgtatcaaacaaactgaaacacttgattgaaggagagtaatgaagatgttattttggacttcggacacctccactggggactcttccaggatgggttggagaggagtaactttgtcttattcgaccattctctttgaactcttctgcagttatactaaaaatgaaaatgatagggcaacaattttttaacttttattttaagttcaagggtacatgtgcaggtttgttacataggtaaacttgtgtcatgggggtttactgtacagattatttcatcacccaggtattaagcctagtactcattaatcatttttcctgatcttctccctcctcccaacctccaccctcaagtaggattcagtgtgttgttcccctctatgtatccatatgttttcataatttagctcccacttatgagtgaagacatacggtatttgattttctgttcctgtgttagtttgcgaaggatagtagcctccaattccatccatgtcaaataatcaaaattatttaaactttgattagttctttattaaatatgtcataaatatttaaaaataatacagcaataccaaaataaacctagaaatattgttttttatattattgttgtatgacatttaaaaatttctttctatgtgtatttatatttatacatacaagttggatcatggagtttgtaatctggttttccactgaacactgtgtcacgaacaactttttctattaacaagcatctatttctttattcttctgggcttcatcgtatggctaaacatgatttgttattctattttgggaatttttagttgtattctattcttttactgtacattgtttacatctggattttcctgtaataaacttttagcacctaaattgcaagatctaaggatatgtgtttttaaaaatctaaagctgaattccttttcttttaaacttcttttcttgtagaacatttcaaacatacataaaagagaagagcacagtgaacccccatgtactccatgtagccaccatccagcttcaacatcaacattttgctaatcttattttaattagctacagctccttgtttgttagttttcatggaaaattttagggcaaattccagatgttgtataactattatgttgtgtaagttatgtatgtacatattccacatatgtatttagtataatctgtgactaataaagacattttaaaaaaccatgcccaca

SEQ ID NO: 176775 - DNA, 2611 bp, Artificial Sequence
  derived and/or modified sequence
catcctagcagtgaatggaaacacacatatggggagaaactaaggctccctactaaaaacgtgcaacatgtgactgggacatcttgttgagctcaagcagggagggagctgaaggtaggaaattccaacattctgaagtcttcagcaaatcttagcagatcatctcctcctcacagtcctgtctttagagaacagggtcgatatttcgggaatcctatagaaagactccaagcctcagaatgagtttggaccagataaaataatctagagttaaagatggcccacatagggagtgccagattcactcacaaggaaatgcagatgggatcaaaggttaataaacacatattgctttgaatagcatatgaaaaccttccagcagctctaataacgttaggcttggtatagaagatgcagagacatgctaaaatttctcccccaattattgccaagcagaaacttggacgatcgacatggaaattgtctccacaggaaacgaaactattactgaatttgtcctccttggcttctatgacatccctgaactgcatttcttgttttttattgtattcactgctgtctatgtcttcatcatcatagggaatatgctgattattgtagcagtggttagctcccagaggctccacaaacccatgtatattttcttggcgaatctgtccttcctggatattctctacacctccgcagtgatgccaaaaatgctggagggcttcctgcaagaagcaactatctctgtggctggttgcttgctccagttctttatcttcggctctctagccacagctgaatgcttactgctggctgtcatggcatatgaccgctacctggcaatttgctacccactccactacccactcctgatggggcccagacggtacatggggctggtggtcacaacctggctctctggatttgtggtagatggactggttgtggccctggtggcccagctgaggttctgtggccccaaccacattgaccagttttactgtgactttatgcttttcgtgggcctggcttgctcggatcccagagtggctcaggtgacaactctcattctgtctgtgttctgcctcactattccttttggactgattctgacatcttatgccagaattgtggtggcagtgctgagagttcctgctggggcaagcaggagaagggctttctccacatgctcctcccacctagctgtagtgaccacattctatggaacgctcatgatcttttatgttgcaccctctgctgtccattcccagctcctctccaaggtcttctccctgctctacactgtggtcacccctctcttcaatcctgtgatctataccatgaggaacaaggaggtgcatcaggcacttcggaagattctctgtatcaaacaaactgaaacacttgattgaaggagagtaatgaagatgttattttggacttcggacacctccactggggactcttccaggatgggttggagaggagtaactttgtcttattcgaccattctctttgaactcttctgcagttatactaaaaatgaaaatgatagggcaacaattttttaacttttattttaagttcaagggtacatgtgcaggtttgttacataggtaaacttgtgtcatgggggtttactgtacagattatttcatcacccaggtattaagcctagtactcattaatcatttttcctgatcttctccctcctcccaacctccaccctcaagtaggattcagtgtgttgttcccctctatgtatccatatgttttcataatttagctcccacttatgagtgaagacatacggtatttgattttctgttcctgtgttagtttgcgaaggatagtagcctccaattccatccatgtcaaataatcaaaattatttaaactttgattagttctttattaaatatgtcataaatatttaaaaataatacagcaataccaaaataaacctagaaatattgttttttatattattgttgtatgacatttaaaaatttctttctatgtgtatttatatttatacatacaagttggatcatggagtttgtaatctggttttccactgaacactgtgtcacgaacaactttttctattaacaagcatctatttctttattcttctgggcttcatcgtatggctaaacatgatttgttattctattttgggaatttttagttgtattctattcttttactgtacattgtttacatctggattttcctgtaataaacttttagcacctaaattgcaagatctaaggatatgtgtttttaaaaatctaaagctgaattccttttcttttaaacttcttttcttgtagaacatttcaaacatacataaaagagaagagcacagtgaacccccatgtactccatgtagccaccatccagcttcaacatcaacattttgctaatcttattttaattagctacagctccttgtttgttagttttcatggaaaattttagggcaaattccagatgttgtataactattatgttgtgtaagttatgtatgtacatattccacatatgtatttagtataatctgtgactaataaagacattttaaaaaaccatgcccaca

SEQ ID NO: 176776 - DNA, 2482 bp, Artificial Sequence
  derived and/or modified sequence
caactcttaattggccctcaaaacttagcctacttgcttctatcttcagaaagccttccccgaccttgatcccacaccttctgccccacaaccccaggctgggtttggtccttctctgctcccatggcacctacttccttccctattaccatttaccacattttcactaccaactcctgaatgacttgatgaaactactatttaaggaaggcaataagtgaagaatatataagaattatccgaggaacagttgctctaataacgttaggcttggtatagaagatgcagagacatgctaaaatttctcccccaattattgccaagcagaaacttggacgatcgacatggaaattgtctccacaggaaacgaaactattactgaatttgtcctccttggcttctatgacatccctgaactgcatttcttgttttttattgtattcactgctgtctatgtcttcatcatcatagggaatatgctgattattgtagcagtggttagctcccagaggctccacaaacccatgtatattttcttggcgaatctgtccttcctggatattctctacacctccgcagtgatgccaaaaatgctggagggcttcctgcaagaagcaactatctctgtggctggttgcttgctccagttctttatcttcggctctctagccacagctgaatgcttactgctggctgtcatggcatatgaccgctacctggcaatttgctacccactccactacccactcctgatggggcccagacggtacatggggctggtggtcacaacctggctctctggatttgtggtagatggactggttgtggccctggtggcccagctgaggttctgtggccccaaccacattgaccagttttactgtgactttatgcttttcgtgggcctggcttgctcggatcccagagtggctcaggtgacaactctcattctgtctgtgttctgcctcactattccttttggactgattctgacatcttatgccagaattgtggtggcagtgctgagagttcctgctggggcaagcaggagaagggctttctccacatgctcctcccacctagctgtagtgaccacattctatggaacgctcatgatcttttatgttgcaccctctgctgtccattcccagctcctctccaaggtcttctccctgctctacactgtggtcacccctctcttcaatcctgtgatctataccatgaggaacaaggaggtgcatcaggcacttcggaagattctctgtatcaaacaaactgaaacacttgattgaaggagagtaatgaagatgttattttggacttcggacacctccattggggactcttccaggatgggttggagaggagtaactttgtcttattcgaccattctctttgaactcttctgcagttatactaaaaatgaaaatgatagggcaacaattttttaacttttattttaagttcaagggtacatgtgcaggtttgttacataggtaaacttgtgtcatgggggtttactgtacagattatttcatcacccaggtattaagcctagtactcattaatcatttttcctgatcttctccctcctcccaacctccaccctcaagtaggattcagtgtgttgttcccctctatgtatccatatgttttcataatttagctcccacttatgagtgaagacatacggtatttgattttctgttcctgtgttagtttgcgaaggatagtagcctccaattccatccatgtcaaataatcaaaattatttaaactttgattagttctttattaaatatgtcataaatatttaaaaataatacagcaataccaaaataaacctagaaatattgttttttatattattgttgtatgacatttaaaaatttctttctatgtgtatttatatttatacatacaagttggatcatggagtttgtaatctggttttccactgaacactgtgtcacgaacaactttttctattaacaagcatctatttctttattcttctgggcttcatcgtatggctaaacatgatttgttattctattttgggaatttttagttgtattctattcttttactgtacattgtttacatctggattttcctgtaataaacttttagcacctaaattgcaagatctaaggatatgtgtttttaaaaatctaaagctgaattccttttcttttaaacttcttttcttgtagaacatttcaaacatacataaaagagaagagcacagtgaacccccatgtactccatgtagccaccatccagcttcaacatcaacattttgctaatcttattttaattagctacagctccttgtttgttagttttcatggaaaattttagggcaaattccagatgttgtataactattatgttgtgtaagttatgtatgtacatattccacatatgtatttagtataatctgtgactaataaagacattttaaaaaaccatgcccaca

SEQ ID NO: 176777 - DNA, 2611 bp, Artificial Sequence
  derived and/or modified sequence
catcctagcagtgaatggaaacacacatatggggagaaactaaggctccctactaaaaacgtgcaacatgtgactgggacatcttgttgagctcaagcagggagggagctgaaggtaggaaattccaacattctgaagtcttcagcaaatcttagcagatcatctcctcctcacagtcctgtctttagagaacagggtcgatatttcgggaatcctatagaaagactccaagcctcagaatgagtttggaccagataaaataatctagagttaaagatggcccacatagggagtgccagattcactcacaaggaaatgcagatgggatcaaaggttaataaacacatattgctttgaatagcatatgaaaaccttccagcagctctaataacgttaggcttggtatagaagatgcagagacatgctaaaatttctcccccaattattgccaagcagaaacttggacgatcgacatggaaattgtctccacaggaaacgaaactattactgaatttgtcctccttggcttctatgacatccctgaactgcatttcttgttttttattgtattcactgctgtctatgtcttcatcatcatagggaatatgctgattattgtagcagtggttagctcccagaggctccacaaacccatgtatattttcttggcgaatctgtccttcctggatattctctacacctccgcagtgatgccaaaaatgctggagggcttcctgcaagaagcaactatctctgtggctggttgcttgctccagttctttatcttcggctctctagccacagctgaatgcttactgctggctgtcatggcatatgaccgctacctggcaatttgctacccactccactacccactcctgatggggcccagacggtacatggggctggtggtcacaacctggctctctggatttgtggtagatggactggttgtggccctggtggcccagctgaggttctgtggccccaaccacattgaccagttttactgtgactttatgcttttcgtgggcctggcttgctcggatcccagagtggctcaggtgacaactctcattctgtctgtgttctgcctcactattccttttggactgattctgacatcttatgccagaattgtggtggcagtgctgagagttcctgctggggcaagcaggagaagggctttctccacatgctcctcccacctagctgtagtgaccacattctatggaacgctcatgatcttttatgttgcaccctctgctgtccattcccagctcctctccaaggtcttctccctgctctacactgtggtcacccctctcttcaatcctgtgatctataccatgaggaacaaggaggtgcatcaggcacttcggaagattctctgtatcaaacaaactgaaacacttgattgaaggagagtaatgaagatgttattttggacttcggacacctccattggggactcttccaggatgggttggagaggagtaactttgtcttattcgaccattctctttgaactcttctgcagttatactaaaaatgaaaatgatagggcaacaattttttaacttttattttaagttcaagggtacatgtgcaggtttgttacataggtaaacttgtgtcatgggggtttactgtacagattatttcatcacccaggtattaagcctagtactcattaatcatttttcctgatcttctccctcctcccaacctccaccctcaagtaggattcagtgtgttgttcccctctatgtatccatatgttttcataatttagctcccacttatgagtgaagacatacggtatttgattttctgttcctgtgttagtttgcgaaggatagtagcctccaattccatccatgtcaaataatcaaaattatttaaactttgattagttctttattaaatatgtcataaatatttaaaaataatacagcaataccaaaataaacctagaaatattgttttttatattattgttgtatgacatttaaaaatttctttctatgtgtatttatatttatacatacaagttggatcatggagtttgtaatctggttttccactgaacactgtgtcacgaacaactttttctattaacaagcatctatttctttattcttctgggcttcatcgtatggctaaacatgatttgttattctattttgggaatttttagttgtattctattcttttactgtacattgtttacatctggattttcctgtaataaacttttagcacctaaattgcaagatctaaggatatgtgtttttaaaaatctaaagctgaattccttttcttttaaacttcttttcttgtagaacatttcaaacatacataaaagagaagagcacagtgaacccccatgtactccatgtagccaccatccagcttcaacatcaacattttgctaatcttattttaattagctacagctccttgtttgttagttttcatggaaaattttagggcaaattccagatgttgtataactattatgttgtgtaagttatgtatgtacatattccacatatgtatttagtataatctgtgactaataaagacattttaaaaaaccatgcccaca

SEQ ID NO: 176778 - DNA, 2482 bp, Artificial Sequence
  derived and/or modified sequence
caactcttaattggccctcaaaacttagcctacttgcttctatcttcagaaagccttccccgaccttgatcccacaccttctgccccacaaccccaggctgggtttggtccttctctgctcccatggcacctacttccttcgctattaccatttaccacattttcactaccaactcctgaatgacttgatgaaactactatttaaggaaggcaataagtgaagaatatataagaattatccgaggaacagttgctctaataacgttaggcttggtatagaagatgcagagacatgctaaaatttctcccccaattattgccaagcagaaacttggacgatcgacatggaaattgtctccacaggaaacgaaactattactgaatttgtcctccttggcttctatgacatccctgaactgcatttcttgttttttattgtattcactgctgtctatgtcttcatcatcatagggaatatgctgattattgtagcagtggttagctcccagaggctccacaaacccatgtatattttcttggcgaatctgtccttcctggatattctctacacctccgcagtgatgccaaaaatgctggagggcttcctgcaagaagcaactatctctgtggctggttgcttgctccagttctttatcttcggctctctagccacagctgaatgcttactgctggctgtcatggcatatgaccgctacctggcaatttgctacccactccactacccactcctgatggggcccagacggtacatggggctggtggtcacaacctggctctctggatttgtggtagatggactggttgtggccctggtggcccagctgaggttctgtggccccaaccacattgaccagttttactgtgactttatgcttttcgtgggcctggcttgctcggatcccagagtggctcaggtgacaactctcattctgtctgtgttctgcctcactattccttttggactgattctgacatcttatgccagaattgtggtggcagtgctgagagttcctgctggggcaagcaggagaagggctttctccacatgctcctcccacctagctgtagtgaccacattctatggaacgctcatgatcttttatgttgcaccctctgctgtccattcccagctcctctccaaggtcttctccctgctctacactgtggtcacccctctcttcaatcctgtgatctataccatgaggaacaaggaggtgcatcaggcacttcggaagattctctgtatcaaacaaactgaaacacttgattgaaggagagtaatgaagatgttattttggacttcggacacctccattggggactcttccaggatgggttggagaggagtaactttgtcttattcgaccattctctttgaactcttctgcagttatactaaaaatgaaaatgatagggcaacaattttttaacttttattttaagttcaagggtacatgtgcaggtttgttacataggtaaacttgtgtcatgggggtttactgtacagattatttcatcacccaggtattaagcctagtactcattaatcatttttcctgatcttctccctcctcccaacctccaccctcaagtaggattcagtgtgttgttcccctctatgtatccatatgttttcataatttagctcccacttatgagtgaagacatacggtatttgattttctgttcctgtgttagtttgcgaaggatagtagcctccaattccatccatgtcaaataatcaaaattatttaaactttgattagttctttattaaatatgtcataaatatttaaaaataatacagcaataccaaaataaacctagaaatattgttttttatattattgttgtatgacatttaaaaatttctttctatgtgtatttatatttatacatacaagttggatcatggagtttgtaatctggttttccactgaacactgtgtcacgaacaactttttctattaacaagcatctatttctttattcttctgggcttcatcgtatggctaaacatgatttgttattctattttgggaatttttagttgtattctattcttttactgtacattgtttacatctggattttcctgtaataaacttttagcacctaaattgcaagatctaaggatatgtgtttttaaaaatctaaagctgaattccttttcttttaaacttcttttcttgtagaacatttcaaacatacataaaagagaagagcacagtgaacccccatgtactccatgtagccaccatccagcttcaacatcaacattttgctaatcttattttaattagctacagctccttgtttgttagttttcatggaaaattttagggcaaattccagatgttgtataactattatgttgtgtaagttatgtatgtacatattccacatatgtatttagtataatctgtgactaataaagacattttaaaaaaccatgcccaca

SEQ ID NO: 176779 - DNA, 2229 bp, Artificial Sequence
  derived and/or modified sequence
ctctaataacgttaggcttggtatagaagatgcagagacatgctaaaatttctcccccaattattgccaagcagaaacttggacgatcgacatggaaattgtctccacaggaaacgaaactattactgaatttgtcctccttggcttctatgacatccctgaactgcatttcttgttttttattgtattcactgctgtctatgtcttcatcatcatagggaatatgctgattattgtagcagtggttagctcccagaggctccacaaacccatgtatattttcttggcgaatctgtccttcctggatattctctacacctccgcagtgatgccaaaaatgctggagggcttcctgcaagaagcaactatctctgtggctggttgcttgctccagttctttatcttcggctctctagccacagctgaatgcttactgctggctgtcatggcatatgaccgctacctggcaatttgctacccactccactacccactcctgatggggcccagacggtacatggggctggtggtcacaacctggctctctggatttgtggtagatggactggttgtggccctggtggcccagctgaggttctgtggccccaaccacattgaccagttttactgtgactttatgcttttcgtgggcctggcttgctcggatcccagagtggctcaggtgacaactctcattctgtctgtgttctgcctcactattccttttggactgattctgacatcttatgccagaattgtggtggcagtgctgagagttcctgctggggcaagcaggagaagggctttctccacatgctcctcccacctagctgtagtgaccacattctatggaacgctcatgatcttttatgttgcaccctctgctgtccattcccagctcctctccaaggtcttctccctgctctacactgtggtcacccctctcttcaatcctgtgatctataccatgaggaacaaggaggtgcatcaggcacttcggaagattctctgtatcaaacaaactgaaacacttgattgaaggagagtaatgaagatgttattttggacttcggacacctccattggggactcttccaggatgggttggagaggagtaactttgtcttattcgaccattctctttgaactcttctgcagttatactaaaaatgaaaatgatagggcaacaattttttaacttttattttaagttcaagggtacatgtgcaggtttgttacataggtaaacttgtgtcatgggggtttactgtacagattatttcatcacccaggtattaagcctagtactcattaatcatttttcctgatcttctccctcctcccaacctccaccctcaagtaggattcagtgtgttgttcccctctatgtatccatatgttttcataatttagctcccacttatgagtgaagacatacggtatttgattttctgttcctgtgttagtttgcgaaggatagtagcctccaattccatccatgtcaaataatcaaaattatttaaactttgattagttctttattaaatatgtcataaatatttaaaaataatacagcaataccaaaataaacctagaaatattgttttttatattattgttgtatgacatttaaaaatttctttctatgtgtatttatatttatacatacaagttggatcatggagtttgtaatctggttttccactgaacactgtgtcacgaacaactttttctattaacaagcatctatttctttattcttctgggcttcatcgtatggctaaacatgatttgttattctattttgggaatttttagttgtattctattcttttactgtacattgtttacatctggattttcctgtaataaacttttagcacctaaattgcaagatctaaggatatgtgtttttaaaaatctaaagctgaattccttttcttttaaacttcttttcttgtagaacatttcaaacatacataaaagagaagagcacagtgaacccccatgtactccatgtagccaccatccagcttcaacatcaacattttgctaatcttattttaattagctacagctccttgtttgttagttttcatggaaaattttagggcaaattccagatgttgtataactattatgttgtgtaagttatgtatgtacatattccacatatgtatttagtataatctgtgactaataaagacattttaaaaaaccatgcccaca

SEQ ID NO: 176780 - DNA, 948 bp, Artificial Sequence
  derived and/or modified sequence
atggagatcgtgagcaccggcaacgagaccatcaccgagttcgtgctgctcggattctatgacatccccgagcttcactttctcttttttattgtgttcacagcagtatatgtatttatcattatcggcaatatgctcataatagtggcagtggtgagctctcagcgtctgcacaagcccatgtatattttcctggcgaatttgtcttttctggatatactttacacgtcagccgtgatgccaaagatgttagagggcttcctgcaggaggccaccattagtgtcgccgggtgtctgctgcagttctttatcttcggtagtctagccaccgctgagtgcctgctcctcgctgtgatggcttatgacagataccttgctatttgttaccctctgcactacccattactgatgggcccaaggcggtacatgggcctggtggtgacgacttggttgagcggctttgtggtggacgggctcgtcgttgcactggtggcacagttaaggttttgcgggcctaatcacatagaccaattctactgtgatttcatgttgttcgtggggctggcatgtagtgaccctcgggtggcccaagtgacgactcttatcctttccgtgttttgcctcacaatccccttcggactgatcttgactagttatgcacgtattgtcgtggcggtgctcagggttccggcaggcgcctctcggaggcgcgcattcagcacatgtagctcccacctggccgtggttacgaccttctatggcaccctcatgattttctacgtcgcacccagcgccgtacacagccaattgttatccaaagtgttctccctgttgtatactgtcgtgacacccctgttcaaccctgtgatctacacgatgcggaacaaggaagtgcatcaggcactgaggaaaatactctgtatcaagcagacggaaacgctcgactag

SEQ ID NO: 176781 - DNA, 948 bp, Artificial Sequence
  derived and/or modified sequence
atggagatcgtgagcaccggcaacgagaccatcaccgagttcgtgctgctcggcttctacgatattccagagcttcacttcctgttcttcattgtgtttaccgctgtttatgtcttcattatcatcggcaatatgctcattatcgtcgcagtggtgagctctcagcggctgcataagcccatgtatatattcctggcgaatcttagctttctagatattctgtacaccagcgctgttatgcccaaaatgcttgagggttttctccaagaagccaccatttcagtggctggctgcctgttacagtttttcatcttcggttccctcgccacagccgaatgcctgctgctagctgtcatggcatacgataggtacctggctatatgctacccactgcactaccctctgctgatgggacccaggagatacatggggctggttgttactacatggctgagtggctttgtggtagacggcctggtggtggccctggttgcccagctccgtttttgcgggcccaaccatattgaccagttttactgtgatttcatgttatttgtgggtcttgcctgcagcgacccaagagtggcacaggtcaccactctgatcctgagcgtgttttgcctgaccataccgttcggtctcattctaaccagttatgccaggatagtcgtggcagtcctcagggtccccgcaggcgcgtcacgccggagagccttttccacatgcagttcccacctggccgttgtaactacattctatggaacgctgatgatcttctacgttgctccctctgcagtccactcccagctgctgtccaaagtattttccctgctgtatacagtcgtaaccccattgtttaaccccgtgatttataccatgaggaataaagaagtgcatcaggctctgcggaagatcttatgcataaagcagaccgaaacactggactag

SEQ ID NO: 176782 - DNA, 948 bp, Artificial Sequence
  derived and/or modified sequence
atggagatcgtgagcaccggcaacgagaccatcaccgagttcgtgctattgggcttctatgatatccctgaactgcacttcctgttcttcatcgttttcacagcagtctacgtgtttatcatcatcggaaacatgctaatcatcgtggccgtcgtgagttcgcagcgcctgcacaagcccatgtacattttcctcgcgaaccttagctttctcgacatcctctacacgagtgccgtcatgcccaaaatgctggagggtttcttgcaggaagccaccattagtgtcgcaggctgcctcctgcagttcttcatcttcggtagtctcgcaactgctgagtgtctactcctggccgtcatggcgtacgaccgatatctggctatttgttatccactgcattatccactgctgatgggtccacgaagatatatgggtctcgtggtgacaacatggttgtctggctttgtggtcgacggactggtcgtcgcccttgtggcccaattgagattttgcggaccaaaccacattgaccagttttattgtgatttcatgctgttcgttggcttagcctgctccgacccacgggtggctcaggtaacaactctgatcttatctgtcttctgtttgacgatcccttttggtctgattctgacctcctatgccaggatcgtcgtggccgtgttacgagtgcctgctggagcttctagaaggcgggctttttccacatgctcctcgcacctcgccgtggtgacaacattttacggcactctgatgatcttttacgtggctccatctgccgtgcacagccaactgcttagcaaagtgttcagtctgctgtatactgtggtcaccccactcttcaatcccgtgatttataccatgagaaataaggaggtgcaccaggccctgcgtaagatcctctgtatcaagcagaccgaaaccctagattag

SEQ ID NO: 176783 - DNA, 948 bp, Artificial Sequence
  derived and/or modified sequence
atggagatcgtgagcaccggcaacgagaccatcaccgagttcgtgctcctgggattttatgacatacccgagctgcactttctttttttcatcgtgtttaccgcggtgtatgtttttatcatcattggcaacatgctgatcattgtagccgtggtcagctcccagcggctacataagcctatgtatattttcttagccaatctgtcttttctggatattctttatacctctgccgtgatgccaaagatgctcgaaggtttcctgcaagaggctaccatatccgtcgctgggtgcttactgcagttcttcattttcggctcgctggccaccgcggagtgcttgctcttagctgttatggcctacgatcgctatctggcaatctgttatccattgcattacccactgcttatgggtcctcggaggtatatgggcttagtggttacaacttggctatccgggtttgtggtagatgggctcgtggtggcccttgttgcacagttaaggttctgcgggccaaatcacatcgaccagttttactgtgatttcatgttattcgtgggactcgcttgcagcgacccgagggtggcccaggtaacaaccttgattctgtctgtcttttgcctgacaattccttttggtctgatcctgacaagttatgcacgcattgtggtggcagtcctgagagttccagccggtgcaagcaggagacgtgccttctccacgtgttcctctcacctggctgtcgttacaacattctacggtactctgatgatattctacgtggcaccgagcgccgtccactcacagctcctgagtaaggtgttctctcttctgtacaccgtggtgacacctctgttcaatccagtcatctacacaatgcgtaataaggaagtgcaccaagctctacgaaagatcctgtgtataaagcagactgaaactctggactag

SEQ ID NO: 176784 - DNA, 948 bp, Artificial Sequence
  derived and/or modified sequence
atggagatcgtgagcaccggcaacgagaccatcaccgagttcgtgctactggggttctatgacatcccagaattgcactttctgtttttcattgtgtttaccgctgtgtacgtattcattatcattgggaatatgctcatcatcgtggcagtggtgtccagtcagaggctacacaaaccaatgtacattttcctggctaacctaagctttcttgacatactctacacctccgctgttatgcctaagatgttggagggattcctgcaggaggcaacgatctctgtggcgggctgccttctgcagttctttatctttggatcactcgcaacggcagaatgccttctcttagctgtgatggcctatgacagatacctcgctatctgttaccccctccattatcccctattgatgggacctagacggtatatgggcttagtggtaaccacatggctttcagggttcgttgtggacggcctcgtggtggcactggttgcccaactgcgcttctgcggtccaaaccacatcgaccaattctattgtgatttcatgctgttcgtgggtctggcctgttcagaccccagagtggcccaggtgacaacactgattttgagtgtcttttgcctgacaatcccattcggcctgatccttacatcatacgcgagaatcgttgtggccgttctgcgcgtcccagcaggggcgagtcggcgtagagctttttcgacttgctctagtcatcttgcggtggtaaccacgttttatggaacactgatgattttctacgtcgccccaagcgccgtgcatagccaactgctctctaaggtgttttccctcctgtacacagtcgtgaccccgctttttaatccagtgatctatacgatgcgcaacaaagaggtgcatcaagctcttagaaagatcttgtgcatcaagcagactgaaactctggactag

SEQ ID NO: 176785 - DNA, 948 bp, Artificial Sequence
  derived and/or modified sequence
atggagatcgtgagcaccggcaacgagaccatcaccgagttcgtgctgctgggattctatgacatacctgagttacatttcctgttctttattgtatttacggctgtgtacgtgtttatcattatcggcaacatgctgattattgttgcggtcgtgtcgtcacaacggctccataaacctatgtatatcttcttagcaaatctatcattcctggatattctatacacgagcgccgtcatgcctaagatgctggagggatttctgcaagaagccactatcagtgtggccggctgcctgttgcagttcttcatcttcggttccctggcgaccgctgaatgcctgcttctggcagtcatggcctacgaccgctacctagctatttgttacccactgcactaccccttactcatgggccctcggcgctacatgggccttgtggtgaccacgtggctaagcggttttgtggtagacggcttggtggtggcattagttgcccagctacgtttctgtggacctaaccatattgatcagttttattgcgacttcatgctgtttgtcgggctggcgtgctctgacccacgcgtggcgcaggttactacactgatcctctccgtcttttgtctgactatcccatttggtttaatactcacttcttacgcgcgaatcgtggttgctgtgctcagggttcccgcgggtgcgagccgcagacgggccttctcaacatgcagtagccacttggctgtggtaaccaccttttatggcacccttatgatcttctacgtcgctccctctgctgttcacagccagttgctatccaaagtcttcagcctcctgtatactgtggtgacacctctgttcaatcccgtgatttataccatgaggaataaagaagttcaccaggccctgcgcaagatcctctgcatcaagcaaacggagacactggactag

SEQ ID NO: 176786 - DNA, 948 bp, Artificial Sequence
  derived and/or modified sequence
atggagatcgtgagcaccggcaacgagaccatcaccgagttcgtgctcctcggcttttacgacatccccgaactacatttcctcttcttcattgtcttcacagctgtttatgttttcatcatcattgggaacatgcttatcatcgttgccgtagttagcagtcaacggcttcacaagccaatgtacattttcttagctaacttatcattccttgatatcttgtacacctcagctgtgatgcctaaaatgctggagggattcctacaggaggcgacaattagcgtggcgggttgcctcctgcagtttttcatcttcggttccctagccacagcagaatgcttactgcttgccgtaatggcgtatgacagatacttagcaatctgttatcccctgcactatcctcttctgatgggccctaggaggtacatggggctggtggtgactacgtggctgtcaggcttcgtggtcgatggactggtcgttgcactggttgcacaactcaggttttgtggccccaaccacattgaccaattttactgtgacttcatgctcttcgtgggtctcgcttgttccgaccctagggtggcacaagtcaccactctgatcctgtcagtattctgcctcactatcccttttgggctcatcttgacatcatatgcccgcattgtggtggctgtgctcagagtgcccgcgggcgcgtcacggcgtcgcgctttcagtacgtgcagctctcacctggcagttgttactactttctacggtactctcatgatcttctacgtggcccctagcgctgtgcactcacagctgctgtctaaggtattttccctcttgtatactgtggtcacacctctttttaatcctgtgatctacaccatgcggaacaaggaggtccaccaggccctgcgcaaaatcctctgcatcaagcagaccgagacgctggattag

SEQ ID NO: 176787 - DNA, 948 bp, Artificial Sequence
  derived and/or modified sequence
atggagatcgtgagcaccggcaacgagaccatcaccgagttcgtgctcctggggttttacgacataccggagttgcactttctgttctttatcgttttcactgccgtgtacgtgtttattataataggtaatatgcttattatagttgctgttgtgtcttcacaacggctgcacaagcctatgtatatatttttggccaacctaagcttcctagatatcctctatacctccgccgtgatgcccaagatgcttgagggcttcctccaggaggctaccattagtgtggctgggtgcctgttacagttcttcatatttggttccctggccacggcggaatgcttattgttggcggttatggcttatgacagatacctggccatatgttaccccctgcactacccgttgcttatgggcccccggcgttatatgggtctggtggtaaccacatggctcagcggcttcgtggtagatggcctcgttgtagctctagtagcacagctccgattttgcggaccgaaccacatagaccagttttactgcgactttatgctctttgtggggctggcctgctcagaccctcgcgttgcccaggtgacaaccctgatactgtctgtcttctgtctaacgatccccttcggattgattctcacaagttacgccaggattgtagtcgctgtgctgagggtgccagcgggtgcttctagaagacgcgcattctcaacatgctcctcacacttagcggttgtgactactttctacggtaccctgatgatcttctacgtggccccctcagctgtacacagccagctcttgtccaaggtctttagcctactgtacactgtggttacacctctgttcaacccggtcatctataccatgcggaataaggaagtgcaccaggctctgagaaaaatcctgtgcatcaaacaaacagaaacattagattag

SEQ ID NO: 176788 - DNA, 948 bp, Artificial Sequence
  derived and/or modified sequence
atggagatcgtgagcaccggcaacgagaccatcaccgagttcgtgctgctgggcttctacgatatccctgaattacattttctattttttatagtcttcactgccgtgtacgtcttcatcataatcggaaatatgttaattatcgtagccgtcgtgagcagtcagaggctgcacaagcccatgtatatctttctggcaaacttaagcttcttagatattctctacacaagcgccgtgatgcctaaaatgttagagggttttctgcaagaagctaccataagcgtagccggttgtttgctgcaattcttcatcttcgggtccctcgcaactgccgagtgcctgctgctcgcggtgatggcttacgacagatatcttgcaatctgttacccgcttcattaccccctgctgatgggacccagacgatacatgggactcgtggtgacgacatggctctctgggtttgtagtggacggcctggtcgtggctttggtggcccagctgcggttttgtggccctaaccatattgatcaattttactgcgattttatgctgttcgttgggttggcctgttcagaccccagagtagcacaggtgactacacttatactgagcgtgttttgtctgacaattcccttcggcctcattctgacctcctatgctcgtatagtggtcgcagtcctacgagtgccagcaggtgcatctcgccgcagggctttctccacatgcagtagccacttggccgtggtgactacattctacgggactctgatgatattctatgtcgccccctccgctgtccattcacaactcttgtctaaggtgttttctctactctacaccgtggtcaccccgctgttcaatcccgtaatctataccatgcgtaataaggaagtgcaccaagctctccgaaaaattctgtgtatcaagcaaaccgaaacattggattag

SEQ ID NO: 176789 - DNA, 948 bp, Artificial Sequence
  derived and/or modified sequence
atggagatcgtgagcaccggcaacgagaccatcaccgagttcgtgctgctgggtttctatgacattcccgagctccatttcttgttctttatagtgtttacagctgtatacgtctttataatcatagggaacatgcttattatcgtggctgtggtgagctcacagagacttcataagcctatgtatatatttctggccaaccttagcttcctggacatcctttacaccagcgctgttatgcctaaaatgttggaggggttccttcaggaagccaccataagcgtggctggttgcctgctgcagttctttatctttgggtcactggctaccgctgagtgtctgctgcttgcggtaatggcgtatgatcgctatctcgccatctgttatccgctccattatcctctactaatgggcccacgcagatatatgggcttggtggtgacgacctggctgtctggctttgtggtggacggattggtggtcgctctcgtggcccagctgcgcttctgcggtccaaaccatatcgaccaattctattgcgactttatgctgttcgtgggcctagcctgtagtgacccccgcgtggcccaagtaaccacactgatcctctcagtcttttgcttgaccatcccctttggccttattctgacctcttacgcacgcatcgtggtggccgtgctgagggtgcccgccggtgcaagcaggaggcgggcattttctacttgcagcagccatctagccgtggtgacaacgttctatggcacactgatgattttctacgttgcgccttccgcagtgcatagtcagctgctctccaaggtttttagtctgctttatacagtcgtgacgccattattcaaccccgtaatttatactatgagaaacaaggaagtgcaccaagccctgcggaaaatcctctgtatcaagcagaccgaaaccttggactag

SEQ ID NO: 176790 - DNA, 948 bp, Artificial Sequence
  derived and/or modified sequence
atggagatcgtgagcaccggcaacgagaccatcaccgagttcgtgctcctgggcttttacgacatccccgagctgcatttcctcttctttattgtctttaccgccgtgtacgttttcattatcatcgggaacatgctgatcatcgtcgccgtcgtttcttctcagcgattgcacaaacctatgtatatctttctggccaatttatcattcttggatatcctctatacatctgctgtgatgcccaaaatgctcgaaggattcctgcaggaagccacaatctcagtggccggttgcttgctgcagttttttattttcggcagtctcgctacggccgagtgcctgctgctggcagtgatggcctatgacaggtacctcgccatctgttatcctctgcactaccccctcctgatgggaccaagacggtacatgggtttagtggttacaacatggctatctggctttgtcgtagacggactagtggtcgccctcgtggctcagctgaggttttgcggaccaaaccatatagaccaattctactgcgactttatgttgttcgtcggcttagcatgcagcgacccgcgcgtcgcacaagtgacgactctgatattaagtgttttttgcctgactattccatttggcttgatcctgacatcctacgcccgcatcgtagtggcagttctcagagtgccagccggcgcatcccgacgaagagccttttcaacctgctcaagccatctggctgtggtgacaaccttctacgggactctcatgattttctatgttgcccccagtgcagtccactcacagcttcttagtaaggtcttcagccttctttacactgtcgtcactccactgttcaaccctgtcatctataccatgcgtaacaaagaggtacaccaggctttaagaaaaattctgtgtataaagcagactgaaaccctggactag

SEQ ID NO: 176791 - DNA, 948 bp, Artificial Sequence
  derived and/or modified sequence
atggagatcgtgagcaccggcaacgagaccatcaccgagttcgtgctgctgggattctatgacattcccgaactacacttcttgttctttatcgtctttacagccgtatacgtatttattattatcggaaatatgctaatcatcgtggctgtcgtgtcgagccaacggctgcataaacccatgtacatcttcctagccaatctctcatttctggatatcctgtataccagcgccgttatgcccaagatgctcgaggggttcctccaggaggcgaccatttctgtggccggatgtttgctccaattcttcatcttcggatctctggcaactgccgaatgtctcctgctggccgtgatggcctatgatagatatctcgccatctgttacccactgcactacccgcttcttatgggtcctcgccggtatatgggtctggtggtgactacctggctttctggtttcgtagtggatggactagtagttgctctggtggctcagctacgcttttgtggccctaaccatatcgatcagttttattgcgactttatgcttttcgtgggtctcgcttgcagcgacccccgagtggctcaggtgactactctcatcttatcagtgttctgcctgactattccattcgggctgattctgaccagctatgcccggattgtggttgcagtgttgcgtgtgcctgccggggcctctcgcagacgcgcattctcgacttgcagctcacatctggccgtggtcaccaccttctacggcactttgatgattttctacgttgccccaagtgccgtccattcccagctcttgtcaaaggtgttcagtctgctttacacagttgttacaccactttttaatccagtgatttacaccatgagaaacaaggaggtgcaccaggctctgcggaagatcctgtgcatcaaacagacagaaacattggattag

SEQ ID NO: 176792 - DNA, 948 bp, Artificial Sequence
  derived and/or modified sequence
atggagatcgtgagcaccggcaacgagaccatcaccgagttcgtgctcctgggattctacgacatacccgaactccacttcttgttctttatcgtgtttactgcagtatacgtcttcatcatcattggaaatatgcttatcattgtggcggtggtttctagccagaggctgcacaagccaatgtatatcttcttagctaatctatctttcctggacatcctttatacctcggctgttatgcctaagatgctggagggatttctgcaggaagcaacgatttcagttgccggctgcctgcttcagttctttattttcgggagtctggccactgcagagtgcctgctcctggccgtgatggcttatgacaggtacctcgccatttgctaccctctgcattatcccctcttgatgggcccccggagatatatgggcctggttgttaccacctggctcagcggcttcgtcgtggacggccttgtggtggctctggtggcgcaacttcgattctgtggccccaaccacattgatcaattttactgcgactttatgctcttcgtgggcctcgcatgctctgaccctcgcgtcgcccaggtaacaaccctaatcctttccgttttctgtctgacgatcccttttggacttatccttacaagttacgcccgaatagtggtggcagtgctgagggtgcccgctggcgcatcaagacggcgggcattctcgacgtgcagttctcatctagcagtggtgactacattttacggaaccctgatgattttttacgtggccccctcggccgtgcactctcagctcctcagtaaggtgttcagcctgttatacactgttgtgacaccccttttcaacccagtgatttacactatgagaaataaggaagtacaccaggcattacggaagatcctttgtatcaagcagaccgaaaccctggattag

SEQ ID NO: 176793 - DNA, 948 bp, Artificial Sequence
  derived and/or modified sequence
atggagatcgtgagcaccggcaacgagaccatcaccgagttcgtgctgcttgggttttatgatatccccgagctgcactttctattttttattgtatttactgccgtatacgttttcatcattatcgggaacatgcttataatcgtcgccgtggtgtcctcccagagactgcacaaacccatgtacatcttccttgctaacttatctttcctggatatcctttacacaagtgcagtgatgcccaagatgctcgagggcttcctgcaagaggcaaccatcagtgtcgctggatgccttctgcagttctttatttttgggtccctagcaactgctgagtgcctcctgttggcggtcatggcctacgatcgttacctggccatctgctacccacttcattaccccctgttgatgggcccgaggaggtatatgggcctagtagtcacaacctggctcagcggatttgtagtcgatggcctggtcgtggctctggttgcccaactgcgattttgtggccctaatcatatcgaccagttctactgcgattttatgttattcgtgggactggcttgcagtgaccctcgggtggcacaggtgacaacattaatactcagcgtgttttgcctgactattcccttcggattaatcctgacctcctacgctcggattgttgtggcagtacttagggtacctgcgggcgcctctagaaggagggccttttccacctgtagttcccacctggccgtcgtgaccacattctacggaaccctaatgattttttatgtcgctcccagcgctgtgcattcgcaactcctgtcgaaggtgttcagtcttctttacactgtggtcaccccactgttcaatcctgttatttacacaatgcgtaataaggaagtgcaccaggccttaagaaagatcttatgtattaaacaaactgagacgctggattag

SEQ ID NO: 176794 - DNA, 948 bp, Artificial Sequence
  derived and/or modified sequence
atggagatcgtgagcaccggcaacgagaccatcaccgagttcgtgttattaggattttatgatatcccggagctccactttctatttttcattgtgtttactgcagtgtatgtctttataattatcggtaatatgctgatcatcgttgctgtggtgtcatcgcagcggctacacaaaccaatgtacatcttcctcgcaaacttgtcgttcctggacattctgtacacgtcagccgtaatgcctaagatgttggagggatttctccaggaggccaccatcagtgtcgcagggtgccttctgcaattcttcatttttgggtccctcgcaacagccgagtgtctgctgctggccgtaatggcttatgatcggtacttggccatctgctaccccctgcactatccccttctgatgggaccacgacgttacatgggcctggtggtgactacttggctgtctggtttcgttgttgacggacttgttgtagccctggtcgctcagctgcggttctgcggtcctaatcatatcgatcaattctactgtgatttcatgctctttgtgggcctcgcttgttcagatcctcgagtcgcccaggtgacaacactgattctgtccgtattttgtctcaccatccctttcgggttaattcttacctcttacgcaaggattgttgtggcagttctcagagtgcctgccggcgcctccagaaggagggcattttccacatgctcttcgcacctggccgtggtcaccaccttctacgggacgctcatgatattttacgtcgcgcccagtgccgtccattcccagctgcttagcaaggttttctctcttctctatactgtcgtgacacctttgtttaaccccgttatatacacaatgcggaacaaagaggtgcaccaggccctaaggaagattttatgcattaaacagactgaaacattggactag

SEQ ID NO: 176795 - DNA, 948 bp, Artificial Sequence
  derived and/or modified sequence
atggagatcgtgagcaccggcaacgagaccatcaccgagttcgtgctgctgggattctatgacattccagaactgcacttccttttcttcatcgtatttaccgcagtgtacgtctttatcattatcggaaatatgcttattattgtggcagtggttagcagccaaagactacataagcctatgtatatcttcctcgccaatctctcctttctggatattctgtatacatccgcagttatgcccaagatgttggagggtttcctgcaggaggccaccatctctgtggcaggctgtttattgcagttttttatttttgggtctctcgctaccgctgaatgcctgttgcttgcagttatggcctacgataggtatctggcaatttgctacccactccactatccacttttgatgggaccccgccggtacatgggtctggttgttacgacctggctgtcgggattcgtggtggacgggctggtggtcgctcttgtggcacaattacgtttctgcggaccaaaccatatcgatcagttctattgcgactttatgttgtttgtaggattagcatgtagtgacccacgtgttgcacaagttaccacgctcattttgtctgtattttgcctgacaatcccgttcggcctgattttgacaagctatgctaggatagtggtggccgttcttcgggttcctgccggcgcctctcggagaagagcttttagcacttgctcttcacatctggcagtggtgactactttttatgggacacttatgatcttctacgtggcgccctctgccgtacatagccaactcctgtccaaggtgttttccctgttgtataccgtggtcaccccgttattcaaccctgtgatctatacaatgagaaacaaagaggtgcatcaagcgctgaggaaaatcctctgcatcaagcagaccgagacccttgactag

SEQ ID NO: 176796 - DNA, 948 bp, Artificial Sequence
  derived and/or modified sequence
atggagatcgtgagcaccggcaacgagaccatcaccgagttcgtgctgttgggattctacgacattcccgaattacattttctcttcttcatagtattcactgccgtgtacgtgttcatcataattggaaacatgctgattatagtggcagtggtttcaagccagcggcttcacaagcctatgtatattttcctggcaaatctttcattcctcgatatactgtacacctcagcagtcatgcccaagatgttagagggatttctgcaggaggccaccatttctgtcgctggctgcctcctgcagttctttatatttggttcattggctactgcggagtgtctgttactggctgttatggcctacgatcggtacctggcaatttgttatcccctgcactaccctctgttgatgggacctaggcgttatatgggacttgtagttaccacatggttgagcggattcgttgttgatggcctagtggtggcactagtggcacaattgagattttgcggcccaaaccatatcgatcagttttattgcgacttcatgctgtttgttggactggcatgctccgatcctcgcgtcgcccaagtgactacactcatcctgtctgttttttgtttaacaattcccttcggcctgatcctcacaagctacgctagaatcgtcgtcgccgtgctccgcgtgcccgctggggctagcaggcgaagagctttctctacctgctcatcccatttggctgtcgttacaacgttttacggtaccctcatgatattttacgtggctccgagtgcagtccacagtcagctcctctccaaagtgttctctcttttgtatacggtagttacaccactcttcaacccagtcatctatacaatgcgaaataaggaggtgcaccaggcacttcgaaagattttatgcattaagcaaaccgaaactctggattag

SEQ ID NO: 176797 - DNA, 948 bp, Artificial Sequence
  derived and/or modified sequence
atggagatcgtgagcaccggcaacgagaccatcaccgagttcgtgcttctggggttctatgacatcccagaactgcattttctgttcttcattgtgttcaccgccgtctacgtcttcattattatcggaaatatgctcataatcgtggcggtggtaagctcccagagactgcataaaccaatgtacattttcctggcaaacctctcattccttgatatcctctacacttctgctgtcatgcccaagatgctagaaggtttcttgcaggaagcaaccatatccgtggctggttgtctcctacagttttttattttcggaagtttggcaacagctgagtgtctgctactggccgtcatggcttacgacaggtaccttgcgatctgttaccccttgcattatccgctcctcatgggtcctcgacggtacatggggctcgtggtcactacttggctttcaggtttcgtcgtcgatggcctagtggtcgcgctggttgcccagctgagattctgcggtcctaatcatatcgatcagttttattgcgattttatgttgtttgtcgggcttgcctgctcggatcctcgagtcgcccaggttactacactaatcttaagcgtgttttgtcttacaatcccattcggactgatcttgacatcctatgcccgcatcgtggtcgccgtacttcgtgtgcccgccggggcctccagacgaagagccttctccacatgctcctctcacctggctgtcgtaactactttctatggaacgctgatgatcttttacgtcgctcctagtgcggtacattctcagctgctgtccaaggtcttttcacttctctatacggttgtgactcccctattcaaccctgttatttacactatgaggaacaaagaggtccatcaggccctgcggaagatactgtgtatcaaacagaccgaaaccctcgattag

SEQ ID NO: 176798 - DNA, 948 bp, Artificial Sequence
  derived and/or modified sequence
atggagatcgtgagcaccggcaacgagaccatcaccgagttcgtgttgcttggattttatgacataccggagctgcacttccttttctttattgtttttactgctgtctacgttttcattattatcggaaacatgcttataattgtggccgttgttagcagtcaaagacttcacaagcccatgtacatctttttggcaaatttaagcttccttgatattctctacacatcagctgttatgccaaagatgctcgagggatttcttcaggaggctacaatttctgtagccgggtgcttgctgcaattttttatattcgggtccctcgccactgccgaatgtctcttgctagccgttatggcatatgacagatatctggctatatgctaccctttgcactatcccctgttgatgggtccccgccgctatatgggacttgtagtgaccacctggcttagtggctttgtggtggacgggttggtggttgcgctcgtcgcccagttacgcttttgcggcccaaatcacattgatcaattttactgcgatttcatgttattcgtgggtcttgcttgcagcgaccctcgcgtagcacaggtgacaaccctaatactttcagtgttttgcttgaccattcctttcgggctcatcctgacctcgtacgcgaggattgttgtggcggtcctgcgggttcctgccggcgctagtagaaggagggcattctccacctgctcctcacatctcgccgttgtcacgaccttctacggaacactgatgatcttctacgtcgctccgagcgcagtgcatagtcagctactctcaaaagttttctccctgctgtatactgtggttacacctctgtttaacccagttatttacaccatgcgcaacaaggaagttcaccaggctttgcgtaaaatcttgtgtattaagcagaccgagaccctggattag

SEQ ID NO: 176799 - DNA, 948 bp, Artificial Sequence
  derived and/or modified sequence
atggagatcgtgagcaccggcaacgagaccatcaccgagttcgtgttactgggattttatgacatccccgaactacatttcctgttcttcattgtattcacggctgtctatgtctttattatcattggcaacatgctcattatcgttgccgtggtttccagtcagcgtttacacaagcctatgtatatatttttggccaacctaagcttcttggacatcctttacacctccgcagtgatgccaaaaatgctggaaggttttctgcaggaggctaccatttcagtggctggatgcctgctccagttctttatattcggttcactcgctacagccgagtgcctgctcttggccgtgatggcgtacgaccggtatctagcgatctgctatcccctgcattatcctctgctcatgggtccgcgcagatatatgggattggtagtgacaacctggctgtcaggttttgtcgtcgatggcctcgtggtagctctggtggcacaactgcggttctgtggacccaaccatatcgatcaattctactgcgacttcatgctcttcgtcggcctagcgtgttcagatcctagggtggctcaggtaacaactctgatattgtcagttttttgcttgacaattccttttggcctcattcttacttcatacgcccggattgttgtggcagtgttacgcgtcccagcaggcgctagtagacgacgggcctttagcacatgttcctctcatttggccgtcgtgaccactttttacggcacccttatgattttttacgtcgcacccagcgccgtccatagccagctcctgtccaaagtgtttagcctcctgtacactgttgtgacacctctattcaaccctgttatctacacaatgaggaacaaggaggtacatcaggccctccgtaaaatactgtgtattaagcaaaccgagaccctggattag

SEQ ID NO: 176800 - DNA, 948 bp, Artificial Sequence
  derived and/or modified sequence
atggagatcgtgagcaccggcaacgagaccatcaccgagttcgtgctcttgggcttctatgacatcccggagttgcatttcctattttttatagtgttcactgctgtgtacgtctttatcattatcgggaatatgctcatcattgtggccgtcgtcagtagccaacggcttcacaagcccatgtacatttttctcgccaatctgtcctttctagatatcctgtatacaagtgctgtgatgcccaaaatgctggagggcttcctgcaggaggcaacaatatcggtagctgggtgcctccttcagttcttcatctttggctcacttgccactgccgagtgcctcctgctggccgtcatggcctacgaccggtatctggccatctgctaccctctccactaccccctccttatgggtccccgtcgatatatgggattagtggtgactacttggctgagcggattcgtggttgatgggctcgtggtggcacttgtcgctcaactgcggttctgtggccctaatcatattgaccagttctactgtgacttcatgctcttcgtggggctggcctgctctgaccccagagtggcacaggtgacaacgctaattctgtccgttttttgcctgactatacccttcgggctgatactgacctcctatgcacgcatcgtggtggctgttctgcgggtgccagctggggcttcaagaaggagggcattctccacttgttcttcacaccttgcagtggtgacaaccttctatgggactctcatgatattctacgtggccccctctgccgtgcactctcaacttttgtccaaggtcttctcactgttatataccgtggtgacgcccctctttaatcctgtaatttatactatgcgtaacaaggaggtacaccaggcacttcgcaagattctgtgcataaaacagactgagactcttgactag

SEQ ID NO: 176801 - DNA, 948 bp, Artificial Sequence
  derived and/or modified sequence
atggaaattgtgagtacaggaaatgagactattactgaattcgtattgctggggttctatgatattcccgaactgcatttcctgttctttatcgtgtttactgccgtttacgtcttcattatcatcggcaatatgctcattattgtggccgttgtcagttctcagagattacataagcctatgtacatcttcctcgcgaacctcagcttcctggacatcttatatacaagtgccgttatgcccaagatgcttgagggcttcctgcaggaagctaccatctcagtcgcaggctgtctgctgcagttctttatttttggctcattagccacggctgaatgcctgctcctcgccgtgatggcctacgataggtacctggcgatctgctatccactccattaccccctgctgatgggccctcgtcgttatatggggctcgtggtcactacatggctgagtggctttgtggtggacggcttggtagtggctctcgtggctcaacttcgcttttgcgggccaaaccatatcgatcagttctattgcgacttcatgctgttcgtcgggttggcctgcagtgatccgagagtcgcgcaggtgacgaccctgatcctttcggtgttctgcttaaccattccgtttggactgatcctaacaagttacgcaagaatagtggtcgcagttttgcgcgtaccagcaggagccagccgaaggcgcgcattctctacttgttccagccatctcgctgtggtaaccacattctatggcactttaatgattttctacgttgctcctagcgccgttcactcccagctgctgtctaaggtgttctcactattgtataccgtggtaaccccactctttaacccagtgatctataccatgcggaataaggaggtgcatcaggccctgcgtaagatattatgtattaagcaaacagaaacactcgactag

SEQ ID NO: 176802 - DNA, 948 bp, Artificial Sequence
  derived and/or modified sequence
atggagatcgtctcaacagggaacgagacaattacagagtttgttcttctggggttctacgatattccagaactgcatttcctttttttcatcgttttcaccgctgtctatgtgttcattatcattggcaatatgctgataattgtcgccgtcgtctcgtcccagcggctgcataagccaatgtatatcttcttagcgaatctcagctttctggatattctctatacatccgccgtaatgccgaagatgctcgaaggttttctgcaggaggcgactatttctgttgccggatgcttgttgcagttcttcatctttggtagcctggccaccgctgagtgtcttctgctcgccgttatggcatacgaccggtaccttgcgatttgttatccactccactaccccctgctgatgggccctaggaggtacatgggactcgtggtcacaacctggctgtcaggctttgtggtagacgggctggtagtagctcttgttgcccaacttcgattctgcggcccaaatcacatcgaccagttctactgtgattttatgctgttcgtgggcttggcttgctccgaccctcgggtcgcgcaggtaacaactctgattttatcagtgttttgtctcaccattcccttcggactgattctgacctcctacgcacggattgttgttgccgtgctgagagtgccagccggtgcaagcagacgcagagcattttcaacatgctcatcccacctggccgtcgtgactaccttctacggcacactaatgattttttacgtcgccccaagtgcagtgcacagtcagttgctgtctaaagtgtttagcctcctctatacggtggtgacgccccttttcaatccagtgatctatactatgagaaataaggaagttcaccaagcacttaggaagatcctgtgcattaaacagaccgaaacccttgactag

SEQ ID NO: 176803 - DNA, 948 bp, Artificial Sequence
  derived and/or modified sequence
atggagatagtctcaaccggcaatgaaaccatcaccgagtttgtacttctggggttttatgatatcccagagctccacttcctcttctttattgtctttactgctgtgtatgtatttattattatcggtaatatgctgataatcgtcgcggttgtctcttctcaacgactgcataaaccaatgtacatattcctggccaacctttcattcctggacatattatatacttcagccgtgatgccaaaaatgctcgagggcttcctgcaagaagccaccatctctgtggccggatgcctgttgcagttcttcatttttggctccctcgccacagcagaatgccttcttttggctgtgatggcctacgataggtatttagccatctgttatccgctccattaccccctactaatgggcccacggagatatatggggctggtggtcaccacatggctcagtggattcgtggttgacggcctggtggtggcactcgtagcacagctccgtttttgtggaccaaaccacatagaccagttctactgtgacttcatgcttttcgtggggctcgcttgcagtgatccacgcgtggcacaggtaacaaccctcatcctgtctgtgttttgtcttacgattccgtttggtctaatcttgacatcgtacgcaagaatcgtggtggccgtgcttcgggtccctgcaggcgctagccgcaggagagctttctccacctgttcctcacacctggctgtcgtgacaactttctatggaaccctgatgatcttttatgtggcgccttcggccgtccactcccagctgctttccaaggtattctccctcctttatacagtcgtgacacccttgttcaaccccgtcatttatacaatgcgcaataaggaagtacatcaagcacttaggaagatcctgtgcattaagcagactgagacactggactag

SEQ ID NO: 176804 - DNA, 948 bp, Artificial Sequence
  derived and/or modified sequence
atggagattgtctctacgggcaatgaaactatcactgagtttgtattattggggttctacgatatacctgaactccactttttgttcttcatcgtgttcaccgccgtgtacgttttcataatcatcggcaacatgctgatcatcgtcgctgtggttagctcccagaggctccacaaaccaatgtatatcttcctggcgaatctgagttttctggacatcctgtatacctcagcagtcatgcctaaaatgttggaaggatttttacaagaagcaacaatcagtgtggcgggatgcctactgcaattctttatatttgggagtctggctaccgcggaatgcctccttttagccgtgatggcctatgaccggtacctggcaatctgctatccactgcactaccctctgcttatgggacccaggcgctacatgggcctggttgtgaccacatggttgtccggcttcgtggttgacggtctcgtagtggccctggtggcacagctcaggttctgtgggccaaaccacatcgatcagttctactgcgattttatgctatttgtggggctggcttgttcagacccacgggttgcacaagtcaccactcttatcctgagtgtcttttgcctcactattccttttggcctaatcctgacaagctacgcccgaatagtagtggccgtgttgcgggtgcccgctggcgcttcccgcagacgcgctttcagcacctgttcctcacacctggctgtagtgactaccttttacggtaccttaatgatcttctatgtcgctcctagcgctgtccatagccagctcctttctaaagtgttctctctgctgtacacagtcgtgactccgctgttcaaccccgtgatctacaccatgcgcaataaggaggtgcatcaggctctgcgcaagatcctttgcatcaaacaaaccgaaaccttggactag

SEQ ID NO: 176805 - DNA, 948 bp, Artificial Sequence
  derived and/or modified sequence
atggagatcgttagcaccggaaacgagaccataacggaatttgtgcttttaggtttctatgacatccctgaacttcattttctgttctttattgttttcaccgctgtttacgtgttcatcattatcggaaacatgctcattatcgtggccgtggtgagttcccagaggcttcacaaaccgatgtacatatttctcgccaaccttagctttctggacatcctgtatacaagtgctgtcatgcccaagatgcttgaaggatttctgcaggaagcgactatctcggtcgccggatgtttgctgcagttcttcatttttgggtctctcgccactgcagagtgtctgctgctggctgtgatggcatacgatagatacctggctatctgttatccactccactacccccttctgatggggccacggaggtacatggggttggtggttactacctggttgtctgggtttgtggtagatggcctagttgtggcgttagtcgctcagctgaggttttgtggccctaatcacatcgaccaattctactgcgacttcatgctgtttgtgggcttagcttgctcggatccacgagtcgctcaagtaactacactgatattatcagtgttctgtctcacaatcccttttggcctcatcctaacctcctacgcacggatagtggtagcggtgctgcgggtccccgctggagcttctcgaagacgggcattctctacatgttcctcacatctggcggtggttacaacattctatggtactcttatgattttttatgtggcgcctagcgcagtgcactctcagctgttgtccaaggtgttttcgctactgtacacagtggtaactccattatttaacccagtgatttacactatgcgcaataaagaggttcaccaggccctacgcaagattctgtgcatcaagcagaccgagacactagactag

SEQ ID NO: 176806 - DNA, 948 bp, Artificial Sequence
  derived and/or modified sequence
atggagatcgtatcgactgggaacgagacaattaccgagttcgtgcttctgggtttttatgatatcccagagctgcactttctttttttcatagtcttcacggctgtctatgtattcatcattatcggcaacatgctcattatcgtcgcagtagttagttcacaaagacttcacaagcctatgtacatctttctggccaacctcagcttcctcgacattctatacacttccgcagttatgcctaagatgttagagggtttcctccaggaagcgaccattagcgtggcagggtgccttctccagttctttatttttggctctctggccaccgccgagtgtctgctgctggctgtcatggcatacgatagatatttagccatctgttatcctttgcattatcctctgttaatgggtccaaggcgttatatggggctcgttgtaacgacatggctgagcggcttcgtcgtggacggcttagttgtggcgcttgtagcacagttacggttctgcggccctaatcacatcgatcagttctattgcgactttatgctgtttgtcgggctagcctgttctgatcccagagtagcacaggtgaccaccctcatcttatccgtcttctgtctgaccatcccattcggattaattctaacctcatatgctcggattgtagtggccgtactaagagtgcccgcaggagcgtcccggagacgcgcatttagcacatgctcatcacacttagctgttgtgacaactttctacgggacactaatgatattctatgtggccccttctgctgtgcatagtcagcttctgtcaaaagtattttccttgctgtatactgtcgtaacaccactcttcaatcccgttatttacactatgcggaacaaagaagtccatcaggctctgaggaagatcctgtgcatcaagcagacagaaactttggattag

SEQ ID NO: 176807 - DNA, 948 bp, Artificial Sequence
  derived and/or modified sequence
atggagattgtttctaccgggaatgagaccatcacagaattcgtcctgctgggcttctacgacattcccgaactccactttctgttcttcatcgtctttaccgccgtgtacgtgtttattatcatcggcaacatgctcataatcgtggctgtggtgagcagtcagagactccacaagccgatgtacatcttcctggccaacctgagctttttggacatactgtacaccagcgcggtcatgccaaagatgttggagggcttcctgcaggaggcgacaataagcgttgctgggtgtctcttacagttctttatatttggctctctggccactgccgaatgcttactgctggccgtgatggcttacgatagatacttggccatctgttatcccctgcactatccactgcttatgggccctaggcgatacatgggtctggttgtgaccacctggctgtccggttttgtggtcgatggtcttgtggtggccctggttgcccaactgcgattttgtggcccaaaccatattgaccaattttactgcgactttatgctatttgttgggctggcctgttcggatccaagagtggcacaggtgactacactgattctgagtgttttttgtcttaccatcccttttggcctcatactgacatcttacgcaagaatcgtagtggccgtcctgcgagtgccggctggcgcatcccggagacgtgcctttagtacttgtagctcacatctggcagttgtgactactttttacgggacactcatgatcttttacgtcgcgccttccgctgttcatagtcagctgttgagtaaagtattctcactcctgtatacagttgtcactcctctatttaatcctgttatttacaccatgcgcaacaaggaagtgcatcaggcactccgaaagattctatgcataaagcagacggagaccttggactag

SEQ ID NO: 176808 - DNA, 948 bp, Artificial Sequence
  derived and/or modified sequence
atggagattgtgagcactgggaatgaaaccattacagagttcgtgttgctcggattctatgatattcctgagttacactttctgttctttatcgtctttaccgcggtgtacgtgtttatcattattggtaacatgctgatcattgtcgccgtagtgtcctcccagcgcctgcacaaacctatgtacatctttctggctaatttgagtttcttggacatcctctacaccagcgctgtgatgcctaagatgctggagggcttcctgcaggaggcaaccatatcggtggcagggtgtctcttgcagttcttcatatttggatctcttgcaactgccgagtgcctgcttctagctgtgatggcgtacgaccgctacttggccatctgctacccactgcattatcctctgctgatggggccacgcaggtacatgggtctcgtggttacaacttggctcagcggctttgtcgtagacgggttggtggttgccctcgtggctcaattgcggttctgcggaccaaaccacatcgaccagttttattgcgattttatgttgtttgtggggctggcctgctctgacccacgcgtcgcccaagtcacgacattgatcctaagtgtgttctgtctgacgattccctttggcctcatcctcacatcctacgccaggatcgtggtggcggttctgagagtccccgctggggcttcccggcgaagggcatttagcacttgctcctcacacctggccgtcgtgacgacgttttacgggactttaatgattttttatgtggccccttcagcagtgcactcccagttgttaagcaaggtgttctctctgctgtacaccgtagtgacaccactgtttaaccctgtgatctataccatgcgaaataaagaagtgcaccaagccctgagaaagatactttgcatcaagcagacagagactctcgactag

SEQ ID NO: 176809 - DNA, 948 bp, Artificial Sequence
  derived and/or modified sequence
atggaaatagtctcaaccgggaatgaaactatcacggagtttgtgttacttggattctacgatatcccggagctgcacttcctcttcttcattgtatttactgccgtctacgtttttattattataggaaacatgctgattattgtggctgtggtttcctcccaacgactgcacaagccaatgtatatattcctcgctaatctgtctttcttggatatcctgtatacctctgcggtcatgcccaaaatgctggagggatttcttcaggaagccaccatctccgtggcgggatgtctcctgcagttctttattttcggaagtctcgctacggctgaatgtctgttgctagcggtgatggcttatgatcgataccttgcaatctgttatccgctgcactaccctctcctcatgggtccacgcagatacatgggtctggtggttacaacttggctgtcaggcttcgtggttgacggcctggtcgtcgcgttggtagcacagctacggttttgcgggcctaaccacatcgatcagttttactgcgacttcatgttgtttgtcgggttagcctgttccgatccaagagtagcccaggttacaacactgattctgagcgttttctgcctcactattccatttggcctaatcttgaccagctacgcacggatagtcgtggctgtgctgagagttccggcaggagcctcgcgacgccgagcttttagcacttgctcttcccacctggcggtcgtaacgactttctacgggacattaatgatcttctacgtggcacccagcgccgttcatagtcagctgctaagcaaggtgttcagtttattgtacacagtggttacacccctattcaaccccgtaatttatactatgcggaacaaagaggttcaccaggctctgagaaaaattctctgtataaaacagacggagactttggattag

SEQ ID NO: 176810 - DNA, 948 bp, Artificial Sequence
  derived and/or modified sequence
atggaaatagtgagcactggaaatgagactattacagagttcgtcttgctgggtttttacgacatcccagagcttcattttttgttcttcatcgtgttcacagccgtgtatgtgtttattattatcgggaacatgctgattattgttgcggtcgtgtcgagccagcgtctgcacaaaccaatgtacatcttcctcgcaaacttgtcttttcttgacattctgtacacatccgcggtaatgcccaagatgcttgagggcttcctgcaggaggccaccattagtgtggccggatgtcttctgcaatttttcattttcgggagcctggcaactgcagaatgcctgctcctagccgtcatggcgtacgataggtatttagctatttgttatcccttacattaccctcttcttatgggtcctcggagatatatgggactggtggtaacaacatggctgtccggcttcgtcgttgatgggctggtcgttgctctggtggcacagcttagattttgcgggccaaaccatatcgaccagttctattgcgactttatgcttttcgtcggccttgcctgctcagatccacgcgtggcgcaggtaaccacacttattttaagcgtgttctgcttgactatccccttcggcctaatcctgacgtcctatgctcggatcgttgtggctgtactgagggtgccagctggggcttccaggcgcagagccttttctacctgcagctcccacctcgccgtcgtcacaacattttatgggaccctcatgattttttatgttgcccctagcgccgtgcactcgcaacttctctccaaggtattctcacttctttataccgtggttacccctctttttaaccccgtgatctacaccatgcggaacaaagaggtgcaccaggctcttcgcaaaatcctgtgcataaagcaaacagaaaccctcgattag

SEQ ID NO: 176811 - DNA, 948 bp, Artificial Sequence
  derived and/or modified sequence
atggagatagttagcacaggtaacgagacaatcaccgagtttgtactgttgggcttctacgacattccagagcttcatttcctgttcttcatcgtgtttacagccgtttatgttttcattatcatagggaatatgctgataatagtggccgtggtaagttcccagcgacttcacaagccgatgtacatttttctggctaacctgtccttcctagacattttatacacttcagccgttatgccgaaaatgctggaggggttcctccaggaagcaactatctctgtcgcaggctgcctcctccaattctttattttcggctctcttgcaacggcagagtgtcttctgttagccgtgatggcttatgacaggtacctagccatttgttacccacttcactaccctctccttatggggccacgccgatacatgggactcgtggtcacaacctggttgagcggattcgttgtggacggactagtggtcgcacttgtggctcaacttagattttgtggcccaaatcacattgatcagttttattgcgacttcatgctgtttgtggggcttgcctgttcagacccaagagtcgctcaggtgacaaccctgattctgtctgtcttctgtttgacgattccttttggccttatccttacaagctacgcacgtatcgtggtcgccgtgttgcgcgtgccagcgggtgcctcccggagacgcgcattttctacttgttctagccacttggctgtcgtcacaacattctacgggaccctgatgatcttctacgtagcaccttcggcggtgcactctcagctgttgagtaaggtcttctccctgctctacaccgtcgttactccactgttcaatccagtcatctatacaatgcgaaacaaagaagtgcaccaggccctgaggaaaatcctgtgcattaaacagaccgaaacactggattag

SEQ ID NO: 176812 - DNA, 948 bp, Artificial Sequence
  derived and/or modified sequence
atggaaatcgtgtcaactgggaacgagacaattacagagtttgtgctgcttggtttctacgatatccctgaattgcattttctcttcttcattgtgttcacagccgtctacgtattcattatcatcggaaatatgcttatcattgtggctgtcgtgagttcgcaaaggctgcacaagcccatgtacatttttctggccaatctttctttcctggacatcctatatacttccgcggttatgcccaagatgctggaaggcttccttcaggaagccaccataagcgtggccggttgcttgttgcagttcttcattttcggcagcctggcaactgccgagtgcttactgttggccgtgatggcttacgacagatacctggctatttgctaccctttacactacccattgctgatgggcccacggagatatatgggcctcgtggtcactacttggctgtccggttttgtggtcgacggactggtggtggccttagttgcccaacttcgtttttgtggccctaatcacatcgatcagttctattgtgacttcatgctgttcgtgggtctggcctgtagcgatccaagagtggcgcaagttactaccctcattttgtctgttttttgtctcaccatcccatttggcctgattctgacgtcgtatgcccgaatcgtcgtggccgttctccgagttccagcaggcgcaagcagaaggagggcgttcagtacctgcagcagtcatctggccgtcgtgaccaccttctacggaaccctgatgatcttctacgtcgcccctagtgcagtgcactcccaactcctgagcaaagtattttctctgttgtatactgtggttacccctttgttcaatcccgtgatttatactatgcgaaacaaggaagtccaccaagctctcaggaaaatcctgtgtatcaagcagaccgagacactcgactag

SEQ ID NO: 176813 - DNA, 948 bp, Artificial Sequence
  derived and/or modified sequence
atggagatcgtgtccactggcaatgagaccattacagaattcgtgctgctaggattctacgacatacccgaactgcactttcttttcttcatcgtgttcacagctgtgtacgtgttcatcatcatcggaaacatgctcattatcgtggccgtagtcagcagccagcggctgcataaacctatgtacatttttttagccaatttgagcttcctggatattctctatacaagcgcagtcatgcctaagatgttagaaggattcttgcaggaagctacaatctctgtcgccggatgtctccttcagttctttattttcggtagtttagctacagctgagtgcctgctgctggctgtgatggcttacgatcggtatctcgccatttgttatcctctgcattaccctctgttgatgggtcctagaaggtacatgggattagttgttacaacctggttgagtgggttcgtggttgatggtttggtagtcgcattggtggcgcagctcaggttctgcgggccaaaccacatagaccaattctattgcgactttatgctattcgtcggtctcgcgtgctctgatcctcgggttgcccaagtcactacactgatcctaagtgtcttctgcctgacaatacccttcggactgattctcacatcctacgccagaattgtcgtggccgtgctccgggtccccgctggtgcatccaggcgccgtgctttctccacatgctcctctcatctggcggtggtgacaaccttctacggcactctgatgatcttttatgttgctcccagtgcggtacactctcagctgctgtctaaagttttcagccttttatacacggtagtaactcctttgttcaatcccgtgatttacaccatgcgcaataaagaggtgcaccaggccctgcgcaagattttgtgcattaagcagaccgaaacccttgattag

SEQ ID NO: 176814 - DNA, 948 bp, Artificial Sequence
  derived and/or modified sequence
atggagatcgtgtctactgggaatgaaaccatcaccgagtttgtccttcttgggttttacgatatacccgagctccatttcctgttcttcatcgtctttaccgccgtctatgtgttcatcataattggcaacatgcttatcatcgtggccgttgtcagcagccagaggcttcacaaaccaatgtatatatttctggccaatctgagctttctggacattctatatacatctgcagtgatgccaaagatgttggagggctttctgcaagaagcgacaatcagcgtggccggatgtttgctgcagttctttatcttcgggagcctggctacagccgaatgtttgctgctggccgtcatggcctatgataggtatctggccatttgctaccccctgcactatcccctgctcatgggaccaaggaggtatatgggccttgtcgtcaccacttggctgtctggcttcgtagttgacggattggtcgtcgcattggtagcgcagctgcgcttctgtggtcctaaccacatcgaccaattctattgtgatttcatgctctttgtgggtctggcttgcagtgaccctagagtcgctcaggtgacgacgctcatactcagcgtgttttgcctaacaattccctttggtttgatactgacgtcttatgccagaatcgtggtcgccgtgctgcgcgtgccggctggggcatcgaggcggagagctttctccacctgttcttcccatctggctgtggtgaccactttttacggcacattaatgatcttttatgtcgccccatccgctgtgcatagtcagctgttaagcaaggtcttcagtctgctgtatacagtggtgacacctctgttcaacccggtgatctatactatgcgcaacaaagaggttcaccaggccctgcggaagatcttgtgtattaaacagacagagactttggattag

SEQ ID NO: 176815 - DNA, 948 bp, Artificial Sequence
  derived and/or modified sequence
atggaaattgtctctaccggcaacgagaccattaccgagttcgtactgctcggcttttacgacatccctgaactgcacttccttttctttattgtgttcacagccgtgtacgtattcattatcatcggaaatatgttgatcatcgtcgccgtggtctcttctcagaggctgcacaagcccatgtacatatttctcgctaatctcagttttctggacattctttacacctcagctgtcatgcccaaaatgttagagggcttcctgcaggaggccacaatttcagtcgctgggtgtctgcttcagtttttcatttttggcagtctcgctactgccgagtgtctcctgttagctgtcatggcgtatgaccggtatctggcgatctgttatcccctgcactatcctctcttgatgggtcctaggagatacatgggcctggtggtcactacctggctcagcggcttcgtggttgatggtcttgttgttgctctcgtggcgcagctgcggttttgcggccctaaccacatcgatcagttctactgcgactttatgttattcgttggcctggcctgctccgaccccagagttgcacaagtcaccacactaatactgagcgtgttttgtctgacaattcccttcgggctgatacttactagttacgccagaatcgttgtggctgtgctgagagtcccagccggagcttccagacggagggccttctccacctgttctagccatctggccgtggttacaacattttacggaacgctcatgatcttctatgtggctccatccgccgtgcacagtcagcttctgagcaaggtattctcactcctctacaccgttgtcacacccctgttcaatccagtaatatacactatgagaaacaaggaagtgcatcaagctctgagaaagatactctgcattaaacagactgaaacccttgattag

SEQ ID NO: 176816 - DNA, 948 bp, Artificial Sequence
  derived and/or modified sequence
atggagattgtatccacaggcaatgagactataaccgagtttgtgcttctgggattctatgacattccagagctgcattttctgttttttatcgtgtttacggctgtgtacgtctttatcattatcgggaatatgttgataatagttgcggtggtctccagtcagagactgcacaaacctatgtatatatttctggccaacctcagtttcttagatatcttgtatacaagcgcagttatgccgaagatgttagaagggttcctgcaggaggctactatctccgtggcaggatgcctcctacagtttttcatctttggcagtctggccaccgccgaatgcctgctcttggctgtgatggcatatgatcgctatctagccatctgctaccccctccattaccctcttttgatgggtccacggcgatatatgggattggttgttaccacatggttatccggctttgtggtagacgggcttgtggtggcgctggtggctcagctgcgattttgcgggccaaaccacatcgatcagttttactgcgacttcatgctgttcgtggggctggcatgttcagatcccagggtcgcccaggtcacgacactgatcctgtctgtattctgcctaacaatcccattcggtcttatccttacatcttacgctagaatcgtggttgctgtgctgagggtgcccgctggagcatcccggcgtagagcctttagcacctgcagctcccacctggctgtcgtgaccaccttctatggcaccctgatgattttttacgtggcgccaagtgcagttcactctcaactgctgtccaaggtgttctccctgttatacaccgtggtgacgccattgtttaacccagtcatctacaccatgcggaataaggaggtgcaccaggctttgcggaagattctctgtattaagcagaccgagacacttgactag

SEQ ID NO: 176817 - DNA, 948 bp, Artificial Sequence
  derived and/or modified sequence
atggagattgtctccacaggcaacgaaaccatcaccgagttcgtgctgctggggttctatgatataccggaactacatttcctgttctttattgttttcactgcagtgtatgtgtttatcatcataggcaatatgctcatcatcgtggctgttgtgtctagtcagaggttgcataaaccaatgtatattttcttggcaaatctttcctttttagacatattatacacatccgccgttatgcctaaaatgctagaaggatttttgcaggaagcaaccataagtgtcgctggatgcctcctgcagttctttattttcggttctctcgctacagccgagtgtttgttgctggctgtgatggcctacgatagatatctggccatctgctatcccttgcactaccctcttctcatgggccctaggcggtatatgggcctcgttgtgaccacatggcttagcggattcgtggtagacgggttggtcgtcgctttagtggcgcaattacggttttgtggaccaaaccatattgaccagttctattgcgactttatgttgttcgttggacttgcatgttctgaccctcgggtggctcaggtgacgactctaatcttatcagttttttgtctgacgatcccattcggtttgattttgacctcatatgccagaatagtagttgcggttctgagagtgcccgctggggcatctcgcaggcgtgcttttagcacctgttcttcgcatctggcagtggtgacaaccttctatggcacattaatgattttttatgtggcccctagtgccgtgcacagtcagctgctgtccaaggtctttagtctactctacacagtcgtaacccccctatttaacccagtgatctataccatgcgtaacaaagaggtgcaccaggccctgcggaaaattctgtgtataaaacagaccgagacattggactag

SEQ ID NO: 176818 - DNA, 948 bp, Artificial Sequence
  derived and/or modified sequence
atggaaatcgtgtccacaggcaatgagactattacagagttcgtactcttgggcttctacgatatcccagaactgcacttccttttttttattgtcttcacagctgtgtacgtcttcataattatcggaaacatgctgatcatcgtggcggtggtgagctcccagaggctgcataaaccaatgtatattttcctcgccaatctgtccttcctggacattctctacacctcggctgtgatgcctaagatgttagaagggttcttgcaagaggcaaccattagcgtggcaggatgtctgctccaatttttcatcttcggcagcctggcaaccgctgagtgcctgttactagcagtgatggcttacgacagatatctggctatctgctacccccttcactatcccttacttatgggcccaagacggtatatgggcctggtcgtgacgacttggctctctggttttgtcgttgacggcctggtcgtggccctcgtcgcccagcttcgattttgtggacctaatcacatcgaccaattctattgcgattttatgctctttgtggggctggcatgcagtgatcctagagtggcccaggtgaccacgttaatcctgagtgtattctgcttgacaatccccttcggactgattctaacctcctatgccagaatcgtcgtggccgtcctgagagttccggctggcgcatcacgtagacgggctttcagcacctgctcctcacacctggccgtcgttacgaccttttacggtaccttgatgattttctacgtggctccatccgccgtgcatagccaactgctcagcaaagtctttagcctgctatataccgtagtcacccccctttttaatccagtaatttacaccatgcgcaataaggaagtacaccaggccttgcggaagattttatgcatcaagcagacagagacactggattag

SEQ ID NO: 176819 - DNA, 948 bp, Artificial Sequence
  derived and/or modified sequence
atggagatcgtgagcacaggaaacgagaccatcactgagttcgtacttctgggattttatgatatccccgaattgcatttcctcttcttcatagtcttcacagctgtctacgtgttcatcatcattggcaatatgctcatcatcgtggccgtagttagctctcagaggctgcataaaccaatgtacatttttctcgccaacctctcttttctcgacatattatacacgagcgcagtgatgccgaaaatgcttgaggggttcctccaagaagctactatttccgtcgctggctgcctcctgcagtttttcatttttggaagcctggccaccgctgaatgcctgctgctggccgttatggcgtacgacaggtaccttgctatttgctatccactgcactatccactgctcatgggcccacgcaggtacatgggactggtggtcactacgtggttgagtgggttcgtggtagacggcctggttgtggcgctggtggcacaactgcggttctgcgggcctaatcacatcgaccagttctattgcgattttatgctgtttgtgggattggcctgttcagatcccagagtggctcaggtaacaaccttgatcctgagtgttttctgtctgactattcctttcggccttatcctgacatcttacgctcggatagtggtggctgtgttaagagtgcccgcaggggcttccagaagacgagcctttagtacttgttcctcccaccttgctgtcgttaccacattctatggcaccctaatgatattttacgtcgccccatctgcagttcatagtcaactgctgtctaaggttttttccctattgtacacagttgtcactcccctgttcaacccagttatttacaccatgcgaaacaaggaggtgcatcaagcgctccgaaagatcctttgtatcaagcaaacggagactctcgactag

SEQ ID NO: 176820 - DNA, 948 bp, Artificial Sequence
  derived and/or modified sequence
atggaaatcgtctctacaggaaatgaaactattactgagtttgtcttgctgggattttatgacatccccgagttgcattttctgttttttatcgtgttcactgcagtctatgtctttatcatcataggtaatatgctgatcattgtggcggtcgtctcctctcaacgcctccacaagcccatgtatatttttctcgcgaatctgagcttcctggatattctctacaccagtgcagtcatgcccaagatgttagagggttttttgcaagaggctaccataagcgttgctgggtgcctgcttcagttttttatctttgggtctctcgctactgctgagtgtttgctgttggccgttatggcttacgaccggtacttggccatctgctaccccctccactaccccctgctgatgggacccaggcgatacatgggactggtggtgacaacttggctgtctgggttcgttgtggacgggcttgtggtggccttggtggctcaactgcgcttctgcgggcctaatcatatcgaccagttctactgtgacttcatgctcttcgtcggtctagcctgttccgaccccagagttgcccaggtaaccacccttattctctcagtgttctgtctcaccattcctttcgggctgatccttacaagctatgccagaattgtagtcgccgttctgcgcgtccctgcgggtgctagcaggcgacgggcatttagtacttgctccagccacctcgccgttgtcaccaccttctacggtacactcatgattttttacgtggctccttccgctgtccactcccagctgctgagcaaggtgttttccctgctgtataccgtggtcacccctcttttcaatccagtcatttatacaatgcgcaacaaagaagtacaccaggcactccgcaagatcctctgcattaagcagaccgagaccttggattag

SEQ ID NO: 176821 - DNA, 948 bp, Artificial Sequence
  derived and/or modified sequence
atggagatagtgtctaccggaaatgaaaccatcactgagttcgtcctgttgggcttttatgacattccagagcttcactttctttttttcatcgtctttaccgccgtctacgtgttcattatcatcggtaatatgctgattattgtggcagtggtgtccagtcaacgcttgcataaacccatgtatatttttctcgccaacctgtcattcctggatattttgtatacaagcgctgttatgccgaaaatgcttgaagggttcctgcaggaggccaccataagtgtcgccggttgtttactccaattctttatattcggatccctggcaaccgctgagtgtcttcttttggcggtaatggcatatgatcggtacctggctatatgttatccattacactacccgttactgatgggaccaagacgatatatggggctcgtagtgaccacttggctttcaggattcgtggtggatggactggtggtagctctggtggcccagctgcgtttttgcggtccaaatcatattgatcaattttattgcgactttatgctgttcgtaggactagcatgctcggaccccagggtggcccaggtcaccaccctcattctgtccgttttctgcctcaccattccattcggtttgattcttacgtcctacgctcgaatcgttgtggcagtattgcgggtgccagctggcgcttcacgacgcagagcattctcaacctgcagttcccacctcgctgtggtgacaactttctacgggaccctgatgatattctacgtcgctccatcggctgtgcactcacagctcctgagcaaggtgttttcgctcctgtacaccgttgtgacaccactttttaaccccgtcatctacactatgaggaataaggaagtgcatcaggcgcttcggaaaatactgtgtattaaacaaactgaaacgctggattag

SEQ ID NO: 176822 - DNA, 948 bp, Artificial Sequence
  derived and/or modified sequence
atggagatcgtgagcaccggcaacgagaccatcaccgagttcgtgctgctgggcttctacgacatccccgagctgcacttcctgttcttcatcgtgttcaccgccgtgtacgtgttcatcatcatcggcaacatgctgatcatcgtggccgtggtgagcagccagagactgcacaagcccatgtacatcttcctggccaacctgagcttcctggacatcctgtacaccagcgccgtgatgcccaagatgctggagggcttcctgcaggaggccaccatcagcgtggccggctgcctgctgcagttcttcatcttcggcagcctggccaccgccgagtgcctgctgctggccgtgatggcctacgacagatacctggccatctgctaccccctgcactaccccctgctgatgggccccagaagatacatgggcctggtggtgaccacctggctgagcggcttcgtggtggacggcctggtggtggccctggtgacccagctgagattctgcggccccaaccacatcgaccagttctactgcgacttcatgctgttcgtgggcctggcctgcagcgaccccagagtggcccaggtgaccaccctgatcctgagcgtgttctgcctgaccatccccttcggcctgatcctgaccagctacgccagaatcgtggtggccgtgctgagagtgcccgccggcgccagcagaagaagagccttcagcacctgcagcagccacctggccgtggtgaccaccttctacggcaccctgatgatcttctacgtggcccccagcgccgtgcacagccagctgctgagcaaggtgttcagcctgctgtacaccgtggtgacccccctgttcaaccccgtgatctacaccatgagaaacaaggaggtgcaccaggccctgagaaagatcctgtgcatcaagcagaccgagaccctggactag

SEQ ID NO: 176823 - DNA, 948 bp, Artificial Sequence
  derived and/or modified sequence
atggaaatcgtgtctaccggaaatgagaccataacagagtttgtgttactgggtttctacgacattccagagctgcatttcctgttcttcattgtgttcactgccgtctacgtgttcataattataggtaatatgctcatcatagtggcggttgtctcttctcagaggctgcataaacctatgtacatctttctggccaatctatcctttctcgacatcctctacacatcagcggtcatgcctaagatgctcgagggttttctccaagaagctacgatctcggtggcaggctgcctgctacagttcttcatctttggcagtttggcaaccgctgagtgcctgcttttggccgtgatggcttacgatcggtacttggccatctgttaccccctgcattacccccttctgatgggtccccgaaggtatatgggtctcgtcgtgactacatggctctcgggcttcgtagttgacgggctggtggtggccctggtcactcagcttaggttttgtggtcccaaccatatcgaccagttttactgtgacttcatgctctttgtggggctggcatgcagcgaccctcgcgtggcacaggtaacaacactgatcctgtctgtgttttgcctcaccataccattcgggttgattctcacatcatatgcaagaattgtggtggccgtcttgagggtgcccgctggcgcctcaaggagaagagccttctctacctgctcctcgcacctggcagtagtgaccacgttttatgggaccctcatgattttttacgtagccccttccgccgtgcacagtcagctgctgtccaaggtgtttagtctgttatacactgtggtcacaccacttttcaatccagtcatttacaccatgaggaataaggaggtgcaccaggcactgcggaaaattctatgcataaaacagacagagaccctggattag

SEQ ID NO: 176824 - DNA, 948 bp, Artificial Sequence
  derived and/or modified sequence
atggagattgtgtctacaggcaacgaaacgatcactgagtttgttctgctggggttctatgacattcccgaactgcacttcctcttctttatcgtatttacggcggtctatgtcttcatcattataggaaatatgctgataatcgttgccgtagtgtccagccagcggttgcacaagcctatgtacatttttctggccaatctttctttcctagatattctgtacacatctgccgtgatgcccaagatgctcgagggattcttgcaagaggctactatttcggtggcagggtgtttgcttcagttttttatctttggcagtcttgccactgctgaatgtctgttgctcgcagtgatggcatacgataggtacctcgccatctgctatccccttcactatccgctgctcatgggaccacgtagatatatgggcctggttgtgaccacatggctgagcggctttgtcgtggacggcctggtggttgcactcgtgacccaactaaggttctgtggcccaaaccacattgaccagttttactgcgattttatgctgtttgttggtcttgcctgttctgacccgagagtcgcgcaggtgacaactctgatcctctcagttttctgcctgaccatccccttcggattaatattgactagctatgcccgcatagtggtcgcagtccttagggtccctgcaggcgcctcgaggcggcgcgctttctctacctgcagcagccacttggctgtcgtcaccaccttctacggcaccctaatgatcttctacgtggcgccatcagcagtgcactcccagctcttatccaaggtattctctttgctatacaccgtggtgacccctctgtttaatcccgttatttacacgatgcgcaataaagaagtccaccaggctctgagaaagatattgtgtatcaaacagaccgagactctggactag

SEQ ID NO: 176825 - DNA, 948 bp, Artificial Sequence
  derived and/or modified sequence
atggagattgtgtctaccggaaatgaaacaatcacagaatttgttctgctaggcttctacgatattccggagttgcacttcttgttctttattgtctttactgccgtgtacgtattcatcattatcggcaatatgttgattatcgtcgcagtggtctcttcccagcgcctacataagccaatgtacatttttctggccaacctgtcctttctggacatcctgtacacttccgctgtgatgccaaaaatgctcgaaggattcttgcaagaggcgactatttcagtcgctggttgccttctgcagttttttatctttggatccctggccacagcagagtgcctgcttctcgccgtcatggcctatgatcgctatctggctatatgctatccactgcactaccctctcctgatgggacctagacgatacatgggtctggtggttaccacgtggcttagcggttttgtcgtcgatgggttagttgtggccctggtcactcaactccgcttttgtggccccaatcacatcgatcaattctactgcgatttcatgctgtttgtgggcttagcctgcagcgatccacgtgtcgcccaggtgactacgctgatcttatccgtcttctgtctaaccataccgttcggcctaatcctcacgtcttacgcccgcatagtggttgcagtgttgcgagtgcctgctggcgcctctagacgcagagccttcagcacctgtagctcccacctggccgtggtcacaacgttttacggtacactcatgatcttttatgttgcgcccagtgctgttcatagccaactgttatccaaagtcttttcgctgctgtacactgtggttacgccgctctttaatcccgtaatttacaccatgagaaacaaagaggtacaccaggccctacgcaaaatattgtgcattaagcagaccgaaactctggattag

SEQ ID NO: 176826 - DNA, 948 bp, Artificial Sequence
  derived and/or modified sequence
atggagatcgtgtccactggaaatgagaccatcacagaatttgtgctgctgggcttctatgacatccctgagctgcacttcctgttcttcatcgtgttcaccgctgtgtatgtgttcatcatcatcggcaacatgctgatcatcgtggccgtggtgagcagccagaggctgcacaagcccatgtacatcttcctggccaacctgtccttcctggacatcctgtacaccagcgctgtgatgcccaagatgctggagggcttcctgcaggaggccaccatctctgtggccggctgcctgctgcagttcttcatcttcggcagcctggccacagctgagtgcctgctgctggccgtgatggcctatgaccgctacctggccatctgctaccccctgcactaccccctgctgatgggcccccggcgctacatgggcctggtggtgaccacctggctgagcggctttgtggtggatggcctggtggtggccctggtgacccagctgcgcttctgtggccccaaccacatcgaccagttctactgtgacttcatgctgtttgtgggcctggcctgcagcgacccccgggtggcccaggtgaccaccctcatcctgagcgtcttctgcctgaccatccccttcggcctcatcctgaccagctatgcccgcatcgtggtggccgtgctgcgggtgcctgctggggccagcagaagaagagccttcagcacctgcagcagccacctggccgtggtgaccaccttctacggcaccctgatgatcttctacgtggcccccagcgctgtgcacagccagctgctgagcaaggtgttcagcctgctgtacacagtggtgacccccctcttcaaccctgtgatctacaccatgaggaacaaggaggtgcaccaggccctgaggaagatcctgtgcatcaagcagacagagaccctggactag

SEQ ID NO: 176827 - DNA, 948 bp, Artificial Sequence
  derived and/or modified sequence
atggagatcgtgagcaccggcaacgagaccatcaccgagttcgtgctgttaggattttacgatatccccgagctccattttctattttttattgtttttacagctgtttatgtgttcattatcatcggcaacatgctgattattgtagccgttgtctcctcacaacgcctgcataaacccatgtacattttcttagccaacctgtccttcctcgacattttgtatacctccgccgtgatgcctaaaatgttggaggggtttttgcaggaagccaccatcagcgtagctggatgcctgcttcagttcttcatctttggctctctcgccacagcagagtgtctgctcctagctgtgatggcgtatgatcgctacctggccatatgttatccattacactaccctctgctgatgggtccccgacggtatatggggctggtcgtaaccacatggttgagtggattcgtcgttgatgggctagtggtggcactcgtcacccagctcaggttctgtgggccaaaccacattgaccaattttactgtgactttatgctgttcgtgggactggcctgtagtgaccccagagtcgcacaggtgaccaccctcatcctgtctgttttttgtctgacaatacctttcggcttgatcttgacctcttacgctcggatcgtagtggcggttctccgggttccggctggggccagcagacgcagagccttcagtacatgttcaagccacctggctgtggtcactaccttctacgggaccctgatgatcttctacgttgccccctctgcagttcacagtcagcttctgtccaaggtgtttagtcttctctacacagtggtgaccccactgtttaatcctgttatttacaccatgcgcaataaggaagtgcaccaagccctgcgcaagatactctgcattaaacagacagagactctcgactag

SEQ ID NO: 176828 - DNA, 948 bp, Artificial Sequence
  derived and/or modified sequence
atggagatcgtgagcaccggcaacgagaccatcaccgagttcgtgctgctgggcttttatgacattcctgagttgcacttcctgttttttatagtgtttaccgccgtgtatgtatttatcatcatcggaaacatgcttatcatcgtagccgtcgtaagcagccagaggctgcacaagccaatgtatattttcctcgccaaccttagcttcctggatattctttacacttccgcagtgatgcctaaaatgctggagggctttttgcaagaggccaccatttccgttgccggttgtctgctccagttttttatcttcggcagcctagccaccgccgaatgtctgctgttggctgtcatggcctacgaccgctacctggctatctgttaccccctacactacccattactgatgggcccaagacgatacatggggcttgtggtaactacctggttaagtggctttgtcgtggacgggttggtagtggcgctagtaactcaattgagattttgtggccccaaccacatcgaccaattctattgtgactttatgttgtttgtaggactggcttgttccgacccacgggttgctcaagtgactaccctgatcctttccgtgttctgcttgaccatccctttcggattaattttaacctcttatgcccgaatcgtggtggctgttctgcgggtgcctgccggcgcatctaggaggagagctttttccacttgctctagtcatttggccgtggtgactactttctacggcaccctgatgatcttttacgttgcaccttcggctgtgcattctcagctcctttctaaggttttttcactgttgtacaccgtggtgacccccctgtttaaccctgtgatctatacaatgaggaataaggaggtgcatcaggcactgcgcaagatactgtgcattaaacagacagagaccctcgactag

SEQ ID NO: 176829 - DNA, 948 bp, Artificial Sequence
  derived and/or modified sequence
atggagatcgtgagcaccggcaacgagaccatcaccgagttcgtgttgttgggattctacgatataccagaactccacttccttttcttcattgtttttaccgccgtctatgtcttcattattataggcaatatgctgataatagtcgccgtcgtatcgtcccagcgcctacacaagcccatgtacatttttctggcaaacctgtcatttcttgacattttatacacttctgccgttatgcccaaaatgctcgaggggttcctccaggaagccactatcagcgtagccggctgcctcctccagtttttcatcttcgggtctttggctacagccgaatgcctgctgctcgctgtcatggcgtacgacagatatctggcgatctgctaccctctgcactatcccctgctcatgggccccagacggtacatggggttagtcgtgaccacctggttatccggcttcgtggtcgatggactggtggtggctctggtgacacagctccgtttttgcgggcccaatcacattgatcagttctactgcgactttatgctcttcgtcggattggcatgctctgatcctagagtggcccaggtcactaccttgatcctctccgtcttttgtctgaccattcccttcgggcttatcctgacgtcttacgccaggatagtggtggccgtgctgcgcgttccagctggcgcatcacgacgcagagcattctccacctgttcttcccatctggccgtggtgaccacattctacgggaccctgatgattttttacgtggcccccagcgccgtccactctcaactgctgtctaaggttttttcgcttttgtataccgtcgtgacccccttgttcaaccctgtaatttacactatgcgcaacaaagaggtgcaccaggccctccgcaagatcctgtgcattaaacagacagaaacgctcgactag

SEQ ID NO: 176830 - DNA, 2482 bp, Artificial Sequence
  derived and/or modified sequence
caactcttaattggccctcaaaacttagcctacttgcttctatcttcagaaagccttccccgaccttgatcccacaccttctgccccacaaccccaggctgggtttggtccttctctgctcccatggcacctacttccttccctattaccatttaccacattttcactaccaactcctgaatgacttgatgaaactactatttaaggaaggcaataagtgaagaatatataagaattatccgaggaacagttgctctaataacgttaggcttggtatagaagatgcagagacatgctaaaatttctcccccaattattgccaagcagaaacttggacgatcgacatggaaattgtctccacaggaaacgaaactattactgaatttgtcctccttggcttctatgacatccctgaactgcatttcttgttttttattgtattcactgctgtctatgtcttcatcatcatagggaatatgctgattattgtagcagtggttagctcccagaggctccacaaacccatgtatattttcttggcgaatctgtccttcctggatattctctacacctccgcagtgatgccaaaaatgctggagggcttcctgcaagaagcaactatctctgtggctggttgcttgctccagttctttatcttcggctctctagccacagctgaatgcttactgctggctgtcatggcatatgaccgctacctggcaatttgctacccactccactacccactcctgatggggcccagacggtacatggggctggtggtcacaacctggctctctggatttgtggtagatggactggttgtggccctggtgacccagctgaggttctgtggccccaaccacattgaccagttttactgtgactttatgcttttcgtgggcctggcttgctcggatcccagagtggctcaggtgacaactctcattctgtctgtgttctgcctcactattccttttggactgattctgacatcttatgccagaattgtggtggcagtgctgagagttcctgctggggcaagcaggagaagggctttctccacatgctcctcccacctagctgtagtgaccacattctatggaacgctcatgatcttttatgttgcaccctctgctgtccattcccagctcctctccaaggtcttctccctgctctacactgtggtcacccctctcttcaatcctgtgatctataccatgaggaacaaggaggtgcatcaggcacttcggaagattctctgtatcaaacaaactgaaacacttgattgaaggagagtaatgaagatgttattttggacttcggacacctccactggggactcttccaggatgggttggagaggagtaactttgtcttattcgaccattctctttgaactcttctgcagttatactaaaaatgaaaatgatagggcaacaattttttaacttttattttaagttcaagggtacatgtgcaggtttgttacataggtaaacttgtgtcatgggggtttactgtacagattatttcatcacccaggtattaagcctagtactcattaatcatttttcctgatcttctccctcctcccaacctccaccctcaagtaggattcagtgtgttgttcccctctatgtatccatatgttttcataatttagctcccacttatgagtgaagacatacggtatttgattttctgttcctgtgttagtttgcgaaggatagtagcctccaattccatccatgtcaaataatcaaaattatttaaactttgattagttctttattaaatatgtcataaatatttaaaaataatacagcaataccaaaataaacctagaaatattgttttttatattattgttgtatgacatttaaaaatttctttctatgtgtatttatatttatacatacaagttggatcatggagtttgtaatctggttttccactgaacactgtgtcacgaacaactttttctattaacaagcatctatttctttattcttctgggcttcatcgtatggctaaacatgatttgttattctattttgggaatttttagttgtattctattcttttactgtacattgtttacatctggattttcctgtaataaacttttagcacctaaattgcaagatctaaggatatgtgtttttaaaaatctaaagctgaattccttttcttttaaacttcttttcttgtagaacatttcaaacatacataaaagagaagagcacagtgaacccccatgtactccatgtagccaccatccagcttcaacatcaacattttgctaatcttattttaattagctacagctccttgtttgttagttttcatggaaaattttagggcaaattccagatgttgtataactattatgttgtgtaagttatgtatgtacatattccacatatgtatttagtataatctgtgactaataaagacattttaaaaaaccatgcccaca

SEQ ID NO: 176831 - DNA, 2611 bp, Artificial Sequence
  derived and/or modified sequence
catcctagcagtgaatggaaacacacatatggggagaaactaaggctccctactaaaaacgtgcaacatgtgactgggacatcttgttgagctcaagcagggagggagctgaaggtaggaaattccaacattctgaagtcttcagcaaatcttagcagatcatctcctcctcacagtcctgtctttagagaacagggtcgatatttcgggaatcctatagaaagactccaagcctcagaatgagtttggaccagataaaataatctagagttaaagatggcccacatagggagtgccagattcactcacaaggaaatgcagatgggatcaaaggttaataaacacatattgctttgaatagcatatgaaaaccttccagcagctctaataacgttaggcttggtatagaagatgcagagacatgctaaaatttctcccccaattattgccaagcagaaacttggacgatcgacatggaaattgtctccacaggaaacgaaactattactgaatttgtcctccttggcttctatgacatccctgaactgcatttcttgttttttattgtattcactgctgtctatgtcttcatcatcatagggaatatgctgattattgtagcagtggttagctcccagaggctccacaaacccatgtatattttcttggcgaatctgtccttcctggatattctctacacctccgcagtgatgccaaaaatgctggagggcttcctgcaagaagcaactatctctgtggctggttgcttgctccagttctttatcttcggctctctagccacagctgaatgcttactgctggctgtcatggcatatgaccgctacctggcaatttgctacccactccactacccactcctgatggggcccagacggtacatggggctggtggtcacaacctggctctctggatttgtggtagatggactggttgtggccctggtgacccagctgaggttctgtggccccaaccacattgaccagttttactgtgactttatgcttttcgtgggcctggcttgctcggatcccagagtggctcaggtgacaactctcattctgtctgtgttctgcctcactattccttttggactgattctgacatcttatgccagaattgtggtggcagtgctgagagttcctgctggggcaagcaggagaagggctttctccacatgctcctcccacctagctgtagtgaccacattctatggaacgctcatgatcttttatgttgcaccctctgctgtccattcccagctcctctccaaggtcttctccctgctctacactgtggtcacccctctcttcaatcctgtgatctataccatgaggaacaaggaggtgcatcaggcacttcggaagattctctgtatcaaacaaactgaaacacttgattgaaggagagtaatgaagatgttattttggacttcggacacctccactggggactcttccaggatgggttggagaggagtaactttgtcttattcgaccattctctttgaactcttctgcagttatactaaaaatgaaaatgatagggcaacaattttttaacttttattttaagttcaagggtacatgtgcaggtttgttacataggtaaacttgtgtcatgggggtttactgtacagattatttcatcacccaggtattaagcctagtactcattaatcatttttcctgatcttctccctcctcccaacctccaccctcaagtaggattcagtgtgttgttcccctctatgtatccatatgttttcataatttagctcccacttatgagtgaagacatacggtatttgattttctgttcctgtgttagtttgcgaaggatagtagcctccaattccatccatgtcaaataatcaaaattatttaaactttgattagttctttattaaatatgtcataaatatttaaaaataatacagcaataccaaaataaacctagaaatattgttttttatattattgttgtatgacatttaaaaatttctttctatgtgtatttatatttatacatacaagttggatcatggagtttgtaatctggttttccactgaacactgtgtcacgaacaactttttctattaacaagcatctatttctttattcttctgggcttcatcgtatggctaaacatgatttgttattctattttgggaatttttagttgtattctattcttttactgtacattgtttacatctggattttcctgtaataaacttttagcacctaaattgcaagatctaaggatatgtgtttttaaaaatctaaagctgaattccttttcttttaaacttcttttcttgtagaacatttcaaacatacataaaagagaagagcacagtgaacccccatgtactccatgtagccaccatccagcttcaacatcaacattttgctaatcttattttaattagctacagctccttgtttgttagttttcatggaaaattttagggcaaattccagatgttgtataactattatgttgtgtaagttatgtatgtacatattccacatatgtatttagtataatctgtgactaataaagacattttaaaaaaccatgcccaca

SEQ ID NO: 176832 - DNA, 2229 bp, Artificial Sequence
  derived and/or modified sequence
ctctaataacgttaggcttggtatagaagatgcagagacatgctaaaatttctcccccaattattgccaagcagaaacttggacgatcgacatggaaattgtctccacaggaaacgaaactattactgaatttgtcctccttggcttctatgacatccctgaactgcatttcttgttttttattgtattcactgctgtctatgtcttcatcatcatagggaatatgctgattattgtagcagtggttagctcccagaggctccacaaacccatgtatattttcttggcgaatctgtccttcctggatattctctacacctccgcagtgatgccaaaaatgctggagggcttcctgcaagaagcaactatctctgtggctggttgcttgctccagttctttatcttcggctctctagccacagctgaatgcttactgctggctgtcatggcatatgaccgctacctggcaatttgctacccactccactacccactcctgatggggcccagacggtacatggggctggtggtcacaacctggctctctggatttgtggtagatggactggttgtggccctggtgacccagctgaggttctgtggccccaaccacattgaccagttttactgtgactttatgcttttcgtgggcctggcttgctcggatcccagagtggctcaggtgacaactctcattctgtctgtgttctgcctcactattccttttggactgattctgacatcttatgccagaattgtggtggcagtgctgagagttcctgctggggcaagcaggagaagggctttctccacatgctcctcccacctagctgtagtgaccacattctatggaacgctcatgatcttttatgttgcaccctctgctgtccattcccagctcctctccaaggtcttctccctgctctacactgtggtcacccctctcttcaatcctgtgatctataccatgaggaacaaggaggtgcatcaggcacttcggaagattctctgtatcaaacaaactgaaacacttgattgaaggagagtaatgaagatgttattttggacttcggacacctccactggggactcttccaggatgggttggagaggagtaactttgtcttattcgaccattctctttgaactcttctgcagttatactaaaaatgaaaatgatagggcaacaattttttaacttttattttaagttcaagggtacatgtgcaggtttgttacataggtaaacttgtgtcatgggggtttactgtacagattatttcatcacccaggtattaagcctagtactcattaatcatttttcctgatcttctccctcctcccaacctccaccctcaagtaggattcagtgtgttgttcccctctatgtatccatatgttttcataatttagctcccacttatgagtgaagacatacggtatttgattttctgttcctgtgttagtttgcgaaggatagtagcctccaattccatccatgtcaaataatcaaaattatttaaactttgattagttctttattaaatatgtcataaatatttaaaaataatacagcaataccaaaataaacctagaaatattgttttttatattattgttgtatgacatttaaaaatttctttctatgtgtatttatatttatacatacaagttggatcatggagtttgtaatctggttttccactgaacactgtgtcacgaacaactttttctattaacaagcatctatttctttattcttctgggcttcatcgtatggctaaacatgatttgttattctattttgggaatttttagttgtattctattcttttactgtacattgtttacatctggattttcctgtaataaacttttagcacctaaattgcaagatctaaggatatgtgtttttaaaaatctaaagctgaattccttttcttttaaacttcttttcttgtagaacatttcaaacatacataaaagagaagagcacagtgaacccccatgtactccatgtagccaccatccagcttcaacatcaacattttgctaatcttattttaattagctacagctccttgtttgttagttttcatggaaaattttagggcaaattccagatgttgtataactattatgttgtgtaagttatgtatgtacatattccacatatgtatttagtataatctgtgactaataaagacattttaaaaaaccatgcccaca

SEQ ID NO: 176833 - DNA, 948 bp, Artificial Sequence
  derived and/or modified sequence
atggagatagtctcaacaggtaacgagacaatcactgagttcgtgctccttgggttttatgacattcccgagttgcacttcctgttcttcattgtgtttacagcagtgtatgtgtttataatcataggcaatatgttaatcattgtagcagtagtctcgagccagaggctccacaaacccatgtacattttccttgccaacctatcctttctggatatcctgtacactagcgccgtgatgcctaagatgttagagggatttctgcaggaggcaacgataagcgtggcagggtgcttgctacagttctttatttttggctcgcttgcaaccgctgagtgtctgctcctggccgtaatggcctacgaccgatacttagccatttgttatcccctgcattatcctcttctaatgggcccacgaagatacatgggtctggtggttaccacctggttaagcggatttgtggtggatggactcgtggtggccctggtgacacagctaagattctgcggacctaaccatatcgatcagttctattgcgatttcatgctattcgtgggtctcgcctgcagcgaccctcgtgtcgcccaggtgacgactctgatcctatcggtgttctgtctcacgatacctttcggactgatcctgacatcctacgcaaggattgttgtcgcagttcttagagtgcccgctggagctagtcggcgtagagcctttagtacatgctccagccacctcgcagttgtgactacattttatggcacgctaatgatattttatgtggccccatcagctgtgcattcacagcttttaagcaaagttttcagccttctctatacagtggtaactcccctttttaaccctgtgatttacactatgcggaacaaggaagtgcatcaggctctcaggaagattctgtgcattaaacagacagaaacccttgactag

SEQ ID NO: 176834 - DNA, 948 bp, Artificial Sequence
  derived and/or modified sequence
atggagatagtatctacagggaacgagaccatcactgagttcgtgctcctgggcttctatgacatccccgagctccattttctgttttttatagtgttcacagccgtgtacgtcttcattataatcggcaacatgttaatcatagtggcagtcgtatcatctcaaaggctgcacaagcccatgtatatatttttggctaacctgagtttcctggacatcctgtatactagcgccgtgatgcccaagatgctggagggattcctacaggaagccaccatatccgtcgcaggatgcctcttacagttctttatctttggctctctggccaccgccgagtgtctactcttggccgtgatggcatatgacagatacctggccatttgctaccctctgcattaccccctacttatgggcccacgtcgctacatgggcctggttgtgaccacatggctatcggggtttgtggtggatgggctagttgtcgctttagtgacccaactcagattctgcggcccaaaccatatcgaccagttttattgcgacttcatgctctttgtaggcctggcctgctctgaccccagagtcgcccaggtgaccaccttaattctgagtgtgttctgcctgaccattccctttgggttaattctcacctcttatgcgaggattgttgtcgccgtgttaagggtaccggctggcgcatcacggaggcgggctttttctacgtgttcatctcatctggcagtggtcacgacattttacggcacactgatgattttttatgtggcccctagcgcagtccactcgcagctgctttctaaagtgttcagcttgctttatactgtggtcactccactgtttaatccagtcatctacaccatgaggaacaaagaggtccatcaagcattgaggaagatcctctgtattaaacaaacagagaccctcgactag

SEQ ID NO: 176835 - DNA, 948 bp, Artificial Sequence
  derived and/or modified sequence
atggagatcgtctcgactggcaatgagaccatcacagagttcgtgctgctgggtttttatgatattcccgaactccattttctgttctttattgtgttcacagccgtttacgtgtttatcatcatcgggaatatgttgattatagtcgccgtggtaagtagtcaacgactccataagccaatgtatatatttctggctaacctatccttcttggacattctttatacctcagcagtcatgcctaaaatgctcgaagggttcctgcaggaggcaacaatctccgtggcaggctgcctgctgcaatttttcatcttcggttctttggctactgctgagtgcttgttattggcggtcatggcgtatgacaggtacctcgctatatgttaccctttacattatccactgctgatggggcctagacgctacatgggactggtggtcaccacctggttgagcgggttcgtggtggacggcttggtggttgccttggtaacccaattgcgattctgcggccctaatcatatcgaccaattctattgtgacttcatgttgtttgtaggattagcctgctctgatccacgggtcgcccaggtgaccactcttatcttgagcgtgttctgcctgacgatccctttcggtctgatcctgacttcatatgcccgaatcgtcgtggccgtcctacgcgtgccagcgggagcctcgcgtaggcgcgcttttagcacgtgctcaagccacctcgctgtggtgacaacattttatggaacccttatgatcttttacgtagcaccatccgccgtccattcacagttgctgagcaaggttttctctctcctgtataccgtggtaacgcccctctttaaccctgttatctacacaatgagaaacaaggaagtgcaccaggcactcaggaaaatcctctgcattaagcaaaccgaaacgctggactag

SEQ ID NO: 176836 - protein, 312 aa, Artificial Sequence
  derived and/or modified sequence
MSANTSMVTEFLLLGFSHLADLQGLLFSVFLTIYLLTVAGNFLIVVLVSTDAALQSPMYFFLRTLSALEIGYTSVTVPLLLHHLLTGRRHISRSGCALQMFFFLFFGATECCLLAAMAYDRYAAICEPLRYPLLLSHRVCLQLAGSAWACGVLVGLGHTPFIFSLPFCGPNTIPQFFCEIQPVLQLVCGDTSLNELQIILATALLILCPFGLILGSYGRILVTIFRIPSVAGRRKAFSTCSSHLIMVSLFYGTALFIYIRPKASYDPATDPLVSLFYAVVTPILNPIIYSLRNTEVKAALKRTIQKTVPMEI

SEQ ID NO: 176837 - protein, 312 aa, Artificial Sequence
  derived and/or modified sequence
MSANTSMVTEFLLLGFSHLADLQGLLFSVFLTIYLLTVAGNFLIVVLVSTDAALQSPMYLFLRTLSALEIGYTSVTVPLLLHHLLTGRRHISRSGCALQMFFFLFFGATECCLLAAMAYDRYAAICEPLRYPLLLSHRVCLQLAGSAWACGVLVGLGHTPFIFSLPFCGPNTIQQFFCEIQPVLQLVCGDTSLNELQIILATALLILCPFGLILGSYGRILVTIFRIPSVAGRRKAFSTCSSHLIVVSLFYGTALFIYIRPKASYDPATDPLVSLFYAVVTPILNPIIYSLRNTEVKAALKRTIQKTVPMEI

SEQ ID NO: 176838 - protein, 312 aa, Artificial Sequence
  derived and/or modified sequence
MSANTSMVTEFLLLGFSHLADLQGLLFSVFLTIYLLTVAGNFLIVVLVSTDAALQSPMYFFLRTLSALEIGYTSVTVPLLLHHLLTGRRHISRSGCALQMFFFLFFGATECCLLAAMAYDRYAAICEPLRYPLLLSHRVCLQLAGSAWACGVLVGLGHTPFIFSLPFCGPNTIPQFFCEIQPVLQLVCGDTSLNELQIILATALLILCPFGLILGSYGRILVTIFRIPSVAGRRKAFSTCSSHLIVVSLFYGTALFIYIRPKASYDPATDPLVSLFYAVVTPILNPIIYSLRNTEVKAALKRTIQKTVPMEI

SEQ ID NO: 176839 - protein, 295 aa, Artificial Sequence
  derived and/or modified sequence
SVTEFLLLGVTDIQELQPFLFVVFLTIYFISVAGNGAILMIVISDPRLHSPMYFFLGNLSCLDICYSSVTLPKMLQNFLSAHKISRSGCALQMFFFLFFGATECCLLAAMAYDRYAAICEPLRYPLLLSHRVCLQLAGSAWACGVLVGLGHTPFIFSLPFCGPNTIPQFFCEIQPVLQLVCGDTSLNELQIILATALLILCPFGLILGSYGRILVTIFRIPSVAGRRKAFSTCSSHLIMVSLFYGTALFIYIRPKASYDPATDPLVSLFYAVVTPILNPIIYSLRNTEVKAALKR

SEQ ID NO: 176840 - protein, 295 aa, Artificial Sequence
  derived and/or modified sequence
SVTEFLLLGVTDIQELQPFLFVVFLTIYFISVAGNGAILMIVISDPRLHSPMYFFLGNLSCLDICYSSVTLPKMLQNFLSAHKISRSGCALQMFFFLFFGATECCLLAAMAYDRYAAICEPLRYPLLLSHRVCLQLAGSAWACGVLVGLGHTPFIFSLPFCGPNTIQQFFCEIQPVLQLVCGDTSLNELQIILATALLILCPFGLILGSYGRILVTIFRIPSVAGRRKAFSTCSSHLIVVSLFYGTALFIYIRPKASYDPATDPLVSLFYAVVTPILNPIIYSLRNTEVKAALKR

SEQ ID NO: 176841 - protein, 295 aa, Artificial Sequence
  derived and/or modified sequence
SVTEFLLLGVTDIQELQPFLFVVFLTIYFISVAGNGAILMIVISDPRLHSPMYFFLGNLSCLDICYSSVTLPKMLQNFLSAHKISRSGCALQMFFFLFFGATECCLLAAMAYDRYAAICEPLRYPLLLSHRVCLQLAGSAWACGVLVGLGHTPFIFSLPFCGPNTIPQFFCEIQPVLQLVCGDTSLNELQIILATALLILCPFGLILGSYGRILVTIFRIPSVAGRRKAFSTCSSHLIVVSLFYGTALFIYIRPKASYDPATDPLVSLFYAVVTPILNPIIYSLRNTEVKAALKR

SEQ ID NO: 176842 - protein, 304 aa, Artificial Sequence
  derived and/or modified sequence
ERMSANTSMVTEFLLLGFSHLADLQGLLFSVFLTIYLLTVAGNFLIVVLVSTDAALQSPMYFFLRTLSALEIGYTSVTVPLLLHHLLTGRRHISRSGCALQMFFFLFFGATECCLLAAMAYDRYAAICEPLRYPLLLSHRVCLQLAGSAWACGVLVGLGHTPFIFSLPFCGPNTIPQFFCEIQPVLQLVCGDTSLNELQIILATALLILCPFGLILGSYGRILVTIFRIPSVAGRRKAFSTCSSHLIVVSLFYGTALFIYIRPKASYDPATDPLVSLFYAVVTPILNPIIYSLRNTEVKAALKR

SEQ ID NO: 176843 - DNA, 939 bp, Artificial Sequence
  derived and/or modified sequence
atgagcgccaacaccagcatggtgaccgagttcctgctgctgggcttcagccacctggccgacctgcagggcctgctgttcagcgtgttcctgaccatctacctgctgaccgtggccggcaacttcctgatcgtggtgctggtgagcaccgacgccgccctgcagagccccatgtacttcttcctgagaaccctgagcgccctggagatcggctacaccagcgtgaccgtgcccctgctgctgcaccacctgctgaccggcagaagacacatcagcagaagcggctgcgccctgcagatgttcttcttcctgttcttcggcgccaccgagtgctgcctgctggccgccatggcctacgacagatacgccgccatctgcgagcccctgagataccccctgctgctgagccacagagtgtgcctgcagctggccggcagcgcctgggcctgcggcgtgctggtgggcctgggccacacccccttcatcttcagcctgcccttctgcggccccaacaccatcccccagttcttctgcgagatccagcccgtgctgcagctggtgtgcggcgacaccagcctgaacgagctgcagatcatcctggccaccgccctgctgatcctgtgccccttcggcctgatcctgggcagctacggcagaatcctggtgaccatcttcagaatccccagcgtggccggcagaagaaaggccttcagcacctgcagcagccacctgatcatggtgagcctgttctacggcaccgccctgttcatctacatcagacccaaggccagctacgaccccgccaccgaccccctggtgagcctgttctacgccgtggtgacccccatcctgaaccccatcatctacagcctgagaaacaccgaggtgaaggccgccctgaagagaaccatccagaagaccgtgcccatggagatctag

SEQ ID NO: 176844 - DNA, 939 bp, Artificial Sequence
  derived and/or modified sequence
atgagcgccaacaccagcatggtgaccgagttcctgctgctgggcttcagccacctggccgacctgcagggcctgctgttcagcgtgttcctgaccatctacctgctgaccgtggccggcaacttcctgatcgtggtgctggtgagcaccgacgccgccctgcagagccccatgtacctgttcctgagaaccctgagcgccctggagatcggctacaccagcgtgaccgtgcccctgctgctgcaccacctgctgaccggcagaagacacatcagcagaagcggctgcgccctgcagatgttcttcttcctgttcttcggcgccaccgagtgctgcctgctggccgccatggcctacgacagatacgccgccatctgcgagcccctgagataccccctgctgctgagccacagagtgtgcctgcagctggccggcagcgcctgggcctgcggcgtgctggtgggcctgggccacacccccttcatcttcagcctgcccttctgcggccccaacaccatccagcagttcttctgcgagatccagcccgtgctgcagctggtgtgcggcgacaccagcctgaacgagctgcagatcatcctggccaccgccctgctgatcctgtgccccttcggcctgatcctgggcagctacggcagaatcctggtgaccatcttcagaatccccagcgtggccggcagaagaaaggccttcagcacctgcagcagccacctgatcgtggtgagcctgttctacggcaccgccctgttcatctacatcagacccaaggccagctacgaccccgccaccgaccccctggtgagcctgttctacgccgtggtgacccccatcctgaaccccatcatctacagcctgagaaacaccgaggtgaaggccgccctgaagagaaccatccagaagaccgtgcccatggagatctag

SEQ ID NO: 176845 - DNA, 939 bp, Artificial Sequence
  derived and/or modified sequence
atgagcgccaacaccagcatggtgaccgagttcctgctgctgggcttcagccacctggccgacctgcagggcctgctgttcagcgtgttcctgaccatctacctgctgaccgtggccggcaacttcctgatcgtggtgctggtgagcaccgacgccgccctgcagagccccatgtacttcttcctgagaaccctgagcgccctggagatcggctacaccagcgtgaccgtgcccctgctgctgcaccacctgctgaccggcagaagacacatcagcagaagcggctgcgccctgcagatgttcttcttcctgttcttcggcgccaccgagtgctgcctgctggccgccatggcctacgacagatacgccgccatctgcgagcccctgagataccccctgctgctgagccacagagtgtgcctgcagctggccggcagcgcctgggcctgcggcgtgctggtgggcctgggccacacccccttcatcttcagcctgcccttctgcggccccaacaccatcccccagttcttctgcgagatccagcccgtgctgcagctggtgtgcggcgacaccagcctgaacgagctgcagatcatcctggccaccgccctgctgatcctgtgccccttcggcctgatcctgggcagctacggcagaatcctggtgaccatcttcagaatccccagcgtggccggcagaagaaaggccttcagcacctgcagcagccacctgatcgtggtgagcctgttctacggcaccgccctgttcatctacatcagacccaaggccagctacgaccccgccaccgaccccctggtgagcctgttctacgccgtggtgacccccatcctgaaccccatcatctacagcctgagaaacaccgaggtgaaggccgccctgaagagaaccatccagaagaccgtgcccatggagatctag

SEQ ID NO: 176846 - DNA, 888 bp, Artificial Sequence
  derived and/or modified sequence
agcgtgaccgagttcctgctgctgggcgtgaccgacatccaggagctgcagcccttcctgttcgtggtgttcctgaccatctacttcatcagcgtggccggcaacggcgccatcctgatgatcgtgatcagcgaccccagactgcacagccccatgtacttcttcctgggcaacctgagctgcctggacatctgctacagcagcgtgaccctgcccaagatgctgcagaacttcctgagcgcccacaagatcagcagaagcggctgcgccctgcagatgttcttcttcctgttcttcggcgccaccgagtgctgcctgctggccgccatggcctacgacagatacgccgccatctgcgagcccctgagataccccctgctgctgagccacagagtgtgcctgcagctggccggcagcgcctgggcctgcggcgtgctggtgggcctgggccacacccccttcatcttcagcctgcccttctgcggccccaacaccatcccccagttcttctgcgagatccagcccgtgctgcagctggtgtgcggcgacaccagcctgaacgagctgcagatcatcctggccaccgccctgctgatcctgtgccccttcggcctgatcctgggcagctacggcagaatcctggtgaccatcttcagaatccccagcgtggccggcagaagaaaggccttcagcacctgcagcagccacctgatcatggtgagcctgttctacggcaccgccctgttcatctacatcagacccaaggccagctacgaccccgccaccgaccccctggtgagcctgttctacgccgtggtgacccccatcctgaaccccatcatctacagcctgagaaacaccgaggtgaaggccgccctgaagagatag

SEQ ID NO: 176847 - DNA, 888 bp, Artificial Sequence
  derived and/or modified sequence
agcgtgaccgagttcctgctgctgggcgtgaccgacatccaggagctgcagcccttcctgttcgtggtgttcctgaccatctacttcatcagcgtggccggcaacggcgccatcctgatgatcgtgatcagcgaccccagactgcacagccccatgtacttcttcctgggcaacctgagctgcctggacatctgctacagcagcgtgaccctgcccaagatgctgcagaacttcctgagcgcccacaagatcagcagaagcggctgcgccctgcagatgttcttcttcctgttcttcggcgccaccgagtgctgcctgctggccgccatggcctacgacagatacgccgccatctgcgagcccctgagataccccctgctgctgagccacagagtgtgcctgcagctggccggcagcgcctgggcctgcggcgtgctggtgggcctgggccacacccccttcatcttcagcctgcccttctgcggccccaacaccatccagcagttcttctgcgagatccagcccgtgctgcagctggtgtgcggcgacaccagcctgaacgagctgcagatcatcctggccaccgccctgctgatcctgtgccccttcggcctgatcctgggcagctacggcagaatcctggtgaccatcttcagaatccccagcgtggccggcagaagaaaggccttcagcacctgcagcagccacctgatcgtggtgagcctgttctacggcaccgccctgttcatctacatcagacccaaggccagctacgaccccgccaccgaccccctggtgagcctgttctacgccgtggtgacccccatcctgaaccccatcatctacagcctgagaaacaccgaggtgaaggccgccctgaagagatag

SEQ ID NO: 176848 - DNA, 888 bp, Artificial Sequence
  derived and/or modified sequence
agcgtgaccgagttcctgctgctgggcgtgaccgacatccaggagctgcagcccttcctgttcgtggtgttcctgaccatctacttcatcagcgtggccggcaacggcgccatcctgatgatcgtgatcagcgaccccagactgcacagccccatgtacttcttcctgggcaacctgagctgcctggacatctgctacagcagcgtgaccctgcccaagatgctgcagaacttcctgagcgcccacaagatcagcagaagcggctgcgccctgcagatgttcttcttcctgttcttcggcgccaccgagtgctgcctgctggccgccatggcctacgacagatacgccgccatctgcgagcccctgagataccccctgctgctgagccacagagtgtgcctgcagctggccggcagcgcctgggcctgcggcgtgctggtgggcctgggccacacccccttcatcttcagcctgcccttctgcggccccaacaccatcccccagttcttctgcgagatccagcccgtgctgcagctggtgtgcggcgacaccagcctgaacgagctgcagatcatcctggccaccgccctgctgatcctgtgccccttcggcctgatcctgggcagctacggcagaatcctggtgaccatcttcagaatccccagcgtggccggcagaagaaaggccttcagcacctgcagcagccacctgatcgtggtgagcctgttctacggcaccgccctgttcatctacatcagacccaaggccagctacgaccccgccaccgaccccctggtgagcctgttctacgccgtggtgacccccatcctgaaccccatcatctacagcctgagaaacaccgaggtgaaggccgccctgaagagatag

SEQ ID NO: 176849 - DNA, 915 bp, Artificial Sequence
  derived and/or modified sequence
gagagaatgagcgccaacaccagcatggtgaccgagttcctgctgctgggcttcagccacctggccgacctgcagggcctgctgttcagcgtgttcctgaccatctacctgctgaccgtggccggcaacttcctgatcgtggtgctggtgagcaccgacgccgccctgcagagccccatgtacttcttcctgagaaccctgagcgccctggagatcggctacaccagcgtgaccgtgcccctgctgctgcaccacctgctgaccggcagaagacacatcagcagaagcggctgcgccctgcagatgttcttcttcctgttcttcggcgccaccgagtgctgcctgctggccgccatggcctacgacagatacgccgccatctgcgagcccctgagataccccctgctgctgagccacagagtgtgcctgcagctggccggcagcgcctgggcctgcggcgtgctggtgggcctgggccacacccccttcatcttcagcctgcccttctgcggccccaacaccatcccccagttcttctgcgagatccagcccgtgctgcagctggtgtgcggcgacaccagcctgaacgagctgcagatcatcctggccaccgccctgctgatcctgtgccccttcggcctgatcctgggcagctacggcagaatcctggtgaccatcttcagaatccccagcgtggccggcagaagaaaggccttcagcacctgcagcagccacctgatcgtggtgagcctgttctacggcaccgccctgttcatctacatcagacccaaggccagctacgaccccgccaccgaccccctggtgagcctgttctacgccgtggtgacccccatcctgaaccccatcatctacagcctgagaaacaccgaggtgaaggccgccctgaagagatag

SEQ ID NO: 176850 - DNA, 939 bp, Artificial Sequence
  derived and/or modified sequence
atgagcgcgaacacctcgatggtgactgagttccttttgctgggtttcagccatctggccgatctgcaggggctactgtttagcgttttcctgaccatctatctgctgacagtcgccggtaattttctgatcgttgtactcgtgagcacagacgcggccctgcagtctcccatgtatttctttcttcggacattgtcagcgctagagataggatatacgtcagttaccgtgcccctgctgctccatcacttacttacgggccggagacatattagtcggagtgggtgtgccctccaaatgtttttttttctcttcttcggcgctacagaatgttgccttctggccgccatggcatatgaccggtatgctgctatctgcgagccattacgttaccctctccttctatcccatcgggtctgtttgcagctggctggctctgcatgggcttgtggagtactggttggactgggtcacacaccttttattttctcacttcccttctgcggtcctaacacgattccccagtttttctgtgagatccagcctgtgctgcaactcgtttgcggagatacatcgctgaatgagttgcagatcatcctagccaccgcacttctgatcttatgtccctttggtctgatcctgggatcctacggacgtatcctggtcaccatcttccgaatcccatcagtagcaggtagaaggaaagccttttccacatgttcatcacacctcattatggtctctctgttctacgggacagccttattcatctacatacgtccaaaggcctcctatgatccagccaccgatccactggtcagcttgttctacgcagtggttactcctatattgaatcctatcatctattcccttagaaacaccgaggtgaaggcagcattgaaaagaaccattcaaaagacagtacccatggagatctag

SEQ ID NO: 176851 - DNA, 939 bp, Artificial Sequence
  derived and/or modified sequence
atgagtgccaataccagtatggttaccgagttcctcctgctgggcttctcacatctcgcggacctccaaggcttacttttctcagtgtttctgactatctacctgctgaccgtggccggcaatttccttatcgttgtattagttagcaccgacgcggccctgcaatcaccaatgtatttcttcctgcgaactttgtctgcgctggaaatcggatacactagcgtcacagtgccactcctgttgcaccatcttttaaccgggaggcgccacatctcccgatcgggatgcgccttgcagatgtttttctttctgttcttcggagccacagaatgctgtctgctggccgcaatggcatatgataggtatgcagcaatctgtgagcctcttcgttatcccctactgttgagccacagggtgtgccttcagctcgctgggtccgcctgggcttgcggggtgttggtcggacttggtcatacgcctttcatattttcactgcctttttgcgggcctaatacgatcccccagtttttctgcgaaattcagcccgtattgcaattagtgtgcggggatacctcactgaacgaactgcaaatcattcttgcgacagctttgctgattttatgcccctttggacttatactgggcagctatggcagaatcctggtcaccatcttccggatacccagcgttgctggtagaagaaaggcgttttcgacctgctcctcacatcttataatggtgagcttgttttatggaaccgccctgtttatttacattcgtccgaaggcctcctacgatcccgccaccgatcctctagtgagtctgttctacgctgtcgtcaccccaatcttaaacccaattatctacagcttgagaaataccgaggttaaagccgccttgaagaggacaatccagaaaaccgtccctatggagatctag

SEQ ID NO: 176852 - DNA, 939 bp, Artificial Sequence
  derived and/or modified sequence
atgtcagccaatacatccatggtcaccgagtttctcttgctgggtttttcacacctcgctgatctgcaagggctgctgttcagtgtgtttctaactatatacctgctgaccgtggccggtaacttcctgatcgtggtccttgtttccaccgatgcagcccttcagtctcctatgtatttgttcctgcggacactgagcgcactggaaatcggttacacgtcggtgaccgttcctctcctgctacatcacctcctgaccggcagaaggcacatttccagaagtgggtgcgcattgcaaatgttctttttcctgtttttcggcgcaaccgagtgttgccttcttgccgccatggcctacgatcggtatgccgcaatctgtgagcccttacggtacccgctgctcctgtcccatagggtgtgtctccaacttgccgggtccgcttgggcttgcggtgtcctcgtcggtttgggacacacacctttcattttctctctcccattttgtggtcccaacactatccagcagtttttctgtgaaatccagcccgttcttcagcttgtgtgtggggatacaagtctgaatgaactccagattatcctggcgaccgccctgctgattttgtgccctttcggcctgatcctgggatcctatgggaggatcttggtcaccatcttccgcatcccatcggtagctggccgccggaaggcgttctccacgtgttcaagtcatctgattgtggtgagcctgttctatggcactgcgttattcatctatatcaggccgaaagcctcttatgatcccgcgactgatccactggtgtccctattctatgccgtcgtcacgcctatcttgaaccccatcatatactccctgagaaacactgaggtgaaagctgctttaaaaaggactatacagaagaccgtcccgatggaaatctag

SEQ ID NO: 176853 - DNA, 939 bp, Artificial Sequence
  derived and/or modified sequence
atgtccgctaacactagcatggtgactgaatttctactattaggattctctcatcttgccgatctacagggtcttctgtttagtgtcttcctgacaatctacctcctcacagtcgcaggcaacttcctgattgtggtcttggtttccaccgatgccgccctgcagtcaccgatgtacttcttcttgagaacactgtcagcccttgagatcgggtacacttctgtgaccgtgccactcttactgcatcatctccttaccggccggcggcatatcagccgctcagggtgcgccctccagatgttcttctttttgttcttcggcgccaccgagtgttgcctgctggctgcaatggcctacgatcgatatgctgccatatgcgaacctctgaggtatcctctgttgctgtcacatcgtgtctgtctgcagttggccggcagtgcttgggcatgtggggtgttggtgggcctcggtcacacaccgttcatcttctctttgccattttgtgggcctaacactattccacaattcttctgcgaaattcagcctgtcctccagttagtgtgtggggataccagcctgaatgaactacagatcattttagccactgccctgctgatcctgtgtccatttggcctcatcctgggaagttatggccgcatcctggtaactatcttcagaataccaagtgtggcagggagaaggaaggccttttctacctgtagttcccatctgatcgttgtgagcctgttctatggcaccgccctgtttatctacataaggcctaaggcatcttacgacccagccactgacccgcttgtgagcctcttctacgctgtggtgacccctatcctgaatcccatcatttattctcttcgcaatacggaggttaaagctgccttgaagaggaccatccagaagaccgtaccaatggagatttag

SEQ ID NO: 176854 - DNA, 939 bp, Artificial Sequence
  derived and/or modified sequence
atgtccgctaatacgtctatggtgactgagttccttctactggggtttagtcacttggccgacctccagggactcctgttcagcgtgtttctgacaatctatctactgactgtggccggtaattttctgatcgttgtgctggtgtcaacagatgcggcactgcagtcccccatgtatttctttctgagaactctcagtgccttggagatcgggtacacctccgtgaccgtgcctctgctcttacaccacctgctcacaggaaggcgtcatatctcccgcagcgggtgtgcgctgcagatgtttttcttcctgttctttggagcgacggaatgttgcttgttggccgctatggcatacgacaggtacgcagctatctgtgagcctctccgctaccctctgcttttgtcccacagagtttgcctgcagctcgctggtagcgcctgggcatgcggggtgctcgtcggactaggtcacacccccttcatattcagcctgcccttctgcggacctaacactataccccagttcttttgtgaaatacaacctgttctgcaactagtctgtggcgatacgtccctaaatgagctgcaaattatcctggcaactgcccttttgatcttgtgcccttttggcctgatactcggttcgtatggccgaattcttgttaccatattcagaattccgtccgtggcgggacgccggaaagcatttagtacatgtagctcacatctgattatggtcagtctgttttatggtacagccctctttatctatattaggccaaaagcgagttatgatcccgccactgatccactggtgtcactgttctatgccgtggtcaccccaatcctgaaccctattatttactctctaagaaacacagaagtgaaagctgccctgaagcggacaatccaaaaaactgtgcctatggagatctag

SEQ ID NO: 176855 - DNA, 939 bp, Artificial Sequence
  derived and/or modified sequence
atgagtgccaatacgagcatggtgacagaattccttctactggggtttagccaccttgccgaccttcaagggttgctatttagcgtctttctgacaatttatctcctgactgtcgcaggaaactttctgattgtggtacttgtttcaaccgacgctgcactacagtcccccatgtacttttttctaagaaccctgagtgctctagagatcggctatacttcagttacagtgcccctcctcctgcaccatctactgaccggtcgcagacatatttcccggtcagggtgtgccctgcagatgtttttcttccttttcttcggtgcaaccgaatgctgcctgctggctgctatggcttatgatcgctatgcagccatttgcgagcccttgcggtatcccctcctgctcagccaccgagtttgccttcagttggcaggtagcgcttgggcgtgtggagttcttgtcggcctaggacacactcccttcatcttttcactacctttttgcggcccaaatacaatcccccagttcttctgtgagatccaacccgtgttgcagctcgtctgcggtgacaccagcttaaatgagctccagataatacttgccaccgccctcctcattctatgcccattcgggttgatactgggatcatacggccggattctagttacaatttttcggatcccctccgtagcgggccgtaggaaagccttttcaacttgttctagtcacctgatcgtggtcagccttttttatggcacagcgctcttcatctacatccggcctaaagctagctacgatcccgctactgatcctctggtgtctctgttctacgccgtcgtgaccccaattctcaacccaatcatctactcgctgagaaataccgaagtcaaggccgcgctaaaaaggactatacagaagactgttcccatggagatctag

SEQ ID NO: 176856 - DNA, 939 bp, Artificial Sequence
  derived and/or modified sequence
atgtctgctaatacctccatggtgacagagtttctcctcctcggattctcacatctggcagatttacaggggcttctgtttagcgtgtttctcaccatctaccttcttacagtcgctggcaactttttgatcgtggtgttggtgtctaccgatgctgcactgcagtccccaatgtactttttccttagaacactttctgcgctcgaaatcggttacacttcggtcacggtgcccctgctgcttcaccatctcctgactggcaggcgtcacataagcagatccgggtgtgccctccagatgtttttcttcctgtttttcggcgccaccgagtgctgcctcctcgcagctatggcctacgaccgctacgctgctatctgcgagccactgcgctaccccctcctgctctcccatcgagtctgcctgcagcttgctgggtcagcctgggcctgcggggttttggtgggcctgggccataccccgtttatttttagtctccccttttgcggccccaatactattccacagttcttttgcgaaattcagcctgttctccagctggtgtgcggagacacttccctgaacgagctccagattatcttggctaccgccctgctgattttatgtccttttggtctcatcctcggctcctacgggcgaattctcgtcacaatattcaggattccttcagtggcaggcagacggaaagcgtttagtacgtgtagttcccacttaattgtcgtctcccttttctacgggaccgcattgtttatctatatccggccgaaggcgtcatacgaccccgccacggatcctcttgtgagcctgttttatgccgtcgtcacaccaatactgaatcccattatttactctctgaggaacaccgaagttaaggccgccctgaaaaggacaattcaaaaaactgtgccaatggagatttag

SEQ ID NO: 176857 - DNA, 939 bp, Artificial Sequence
  derived and/or modified sequence
atgtcagctaacactagtatggtgaccgagtttctactactagggttttcccatttagctgatctacagggcctgctattcagcgtcttcctcactatttaccttctgaccgtcgctggaaattttctgattgttgtgctggtctccactgacgccgccctgcagtcacccatgtatttctttctgcgtaccctgtccgcacttgagatcgggtacacaagcgtgaccgtgcccctgctcctccatcacctccttactggcaggaggcatatttcccggagtgggtgcgccctgcaaatgtttttctttctctttttcggcgccactgagtgctgtctcctggcggccatggcctacgaccgatacgcagccatttgtgagcccctgcggtaccctttattgctgagtcatagagtatgtctgcagctcgcaggaagcgcctgggcctgcggagtactcgtgggtttaggccacacacctttcattttcagtttgccgttctgtggcccaaacacaataccacagttcttctgcgagatccaacccgttttgcagctcgtatgtggcgatacctccctcaacgaacttcaaattattctggctacagctctgctgatattgtgcccatttgggctgatccttgggtcatacggaaggatactggtcaccatttttcggatccccagtgttgcagggcgccggaaggctttctctacttgtagcagccacctgatcgtggtcagcttgttctatgggactgcactttttatatacataagacccaaggcaagctatgaccctgccaccgatccattggtgtctctgttctatgctgtcgtgacccccatcttgaatcctattatttacagcctacgcaataccgaggtgaaagccgcactgaaacgtacgatacagaagaccgtgccaatggagatctag

SEQ ID NO: 176858 - DNA, 888 bp, Artificial Sequence
  derived and/or modified sequence
tctgtcacagaattcctgcttctcggcgtcaccgacatccaggagctgcagccattcttgtttgtcgtgttcttgacaatctactttatttccgtggctggcaacggagcaatacttatgatagtgataagcgacccacgcctgcacagcccaatgtactttttccttgggaacctgtcttgcttagacatctgctatagttccgttaccctgccaaagatgctgcagaactttctcagcgcccataagatcagcaggagcggctgcgctcttcagatgtttttctttctctttttcggagcaacagagtgctgcctgcttgccgcaatggcatatgacaggtacgccgccatatgcgaaccgctgcggtatcccctattgctgtcccatagagtatgtttgcagctcgcaggatccgcttgggcgtgcggagtattggtgggtttgggacacactccattcatcttcagtctaccattctgcgggccaaacacaattccacagttcttctgtgaaatccaacccgtccttcaactggtctgtggagatacatccctaaatgagctgcagataatcttggctacagcgctgctaattttgtgtcccttcggtttgatcctagggagctacggacgcattctcgtgacaattttcagaatcccctcagtggcaggaagaaggaaagctttctccacatgtagtagtcatctgataatggtatctctgttttatgggaccgcgctgtttatttacattcggcccaaagcgtcatatgatcctgctacggatcccctagtctccttgttttatgctgtagttactccgatcctcaacccaattatatatagcctcagaaacactgaggttaaggctgcattaaaaagatag

SEQ ID NO: 176859 - DNA, 888 bp, Artificial Sequence
  derived and/or modified sequence
tccgtgaccgaatttctgcttctcggggtgacagacatccaggaactgcagcccttcctgttcgtggtgttcctgaccatatatttcatctctgtggctggcaacggcgcaattctgatgatagtgatttccgatcccaggctacactctccaatgtacttttttctcggtaatctgagctgcctggatatatgctactcatccgtgaccctgcccaaaatgttgcagaacttcttatccgcccacaagatctctcggagcggctgtgccctgcagatgtttttctttctatttttcggtgctacggagtgttgcctcctcgccgccatggcctacgatcgatatgccgcgatctgcgaaccactcagatacccactgctgctcagtcatagagtctgcctgcagttggcgggatcggcatgggcatgcggtgtgctggtgggcttgggccatactccctttatcttcagccttcctttctgtggccccaataccattccccagtttttctgcgagattcagccggtgctgcagctggtttgcggggatacatccctgaacgaacttcagattatcctggctaccgcacttctgatcctgtgcccattcgggctcatcctaggatcttatggtagaatcttagtgaccatttttcgaataccaagcgtcgcggggcggagaaaggcatttagtacatgtagctcacacctgatcatggtgagtctgttctacggaacagccttattcatttacatccgaccgaaggcctcttatgaccctgcgaccgaccctctggtgagtcttttctacgccgtcgtgacaccaattctaaatccaatcatatattcccttcggaatacagaggttaaagccgccctaaagcgatag

SEQ ID NO: 176860 - DNA, 888 bp, Artificial Sequence
  derived and/or modified sequence
agtgtgacagaattcctattactgggtgtcaccgatatacaggagctgcagccattcctgtttgtggtcttcttaactatttattttatatcagtggctggaaatggagctatcctaatgatagtcatcagcgacccccgcctgcacagccccatgtacttctttcttgggaatctgtcttgcctggatatctgttactcctcagtgacactgcctaagatgctgcagaacttcttgagtgctcataaaatcagccgtagcgggtgcgcattacagatgtttttttttctcttctttggagccacggaatgctgcctcttggccgcgatggcatacgataggtatgccgctatttgtgagccccttcgttaccccttgcttctgtctcaccgggtgtgcctgcaacttgctggttccgcctgggcatgcggggtgctcgttggtctaggacatacacccttcatcttcagccttcccttctgcggccctaacaccattcaacagttcttttgcgaaatacagcccgtactccagctggtgtgtggcgatacatccttaaacgaattgcaaattatccttgcaacggccctgcttatactttgcccttttggcttaatactggggtcatacggcaggatccttgtcaccattttccgtatccccagcgtagcagggaggcgtaaggctttttcaacatgctcatctcacttgattgtggtgagcctattttatgggactgcgctgttcatttacatcaggccgaaggcatcttatgacccagccactgaccctttagtcagcttattctatgcagttgtaacaccaatactaaacccaattatctactcactccggaacacagaggtaaaggcggctctcaagcggtag

SEQ ID NO: 176861 - DNA, 888 bp, Artificial Sequence
  derived and/or modified sequence
tcggttacagaattcctcctcttaggggtaacggacattcaggagttgcagccgtttctttttgtagtatttctcacaatttattttatctctgttgccggcaatggcgctatactcatgatcgtcatctcagaccccaggctgcacagccccatgtacttctttctgggaaatcttagctgtctggatatttgttatagcagtgtgacgctccctaagatgctgcagaatttccttagcgcccataaaatatcccgcagcggttgtgccctccagatgttctttttcctattcttcggggccactgaatgctgcttgctggctgccatggcatatgacaggtacgccgcaatctgcgagcccctaaggtatcctctgttactgtcccatcgggtatgcttgcagcttgcaggatctgcctgggcatgcggtgtattggttggacttggtcacactccattcatcttctcgcttcccttttgtggccctaacacgattccccagttcttttgcgaaattcagcctgtactccaactggtttgcggagatacctcccttaacgaacttcaaatcatcttagcaacagctcttctaatcctgtgcccattcggcctaatattaggctcatatggtcgcatcttagttacgatattccggatcccgtccgttgctggacgaaggaaggctttctcgacgtgtagttctcacttaatcgtggtttctctcttttatggcacggcattgttcatatatatcagacccaaggcttcgtacgaccctgcaactgaccccttggtctctcttttttacgccgtggtcaccccaattctgaacccgattatctactcgttaaggaacacagaggtaaaggccgctctaaagcgatag

SEQ ID NO: 176862 - DNA, 915 bp, Artificial Sequence
  derived and/or modified sequence
gagcggatgtccgctaacacaagcatggtgactgagttcctcctgctgggatttagccatctcgccgacctccaaggcctcctgtttagcgtgttcttaacaatctatctgcttactgttgccggaaatttcctgatcgttgtgctcgtgtcaactgacgctgccctgcaaagcccgatgtatttcttcctgcgaacacttagtgctctggagattggatacacctcagtcactgtcccccttctgctgcatcacctgctaaccgggcgacggcatatctctcgtagcgggtgcgcgctccagatgttttttttcttattctttggggctaccgagtgctgtctccttgccgccatggcgtatgacagatacgccgcaatctgcgaacctctgaggtaccctcttttgctgtcacaccgcgtgtgcctgcagcttgccggctcagcatgggcttgcggtgtgctcgtgggcctcgggcataccccttttatcttcagcctccccttttgcggcccgaataccatcccgcaatttttctgcgagattcagccagtattgcagcttgtttgcggagacacatcactcaacgaactccagatcattttggccacagccctgttgattctttgcccatttgggttgatcctggggtcatatgggcggatcctggtaactatcttccgcatacctagcgtggcgggcagacgtaaagccttctccacgtgttcatcccatcttatcgtcgtgtcattgttctacggcacagccctgttcatatatattcggccaaaagcatcatacgatccagcaacagatcctctggtttctctcttctacgcagtcgttacacccatccttaaccccatcatctactctcttaggaatacggaggtgaaggctgcccttaagagatag

SEQ ID NO: 176863 - DNA, 888 bp, Artificial Sequence
  derived and/or modified sequence
tctgtcacagagttcctactgctgggggttactgacatccaggaattacaaccattcctctttgtcgtgttcctgactatatacttcatctctgttgccggtaacggggccattcttatgatcgtgatcagcgatccccggctgcatagccctatgtatttcttcctgggtaaccttagctgcttggatatttgttattcatccgtcacactccctaagatgctgcagaactttctgtcagcgcacaagatctctcgaagtgggtgcgccctccagatgttcttcttcctgtttttcggggccactgagtgctgcctgttggccgctatggcttatgaccgttacgctgcaatctgtgaacctctccgctatccactactgcttagccaccgagtgtgtctccagcttgcgggaagcgcgtgggcttgtggcgtgctagttggcctcgggcatactccctttattttctccttgcctttttgtggcccaaacaccatacctcaattcttctgtgagattcaacctgtgctgcagcttgtctgtggcgacacatcattaaatgagttacagattattctggccacagctcttctgatcctctgtccattcggacttatcctgggctcttacgggcgaatcctcgtgaccattttccggattccttctgtggcaggacgtcgaaaagcgttctcaacctgcagctctcatttgatcgtggtcagtctgttttacgggactgcgctgtttatctatatccgacccaaagctagttatgaccccgctaccgaccccctggtgtcactcttctacgcagttgtgacacctatactgaaccctattatctacagtctaagaaacactgaggtaaaggcagctttaaaacgctag

SEQ ID NO: 176864 - DNA, 888 bp, Artificial Sequence
  derived and/or modified sequence
tctgttacggaatttctgctgcttggcgtaaccgacatccaagaactgcagcccttcctttttgtggtgtttctaacaatatattttatatccgttgcgggaaatggagcaatactgatgatcgttatctctgacccacggctgcattccccgatgtacttctttcttggaaatctgagttgtctggacatttgttacagttcggtgacccttcctaagatgttacagaacttcctgtccgcgcacaaaattagtcgtagcggttgtgctttgcaaatgtttttcttccttttctttggagccacagagtgttgtctgttagcagccatggcgtatgaccgctatgctgctatttgcgaacctctgaggtaccctctgttacttagtcacagagtctgcctacagctggccggatctgcctgggcttgtggcgtgctagtcgggctggggcatactcccttcatctttagcttacctttttgcggtccgaataccattccccagttcttttgcgagattcagcctgttttacagttagtatgtggagacaccagcctgaatgagctgcagattatcctcgccaccgccttactgattttatgccccttcggcctaatcctggggagttacggccggatcctggtcaccatttttaggatcccgtccgtcgcaggcagacgcaaggccttctctacatgttcatctcacctgattgtcgttagtctgttctacggcacagccctgttcatctatatcagaccgaaggcctcctatgaccccgcaacagaccctctcgtgtcccttttttatgcagtagtgaccccaattctgaatccgatcatctacagtctccgtaacactgaggtcaaagcagccctgaagcgttag

SEQ ID NO: 176865 - DNA, 939 bp, Artificial Sequence
  derived and/or modified sequence
atgtctgccaacacctccatggtgacagagttcctgctgctgggcttcagccacctggccgacctgcagggcctgctcttcagcgtcttcctgaccatctacctgctgactgtggccggcaacttcctgattgtggtgctggtgtccacagatgctgccctgcagagccccatgtacttcttcctgcggaccctgagcgccctggagatcggctacacctctgtgacagtgcccctgctgctgcaccacctgctgaccggccgccgccacatcagccgcagcggctgtgccctgcagatgttcttcttcctgttcttcggggccacagagtgctgcctgctggccgccatggcctatgacagatatgctgccatctgtgagcccctgcgctaccccctgctgctgagccaccgggtgtgcctgcagctggccggcagcgcctgggcctgtggggtgctggtgggcctgggccacacccccttcatcttcagcctgcccttctgtggccccaacaccatcccccagttcttctgtgagatccagcctgtgctgcagctggtgtgtggggacaccagcctgaatgagctgcagatcatcctggccacagccctgctgatcctgtgccccttcggcctcatcctgggcagctatggccgcatcctggtgaccatcttccgcatccccagcgtggccggccgcaggaaggccttcagcacctgcagcagccacctgatcatggtgtccctcttctatggaacagccctcttcatctacatccggcccaaggccagctatgaccctgccacagaccccctggtgtccctcttctatgctgtggtgacccccatcctgaaccccatcatctacagcctgaggaacacagaggtgaaggccgccctgaagaggaccatccagaagacagtgcccatggagatctag

SEQ ID NO: 176866 - DNA, 939 bp, Artificial Sequence
  derived and/or modified sequence
atgtctgccaacacctccatggtgacagagttcctgctgctgggcttcagccacctggccgacctgcagggcctgctcttcagcgtcttcctgaccatctacctgctgactgtggccggcaacttcctgattgtggtgctggtgtccacagatgctgccctgcagagccccatgtacctgttcctgcggaccctgagcgccctggagatcggctacacctctgtgacagtgcccctgctgctgcaccacctgctgaccggccgccgccacatcagccgcagcggctgtgccctgcagatgttcttcttcctgttcttcggggccacagagtgctgcctgctggccgccatggcctatgacagatatgctgccatctgtgagcccctgcgctaccccctgctgctgagccaccgggtgtgcctgcagctggccggcagcgcctgggcctgtggggtgctggtgggcctgggccacacccccttcatcttcagcctgcccttctgtggccccaacaccatccagcagttcttctgtgagatccagcctgtgctgcagctggtgtgtggggacaccagcctgaatgagctgcagatcatcctggccacagccctgctgatcctgtgccccttcggcctcatcctgggcagctatggccgcatcctggtgaccatcttccgcatccccagcgtggccggccgcaggaaggccttcagcacctgcagcagccacctgattgtggtgtccctcttctatggaacagccctcttcatctacatccggcccaaggccagctatgaccctgccacagaccccctggtgtccctcttctatgctgtggtgacccccatcctgaaccccatcatctacagcctgaggaacacagaggtgaaggccgccctgaagaggaccatccagaagacagtgcccatggagatctag

SEQ ID NO: 176867 - DNA, 939 bp, Artificial Sequence
  derived and/or modified sequence
atgtctgccaacacctccatggtgacagagttcctgctgctgggcttcagccacctggccgacctgcagggcctgctcttcagcgtcttcctgaccatctacctgctgactgtggccggcaacttcctgattgtggtgctggtgtccacagatgctgccctgcagagccccatgtacttcttcctgcggaccctgagcgccctggagatcggctacacctctgtgacagtgcccctgctgctgcaccacctgctgaccggccgccgccacatcagccgcagcggctgtgccctgcagatgttcttcttcctgttcttcggggccacagagtgctgcctgctggccgccatggcctatgacagatatgctgccatctgtgagcccctgcgctaccccctgctgctgagccaccgggtgtgcctgcagctggccggcagcgcctgggcctgtggggtgctggtgggcctgggccacacccccttcatcttcagcctgcccttctgtggccccaacaccatcccccagttcttctgtgagatccagcctgtgctgcagctggtgtgtggggacaccagcctgaatgagctgcagatcatcctggccacagccctgctgatcctgtgccccttcggcctcatcctgggcagctatggccgcatcctggtgaccatcttccgcatccccagcgtggccggccgcaggaaggccttcagcacctgcagcagccacctgattgtggtgtccctcttctatggaacagccctcttcatctacatccggcccaaggccagctatgaccctgccacagaccccctggtgtccctcttctatgctgtggtgacccccatcctgaaccccatcatctacagcctgaggaacacagaggtgaaggccgccctgaagaggaccatccagaagacagtgcccatggagatctag

SEQ ID NO: 176868 - DNA, 888 bp, Artificial Sequence
  derived and/or modified sequence
tctgtgacagagttcctgctgctgggcgtgacagacatccaggagctgcagcccttcctgtttgtggtgttcctgaccatctacttcatctctgtggccggaaatggagccatcctgatgatcgtcatcagtgacccccggctgcacagccccatgtacttcttcctgggcaacctgagctgcctggacatctgctacagctctgtgaccctgcccaagatgctgcagaacttcctgagcgcccacaagatcagccgcagcggctgtgccctgcagatgttcttcttcctgttctttggagccacagagtgctgcctgctggccgccatggcctatgacagatatgctgccatctgtgagcccctgcgctaccccctgctgctgagccaccgggtgtgcctgcagctggccggcagcgcctgggcctgtggggtgctggtgggcctgggccacacccccttcatcttcagcctgcccttctgtggccccaacaccatcccccagttcttctgtgagatccagcctgtgctgcagctggtgtgtggggacaccagcctgaatgagctgcagatcatcctggccacagccctgctgatcctgtgccccttcggcctcatcctgggcagctatggccgcatcctggtgaccatcttccgcatccccagcgtggccggccgcaggaaggccttcagcacctgcagcagccacctgatcatggtgtccctcttctacggcacagccctcttcatctacatccggcccaaggccagctatgaccctgccacagaccccctggtgtccctcttctatgctgtggtgacccccatcctgaaccccatcatctacagcctgaggaacacagaggtgaaggccgccctgaagaggtag

SEQ ID NO: 176869 - DNA, 888 bp, Artificial Sequence
  derived and/or modified sequence
tctgtgacagagttcctgctgctgggcgtgacagacatccaggagctgcagcccttcctgtttgtggtgttcctgaccatctacttcatctctgtggccggaaatggagccatcctgatgatcgtcatcagtgacccccggctgcacagccccatgtacttcttcctgggcaacctgagctgcctggacatctgctacagctctgtgaccctgcccaagatgctgcagaacttcctgagcgcccacaagatcagccgcagcggctgtgccctgcagatgttcttcttcctgttctttggagccacagagtgctgcctgctggccgccatggcctatgacagatatgctgccatctgtgagcccctgcgctaccccctgctgctgagccaccgggtgtgcctgcagctggccggcagcgcctgggcctgtggggtgctggtgggcctgggccacacccccttcatcttcagcctgcccttctgtggccccaacaccatccagcagttcttctgtgagatccagcctgtgctgcagctggtgtgtggggacaccagcctgaatgagctgcagatcatcctggccacagccctgctgatcctgtgccccttcggcctcatcctgggcagctatggccgcatcctggtgaccatcttccgcatccccagcgtggccggccgcaggaaggccttcagcacctgcagcagccacctgattgtggtgtccctcttctacggcacagccctcttcatctacatccggcccaaggccagctatgaccctgccacagaccccctggtgtccctcttctatgctgtggtgacccccatcctgaaccccatcatctacagcctgaggaacacagaggtgaaggccgccctgaagaggtag

SEQ ID NO: 176870 - DNA, 888 bp, Artificial Sequence
  derived and/or modified sequence
tctgtgacagagttcctgctgctgggcgtgacagacatccaggagctgcagcccttcctgtttgtggtgttcctgaccatctacttcatctctgtggccggaaatggagccatcctgatgatcgtcatcagtgacccccggctgcacagccccatgtacttcttcctgggcaacctgagctgcctggacatctgctacagctctgtgaccctgcccaagatgctgcagaacttcctgagcgcccacaagatcagccgcagcggctgtgccctgcagatgttcttcttcctgttctttggagccacagagtgctgcctgctggccgccatggcctatgacagatatgctgccatctgtgagcccctgcgctaccccctgctgctgagccaccgggtgtgcctgcagctggccggcagcgcctgggcctgtggggtgctggtgggcctgggccacacccccttcatcttcagcctgcccttctgtggccccaacaccatcccccagttcttctgtgagatccagcctgtgctgcagctggtgtgtggggacaccagcctgaatgagctgcagatcatcctggccacagccctgctgatcctgtgccccttcggcctcatcctgggcagctatggccgcatcctggtgaccatcttccgcatccccagcgtggccggccgcaggaaggccttcagcacctgcagcagccacctgattgtggtgtccctcttctacggcacagccctcttcatctacatccggcccaaggccagctatgaccctgccacagaccccctggtgtccctcttctatgctgtggtgacccccatcctgaaccccatcatctacagcctgaggaacacagaggtgaaggccgccctgaagaggtag

SEQ ID NO: 176871 - DNA, 915 bp, Artificial Sequence
  derived and/or modified sequence
gagaggatgtctgccaacacctccatggtgacagagttcctgctgctgggcttcagccacctggccgacctgcagggcctgctcttcagcgtcttcctgaccatctacctgctgactgtggccggcaacttcctgattgtggtgctggtgtccacagatgctgccctgcagagccccatgtacttcttcctgcggaccctgagcgccctggagatcggctacacctctgtgacagtgcccctgctgctgcaccacctgctgaccggccgccgccacatcagccgcagcggctgtgccctgcagatgttcttcttcctgttcttcggggccacagagtgctgcctgctggccgccatggcctatgacagatatgctgccatctgtgagcccctgcgctaccccctgctgctgagccaccgggtgtgcctgcagctggccggcagcgcctgggcctgtggggtgctggtgggcctgggccacacccccttcatcttcagcctgcccttctgtggccccaacaccatcccccagttcttctgtgagatccagcctgtgctgcagctggtgtgtggggacaccagcctgaatgagctgcagatcatcctggccacagccctgctgatcctgtgccccttcggcctcatcctgggcagctatggccgcatcctggtgaccatcttccgcatccccagcgtggccggccgcaggaaggccttcagcacctgcagcagccacctgattgtggtgtccctcttctatggaacagccctcttcatctacatccggcccaaggccagctatgaccctgccacagaccccctggtgtccctcttctatgctgtggtgacccccatcctgaaccccatcatctacagcctgaggaacacagaggtgaaggccgccctgaagaggtag

SEQ ID NO: 176872 - DNA, 1649 bp, Artificial Sequence
  derived and/or modified sequence
cagaaataagcaattaaggaagttcttgtcatcttttgcctgagcatgttttaaaactagagaaatgctcacccctctaaatagttgaactgtttaatgctataggagcttaaaaagagaggatctttctcattttttttctcctccttgaacactgtgaaatttatggtaaaatgacagaaaaagaagaaagactaagtgaatctggtaactaaagaaagagctggaaaaaagaaaactagagggcaagaggtgataagagaggtcacctcttatcagacaggagacaagttgatggagaaaaagatctgctatgagggaaaattctgtctccagccctgcaggaagaattggaaaatcagaaaagagtgaaaagggagctagactgacttaatcttcagcccaggtaaaactggaaagacagtttaacatgttctttagaatgataggcactatcaggaagagatgaagtcagggattcaggctcagagagacaaatactcatccaggatcccaagagtgagcaagggtggaatatggactccaggcaaggctgcctaatttcaaagtccatgatattctaatagaaagggagatctagtgctgcgatcagatgcagagagaggtcatctttgcccatttcacgattccatagttgtgatttttccttgccatttcttttgtcttccagtcaaaggtatgcaggcaggatgagtgcaaacacctccatggtgactgagtttcttcttctcggcttctcccacctggccgacctccagggcttgctcttctctgtctttctcactatctacctgctgaccgtggcaggcaatttcctcattgtggtgctggtctccactgatgctgccctccagtcccctatgtacttcttcctgcgcaccctctcggccttggagattggctatacgtctgtcacggtccccctgctacttcaccacctccttactggccggcgccacatctctcgctctggatgtgctctccagatgttcttcttcctcttctttggcgccacggagtgctgcctcctggcagccatggcctatgaccgctatgcagccatctgtgaacccctccgctacccactgctgctgagccaccgggtgtgtctacagctagctgggtcggcgtgggcctgtggggtgctggtggggctgggccacacccctttcatcttctctttgcccttctgcggccccaataccatcccgcagttcttctgtgagatccagcctgtcctgcagctggtatgtggagacacctcgcttaatgaactgcagattatcctggcaacagccctcctcatcctctgcccctttggcctcatcctgggctcctacgggcgtatcctcgttaccatcttccggatcccatctgttgcgggccgccgcaaggccttctccacctgctcctcccacctgatcatggtctccctcttctatggcaccgcactctttatctatattcgccctaaggccagctacgatccggccactgaccctctggtgtccctcttctatgctgtggtcacccccatcctcaaccccatcatctacagcctgcggaacacagaggtcaaagctgccctaaagagaaccatccagaaaacggtgcctatggagatttga

SEQ ID NO: 176873 - DNA, 1649 bp, Artificial Sequence
  derived and/or modified sequence
cagaaataagcaattaaggaagttcttgtcatcttttgcctgagcatgttttaaaactagagaaatgctcacccctctaaatagttgaactgtttaatgctataggagcttaaaaagagaggatctttctcattttttttctcctccttgaacactgtgaaatttatggtaaaatgacagaaaaagaagaaagactaagtgaatctggtaactaaagaaagagctggaaaaaagaaaactagagggcaagaggtgataagagaggtcacctcttatcagacaggagacaagttgatggagaaaaagatctgctatgagggaaaattctgtctccagccctgcaggaagaattggaaaatcagaaaagagtgaaaagggagctagactgacttaatcttcagcccaggtaaaactggaaagacagtttaacatgttctttagaatgataggcactatcaggaagagatgaagtcagggattcaggctcagagagacaaatactcatccaggatcccaagagtgagcaagggtggaatatggactccaggcaaggctgcctaatttcaaagtccatgatattctaatagaaagggagatctagtgctgcgatcagatgcagagagaggtcatctttgcccatttcacgattccatagttgtgatttttccttgccatttcttttgtcttccagtcaaaggtatgcaggcaggatgagtgcaaacacctccatggtgactgagtttcttcttctcggcttctcccacctggccgacctccagggcttgctcttctctgtctttctcactatctacctgctgaccgtggcaggcaatttcctcattgtggtgctggtctccactgatgctgccctccagtcccctatgtacctcttcctgcgcaccctctcggccttggagattggctatacgtctgtcacggtccccctgctacttcaccacctccttactggccggcgccacatctctcgctctggatgtgctctccagatgttcttcttcctcttctttggcgccacggagtgctgcctcctggcagccatggcctatgaccgctatgcagccatctgtgaacccctccgctacccactgctgctgagccaccgggtgtgtctacagctagctgggtcggcgtgggcctgtggggtgctggtggggctgggccacacccctttcatcttctctttgcccttctgcggccccaataccatccagcagttcttctgtgagatccagcctgtcctgcagctggtatgtggagacacctcgcttaatgaactgcagattatcctggcaacagccctcctcatcctctgcccctttggcctcatcctgggctcctacgggcgtatcctcgttaccatcttccggatcccatctgttgcgggccgccgcaaggccttctccacctgctcctcccacctgatcgtggtctccctcttctatggcaccgcactctttatctatattcgccctaaggccagctacgatccggccactgaccctctggtgtccctcttctatgctgtggtcacccccatcctcaaccccatcatctacagcctgcggaacacagaggtcaaagctgccctaaagagaaccatccagaaaacggtgcctatggagatttga

SEQ ID NO: 176874 - DNA, 1649 bp, Artificial Sequence
  derived and/or modified sequence
cagaaataagcaattaaggaagttcttgtcatcttttgcctgagcatgttttaaaactagagaaatgctcacccctctaaatagttgaactgtttaatgctataggagcttaaaaagagaggatctttctcattttttttctcctccttgaacactgtgaaatttatggtaaaatgacagaaaaagaagaaagactaagtgaatctggtaactaaagaaagagctggaaaaaagaaaactagagggcaagaggtgataagagaggtcacctcttatcagacaggagacaagttgatggagaaaaagatctgctatgagggaaaattctgtctccagccctgcaggaagaattggaaaatcagaaaagagtgaaaagggagctagactgacttaatcttcagcccaggtaaaactggaaagacagtttaacatgttctttagaatgataggcactatcaggaagagatgaagtcagggattcaggctcagagagacaaatactcatccaggatcccaagagtgagcaagggtggaatatggactccaggcaaggctgcctaatttcaaagtccatgatattctaatagaaagggagatctagtgctgcgatcagatgcagagagaggtcatctttgcccatttcacgattccatagttgtgatttttccttgccatttcttttgtcttccagtcaaaggtatgcaggcaggatgagtgcaaacacctccatggtgactgagtttcttcttctcggcttctcccacctggccgacctccagggcttgctcttctctgtctttctcactatctacctgctgaccgtggcaggcaatttcctcattgtggtgctggtctccactgatgctgccctccagtcccctatgtacttcttcctgcgcaccctctcggccttggagattggctatacgtctgtcacggtccccctgctacttcaccacctccttactggccggcgccacatctctcgctctggatgtgctctccagatgttcttcttcctcttctttggcgccacggagtgctgcctcctggcagccatggcctatgaccgctatgcagccatctgtgaacccctccgctacccactgctgctgagccaccgggtgtgtctacagctagctgggtcggcgtgggcctgtggggtgctggtggggctgggccacacccctttcatcttctctttgcccttctgcggccccaataccatcccgcagttcttctgtgagatccagcctgtcctgcagctggtatgtggagacacctcgcttaatgaactgcagattatcctggcaacagccctcctcatcctctgcccctttggcctcatcctgggctcctacgggcgtatcctcgttaccatcttccggatcccatctgttgcgggccgccgcaaggccttctccacctgctcctcccacctgatcgtggtctccctcttctatggcaccgcactctttatctatattcgccctaaggccagctacgatccggccactgaccctctggtgtccctcttctatgctgtggtcacccccatcctcaaccccatcatctacagcctgcggaacacagaggtcaaagctgccctaaagagaaccatccagaaaacggtgcctatggagatttga

SEQ ID NO: 176875 - DNA, 885 bp, Artificial Sequence
  derived and/or modified sequence
tcagtcactgaatttctccttttgggagtgacagacattcaagaactgcagccttttctcttcgttgttttccttaccatctacttcatcagtgtggctgggaatggagccattctgatgattgtcatctctgatcctagactccattcccctatgtatttcttcctgggaaacctgtcctgcctggacatctgctactccagcgtaacactgccaaaaatgctgcagaacttcctctctgcacacaaaatctctcgctctggatgtgctctccagatgttcttcttcctcttctttggcgccacggagtgctgcctcctggcagccatggcctatgaccgctatgcagccatctgtgaacccctccgctacccactgctgctgagccaccgggtgtgtctacagctagctgggtcggcgtgggcctgtggggtgctggtggggctgggccacacccctttcatcttctctttgcccttctgcggccccaataccatcccgcagttcttctgtgagatccagcctgtcctgcagctggtatgtggagacacctcgcttaatgaactgcagattatcctggcaacagccctcctcatcctctgcccctttggcctcatcctgggctcctacgggcgtatcctcgttaccatcttccggatcccatctgttgcgggccgccgcaaggccttctccacctgctcctcccacctgatcatggtctccctcttctatggcaccgcactctttatctatattcgccctaaggccagctacgatccggccactgaccctctggtgtccctcttctatgctgtggtcacccccatcctcaaccccatcatctacagcctgcggaacacagaggtcaaagctgccctaaagaga

SEQ ID NO: 176876 - DNA, 885 bp, Artificial Sequence
  derived and/or modified sequence
tcagtcactgaatttctccttttgggagtgacagacattcaagaactgcagccttttctcttcgttgttttccttaccatctacttcatcagtgtggctgggaatggagccattctgatgattgtcatctctgatcctagactccattcccctatgtatttcttcctgggaaacctgtcctgcctggacatctgctactccagcgtaacactgccaaaaatgctgcagaacttcctctctgcacacaaaatctctcgctctggatgtgctctccagatgttcttcttcctcttctttggcgccacggagtgctgcctcctggcagccatggcctatgaccgctatgcagccatctgtgaacccctccgctacccactgctgctgagccaccgggtgtgtctacagctagctgggtcggcgtgggcctgtggggtgctggtggggctgggccacacccctttcatcttctctttgcccttctgcggccccaataccatccagcagttcttctgtgagatccagcctgtcctgcagctggtatgtggagacacctcgcttaatgaactgcagattatcctggcaacagccctcctcatcctctgcccctttggcctcatcctgggctcctacgggcgtatcctcgttaccatcttccggatcccatctgttgcgggccgccgcaaggccttctccacctgctcctcccacctgatcgtggtctccctcttctatggcaccgcactctttatctatattcgccctaaggccagctacgatccggccactgaccctctggtgtccctcttctatgctgtggtcacccccatcctcaaccccatcatctacagcctgcggaacacagaggtcaaagctgccctaaagaga

SEQ ID NO: 176877 - DNA, 885 bp, Artificial Sequence
  derived and/or modified sequence
tcagtcactgaatttctccttttgggagtgacagacattcaagaactgcagccttttctcttcgttgttttccttaccatctacttcatcagtgtggctgggaatggagccattctgatgattgtcatctctgatcctagactccattcccctatgtatttcttcctgggaaacctgtcctgcctggacatctgctactccagcgtaacactgccaaaaatgctgcagaacttcctctctgcacacaaaatctctcgctctggatgtgctctccagatgttcttcttcctcttctttggcgccacggagtgctgcctcctggcagccatggcctatgaccgctatgcagccatctgtgaacccctccgctacccactgctgctgagccaccgggtgtgtctacagctagctgggtcggcgtgggcctgtggggtgctggtggggctgggccacacccctttcatcttctctttgcccttctgcggccccaataccatcccgcagttcttctgtgagatccagcctgtcctgcagctggtatgtggagacacctcgcttaatgaactgcagattatcctggcaacagccctcctcatcctctgcccctttggcctcatcctgggctcctacgggcgtatcctcgttaccatcttccggatcccatctgttgcgggccgccgcaaggccttctccacctgctcctcccacctgatcgtggtctccctcttctatggcaccgcactctttatctatattcgccctaaggccagctacgatccggccactgaccctctggtgtccctcttctatgctgtggtcacccccatcctcaaccccatcatctacagcctgcggaacacagaggtcaaagctgccctaaagaga

SEQ ID NO: 176878 - DNA, 912 bp, Artificial Sequence
  derived and/or modified sequence
gagaggatgagtgcaaacacctccatggtgactgagtttcttcttctcggcttctcccacctggccgacctccagggcttgctcttctctgtctttctcactatctacctgctgaccgtggcaggcaatttcctcattgtggtgctggtctccactgatgctgccctccagtcccctatgtacttcttcctgcgcaccctctcggccttggagattggctatacgtctgtcacggtccccctgctacttcaccacctccttactggccggcgccacatctctcgctctggatgtgctctccagatgttcttcttcctcttctttggcgccacggagtgctgcctcctggcagccatggcctatgaccgctatgcagccatctgtgaacccctccgctacccactgctgctgagccaccgggtgtgtctacagctagctgggtcggcgtgggcctgtggggtgctggtggggctgggccacacccctttcatcttctctttgcccttctgcggccccaataccatcccgcagttcttctgtgagatccagcctgtcctgcagctggtatgtggagacacctcgcttaatgaactgcagattatcctggcaacagccctcctcatcctctgcccctttggcctcatcctgggctcctacgggcgtatcctcgttaccatcttccggatcccatctgttgcgggccgccgcaaggccttctccacctgctcctcccacctgatcgtggtctccctcttctatggcaccgcactctttatctatattcgccctaaggccagctacgatccggccactgaccctctggtgtccctcttctatgctgtggtcacccccatcctcaaccccatcatctacagcctgcggaacacagaggtcaaagctgccctaaagaga

SEQ ID NO: 176879 - DNA, 939 bp, Artificial Sequence
  derived and/or modified sequence
atgagcgccaacaccagcatggtgaccgagttcctgctgctgggcttctcccatttagccgatctgcagggtctactgttcagtgtctttctcacaatctacttattaaccgtggccggcaatttcctgatcgtggtactggtatctaccgacgctgccttacagtctccaatgtactttttcttacgcacgttatccgccttagaaatcgggtatacttcagtcacagtgcccctgctcctccaccacctgctgactggtagaagacatatttcccgctctggttgcgcccttcagatgttttttttcttattttttggggccaccgaatgctgcctcctggcagctatggcctacgatcggtacgctgctatatgtgagccgctgcgatacccccttttgctgtcccacagggtgtgtctacagctcgcagggtccgcgtgggcatgcggtgtccttgtcggactagggcacactccattcattttttccctccccttttgcggtccaaatacgattccccaattcttctgcgagatccagccggtcctacagttagtttgcggagatacctccttaaatgagttgcagataattctggcaactgctctcctgattctgtgcccgttcggattaattcttggcagctatggcaggatactggtcaccatatttcgtattccatctgtggctggccgccgcaaagctttcagtacttgtagctcccatctcatcatggtgtcactgttttatggtaccgccttgttcatttatattcggcctaaggcttcttatgaccccgcaactgaccctttggtgtccctgttttacgctgttgtaactcccatacttaatccaattatctattcactcagaaacaccgaagtgaaagcagcgctgaagcgaactatacagaagaccgtgcccatggaaatctag

SEQ ID NO: 176880 - DNA, 939 bp, Artificial Sequence
  derived and/or modified sequence
atgagcgccaacaccagcatggtgaccgagttcctgctgctgggcttctcgcacctggccgacctgcaaggcctcttatttagcgtgtttttgaccatctacttactcacagttgccggcaacttcttgattgttgtgctggtgagtaccgacgccgcgctacagagtccgatgtactttttcttgagaactctgagcgctctcgagatcggatacacatcagtaactgtcccccttctgcttcatcatctcctgacagggagaagacacatctcacgttctggctgtgccctgcagatgttctttttcctgttctttggtgccactgagtgttgcctgttagccgccatggcgtacgacagatacgccgcaatttgcgagcccttgcgatatcccctcctgcttagtcacagggtatgcctacaactcgcgggatctgcttgggcctgtggggtgctcgtcggcctgggacacacaccgtttattttttcactgcccttctgcgggccaaatacaattcctcagttcttctgtgagattcagccagtcctgcagctcgtgtgtggcgatacgtcactgaatgagctgcagattatcctagcaacagctctcttaatactgtgcccctttggtttgattcttggatcttatgggcggatcctagttacaatcttcaggattccttccgttgcaggacgccggaaagcctttagcacgtgttctagtcatctgattatggtctccctgttttacggcaccgcattattcatctacatccgccctaaggcttcttacgatccggccaccgacccactcgtaagcctattctatgctgtggtgacaccaattctaaatcctattatctactcccttcgaaatacagaggtgaaggcggctctcaagaggaccattcaaaagacagtcccgatggagatctag

SEQ ID NO: 176881 - DNA, 939 bp, Artificial Sequence
  derived and/or modified sequence
atgagcgccaacaccagcatggtgaccgagttcctgctgctgggcttttctcatctggctgatcttcagggcctgctcttctcagtcttcttgacaatttatctactaactgtcgccggcaactttctgattgtcgtccttgtaagcacggacgccgcactccaatcacccatgtatctgttcctcagaacgcttagcgctttagagattggttacacatcagtaaccgtccctttgctgttacaccacttgttaaccggacggcggcacatttcaaggtctggatgcgctctgcagatgtttttcttcctttttttcggcgccacagagtgttgcctccttgcggcaatggcatatgaccgttacgctgccatttgcgagcccctgcgttaccctctcctcctgtctcatcgcgtgtgtctgcagctggcaggatccgcatgggcgtgtggggtgctggttggtttgggtcacaccccatttatcttcagcctccctttctgcggccctaacaccatccagcagtttttttgcgagatccaacctgttttgcaactggtttgcggagacacctccctgaacgaactgcagattatcctggccaccgccctgttgatcctgtgcccattcgggttgatccttggtagttacggtagaatcctcgtaaccatcttccggattccctctgtggccggtaggcgcaaagcgttcagcacttgcagtagccatctcatcgtggtctccctgttttatggcactgcgctcttcatctacattaggcctaaagctagctacgatcctgctactgatcccctcgtctctctgttttacgctgtagtcactcctatcctgaacccaattatttattcgttacgcaataccgaagttaaagcagctctgaagaggactattcagaagactgtcccaatggagatttag

SEQ ID NO: 176882 - DNA, 939 bp, Artificial Sequence
  derived and/or modified sequence
atgagcgccaacaccagcatggtgaccgagttcctgctgctgggctttagtcacctggccgacctgcagggcctcctattttccgtgtttctaactatctaccttctgacagtggctggcaactttttaatcgtcgtgctggtctcaactgacgccgctctgcagagtccaatgtacttcttcttgagaaccctcagcgcattggagattggatataccagcgtcaccgttcctctgctgttacaccacctgctcaccggccgccgccatattagcagatcaggttgtgcactgcagatgttcttctttcttttttttggtgccacagaatgttgtctccttgccgctatggcatatgatcggtatgccgcaatctgtgagccacttcgctacccactgttgctgagtcaccgcgtttgcctgcagttggcggggagcgcttgggcttgcggcgtccttgtcggcctggggcataccccattcattttttccctcccattctgcgggcccaacaccatcccacaatttttttgtgagatccagccggtgctccagctggtatgcggtgatactagtctgaatgaactgcagattatcttggccacggcgttgctgatcctgtgtccattcgggctgattctaggaagctacggccgcatactggtaaccatctttaggatccctagcgtggctggtcggcggaaagctttctcaacatgcagctcacatctcattgtggtgtccctgttctatgggaccgccctctttatttacattcgacctaaggcaagttatgatccagccacagatcccctcgtgtccctgttctacgcagtggtgacccctatccttaatcctatcatctacagcttgagaaacacagaggtcaaggcagccctgaagcggacaattcagaagactgttccaatggagatttag

SEQ ID NO: 176883 - DNA, 939 bp, Artificial Sequence
  derived and/or modified sequence
atgagcgccaacaccagcatggtgaccgagttcctgctgctgggcttttctcatttggcggatctgcagggactgttattttcagtcttcctgaccatatatcttctgaccgttgctgggaatttcctcatcgttgtgttggtttccactgatgccgcgctgcagagtcccatgtatttcttcctgcggaccctcagtgcactagagatcggatatacctccgtgaccgtgccactcctgttacaccatctgctcactggtaggagacatatttcccggtcaggctgcgccctgcagatgtttttttttctgtttttcggcgcaaccgaatgctgcttgctggctgctatggcttatgatcggtatgctgctatatgtgagccactaagataccccctgctgctcagtcatagggtttgtctgcagctggctggctccgcctgggcttgtggtgtactggtgggactgggtcacacccctttcatcttctcactcccgttctgcggccctaacacgatcccccagttcttttgcgagatccaacctgtgctccaactggtctgtggtgacaccagtctaaacgagctacagattatccttgcaaccgccctgctgattctctgtccttttggccttattttaggctcttacggtagaattctcgtgacgatatttcgaataccaagtgtcgccggcagacgtaaagccttcagcacctgtagttctcatctgatcatggttagcctgttttacgggaccgccctgtttatctatattcggccgaaagcatcctacgatcctgccaccgatcccctcgtatctcttttttacgctgtggttactcctattctcaacccgattatttatagcctacgtaatactgaagtgaaggccgccctgaagaggactatacagaagactgtgcccatggaaatatag

SEQ ID NO: 176884 - DNA, 939 bp, Artificial Sequence
  derived and/or modified sequence
atgagcgccaacaccagcatggtgaccgagttcctgctgctgggctttagtcacttagctgatctacaaggtttgctgttctctgtgtttctgaccatctacctgctgacagtcgccggaaattttctgatagttgtgttggtgtctaccgatgcggccctccaatcaccaatgtatttctttttacggacactgagtgccctggagattgggtacacttctgtgacagtgcccctcctcctgcaccacctcctgaccggtaggcggcatatctctcgatccgggtgcgccttgcagatgttctttttcctctttttcggagccaccgaatgttgcctgttggccgcaatggcctacgaccgttatgcggcaatttgcgagcccttgcgctaccccctgctgctctcgcatcgtgtttgccttcaattagccggaagcgcttgggcatgcggagtactggttgggttaggtcacacccccttcattttttcattacccttttgtgggcccaacaccatccctcagtttttttgtgagattcaacctgtcctgcaactggtctgtggtgacacttctctcaatgaacttcagataattctcgctaccgccttattgatactttgtccctttggcctgatcctcggctcttatggtcggatactagtgacaatcttccgtatacctagcgtggcaggacgtcgtaaagctttcagcacttgtagctcacacttaattgtggtcagtcttttttatgggactgctctgttcatttatatccggccgaaggcatcctatgacccagcgaccgatccactggtgtcactgttctacgctgtggtcacgcctattctgaatccaataatctactcccttagaaatactgaagtaaaggcagccctgaagcgcactatccagaaaacagtacccatggagatctag

SEQ ID NO: 176885 - DNA, 939 bp, Artificial Sequence
  derived and/or modified sequence
atgagcgccaacaccagcatggtgaccgagttcctgctgctgggctttagccatctggcggatttacagggtttattattctctgtctttttgactatttatctgcttacggtggccgggaacttcctgatcgtggtgcttgtatccactgatgcagccctgcagagccccatgtatttcttcttaaggaccctgagcgcgctggagatcggctatacttctgttaccgttcctttgttgcttcaccacttgttgaccggacggcgtcatatctctcgtagtggctgcgctctccagatgtttttctttctgttttttggggccaccgaatgctgcttgcttgccgcaatggcttacgaccgatacgccgcgatttgcgagccgcttcggtaccctctgctgctttctcaccgcgtctgcttacagcttgccgggagtgcatgggcctgtggagtgctggtagggcttggacatactccctttattttctctctgccattttgtggccccaacacaatcccccaattcttctgtgagattcagccagtgctgcagttagtctgtggggacacctccctgaacgagctgcaaattatattggcgacagcgctgctgattttatgcccgtttgggctaattttgggatcttacggacggattttggtcacaatctttagaattccatccgttgcaggacgaagaaaggctttctctacatgctctagccatctgatcgtcgtctcgctcttctacggaacggctctgtttatctacatacgaccaaaggctagctacgacccagccacagatccactcgtgtcgctgttctacgccgtcgttacacccatcttgaatccaattatttacagcctcaggaataccgaggtgaaggccgctctgaaacgcactattcagaagacagtgcccatggaaatttag

SEQ ID NO: 176886 - DNA, 939 bp, Artificial Sequence
  derived and/or modified sequence
atgagcgccaacaccagcatggtgaccgagttcctgctgctgggcttcagccatctagccgatctgcagggattgctgttctctgtgtttcttaccatttacttactcactgtggcaggtaactttctaattgttgtcctggtgagcaccgatgcagctctgcagagcccaatgtacttctttctgaggacactgtcagctctggaaatcgggtacacaagtgtcaccgtaccactgctcctgcaccacttactgacgggacgcagacacatatcaagatctggctgtgccctgcaaatgttcttcttccttttcttcggagcaacagagtgctgcctgctcgctgctatggcttacgacaggtacgctgccatatgtgaaccgttaagatatcccttgctactgagtcatcgcgtctgcctgcagttagcaggatccgcttgggcctgcggtgtgctggttgggctaggacatactccctttatcttttccctccctttttgtggtcctaatacaatacctcaattcttctgcgagatccagccggttctgcagctggtctgtggcgatacttctctcaacgaactgcagatcatactggcaacggccctgctaatcctgtgtccatttgggctaattctgggttcgtacgggcgaattctggtgaccatcttcagaattccgtctgtagcaggaaggagaaaggcttttagcacatgttcgtctcacctgatcgtagtgtctttgttctatggaaccgctttgttcatatacattagacccaaagctagttacgaccctgcgacagacccactcgtttccctgttctatgcagttgtcacacctatcctgaatcccattatatactccctgagaaatacagaagtgaaagcagccttgaagagaacgatacaaaagaccgtccccatggaaatctag

SEQ ID NO: 176887 - DNA, 888 bp, Artificial Sequence
  derived and/or modified sequence
agcgtgaccgagttcctgctgctgggcgtgaccgacatccaggagctacagccatttctctttgtcgtttttcttaccatttacttcatctctgtcgctggcaacggcgctatcctaatgattgtgattagcgatcctcggctgcatagccctatgtacttctttttgggcaacctcagttgccttgatatttgctattcctcggtgacactcccgaagatgcttcaaaactttctgagcgcccataaaatctctcgcagcggctgcgctctccagatgttttttttcctattttttggggccaccgaatgttgtctactcgctgccatggcatatgataggtacgctgccatttgcgagccattgagatatcctctgctacttagccatagagtgtgcttgcaattagccggctccgcttgggcctgtggcgttctcgtgggtctgggacataccccgtttattttcagcctgccgttctgtggccccaatacgatcccccagttcttttgcgaaatacagccagtcctccagcttgtgtgcggggatactagtcttaatgaacttcagataatactagccaccgccctgctgatcttatgccccttcggactcattctcggctcctacggccgcattctcgtcaccatttttcgaattccatccgtggcggggagaagaaaggccttctctacctgttcttcccacctgattatggtaagtctgttttatgggacagccctctttatctacatcagaccaaaagcctcctacgaccccgccaccgacccattggtgagtctcttttatgctgtggtgacacccatcttaaatcccattatttatagcctccgcaacacggaagtcaaagccgccctgaaacggtag

SEQ ID NO: 176888 - DNA, 888 bp, Artificial Sequence
  derived and/or modified sequence
agcgtgaccgagttcctgctgctgggcgtgaccgacatccaggagttacagccttttctgttcgtggtgtttttgaccatctacttcatcagtgttgcgggcaacggggctattttaatgatcgtgatctccgacccgaggctgcattcaccaatgtatttcttcttgggcaacctgagctgccttgatatctgttactccagcgtcaccctgcctaaaatgttgcaaaacttcttatccgcacataagatctcaagatcaggctgtgcgttgcaaatgttcttctttctgttttttggagctacagaatgctgcttattggctgcaatggcttacgatcgctacgcagcaatttgtgagcctctcaggtaccccctacttctctctcacagggtatgtttacagctggcagggtcggcttgggcgtgcggcgtactcgttggacttggacacactcccttcattttttccctaccgttttgcgggccaaacacaatcccccagtttttctgtgagatacaacctgtactacagcttgtctgcggagatacatcactgaatgagctccagatcatcctggctaccgctctgctgattctctgtccatttgggctgatcttgggatcctacggtaggattctcgtaacaattttcagaatcccaagtgtggcggggcggagaaaagcctttagtacttgctccagccatctaatcatggtcagcctattttatggtaccgcacttttcatctacattaggccgaaagcaagctacgatcctgctaccgatcccttggtgtccttattttatgcagttgttacccctattctgaatcctatcatctattcactcaggaataccgaagtgaaagctgccctgaaaaggtag

SEQ ID NO: 176889 - DNA, 888 bp, Artificial Sequence
  derived and/or modified sequence
agcgtgaccgagttcctgctgctgggcgtgaccgacatccaggagctacagccctttttatttgtggtgttcctgaccatttacttcatctctgtggccggtaatggcgcgatcttgatgatcgtgatttctgacccccgattacatagccctatgtatttttttttggggaaccttagttgtctggacatatgctactcttctgtgactctgcccaagatgctgcaaaatttccttagcgcccataaaataagcaggagcggttgtgcattacagatgttttttttcttgttctttggcgccactgaatgttgtttactagctgctatggcttacgatcgctacgctgctatctgcgagcctttgcgctaccctctgctcctgagccaccgggtctgcctccagctagcaggctcagcttgggcatgcggcgtgttggtgggattgggccacactccgttcatcttttcactgcctttctgcggccctaatacaatacagcaattcttttgcgagattcaaccagtgctgcagctcgtatgcggcgacacctccctcaatgagctgcagatcatactggctactgcattactgatactgtgccctttcggactcatcctcggctcttacggacggatactggtgacaatcttcagaataccctctgtggcgggtcgcaggaaggctttcagtacctgtagcagtcatctgatagtggtttccctgttttatggcactgcccttttcatttacatccggcccaaagctagctatgacccagcaactgaccccctggtttcactgttttatgccgtggttactcctattctgaatcctattatctactccctgaggaacacagaagttaaggcggcactcaagcgctag

SEQ ID NO: 176890 - DNA, 888 bp, Artificial Sequence
  derived and/or modified sequence
agcgtgaccgagttcctgctgctgggcgtgaccgacatccaggagctccagcctttcctatttgtcgtctttttgaccatctacttcatatccgtagccgggaatggcgccattctcatgatcgttatcagcgatcccaggctccactcgcccatgtatttcttcctgggcaacctgagctgtctggatatttgctatagttctgtgacactgcctaagatgttgcagaacttcctgagtgcacataaaatttcaagaagcggctgtgctctgcagatgttcttctttcttttttttggggctaccgagtgctgccttctggctgccatggcttacgatcgttatgcagccatctgcgaacccttgcgttaccctctgctgctgtcccatagggtttgtttgcagcttgcaggttctgcatgggcatgcggcgtgctggtcggccttgggcatacaccttttatattctctctacctttctgcggccctaatacgattcctcagttcttctgtgaaatacaacccgtactccagttagtttgcggggacacgtcactgaatgagttgcagatcattttagcaactgcactgctgatactctgtccttttggtctgatattaggatcctacggtagaattctggttaccatcttccggataccatccgtagctggccgcaggaaggccttcagtacctgttcttcccatttgattgtggttagcctgttctacgggacagctctttttatatatattcgacctaaggcctcgtacgaccccgccacagatccgcttgtctctctgttttatgctgtggtgaccccaatcctgaaccctattatctatagcttgcgtaacaccgaagttaaggccgcgctaaagcgctag

SEQ ID NO: 176891 - DNA, 915 bp, Artificial Sequence
  derived and/or modified sequence
gagcggatgagcgccaacaccagcatggtgaccgagttcctgctgctgggtttctcccatctggctgatctgcaggggctcctgttttcagttttcctcacaatctatttactgacagttgccggtaatttccttatcgtggtgttagtcagtactgacgctgctctgcagtctccaatgtatttctttctgagaaccctgagcgcactggagataggctacaccagtgtgaccgtcccactgctgcttcatcacctgctgactgggcggaggcacatcagcagatccggctgtgccttgcagatgtttttctttctgttttttggagccaccgaatgctgcctactcgctgcaatggcatacgatagatacgcggcaatctgtgagccactgagatacccactgttgctgtcccatagagtgtgtctgcagctggccggctctgcatgggcctgcggagtgctagtgggattagggcacaccccctttattttcagccttccgttctgtggtcccaacaccataccacagttcttttgcgaaatacagcctgtcctgcagcttgtttgtggggatacgtctctcaatgaattgcagattatactcgccacggctctcctgatactctgtcctttcgggttaattctgggcagctatggacggatactggtgactatcttccggatccccagcgtggcgggaagaagaaaggcattcagcacttgctctagccacctgatagtggtcagcctgttttatgggacagccctgttcatttacatacggccaaaggccagctatgatccggctaccgacccactggtgagtctcttctacgcagttgttactccgatcctaaatccaatcatttacagcttgcggaacactgaagtgaaggccgctttgaagaggtag

SEQ ID NO: 176892 - DNA, 888 bp, Artificial Sequence
  derived and/or modified sequence
agcgtgaccgagttcctgctgctgggcgtgaccgacatccaggagctgcagccatttctcttcgtggttttcctgactatatactttatcagcgtggcagggaacggtgccattcttatgatagtgatttctgatccacgcttgcattcccctatgtacttttttctggggaatctttcatgtctggatatatgttactcaagcgttacactccccaagatgcttcagaatttcctgtccgctcacaagataagccgctctggatgcgccctgcagatgttcttctttctgttcttcggagccaccgagtgctgtctcctggccgctatggcttatgacaggtacgcagcgatatgcgaacctctgagataccctcttctgctgagtcatcgtgtgtgtctccagctggccggatccgcttgggcttgcggtgtgctggttgggttaggccacactccttttatcttctcattgccattctgtggccccaatacgatcccacagttcttttgtgaaatccagcccgtgctgcagctcgtttgtggcgacacatctcttaatgaacttcagataatattggccaccgccctgcttattttgtgcccgtttggactgatcctgggaagctatggaagaattctggtcactatctttcggattccatctgtggcaggacggcgaaaagcgttttccacgtgttctagtcatttgatcgtagtgtctcttttttatggcaccgctttgttcatttacattcgacctaaagcatcttacgacccggcaaccgacccactcgtctcactcttctacgcagtggtcacccctatcctgaatcccatcatctactctctcaggaatactgaagtgaaagcagcgctgaaacggtag

SEQ ID NO: 176893 - DNA, 888 bp, Artificial Sequence
  derived and/or modified sequence
agcgtgaccgagttcctgctgctgggcgtgaccgacatccaggagctgcagccctttctttttgttgtattcctaactatatactttattagcgttgccggtaatggcgccatactgatgattgtgatcagtgaccctcgactgcatagccctatgtatttcttcctgggcaacctgagctgtctggatatatgctactctagcgtcacacttcccaaaatgctgcagaatttcttgtcagcccacaagatttctaggtctggttgcgccctacagatgtttttcttcttgtttttcggtgccaccgagtgctgtctccttgcggctatggcatatgacaggtacgcagcaatatgtgaacccctgcgttatcctctcctgctctcgcacagagtctgtttacaattggccggcagtgcatgggcttgcggggtgctagtgggtctcggtcataccccattcatcttcagtttgccattctgcggtccaaacactatcccgcagttcttctgtgagatacagcctgtcctccaattggtttgtggcgacacgtccctcaacgagctgcaaatcatcctagccacagccctgctgattctgtgccctttcggacttatcctgggaagctatggtcgcatcctcgttaccatctttaggatcccatcagtggctggaagaaggaaagcattttccacgtgttccagccatctcattgttgtgagcctattttacggtacagcactttttatttatatccgtcctaaggcctcttacgacccagccacggacccattggtatctttattctacgccgtggtgacaccaatcctcaatcctattatatacagtctacgcaacaccgaagttaaagccgctttaaaaagatag

SEQ ID NO: 176894 - DNA, 939 bp, Artificial Sequence
  derived and/or modified sequence
atgtcggcgaatactagcatggtcacggaattcctgcttctcggcttcagccatctggctgaccttcaggggctcctcttctctgtatttcttaccatctacctgctgactgtggccggaaattttttgattgtggtgttagttagcacagatgccgcacttcagtcgcctatgtacttttttctgcggaccctctctgccctggagattggatacacctctgtaacagtgccgctcttgctgcatcacttacttacagggaggaggcatatctccagaagcgggtgtgctctccagatgttcttcttccttttttttggagccaccgaatgctgtctgctagccgcaatggcctacgaccgttatgccgcaatctgcgaaccactacggtacccactcctcctttcccaccgggtctgtctgcagctggcgggaagtgcttgggcatgcggagtcctggtcggcctgggccataccccatttatcttctctctcccattttgtggaccaaatactatcccccaattcttctgcgagattcagcctgtcctccagctggtttgtggagatacttctctgaatgagctgcagattatcttggctacagctcttctcatcttatgtccatttggcctcatcctgggcagctatggacgaatactcgttaccatttttcgcatccccagcgtggccggaaggcgaaaagcctttagcacgtgtagttcccacctcattatggtcagtctcttttacggaaccgccctgtttatctatattaggcctaaggctagctacgaccccgctaccgatccactggtgagcctattctatgccgtggtcactcccatcctgaatcctattatttactctttacgcaacaccgaggtgaaggccgcactcaagcggactatccagaagaccgtgcctatggagatatag

SEQ ID NO: 176895 - DNA, 939 bp, Artificial Sequence
  derived and/or modified sequence
atgagtgccaatacctccatggtgacggaattcctgctgctgggattctcccatttggccgaccttcagggcctgctgttctcggtgtttttgactatctacctgttaactgtagcgggaaatttcctcatcgtcgttctagtgtctacagatgccgctctgcaatctccgatgtacttttttctgcgaaccttaagtgcgcttgaaatcgggtacacctcggttactgtccccctcttacttcatcacttgctgacaggacgcagacatatttctcggtctggctgcgcactgcagatgttttttttcctattctttggtgctaccgaatgttgtttgttggctgccatggcctacgatcggtatgctgccatctgtgagccacttaggtacccactcctattgtcacaccgtgtttgcctccagcttgccggaagcgcctgggcatgtggagttctggtcggcctggggcacaccccatttattttcagtctcccattctgtggcccaaataccattccacagttcttctgtgagattcagcccgtgttgcagctggtctgtggagacacgtctctgaatgaactccaaattatactcgcgaccgccttgctgatcctgtgccccttcggcttgattttgggtagttatggaaggatcctcgttacgatattccgaatccccagtgttgccggacgaagaaaagcattctccacatgttcttcacacctgattatggtctcgctgttttatggaacagctctcttcatctatatccggccaaaggcttcatacgatcccgctactgaccccctcgtatcattattttacgcagtcgttacaccaattctgaatcctatcatctacagtttgagaaataccgaggtgaaagcggctctgaagagaactattcaaaagacagtcccgatggagatctag

SEQ ID NO: 176896 - DNA, 939 bp, Artificial Sequence
  derived and/or modified sequence
atgtcagccaacaccagcatggtcacagaatttctgctgctggggttctctcacttagccgacctacagggattgctcttttccgtgttcctcactatttatctcctcacagtagcaggaaacttccttatcgtagttctcgtgtccactgatgcagcgctgcagtcccccatgtacctttttctgagaacgctgagtgctctggagatcgggtacactagcgtgactgtgccgctgctgttgcatcaccttctaactggcaggcggcacatatcccgaagcggttgtgctttgcaaatgttcttcttcctgttttttggagctactgaatgctgcctcctggctgcgatggcttacgataggtacgccgctatctgcgaaccgctccggtatccactgctcctgagccacagagtttgcttgcaactcgctggtagcgcgtgggcttgcggtgtcctggtcggcctgggccacactccgtttatctttagtcttccattctgcggacccaacacaattcagcagttcttctgtgagattcagccggtgctacaattggtctgtggggatacatccctgaacgagttgcagataattcttgccaccgccctactgatcctgtgtccattcgggttgattttaggcagttacggacgcattctggtgactatttttcgcattcccagcgtggcaggcaggagaaaggcgttctcgacctgcagttcccatctgatcgtagttagtctcttttatgggaccgcgctatttatatacatcaggccaaaggcatcttacgatcctgcaacagacccccttgtatctctgttctacgctgtggtgacgccgatcttaaaccccatcatctattctctccggaacacagaagttaaagccgcactgaaaagaacaatacagaagactgtccctatggaaatctag

SEQ ID NO: 176897 - DNA, 939 bp, Artificial Sequence
  derived and/or modified sequence
atgtctgccaatacaagtatggtaactgaattcctcttgctcggattctcccatctcgcagacctgcaaggtttactcttctcggttttcctgaccatttacctgctgactgtggcaggtaattttctcatcgtcgtgctggtctctacagacgctgcgctccaatccccaatgtacttctttcttcgcacactttctgctctggaaatcggttacaccagcgtcactgtcccactcctgttgcaccatttactgacagggcgtcgacacattagccgctcaggttgtgcgcttcagatgttctttttcttatttttcggcgcaaccgaatgttgtctcttagcagctatggcttatgaccgatacgctgccatttgcgagcccttaagatatcctctcctgttgtcacaccgggtgtgtctccagttagctggctctgcctgggcatgcggtgtgctagtgggcctgggacacacccctttcattttctctctgcccttctgtggtcccaacacaattccacaattcttctgcgaaattcagcctgtgctccagctggtgtgtggcgatacttccctcaacgaattgcagattattttagctaccgccttacttatcctctgtccattcggacttattttgggatcttacgggagaattttagttaccattttcaggatcccatcagttgcagggaggcgtaaagccttctctacttgcagtagccacctgatcgtggtcagcctgttctacggtaccgccctcttcatttacataaggcctaaggctagttacgatcctgccaccgatccactggtctctctgttttacgcagtggttacaccgatcctgaaccctatcatctactcactcagaaataccgaagttaaggccgcacttaagcgaaccattcagaagaccgttcctatggaaatctag

SEQ ID NO: 176898 - DNA, 939 bp, Artificial Sequence
  derived and/or modified sequence
atgagcgctaatacatccatggtgactgagttcctcttgctggggttcagccatctcgcagatctccaaggtctgctgttttcagtgtttttaacaatttacctgctgaccgtcgctggcaacttcttaatcgtcgtgctggtatcaaccgatgccgcactgcaatccccaatgtacttctttttacggaccctctccgcgctggagatcggctacacgagtgtcactgtgccgctgctgttgcatcacctcttaactggaagaaggcacatttctcgttcagggtgcgccctccagatgttctttttcttgttttttggtgctactgaatgttgtctgcttgcggctatggcttatgaccgttacgctgctatctgcgagccactccgctatccattattgctgtctcaccgtgtgtgtttgcagctggccggtagcgcctgggcctgcggagtccttgtcggactcggccataccccattcatttttagcttaccgttctgtggccctaacaccatcccacaattcttctgcgagatccagccagtgctacagctggtctgtggcgacacatctttgaatgaactgcagataatattagccaccgctctcctgatcctttgtcccttcggtttgatcctgggatcttacgggagaatactggttaccattttccgcatcccaagtgttgccggtcgacgtaaggcatttagcacctgctcctcccatctcattatggtgagccttttctacggaactgctttgtttatttacatccggccaaaagcctcatacgatcctgccacggatccattagtgagcctgttctatgcagtagtaactcccatcctgaacccaataatctacagcctgagaaacacagaggtgaaggcggcactcaagagaaccatccaaaaaactgtacctatggaaatttag

SEQ ID NO: 176899 - DNA, 939 bp, Artificial Sequence
  derived and/or modified sequence
atgtcagctaacactagcatggttaccgagttcctgttgttaggttttagccacctggctgacttacagggactgctcttcagcgtcttcctcacaatttacttgctcaccgttgccggtaacttcttgatcgttgtcctagtgagcaccgacgccgctctgcagtctcctatgtacttttttctgagaactctgagtgcactggagatcggctatacatccgtaacagtgcccttactcctccatcatcttctgactggcaggagacacataagccggagtgggtgtgccctccagatgtttttctttcttttcttcggagcgacggaatgctgcctgctcgccgctatggcatacgaccgctacgccgcaatctgtgagccactgaggtacccattgctgctcagccaccgagtgtgtctccaactcgctggcagcgcctgggcttgtggcgtgttggtcggattgggtcataccccctttattttcagtctcccattctgtggaccaaatacgatacctcagtttttctgtgaaatacagcctgtgttgcagctcgtatgtggcgacaccagtctcaacgagctccagataattttagccaccgccctgttgatcttatgtccgtttgggctgatcctgggaagctacggacgtatcttggtgaccatcttccggatcccctccgtggcgggacggagaaaagcattttcaacctgcagtagtcacctgattgttgtgtcactgttctacggtaccgccctgttcatctatattcgcccaaaggcctcatacgacccagcaacggacccattggtgtccctgttctacgccgtagtgacaccaattctgaacccaataatctacagcctcagaaacacagaagttaaggcagcactgaagcgcactatccaaaaaaccgttccaatggaaatctag

SEQ ID NO: 176900 - DNA, 939 bp, Artificial Sequence
  derived and/or modified sequence
atgagtgcgaacacttctatggttacggagttcttattacttggcttttctcatcttgccgatctgcagggactcttgttcagtgttttcctgaccatttatctcctgacagtggcagggaacttcctgatcgtggtactggtctccactgatgccgcactccagtccccaatgtacttcttcttgcggacactttcagcactggagatcgggtacacttctgtgactgttcctctgttattgcaccacctgcttactggccgtaggcacatatccaggagcggctgtgctttgcagatgttcttcttccttttctttggggctacagagtgttgccttctcgcagcaatggcgtacgacaggtacgcagctatctgtgagcctctccggtatccactgcttctgagccatcgggtgtgcttgcaactcgccggtagtgcttgggcatgtggagttctggtgggtttaggccacacgccctttatctttagtctaccgttttgcgggccaaacacgatcccacagttcttttgtgagatacagcctgttctgcagttggtgtgtggagacacatccctgaatgagctgcaaattattcttgctacagcactgctgattctgtgccctttcggcctgatcctggggtcttatggcaggattcttgtgaccatctttcgcattccatccgttgcaggtaggagaaaagcattttcgacctgcagctctcaccttatcgtggtgtccctattctatggcactgccttatttatttatatccggcctaaagcaagctacgaccctgcaacggatcccctggtcagtctattctatgccgtggttaccccaatcctaaatcccattatttacagccttcgcaacacggaggtgaaggctgctcttaaacggaccattcaaaaaaccgtgccgatggagatctag

SEQ ID NO: 176901 - DNA, 939 bp, Artificial Sequence
  derived and/or modified sequence
atgtcggccaatactagtatggtcacagaattccttttgctcgggttcagccatcttgccgacctgcagggactactattctctgtgttcctcaccatctatctactgactgtggcaggaaatttcctcatcgtagtgcttgtctctacagacgctgccctccagagccccatgtatttctttctgcggactttgtctgcgctagagatcggttatacatctgtaacggtgccacttctcctccaccacttgttgacaggcagaagacacattagtagaagcggttgcgccctccagatgtttttcttcttattttttggagctactgagtgttgtctgctggccgctatggcctacgaccgttacgccgcaatttgtgaaccgctgagatatccactcctgctgtcacacagagtgtgcttgcagctggcaggctcagcgtgggcatgcggtgtgttggttgggttgggccacaccccgtttatcttttctttgcctttctgtggcccaaacacaattccccagtttttctgcgagatacagcctgtgctgcaactggtttgtggagacacctcactgaatgaacttcagatcattctggccaccgcattgctgatcctctgccccttcggattaattttgggcagctacgggcgaatactcgtcaccatattcaggatcccaagtgtcgccggacggaggaaagcgttttcaacttgcagctcccacctgattgtcgtatccctcttttacggcaccgcactgtttatctatattcggcctaaggcatcttacgatccagctacggatccgcttgtgagtttgttttacgccgtggttaccccaatccttaatcccatcatctattcactgagaaacaccgaggtgaaggctgccctgaaaagaacgattcagaagaccgtgcctatggaaatctag

SEQ ID NO: 176902 - DNA, 888 bp, Artificial Sequence
  derived and/or modified sequence
agcgtgacagaattcctgctgttgggggttaccgacatccaggagcttcaaccatttttattcgtggtcttcctaacgatctattttatcagcgtggctggcaacggcgctatccttatgatagtgatttccgatccacgcctgcatagccccatgtacttctttctcggcaacctcagttgcctcgacatatgctattccagtgtcaccttgcccaaaatgcttcaaaacttcctgtctgctcacaaaatatcgaggtcaggctgtgcacttcagatgttctttttcttgttcttcggagcaacagagtgttgcctgctggccgcaatggcgtatgaccggtacgcagccatttgtgagccactccgctatcctctccttctgagccatagggtgtgcctccagctggcgggatcagcgtgggcctgcggcgtcctggttggactgggccacacccctttcatcttcagcttgcccttctgcggccctaataccatcccgcaatttttctgtgagatacaacctgttctgcagttggtgtgcggtgacacctcgctgaatgagctgcagatcattttagctactgccttgctgatcctttgccccttcgggctgatcctggggtcttacggtcggatcctggtcacaatattccgtattccatccgtagcgggacggaggaaagcctttagtacctgcagcagtcacctgattatggtttcgttattctacgggacagctctgttcatctacataaggcccaaggctagctatgaccctgcaaccgatcctctcgtttcattgttctatgctgttgtaactccgattcttaacccaatcatctactcacttcggaacacagaagttaaggctgcactcaagaggtag

SEQ ID NO: 176903 - DNA, 888 bp, Artificial Sequence
  derived and/or modified sequence
tcagtgacagagttcctgttgttgggcgtgacagacatccaggaactccaacctttcctcttcgtcgtattcttgacgatttacttcatttctgttgccggtaacggcgctatcttaatgatcgttataagcgatcctcggcttcacagccccatgtatttctttctgggcaacctctcctgtctggatatttgttacagtagtgtgacattgcctaaaatgctgcaaaattttctatctgctcataaaatcagtaggagcggctgcgcactgcaaatgttcttctttctgtttttcggcgcaaccgagtgctgcctcctcgctgcgatggcctacgacagatacgcggctatttgcgagcccctccgctacccactgctgctttcacatcgagtttgccttcagctcgcaggtagtgcttgggcatgcggggttcttgtgggcttgggccacaccccttttattttttctctcccattttgcgggccaaacaccatcccccaattcttctgcgagatccaaccagtgctgcagcttgtgtgcggggacacatcactgaacgagctgcagatcattctagctaccgctctgctcattttgtgcccattcgggttgattctcggatcatacggcaggattctggtgactatcttcaggatccctagtgttgctggccgacggaaagcattctcgacctgtagcagccacttaattatggtgtctctattctatgggaccgcactcttcatctacattcgaccaaaggcctcttacgatcctgcaaccgatccccttgtctccttattctatgctgtggtgacccctatactgaacccgatcatctacagcctgcggaatactgaagtgaaagcagcacttaaaaggtag

SEQ ID NO: 176904 - DNA, 888 bp, Artificial Sequence
  derived and/or modified sequence
agtgtgaccgagttcctgctcctgggagttaccgacatccaggagctccaacccttcctttttgtagtttttctgacaatctatttcatctccgttgccggaaacggggctatactcatgatcgtgatttccgatcctaggctgcacagtccaatgtacttcttcctgggtaacctttcctgcttagacatctgctattcgtccgtaaccctccccaaaatgctgcagaacttcctgtcagcccacaaaataagtcgctcagggtgtgccttgcagatgttctttttcctgttctttggagcgaccgaatgctgcctcctggctgctatggcatatgatcgctacgccgcaatttgtgagcctcttaggtacccgctgcttttatcacatcgggtgtgcttgcaactagccggatccgcgtgggcttgcggcgttttggtaggactgggtcacacgccttttattttttccctacctttttgtgggcctaatactattcagcaattcttctgcgaaatccagccggtgctgcagttggtgtgtggggatacatctctgaacgaactgcagatcattctagccaccgcattgcttatcctgtgccctttcggactgattttgggctcctacggcagaattcttgtgacaatcttccggatcccatccgtcgccggaaggcgaaaggccttctctacttgctctagccacttgatcgtggtgtccctgttctatgggaccgctttgttcatctatatccgaccaaaagcgagttacgatccagccaccgaccctctggtgagccttttctacgccgtggtcacccctattcttaacccaatcatatattctctccgcaataccgaagtgaaggccgcactgaagcgctag

SEQ ID NO: 176905 - DNA, 888 bp, Artificial Sequence
  derived and/or modified sequence
tctgtgacagagttcctattgttgggagtaacagatatccaggagttgcaaccgtttttatttgttgtcttcttgacaatctacttcatatccgttgcaggtaacggagccattttaatgatcgtgatcagtgatccacggctccactcacccatgtactttttcctgggaaacttatcctgccttgatatatgctacagtagcgtgacacttcccaagatgctacaaaactttctgagcgcccacaagattagtcgctccgggtgcgccctacaaatgttcttctttctgtttttcggagcgactgagtgttgtctgttagccgcaatggcatatgaccggtacgccgcaatctgcgaaccattaagatatcctctgttactgagccatcgagtgtgtctgcaattggcgggatccgcttgggcctgtggggtgctggtcggcttggggcatacgccctttatcttctccctgcctttttgcggaccgaacacgattccacaattcttttgtgagatccagccagttctgcagttggtgtgtggggacacttcgttgaatgagcttcaaattatcctcgccaccgcgcttcttatcctttgcccgttcgggctcatactcggctcttatggaagaattctcgtgaccatatttcggatcccaagcgtggccggaagacggaaggctttctccacttgtagctcacatctcatcgtggtgagcttattctatggaactgcactgtttatatacattcgacctaaggcctcatacgatcctgccaccgatccccttgtctcccttttttatgcagttgtgacgcctatactaaatccaatcatctattctctgagaaacacagaagttaaggcagcacttaaacgctag

SEQ ID NO: 176906 - DNA, 915 bp, Artificial Sequence
  derived and/or modified sequence
gaaaggatgtccgcaaacacaagtatggtgacggaattcctgctgctaggtttctctcacttggcagaccttcaaggcttgttattctctgtatttctgactatttatttactcaccgtcgcagggaacttcttaatcgtggtgctagtgagcaccgacgccgctcttcagtctcccatgtactttttcctgagaaccctgagcgcactagagatcggatacacttctgtgaccgtgcctctgctcctgcatcatctgttaacaggcagaagacacatctcccggagtgggtgcgcactgcaaatgtttttctttcttttctttggagctactgagtgttgtctactagccgctatggcctatgatcgctatgccgcaatctgcgaaccccttcgttatccactcctcctgagccatagagtctgtctgcagctggccggatctgcctgggcctgtggggtgttggtcgggcttggccacacccctttcattttctccttacccttctgtggcccaaacacaatcccacagttcttctgcgagatccagcctgtgctgcagctggtttgcggagacacctccctgaacgaactgcagattatcctggctaccgccttacttatcctgtgtcccttcggtttgatcctgggcagctatggtcgaatcctcgtaacaatctttcgcattccatccgtcgccggtcgccgtaaagcattcagcacctgttcatcacacctcattgtcgtctcattgttctacgggactgctctgtttatttatattagaccaaaggccagctacgacccagcaaccgatccgttggtcagccttttctacgccgtcgtgactcccatattgaatcctattatctattctctgcgcaacaccgaagtcaaggctgccctcaagagatag

SEQ ID NO: 176907 - DNA, 888 bp, Artificial Sequence
  derived and/or modified sequence
tcagtgaccgaattcctgctgttaggagtcacagatattcaggagctgcagccctttttattcgtggtgttcttgacgatatactttataagcgttgcagggaacggcgctatactgatgatcgtaatatccgaccccagattgcacagtccaatgtattttttccttggaaatcttagctgtctggatatttgctactcaagcgtgacattacccaagatgcttcagaattttctcagtgctcacaagatcagcagatcggggtgcgctctccagatgtttttctttcttttcttcggcgctactgaatgctgtctcttggccgcaatggcgtatgatcgatacgctgcgatctgtgaaccgttgcgctaccctctcctgctgtctcatcgggtgtgcctgcagctagccggatctgcctgggcatgcggcgtgctcgtcgggctcggacacacgcctttcatctttagtctccctttctgcgggcctaacaccattccacagttcttctgcgaaattcagcctgtcctgcaactagtgtgtggggacacctctctcaacgagttgcaaatcattctcgctactgccttgcttatcctgtgtcctttcgggttgatacttggctcttatggcaggattctggtcaccatattcagaatcccaagcgtggctggcagacgaaaagctttttcaacttgctcctcccatctcatcgtcgttagcctcttctatggcacagctttatttatctacattaggcctaaagctagttatgatccagctactgatccacttgtgtcccttttctacgctgttgtcacaccgattctgaaccctattatctactcgttaagaaatacagaggtaaaggccgcactcaaaaggtag

SEQ ID NO: 176908 - DNA, 888 bp, Artificial Sequence
  derived and/or modified sequence
tctgttacagagtttctgctgttgggggtgactgatatccaggagctacaaccatttttgttcgttgttttccttaccatctactttatatccgtcgccggaaacggtgctatcctgatgattgttatctccgatccaagattacactctccgatgtattttttcctcggtaatctgagctgcctcgacatatgctattctagcgtgactctgcccaaaatgctgcagaacttcttatctgctcacaagattagccgatctgggtgcgcactgcaaatgtttttctttcttttcttcggcgctacagaatgttgcttattagctgctatggcttatgatcgttacgcagctatctgcgagcctcttcgctaccctctcctgctgtcccacagagtgtgtctacagctggcaggcagcgcctgggcctgcggcgtgcttgttggactcggccatacccccttcattttttccctacctttctgtggaccgaacactattccccagttcttttgtgagatccagccagtgctgcaactagtatgcggtgatacctctcttaacgagttacagataatcctcgcgactgctctgttaatcctgtgtccctttggattaatcctgggcagttacgggagaattctggtgactattttccggatccctagcgttgcagggagacggaaggcttttagtacctgttcatcccatctgatcgtagtgagtctgttctatggaaccgccctttttatctatatcagacctaaggcctcatacgatccggctaccgaccctctggtgtccctcttttatgcagtggtgaccccaatcctaaatccaatcatatacagtttgaggaatacagaagtcaaagcggctcttaaaagatag

SEQ ID NO: 176909 - protein, 206 aa, Artificial Sequence
  derived and/or modified sequence
MTTLAGAVPRMMRPGPGQNYPRSGFPLEVSTPLGQGRVNQLGGVFINGRPLPNHIRHKIVEMAHHGIRPCVISRQLRVSHGCVSKILCRYQETGSIRPGAIGGSKPKQVTTPDVEKKIEEYKRENPGMFSWEIRDKLLKDAVCDRNTVPSVSSISRILRSKFGKGEEEEADLERKEAEESEKKAKHSIDGILSERGKALVSGVSSH

SEQ ID NO: 176910 - DNA, 621 bp, Artificial Sequence
  derived and/or modified sequence
atgacaaccctggctggagccgtcccacgaatgatgcggcctgggcccggacagaattatcctcgctcaggctttcctcttgaggtcagcacaccactaggacagggaagagtgaatcagctcggcggcgtctttatcaatggtcggccactgcccaaccacatccgtcataaaattgttgaaatggctcatcacggcatcagaccctgcgttataagtcgccagctcagagtcagccatggttgcgtctcaaaaatactttgtcgatatcaagagacaggttcaatcagaccaggcgctatcggcggctcgaagccgaaacaggtgactacacccgatgttgagaagaaaatagaggaatacaagcgggaaaaccccgggatgttttcatgggagatacgcgacaagttgctgaaggacgcagtgtgcgataggaacaccgtgccatccgtaagcagcatatctcgtatcctgaggagcaaatttggaaagggcgaggaggaagaagccgacctcgagaggaaagaggctgaggaatctgagaaaaaggctaaacattcgatcgatggaatcctgtccgaaaggggtaaggctttggtgagcggagtatcatctcactag

SEQ ID NO: 176911 - DNA, 621 bp, Artificial Sequence
  derived and/or modified sequence
atgaccaccctggccggggctgtgcccaggatgatgaggcctggccctggccagaactaccccaggagcggcttccccctggaggtgtccacccccctgggccagggccgggtgaaccagctgggcggcgtcttcatcaatggccggcccctgcccaaccacatccgccacaagatcgtggagatggcccaccacggcatccggccctgcgtcatcagccggcagctgcgggtgagccacggctgtgtgtccaagatcctgtgccgctaccaggagaccggcagcatccggcctggggccatcggcggcagcaagcccaagcaggtgaccaccccagatgtggagaagaagattgaggagtacaagcgggagaaccctggcatgttctcctgggagatccgggacaagctgctgaaggatgctgtgtgtgacaggaacacagtgcccagcgtgagcagcatcagccgcatcctgcggagcaagtttgggaagggggaggaggaggaggccgacctggagaggaaggaggccgaggagagcgagaagaaggccaagcacagcattgatggcatcctgtctgagcggggcaaggccctggtgtctggagtgagcagccactag

SEQ ID NO: 176912 - DNA, 621 bp, Artificial Sequence
  derived and/or modified sequence
atgaccaccctggccggcgccgtgccccggatgatgcggcccggccctggccaaaattacccccggtctggcttccctctcgaggtcagcacaccactgggccagggacgcgtgaatcagttaggcggagtgtttatcaacggccggccccttcccaaccatatacgccacaagatcgtggagatggcccatcacggtatcagaccatgtgtcatttcacggcaacttagggtgtcccatgggtgtgtgagtaaaatcttatgtcggtatcaggagaccgggtccattagacccggcgccatcgggggctcaaaacccaaacaagtgaccacaccggatgtggagaaaaagatcgaagagtataagagagagaaccccggtatgttttcttgggagatccgagataagctattgaaggacgctgtgtgcgataggaataccgtccccagcgtgtcctcgatttcacgtatcctgagatccaaatttggaaagggggaggaagaggaagccgatctcgagaggaaggaagcagaagagagtgaaaagaaggccaaacactccatcgacggcattctgtccgaacgcggaaaagcgcttgtcagcggtgtgagctctcactag

SEQ ID NO: 176913 - DNA, 958 bp, Artificial Sequence
  derived and/or modified sequence
caaacttttccgccctgggctcgggatcctggactccggggcctccccgtcctcccctttcccgggttccagctccggcctctggactaggaaccgacagcccccctccccgcgtccctccctctctctccagccgttttggggaggggctctccacgctccggatagttcccgagggtcatccgcgccgcactcgcctttccgtttcgccttcacctggatataatttccgagcgaagctgcccccaggatgaccacgctggccggcgctgtgcccaggatgatgcggccgggcccggggcagaactacccgcgtagcgggttcccgctggaagtgtccactcccctcggccagggccgcgtcaaccagctcggcggtgtttttatcaacggcaggccgctgcccaaccacatccgccacaagatcgtggagatggcccaccacggcatccggccctgcgtcatctcgcgccagctgcgcgtgtcccacggctgcgtctccaagatcctgtgcaggtaccaggagactggctccatacgtcctggtgccatcggcggcagcaagcccaagcaggtgacaacgcctgacgtggagaagaaaattgaggaatacaaaagagagaacccgggcatgttcagctgggaaatccgagacaaattactcaaggacgcggtctgtgatcgaaacaccgtgccgtcagtgagttccatcagccgcatcctgagaagtaaattcgggaaaggtgaagaggaggaggccgacttggagaggaaggaggcagaggaaagcgagaagaaggccaaacacagcatcgacggcatcctgagcgagcgaggaaaggccctggtctccggagtttcctcgcattaaaggagagagagagagagtactcttttgggcaacggccctccaaaattgcccccacattggctgccttataaatatgtctgtgtgttg

SEQ ID NO: 176914 - DNA, 621 bp, Artificial Sequence
  derived and/or modified sequence
atgactacgttggctggggcagtgcctcgtatgatgcggccaggcccaggccaaaattatcctagaagtggctttccactggaagtcagcacacctctaggacaaggccgagtaaaccagctgggtggagtttttatcaacggcagacccctgcctaaccacattcgacacaaaatagttgagatggcccatcacggcatccgcccatgcgtgatatcacgtcaacttcgcgtttcccatggatgtgtttcaaagattctatgcagataccaagagaccggctcaatccgccctggcgcaataggcggaagcaagccaaaacaggtgacaacccctgacgttgagaagaaaatagaggagtacaaacgtgagaatcccggaatgttttcctgggagatccgggacaaacttctcaaagacgcagtctgcgatcgtaatacagtaccatctgtcagcagcatttctcgcatccttcgcagcaagtttggcaagggagaggaggaggaggccgatttggagaggaaggaggccgaggagagcgagaaaaaggcgaagcactcaatcgatggaattttgtcagagcggggaaaagcccttgtctccggcgtcagtagtcattag

SEQ ID NO: 176915 - DNA, 621 bp, Artificial Sequence
  derived and/or modified sequence
atgaccaccctggccggcgccgtgcccagaatgatgagacccggccccggccagaactaccccagaagcggcttccccctggaggtgagcacccccctgggccagggcagagtgaaccagctgggcggcgtgttcatcaacggcagacccctgcccaaccacatcagacacaagatcgtggagatggcccaccacggcatcagaccctgcgtgatcagcagacagctgagagtgagccacggctgcgtgagcaagatcctgtgcagataccaggagaccggcagcatcagacccggcgccatcggcggcagcaagcccaagcaggtgaccacccccgacgtggagaagaagatcgaggagtacaagagagagaaccccggcatgttcagctgggagatcagagacaagctgctgaaggacgccgtgtgcgacagaaacaccgtgcccagcgtgagcagcatcagcagaatcctgagaagcaagttcggcaagggcgaggaggaggaggccgacctggagagaaaggaggccgaggagagcgagaagaaggccaagcacagcatcgacggcatcctgagcgagagaggcaaggccctggtgagcggcgtgagcagccactag

SEQ ID NO: 176916 - protein, 398 aa, Artificial Sequence
  derived and/or modified sequence
MPHNSIRSGHGGLNQLGGAFVNGRPLPEVVRQRIVDLAHQGVRPCDISRQLRVSHGCVSKILGRYYETGSIRPGVIGGSKPKVATPKVVEKIGDYKRQNPTMFAWEIRDRLLAEGVCDNDTVPSVSSINRIIRTKVQQPFNLPMDSCVATKSLSPGHTLIPSSAVTPPESPQSDSLGSTYSINGLLGIAQPGSDKRKMDDSDQDSCRLSIDSQSSSSGPRKHLRTDAFSQHHLEPLECPFERQHYPEAYASPSHTKGEQGLYPLPLLNSTLDDGKATLTPSNTPLGRNLSTHQTYPVVAAPPFWICSKSAPGSRPSMPFPMLPPCTGSSRARPSSQGERWWGPRCPDTHPTSPPADRAAMPPLPSQAWWQEVNTLAMPMATPPTPPTARPGASPTPAC

SEQ ID NO: 176917 - DNA, 1197 bp, Artificial Sequence
  derived and/or modified sequence
atgccccacaacagcatcagaagcggccacggcggcctgaaccagctgggcggcgccttcgtgaacggcagacccctgcccgaggtggtgagacagagaatcgtggacctggcccaccagggcgtgagaccctgcgacatcagcagacagctgagagtgagccacggctgcgtgagcaagatcctgggcagatactacgagaccggcagcatcagacccggcgtgatcggcggcagcaagcccaaggtggccacccccaaggtggtggagaagatcggcgactacaagagacagaaccccaccatgttcgcctgggagatcagagacagactgctggccgagggcgtgtgcgacaacgacaccgtgcccagcgtgagcagcatcaacagaatcatcagaaccaaggtgcagcagcccttcaacctgcccatggacagctgcgtggccaccaagagcctgagccccggccacaccctgatccccagcagcgccgtgaccccccccgagagcccccagagcgacagcctgggcagcacctacagcatcaacggcctgctgggcatcgcccagcccggcagcgacaagagaaagatggacgacagcgaccaggacagctgcagactgagcatcgacagccagagcagcagcagcggccccagaaagcacctgagaaccgacgccttcagccagcaccacctggagcccctggagtgccccttcgagagacagcactaccccgaggcctacgccagccccagccacaccaagggcgagcagggcctgtaccccctgcccctgctgaacagcaccctggacgacggcaaggccaccctgacccccagcaacacccccctgggcagaaacctgagcacccaccagacctaccccgtggtggccgccccccccttctggatctgcagcaagagcgcccccggcagcagacccagcatgcccttccccatgctgcccccctgcaccggcagcagcagagccagacccagcagccagggcgagagatggtggggccccagatgccccgacacccaccccaccagcccccccgccgacagagccgccatgccccccctgcccagccaggcctggtggcaggaggtgaacaccctggccatgcccatggccaccccccccaccccccccaccgccagacccggcgccagccccacccccgcctgctag

SEQ ID NO: 176918 - DNA, 1197 bp, Artificial Sequence
  derived and/or modified sequence
atgccccacaatagcatccggagtggccacggcggcctgaaccagttgggtggggccttcgtaaacggtcgccctctccccgaggtagtgagacagagaattgtggatctggcccaccagggcgtgcgaccctgtgatatcagccgacagttgcgtgtaagccacggttgcgtgagtaagatcctgggtcgctattatgagacagggtcaatcaggcccggcgtgatcggcggctccaagcctaaagtagccacccctaaggttgttgaaaaaattggagactacaagcgacagaacccaaccatgttcgcttgggaaatcagggaccggctgctggccgagggggtatgtgataacgacactgtaccctccgtttcatctataaacaggataattcgaacaaaggtacagcagccctttaatttacctatggacagctgtgtggccaccaaaagcttatctcctgggcacaccctgatcccatcgtccgccgtaactccccctgagagtccacagtcagattccctgggctcaacatattccattaacgggctcttaggaatagcccaacccggttcagataaacgaaaaatggacgatagcgatcaagattcttgccgcttgagcatcgatagtcagtcatccagcagcgggccgcgtaagcatctgcgcaccgatgccttcagccaacaccatctggagccgctagaatgtcccttcgagaggcaacactatcccgaggcgtatgccagcccaagccacactaagggcgaacaaggactgtaccccctccctctcctcaatagcactctggacgacggaaaggccacgctgacgccaagcaacacccctctgggccgtaatctctctactcaccagacttaccctgtcgtagccgcgccccccttttggatttgcagcaagagcgcccccgggtcccggcccagcatgccatttcccatgttacccccctgcactggaagtagccgggccaggccaagcagccaaggagagaggtggtggggacctcgatgtccagatacacatccgactagccccccagcggaccgggccgctatgccacccctgccctcgcaggcatggtggcaagaagtcaatacgctggccatgccaatggcgacccctcctaccccgccaaccgcgcggcccggcgcctctccaacaccagcatgctag

SEQ ID NO: 176919 - DNA, 1197 bp, Artificial Sequence
  derived and/or modified sequence
atgcctcataatagcattcggagcggacacggcgggcttaatcaattgggtggtgccttcgtgaatggaaggccactgcctgaggtggtgcgacaacgcatcgttgatctcgcccaccaaggtgttcggccatgcgacatttctcggcagctgagagtcagccacggctgcgtgagtaagattctgggccggtactacgagacaggctctattcgccctggcgtgatcgggggctcaaaacccaaagttgctacccccaaggtcgtcgagaagattggggattataagcgacagaaccctacgatgtttgcctgggaaatccgcgaccggcttttagcagagggagtgtgcgacaacgatacagtaccctctgtcagctcaattaatcgtatcatcagaacaaaggttcaacaacctttcaacctgccaatggactcgtgtgttgctacaaaatctctgagcccaggccacactctcatcccgtcctccgctgtgacccctcctgaatcaccgcagtcagactccctgggctccacatattctatcaatgggctgctcggcatcgcccagccaggctcagacaaaaggaagatggatgattcagatcaagacagttgccggctgagtatcgactctcagtcgtcttccagtggacccagaaaacacttaagaaccgatgcattttcccagcaccacctggagccgcttgagtgtccgtttgagagacagcactatccagaggcttatgcctcgccatcccatacaaaaggtgagcagggtctgtacccactcccccttctgaattccactcttgacgatggcaaggccaccctgaccccaagtaacacacctctgggcaggaatctctccacccaccagacttatcccgtggtggcggcccctcccttctggatttgtagtaagagtgccccagggtcacggccttccatgcccttccccatgctacccccctgtacagggtcctctagagcacgcccttcttctcagggagaaaggtggtggggacctcggtgccccgatactcacccaaccagccctcccgctgatagagcggctatgccacccctacccagtcaggcatggtggcaagaggtaaacaccctggcaatgccaatggcgaccccccctaccccacctacagccaggccgggggcgtcccccaccccggcctgctag

SEQ ID NO: 176920 - DNA, 1197 bp, Artificial Sequence
  derived and/or modified sequence
atgccccacaacagcatccgcagcggccacggcggcctgaaccagctgggcggggcctttgtgaatggccggcccctgcctgaggtggtgcggcagagaattgtggacctggcccaccagggcgtgcggccctgtgacatcagccggcagctgcgggtgagccacggctgtgtgtccaagatcctgggccgctactatgagaccggcagcatccggcctggggtcatcggcggcagcaagcccaaggtggccacccccaaggtggtggagaagatcggggactacaagaggcagaaccccaccatgtttgcctgggagatccgggaccggctgctggccgagggcgtgtgtgacaatgacacagtgcccagcgtgagcagcatcaaccgcatcatccgcaccaaggtgcagcagcccttcaacctgcccatggacagctgtgtggccaccaagagcctgagccctggccacaccctcatccccagcagcgctgtgaccccacctgagagcccccagagcgacagcctgggcagcacctacagcatcaatggcctgctgggcatcgcccagcccggcagtgacaagaggaagatggatgacagcgaccaggacagctgccgcctgagcattgacagccagagcagcagcagcggccccaggaagcacctgaggacagatgccttcagccagcaccacctggagcccctggagtgcccctttgagcggcagcactacccagaggcctatgccagccccagccacaccaagggggagcagggcctgtaccccctgcccctgctgaacagcaccctggatgatggcaaggccaccctgacccccagcaacacccccctgggcaggaacctgagcacccaccagacctaccctgtggtggccgccccacccttctggatctgcagcaagagcgcccctggcagccggcccagcatgcccttccccatgctgcccccctgcaccggcagcagccgggcccggcccagcagccagggcgagcgctggtggggcccccgctgcccagacacccaccccaccagccccccagctgaccgggccgccatgccacccctgcccagccaggcctggtggcaggaggtgaacaccctggccatgcccatggccaccccacccaccccacccacagcccggcctggggccagccccaccccagcctgctag

SEQ ID NO: 176921 - DNA, 1197 bp, Artificial Sequence
  derived and/or modified sequence
atgccccacaacagcatccggagcggccacggcggcctgaaccagctggggggggccttcgttaacggtaggcccttgccagaggtggtgagacagaggattgtggacctggcacatcagggcgttcggccctgcgacatctcaagacagctgcgcgtgagccacggctgcgtgtccaagatactggggcgctattacgagactggctcaatcaggccaggggtgattggcggttcaaaacccaaagtagccaccccaaaggttgttgaaaagatcggggattataagcgacagaaccccacaatgtttgcctgggagatccgggatcgactgctggctgaaggagtgtgcgataacgacacagtgccctctgtgtccagcattaatcggatcattaggaccaaggtgcagcaacccttcaacctgccgatggactcttgtgtggcaacaaaatcacttagtcccgggcacactctcataccgagctccgccgtaaccccccccgaatctccccaatccgacagcctaggctccacctacagcatcaacggtcttctgggcatcgcccaacctggaagtgacaagcggaagatggacgactccgatcaggattcatgcagactgagcatagatagccagtcttcatcgtccggcccgagaaagcacctacgtactgacgcattctcccagcatcatctcgagccgctagagtgtccattcgagcgtcaacattacccagaagcctacgcctcacccagccacactaaaggcgaacaaggcctatatccactcccgctgctgaattccaccttggatgatgggaaggccacactgaccccctccaacacacctctaggtcggaacctgagcacccatcaaacataccccgtggtagccgctccacccttttggatatgcagtaagagtgccccaggctcccgaccctcaatgccctttcccatgctaccaccttgcaccggatcctcccgcgcgaggccatccagccagggtgagcggtggtggggcccaagatgtccagatacccatccaacttcaccgcccgccgatcgagccgccatgcctcctcttccctctcaggcatggtggcaggaggttaatacactggctatgccaatggccacccccccaacccccccgacggcacgcccaggagctagcccgacaccagcatgttag

SEQ ID NO: 176922 - DNA, 1197 bp, Artificial Sequence
  derived and/or modified sequence
atgccccacaacagcatccggagcggccacggcggcctgaaccagctggggggagcattcgttaacggacggcccctacctgaggtcgtccgacagcggattgtagacttggcccatcaaggagttagaccgtgtgacatctcacggcaactgagagtctcccacggctgcgttagcaaaattttgggcagatattatgagaccggttccatccgcccaggggtgattggtggaagcaaacccaaagtggctacgcccaaggtggtggagaagatcggcgactataaaagacagaaccctacgatgttcgcttgggagattcgggaccgtctgctggccgaaggggtgtgcgacaacgacactgtgccctctgtctcttcaataaacaggattatccggaccaaagtgcagcagcctttcaatctgccaatggatagctgcgttgccaccaagtctctgtcccctggccacactcttattccatcatctgctgtgaccccaccagaaagcccacaatctgactctctgggatccacttatagcattaacgggctgcttggcatcgcccagcccgggtccgacaaaagaaaaatggatgactctgaccaggattcctgcaggctgagcattgactcccagagcagttcttcagggcctaggaagcatctccgaactgacgcattcagccagcaccatctggagcctctggaatgtccttttgaacggcagcactaccccgaggcttatgccagccctagccacactaagggggaacaagggttgtatcctctccccctactcaattcaacactggacgacggaaaagcaacattgaccccctctaacaccccactcggacggaacctgtccacgcaccaaacataccccgtcgtggccgctccacctttctggatctgtagcaagtcggctcctggatcaaggcctagtatgccttttccgatgctgccgccatgcaccggttcctcccgggcacggccgtccagccagggagagcgctggtggggcccccggtgccctgacactcacccaaccagccccccagccgatagggctgcgatgccaccactgccatctcaagcgtggtggcaagaagttaacaccctcgctatgcctatggccacccccccaacccccccaaccgcaagacccggagccagccctacaccagcttgttag

SEQ ID NO: 176923 - DNA, 1197 bp, Artificial Sequence
  derived and/or modified sequence
atgcctcacaactccatcagatctggccatggagggctgaaccagctgggaggggcctttgtgaatggcagacctctgccggaagtggtccgccagcgcatcgtagacctggcccaccagggtgtaaggccctgcgacatctctcgccagctccgcgtcagccatggctgcgtcagcaagatccttggcaggtactacgagactggcagcatccggcctggagtgatagggggctccaagcccaaggtggccacccccaaggtggtggagaagattggggactacaaacgccagaaccctaccatgtttgcctgggagatccgagaccggctcctggctgagggcgtctgtgacaatgacactgtgcccagtgtcagctccattaatagaatcatccggaccaaagtgcagcaaccattcaacctccctatggacagctgcgtggccaccaagtccctgagtcccggacacacgctgatccccagctcagctgtaactcccccggagtcaccccagtcggattccctgggctccacctactccatcaatgggctcctgggcatcgctcagcctggcagcgacaagaggaaaatggatgacagtgatcaggatagctgccgactaagcattgactcacagagcagcagcagcggaccccgaaagcaccttcgcacggatgccttcagccagcaccacctcgagccgctcgagtgcccatttgagcggcagcactacccagaggcctatgcctcccccagccacaccaaaggcgagcagggcctctacccgctgcccttgctcaacagcaccctggacgacgggaaggccaccctgaccccttccaacacgccactggggcgcaacctctcgactcaccagacctaccccgtggtggcagctccgcctttttggatctgcagcaagtcggctccggggtcccgcccttcaatgcctttccccatgctgcctccgtgtacgggcagttcacgggccaggccctcctctcagggcgagagatggtggggcccacgctgcccggatacccaccccacatccccaccagcggacagggcagctatgcctcctctgccatcgcaggcatggtggcaggaagtgaatactctggcaatgcctatggccacaccccctactcctcctacagcgaggcctggcgcttccccaactccagcttgctga

SEQ ID NO: 176924 - DNA, 1197 bp, Artificial Sequence
  derived and/or modified sequence
atgccacataactccattagatccggccacggcggactgaatcaactcgggggagctttcgtgaacggacgcccacttccagaggttgtcagacagcgcattgttgatttggcacaccagggtgtacgcccttgcgatatatcccggcagctgcgcgtgagtcatggttgcgttagcaagattctgggacggtattatgaaacaggctccatcaggccaggcgttattggcggtagcaagcctaaggtggccactcctaaagtggtagagaagattggagactacaaacgacagaaccccacgatgttcgcatgggaaatccgcgatcggcttctggctgaaggagtctgtgacaacgacactgttccctccgtctccagcattaatcgaatcatacgtacaaaagtgcagcagcctttcaacctccctatggacagttgtgtagcaactaaaagtctctcccccggtcacactctgattccttcaagcgccgtgactccacctgaatctccccagtctgatagcctgggaagtacctactccatcaatggccttctcggcattgcacagcctggatccgacaaaaggaaaatggatgattcagatcaggactcttgccggcttagtattgattcacagagcagttcctccggtcccagaaaacatctgaggacggatgccttctcccagcatcatctcgaacccttggaatgcccctttgaaagacagcactatcccgaagcgtacgcctccccgtcccataccaaaggcgaacagggcctgtacccgctccccctgttgaactccacacttgatgatggtaaagccacgctaacaccaagtaacacacctttgggtaggaacctatctacacatcagacgtacccagtggtggccgctccacctttctggatatgttctaagagcgcaccaggttctcgtcctagtatgccattccctatgctcccaccatgtactggcagttcacgcgcacgtccttcatctcagggagagcggtggtgggggccacgatgcccagatacccacccaacctctccaccagctgaccgggctgccatgcccccacttccctcacaggcttggtggcaggaggtgaacactctcgcaatgccgatggccacacctcctaccccaccaacggcaagacccggagcttctccaacaccagcatgctag

SEQ ID NO: 176925 - DNA, 1197 bp, Artificial Sequence
  derived and/or modified sequence
atgccccataatagtattagatctggacacggcggacttaatcagttgggtggagcatttgtcaacggacgccctcttccagaggtcgttcgtcagaggatcgtggacctggcccatcaaggagtacggccttgtgatatttccaggcagctcagggtgagtcacgggtgtgtgagcaagatattggggagatactatgagaccggaagcattcgccctggggtcattgggggtagcaagcccaaagtcgcgacacccaaagttgtggaaaagattggcgactacaagcgccaaaacccaaccatgttcgcttgggagatacgtgataggctcctcgcagaaggtgtgtgtgataacgacacagtcccctcagtctcctcaattaaccgaatcatccgcaccaaagtacagcagccgtttaatctgccgatggactcttgcgtcgctactaagtccttgagccccggacacactctgattccttcgagtgccgtgacacccccagagtcaccccagtccgactctctcggatctacatactcgataaacggtctgctgggcattgcccagcccggatccgacaagcggaagatggacgacagcgatcaggacagctgcagactatcaattgattcacaaagttcctcatcagggccaagaaagcacctgcggacagatgctttttcacagcatcatttagagccattagagtgcccgtttgaaaggcaacactatcccgaggcctacgcatccccctcccatacaaagggggagcaggggctgtaccccctaccactgctgaactcaactttggatgacggcaaggcaactctaacaccgtctaataccccactgggccgaaatctgagtacccaccaaacctacccagtggtagccgcaccacccttctggatttgcagtaagtctgctcccggttctaggccctcaatgcccttccctatgttgccgccttgtaccggaagctcacgcgcacgccctagctcacaaggtgaacgctggtggggccctcgctgtcccgacacccatcccacatctcccccagccgacagggccgctatgcccccactgccctcccaggcctggtggcaggaagttaacacactcgccatgccaatggcaactccgcctacacctcccacggcacgacctggtgcttccccgacaccagcatgctag

SEQ ID NO: 176926 - protein, 321 aa, Artificial Sequence
  derived and/or modified sequence
MPHNSIRSGHGGLNQLGGAFVNGRPLPEVVRQRIVDLAHQGVRPCDISRQLRVSHGCVSKILGRYYETGSIRPGVIGGSKPKVATPKVVEKIGDYKRQNPTMFAWEIRDRLLAEGVCDNDTVPSVSSINRIIRTKVQQPFNLPMDSCVATKSLSPGHTLIPSSAVTPPESPQSDSLGSTYSINGLLGIAQPGSDKRKMDDSDQDSCRLSIDSQSSSSGPRKHLRTDAFSQHHLEPLECPFERQHYPEAYASPSHTKGEQGERWWGPRCPDTHPTSPPADRAAMPPLPSQAWWQEVNTLAMPMATPPTPPTARPGASPTPAC

SEQ ID NO: 176927 - DNA, 966 bp, Artificial Sequence
  derived and/or modified sequence
atgccccacaacagcatcagaagcggccacggcggcctgaaccagctgggcggcgccttcgtgaacggcagacccctgcccgaggtggtgagacagagaatcgtggacctggcccaccagggcgtgagaccctgcgacatcagcagacagctgagagtgagccacggctgcgtgagcaagatcctgggcagatactacgagaccggcagcatcagacccggcgtgatcggcggcagcaagcccaaggtggccacccccaaggtggtggagaagatcggcgactacaagagacagaaccccaccatgttcgcctgggagatcagagacagactgctggccgagggcgtgtgcgacaacgacaccgtgcccagcgtgagcagcatcaacagaatcatcagaaccaaggtgcagcagcccttcaacctgcccatggacagctgcgtggccaccaagagcctgagccccggccacaccctgatccccagcagcgccgtgaccccccccgagagcccccagagcgacagcctgggcagcacctacagcatcaacggcctgctgggcatcgcccagcccggcagcgacaagagaaagatggacgacagcgaccaggacagctgcagactgagcatcgacagccagagcagcagcagcggccccagaaagcacctgagaaccgacgccttcagccagcaccacctggagcccctggagtgccccttcgagagacagcactaccccgaggcctacgccagccccagccacaccaagggcgagcagggcgagagatggtggggccccagatgccccgacacccaccccaccagcccccccgccgacagagccgccatgccccccctgcccagccaggcctggtggcaggaggtgaacaccctggccatgcccatggccaccccccccaccccccccaccgccagacccggcgccagccccacccccgcctgctag

SEQ ID NO: 176928 - DNA, 966 bp, Artificial Sequence
  derived and/or modified sequence
atgccccacaatagtattcggtcgggacatgggggtttgaaccagctgggaggcgctttcgtgaacggcagacctctacccgaagttgtgagacagagaatcgttgacttggcccatcaaggcgtgcgaccctgcgacatctcccgacaacttagggtcagccacggatgtgtgtccaaaattctggggcgatactatgaaactggaagcatccgtcctggtgtgatcggggggtccaagccaaaagtggctactccgaaggtggtcgaaaagattggagactataagagacagaaccccacaatgtttgcctgggagatccgcgatcgactcctggcagagggcgtgtgtgacaatgacacagtcccatctgtgagttccatcaatcgcatcatccggactaaggttcagcagccattcaatcttcccatggattcttgcgtggccacaaagtctttgagccccggccataccctgatacctagcagtgccgtgaccccacccgagagtccacagtccgatagtctgggatcgacatactctattaacggcctgcttggcattgctcaaccaggttccgataagcggaagatggacgacagtgatcaggacagttgtagactgagcattgacagtcagtcaagttctagcgggcctaggaaacatcttcgtacagacgctttctcacagcaccacctcgaacccctcgagtgtccctttgagcgacaacactacccagaagcttacgcaagcccctctcacacaaaaggcgagcagggcgagcggtggtggggtcctcggtgtccggacacccatcctaccagtccaccagccgatagagctgccatgccaccattgcccagtcaggcgtggtggcaagaggtgaacactcttgcaatgcctatggccaccccccccacaccccctacagcccggcccggcgcctcacccaccccagcttgttag

SEQ ID NO: 176929 - DNA, 966 bp, Artificial Sequence
  derived and/or modified sequence
atgccccacaacagcatccgcagcggccacggcggcctgaaccagctgggcggggcctttgtgaatggccggcccctgcctgaggtggtgcggcagagaattgtggacctggcccaccagggcgtgcggccctgtgacatcagccggcagctgcgggtgagccacggctgtgtgtccaagatcctgggccgctactatgagaccggcagcatccggcctggggtcatcggcggcagcaagcccaaggtggccacccccaaggtggtggagaagatcggggactacaagaggcagaaccccaccatgtttgcctgggagatccgggaccggctgctggccgagggcgtgtgtgacaatgacacagtgcccagcgtgagcagcatcaaccgcatcatccgcaccaaggtgcagcagcccttcaacctgcccatggacagctgtgtggccaccaagagcctgagccctggccacaccctcatccccagcagcgctgtgaccccacctgagagcccccagagcgacagcctgggcagcacctacagcatcaatggcctgctgggcatcgcccagcccggcagtgacaagaggaagatggatgacagcgaccaggacagctgccgcctgagcattgacagccagagcagcagcagcggccccaggaagcacctgaggacagatgccttcagccagcaccacctggagcccctggagtgcccctttgagcggcagcactacccagaggcctatgccagccccagccacaccaagggggagcagggcgagcgctggtggggcccccgctgcccagacacccaccccaccagccccccagctgacagagctgccatgccacccctgcccagccaggcctggtggcaggaggtgaacaccctggccatgcccatggccaccccacccaccccacccacagcccggcctggggccagccccaccccagcctgctag

SEQ ID NO: 176930 - DNA, 966 bp, Artificial Sequence
  derived and/or modified sequence
atgccccacaacagcatccggagcggccacggcggcctgaaccagctggggggggctttcgtcaacggccggccactgccagaggtcgtcaggcagagaattgtggacctggcccaccagggggttagaccctgcgacattagtaggcagttgcgagttagccacggttgtgtgtccaaaatactgggaagatactacgaaaccgggtctattcgaccgggcgtcattggtgggtccaagcctaaagtagccacgccaaaagtcgtggaaaaaattggcgattacaagagacagaaccctactatgttcgcctgggagatcagagatcgtctgctagcagagggtgtgtgcgataatgacacagtgccaagcgtgtcgtcaatcaatcgcattatccggaccaaggtgcagcagccattcaatttgcccatggattcctgtgtggccacaaaatctctgtcccctgggcatactctgatcccctcttccgctgtaacgcccccagagtctccccagtcggactccctgggatccacatatagcattaatggcctgctgggtattgcccagccagggtccgacaaacgaaagatggatgattctgaccaggatagttgtagactctcaatcgacagtcaatcaagttcttctggcccacggaagcaccttagaacagatgcttttagtcagcatcacctcgaacccttggaatgtcccttcgaaagacagcattaccccgaagcgtatgcgagtcctagccacacaaaaggcgaacagggcgaacgatggtggggacccagatgccctgatacccatcctactagtccccccgccgacagggccgctatgccccccctgccatctcaggcatggtggcaggaagtgaatacactggccatgccaatggcgacacctcccaccccccccacagcgaggcccggggcatctccaacccccgcctgctag

SEQ ID NO: 176931 - DNA, 966 bp, Artificial Sequence
  derived and/or modified sequence
atgccccataatagtatccgcagcgggcacggcggattgaaccaactgggtggtgctttcgtgaatgggaggccactcccagaagtggtgcgacagcgaatagtcgatctcgcacatcagggagtgaggccgtgtgacatcagccgacaactgagagttagccacggctgtgttagcaagatattggggagatattatgagactgggagcattaggccgggtgttatagggggtagcaaaccgaaagtggccaccccaaaggtcgtagagaaaattggagactataaaagacagaacccaacaatgttcgcctgggaaattcgcgaccggctgctcgcggaaggtgtgtgtgacaatgatacagtccctagcgtgagttccatcaataggattattaggacaaaggttcagcagcccttcaacctgcccatggattcttgtgtggctactaagagtctcagtcctggccacactctgatcccctctagcgctgtcacacctccagaatctccacagagtgattctctgggaagtacatactctatcaacggtcttctgggaatagcccagccgggttccgataagaggaagatggatgacagcgatcaggactcttgtaggctaagcatcgacagtcaaagctcctcctcagggccacgcaaacacctgagaacagacgcctttagccagcaccaccttgaaccgctcgagtgtcccttcgaacggcagcactacccagaagcatacgctagcccatcccatacaaagggcgaacagggagagcgatggtgggggccacgttgcccagatacgcatcctacctcaccaccagctgatagggctgccatgcctcctctgcctagtcaggcttggtggcaagaagtgaatacactcgcgatgccgatggccacacctcccacacccccaaccgcgagacccggtgccagccccacccctgcgtgctag

SEQ ID NO: 176932 - protein, 515 aa, Artificial Sequence
  derived and/or modified sequence
MGNWVVNHWFSVLFLVVWLGLNVFLFVDAFLKYEKADKYYYTRKILGSTLACARASALCLNFNSTLILLPVCRNLLSFLRGTCSFCSRTLRKQLDHNLTFHKLVAYMICLHTAIHIIAHLFNFDCYSRSRQATDGSLASILSSLSHDEKKGGSWLNPIQSRNTTVEYVTFTSIAGLTGVIMTIALILMVTSATEFIRRSYFEVFWYTHHLFIFYILGLGIHGIGGIVRGQTEESMNESHPRKCAESFEMWDDRDSHCRRPKFEGHPPESWKWILAPVILYICERILRFYRSQQKVVITKVVMHPSKVLELQMNKRGFSMEVGQYIFVNCPSISLLEWHPFTLTSAPEEDFFSIHIRAAGDWTENLIRAFEQQYSPIPRIEVDGPFGTASEDVFQYEVAVLVGAGIGVTPFASILKSIWYKFQCADHNLKTKKVGHAALNFDKATDIVTGLKQKTSFGRPMWDNEFSTIATSHPKSVVGVFLCGPRTLAKSLRKCCHRYSSLDPRKVQFYFNKENF

SEQ ID NO: 176933 - protein, 192 aa, Artificial Sequence
  derived and/or modified sequence
MGNWVVNHWFSVLFLVVWLGLNVFLFVDAFLKYEKADKYYYTRKILGSTLACARASALCLNFNSTLILLPVCRNLLSFLRGTCSFCSRTLRKQLDHNLTFHKLVAYMICLHTAIHIIAHLFNFDCYSRSRQATDGSLASILSSLSHDEKKGGSWLNPIHPHITPTVYMFTVTFDMVLSSVNSNLFLFLLIKK

SEQ ID NO: 176934 - DNA, 1548 bp, Artificial Sequence
  derived and/or modified sequence
atgggcaactgggtggtgaaccactggttcagcgtgctgttcctggtggtgtggctgggcctgaacgtgttcctgttcgtggacgccttcctgaagtacgagaaggccgacaagtactactacaccagaaagatcctgggcagcaccctggcctgcgccagagccagcgccctgtgcctgaacttcaacagcaccctgatcctgctgcccgtgtgcagaaacctgctgagcttcctgagaggcacctgcagcttctgcagcagaaccctgagaaagcagctggaccacaacctgaccttccacaagctggtggcctacatgatctgcctgcacaccgccatccacatcatcgcccacctgttcaacttcgactgctacagcagaagcagacaggccaccgacggcagcctggccagcatcctgagcagcctgagccacgacgagaagaagggcggcagctggctgaaccccatccagagcagaaacaccaccgtggagtacgtgaccttcaccagcatcgccggcctgaccggcgtgatcatgaccatcgccctgatcctgatggtgaccagcgccaccgagttcatcagaagaagctacttcgaggtgttctggtacacccaccacctgttcatcttctacatcctgggcctgggcatccacggcatcggcggcatcgtgagaggccagaccgaggagagcatgaacgagagccaccccagaaagtgcgccgagagcttcgagatgtgggacgacagagacagccactgcagaagacccaagttcgagggccacccccccgagagctggaagtggatcctggcccccgtgatcctgtacatctgcgagagaatcctgagattctacagaagccagcagaaggtggtgatcaccaaggtggtgatgcaccccagcaaggtgctggagctgcagatgaacaagagaggcttcagcatggaggtgggccagtacatcttcgtgaactgccccagcatcagcctgctggagtggcaccccttcaccctgaccagcgcccccgaggaggacttcttcagcatccacatcagagccgccggcgactggaccgagaacctgatcagagccttcgagcagcagtacagccccatccccagaatcgaggtggacggccccttcggcaccgccagcgaggacgtgttccagtacgaggtggccgtgctggtgggcgccggcatcggcgtgacccccttcgccagcatcctgaagagcatctggtacaagttccagtgcgccgaccacaacctgaagaccaagaaggtgggccacgccgccctgaacttcgacaaggccaccgacatcgtgaccggcctgaagcagaagaccagcttcggcagacccatgtgggacaacgagttcagcaccatcgccaccagccaccccaagagcgtggtgggcgtgttcctgtgcggccccagaaccctggccaagagcctgagaaagtgctgccacagatacagcagcctggaccccagaaaggtgcagttctacttcaacaaggagaacttctag

SEQ ID NO: 176935 - DNA, 579 bp, Artificial Sequence
  derived and/or modified sequence
atgggcaactgggtggtgaatcactggttcagcgtcctctttcttgttgtgtggctgggcctcaatgtgtttttgttcgtggacgcttttctgaaatatgagaaggcagacaagtactattatacccgcaaaattctgggaagcaccttagcttgcgctagagcctcggccttgtgcttaaatttcaacagtaccctgatcctgttgccagtatgtagaaacctgctgagctttttgcgcgggacttgtagtttctgctccagaacgcttcgaaagcagctggaccataacctgacttttcacaaactcgtggcatacatgatttgccttcacactgccattcacatcatagcccacctttttaattttgattgttactcaaggagccgacaggctactgacggttcactggcctccattctcagtagcttgagccacgatgaaaaaaaaggcgggtcgtggctgaacccaatacatccacacattacccccacagtgtacatgtttacagtaacatttgatatggtactgtccagtgttaattccaatctgttcctgttcctccttattaaaaagtag

SEQ ID NO: 176936 - DNA, 579 bp, Artificial Sequence
  derived and/or modified sequence
atgggcaattgggtggttaaccactggttctcagtcctcttcctggttgtgtggctgggactgaatgttttcttatttgtggacgccttcctcaagtatgagaaggctgataagtattactatactagaaagatcctgggttctaccctggcctgcgcccgggctagcgccttgtgcttaaatttcaatagcacactgattctactccctgtctgtcggaacttgctgagctttctcagaggcacctgttctttttgctcccgcaccttgcgcaaacagctggaccacaatctcacctttcacaagctggtggcttacatgatttgcttacatacagcaatccacatcatcgcacatttatttaacttcgattgttactctcggagcagacaggcaactgatggatctcttgcgagtattttgtctagtctgagccacgacgagaagaagggaggctcttggctcaatccaattcatccccacattacccccactgtttatatgtttaccgtgaccttcgatatggtcctctctagcgtcaattcaaacttgttcctgttcctgcttatcaagaaatag

SEQ ID NO: 176937 - DNA, 1548 bp, Artificial Sequence
  derived and/or modified sequence
atgggcaactgggtcgtgaatcactggttttcagtcttgtttctggtagtgtggctggggctcaacgtatttctgtttgttgacgcctttctgaaatatgaaaaagccgataaatactattatactcgtaaaatcctgggatccaccctcgcctgtgcccgcgcgagcgcgctttgtttaaactttaattccaccctgattctgctgccagtctgccgcaaccttctctcctttctgcgcggaacttgcagcttttgctctcgcaccctgagaaaacagctcgaccataaccttaccttccataaacttgtggcctacatgatttgtttacacaccgccatccacattattgcccatctctttaacttcgactgctactcgaggagtagacaggccaccgacgggagtctggcctccatcctctccagtttgagccacgatgaaaagaagggagggtcctggctgaatccgattcagtctagaaacactacagtggagtatgtcactttcacttccattgccggactgacaggagtgatcatgacgatcgcactgattctgatggtcactagtgccacagagttcatccgcagatcctatttcgaggtgttctggtacacacaccatctgttcattttctatatcttgggcttaggcatacacggcatcggaggaatagtaaggggacagaccgaggagtcgatgaacgagtcgcacccgcgaaaatgcgcagagtccttcgagatgtgggacgatagggacagccattgccgccgtcccaaatttgagggacacccccctgagagctggaaatggatcctcgctccggtgattctgtacatctgtgagaggatccttagattttacagatcgcagcaaaaggtggtcataactaaagtcgtcatgcacccttcaaaggtgttagagctgcagatgaataaaagaggcttttctatggaggtaggacagtacatctttgttaattgtccatctatttcgctcctggaatggcatcccttcaccttgacttccgctccggaggaggacttcttctctatacacattcgagcagcaggagattggaccgagaatctcattcgggccttcgagcagcagtacagtcccataccacgcatagaagtcgatgggccattcggaacagcctctgaagacgtctttcaatacgaggtagccgtcttggtcggagccgggattggagtaacccctttcgcgagtatcctgaaatccatctggtacaagtttcagtgtgccgaccataatctcaagaccaaaaaggttggccacgcggcgcttaatttcgataaagctaccgacatcgtgacgggactgaaacaaaaaacttccttcggaaggcccatgtgggataatgaattttctaccattgctacaagccacccaaaatctgtcgttggggtgttcctctgtggccccaggacactggcaaaatcactgcgcaaatgttgccatcgatacagctcccttgatcccagaaaagttcagttttatttcaataaagagaatttttag

SEQ ID NO: 176938 - DNA, 579 bp, Artificial Sequence
  derived and/or modified sequence
atgggcaactgggtggtgaaccactggttctctgtgctcttcctggtggtgtggctgggcctgaatgtgttcctgtttgtggatgccttcctgaagtatgagaaggctgacaagtactactacaccaggaagatcctgggcagcaccctggcctgtgcccgggccagcgccctgtgcctgaacttcaacagcaccctcatcctgctgcctgtgtgcaggaacctgctgtccttcctgcggggcacctgcagcttctgcagcaggaccctgaggaagcagctggaccacaacctgaccttccacaagctggtggcctacatgatctgcctgcacacagccatccacatcatcgcccacctgttcaactttgactgctacagccgcagccggcaggccacagatggcagcctggccagcatcctgagcagcctgagccatgatgagaagaagggcggctcctggctgaaccccatccacccccacatcacccccaccgtgtacatgttcaccgtgacctttgacatggtgctgagctctgtgaacagcaacctcttcctgttcctgctgatcaagaagtag

SEQ ID NO: 176939 - DNA, 1548 bp, Artificial Sequence
  derived and/or modified sequence
atgggcaactgggtggtgaaccactggttctctgtgctcttcctggtggtgtggctgggcctgaatgtgttcctgtttgtggatgccttcctgaagtatgagaaggctgacaagtactactacaccaggaagatcctgggcagcaccctggcctgtgcccgggccagcgccctgtgcctgaacttcaacagcaccctcatcctgctgcctgtgtgcaggaacctgctgtccttcctgcggggcacctgcagcttctgcagcaggaccctgaggaagcagctggaccacaacctgaccttccacaagctggtggcctacatgatctgcctgcacacagccatccacatcatcgcccacctgttcaactttgactgctacagccgcagccggcaggccacagatggcagcctggccagcatcctgagcagcctgagccatgatgagaagaagggcggctcctggctgaaccccatccagagcaggaacaccaccgtggagtatgtgaccttcaccagcattgctggcctgactggagtcatcatgaccatcgccctgatcctgatggtgaccagcgccacagagttcatcagaagaagctactttgaggtgttctggtacacccaccacctgttcatcttctacatcctgggcctgggcatccatggaattggaggcatcgtgcggggccagacagaggagagcatgaatgaaagccaccccaggaaatgtgccgagagctttgagatgtgggatgaccgggacagccactgccggcggcccaagtttgagggccaccccccagagagctggaagtggatcctggcccctgtgatcctgtacatctgtgagcgcatcctgcgcttctaccgcagccagcagaaggtggtgatcaccaaggtggtgatgcaccccagcaaggtgctggagctgcagatgaacaagaggggcttctccatggaggtgggccagtacatctttgtgaactgccccagcatcagcctgctggagtggcaccccttcaccctgaccagcgcccctgaggaggacttcttcagcatccacatccgggccgccggggactggacagaaaatctcatccgggcctttgagcagcagtacagccccatccccagaattgaggtggatggcccctttggaacagcctctgaagatgtgttccagtatgaggtggccgtgctggtgggcgccggcattggagtgaccccatttgccagcatcctgaagagcatctggtacaagttccagtgtgccgaccacaacctgaagaccaagaaggtgggccacgccgccctgaactttgacaaggccacagacatcgtgacaggcctgaagcagaagaccagctttggccggcccatgtgggacaatgagttcagcaccatcgccaccagccaccccaagtctgtggtgggcgtcttcctgtgtggccccaggaccctggccaagagcctgaggaagtgctgccaccgctacagcagcctggaccccaggaaggtgcagttctacttcaacaaggagaacttctag

SEQ ID NO: 176940 - DNA, 1734 bp, Artificial Sequence
  derived and/or modified sequence
ggacctctccagaatccggattgctgaatcttccctgttgcctagaagggctccaaaccacctcttgacaatgggaaactgggtggttaaccactggttttcagttttgtttctggttgtttggttagggctgaatgttttcctgtttgtggatgccttcctgaaatatgagaaggccgacaaatactactacacaagaaaaatccttgggtcaacattggcctgtgcccgagcgtctgctctctgcttgaattttaacagcacgctgatcctgcttcctgtgtgtcgcaatctgctgtccttcctgaggggcacctgctcattttgcagccgcacactgagaaagcaattggatcacaacctcaccttccacaagctggtggcctatatgatctgcctacatacagctattcacatcattgcacacctgtttaactttgactgctatagcagaagccgacaggccacagatggctcccttgcctccattctctccagcctatctcatgatgagaaaaaggggggttcttggctaaatcccatccagtcccgaaacacgacagtggagtatgtgacattcaccagcattgctggtctcactggagtgatcatgacaatagccttgattctcatggtaacttcagctactgagttcatccggaggagttattttgaagtcttctggtatactcaccacctttttatcttctatatccttggcttagggattcacggcattggtggaattgtccggggtcaaacagaggagagcatgaatgagagtcatcctcgcaagtgtgcagagtcttttgagatgtgggatgatcgtgactcccactgtaggcgccctaagtttgaagggcatccccctgagtcttggaagtggatccttgcaccggtcattctttatatctgtgaaaggatcctccggttttaccgctcccagcagaaggttgtgattaccaaggttgttatgcacccatccaaagttttggaattgcagatgaacaagcgtggcttcagcatggaagtggggcagtatatctttgttaattgcccctcaatctctctcctggaatggcatccttttactttgacctctgctccagaggaagatttcttctccattcatatccgagcagcaggggactggacagaaaatctcataagggctttcgaacaacaatattcaccaattcccaggattgaagtggatggtccctttggcacagccagtgaggatgttttccagtatgaagtggctgtgctggttggagcaggaattggggtcaccccctttgcttctatcttgaaatccatctggtacaaattccagtgtgcagaccacaacctcaaaacaaaaaaggttggtcatgcagcattaaactttgacaaggccactgacatcgtgacaggtctgaaacagaaaacctcctttgggagaccaatgtgggacaatgagttttctacaatagctacctcccaccccaagtctgtagtgggagttttcttatgtggccctcggactttggcaaagagcctgcgcaaatgctgtcaccgatattccagtctggatcctagaaaggttcaattctacttcaacaaagaaaatttttgagttataggaataaggacggtaatctgcattttgtctctttgtatcttcagtaatttacttggtctcgtcaggtttgagcagtcactttaggataagaatgtgcctctcaagccttg

SEQ ID NO: 176941 - DNA, 785 bp, Artificial Sequence
  derived and/or modified sequence
gctgatagcacagttctgtccagagaaggaaggcagaataaacttattcattcccaggaactcttggggtaggtgtgtgtttttcacatcttaaaggctcacagaccctgcgctggacaaatgttccattcctgaaggacctctccagaatccggattgctgaatcttccctgttgcctagaagggctccaaaccacctcttgacaatgggaaactgggtggttaaccactggttttcagttttgtttctggttgtttggttagggctgaatgttttcctgtttgtggatgccttcctgaaatatgagaaggccgacaaatactactacacaagaaaaatccttgggtcaacattggcctgtgcccgagcgtctgctctctgcttgaattttaacagcacgctgatcctgcttcctgtgtgtcgcaatctgctgtccttcctgaggggcacctgctcattttgcagccgcacactgagaaagcaattggatcacaacctcaccttccacaagctggtggcctatatgatctgcctacatacagctattcacatcattgcacacctgtttaactttgactgctatagcagaagccgacaggccacagatggctcccttgcctccattctctccagcctatctcatgatgagaaaaaggggggttcttggctaaatcccatccatccccatataacaccaacagtgtacatgtttactgtcacttttgatatggtcttatccagtgtgaacagcaatttattcttatttttgctcatcaaaaaataa

SEQ ID NO: 176942 - DNA, 661 bp, Artificial Sequence
  derived and/or modified sequence
ggacctctccagaatccggattgctgaatcttccctgttgcctagaagggctccaaaccacctcttgacaatgggaaactgggtggttaaccactggttttcagttttgtttctggttgtttggttagggctgaatgttttcctgtttgtggatgccttcctgaaatatgagaaggccgacaaatactactacacaagaaaaatccttgggtcaacattggcctgtgcccgagcgtctgctctctgcttgaattttaacagcacgctgatcctgcttcctgtgtgtcgcaatctgctgtccttcctgaggggcacctgctcattttgcagccgcacactgagaaagcaattggatcacaacctcaccttccacaagctggtggcctatatgatctgcctacatacagctattcacatcattgcacacctgtttaactttgactgctatagcagaagccgacaggccacagatggctcccttgcctccattctctccagcctatctcatgatgagaaaaaggggggttcttggctaaatcccatccatccccatataacaccaacagtgtacatgtttactgtcacttttgatatggtcttatccagtgtgaacagcaatttattcttatttttgctcatcaaaaaataaaggattttcttc

SEQ ID NO: 176943 - DNA, 579 bp, Artificial Sequence
  derived and/or modified sequence
atgggcaactgggtggtgaaccactggttcagcgtgctgttcctggtggtatggcttggcctgaatgtgtttctgttcgtcgatgcctttctgaagtacgagaaagctgacaagtactattacacacgtaagatcctgggtagtaccctggcctgcgcccgggcatccgccctttgcctaaacttcaacagcactctcatattgctgcccgtgtgccggaacctcctgagtttcctgcgaggtacttgctccttttgtagccgcactcttaggaagcagcttgaccacaatctgacgttccacaaactggtggcatacatgatctgccttcacaccgccattcacattatcgctcacctgttcaattttgattgctattcgcgcagtcgccaggccacagacggaagcttggccagcattctgtcatccctctctcacgatgagaagaaaggcggctcatggctgaatccaattcatccccacattacccctaccgtttacatgtttacagtcacattcgatatggtcctgtcctccgttaattcaaatttgttcctctttcttctgatcaaaaagtag

SEQ ID NO: 176944 - DNA, 579 bp, Artificial Sequence
  derived and/or modified sequence
atgggcaactgggtggtgaaccactggttcagcgtgctgttcctggtggtgtggctagggctgaatgtgttcctgttcgttgatgccttcctgaagtacgagaaggctgataaatattattatacgcgaaaaatcttggggagcacactcgcctgtgccagagcgtcggcactgtgcctcaacttcaactctacactcatccttctgccagtgtgccgtaacctgctgagtttcctgagagggacttgttcattctgctcgcggacgctccggaagcagctcgatcacaatttgacgttccataagcttgtcgcatacatgatttgcttgcataccgctatccatataatcgctcatctattcaatttcgactgttactctcggagtcgacaagcaacggacggcagtctagcctccattctttcctccctgtcacatgatgaaaaaaagggaggtagctggctgaaccccattcaccctcacattacccctacagtttacatgttcacggttacattcgatatggtgctttcaagtgtaaattccaaccttttcctgtttcttctgatcaaaaaatag

SEQ ID NO: 176945 - DNA, 1548 bp, Artificial Sequence
  derived and/or modified sequence
atgggcaactgggtggtgaaccactggttcagcgtgctgttcctggtggtatggctgggactgaatgtcttccttttcgtcgatgctttcttgaaatatgagaaagccgataaatactattatacccggaagattctcgggtctacacttgcttgtgcccgggcatctgcattatgcctgaattttaactccacccttatcctgctgcccgtctgccgcaacttgttgagctttctccggggcacttgctccttttgcagcagaacattgaggaaacagttggatcacaatctcacattccacaaactggtggcctacatgatttgtctgcatactgcaatccacataatcgcacatctcttcaattttgactgttattcccgcagtaggcaggctaccgatggcagcttggcatctatcctgagcagtttaagtcatgacgagaagaaaggcggatcctggttgaaccccatccagtcaagaaacacgaccgtcgaatacgtgacattcacgagcatagcagggctgacaggtgtgatcatgaccatcgctttgatactcatggtgaccagcgccacagaattcattagacgctcatacttcgaggtgttctggtacacacatcacctgtttatcttctatatactgggtctcggtatacacgggattggtgggattgtacgtggccagaccgaagagagcatgaacgagtctcatcctcggaaatgcgcggagtcctttgagatgtgggacgatcgtgacagccattgccgccgccccaagtttgaaggacaccctccagaatcctggaaatggattcttgccccggtgatactctacatttgtgagaggatcctgaggttctacagatcccagcagaaagtagtgatcacgaaagtggttatgcatccgtctaaagtgcttgagctgcagatgaataagcggggttttagtatggaggtgggccagtatattttcgtaaactgtccatcgatttctctcctggaatggcacccattcaccttgacatcagcgcccgaagaagattttttctccattcacatccgcgccgcaggcgactggacagaaaacttaatccgtgctttcgagcaacagtattctcccatcccgcgcattgaggttgacggaccgtttgggaccgcaagcgaagacgtgtttcaatacgaagtcgccgtcctggtaggcgccggcattggagttactccttttgcaagcatactcaaaagcatctggtacaagtttcagtgtgccgaccacaatctgaagaccaagaaagtcgggcacgcagccttaaattttgataaggctaccgacatagtgactggcctgaagcagaagacttctttcggtcgaccaatgtgggataacgagttttctaccatcgccactagccaccccaagagcgtggtcggcgtattcctgtgcggcccaaggacactggcaaaaagcttgcgcaaatgctgccaccgctacagcagcctggacccacgaaaggtacaattctatttcaacaaggaaaacttttag

SEQ ID NO: 176946 - DNA, 579 bp, Artificial Sequence
  derived and/or modified sequence
atgggcaattgggtggtcaaccactggttctcagtgcttttcctggtggtctggctgggtctgaacgtgttcctgtttgtggacgctttccttaaatacgaaaaggccgacaagtactactacacaagaaagatcctagggagcaccctggcgtgtgctcgtgccagcgctctttgtctgaattttaatagcaccctgattcttctgcccgtctgtcggaacctgctgtcatttttacgcggaacgtgtagcttttgtagtagaaccctgcgcaagcagttagaccacaatctcactttccataagcttgttgcatacatgatatgcctgcacactgccatccacatcatcgctcacctgtttaactttgattgttattcgcgttccaggcaggcaactgacgggagcctggccagtattctgagttccctaagtcacgatgagaagaaaggcggatcatggctgaaccccattcatcctcacataaccccgaccgtctacatgttcacggttactttcgacatggtgctcagcagtgtgaattctaacctgttcctgttcctgctcattaaaaagtag

SEQ ID NO: 176947 - DNA, 579 bp, Artificial Sequence
  derived and/or modified sequence
atgggaaactgggtggttaaccactggttctcggtgcttttcctggtagtctggcttgggttaaacgttttcctctttgtggacgcattcctcaaatatgaaaaagccgacaaatactattatactcgaaagattcttggttccacactggcatgtgcccgagcatccgctctgtgcctcaacttcaactcaactctgatactgctgcctgtttgtcgcaatttactctcttttctgcggggaacatgctccttctgctcaaggactctccgcaagcagttggaccacaacctgacgttccacaagctggtcgcgtacatgatctgcctgcacaccgctattcatatcatagcccatctgttcaacttcgactgttactcgcgatctcgccaggcgactgacgggagccttgcaagcatcttaagctccctctcacacgatgaaaaaaaaggcggttcttggctgaacccgatccacccgcacataacccctaccgtttacatgttcaccgtaacattcgacatggttcttagctcagtgaatagtaatctgttcctgtttctcttgattaagaagtag

SEQ ID NO: 176948 - DNA, 1548 bp, Artificial Sequence
  derived and/or modified sequence
atggggaactgggtggtgaaccactggttctccgttctgttcctcgtcgtgtggctgggattaaacgtgttcctgtttgtcgacgcatttcttaagtatgaaaaagccgacaagtattattacacacgcaagatattgggctcgacgttggcctgtgcacgggcttcagccctgtgcctgaacttcaactccaccctgatcctgttgccagtgtgccgcaacctgctgagcttcctccgtggcacttgttcattttgcagtaggacactgcggaaacaactggaccacaacttaacatttcacaagctcgtcgcatatatgatctgtctccatacggctattcacatcatagcccatttgttcaactttgattgctacagccgaagcagacaggccacagacgggtccctggcgtccatcctgtccagcctgtctcacgacgagaagaagggtggttcgtggctgaacccaattcaaagcaggaatacaacagtcgaatatgtgacatttaccagcatcgctgggcttacaggagttattatgactatcgcccttattctcatggtgacttccgccacagagttcattagaagatcctattttgaggtcttctggtatacacatcatctgttcatcttttacattctggggctcggtattcatgggatcggcggtatcgtccgcggacagaccgaggagtctatgaatgaatcccaccctcggaaatgcgctgaatcatttgaaatgtgggatgatagagattcccattgtcgtaggcctaaattcgagggacacccacccgagagttggaaatggattctcgcaccagtgattctgtatatctgcgaacggatcctgcggttctatcgtagccaacagaaagttgtgattaccaaagttgtgatgcacccttccaaggtgctcgaactgcaaatgaacaagagaggattctcgatggaagtgggacaatatatttttgtgaactgtcccagtatatcactgcttgaatggcatccattcactttaacctctgcccctgaggaggacttcttcagcatccatattcgcgctgctggcgattggactgagaatctgatccgggctttcgaacagcagtatagccccattccaaggatcgaggttgatggcccttttggcacggctagtgaggacgttttccagtatgaagtggccgtgctcgtgggggctggcatcggcgtgactccctttgctagtatcctcaagtccatttggtacaagtttcaatgcgccgaccataatctcaagacgaagaaggtcggacacgccgctctgaacttcgacaaggctacagatattgttactggcctgaagcagaaaaccagtttcggcagaccaatgtgggataatgagttctccacgatcgcaacatcacacccgaagtctgtggtgggcgtgttcctgtgtgggccaagaaccctggctaagagcctgcggaagtgttgtcatcggtactcttccctcgaccccaggaaggtacagttttactttaacaaggagaatttttag

SEQ ID NO: 176949 - DNA, 443 bp, Artificial Sequence
  derived and/or modified sequence
actgctccccgcgggccagagccggccgagctgctgcccgccggggctctgaacggcgcggcggggccgggagccagggaccggccgaggagagtggcggccccggacggctgccggaggggcggccgcgcgtggatgcggcgggagctggaagcctcaagcagccggcgccgtctctgcccccgggcgccctatggcttgaagtgcaggcgacggtggcggcagtagcggagggtgaccgcccggctctcggcccggctctatgatggaccgagagcccctctagggtggtatgcggagacaagagacacctctaagcaccagacagagcgcttccctatccctgtctgaggcgggcagcccttgagtgcttcctcttgaagagcagagagcctggccacccagtggctccaccgccctgatggatccactgaatctgtcct

SEQ ID NO: 176950 - DNA, 579 bp, Artificial Sequence
  derived and/or modified sequence
atgggcaactgggtggtgaaccactggttcagcgtgctgttcctggtggtgtggctgggcctgaacgtgttcctgttcgtggacgccttcctgaagtacgagaaggccgacaagtactactacaccagaaagatcctgggcagcaccctggcctgcgccagagccagcgccctgtgcctgaacttcaacagcaccctgatcctgctgcccgtgtgcagaaacctgctgagcttcctgagaggcacctgcagcttctgcagcagaaccctgagaaagcagctggaccacaacctgaccttccacaagctggtggcctacatgatctgcctgcacaccgccatccacatcatcgcccacctgttcaacttcgactgctacagcagaagcagacaggccaccgacggcagcctggccagcatcctgagcagcctgagccacgacgagaagaagggcggcagctggctgaaccccatccacccccacatcacccccaccgtgtacatgttcaccgtgaccttcgacatggtgctgagcagcgtgaacagcaacctgttcctgttcctgctgatcaagaagtag

SEQ ID NO: 176951 - protein, 645 aa, Artificial Sequence
  derived and/or modified sequence
MSERKEGRGKGKGKKKERGSGKKPESAAGSQSPALPPRLKEMKSQESAAGSKLVLRCETSSEYSSLRFKWFKNGNELNRKNKPQNIKIQKKPGKSELRINKASLADSGEYMCKVISKLGNDSASANITIVESNEIITGMPASTEGAYVSSESPIRISVSTEGANTSSSTSTSTTGTSHLVKCAEKEKTFCVNGGECFMVKDLSNPSRYLCKCPNEFTGDRCQNYVMASFYKHLGIEFMEAEELYQKRVLTITGICIALLVVGIMCVVAYCKTKKQRKKLHDRLRQSLRSERNNMMNIANGPHHPNPPPENVQLVNQYVSKNVISSEHIVEREAETSFSTSHYTSTAHHSTTVTQTPSHSWSNGHTESILSESHSVIVMSSVENSRHSSPTGGPRGRLNGTGGPRECNSFLRHARETPDSYRDSPHSERYVSAMTTPARMSPVDFHTPSSPKSPPSEMSPPVSSMTVSMPSMAVSPFMEEERPLLLVTPPRLREKKFDHHPQQFSSFHHNPAHDSNSLPASPLRIVEDEEYETTQEYEPAQEPVKKLANSRRAKRTKPNGHIANRLEVDSNTSSQSSNSESETEDERVGEDTPFLGIQNPLAASLEATPAFRLADSRTNPAGRFSTQEEIQARLSSVIANQDPIAV

SEQ ID NO: 176952 - DNA, 3093 bp, Artificial Sequence
  derived and/or modified sequence
gaggccaggggagggtgcgaaggaggcgcctgcctccaacctgcgggcgggaggtgggtggctgcggggcaattgaaaaagagccggcgaggagttccccgaaacttgttggaactccgggctcgcgcggaggccaggagctgagcggcggcggctgccggacgatgggagcgtgagcaggacggtgataacctctccccgatcgggttgcgagggcgccgggcagaggccaggacgcgagccgccagcggtgggacccatcgacgacttcccggggcgacaggagcagccccgagagccagggcgagcgcccgttccaggtggccggaccgcccgccgcgtccgcgccgcgctccctgcaggcaacgggagacgcccccgcgcagcgcgagcgcctcagcgcggccgctcgctctccccctcgagggacaaacttttcccaaacccgatccgagcccttggaccaaactcgcctgcgccgagagccgtccgcgtagagcgctccgtctccggcgagatgtccgagcgcaaagaaggcagaggcaaagggaagggcaagaagaaggagcgaggctccggcaagaagccggagtccgcggcgggcagccagagcccagccttgcctccccgattgaaagagatgaaaagccaggaatcggctgcaggttccaaactagtccttcggtgtgaaaccagttctgaatactcctctctcagattcaagtggttcaagaatgggaatgaattgaatcgaaaaaacaaaccacaaaatatcaagatacaaaaaaagccagggaagtcagaacttcgcattaacaaagcatcactggctgattctggagagtatatgtgcaaagtgatcagcaaattaggaaatgacagtgcctctgccaatatcaccatcgtggaatcaaacgagatcatcactggtatgccagcctcaactgaaggagcatatgtgtcttcagagtctcccattagaatatcagtatccacagaaggagcaaatacttcttcatctacatctacatccaccactgggacaagccatcttgtaaaatgtgcggagaaggagaaaactttctgtgtgaatggaggggagtgcttcatggtgaaagacctttcaaacccctcgagatacttgtgcaagtgcccaaatgagtttactggtgatcgctgccaaaactacgtaatggccagcttctacaagcatcttgggattgaatttatggaggcggaggagctgtaccagaagagagtgctgaccataaccggcatctgcatcgccctccttgtggtcggcatcatgtgtgtggtggcctactgcaaaaccaagaaacagcggaaaaagctgcatgaccgtcttcggcagagccttcggtctgaacgaaacaatatgatgaacattgccaatgggcctcaccatcctaacccaccccccgagaatgtccagctggtgaatcaatacgtatctaaaaacgtcatctccagtgagcatattgttgagagagaagcagagacatccttttccaccagtcactatacttccacagcccatcactccactactgtcacccagactcctagccacagctggagcaacggacacactgaaagcatcctttccgaaagccactctgtaatcgtgatgtcatccgtagaaaacagtaggcacagcagcccaactgggggcccaagaggacgtcttaatggcacaggaggccctcgtgaatgtaacagcttcctcaggcatgccagagaaacccctgattcctaccgagactctcctcatagtgaaaggtatgtgtcagccatgaccaccccggctcgtatgtcacctgtagatttccacacgccaagctcccccaaatcgcccccttcggaaatgtctccacccgtgtccagcatgacggtgtccatgccttccatggcggtcagccccttcatggaagaagagagacctctacttctcgtgacaccaccaaggctgcgggagaagaagtttgaccatcaccctcagcagttcagctccttccaccacaaccccgcgcatgacagtaacagcctccctgctagccccttgaggatagtggaggatgaggagtatgaaacgacccaagagtacgagccagcccaagagcctgttaagaaactcgccaatagccggcgggccaaaagaaccaagcccaatggccacattgctaacagattggaagtggacagcaacacaagctcccagagcagtaactcagagagtgaaacagaagatgaaagagtaggtgaagatacgcctttcctgggcatacagaaccccctggcagccagtcttgaggcaacacctgccttccgcctggctgacagcaggactaacccagcaggccgcttctcgacacaggaagaaatccaggccaggctgtctagtgtaattgctaaccaagaccctattgctgtataaaacctaaataaacacatagattcacctgtaaaactttattttatataataaagtattccaccttaaattaaacaatttattttattttagcagttctgcaaatagaaaacaggaaaaaaacttttataaattaaatatatgtatgtaaaaatgtgttatgtgccatatgtagcaattttttacagtatttcaaaacgagaaagatatcaatggtgcctttatgttatgttatgtcgagagcaagttttgtacagttacagtgattgcttttccacagtatttctgcaaaacctctcatagattcagtttttgctggcttcttgtgcattgcattatgatgttgactggatgtatgatttgcaagacttgcaactgtccctctgtttgcttgtagtagcacccgatcagtatgtcttgtaatggcacatccatccagatatgcctctcttgtgtatgaagttttctttgctttcagaatatgaaatgagttgtgtctactctgccagccaaaggtttgcctcattgggctctgagataatagtagatccaacagcatgctactattaaatacagcaagaaactgcattaagtaatgttaaatattaggaagaaagtaatactgtgatttaaaaaaaact

SEQ ID NO: 176953 - DNA, 1938 bp, Artificial Sequence
  derived and/or modified sequence
atgagcgagagaaaggagggcagaggcaagggcaagggcaagaagaaggagagaggcagcggcaagaagcccgagagcgccgccggcagccagagccccgccctgccccccagactgaaggagatgaagagccaggagagcgccgccggcagcaagctggtgctgagatgcgagaccagcagcgagtacagcagcctgagattcaagtggttcaagaacggcaacgagctgaacagaaagaacaagccccagaacatcaagatccagaagaagcccggcaagagcgagctgagaatcaacaaggccagcctggccgacagcggcgagtacatgtgcaaggtgatcagcaagctgggcaacgacagcgccagcgccaacatcaccatcgtggagagcaacgagatcatcaccggcatgcccgccagcaccgagggcgcctacgtgagcagcgagagccccatcagaatcagcgtgagcaccgagggcgccaacaccagcagcagcaccagcaccagcaccaccggcaccagccacctggtgaagtgcgccgagaaggagaagaccttctgcgtgaacggcggcgagtgcttcatggtgaaggacctgagcaaccccagcagatacctgtgcaagtgccccaacgagttcaccggcgacagatgccagaactacgtgatggccagcttctacaagcacctgggcatcgagttcatggaggccgaggagctgtaccagaagagagtgctgaccatcaccggcatctgcatcgccctgctggtggtgggcatcatgtgcgtggtggcctactgcaagaccaagaagcagagaaagaagctgcacgacagactgagacagagcctgagaagcgagagaaacaacatgatgaacatcgccaacggcccccaccaccccaaccccccccccgagaacgtgcagctggtgaaccagtacgtgagcaagaacgtgatcagcagcgagcacatcgtggagagagaggccgagaccagcttcagcaccagccactacaccagcaccgcccaccacagcaccaccgtgacccagacccccagccacagctggagcaacggccacaccgagagcatcctgagcgagagccacagcgtgatcgtgatgagcagcgtggagaacagcagacacagcagccccaccggcggccccagaggcagactgaacggcaccggcggccccagagagtgcaacagcttcctgagacacgccagagagacccccgacagctacagagacagcccccacagcgagagatacgtgagcgccatgaccacccccgccagaatgagccccgtggacttccacacccccagcagccccaagagcccccccagcgagatgagcccccccgtgagcagcatgaccgtgagcatgcccagcatggccgtgagccccttcatggaggaggagagacccctgctgctggtgaccccccccagactgagagagaagaagttcgaccaccacccccagcagttcagcagcttccaccacaaccccgcccacgacagcaacagcctgcccgccagccccctgagaatcgtggaggacgaggagtacgagaccacccaggagtacgagcccgcccaggagcccgtgaagaagctggccaacagcagaagagccaagagaaccaagcccaacggccacatcgccaacagactggaggtggacagcaacaccagcagccagagcagcaacagcgagagcgagaccgaggacgagagagtgggcgaggacacccccttcctgggcatccagaaccccctggccgccagcctggaggccacccccgccttcagactggccgacagcagaaccaaccccgccggcagattcagcacccaggaggagatccaggccagactgagcagcgtgatcgccaaccaggaccccatcgccgtgtag

SEQ ID NO: 176954 - DNA, 1938 bp, Artificial Sequence
  derived and/or modified sequence
atgagcgagagaaaagaaggcagggggaagggaaaagggaagaaaaaagaaaggggctccgggaaaaagcccgaatctgcagccggcagccaatcccccgcactcccgccgcggcttaaggaaatgaagtcacaagaaagtgctgccggtagtaagttggttctacgctgtgagacatcctccgagtactcaagcctgagattcaaatggtttaagaatgggaatgagctgaaccgaaaaaacaaaccccagaacatcaagatacagaaaaagccaggcaagtcagagctgcggatcaacaaggcctccctcgctgactccggtgagtacatgtgcaaggtgatatcaaaactgggtaatgatagcgcctccgctaatataacaatcgttgagagcaacgaaatcatcaccggaatgcccgccagcaccgagggtgcttatgtcagcagtgaaagccccattcgaataagcgtgagcacagagggtgcgaacacatcaagttccacatctacaagcacaacaggcaccagtcatcttgtcaagtgtgcagagaaggaaaaaaccttttgcgtaaatggcggggaatgttttatggtgaaagatttgtctaatccctcacgatatctatgcaagtgccccaatgaatttaccggagataggtgccagaattacgtgatggcctctttctataagcacctggggattgagtttatggaggccgaagaactgtatcagaaaagggtcctgaccattaccggcatatgtattgccctgttggttgtagggattatgtgtgtggtcgcatactgcaaaactaagaagcaaaggaagaagttgcatgaccgacttagacagtctttgagatcagagagaaacaacatgatgaacattgctaacggccctcaccatcccaatcccccgcccgaaaatgttcagctggtcaatcagtacgtttctaagaacgtcatttcatccgagcatattgtcgagagggaggcagagacttccttctctacttcgcactatacgtccaccgcccaccattcgacgaccgtgactcagacaccgagtcacagttggagcaatgggcatactgagtccatcctcagcgagagtcacagtgttatcgtgatgtcgtcagttgaaaattcaaggcactcaagtcccaccggcggcccgagaggacgactgaacggaacgggcggccctagggaatgtaacagtttcttaagacacgctagagagacgccagattcttatagagactctccccactcagagcgttacgtctccgctatgactacacctgcacgcatgagtcctgtcgattttcacaccccaagcagccccaagtcccccccttcagaaatgagtccgccagtgtcttcaatgactgtgtctatgccaagtatggcggtgagcccttttatggaggaagaacgacccctgttgctggtgaccccccccagactacgggagaaaaaatttgaccaccaccctcaacagttctcttctttccaccacaatcccgcccacgactccaactctctgcccgcttcacccctgcgtattgtcgaagacgaggagtacgaaaccactcaggagtatgagcctgcccaggagcccgtgaagaaacttgctaattcacgccgggctaaaaggactaagcctaacggccacatagctaataggttagaggtagattccaataccagctcacagagcagtaactcggagtctgaaacagaggacgaacgcgtgggggaggatactccattcctggggattcagaatccattggccgcaagtctggaggccacacctgctttcaggcttgccgatagcagaaccaaccccgccggcagattcagtacccaggaagaaatccaggcaaggcttagcagcgtgatcgcgaaccaagatccaatagctgtgtag

SEQ ID NO: 176955 - DNA, 1938 bp, Artificial Sequence
  derived and/or modified sequence
atgtctgagaggaaggagggccggggcaagggcaagggcaagaagaaggagcggggcagcggcaagaagccagagagcgctgctggcagccagagccctgccctgcccccccggctgaaggagatgaagagccaggagagcgctgctggcagcaagctggtgctgcgctgtgagaccagcagcgagtacagcagcctgcgcttcaagtggttcaagaatggaaatgagctgaacaggaagaacaagccccagaacatcaagatccagaagaagccaggcaagtctgagctgcgcatcaacaaggccagcctggccgacagcggggagtacatgtgcaaggtgatcagcaagctgggcaatgacagcgccagcgccaacatcaccatcgtggagagcaatgagatcatcaccggcatgcctgccagcacagaaggagcctacgtgagcagcgagagccccatccgcatctctgtgtccacagagggcgccaacaccagcagcagcaccagcaccagcaccaccggcaccagccacctggtgaagtgtgccgagaaggagaagaccttctgtgtgaatggaggagagtgcttcatggtgaaggacctgagcaaccccagccgctacctgtgcaagtgccccaatgagttcaccggggaccgctgccagaactacgtgatggccagcttctacaagcacctgggcatcgagttcatggaggccgaggagctgtaccagaagagggtgctgaccatcaccggcatctgcatcgccctgctggtggtgggcatcatgtgtgtggtggcctactgcaagaccaagaagcagaggaagaagctgcatgaccggctgcggcagagcctgcggagtgaaagaaacaacatgatgaacatcgccaacggcccccaccaccccaaccccccaccagaaaatgtgcagctggtgaaccagtatgtgtccaagaatgtcatcagcagcgagcacatcgtggagcgggaggccgagaccagcttcagcaccagccactacaccagcacagcccaccacagcaccaccgtgacccagacccccagccacagctggagcaatggccacacagagagcatcctgtctgagagccacagcgtcatcgtgatgagctctgtggagaacagccgccacagcagccccaccggcggcccccggggccgcctgaatggcaccggcggcccccgggagtgcaacagcttcctgcggcatgcccgggagaccccagacagctacagagacagcccccacagcgagagatatgtgtctgccatgaccaccccagccaggatgagccctgtggacttccacacccccagcagccccaagagccccccatctgagatgagcccccctgtgtcctccatgacagtgtccatgcccagcatggctgtgagccccttcatggaggaggagcggcccctgctgctggtgaccccaccccggctgcgggagaagaagtttgaccaccacccccagcagttcagcagcttccaccacaacccagcccatgacagcaacagcctgcctgccagccccctgcgcatcgtggaggatgaggagtatgagaccacccaggagtatgagcccgcccaggagcctgtgaagaagctggccaacagccggcgggccaagaggaccaagcccaacggccacatcgccaaccggctggaggtggacagcaacaccagcagccagagcagcaacagcgagagcgagacagaagatgagcgggtgggggaggacacccccttcctgggcatccagaaccccctggccgccagcctggaggccaccccagccttccggctggccgacagcaggaccaacccagctggccgcttcagcacccaggaggagatccaggcccggctgagctctgtgattgccaaccaggaccccatcgctgtgtag

SEQ ID NO: 176956 - DNA, 1938 bp, Artificial Sequence
  derived and/or modified sequence
atgagcgagcggaaggagggccggggcaagggcaagggcaagaagaaagaaagggggagcgggaagaagccggagtccgctgctgggtctcagagcccagcgttgcctcccagactgaaagaaatgaagtcccaggagtccgctgctggttctaagttggtgctcagatgcgaaacatcttccgaatacagcagcttgcggtttaagtggtttaaaaatgggaacgaactgaaccgtaaaaacaaaccccaaaatatcaagatccaaaaaaagcccggtaagagcgaattacgcatcaacaaggcatctctagccgatagcggggagtatatgtgcaaggtaatctcaaaactgggaaacgattccgctagcgccaacattaccattgtcgagtccaacgaaattatcacaggcatgcccgcgtcaacagaaggggcttacgtgtcaagcgagagcccgataaggattagtgtgagtactgagggggctaatacatcctcatccacttcgacctcaactaccgggacctcccacctagtcaagtgtgccgaaaaagaaaagacattctgcgtaaacggcggagaatgtttcatggtgaaagacctgagcaaccctagtcgctacttatgcaaatgcccaaatgagtttaccggagatcgctgtcagaattatgttatggcctctttttataagcacttggggatcgaattcatggaagctgaagagctatatcaaaagcgagtactgacaatcactggcatctgcatcgcactgctggtcgtcggaatcatgtgcgtcgtggcttactgtaagaccaaaaaacagaggaagaaacttcatgacagactccgacagtcattgagaagcgagcgcaacaacatgatgaacatagcaaacggcccacaccacccgaaccctccacctgaaaatgtgcagctggtcaaccagtatgtgagcaaaaacgtcatatcatccgaacatattgtcgagcgcgaggctgagacctccttttcaacatctcactatacatccacggctcaccacagtactactgtgacccaaacccccagccactcttggagtaatgggcacaccgagtctatcctgagcgaatcccattctgtaatagtaatgtcctctgtggagaacagcagacatagctcacccacgggcggccctcgtggcagactcaacggaactggcggccctagagagtgcaacagctttctgcgccatgctcgcgaaactccagacagctacagggactccccacacagtgagaggtacgtctccgccatgaccacccccgctcgaatgtcccctgtagactttcatactcccagctccccgaagagtcctccaagcgagatgtccccaccagtatcatctatgactgtgagcatgccctcaatggccgtctcccccttcatggaagaggagaggccgttgctgctggtaaccccccctaggctcagggagaagaagttcgatcatcatcctcagcagttttcaagttttcatcacaaccccgcccacgactccaattccttgccggcctcccctctgcgaatcgtcgaagacgaagagtatgagaccacccaggagtatgagccagcacaggaacctgttaagaagttggccaattcccgacgggctaagcggaccaagcctaacggtcatattgcaaaccgcctagaggttgacagcaacacatccagccagtcttccaatagtgagagcgagacagaagacgaaagagttggcgaggatacgcccttcctcgggatacagaaccctcttgccgcctctctcgaggccacccctgccttcaggctcgccgactcacggactaatcctgctggtcgcttctctacacaggaggaaatccaggccaggttgtcttcggttattgccaaccaggaccccattgctgtttag

SEQ ID NO: 176957 - DNA, 1938 bp, Artificial Sequence
  derived and/or modified sequence
atgtcagagagaaaagaggggagaggaaaggggaaggggaagaaaaaggaacgcggttccggcaagaagcccgaatctgcagctggatcgcagtcacccgctttgccacctagactaaaagagatgaaaagccaggaaagtgcagccggatccaagttagtgcttcgatgcgagacttccagcgaatactcgagcctgcggttcaagtggtttaaaaacggaaatgagttgaatagaaagaataagccccaaaacatcaaaatccagaaaaagccgggaaaatccgagcttcgaattaacaaggcgtcgcttgctgactctggagagtacatgtgcaaggtcatcagtaagttagggaacgatagcgccagcgcgaacattactatcgtcgaatccaacgagatcattactgggatgccagcctccacagagggagcatacgtttccagtgaaagtccgatacgaattagcgtcagcaccgaaggtgctaatacatcttcctcaacaagcaccagtacaacgggcacatcacatctggtgaaatgcgccgagaaagaaaaaactttctgtgtgaacggaggggagtgctttatggtcaaggatctgagtaatcctagccggtatctgtgcaagtgtccgaacgagtttacgggagacaggtgtcagaactacgtcatggcctcgttttacaaacacctgggaatagaatttatggaagctgaagaactctatcagaagagggtgctgacgattaccggaatctgtattgccctcctggtggtggggattatgtgcgtagtcgcttactgtaagactaagaaacagcggaaaaaactgcacgaccggctgcggcagtcgcttcggtccgagcgcaataatatgatgaatattgccaacggcccacatcaccctaatccgcctcctgagaatgtgcagctggtgaaccagtacgtgtccaagaatgtgattagtagcgagcatattgtcgaacgtgaggcagagacttctttctcaacatctcattatactagcacagcacaccatagtacgactgtcactcagaccccttcccactcctggtccaacggccacacagagtcaattctgtccgaatcccacagtgtcattgtgatgtcctctgtggagaacagtcggcattcaagccccaccgggggacccagaggcagactcaatggcactgggggtcccagagagtgcaattcttttctgcgacacgccagggagacaccggattcttaccgagactccccacactcagaacgatacgtgtctgcgatgactaccccagctcggatgtctccggtcgacttccacaccccgtctagccctaaatcgcccccatcggagatgtccccccctgtgtcttcgatgacagtctcaatgccctccatggccgtttcgccttttatggaggaagaacggccactgctactagttactccgcctcggttacgcgaaaagaagttcgaccatcatcctcagcagttctcgtcatttcaccataaccccgctcacgactcaaactctcttccggcatcccccctccgaattgttgaggacgaggagtatgagaccacacaggagtacgaacctgctcaggaacccgtgaagaagttagccaactctaggagggcgaaacggactaagcccaatggacatatcgctaaccggctggaagtggatagcaatacaagcagccaatctagcaacagcgaatctgagaccgaagatgagagagttggggaagacacccccttccttggcatccaaaaccctttagccgctagcctcgaggctacacctgcctttaggctggcggattctcgaaccaaccctgctgggcgtttcagcacccaggaggaaatacaagcgaggctgtcttcagtaatcgctaaccaggaccctatcgcggtctag

SEQ ID NO: 176958 - DNA, 3083 bp, Artificial Sequence
  derived and/or modified sequence
gaggccaggggagggtgcgaaggaggcgcctgcctccaacctgcgggcgggaggtgggtggctgcggggcaattgaaaaagagccggcgaggagttccccgaaacttgttggaactccgggctcgcgcggaggccaggagctgagcggcggcggctgccggacgatgggagcgtgagcaggacggtgataacctctccccgatcgggttgcgagggcgccgggcagaggccaggacgcgagccgccagcggtgggacccatcgacgacttcccggggcgacaggagcagccccgagagccagggcgagcgcccgttccaggtggccggaccgcccgccgcgtccgcgccgcgctccctgcaggcaacgggagacgcccccgcgcagcgcgagcgcctcagcgcggccgctcgctctccccctcgagggacaaacttttcccaaacccgatccgagcccttggaccaaactcgcctgcgccgagagccgtccgcgtagagcgctccgtctccggcgagatgtccgagcgcaaagaaggcagaggcaaagggaagggcaagaagaaggagcgaggctccggcaagaagccggagtccgcggcgggcagccagagcccagccttgcctccccgattgaaagagatgaaaagccaggaatcggctgcaggttccaaactagtccttcggtgtgaaaccagttctgaatactcctctctcagattcaagtggttcaagaatgggaatgaattgaatcgaaaaaacaaaccacaaaatatcaagatacaaaaaaagccagggaagtcagaacttcgcattaacaaagcatcactggctgattctggagagtatatgtgcaaagtgatcagcaaattaggaaatgacagtgcctctgccaatatcaccatcgtggaatcaaacgagatcatcactggtatgccagcctcaactgaaggagcatatgtgtcttcagagtctcccattagaatatcagtatccacagaaggagcaaatacttcttcatctacatctacatccaccactgggacaagccatcttgtaaaatgtgcggagaaggagaaaactttctgtgtgaatggaggggagtgcttcatggtgaaagacctttcaaacccctcgagatacttgtgcaagtgcccaaatgagtttactggtgatcgctgccaaaactacgtaatggccagcttctacaagcatcttgggattgaatttatggaggcggaggagctgtaccagaagagagtgctgaccataaccggcatctgcatcgccctccttgtggtcggcatcatgtgtgtggtggcctactgcaaaaccaagaaacagcggaaaaagctgcatgaccgtcttcggcagagccttcggtctgaacgaaacaatatgatgaacattgccaatgggcctcaccatcctaacccaccccccgagaatgtccagctggtgaatcaatacgtatctaaaaacgtcatctccagtgagcatattgttgagagagaagcagagacatccttttccaccagtcactatacttccacagcccatcactccactactgtcacccagactcctagccacagctggagcaacggacacactgaaagcatcctttccgaaagccactctgtaatcgtgatgtcatccgtagaaaacagtaggcacagcagcccaactgggggcccaagaggacgtcttaatggcacaggaggccctcgtgaatgtaacagcttcctcaggcatgccagagaaacccctgattcctaccgagactctcctcatagtgaaaggtatgtgtcagccatgaccaccccggctcgtatgtcacctgtagatttccacacgccaagctcccccaaatcgcccccttcggaaatgtctccacccgtgtccagcatgacggtgtccatgccttccatggcggtcagccccttcatggaagaagagagacctctacttctcgtgacaccaccaaggctgcgggagaagaagtttgaccatcaccctcagcagttcagctccttccaccacaaccccgcgcatgacagtaacagcctccctgctagccccttgaggatagtggaggatgaggagtatgaaacgacccaagagtacgagccagcccaagagcctgttaagaaactcgccaatagccggcgggccaaaagaaccaagcccaatggccacattgctaacagattggaagtggacagcaacacaagctcccagagcagtaactcagagagtgaaacagaagatgaaagagtaggtgaagatacgcctttcctgggcatacagaaccccctggcagccagtcttgaggcaacacctgccttccgcctggctgacagcaggactaacccagcaggccgcttctcgacacaggaagaaatccaggccaggctgtctagtgtaattgctaaccaagaccctattgctgtataaaacctaaataaacacatagattcacctgtaaaactttattttatataataaagtattccaccttaaattaaacaatttattttattttagcagttctgcaaatagaaaacaggaaaaaaacttttataaattaaatatatgtatgtaaaaatgtgttatgtgccatatgtagcaattttttacagtatttcaaaacgagaaagatatcaatggtgcctttatgttatgttatgtcgagagcaagttttgtacagttacagtgattgcttttccacagtatttctgcaaaacctctcatagattcagtttttgctggcttcttgtgcattgcattatgatgttgactggatgtatgatttgcaagacttgcaactgtccctctgtttgcttgtagtagcacccgatcagtatgtcttgtaatggcacatccatccagatatgcctctcttgtgtatgaagttttctttgctttcagaatatgaaatgagttgtgtctactctgccagccaaaggtttgcctcattgggctctgagataatagtagatccaacagcatgctactattaaatacagcaagaaactgcattaagtaatgttaaatattaggaagaaagtaatactgtgattt

SEQ ID NO: 176959 - protein, 637 aa, Artificial Sequence
  derived and/or modified sequence
MSERKEGRGKGKGKKKERGSGKKPESAAGSQSPALPPRLKEMKSQESAAGSKLVLRCETSSEYSSLRFKWFKNGNELNRKNKPQNIKIQKKPGKSELRINKASLADSGEYMCKVISKLGNDSASANITIVESNEIITGMPASTEGAYVSSESPIRISVSTEGANTSSSTSTSTTGTSHLVKCAEKEKTFCVNGGECFMVKDLSNPSRYLCKCPNEFTGDRCQNYVMASFYKAEELYQKRVLTITGICIALLVVGIMCVVAYCKTKKQRKKLHDRLRQSLRSERNNMMNIANGPHHPNPPPENVQLVNQYVSKNVISSEHIVEREAETSFSTSHYTSTAHHSTTVTQTPSHSWSNGHTESILSESHSVIVMSSVENSRHSSPTGGPRGRLNGTGGPRECNSFLRHARETPDSYRDSPHSERYVSAMTTPARMSPVDFHTPSSPKSPPSEMSPPVSSMTVSMPSMAVSPFMEEERPLLLVTPPRLREKKFDHHPQQFSSFHHNPAHDSNSLPASPLRIVEDEEYETTQEYEPAQEPVKKLANSRRAKRTKPNGHIANRLEVDSNTSSQSSNSESETEDERVGEDTPFLGIQNPLAASLEATPAFRLADSRTNPAGRFSTQEEIQARLSSVIANQDPIAV

SEQ ID NO: 176960 - protein, 483 aa, Artificial Sequence
  derived and/or modified sequence
MQIPKHISIEDITATSTSTTGTSHLVKCAEKEKTFCVNGGECFMVKDLSNPSRYLCKCPNEFTGDRCQNYVMASFYKAEELYQKRVLTITGICIALLVVGIMCVVAYCKTKKQRKKLHDRLRQSLRSERNNMMNIANGPHHPNPPPENVQLVNQYVSKNVISSEHIVEREAETSFSTSHYTSTAHHSTTVTQTPSHSWSNGHTESILSESHSVIVMSSVENSRHSSPTGGPRGRLNGTGGPRECNSFLRHARETPDSYRDSPHSERYVSAMTTPARMSPVDFHTPSSPKSPPSEMSPPVSSMTVSMPSMAVSPFMEEERPLLLVTPPRLREKKFDHHPQQFSSFHHNPAHDSNSLPASPLRIVEDEEYETTQEYEPAQEPVKKLANSRRAKRTKPNGHIANRLEVDSNTSSQSSNSESETEDERVGEDTPFLGIQNPLAASLEATPAFRLADSRTNPAGRFSTQEEIQARLSSVIANQDPIAV

SEQ ID NO: 176961 - protein, 420 aa, Artificial Sequence
  derived and/or modified sequence
MSERKEGRGKGKGKKKERGSGKKPESAAGSQSPALPPRLKEMKSQESAAGSKLVLRCETSSEYSSLRFKWFKNGNELNRKNKPQNIKIQKKPGKSELRINKASLADSGEYMCKVISKLGNDSASANITIVESNEIITGMPASTEGAYVSSESPIRISVSTEGANTSSSTSTSTTGTSHLVKCAEKEKTFCVNGGECFMVKDLSNPSRYLCKCPNEFTGDRCQNYVMASFYKAEELYQKRVLTITGICIALLVVGIMCVVAYCKTKKQRKKLHDRLRQSLRSERNNMMNIANGPHHPNPPPENVQLVNQYVSKNVISSEHIVEREAETSFSTSHYTSTAHHSTTVTQTPSHSWSNGHTESILSESHSVIVMSSVENSRHSSPTGGPRGRLNGTGGPRECNSFLRHARETPDSYRDSPHSER

SEQ ID NO: 176962 - protein, 211 aa, Artificial Sequence
  derived and/or modified sequence
MSERKEGRGKGKGKKKERGSGKKPESAAGSQSPALPPRLKEMKSQESAAGSKLVLRCETSSEYSSLRFKWFKNGNELNRKNKPQNIKIQKKPGKSELRINKASLADSGEYMCKVISKLGNDSASANITIVESNEIITGMPASTEGAYVSSESPIRISVSTEGANTSSSTSTSTTGTSHLVKCAEKEKTFCVNGGECFMVKDLSNPSRYLCK

SEQ ID NO: 176963 - DNA, 3069 bp, Artificial Sequence
  derived and/or modified sequence
gaggccaggggagggtgcgaaggaggcgcctgcctccaacctgcgggcgggaggtgggtggctgcggggcaattgaaaaagagccggcgaggagttccccgaaacttgttggaactccgggctcgcgcggaggccaggagctgagcggcggcggctgccggacgatgggagcgtgagcaggacggtgataacctctccccgatcgggttgcgagggcgccgggcagaggccaggacgcgagccgccagcggtgggacccatcgacgacttcccggggcgacaggagcagccccgagagccagggcgagcgcccgttccaggtggccggaccgcccgccgcgtccgcgccgcgctccctgcaggcaacgggagacgcccccgcgcagcgcgagcgcctcagcgcggccgctcgctctccccctcgagggacaaacttttcccaaacccgatccgagcccttggaccaaactcgcctgcgccgagagccgtccgcgtagagcgctccgtctccggcgagatgtccgagcgcaaagaaggcagaggcaaagggaagggcaagaagaaggagcgaggctccggcaagaagccggagtccgcggcgggcagccagagcccagccttgcctccccgattgaaagagatgaaaagccaggaatcggctgcaggttccaaactagtccttcggtgtgaaaccagttctgaatactcctctctcagattcaagtggttcaagaatgggaatgaattgaatcgaaaaaacaaaccacaaaatatcaagatacaaaaaaagccagggaagtcagaacttcgcattaacaaagcatcactggctgattctggagagtatatgtgcaaagtgatcagcaaattaggaaatgacagtgcctctgccaatatcaccatcgtggaatcaaacgagatcatcactggtatgccagcctcaactgaaggagcatatgtgtcttcagagtctcccattagaatatcagtatccacagaaggagcaaatacttcttcatctacatctacatccaccactgggacaagccatcttgtaaaatgtgcggagaaggagaaaactttctgtgtgaatggaggggagtgcttcatggtgaaagacctttcaaacccctcgagatacttgtgcaagtgcccaaatgagtttactggtgatcgctgccaaaactacgtaatggccagcttctacaaggcggaggagctgtaccagaagagagtgctgaccataaccggcatctgcatcgccctccttgtggtcggcatcatgtgtgtggtggcctactgcaaaaccaagaaacagcggaaaaagctgcatgaccgtcttcggcagagccttcggtctgaacgaaacaatatgatgaacattgccaatgggcctcaccatcctaacccaccccccgagaatgtccagctggtgaatcaatacgtatctaaaaacgtcatctccagtgagcatattgttgagagagaagcagagacatccttttccaccagtcactatacttccacagcccatcactccactactgtcacccagactcctagccacagctggagcaacggacacactgaaagcatcctttccgaaagccactctgtaatcgtgatgtcatccgtagaaaacagtaggcacagcagcccaactgggggcccaagaggacgtcttaatggcacaggaggccctcgtgaatgtaacagcttcctcaggcatgccagagaaacccctgattcctaccgagactctcctcatagtgaaaggtatgtgtcagccatgaccaccccggctcgtatgtcacctgtagatttccacacgccaagctcccccaaatcgcccccttcggaaatgtctccacccgtgtccagcatgacggtgtccatgccttccatggcggtcagccccttcatggaagaagagagacctctacttctcgtgacaccaccaaggctgcgggagaagaagtttgaccatcaccctcagcagttcagctccttccaccacaaccccgcgcatgacagtaacagcctccctgctagccccttgaggatagtggaggatgaggagtatgaaacgacccaagagtacgagccagcccaagagcctgttaagaaactcgccaatagccggcgggccaaaagaaccaagcccaatggccacattgctaacagattggaagtggacagcaacacaagctcccagagcagtaactcagagagtgaaacagaagatgaaagagtaggtgaagatacgcctttcctgggcatacagaaccccctggcagccagtcttgaggcaacacctgccttccgcctggctgacagcaggactaacccagcaggccgcttctcgacacaggaagaaatccaggccaggctgtctagtgtaattgctaaccaagaccctattgctgtataaaacctaaataaacacatagattcacctgtaaaactttattttatataataaagtattccaccttaaattaaacaatttattttattttagcagttctgcaaatagaaaacaggaaaaaaacttttataaattaaatatatgtatgtaaaaatgtgttatgtgccatatgtagcaattttttacagtatttcaaaacgagaaagatatcaatggtgcctttatgttatgttatgtcgagagcaagttttgtacagttacagtgattgcttttccacagtatttctgcaaaacctctcatagattcagtttttgctggcttcttgtgcattgcattatgatgttgactggatgtatgatttgcaagacttgcaactgtccctctgtttgcttgtagtagcacccgatcagtatgtcttgtaatggcacatccatccagatatgcctctcttgtgtatgaagttttctttgctttcagaatatgaaatgagttgtgtctactctgccagccaaaggtttgcctcattgggctctgagataatagtagatccaacagcatgctactattaaatacagcaagaaactgcattaagtaatgttaaatattaggaagaaagtaatactgtgatttaaaaaaaact

SEQ ID NO: 176964 - DNA, 1911 bp, Artificial Sequence
  derived and/or modified sequence
atgtccgaacgcaaagaaggtagaggtaaagggaaaggcaaaaagaaggagcgcggatccggaaagaagcctgaatccgctgcgggaagccagtcaccagcactgcccccaagactcaaggagatgaagtcccaggaatcggcagccggaagcaagctcgtcctgcggtgcgagacttcaagcgaatactcgtccctgcgttttaagtggttcaaaaatggaaatgagctgaacagaaagaataagcctcagaacattaagatacaaaagaagcctggtaagtccgaacttcgaatcaacaaggcctctctcgcagactccggagagtacatgtgtaaagtgatctccaagctggggaacgattcagcaagcgcgaacattaccatcgtggaatcgaatgaaatcatcacggggatgcccgcctcgactgaaggcgcatacgtgagctccgaatcacccattagaatttccgtgtcgactgaaggtgcaaacacctcctcctccacgtccaccagcactaccggaacttcgcacctggtgaaatgcgcggagaaggaaaagaccttttgcgtgaacggcggggaatgttttatggtcaaggatctttcgaatcccagcaggtacctgtgcaagtgtcccaacgaattcactggggataggtgtcagaattacgtgatggcctcgttttacaaggcagaggaactgtaccaaaagagagtgcttaccatcaccggaatatgtatcgcacttttggtggtcggcataatgtgcgtggtggcgtactgtaagactaagaagcagcgaaagaagctccacgacagactccgccagtcccttaggtcagaacgcaacaacatgatgaacattgcaaacggtccacatcatccaaacccgccacctgaaaacgtccaacttgtgaaccagtacgtctccaaaaacgttatttcatcagaacatatcgtggagcgagaagctgaaacttccttttcaacctcgcattacacctcgaccgcacatcattccaccaccgtgactcagaccccctcgcattcgtggtcgaacggtcatactgaatccattctgtcggaatcccactcggtgattgtgatgtccagcgtggaaaactcacgccactcctcccctactggaggccctagaggacgcctgaacggtactggagggcctagggaatgtaattcctttcttagacatgctcgcgagactccagattcctaccgagattccccacattcagagcgttacgtgtcggcaatgaccacgccagcccgtatgtcgcccgtggattttcatactcctagctcacccaaatcacctccatctgaaatgagccctccagtgtcgtcgatgaccgtctccatgccatcaatggcggtgtcgccattcatggaggaagagcgaccacttcttttggtgacccctcccagacttcgtgaaaagaagttcgatcatcatcctcagcaattttcgagctttcatcataaccctgcccacgattcgaactcactccccgcgtcgcctcttagaatcgtggaggatgaagaatacgagactacgcaggaatacgagcccgcacaagagcctgtgaaaaagctggcaaattcccgtcgggcaaagcgtaccaagccaaacggccatattgccaacagactggaagttgattcgaacacttcttctcagagctccaattccgaatccgaaaccgaagatgaacgtgtgggtgaggacacgcccttccttggaattcaaaaccctttggcagcatcgctggaagcaactccagcattcagactggcagatagcaggaccaatccagctggtcgattctcgactcaagaagagattcaagcaaggcttagcagcgtgattgcaaatcaagatcctattgcggtg

SEQ ID NO: 176965 - DNA, 1911 bp, Artificial Sequence
  derived and/or modified sequence
atgtcggaacgtaaagaaggtagaggcaaaggtaagggtaaaaagaaagaacgtgggagtggtaagaaacccgaatctgctgcagggtcgcagtcccccgcactcccaccccggctgaaagagatgaagtcccaggaaagcgcggcaggatctaagctggtgctacgctgtgagacgtcctccgaatattcttctcttcggtttaaatggttcaaaaacggtaacgagctgaaccgtaagaacaagccacaaaacataaagatccaaaagaagccgggcaagtctgaactgcgcattaacaaggcctcgctggccgattctggagagtatatgtgtaaagtgatatctaagctgggcaacgactccgcttcagccaacatcacaatcgttgaaagcaacgagattattaccggaatgccagcttctaccgaaggcgcctacgtgtcctcagaaagccccatacgaatctcggtgagtaccgagggggctaatacttctagttctacctctactagtacaaccggaacgagccaccttgtcaagtgcgcagagaaagagaagaccttttgtgtgaacggtggtgaatgttttatggttaaagatctgtcgaatccaagtaggtatctgtgtaaatgcccaaatgaatttacaggagatcggtgtcagaactacgtcatggcctctttctataaggccgaggagctctatcagaagcgggtgctcaccatcactggaatttgcatcgctctcctggtggtcgggattatgtgcgtagtggcatactgtaaaaccaaaaagcagcgcaagaaactgcatgaccgactgcgccagagtctgcgctccgagagaaataacatgatgaatattgccaatggcccacatcatcctaatcctccaccggaaaacgtccagctggttaaccaatatgtcagcaagaacgtcatcagttcagagcatattgttgagcgcgaggcggagacgtcttttagcacatcccactacacaagcactgcacaccactccaccacagttacccaaacccctagtcactcatggtctaatggccacacagagagtattctgagtgagtcacactccgtgatcgtaatgagcagcgtggaaaattcacggcattcatctcccactggaggtcccaggggccgccttaatggcaccggcggtcctcgcgaatgcaattcatttctgcggcacgcccgcgaaacacccgacagttatcgggactcgccacatagtgaacggtatgtgtcggccatgacaacaccagctagaatgagtcctgtggattttcatacgcccagctctcctaagtccccacctagcgagatgagccctccagtttcatcaatgactgtgagtatgcccagcatggctgttagcccattcatggaagaagagcgaccactgctgctggtaactccaccgcgcctgcgcgaaaaaaaattcgaccatcaccctcaacagttctcctcgtttcatcataatcctgcccatgattccaattcgttacccgcaagccccttaagaatcgtggaggatgaggaatacgaaaccacccaggagtacgagccggctcaggaaccagttaagaagctagcaaatagtcgacgcgctaagagaaccaagcccaatggccatattgccaataggctggaggtagacagcaacacctcctctcagtcaagtaactctgagtccgagaccgaagatgagcgggttggggaggatacaccattcctgggtatacaaaacccgcttgcggcatcgctggaagcgacacctgcctttaggctagccgacagcagaaccaaccccgctggccgattctccactcaagaagagatccaggcgcgtctcagctcggtcattgcgaatcaggaccccattgccgtg

SEQ ID NO: 176966 - DNA, 1911 bp, Artificial Sequence
  derived and/or modified sequence
atgtcagagaggaaggaggggcgcggtaaaggaaagggtaagaagaaagagcgaggcagtgggaagaagccagagagtgccgctgggtcgcagtctcccgctctgcctccccgattgaaggaaatgaaatcgcaagagagcgctgcgggctccaagctggtcctccggtgcgagacctcaagtgaatattcctcactgcggttcaagtggttcaagaacggaaatgagcttaacaggaagaataagccccagaatatcaagatccagaaaaaacccggcaagagcgagctccgaatcaacaaggcctctctcgctgactcaggtgaatacatgtgcaaagtgatctctaagctcgggaacgacagtgcgtctgccaatataaccattgtggagtccaacgagatcatcactggcatgcctgcttctaccgagggggcctatgtgagcagtgagtctccaatacggatttcagtatcaaccgagggagccaacacttcctcatcaacgtcaacttccacaactggtacgagccacctcgtgaaatgtgccgagaaggaaaagaccttttgcgtcaatggtggcgaatgtttcatggttaaggacctgtccaacccctcacgctatctttgcaaatgccccaacgagttcacgggggataggtgccaaaactacgtgatggcttctttctacaaggccgaggagttgtatcagaagcgggtgttgaccatcacaggcatatgtatcgcactgcttgtcgtgggaattatgtgcgtcgtggcctactgcaagactaagaagcagcgcaaaaaactccacgaccgtctacgccagtctcttcggtctgaaaggaataatatgatgaacatcgcaaatgggcctcaccaccctaaccccccccctgagaatgtccagctggttaaccagtacgtgagcaagaacgtgatcagcagcgagcatattgtagagagggaggccgagacaagcttcagcaccagtcattacacatctactgcccaccacagtacaacagtgacacagacaccaagccactcttggtcaaatggacatacagaatcaatcctgagcgagtcacattcggtgatagttatgtcttccgtcgagaattctagacactccagtcccactgggggcccacgcgggcgattgaacggaactggcggtcctagagagtgtaatagcttcctgagacacgcacgtgagacccccgacagctaccgcgactccccgcattcagaaaggtatgtaagcgccatgacgactcccgcacgtatgagtccggtcgacttccatacgccaagttctcccaagtcacctccctccgaaatgagtccacctgtttcatcgatgacagtttctatgccttcgatggccgtgtcaccttttatggaagaggaacggccactgctcctcgtcacccctcctcgtctgcgcgaaaaaaaatttgaccaccacccccagcaatttagcagctttcatcacaaccccgctcacgattccaactccctgcccgccagcccgttgcgtatcgtagaggatgaggaatatgaaacgacacaggaatacgagcctgcgcaggagcccgtgaagaagttggctaattctcggagagccaaaagaaccaagccaaacgggcatatcgctaaccggctggaggtggattccaatacatcctcacagtcctctaacagcgaaagcgagacagaggatgaacgggtgggagaggatacacccttcttgggcatccagaacccattagcggcctccttagaggcaacccccgccttcagactggcagattcccggacaaacccagcagggcgcttctcaacgcaggaagaaatccaggcacgcttaagttcagtcattgccaaccaagacccgattgcagtg

SEQ ID NO: 176967 - DNA, 1911 bp, Artificial Sequence
  derived and/or modified sequence
atgagtgagcgcaaggagggcagaggcaaggggaaaggcaagaaaaaggaacgggggtccgggaaaaaacctgaaagcgctgcgggtagccagagccctgcattgcccccaagacttaaggagatgaaatctcaggagagtgcagccggtagcaaactcgtcttacgctgtgagacatctagtgaatattcaagcctgcgtttcaaatggtttaaaaacgggaacgagctgaaccgaaaaaataaaccccagaatatcaaaatacagaaaaagccaggcaagtctgagctgcggatcaataaagcttctctggcggactcaggagagtacatgtgtaaagttatatctaagctggggaacgactccgcctccgccaatattactatcgttgaaagtaatgaaattattactggcatgcccgcttctactgaaggtgcatatgtgtctagtgaatcacccatccgcatcagcgtcagtacagaaggcgccaacacaagcagtagcacgtcaacttcgaccaccgggaccagccatttagttaagtgcgcggagaaggaaaagacgttctgtgttaacggcggggaatgttttatggtgaaggacctctcaaatcccagcaggtatctgtgcaagtgtcccaatgaatttactggggatagatgccaaaactacgtcatggccagcttctataaggcagaagagctgtatcagaaacgagtgctgaccattacaggtatatgcattgccctgctggtcgtgggaatcatgtgcgttgtcgcatactgcaaaaccaagaagcaaaggaaaaagttacacgatagacttagacaatctttaaggagcgaaaggaacaacatgatgaatatagccaatggtccccatcatcccaatcccccacccgaaaacgtccaattggttaaccagtacgtatctaagaatgtgatctcttccgaacacattgtagagagggaagccgagacctcatttagtacctcccactatacgagtaccgctcaccatagtacaacggtgacacagacaccatcacattcttggtcgaacggtcacaccgagtctattctgtccgaatctcactccgtcattgtgatgtcatcagtcgagaattctagacacagcagcccaactggaggtccccgggggagactcaatggaacagggggtcctcgggagtgtaattcttttctccggcacgctcgtgaaactcccgactcctatagggattcgccacattcggaacgttatgtatctgcaatgacaactcccgccaggatgagtcccgtggattttcacacgccatccagcccgaagagcccaccctccgaaatgagcccccccgtgagctcaatgacggtctctatgccaagtatggcagtgtcccccttcatggaggaggagcggcccttgttgttggtcaccccccctcggctgagagaaaagaaattcgatcaccacccccaacaattctccagtttccatcataatcctgctcacgactccaacagtttacctgcctcgcccctccgcattgtcgaagacgaggagtacgaaacaacccaagagtatgaacctgcccaagagcctgttaagaaactggccaatagtcggcgggccaaaagaacgaaacctaacggccatattgcaaatcgtctggaggtcgattcaaacacatcctcccagtccagtaactctgagtcagaaaccgaggatgagagagttggagaggatacacccttccttggaatccagaatccactggctgccagcctggaagcaactccggcattccggttagcagattcaagaacaaaccccgctggacgatttagcactcaggaggaaatccaggccagactgtccagtgtgatagccaaccaagatccgatcgctgtg

SEQ ID NO: 176968 - DNA, 1911 bp, Artificial Sequence
  derived and/or modified sequence
atgtcagagagaaaagaaggtcgcggcaaaggcaagggtaagaaaaaagaaaggggctctggcaagaaaccagaatctgctgcagggagccaatcaccagctcttccaccacgcctgaaggaaatgaagagccaggagtcggcggctgggtcaaagttggtgcttcggtgtgagacaagttcagaatactcatctctgaggtttaagtggtttaagaatggcaatgagctcaaccggaagaataaacctcaaaatattaaaatccaaaaaaagccgggtaaatcggaactgaggatcaataaggcctctctcgcggattcgggcgaatacatgtgcaaggtgatttcaaaacttggaaacgactccgccagcgcaaacattacaatcgtcgagagcaatgagatcataactggtatgccagccagcactgagggggcctacgtttcctccgaatcacctattcgaatttccgtgtcaactgagggggcaaatacttccagctcaactagtacatcaactactgggacatcacacctcgtgaagtgtgccgagaaggaaaagacgttctgcgtcaacgggggggagtgcttcatggtcaaggacctgtccaatcctagcagatatctctgcaaatgtcccaatgaatttaccggagatcgttgccagaactatgtcatggcctccttctacaaagcggaggaactttaccagaagcgcgtcctgaccattactggtatttgtattgcactccttgtagtgggcatcatgtgtgtcgtggcctactgtaagaccaagaaacagaggaaaaaattacacgataggctgaggcagtccctgagaagtgaaaggaacaatatgatgaatattgccaacggtcctcatcatcccaacccaccacccgagaacgtacagcttgtgaatcagtacgtgagtaagaatgtgatctcttcagagcacatagtcgagcgcgaggccgaaaccagtttctccactagccactacacctctactgctcaccacagtactaccgtgacacaaacaccttcccatagttggtctaacggccataccgaatctatcctgtccgaaagtcacagcgtgattgtgatgagcagcgtagagaacagccggcattccagccctaccggagggcctagaggtcggctgaacggcacgggcggtccacgggaatgcaacagtttcctccggcacgctagagaaacccctgactcctatagggacagccctcatagtgaaagatatgtgtctgctatgacgacaccagcaaggatgtctcctgtggattttcacaccccaagttcaccaaaaagcccgccatccgaaatgtcacccccggtgagttccatgaccgtctcaatgccatctatggcagtatcaccttttatggaggaagagcggcctctgctgttagttacgccaccacgcctgcgcgagaaaaaatttgaccaccaccctcaacagttctcctccttccatcacaatcctgctcatgactcgaactccctgccagcctctcccctgcggatcgtggaggacgaagagtatgagactacccaagagtacgagcctgcccaggaacctgtcaaaaaacttgccaatagtaggagagctaaacgcacaaaacccaatggacacatcgcgaaccgactcgaggtggacagtaacacatcttctcagagcagcaattctgagtctgaaacggaagatgagagagtgggcgaagatacaccctttttggggattcagaatcctttggccgcaagtctcgaggccacgcccgcattccggttagccgactctagaaccaatcctgctggaagattcagcacccaggaggaaattcaggctcggttgtcatccgtgatcgcaaatcaggatccaatagccgta

SEQ ID NO: 176969 - DNA, 1911 bp, Artificial Sequence
  derived and/or modified sequence
atgtccgaacggaaagaaggccgaggcaaagggaaaggaaaaaagaaggagcgtggttcaggtaagaagcctgaatcagcagcgggctcccagagccccgcactgcctccacggctgaaggagatgaaaagtcaggagtccgcagccggctccaagctagtcctgcggtgcgaaacatcctctgaatacagctccttgcgattcaaatggtttaagaacgggaacgagctgaacagaaaaaacaaacctcagaatattaaaattcagaagaaacctgggaaatccgagctgcggattaataaagcttcactagccgatagcggcgaatacatgtgtaaggtgatctctaaactgggaaacgactcagcatcggcaaatatcaccatcgtggagagcaacgagatcatcactggaatgcccgcgagtaccgagggggcatacgtcagttctgaaagcccgatccgcatttcagtgtcaaccgaaggggctaacaccagttcctcaacctccacctctacaaccggcacttctcacctggtcaagtgcgcagaaaaagagaagactttttgcgtaaatggcggagagtgtttcatggtcaaagacttaagtaatccctctagatatctttgtaaatgtccaaatgaatttacaggcgataggtgccagaactacgttatggcctccttctataaggcggaagaactgtatcagaaaagggttctcactatcacgggcatctgtatcgctctgttggtggtgggcatcatgtgcgtcgtcgcctactgtaagacaaaaaagcagagaaaaaaacttcatgataggctaaggcaatcgctgcgttctgagcgaaacaacatgatgaacatcgccaacgggcctcatcatcccaatccaccgcccgagaacgtgcaactggtcaaccaatacgtctctaagaacgtaatctcttccgaacacattgttgagcgtgaggcggaaacttcatttagcaccagccactatacaagcactgcccaccatagtacgacggtcacacagacacccagtcattcttggagtaatggacacaccgaatccatcctgtccgaatcccatagtgtgatagtgatgtctagtgtggagaatagtagacactcgtctcctacgggtggtccccgcggccgcttgaatgggaccggtggacctcgggaatgcaacagctttcttagacacgcgcgggaaacccccgacagctatcgcgactctccccatagtgaacggtacgttagcgccatgacaacccctgcccggatgtccccagtggattttcataccccttccagcccgaagagcccaccctcagagatgagtccacccgtatcttcaatgacagtgtctatgccatccatggccgtatctcccttcatggaagaagagagacccctcctgctcgtgacaccaccccgactccgagagaagaagtttgatcaccatcctcaacagttttcaagttttcaccacaatccggcacacgactctaatagcctgccagccagtcccctacgcattgtggaggatgaagagtatgaaacaacacaggagtacgaacccgcacaggaacccgtgaagaaacttgccaactcccgtagggctaagcggacaaaaccgaacggacatatcgccaataggcttgaggtcgatagtaacacttctagccagtcatccaattcagagagcgaaaccgaagatgagagggtcggagaggacaccccctttcttggcatccagaaccctctcgccgcctctctggaagccacacccgctttcaggctggcagactcaagaactaatccagcagggaggttcagtacacaggaggagatccaggctaggctgtcatccgtcatcgctaaccaggatccgatcgccgtc

SEQ ID NO: 176970 - DNA, 1911 bp, Artificial Sequence
  derived and/or modified sequence
atgagcgagcgcaaggaaggaagaggcaaaggcaaaggaaagaaaaaggaaagggggagcggaaagaaaccagagagcgccgccggatctcaatcaccagctctaccgcctagactgaaggagatgaagtctcaggaatccgcagccggcagcaagcttgttttgcggtgcgaaacatcaagcgagtattcgagtctccgtttcaaatggttcaaaaatgggaatgaactgaataggaagaacaagccacaaaacataaagatccaaaaaaagccgggaaaaagcgagctgcgcatcaacaaagctagtttagctgactccggcgaatacatgtgcaaggtgattagcaagctcggaaatgactctgcctcggccaacataacaattgtggagtctaatgagattattaccggcatgccagcaagtaccgaaggcgcttatgtgtcttccgagtcccctatccggatctccgtcagcacagaaggagcaaacactagtagcagtacttcaacttctacaactggcacctcccatctcgtaaagtgtgccgagaaagagaaaactttttgcgtaaacgggggtgagtgcttcatggtaaaggatctcagtaatccttcgcgttatttgtgcaaatgccctaatgagttcaccggggatcggtgccagaactacgttatggcatcgttctataaagccgaggagctctaccagaagagagtactcaccattacaggaatatgtattgcactgctcgtagtcggcatcatgtgtgttgtagcttactgtaaaacgaagaagcagagaaagaagctgcatgacaggctcaggcagtctctgaggagcgaacgaaacaatatgatgaatattgcaaacggacctcatcatccaaatccccctcccgagaatgtccagctcgtgaaccagtatgtgtcaaaaaatgtgatttccagtgaacatatcgtggagagagaggccgagacctcctttagcacctcccactacacctcaactgctcatcattcaaccacagtgacacagacacccagtcattcatggagtaatggacacactgagtctatactgagtgagtcccactctgtgatagtcatgagctctgtggaaaacagtcggcattcgtcaccaacaggaggcccccggggccgcctcaatgggaccggtggccctcgcgagtgcaattcatttcttcgtcacgctagggagactcccgacagctaccgggattcaccgcactcagagcgttacgtgagcgcgatgaccacccccgcccggatgtctcccgttgactttcatactccttcttcaccaaaaagccccccttctgagatgagccccccagtgagttccatgacagtcagcatgccaagcatggcagtaagtccctttatggaggaggagcggcccctccttttagttaccccccctcgcttgagggaaaagaagttcgaccaccatcctcagcagtttagctccttccaccacaacccagcccacgattccaactctctaccagcgtccccactgcgcatcgtggaagacgaggaatatgagaccacccaggaatacgagcccgcccaggagcccgttaaaaagctcgctaattctagacgagccaaacggacgaaacccaacgggcatatcgcaaaccgtctggaggtcgactccaacacttcctcccagagttcaaattccgaatccgagaccgaagatgagagagtcggggaggacaccccatttttaggaatccaaaaccctctggctgcgtctttggaggccacccctgcattccgtttagccgacagtcggacaaatccagccgggcgattctccacccaggaggagatccaggcccggttgagttcagtcatagccaaccaagacccgatcgccgtg

SEQ ID NO: 176971 - DNA, 1911 bp, Artificial Sequence
  derived and/or modified sequence
atgtcggaacgtaaggagggccgcggcaagggcaagggaaagaaaaaggaaagagggagcggaaagaaaccagagtccgcagcaggtagccaaagccccgccctaccgccccgtctgaaagagatgaagagtcaggagtctgcggccggatcgaagctagtcctgagatgtgagacgtctagtgagtatagctcgctccgctttaagtggttcaagaacgggaacgaactgaaccgcaagaacaagcctcagaatattaagatacaaaagaagcctggaaagagtgagctgcgcatcaataaggccagtttggctgattccggagaatacatgtgcaaggtgattagcaagctgggaaacgattcagccagcgccaatatcacgatcgttgaatcgaacgaaattattacgggaatgcccgcatccacggagggagcctacgtgagctcggagagcccgattcggatctccgtgagtactgagggtgctaacacgagctcctcaaccagcactagcacaacaggaacgtcgcacttagtgaagtgtgcggagaaggagaagacgttctgcgtgaacggaggagaatgttttatggtcaaggacctgagtaaccccagtcgctatctgtgcaaatgcccgaacgaattcaccggtgaccgctgtcagaattatgtcatggcatcgttctataaggccgaggagctgtatcagaagcgtgtgcttacaatcaccggcatctgcatagcgttgctggtcgtcggtatcatgtgcgtggttgcatattgcaagacaaagaaacaacgcaaaaagctacacgacagactacggcaatccttaagaagcgaacgaaacaatatgatgaatatcgcaaatggtccccatcatcccaatccccctccagagaatgtccagctggttaatcagtacgtgtcaaagaatgtcatctcgtccgagcacatcgtcgagcgggaggcagagaccagcttctccaccagtcactacacaagtacggcccaccactcgacgacggttacgcagacgccctctcacagttggagcaacggtcatacggaatcaatcctgtcagagtcccatagtgtgatagtcatgagcagtgtggaaaactcgaggcactccagtccgacaggcggaccacggggcagacttaacggcaccggtggaccacgcgaatgcaattctttcctgcgtcatgcgcgtgagacccccgactcgtaccgcgatagcccgcattcggagcgatatgtgagcgcgatgacaacgcccgcgcgcatgtccccggtcgactttcacacaccaagcagccctaaatcccctcctagcgagatgagcccgcccgtgagcagcatgacggtgtcgatgccatccatggccgtctcgcccttcatggaggaggaacgaccactgctgttagtaacgcccccacgtttgcgtgagaagaagtttgaccatcatccacagcagttcagctcattccaccacaatcccgcccacgattcgaacagcctgccggctagcccccttcgcattgtcgaagatgaagaatacgaaaccacgcaggagtacgaaccagcccaggaaccagtgaaaaaattggccaactcccggcgggccaagcggacgaaaccgaatggacacatcgccaaccggctggaggtcgatagtaatacatcttcccagtctagcaactctgaaagcgaaacggaagacgaaagagtgggagaggatacgccatttctgggcattcagaatccgttggcagccagcctagaggcaacgcccgccttccgcctggccgatagccgcacaaacccggcgggtcgcttctccactcaagaagagatacaggcgagactgtccagtgtgatcgccaatcaagatccaattgccgtc

SEQ ID NO: 176972 - DNA, 1911 bp, Artificial Sequence
  derived and/or modified sequence
atgtccgagagaaaagaaggacggggtaaaggaaagggaaaaaagaaagagcgcggatccggcaaaaagccagagtcggcggcgggatcacagtcaccggccctccctccacgcctgaaggagatgaagtcccaagagtctgccgccggctcgaagctggtcctccggtgcgagacttcatccgaatactcatccctgcggttcaaatggttcaaaaacggtaacgagctgaatagaaagaataagcctcaaaacatcaagatccagaagaagccgggaaagtcagagctgcgaatcaacaaggcgtcattggccgacagcggggagtacatgtgcaaagtgatctcaaagctgggaaacgactccgcatcggcaaacattaccatcgtcgaatcaaatgaaatcattactggcatgccggcctcgactgagggagcctacgtctcctccgagtcgccaatccgcatctcagtgagcaccgagggagctaatacttcctcgtccaccagcacgtcaaccactggaaccagccatctggtgaaatgtgctgagaaggaaaagaccttctgtgtgaacggaggagaatgcttcatggtgaaggatctgtcaaatccatccagatatttgtgtaagtgtccgaacgagttcactggagatagatgccagaattacgtgatggcatccttctacaaggctgaagagttgtaccagaaacgagtgttgacgatcaccggcatctgcatcgcactgctggtggtgggaatcatgtgcgtggtggcctactgtaagacgaagaagcagcggaaaaagttgcacgatagacttcgccagtcgcttaggagcgagaggaataacatgatgaatattgcgaacggccctcatcaccctaacccaccacccgaaaatgtgcagctggtgaaccaatacgtttcaaagaatgtgatctccagcgagcacatcgtggagcgggaagctgaaacttccttttcaacctcccattacacctccactgcccaccactcgactaccgtcacccaaaccccgagccattcctggtcgaacggtcataccgagtcaatcctgtctgaatcacacagcgtcatcgtgatgtcgtctgtcgagaattcgaggcactcctcaccgaccggcggaccgcgcggacgcctgaatggaactggtggaccacgcgaatgcaactcgttcctccggcacgcacgggagacgccggattcctacagagactcgccgcacagcgaacgctacgtctccgcaatgactacccccgcccggatgtcgccagtcgacttccacaccccgtcgtcgcctaagtccccgccgagcgaaatgagcccgccggtgtcgtcaatgactgtgtcaatgccgtccatggctgtgtcccccttcatggaagaggaacgccctctgctgctcgttactccaccgaggctcagagagaaaaagtttgaccaccaccctcaacagttctcatcattccatcataacccggctcacgattcaaattcgctcccggcgtcccctctgaggattgtggaggacgaagagtacgaaaccactcaggaatacgaaccagctcaggaacctgtgaaaaagttggcaaacagccgccgcgccaagagaaccaagccgaacgggcacattgcgaaccggctggaggtggactctaacacctcatcgcaatcatccaattccgaatccgaaaccgaggacgaaagggtgggagaagataccccgttccttggtattcaaaatccgctggccgcaagcctggaagcgacgccagcgttccggttggcggactcgcggactaacccggcgggacggtttagcactcaggaggaaattcaggcccggctttcgagcgtgatcgcaaaccaggatcccatcgctgtc

SEQ ID NO: 176973 - DNA, 1911 bp, Artificial Sequence
  derived and/or modified sequence
atgtcagaaagaaaagaaggtcgaggtaaaggaaaaggtaaaaaaaaagaaagaggttctggaaaaaaaccagaatcagcagctggatcacaatcaccagcacttccaccacgtcttaaagaaatgaaaagtcaagaatcagctgcaggttcaaaacttgttttaagatgtgaaacttcatcagaatattcatctttaagattcaagtggtttaaaaatggaaatgaattaaatagaaaaaataaacctcaaaatattaaaattcaaaaaaaacctggaaaaagtgagttaagaattaataaggctagtttagctgatagtggagaatatatgtgtaaagttatatcaaaattgggtaatgatagtgcttctgcaaatataacaattgttgaatcaaatgaaattattacaggaatgcctgcaagtactgaaggtgcttatgtttcttcagaatcaccaattagaatttctgtaagtacagaaggtgctaatacaagctcatcaacttctacatcaactactggaacaagtcatcttgttaaatgtgctgaaaaagaaaagactttttgtgtaaatggaggagaatgctttatggttaaggacttatctaatccttctaggtatttatgtaaatgtccaaatgaatttactggagatcgttgtcaaaattatgttatggcttcattttataaagccgaagagctttatcaaaaaagagttttaactataacagggatttgtattgctcttttagtggttggtattatgtgtgttgttgcatattgcaaaacaaaaaaacaaagaaagaaacttcatgaccgattgagacaatctttaagatcagaaagaaataacatgatgaatattgctaatggacctcaccatccaaatccaccaccagagaatgttcaattagtgaatcaatatgtttctaaaaatgtcatatctagtgaacatattgttgaaagagaagcagaaactagtttttctacatcacattatactagtacagcacatcattcaacaacagttacacaaactccatcacattcatggtcaaatggacatacagaatcaatcttgtctgaatcacatagtgttattgttatgtcatctgttgaaaattcaaggcattcatctcctacaggaggaccaagaggaagattaaatggaactggaggacctagagaatgtaattcattccttagacatgctagagaaactccagattcatatagagattcaccacacagtgaaagatatgtttcagcaatgacaacaccagcaagaatgagtccagtagattttcacacaccatcatcaccaaagtcaccaccatctgaaatgtcaccacctgtttctagtatgactgtttcaatgccaagtatggcagtttcaccttttatggaagaagaaagacctttacttttagttacaccaccaagattaagagaaaaaaaattcgatcatcatccacaacaattcagttcatttcaccataatccagcacatgattctaattctttacctgcttcaccattaagaattgtcgaagatgaagaatatgaaactacccaagaatatgaaccagctcaagaacctgttaaaaaacttgctaattcaagaagagcaaaaagaacgaaacctaacggacatatagcaaatcgattggaagttgactctaatacatcctcgcaatctagcaactcagaaagtgaaacagaagatgagagagtaggagaagacactccatttcttggaattcaaaatccacttgctgcaagtttagaagctacaccagcattcagattagctgatagtagaactaatccagcaggacgtttttcaacgcaagaagaaattcaagctagactttcttcagtaattgccaatcaagatccaattgcagtg

SEQ ID NO: 176974 - DNA, 1911 bp, Artificial Sequence
  derived and/or modified sequence
atgtctgagaggaaagaggggcgcggcaagggcaagggcaagaagaaggagcgcggatccggaaaaaaacccgaaagtgccgcaggctcccagagccccgccctgccgcctaggctgaaggaaatgaaaagccaggaatctgccgccggttccaagctggtgctccgatgcgagacatcctcagagtacagctccttgcggtttaagtggttcaagaatggtaacgagcttaatcgcaagaataaaccacaaaacatcaaaattcaaaagaagccaggcaagtcagagctgaggattaataaggctagcttggccgacagtggcgaatacatgtgcaaggtcatatcaaaactggggaacgattctgcgtccgccaatattactattgtggagtccaatgagatcataacaggaatgcccgcaagcacagagggtgcttatgtgtctagcgagtcccctatcaggatcagtgtgagtacagagggggcaaatacaagttctagcactagcacgtccacaaccggcactagtcatttggtgaagtgcgcagagaaggagaagacattttgcgttaacggaggagaatgcttcatggtgaaagatcttagtaatcccagccgatatctctgtaagtgtccaaacgagttcacgggagacagatgccagaactacgtgatggcgtccttttacaaggcggaagagctctaccaaaagagagtgctcactattacaggcatctgtattgcactccttgttgtaggcatcatgtgtgtggttgcgtactgtaagacgaaaaagcagagaaagaaactgcatgaccgactgaggcagagtttgagatctgaaaggaataacatgatgaacatcgctaacgggccccatcaccctaatcccccccccgaaaacgtgcagctggtgaaccaatacgtgagtaagaacgtgatttcctctgaacacatcgtcgaaagagaggctgagacatcatttagcacaagccactatacatcaaccgcacatcactccacgacagttacccagactccgtctcactcttggtctaacggacatacagagtccattctttccgaaagccactctgtcattgtgatgagctccgtcgaaaattcacggcattcaagtccaaccggcgggcctcgggggaggttgaacggcactgggggcccccgggagtgtaattcattcctgcggcacgccagagaaactcccgattcatacagggattctcctcactccgaacgctatgtcagcgccatgaccacccctgctcggatgtcccccgtcgacttccacacccccagcagccccaaatccccaccaagtgagatgtctccaccagtgagctctatgacagtgtcaatgccctctatggccgtgtctcctttcatggaggaggaacggcccctgctcctggtgacgccaccccgcttgcgagagaagaagttcgaccaccaccctcagcagttttcttcatttcatcacaaccccgcacatgactccaatagcttgcctgccagtcccctgagaatcgtcgaggacgaagaatatgagactacgcaggagtacgaaccggcccaggaacccgtgaagaagcttgctaattccagaagggctaaacgcaccaagccgaatggtcacatcgctaatcgcctcgaggtcgattctaatacatcatctcagagctctaattctgagtcagagaccgaggatgagagggttggcgaagatactccgttcctgggaatccaaaaccccctggcagcgagtctcgaagctacaccagcgtttcgcctcgctgactcccggaccaacccagctggtcgcttttccacccaagaagaaattcaagcaaggctgtcctccgttatcgccaatcaagatccgatcgcagtg

SEQ ID NO: 176975 - DNA, 1911 bp, Artificial Sequence
  derived and/or modified sequence
atgagcgaacgcaaagagggacggggaaagggaaaaggcaagaagaaggaaagggggtcgggaaagaagccggaatcggcggcggggagccaatcaccagcactcccaccgcggcttaaagagatgaaatcgcaggaaagcgctgctggatcgaaactggtgcttaggtgcgagacttcttcggaatattcgtccttgcgcttcaagtggttcaagaatggcaacgagctgaaccgcaagaataagccacaaaacatcaaaattcagaagaagcccggtaaatctgagttgagaatcaacaaagcctcgctggcggactccggcgaatacatgtgcaaggtgatctcgaagctggggaatgactcagcctcggccaacatcactatcgtggagtcgaacgagattatcactggaatgccagcatcgaccgagggggcgtatgtctcgtcggaatcccctatcagaatctccgtgagcacggagggtgctaacaccagctcatcgacttccacctcaaccaccggaacttcccatctggtcaagtgcgcagaaaaagaaaagaccttctgcgtcaatggaggagaatgcttcatggttaaggatctgagcaacccgagccgatacctgtgcaagtgtccaaacgaattcaccggagacagatgtcagaactacgtgatggcctcattctacaaggcagaggaactgtaccagaagcgggtgctcaccatcaccggcatctgcatcgcgctcctcgtcgttggtattatgtgtgtggtggcgtactgtaaaaccaagaaacaacggaagaagctgcacgacagacttcgccagtctctgaggtccgaacggaacaatatgatgaatattgctaacggtccacatcaccccaacccgccgccggagaatgtgcaactggtgaaccagtacgtcagcaagaacgttatctcatcagagcacatcgtggaaagagaggccgagactagcttctcgacgtcccactacacctcgactgcacaccattccactactgtcactcagactccaagccattcctggtcgaatggccacactgagtccatcctctcggaaagccactcggtgatcgtgatgtcgtcagtcgagaacagcaggcatagctcaccaacgggaggcccacgcggtcgcctgaatggaaccggagggccgagggagtgcaactcattcctccgtcatgcccgagaaacccctgattcgtaccgcgactctccgcactcggaaagatacgtgtcggcaatgacgaccccggcaagaatgtctccagttgacttccatactcccagctcccctaagtccccgccatctgaaatgtcccctcccgtctcttctatgacggtttctatgccgtctatggctgtgtccccgtttatggaagaagagcgccccttgctgttggtcactccgcctcgcttgcgggaaaagaaatttgaccaccacccgcagcagttctccagctttcatcacaaccccgcgcacgattccaattcgctccctgcctccccgctcagaatcgtcgaggacgaggagtacgaaaccactcaggaatacgagccggcccaagagccagtgaagaagctggccaattcacggcgggccaagaggaccaagccaaacggacatatcgcgaatcgattggaggtggattcaaacacctcgtcccaatcctcgaactccgaatcagaaactgaagatgaacgtgtgggagaggacactccgtttctggggattcagaaccctcttgccgcatcgctggaggccacccccgcgttccggctggccgattcccgcaccaatccggccggacggttctcgacccaggaagaaatccaagcgcgcctgagctcggtcatagcgaatcaagatcctattgcagtg

SEQ ID NO: 176976 - DNA, 1911 bp, Artificial Sequence
  derived and/or modified sequence
atgtccgaacgcaaagaagggcggggaaaagggaaagggaagaagaaagaaagggggtcaggaaaaaagcctgaatcagctgctggatctcagtcaccagccctacctcctcggctcaaagaaatgaagagtcaggaaagtgctgccgggagtaagctcgtgctccgatgtgaaacatcttcagagtattcttccttacggttcaagtggttcaagaatgggaacgagctgaatagaaaaaacaaacctcagaacataaagatccagaaaaaacctggaaaatccgagcttcggatcaataaagcttccctagccgatagtggagaatatatgtgcaaagtcatctcaaaactcgggaatgatagtgcgtccgccaacatcacaatagtggaatctaacgaaataataacaggaatgcccgcctcaacagagggggcctatgtctcctcggagtctcccatcagaataagtgtctctacagaaggagccaatacttcaagttcgacttctacatcaacaacaggaacatcccacctagtaaaatgtgccgaaaaagagaagacattttgtgtgaatgggggggaatgtttcatggtgaaggatttgtctaacccatcccggtatttatgcaagtgccccaacgagttcacaggagataggtgtcaaaattacgtgatggcttcgttctacaaagccgaggaactgtaccagaaacgggtgctgactatcacagggatctgcatagctctattggttgttgggataatgtgtgttgttgcatattgcaaaactaagaagcagaggaaaaaattacacgaccggctgagacagtccctccgctctgaacggaacaacatgatgaacatcgccaacgggccccaccacccaaatcctcccccagaaaatgttcagcttgttaatcagtacgtttcaaagaatgtgatttcttctgaacatatcgttgaaagagaggccgaaactagtttttctacttctcattacactagtactgcccatcattccacaacagtgactcagactccatctcattcttggtctaatggacacactgaatccatattatccgaatcccactcagtcatagtcatgagtagtgtggaaaatagtcgccattcctcacctactggaggaccccggggaagattaaacggaacagggggacccagagaatgcaattcgtttctacggcatgcccgggaaactcctgattcataccgggactcccctcactcagaacggtatgtctctgcaatgacaactccagccaggatgtctcctgtggattttcacacaccttcttcccctaagtcacctccatcggaaatgtctccgcctgtctcttcaatgactgtgtctatgccatctatggctgtgtctccatttatggaggaagaacgtcctctcttattagttactccccctcggctgcgcgagaaaaaattcgatcaccaccctcaacagttctccagtttccatcacaatcctgcgcatgattctaactctctacccgcttctcctctgaggatagtcgaagatgaagagtatgagacaacacaggaatacgaaccagctcaggaacccgtcaaaaaactggccaacagtcgaagagcaaaacgaacaaaacccaacgggcatatcgcaaaccgactcgaagtcgattctaacacatcatcccagtcttctaattctgaatcagaaactgaagatgaacgggtcggggaggatacaccatttttagggatccagaatcccttagccgctagtcttgaggcaactcctgcctttagactggccgattctaggactaaccctgccgggcggttctcaactcaggaagagatacaggcccgtctctcatcagtgatagccaatcaggatcccattgccgtt

SEQ ID NO: 176977 - DNA, 1911 bp, Artificial Sequence
  derived and/or modified sequence
atgtctgaacgcaaggaggggcggggaaagggcaaaggaaagaaaaaggagaggggtagcggaaagaaaccagaatccgccgctggtagccaatcgccggctcttccaccgcgcctgaaggagatgaagagccaggaatcagccgctggatcgaagctggtgctgcggtgcgaaacctcaagcgaatactcatccctccgcttcaagtggttcaagaatggaaacgagctgaacaggaagaacaaaccacagaatatcaagattcagaagaagccaggaaaatcggagctgaggatcaataaggcctcgctggccgactccggagagtacatgtgcaaggtcatcagcaagctcgggaacgactcggcttccgcaaatatcaccatcgtggaatcaaacgaaatcatcaccggaatgcctgccagcaccgaaggagcctacgtgagctcggaaagcccaatccgcattagcgtgtcgactgaaggggctaacactagctcgtccacctccaccagcacgaccgggacctcgcacctcgtcaagtgcgccgaaaaggaaaagactttctgcgtcaacggcggcgaatgtttcatggtcaaggacctctccaacccctcgcgatacttgtgcaaatgtccaaacgagttcaccggagatcggtgccaaaactacgtgatggccagcttctataaggcggaggaactgtaccagaagagagtgctgactatcaccggcatctgcatcgcgctgctggttgtcggaatcatgtgcgtcgtggcatactgcaagactaagaagcagcgcaaaaagctccatgatcggcttagacagtcgctgaggtcagaaagaaataacatgatgaatatcgcgaacggacctcatcacccgaacccaccacccgagaacgtgcagctggtgaaccagtatgtctcgaaaaatgtcatctcctcggagcatattgtggagcgggaggccgagacttcattttcgaccagccattacacttcaactgcccaccactcgactaccgtcacccagactccgtcccatagttggtcgaacggccacacggagtccatcctctccgaatcgcactccgttatcgtgatgtcgtcggtggagaatagccgacactcatcgcccaccggcggaccgaggggacgcctgaacggaaccggaggcccccgcgaatgcaactccttcttgaggcatgctagagaaacccctgatagctaccgggactcgccacattcagagcggtatgtgtcggcgatgaccactccggctcggatgtcaccggttgatttccataccccttcttcccccaagtccccgccgtcggaaatgtcaccccccgtgtcgagcatgaccgtgtcaatgccgtccatggccgtgtccccgttcatggaagaggaaagaccgctgttgctcgtgaccccgcctagactccgcgaaaagaagttcgaccatcatccacagcagtttagcagctttcaccacaacccggcccatgactccaattcgctgcctgccagccctctgcggatcgttgaagatgaagaatacgagacgacccaggagtacgaacctgcgcaagaaccagtcaagaaactggcgaattcacggcgcgcgaagcggactaagcctaatggacacatcgctaacaggctggaggtcgactcgaacacgagcagccagtcgtcgaacagtgagtcggagactgaagatgagcgtgtgggagaggacacccctttcttgggtattcaaaatcctcttgccgccagcctggaggccactccggccttccgtctggcggactcccggaccaacccagcggggagattctcaactcaggaagagatccaggcccgcctctcaagcgtgatcgccaatcaggaccctattgcggtc

SEQ ID NO: 176978 - DNA, 1911 bp, Artificial Sequence
  derived and/or modified sequence
atgtccgaaaggaaggaaggccgaggtaaggggaagggaaaaaagaaggagcgcggtagcgggaagaagcctgagtcggccgcagggagccaatcccccgccctgccgccacgcctgaaggaaatgaagtctcaggaatcagcagcaggatccaagctggtgcttcggtgcgaaacgtctagcgagtactcgtcactgcgctttaagtggttcaagaatggaaatgagctgaacaggaaaaacaaacctcaaaacatcaagatccaaaagaaacctggtaagtccgagcttcggataaacaaggcatcacttgccgactccggagaatacatgtgtaaggtgatatccaagctgggaaacgattcggcatcagccaatatcacgattgtcgagtcaaacgagatcattactggaatgccggcgtccaccgagggtgcatacgtctcctccgaatcacccattaggatttcggtgagcaccgaaggcgcgaatacttcgagcagcacctccacctccactaccggtacctcgcatcttgtgaagtgtgccgagaaggaaaagactttctgtgtgaatggaggcgaatgttttatggtcaaggatctctcaaacccttccagatacctgtgtaaatgtcctaatgaatttaccggtgatcggtgtcagaattacgtgatggcgtccttttacaaggcagaagaactttaccaaaaaagggttcttactatcaccggcatttgtattgcattgctcgtggtcggaatcatgtgcgtcgtggcgtattgtaaaacgaagaaacaacggaaaaaactccatgatagacttcggcaatcgcttcggtccgagcggaataacatgatgaacattgccaatggacctcatcatccgaatcctccacctgaaaatgtccaactcgtgaatcagtacgtctccaaaaacgtgatctcgtcggagcacattgtggagagggaagcagagactagcttttcaacctctcactacacttcaaccgcacatcattcgactaccgtgacgcaaactccttcgcattcatggtccaacggtcataccgaaagcatcctgagtgagtcacattccgtgatagtgatgagcagcgtggagaattcgagacactcctcgccaaccggaggaccccgcggtcgtctgaacggaactggtggtccaagagaatgtaactcctttcttagacacgcaagggaaacccccgatagctacagggattcgcctcactccgaaagatacgtgagcgcgatgaccactccagcaagaatgtcacctgtcgatttccatacgccctcctcaccaaagtcaccaccttcggagatgagcccccctgtgtcctcgatgaccgtctccatgccttcgatggcagtctcgcccttcatggaggaggaaagaccccttcttcttgtgactccacctagacttagagaaaagaagttcgatcatcatccacaacaattttcctctttccaccataaccccgcgcacgattcaaattcccttccagcctcgcccctgagaatcgtggaagatgaggaatatgagactacccaagagtacgagccagcccaagagcctgtgaaaaaactcgcaaactccaggagagccaagcgcactaagcctaacggacatattgcaaatcgtctggaagtggattcgaacacttccagccagtcgtcgaatagcgaatctgagactgaagatgagagggtgggcgaggacaccccgtttctgggaattcagaacccgctcgcagcctcgttggaagcaacgcctgcatttcgcctggccgatagccgaaccaaccctgccggtaggttctccacccaagaagagattcaagccagactttcctccgtgatcgcaaatcaagacccaattgcagtg

SEQ ID NO: 176979 - DNA, 1911 bp, Artificial Sequence
  derived and/or modified sequence
atgagcgaaagaaaagagggccgcggaaaggggaaaggtaagaaaaaggaaagaggcagcggaaaaaaacctgagtccgcagccggaagccagtcaccagccctgccacctaggcttaaggaaatgaagagtcaagaatccgccgctggaagcaaactcgtgctgagatgcgagacatcttcagagtacagctcgctgcgttttaagtggttcaaaaacggcaacgaacttaaccgaaaaaacaagccacagaatataaagattcagaagaagcctggcaagtcagaactgcgcatcaacaaagcttcactggcggactcaggagaatacatgtgcaaagttatcagtaaactgggcaacgacagtgcatcagccaacattactatcgtagagtcaaacgagatcatcacgggcatgccggcttctacggagggggcgtatgtgagcagcgagtctcctatccgaatctcagtgagtaccgaaggcgccaacacaagctccagcaccagcacttcgaccacaggtacaagccatctcgtgaaatgtgctgaaaaggagaagacattctgtgtcaacggaggcgagtgcttcatggtgaaagatctgagtaacccctcacgctacctctgcaagtgtcctaacgaattcacaggtgaccgctgccagaactacgtcatggcttctttctacaaggctgaagagctgtaccagaaacgcgtactgacaatcacaggaatctgtatcgccttactggtggtcggaatcatgtgcgtcgttgcttactgcaaaaccaagaaacagcgtaagaaactccatgatagactgaggcaatctcttaggagcgaacgcaataacatgatgaacatagctaatggcccccaccaccctaatcctccacccgaaaacgtccagctggtgaaccaatatgtctccaagaacgtcatctcaagtgagcacatcgtcgagagggaggcggaaacttccttctccaccagccactacaccagcaccgcacaccactctaccacagtcacacagacgccctcccattcttggtcaaatggacacacagagagcatattaagcgaatcacacagcgtcatcgtgatgagctcagtagagaacagtcgccattccagtcctacaggcggcccccgaggcaggctgaacggcaccggcggccctcgagagtgcaacagctttctgagacacgctcgcgagacaccagactcctatagggactctccacacagcgagagatatgtgtcggctatgaccacaccagcacgaatgtccccagtcgattttcacacacccagctctccaaagtcgcctccttctgagatgagccctcccgtaagcagcatgactgtgtccatgccaagcatggcagtctcaccatttatggaggaggaaaggccacttcttctggtaactcccccaaggctccgtgagaagaaatttgatcatcacccccagcagtttagtagctttcaccataacccagctcatgactcaaacagcttgccggcttctcctctgagaatcgtggaagacgaggaatatgagacaactcaggagtacgagcccgcccaagagcccgttaagaagctggctaatagcaggcgtgcaaaacgaactaagcccaacggccacattgccaacagactcgaggtcgattctaacacaagcagccagagctccaatagcgagtctgagacagaggacgagagagttggcgaagacaccccattcctgggtatccagaacccactcgcagctagtctggaggctactcccgcttttcggctggccgactccaggacaaatccagctgggcgtttcagtacgcaggaggaaattcaggctcgtctttctagtgtcatcgccaatcaagatccaatagccgtg

SEQ ID NO: 176980 - DNA, 1911 bp, Artificial Sequence
  derived and/or modified sequence
atgtccgaacggaaggagggcaggggaaaaggaaagggtaagaagaaggagcggggttccggaaagaaaccggaatcagccgctggttcgcagagcccagcgctgccaccacgcctgaaggaaatgaagtcacaagagtcggccgcaggaagcaagctggtcttgaggtgcgagacttcgtcagaatacagcagcctgcgctttaagtggttcaagaatggcaacgaactgaaccggaagaacaagccccagaacatcaagatccagaagaagcctggaaaatcagaactgcgcatcaacaaggcttccctggcggactccggggagtatatgtgcaaagtcatctccaagttgggaaacgactccgcctcggctaacatcaccatagtggagagcaatgaaatcatcactggaatgccggcgtcaaccgaaggagcctacgtctcctccgaatcacctatccgcattagtgtgagcacggagggagccaatacttcctcgagcacctctactagcaccactggcacctcacacctcgtgaagtgcgcggaaaaagagaaaactttctgcgtcaacggcggggaatgttttatggtgaaagaccttagcaatccgtcgcggtacctgtgcaaatgtcctaatgaattcaccggggaccgatgccagaactacgtcatggcttccttctacaaggctgaagagttgtaccaaaagagggtgctgaccatcaccggaatttgcatcgcgctgcttgtggtgggaatcatgtgcgtcgtggcctactgtaaaactaagaagcagagaaagaaactgcacgaccgcctgcgacagagcctgcggtccgagcgcaacaacatgatgaacattgccaacggaccgcaccatccaaaccctccgccggaaaatgttcagctggtgaaccagtacgtgtccaagaatgtcatctcatcagaacacatcgtggaacgggaggccgagactagcttctcgaccagccattatacctcgactgcacaccactcgaccacggtgactcaaactccctctcactcgtggtcaaacggccacactgagtccatcctttccgaatctcactcagtgatcgtgatgtcgtctgtggagaacagccgccactcctcaccgactggcggaccgcgcggccggctcaatggaaccgggggcccgcgggagtgcaattcgttcctcagacatgcacgggaaactccggactcgtaccgcgattcgccccattccgaaagatacgtgagcgcgatgaccactccagcccggatgtcgccggtcgacttccacaccccatcctcgcctaaatcaccaccgagcgagatgtccccgccggtgtcgtccatgacggtatccatgcctagcatggcggttagcccctttatggaagaagaacgcccactgctcctcgtcaccccgcccagactcagggagaagaaattcgatcaccatccacagcaattttcaagtttccatcataatcctgcacatgactcgaactccctcccagcctcgccgttgaggattgtggaggatgaagagtacgagacgacccaagaatacgagccagcccaggaaccagtcaagaagctcgcaaattcacgccgggccaaaagaaccaagccgaatgggcacattgcaaatagactggaggtggattcgaacacctcgtcgcagagctcaaacagcgaatccgaaacggaggacgagcgtgtgggagaagataccccgtttctgggaatccagaaccccctcgcggcatcgcttgaggcgactcctgccttccgcctggcagattccagaactaaccctgccggtcgcttcagcacccaagaagaaatccaggctagactctcgtccgtgatcgctaaccaagacccgatcgccgtc

SEQ ID NO: 176981 - DNA, 1911 bp, Artificial Sequence
  derived and/or modified sequence
atgtccgagcggaaagagggaaggggaaaggggaagggcaagaagaaggagcgggggtccggcaaaaaacccgaatcggccgcgggatcccagtcccccgcgttgccccctcggctgaaggagatgaagagccaggagagtgctgcgggaagcaagctggtactccgctgcgagacaagttctgaatactctagcttgcgcttcaaatggtttaagaacggaaatgaactgaaccgcaagaataagcctcaaaatattaagatccaaaagaagcctggcaaatctgaactacggataaacaaggcctctcttgctgattctggtgagtatatgtgcaaagtgatctccaaactggggaacgattccgccagtgccaacattaccatcgtggagagcaacgagatcattacaggcatgccggcgagcacagaaggggcttacgttagctcagagagtcctataagaatcagcgtgtccactgaaggcgcgaatacttcttcatcgacttccacgagtacgacggggacttcacaccttgtcaaatgtgcggaaaaggaaaagacattctgtgtaaacggcggagagtgctttatggtcaaagatctgtctaacccatctaggtatctgtgtaagtgccccaatgagtttactggtgataggtgtcagaattatgtgatggcgtcgttctacaaagccgaggagctctaccaaaagagggtgttgaccataactggaatttgcattgctctactggtggtgggcataatgtgtgtagttgcatattgtaagactaaaaagcagaggaaaaaactgcatgatcgcctgcgacaaagcttgcgatcagagcgcaacaatatgatgaacatcgccaacggtccacatcacccaaaccccccacctgaaaacgtccaactggttaatcagtacgtgtccaagaatgtcatctctagtgaacacatcgtggagagagaggctgagactagctttagcacgagtcactatacatctaccgctcatcattcaacgaccgtgactcagacgccatcccacagctggtccaacggccacacagagtctattctgagcgaatcacactcagtgattgtgatgtcctctgtggaaaactcccggcattcttcaccgaccggaggacccaggggacggctgaatgggaccggagggccgcgagagtgtaattctttcctgaggcatgctagggaaacaccagattcctatcgagattctccacactctgaaaggtacgtgtcagcgatgacaacccccgcacgaatgtcccccgtagattttcacactccttcttcaccgaaatccccaccatctgagatgtcaccacctgtgagttcgatgacagtgagcatgccaagtatggctgtgagtccatttatggaggaagaaaggcccctgctgttagtcacaccacctcgactcagggagaagaaatttgatcaccatccacagcagtttagctcatttcaccacaaccccgcacatgactcaaactctctgccagcttccccgttgagaatcgtcgaagatgaagagtacgagaccacccaggagtatgaacccgcccaggagcctgttaagaagctggccaacagtaggcgggctaaaaggactaaacccaacggccacatcgctaaccggttagaggtagattcaaacacatcttcccagtctagcaatagcgaatctgagacagaggacgaacgcgtgggcgaagatacacctttccttggcatccagaaccctctggctgcatccttggaagctacaccagctttcaggctcgccgatagtcgtacaaacccagcaggaaggttttccactcaggaagaaattcaggctcgactttcctcggttatcgccaatcaggacccaatcgcagtc

SEQ ID NO: 176982 - DNA, 1911 bp, Artificial Sequence
  derived and/or modified sequence
atgagcgaaagaaaggagggacgcggcaaaggcaaaggaaagaagaaggaacggggctcaggaaagaaaccagaatcagccgccggatcacaatctcctgcgctgccccccaggcttaaggagatgaagtcccaggagtccgctgccgggtcgaagctcgtgctgaggtgtgaaacttcgtccgagtacagctccctgagattcaagtggtttaagaatggaaacgaacttaaccgtaagaataagccccaaaacatcaaaatccagaagaagcccggaaaatcggaactgcggattaacaaagcctcactggctgacagcggagagtacatgtgcaaggtgatctcaaagctcggcaacgattcagcttcggccaatatcactatcgtcgaatcgaatgagatcatcactggtatgccggcttccaccgagggtgcgtacgtgagctccgagtcaccaatccgcatcagcgtgtcgacggaaggagcaaacacttcgtcctcaacctccacctcgaccaccggaaccagccatctggtgaaatgcgccgagaaggaaaagactttctgcgtgaacggaggagaatgcttcatggtcaaggatctgtcgaacccatcccgttacctgtgcaagtgcccaaacgaattcaccggagatcggtgtcagaactacgtgatggccagcttctacaaagcagaggaactgtaccagaaaagagtcctgaccatcaccggaatttgtatcgcgctgctcgtggtgggcatcatgtgcgtagtggcctactgcaagaccaaaaaacagagaaagaaactccacgatcgcctccggcagtcactccgcagcgaacgcaataacatgatgaacatcgcaaacggaccgcaccatccgaatccaccgccggagaacgtgcagctggtaaaccagtacgtgtcgaagaacgtcatctcctccgaacatatcgtggaacgcgaagccgaaacctctttcagcaccagccactacacctccaccgcccaccactcgaccaccgtgacgcaaaccccttcccattcgtggtccaatgggcacaccgagtccatcttgagcgagtcacactccgttatcgtcatgtcctcggtcgaaaactcgcgccattcctcgccgaccggaggcccgagaggccgccttaacggaaccggaggaccgcgggaatgcaattcgttcctgcggcacgccagggaaacccctgactcgtaccgcgactccccccactcggaaaggtacgtgagcgcaatgaccacgccagctcgaatgtcccccgtcgacttccataccccttcgtcaccgaaaagccctccaagcgagatgagcccgccagtctcaagcatgaccgtctccatgccgtccatggctgtctcgccttttatggaggaagagcggccacttctcctggtgactccgcctcggctcagggagaagaagtttgatcatcacccacagcaattttctagcttccaccataacccggcacacgactcgaattcgctccctgcatcgccgctgcgcatcgtggaggacgaggagtacgagactacgcaggagtacgagcctgcacaggaaccggtgaagaagctggcgaactcccgacgggcaaaaagaactaagccgaacggacatatcgctaataggctcgaggtggactcaaacacctcgtcccagtcatccaactccgaatccgaaactgaggacgaaagagtgggcgaggacacgccgttcctgggtatccagaatcctctggctgcctcgctggaggcgactccggcattccgcctggcggactcccggaccaacccagcgggacgcttttcaacccaggaggaaatccaggcccggctctcgtcagtgatcgcgaatcaagacccgatcgcggtg

SEQ ID NO: 176983 - DNA, 1911 bp, Artificial Sequence
  derived and/or modified sequence
atgagcgagagaaaggaggggcgaggaaaaggaaagggcaagaagaaagagaggggctcgggcaaaaaacctgagtccgcggccggatcacagagtccagctctcccgccacggctgaaagagatgaagtcacaggagagcgcggccggaagcaaactcgttcttaggtgtgaaacatcttccgagtattcctccttaaggtttaagtggttcaagaatggcaacgaactcaacaggaagaacaaaccacagaatatcaagatccagaagaaaccaggcaagtccgagcttcgaattaataaagcctcgctggcggactcaggggaatatatgtgcaaggtcatcagcaaacttgggaacgactccgcatccgccaacattacaatcgtggaaagcaacgagataatcacgggcatgccagcgagcacagagggcgcctatgtctcctccgagtcgcccatcaggatcagcgtttccaccgagggagccaacacctcttcatcaacctcaacaagcactacagggacaagccacctagttaagtgtgcagaaaaggagaaaaccttctgtgtcaacggcggagagtgtttcatggtcaaagatctgtctaatccgtccaggtatctatgtaaatgcccgaatgagttcactggggaccgatgccaaaactacgtcatggcaagcttctacaaggctgaagagttatatcagaagcgagtgctgaccatcaccggcatctgcatcgccctcctagtcgtcggaatcatgtgcgtcgtagcctactgcaagaccaaaaaacaaagaaagaagttgcacgataggctaagacagtcactacgcagcgagagaaataacatgatgaatatagccaatggccctcatcaccccaaccctccccctgaaaatgtccagttggtcaatcagtacgttagtaagaacgtgatcagctctgaacatatcgtggaacgcgaggcagaaacatcattctcaaccagccattacactagcacagcccaccactctactaccgtcacccagaccccatcccattcatggtcaaatgggcacacagaaagcatccttagtgagtcccactccgtaatcgtcatgtcaagtgtggaaaattccagacactcttcacccaccggcggaccacgggggaggctgaacggaaccggtggacctcgggagtgtaatagttttcttcggcacgccagagagacgccggactcatatcgagactccccgcactccgaacgctatgtaagcgccatgactactccggccaggatgagtcccgttgacttccacacacccagctctcccaagtctccgccctctgaaatgagccctccggtatcctcaatgaccgtgtccatgccttcaatggcagtgagtccattcatggaggaagaacggcccttgctgttggtcacccctccgcgtctgcgcgagaagaagttcgaccaccacccacaacagttctcatctttccaccataaccccgcccacgacagcaacagtcttccagctagcccgctgaggattgttgaagatgaggaatacgagaccacgcaggagtatgagcccgcccaggaacctgtcaaaaaattggctaatagccgcagagccaaaaggactaagccaaacggtcatattgccaatcgactggaagtcgactcgaacacatcttcgcaatcgtctaatagtgagagtgaaacagaagacgagcgcgttggcgaagacacacctttcctgggcattcagaaccctctggcagcgagcctggaagccacaccagcattccggctggccgactctcgcacgaatcccgctggcagattttccactcaggaagaaatacaagcccgcctatcttccgtgattgctaatcaggaccccatcgcggtt

SEQ ID NO: 176984 - DNA, 1911 bp, Artificial Sequence
  derived and/or modified sequence
atgtccgagcgtaaagaggggcgaggcaaaggcaagggtaagaagaaagagcgcggtagcgggaagaagcctgagagcgctgccggtagccagagcccggctctgccccctcgactgaaagagatgaagtcacaggagtccgcggctggtagcaaactggtgctacgttgcgagacgagcagcgagtactcaagcctgcgtttcaagtggtttaagaatggcaacgagctgaatcgcaagaacaagcctcagaacataaagatccagaagaaaccggggaagtccgagctgcgcatcaacaaagcgagcctggcagacagcggcgagtatatgtgtaaagttatctccaagctgggtaacgactccgcttctgccaatattaccattgttgaatccaatgaaataattacgggcatgccggcaagcacagagggcgcatacgttagcagcgaatcccctatccgtataagcgtcagcacggaaggtgcaaacaccagcagctccacgagcaccagcactacgggtaccagccatttagttaagtgcgctgagaaggaaaaaaccttctgtgttaatggtggtgaatgcttcatggttaaagacctaagcaacccttcccgctacctttgtaaatgccccaacgaatttactggagatcgttgccagaactacgtaatggcatccttctacaaagctgaggaactgtaccagaaacgtgtgctgaccattacgggtatctgtattgcgttgctggtggtaggcattatgtgcgtagtggcatactgtaaaactaagaaacaaagaaaaaagctgcatgaccgcctgcgccagagcctgcgctcggaacgcaataacatgatgaatatcgcaaatggacctcatcatccgaatcctccacctgagaatgtgcagctggtcaaccagtacgtttctaagaacgtgatcagcagcgagcatatcgttgaacgggaagcggaaactagcttctctacgagtcactataccagtaccgctcaccacagcacaactgtcacacagactccatcccactcctggagcaacgggcacacagaatctattctgtctgagagccacagcgtgatagtgatgagcagcgtggaaaactctcgccactctagcccgaccggcggtcctcggggaaggctgaacggtaccggcggcccgcgcgagtgtaactctttcctgcgccatgcgcgggagacccctgacagctacagggactctccacactccgagcgctacgtttccgcgatgaccaccccggcccgcatgtccccagttgacttccatactccgtcttctccgaagtcccctccttctgaaatgtcccctccagtgtcctccatgactgtgagcatgccaagcatggccgtctctccgttcatggaggaagaacgtccgttgctgttggtcactccaccccgtctgcgagagaagaagtttgatcatcacccacaacagttcagctcatttcatcacaacccagcgcatgattcgaatagcctgcccgcctctcctctgcggattgttgaggatgaagaatacgaaaccacccaggaatatgaaccggctcaagagccggttaaaaaactggcgaactcacgtcgcgcgaaacgcacgaagcctaacggtcacatcgctaaccgtctggaagttgacagcaataccagcagccaaagctcgaacagtgagagcgagaccgaggacgagagagtgggcgaggacaccccatttctgggtattcaaaacccattagcagcgagcctggaagcaactccggcatttcgcctggcagatagtcgcaccaaccctgctggaagattttccacccaagaggagatccaggcgagattgagctctgttatcgcaaatcaggatccaatcgccgtt

SEQ ID NO: 176985 - DNA, 1911 bp, Artificial Sequence
  derived and/or modified sequence
atgtcggaacggaaggagggtcggggcaaaggaaagggcaaaaagaaggagcgcggtagcggcaagaagcccgaatcggccgccggatctcagtctcccgccctcccccctcgtctgaaagagatgaagtctcaagagtccgctgcaggatctaaactcgtgctgcgatgcgagactagtagcgaatattcctcgctcagattcaagtggttcaaaaacggtaacgaactgaataggaaaaacaaacctcagaatatcaaaattcaaaaaaaaccaggaaagtctgaattaaggatcaacaaggccagcttggccgattcgggtgaatacatgtgtaaggtcatatccaaactcggtaatgatagtgcttctgccaacattaccatcgtagaaagcaatgagattattaccggcatgccagccagtacagaaggtgcttacgtgagttcagaaagtcctatacgcatctcggtctcaacagaaggcgcaaatacctcgtctagtacctctacctcaacaaccggcacaagccatctcgtcaagtgcgcagaaaaggagaagaccttttgtgtgaacggcggagagtgctttatggtgaaggacctgtcgaacccgagccgttatctgtgcaaatgcccaaatgagttcacaggagaccgatgtcagaattatgtcatggcatctttttacaaggcagaggaactgtaccagaagcgggtgctgacaatcacaggaatctgcattgctctgctggtggtgggaatcatgtgtgtggtggcctactgcaagacaaaaaagcagcgcaaaaagctgcacgatagactccgacagagtttgaggtccgaacgtaacaacatgatgaacatcgctaatggtcctcatcacccaaatcccccaccagagaatgttcagctggtgaaccaatacgtttccaagaatgtgataagcagcgagcacatagtggaacgcgaggcggagaccagcttctctaccagtcattacacatccacggcgcaccactccacaaccgtgacacaaacaccctcacacagctggtcaaatgggcatactgaatcaatcctgagcgagtcacactccgtcatcgtgatgagctcggttgagaattcccgccactccagcccaaccggtggcccaaggggacgtctgaacggtactggcggcccaagagaatgtaactccttcctgcgtcatgctcgagagacccctgattcttacagggattcgccccactctgaacgctatgtatcagctatgaccacaccagctcgcatgtcacccgtagacttccatacaccatcgtcaccaaaatccccgccgagcgagatgagccccccagtgtcttcaatgacagtctcaatgccatccatggcagtgtctccctttatggaagaggaaaggccacttctcctggttacaccaccaaggctgcgtgaaaagaagtttgatcaccacccacagcagtttagcagctttcaccacaatccggcccacgactccaacagcctgccagcctctcctctccgcatcgtcgaggatgaggagtacgagaccacccaggagtatgagcccgcgcaggagccggtgaaaaagttggcgaacagcagacgtgcaaaaaggacgaagccaaatgggcatattgctaatagactggaggtcgatagcaacaccagttcccagagtagtaattccgaatcagaaaccgaagatgaaagagtgggcgaagacactccattcctgggcattcagaaccctctggctgcatcactcgaagccacgcccgctttcaggctggctgactccagaactaaccccgccgggcggtttagtactcaggaagaaattcaggcgcgactatctagcgttattgctaatcaggacccaatcgcggtg

SEQ ID NO: 176986 - DNA, 1911 bp, Artificial Sequence
  derived and/or modified sequence
atgtccgagcgcaaagaagggcggggtaagggtaagggcaagaaaaaagagcgaggctcaggaaagaagcctgaatcagcagcgggatctcaatcgcccgcgctgcctccgcgccttaaagagatgaaaagccaggaatccgcagcgggaagcaaactggtgctccggtgcgagacttcatccgaatacagcagcctgcggttcaagtggtttaagaacgggaacgagctcaaccgcaagaacaaaccacagaacatcaagatccaaaagaagcccggcaagtcagaattgcggatcaacaaggcttccctggctgacagcggagagtatatgtgcaaggtcatttcgaagctcggaaatgactctgccagcgctaatatcaccatcgtggaatcgaatgagatcataaccgggatgcccgcgtccaccgagggcgcctacgtgagctccgaatccccgattcgcatttcggttagcaccgagggagcgaatacctcttcgtcaacttccacctcaactaccgggactagccacctcgtcaagtgtgccgagaaggaaaagacgttctgcgttaatggaggagaatgttttatggttaaggatctgtccaatccttcgcggtacctttgtaagtgccccaacgaattcactggagatcgctgccaaaactacgttatggcctcgttctacaaggctgaggagctgtaccagaagagggtgctgaccatcaccggtatctgcatcgccctcctggtggtggggatcatgtgcgtcgtggcctactgcaagaccaaaaagcaacggaagaagctccacgacagacttagacagagcctgagatccgagcgcaacaacatgatgaatatcgcaaacgggcctcatcaccccaatcccccaccggagaatgtgcaactggtgaaccagtacgtgtccaagaatgtcatctcatccgagcacattgttgaacgcgaagcggagacttctttttccacttcccactacacttcgactgcgcaccactccacgaccgtcacccagactccctcccactcatggtcgaacgggcatactgaatcgatcctcagcgagtcccattcggtcatcgtgatgtcatcggtggagaacagccgacactcctcaccgactggcggaccgcggggccggctgaatggaaccggtggcccgcgggaatgcaacagcttcctccgccacgcgcgagaaaccccagactcctaccgcgattcaccgcattccgaacgctacgtctcggcaatgaccactccggcccgcatgtcgccagtggatttccataccccgtcctctccgaagagcccgccatccgaaatgtcgccaccagtgtcgtcgatgactgtctccatgccatcaatggcggtgtccccgttcatggaggaggaacggccactccttttggtgactccaccacgccttcgggaaaagaagttcgaccatcacccgcagcagtttagctcgttccaccacaaccctgcacatgactctaactcgctgcctgcgtcccccttgagaatcgtggaggatgaggagtacgaaaccacccaagaatacgagccagcccaggaaccggtcaaaaaactcgcaaactcccgcagagcaaaacggaccaagccgaatggccacattgcaaatcgcttggaagtcgactccaacacctcctcgcaaagctcaaactcggagagcgaaactgaagatgagcgggtgggtgaagatactccattcctcggaatccaaaaccctctggcagcttctctggaggcaacgccggcttttagactggcagacagccgcacgaacccagccgggagattttcgacccaggaggaaatccaggctaggctgagctcagtgatcgctaaccaggaccctatcgcggtg

SEQ ID NO: 176987 - DNA, 1911 bp, Artificial Sequence
  derived and/or modified sequence
atgtcagaaaggaaggaaggccgcgggaagggcaaggggaaaaagaaggaaaggggatcaggtaagaaacctgagtcggccgcggggagccagtctcctgcactgccacctcggctgaaggaaatgaagtcccaggagtccgctgcaggatccaagctagtgctccgttgtgaaacaagctctgagtatagttcactgagattcaaatggtttaaaaacgggaatgaactgaataggaagaataagccccagaatatcaaaattcagaaaaagcccggtaaatctgagttaaggattaacaaggccagcctggccgacagtggagaatacatgtgtaaagtgatctcaaaactaggcaacgattctgcctccgccaatattacgattgtggaatcaaatgagataatcaccggtatgccggctagtactgaaggagcgtatgtttcctctgagtcccctataaggataagcgtgtccactgaaggagcaaacacaagcagctccacttcgacgagtaccaccggcacctcacatctcgttaagtgcgccgagaaggagaagaccttctgtgtgaatggcggagagtgctttatggtcaaagatctgagcaacccttcccgctacctctgcaaatgcccaaacgaattcacaggtgaccggtgccaaaactacgttatggcgagtttttacaaggctgaggagctgtatcagaagcgcgtgttgaccattactggaatatgcatcgcgctattggtagttgggataatgtgtgtcgtcgcatactgcaaaaccaaaaagcagcgcaagaaacttcatgatcgcttgagacagagcctgcggagcgaacgtaataacatgatgaacattgctaatggtccacaccatcccaaccccccccctgaaaatgtccagctagttaatcagtacgtttcaaagaacgtgatctccagtgagcacatagtggagagagaggcggaaacgagtttcagtacatcccactacacttcaaccgctcatcactcgaccacagtcacgcagacaccaagccatagctggtccaacggacacaccgaatccattctgagtgagagccattctgtaattgtgatgagctctgtagagaactcaaggcacagcagccctacggggggacccagaggaagactgaatggtaccggtggaccacgagagtgtaacagctttctccgccacgcacgagagacccctgactcctatagggatagtccccactctgaacgttatgtgtctgccatgacaacaccagcccggatgtcccctgtggattttcacactcctagcagtccaaagtctccccctagcgaaatgtcacctcccgtttcctcaatgaccgtgtctatgcctagcatggccgtctccccgtttatggaggaagagagacctctgctgctggtgacccctccacgcctcagagagaagaaatttgaccatcatccacagcagttctcatcttttcatcacaaccccgctcacgatagtaattccttacccgcctccccacttagaatcgttgaggacgaggagtacgaaaccacgcaggagtacgagccagcccaggagccagtaaagaaattagcgaattcacggagggctaagcggacgaaacccaacggtcacatcgctaaccggttagaggtggactcgaacacttccagccagtccagtaacagtgagagcgagactgaagatgaaagagtcggggaagacacacctttcctgggcatccagaacccactggctgcctctttggaggccactccagccttccgcctggcggactctcgtacaaatccagctggccgattttctacccaagaggaaatccaggcccggctgtcatctgtcattgccaatcaggacccaattgcagtg

SEQ ID NO: 176988 - DNA, 1911 bp, Artificial Sequence
  derived and/or modified sequence
atgtccgaacgtaaggagggtcgaggcaagggtaaggggaaaaagaaagaaagaggttctggcaagaagcccgaatcggcggcaggctcgcaaagcccagcgctgccaccgaggctgaaggagatgaagagccaggagagcgcagcaggatcgaagctcgtgcttcggtgtgaaacctcgagcgaatacagcagcttgcggttcaagtggttcaaaaacggcaatgagctgaaccgtaagaataagccccagaacatcaaaattcaaaagaagccgggaaagtcggaacttcggattaacaaagcatcgttggcggatagcggggagtacatgtgcaaggttatcagcaaactgggaaatgactccgcatcggccaatatcacgatcgtggaatcgaacgagatcataacgggaatgcctgcatcgaccgagggcgcatacgtttcgtcggaatcgccaatccgtatttccgtctcaaccgaaggtgcaaatacttcctcatccacttcaacttcgactactggcaccagccatctcgtgaagtgcgcagaaaaggaaaagacgttttgcgtgaacgggggagaatgtttcatggtgaaagacctctcaaatccatcaagatacctgtgtaagtgtccgaacgaattcactggtgatagatgccagaattacgtgatggcatcgttctacaaagccgaggaattgtatcaaaagcgcgtgctgaccattactgggatatgtattgcgctgctggtcgttggcataatgtgtgtcgtggcatactgtaagactaagaagcagagaaaaaagctccatgaccggctgagacagtcactgcgctccgaacgaaacaatatgatgaatattgctaacggcccacatcacccaaatcctccacccgaaaacgtgcagttggtcaaccagtacgtgtccaaaaatgtcatttcaagcgagcatattgtcgagcgtgaggcagagacttcgttttcgacctctcattacacttcgaccgcacatcacagcacgactgtgacgcaaactccttctcactcctggagcaatggtcacactgaatccattctttccgaatcacattcagtgatcgtgatgtcgtcggtggaaaattcacggcactcgtccccaactggagggccacgcggtcgacttaacggaaccggcggaccaagagaatgtaactcatttctgcggcatgccagagaaacccccgactcgtacagagattcaccacatagcgagaggtatgtgagcgcaatgactacgcctgcccggatgtcaccagtcgatttccataccccatcctcgcctaaatcccctccttcagaaatgtcacctcctgtgtcctccatgaccgtctccatgccttcaatggccgtgtcgccttttatggaggaagaacgacctctgttgcttgttacccctccaagattgagggagaagaagtttgaccatcacccacaacaatttagctcctttcatcataacccagcccatgacagcaactcgcttcccgcaagcccacttcgcattgtcgaggatgaggaatacgaaactacccaggaatacgaaccagcacaagaaccagtgaaaaaacttgctaacagcaggcgtgcgaagcgcaccaagccgaatgggcatattgctaaccgtcttgaggtcgattcaaacacctctagccaatcgtccaactcggaatccgagacggaggatgagagagtcggagaagataccccttttctcggaattcagaatcctctggccgcatcgctggaggcaacccctgcatttcggctggctgattcccgcaccaacccggcaggacgtttttcaacgcaggaggagattcaagctcgcctgtcgagcgtcatcgcaaaccaagatccaatcgcagtg

SEQ ID NO: 176989 - DNA, 1911 bp, Artificial Sequence
  derived and/or modified sequence
atgtccgagcgtaaggaggggcgaggtaagggaaaagggaagaagaaggagcgaggatctggcaaaaagcctgagtcagcggccggaagccaaagtcccgctcttcctcctcggctcaaggaaatgaagagccaagaatcagcagcaggatcaaaacttgtgctccgctgtgaaacctcaagcgagtactcctcacttagatttaagtggtttaagaatggaaatgaacttaaccggaagaacaagcctcaaaacataaagattcaaaagaagcccggaaagtccgaacttcgcatcaacaaggcctcgcttgcagattcgggagaatacatgtgcaaagtgatatcgaagctgggaaacgacagtgcaagcgctaatatcaccatagttgagtcgaacgaaatcattactgggatgcccgcaagcactgagggagcttacgtgtccagcgagtccccaattcgcatttccgtgtcgactgagggggccaacacttcgagctcgacctccacgagcactactggaacctctcatctggtgaagtgcgccgaaaaggaaaagactttttgcgtgaacggcggtgaatgttttatggtgaaggacctctccaatccgtcgagatacctgtgtaaatgccccaatgagtttactggtgataggtgtcagaactatgtcatggcgtccttttacaaagcagaagagctctaccaaaagagggtgctgacgattactgggatctgtattgccctgctggtggtgggtattatgtgcgttgtggcatactgtaagacgaaaaagcagaggaagaagctgcacgaccggcttcgccagtcgcttcggtcagagcggaacaatatgatgaatatagcaaacgggccacatcatcctaaccctccccctgagaacgtgcagctggtgaatcagtacgtgtccaagaacgtaatttcgtcggagcatatcgtcgagagagaagcagaaacctccttctcaacctcgcattatacttcgaccgcacatcactccaccaccgtgactcaaaccccttcgcattcctggtctaacggtcatactgaatctattctttcggaaagccattcggtgatcgtgatgagcagcgtggaaaattcaagacattcctcgcctacggggggaccaagaggacggctgaacggaactggtgggcccagggagtgtaattccttccttcggcatgcgcgcgagacgccagattcctaccgcgattccccgcactccgaaagatacgtgtcagcgatgactacgccagccaggatgtcccctgtggatttccatactccttcctcacctaaatcgcccccttcggaaatgtccccaccggtgtcaagcatgaccgtgtcgatgccttcgatggccgtgagcccatttatggaggaagaacgcccacttcttcttgtgactccacctagactgagagaaaagaagttcgatcatcacccacaacagttctcctcgtttcatcacaacccagctcacgactcaaattcgctcccagcatcgccgctgcgcatcgtggaagatgaggagtacgaaaccactcaagaatacgaaccggcgcaagaacccgtgaagaaactcgcgaactccagaagggcaaaacgcactaaacccaatgggcatattgcgaatcgtctggaagtggacagcaatacctcgagccaatcgtcaaactcagaatcggaaaccgaagatgaacgggtgggggaagataccccttttctgggaatccaaaaccctctggcggcctcattggaagcgactccagcgtttagattggcagacagccggaccaacccagcaggtcgttttagcactcaggaagagattcaggctagattgtcgtcggtgattgcaaaccaggatccgatagcagtg

SEQ ID NO: 176990 - DNA, 1911 bp, Artificial Sequence
  derived and/or modified sequence
atgagcgaaaggaaagaaggtaggggcaaaggcaaaggtaagaagaaagaaagaggcagtggaaagaaacctgaaagcgctgccgggagtcaatcccccgcccttccaccacggctgaaagagatgaaaagccaagagagcgctgcaggttccaagttggtgttaagatgtgaaacatcgtctgagtatagctctctgcgatttaagtggttcaagaacggtaatgaactcaacagaaagaataagccccagaatataaagattcagaaaaaaccggggaaaagcgaattgcgcattaataaggctagcctggctgactccggagaatacatgtgcaaggtcatctctaaactgggaaatgatagcgcaagcgctaacatcactatcgtggagtccaatgagattattaccggcatgcccgcctctactgagggcgcctacgtttctagcgagtccccaatcaggatttcagtgagcacagagggcgccaatacgagttcctcaacctccaccagtaccaccggtacttcccacctcgttaaatgtgctgaaaaggaaaaaactttctgcgttaacgggggagagtgtttcatggtgaaggatctgtcaaatccgtctcgatatctatgtaagtgccccaatgagttcaccggcgatagatgtcagaattacgttatggccagcttttacaaagccgaggaactgtatcagaaaagggtgttaacaattaccggcatttgcatcgcattgctggtcgttggcatcatgtgcgtggtggcctattgtaagaccaagaaacaaagaaagaagctccatgacagattacgccagagcttgcggagtgagcggaacaacatgatgaatatcgccaacgggcctcaccacccaaatccaccccctgagaatgtacaattggttaaccaatatgtgtcaaaaaatgttatttcctcagagcatattgtggaacgggaggctgagacctccttctccaccagtcattatacgagcaccgcgcaccatagcacaaccgtgacccagacgccaagtcacagttggtctaacggccacacagagagcattctgtctgaaagtcattccgtgatcgtgatgtcctcggtggagaactccaggcattcgagcccaactggtgggcctcgagggcgcctgaatggtaccggagggcctcgggagtgcaacagcttcctgcggcacgcccgagagacccccgactcctatagagattcccctcattctgaacgatacgtttccgccatgactacgcctgctcggatgagcccagtggactttcataccccatcctctcctaagagtccaccaagtgagatgagcccgcccgtctcttccatgacggtaagtatgccttcaatggcagtttcacctttcatggaagaagaaaggcccctcctgcttgtcaccccccctcggttaagagagaaaaagttcgatcaccatccacagcagttttcgagcttccatcacaatccggcgcatgacagcaactctctcccagcctctcctcttaggattgtggaggacgaagagtacgagactacacaggaatatgagccagcacaggagccggtcaagaaactggcgaactctaggcgcgccaaaaggaccaagcctaatgggcatatcgctaacaggctggaggtcgatagcaatacatcttctcagagctctaactctgaatctgaaactgaagatgagcgagtgggagaggatacaccatttcttgggatccagaacccgctagcagcgagcctggaagcaacccctgctttcagattggcggactccaggacaaacccggccggccggttctccacccaggaggaaatccaggcgagattaagttcagtgattgccaatcaggatcccattgcagtc

SEQ ID NO: 176991 - DNA, 1911 bp, Artificial Sequence
  derived and/or modified sequence
atgagcgaacgcaaggagggacggggaaaagggaagggcaagaagaaggaacgcggctcaggaaagaagcccgagtctgccgctggatcgcaaagccccgcactgccgcccagattgaaggaaatgaagtcgcaggaaagcgcagcaggatcaaaattggtgctgcgctgcgagacttcctcagagtactcctcactgcgcttcaagtggttcaagaacggaaatgagttgaaccgcaagaacaaaccgcaaaacatcaagatccagaaaaagcccggaaagtccgaactgcggataaacaaagcgtctctcgctgactcgggggagtacatgtgcaaagtgatctccaaattgggtaacgacagtgcgagcgcgaatatcaccatcgtggaatctaatgagattatcaccggaatgccggccagcacggagggcgcgtacgtgtcctcagaatcgccaatcagaatctcagtgagcactgagggtgccaacacttcatcatccactagcacctctacgaccggtaccagccacctggtgaagtgcgcggagaaggaaaagaccttttgcgtcaacggaggagagtgcttcatggtgaaggacctcagcaatccgtcgcgctacctctgtaaatgcccgaacgaattcaccggagatcgctgtcagaattacgtgatggcgtcattctacaaagcagaagagctgtaccagaagcgggtcctgactatcacgggcatctgcattgctcttctggtcgtcggcatcatgtgtgtggtggcatattgcaagaccaagaagcagcggaagaaacttcatgatcgcttgcgccaaagcctccgctctgaacggaataacatgatgaatatcgccaacgggccacaccaccccaacccgccgccggaaaatgtgcagctggtgaaccagtacgtctcgaagaacgtgatctcgtcggaacatatcgtggagagagaagcagaaacttccttctcgacgagccactatacgtccactgctcaccatagcaccaccgtgacccaaactccgtcccattcctggtcaaacgggcacacggaatcgatcctgagcgaatcccactccgtcatcgtgatgtcgtcagtggagaactcacgacattcctcccctaccggaggaccaaggggacggctgaatggcactggtggcccgcgcgagtgtaatagcttcctgcgacatgcgcgcgagactcccgactcctaccgggactccccacactcggaacggtacgtgagcgcgatgactactccggccagaatgtccccagtggactttcataccccatcgtccccgaagtcccctccttcagaaatgtcgccgccagtgtccagcatgaccgtgagcatgccatcaatggccgtgtcgcctttcatggaggaggaaaggccactcctgctggtcactccaccgagactccgggagaagaagttcgaccaccatccacagcagttctcgtcgttccaccacaatcccgcacatgactcgaactccctgcctgccagcccactgcgcatcgtggaggacgaggagtacgaaaccactcaagagtatgagccggcccaagaacctgtgaagaagctcgcgaattcgaggagagctaagcggaccaagcccaatggacacatcgcaaaccggctcgaagtggattcgaacacttcctcgcagtccagcaacagcgagagcgaaactgaagatgaaagagttggcgaggacacccctttcttgggaatacagaatccgctggcggcctcactggaggcaaccccggctttccgccttgccgatagccgcacgaacccagcaggacggtttagtactcaagaagaaattcaggcgcggcttagctcggtcatcgcgaatcaagatcctatcgccgtc

SEQ ID NO: 176992 - DNA, 1911 bp, Artificial Sequence
  derived and/or modified sequence
atgtccgagcgcaaggaggggcgaggcaaagggaaaggcaaaaagaaagagagaggatcaggaaaaaagcctgaaagcgcagcaggctctcaaagtccagctctgccccctcgcctcaaagaaatgaaatctcaggaaagtgctgccggcagcaaactcgttctgcgttgtgagacatccagcgaatactcttcccttagattcaaatggtttaagaatgggaacgagctcaacaggaaaaataagccccagaacattaagattcaaaagaagccgggcaaaagcgaactccggatcaataaagcttcattggcagacagcggcgagtatatgtgcaaggtgattagcaagttaggaaatgattccgcctctgcaaatatcacaatagttgagtctaatgaaattatcaccggtatgcccgcaagtacagaaggcgcatacgtgtcgtctgagagtccaattaggatttcagttagtacagagggggccaatactagcagttctaccagtacatcaaccacgggcacttcacacctggtgaagtgcgccgagaaagaaaagactttttgcgttaatggaggggaatgcttcatggttaaggacctgtccaatccgtctaggtacttatgcaaatgtcccaacgagtttactggcgacaggtgccagaattatgttatggccagtttctacaaggcggaggagctgtatcagaaacgcgttctaaccatcacaggcatctgtatagctctgcttgtcgtaggaatcatgtgtgtggttgcatattgtaagacgaaaaagcagaggaagaagctgcacgatagattgcgccaatcccttcggtcagagcggaataatatgatgaacatcgcaaatggcccccatcatcccaacccccccccggagaacgttcagcttgtcaatcagtatgtctccaagaatgtcatcagttccgaacatattgtggagagggaagccgagacttcattttcgacttcacactataccagcactgctcatcacagcaccaccgtgacacagacgccctcacattcctggtctaatggtcacacggaatcgattctgagcgagtctcattccgttattgttatgtcctccgtggaaaatagccgccacagttctcccaccgggggcccccgcggtagactaaatggtacaggtgggcctcgggagtgtaactccttcctacggcatgcacgtgaaacaccagactcttatagagactctccccactccgagcgatacgtcagtgcaatgacgactccagcacgaatgtcaccggtcgactttcacacgccctcttctcctaaatctccgccctcagagatgagtcctccagtgtccagcatgacagtgagcatgccctcaatggcagtgagtccctttatggaagaagaacgccctttgctgctggtgacaccaccgcgtttaagagagaagaagtttgaccatcaccctcagcagttttcatcctttcatcacaaccctgcccatgactctaatagcctccccgcaagcccactgaggatcgtggaggacgaagagtatgagaccacccaagagtacgagcccgcacaggaaccagtcaagaaactggctaacagcagacgtgcgaagagaactaaacccaacggccatatagccaatcggcttgaagtcgacagtaacacgtccagtcagtcctcgaactcggagtcagaaacggaagacgaacgagtcggagaggataccccatttctcggcatccaaaatccactggccgcctctctggaagctacacccgcttttcgtctcgctgacagtcggactaaccctgctggtagattttctacacaggaagagatccaggcgagactgagtagcgttatcgccaaccaggaccctatcgcagta

SEQ ID NO: 176993 - DNA, 1911 bp, Artificial Sequence
  derived and/or modified sequence
atgagcgaaagaaaagagggtcgaggtaaaggtaagggaaagaagaaggagaggggatcggggaagaagcctgaaagcgcagcgggatctcaatcgcccgctcttcctccacgactgaaggagatgaagtcccaagagtccgcagccggaagcaagctggtgctgcggtgtgaaacgtcatccgaatactcctcgctcaggttcaagtggtttaagaatggaaacgagctgaatcgtaaaaacaagcctcagaacatcaaaattcaaaagaaacccggaaagagcgagctgaggattaacaaggcctcgctggccgactcgggagaatacatgtgtaaggtcatctcaaaacttggaaacgattcggcaagcgcaaacattaccatcgttgagtccaacgagatcattactggaatgccggcctccaccgaaggagcatacgtgtccagcgagtcaccaattcgtatatctgtgtcaaccgagggagcaaacacctcatcatccacttccacctcgactactgggacctcgcatctggtgaagtgcgcagagaaggaaaagactttttgtgtgaatggtggagaatgctttatggtcaaggacctttccaatccttctcgctacctgtgtaaatgtccgaacgaatttaccggagacagatgccaaaactacgtgatggcatccttctacaaggcggaagaactgtatcagaaaagagtcctgaccatcactggtatttgtattgcccttcttgtggtgggcataatgtgcgtggtggcgtactgtaaaaccaagaagcaacgtaagaagctgcatgaccgcctgcgacagtcacttcgaagcgaaaggaataacatgatgaatatcgcgaacggaccacatcacccgaacccgccacccgaaaacgtgcaattggtcaaccaatacgtctcgaagaatgtcatttcgtcagagcatattgtcgaacgcgaagcagagacttcgttctccacttcgcattacacctcaaccgcccaccattccactaccgtgactcaaactccgtcacattcctggtcaaacgggcacaccgagtccatcttgagcgaatcccattccgtgattgtgatgtcatccgtcgaaaactccagacactcgagccctaccgggggccctcgcggaaggcttaacggaaccggtggtcctagggagtgtaacagtttccttagacatgcacgcgaaactcccgatagttacagagactccccccactcggagcgctacgttagcgcaatgaccacccctgcacggatgtcgccagtcgattttcataccccaagctcgcctaaatcccctccttcggagatgtccccacccgtgtcctccatgacggtgtcgatgccaagtatggcagtcagcccttttatggaagaggaaagacctctgctgcttgtcactccgccacggctgcgtgaaaagaagttcgatcatcatcctcagcaattttcctcgtttcatcataatcctgcacatgactcgaactcccttcctgccagtccgctgcggattgtggaagatgaggaatacgagactactcaagaatacgaacctgcacaagaacccgtgaagaaattggccaacagccggcgagctaagcgaaccaaaccaaacggccatatcgccaatagacttgaagtcgattccaacacgagcagccaatcgagcaactcagaatcggaaactgaagatgagagggtcggggaagatactccatttttgggtattcagaacccactcgcagcgtccctggaagccactccagcatttcggcttgcagactccaggactaatcccgccgggcggttctcaacccaagaggaaatccaagcccggctctcgtcggtgatagcgaaccaggacccaatcgctgtc

SEQ ID NO: 176994 - DNA, 1911 bp, Artificial Sequence
  derived and/or modified sequence
atgtccgagaggaaagaagggcgggggaagggcaagggaaagaagaaggaacggggttcaggcaagaagcctgaaagcgccgctggttctcagagcccagcattacctccacgcctaaaggagatgaagagccaagagagcgcagctggcagtaagttggtacttaggtgtgagacctcttcagaatattcctctctgcggtttaagtggttcaagaacggaaatgagcttaataggaaaaacaaaccccagaatattaaaattcaaaagaagcccggcaagtccgaactgcgaataaataaggcgtccctggcagattccggagagtatatgtgcaaggtgatctcgaagctaggtaatgacagcgcctccgcgaatattacgatcgtggagtctaacgagataatcaccggaatgccggcgtctactgaaggggcctatgtatcctccgagagccccattagaatctctgtgagtacagagggggccaacacatccagctctacaagtacaagcacaacgggcacctcccatctggtgaagtgtgccgagaaggagaagaccttctgcgtgaacggaggagaatgctttatggtgaaggatctgagtaacccctcgaggtatctgtgtaaatgtcccaatgaatttacaggagacaggtgccagaactacgttatggcctcgttctacaaagctgaagagctttatcagaagcgcgtcttaaccatcaccggcatctgtatagcgttgcttgtggtgggcattatgtgcgtcgttgcctattgcaaaaccaaaaagcaacgcaagaaactgcacgaccgactgaggcaaagtctaaggtcggagaggaataatatgatgaatattgccaacggcccacatcacccaaacccccctcctgagaacgtacaactggtgaaccagtatgtcagtaagaatgtaatttcctctgagcatattgtggagagagaggctgagacgagcttctccacctcacactatactagcactgctcaccactcaactacagtcacgcagactccctcacacagctggtccaatggccacactgaatcaatcctgtcggaaagccacagtgtcatcgtcatgagcagcgtggagaactcccggcatagtagccctaccggcggacccagaggacgcctgaatggcaccgggggaccaagggagtgtaatagctttctaaggcatgcaagggagactcccgatagttatagggactcaccacactccgaacgttatgtatccgccatgaccactcctgctcggatgagccctgtcgacttccatacaccatcatcacccaagagtcccccatccgagatgagcccacctgtgagctcaatgacagtctccatgccctcaatggctgtcagcccatttatggaggaggaacggccccttttgctggtcacgcccccacgcctacgtgaaaagaagttcgatcaccacccacaacagttctcatcttttcaccacaaccccgcgcacgattctaactcactgcctgcttcacctctgcgcatagtcgaggacgaagaatatgagaccacacaggagtacgagcccgcccaagaacctgttaagaaattggctaatagcaggcgcgccaagagaaccaagccaaacggtcatatcgcaaataggctcgaagtggatagtaacactagctcccaatccagcaattccgaatctgagacagaagatgaacgagtgggtgaggatacaccattcctggggatacagaatcctctcgccgcgtctcttgaggcaacacctgccttcagactcgccgatagccgcactaatccagccggacgcttcagtacacaggaggaaattcaggcccgactgtctagcgtcatcgctaatcaggatccaatcgcggtt

SEQ ID NO: 176995 - DNA, 1911 bp, Artificial Sequence
  derived and/or modified sequence
atgtccgagcggaaggaagggaggggtaaaggaaagggaaagaagaaagagcggggctccggcaagaaaccggagagcgctgcggggtctcagtcacctgccctgccccctcggctgaaggagatgaaaagtcaggagtcagcagccgggagcaagctcgtattgagatgcgaaacgtcttccgaatactcgtccctgaggtttaaatggtttaagaacggtaacgaactcaaccggaaaaacaagccccagaacatcaagatccagaagaaaccgggcaagagtgagctccgaattaataaagcatccctcgccgacagcggcgagtacatgtgtaaagtgataagtaagctgggcaatgattcagcttcggcgaatatcaccatcgtcgagagcaatgagatcattaccggaatgcctgcatctaccgaaggggcctacgtgagtagcgagtccccaatcagaattagcgtgagcacggagggagccaatacttcttcatctacatcgactagcactaccggaacctcacacctggtgaaatgtgccgagaaagagaagaccttctgcgttaatggtggagagtgttttatggtcaaggacctctccaatccttcccgatatttgtgcaagtgccccaatgaattcacgggagacaggtgtcaaaactatgtgatggcttctttctataaggccgaggagctctatcagaagcgggtgttgaccatcaccggaatttgcattgccctgctagtggtcggaattatgtgcgtcgtagcttattgcaaaacaaagaagcagcggaaaaagctccatgaccgtctgcggcagtccctgcgcagcgagcggaataacatgatgaatatcgccaacgggcctcaccacccgaacccccctccagaaaacgtgcagctggtcaaccagtacgtaagtaagaacgtcatcagtagtgagcatatcgtggaacgtgaggccgaaacctccttctcaaccagtcactacacttctaccgcacatcattccaccaccgtgacacaaaccccctcgcactcatggagtaacggccacacagaatctatcctctctgaaagccactctgtcatcgtcatgagttcagtggagaacagtagacatagctcgcccactggcggtccccgagggagattgaacggcactggaggcccgagagagtgcaacagcttcctcagacacgctcgggagacgcctgatagctacagggactccccccattccgagcgctacgtgtcagcaatgactactcctgcacgaatgtcgccggtggatttccacaccccatcttcacctaaatcccccccctcagagatgagtcccccggtgtcctccatgacagtgagcatgccatctatggctgtgagcccttttatggaggaagagcgacccttgctgctggttactccccctcgactgagagagaagaaattcgatcatcacccacagcaattctcgtcttttcaccataatcctgctcatgattcaaattcactccctgcgagcccgcttcgtatcgttgaggacgaagagtatgaaacgacacaggagtatgaacctgcccaggagccagtaaaaaaactggcaaacagcaggagagccaagcgcactaagccaaatgggcacatagctaacaggctggaagtagatagtaatacatcttcccagtcttctaatagcgagtccgagaccgaagatgagagagtcggagaagatacgcccttccttggcattcagaaccccctggcagcttccttagaggcaacaccagccttccggctggccgactcccggaccaatccggctgggagatttagcacacaagaagagatccaagcccgtttgagctccgtgattgcaaaccaagacccaattgccgtt

SEQ ID NO: 176996 - DNA, 1911 bp, Artificial Sequence
  derived and/or modified sequence
atgtcagaacggaaagagggtcgggggaagggaaagggaaagaagaaggaacgcggatcgggaaagaagccagaatcggcggctggatcccagtccccggcccttccgccacgcttgaaggagatgaagtcccaggagtccgccgcgggatccaagctggtgctgcgctgcgaaactagcagtgagtactcgtcccttcgcttcaaatggtttaagaacgggaacgagctcaacagaaagaacaaaccacagaacatcaagatccagaaaaagccgggcaaatcggagctccggatcaacaaggccagcttggcggactccggcgagtacatgtgcaaggtcatctctaagctgggaaatgatagcgcgtccgctaacattaccatcgtcgaatcaaacgagatcattaccggtatgcctgcgagcacggaaggcgcatacgtgtcatccgaatcaccgatccgcatctctgtgtccaccgagggtgccaacacctcgtcatcaacttcaacctccacgactggcacctcccatctggtcaagtgcgcagaaaaggaaaagacgttctgcgttaacggtggcgaatgcttcatggttaaagacctttcaaacccctcacgctacctctgcaagtgccccaatgagttcaccggggatcgctgtcagaactatgtgatggcatccttctacaaggcagaagagctctaccaaaaacgcgttctgactattactggcatctgtatcgccctgctcgtcgtcggcatcatgtgcgtggtcgcatactgtaagacgaagaaacaacgcaaaaagctgcacgatcgcctccggcagtctctccgctccgaacgcaataacatgatgaatatcgccaatggcccacatcaccctaacccgccaccggaaaatgttcagctggtcaatcagtacgtgtcgaaaaacgtgatctcctccgagcacatcgtggaacgggaagcggaaaccagcttctctacctcccactacacctccaccgcgcaccacagcactaccgtcacgcagactccgtcccacagctggtcaaacggccataccgagtcaatcctcagtgagtcgcacagcgtgatcgtcatgtcgtcagtggaaaattcacggcacagctctcccacggggggtcctcggggacgactcaatggaactggcggacctagagaatgcaactcattcctgcggcacgcccgcgaaacccccgactcctacagggattcgcctcattcggagcgctacgtttccgcgatgaccactccggcacgcatgagcccggtggattttcacaccccttcgtccccgaagtcgccgccgtccgaaatgtccccaccggtgtcatctatgactgtctcgatgccgagtatggcagtgtcgccattcatggaagaggaacgccctctgctgctggtcactcccccaaggctgcgggaaaagaagttcgaccaccatccacaacagtttagctcatttcatcataacccggcgcatgacagcaactcactccccgccagcccgctgcggatcgtcgaggacgaagagtacgaaaccactcaggagtatgagcctgctcaggagcctgtgaaaaagctcgccaactcgcggcgcgccaagcgcacgaagccaaacgggcacatcgccaacagactggaggtggactccaacacgtcgtcgcagtccagcaacagcgaatcggaaaccgaagatgagagggtgggagaagatactccgttcctcggaatccaaaatccgctcgcagcctccttggaagcgactcccgcgttccgcctcgcggactcgcggaccaatccagctggccggttctcgactcaggaagagatccaggcccggctctcgtccgtcatcgccaatcaagaccctatcgcggtg

SEQ ID NO: 176997 - DNA, 1911 bp, Artificial Sequence
  derived and/or modified sequence
atgtccgaaagaaaggagggtagagggaaaggtaagggaaagaaaaaggaacggggatccggcaagaagcctgagagcgcggcaggttcacaatcaccggcgctgccgccacgtcttaaggagatgaaatcccaggaaagcgcagcaggttccaagctggttctcagatgtgaaacctcgagtgaatactcgtcgcttcgttttaagtggttcaaaaatggaaatgagcttaatcgaaagaacaagcctcagaacatcaagattcaaaagaagccaggtaaatctgagctgcggatcaataaagctagcttggcagatagcggagaatacatgtgtaaagtgatatccaagctcgggaatgatagcgcttccgccaacatcaccattgtggagtccaacgagattatcaccggcatgccagcttctaccgaaggggcatacgtgagctcggagtcgcccataaggatctccgtctcaaccgaaggagcaaacacttcgagctccacttcaaccagcactactggtacttcccatctggtgaaatgcgcagaaaaggaaaaaactttctgcgtaaatggaggtgagtgcttcatggtgaaggacttgtcgaacccatccagatacctttgtaagtgccccaatgaatttaccggtgaccgctgccaaaactacgttatggcatccttttacaaagcagaggaattgtaccagaagcgcgtcctgaccatcaccggaatatgtattgctcttcttgtggtgggtattatgtgcgtggtggcatattgtaagactaagaaacagagaaagaaacttcacgaccgactgaggcaatcactgagaagcgaaagaaacaacatgatgaatatcgcgaatggcccacatcatccaaacccgccccctgaaaacgtgcagcttgtcaatcagtacgttagcaagaatgtgataagctcggaacacattgtggaaagggaagcagagacgtcgttctcaacttcgcattatacctcgaccgcgcatcatagcaccaccgtgacccagacgccctcccattcatggtcgaacggacatacggagtcaattctttccgaatcacactccgtgatagtgatgtcgtccgtggaaaattcccgacattcatctccgactggaggacctaggggacgcttgaatggtaccgggggtccacgagagtgtaacagctttcttaggcacgcaagagaaacccctgattcataccgcgactcccctcatagcgaacggtacgtgtccgcgatgaccaccccagcacgcatgtcgccagtggatttccataccccttcgtcacctaagtcgccaccctcagagatgtcccctcctgtgtcctcaatgacggtgtcgatgccgagcatggctgtctcgccgtttatggaggaagaacgaccgctgcttttggtgactcctccgaggctgagagagaagaaatttgaccaccaccctcaacaattcagctcgtttcatcacaacccagcacatgattcgaacagcctcccagcatccccactccgaatagttgaggacgaagaatacgagactactcaggaatacgagccggcgcaggaaccagtcaagaagctcgcaaactcgcggcgagcaaaaaggaccaagcctaatggacatatcgcgaaccggctcgaagtggattctaatacttcgtcccaatcgtcgaattcggagagtgagactgaagatgaacgtgtcggagaagataccccatttctgggcattcaaaatcctctcgcagcatcccttgaagcaacccccgcattccgcctggccgactccaggaccaaccccgccgggcgtttctcaacccaagaggagattcaggcaaggctttcaagcgtcattgccaatcaagacccgatagcagtg

SEQ ID NO: 176998 - DNA, 1911 bp, Artificial Sequence
  derived and/or modified sequence
atgtcggagcgaaaggagggacgcggcaaagggaagggtaagaaaaaagagcgaggctccggcaagaagccggaatccgcagcgggatcccaatcaccagctcttccaccaaggctcaaggaaatgaaatcccaggaatcagcggccgggtcaaagctcgtcctgcggtgcgagacttcatccgaatactcgtcgctcaggttcaagtggttcaagaacggtaacgagcttaaccgcaagaacaaaccgcagaatatcaaaatccaaaagaagccgggaaaatcagaattgcggatcaataaggcgtcacttgcggactcgggagaatacatgtgcaaggtcatctcaaagctcggaaatgactccgcgtcggcaaacatcaccatcgtggagtctaatgaaatcatcacgggaatgcctgcttccactgaaggcgcctacgtctcctccgaatcgccgatccgcatctcagtcagcactgagggagcgaacacctcatcctccacttcaaccagcactaccggtacttcccacctcgtgaaatgcgccgaaaaggaaaaaaccttttgtgtgaacggaggtgaatgcttcatggtcaaggacctgagcaacccaagcagatacctctgcaagtgcccaaacgagttcactggcgaccgctgccagaactacgtgatggcatccttttacaaagcagaggagctctaccagaagcgggtgctgaccatcactggcatctgcatcgcgctccttgttgtgggcattatgtgcgtcgtcgcctactgcaagaccaaaaagcagagaaagaagctccacgatagactgcggcagtctcttaggtcggagcggaacaatatgatgaacatcgccaacggaccccatcatccgaacccaccaccggaaaacgtgcagctggtcaaccaatacgtgagtaaaaacgtgatttcgtcagaacacatcgtcgaacgggaggccgagacttcgttttccacctcgcactacacttccacggcccatcactcgaccactgtcactcagactccttctcatagctggtcgaatggccatactgaatccatcctgtcagagagccactcagtgatcgtgatgtcaagcgtggaaaactcacggcactcgtcgccgacgggcgggccgcgcggacgcttgaacggtaccggaggacctcgcgaatgcaactcgtttcttcgccatgcgcgcgaaaccccggactcctacagagatagcccgcactcggaacggtacgtgtcggccatgactactccggctaggatgtcaccagtcgacttccacactccgtcgtcgccaaagtcgccgccatccgagatgtccccgcctgtgagctccatgaccgtcagcatgccatccatggctgtgtcgccattcatggaagaggaaaggccgctgttgctcgtgaccccgccccggctgcgcgaaaagaagttcgaccaccacccacagcagttctctagcttccatcataaccccgcccatgattccaattcacttccagccagcccgctgagaatcgtggaagatgaagaatatgagactactcaggagtacgaacccgcccaggagccggtgaagaagctcgcgaacagcagaagagcaaaaagaacgaagccaaatggccacatcgccaaccggcttgaagtcgatagcaacacttcctcgcaatcgtcaaactccgagagcgaaaccgaggatgaacgcgtgggggaggatactccgttcctgggaatccagaatccgctcgcggctagccttgaagcaactccggctttccgcctcgcggatagccgcaccaatccggcgggcagattttcgactcaagaagaaattcaggcacggctttcgtccgtgatcgccaaccaggacccaatcgcagtg

SEQ ID NO: 176999 - DNA, 1911 bp, Artificial Sequence
  derived and/or modified sequence
atgtctgagagaaaggaaggcaggggcaagggcaaaggaaaaaaaaaggagcgcggatccggcaagaagcctgaatctgctgcaggatctcagtcacctgctctgcctcctaggctcaaggaaatgaagagtcaggaaagcgccgccggaagcaagctggtgctcaggtgtgaaaccagctcagaatatagcagccttagattcaagtggtttaaaaacggaaatgagctgaacaggaaaaacaaaccccagaacatcaaaatccaaaaaaagcctggcaaatctgaacttcgtatcaacaaggcatctttagcagatagcggagagtacatgtgtaaggttattagcaaactgggaaacgactctgcaagcgctaatattacaattgtcgaatccaacgagataatcaccggcatgcctgcctctacagaaggcgcatatgtgagttccgaatctcccatcaggatcagtgtgtctactgagggcgcaaacacctcaagctccacaagcacaagcaccacaggcacctcacacctcgtaaaatgtgccgagaaggaaaagaccttttgtgtgaacggcggggagtgctttatggtgaaggatttaagtaatcccagccgttacctttgcaaatgccccaacgagttcaccggcgaccggtgtcagaactacgtcatggcttctttctataaagctgaggaactctaccagaagagggtgctgacaatcaccggcatttgcatcgcactcctggtcgtcggaattatgtgcgtggtggcctactgcaagacaaaaaagcagaggaagaagctgcatgaccgccttagacagtctctgcgatccgaaagaaataatatgatgaacatcgctaatggccctcaccaccccaaccccccccctgagaacgtgcaactggttaatcagtatgttagcaagaatgtaatcagctcagagcatatcgtggagagggaagcggaaactagtttttctactagtcactacacatcaaccgctcaccactccacaactgtcacccaaacgccctcccattcctggtcgaatggccacacagagagcatcctgagcgagtctcacagtgtcatcgtaatgtcttcagtggaaaacagccgccacagctctccaactggaggacccagggggagacttaacggcactggtgggccgcgtgagtgcaacagtttcctgagacacgcgagagagacgcctgactcttatcgtgactcgccccatagcgagcgatatgtaagtgcaatgaccacaccggccagaatgagtccggtggattttcacaccccctcatcacctaagagcccacctagcgaaatgtcacctcctgtgagtagcatgacagtgagcatgccttccatggccgtcagcccttttatggaggaagaaaggccacttctcctagtgacccccccaagactcagagaaaaaaagttcgaccatcaccctcagcaattctcctcttttcaccacaatccggctcacgactccaacagcctgccagcttcacccttgcgaattgttgaagacgaagagtacgagactactcaagagtatgagcctgcccaggagccagtgaagaagctggcaaatagccgcagagctaagcggaccaaacccaacggtcatattgccaacagactggaagtagatagcaacaccagcagccaatcgagtaatagtgagagtgagactgaggacgagagagtaggcgaggacaccccattccttggtatccagaacccactggctgccagcctcgaggcaacccctgctttcagactggccgacagcagaactaatccagccggaagatttagcacacaggaggaaatccaggcacgtcttagcagcgtgattgccaaccaagacccaatcgccgtt

SEQ ID NO: 177000 - DNA, 1911 bp, Artificial Sequence
  derived and/or modified sequence
atgtctgagaggaaggagggtagaggcaagggcaagggtaagaaaaaggagaggggtagtggaaagaagcccgagtctgccgccggaagccaatctcctgccctgccccctagattgaaagagatgaaaagtcaggaatctgctgcaggttctaagctggtgctccgctgcgaaacctcttccgagtactcatctttgcgttttaagtggttcaagaacggtaacgaactgaataggaagaacaagcctcagaacattaaaatccagaaaaagcccggaaagtctgaacttaggattaacaaggcctccttggctgactcaggcgagtatatgtgcaaggtcataagcaaactcggtaacgatagcgctagtgccaacattacaattgtggagtccaacgagatcataacaggaatgccagcatcaactgaaggagcctatgtctccagcgagtccccaattcgtatctctgtttccactgagggagctaatactagcagctctactagtactagcacaactggcaccagtcacctggtgaagtgtgcagagaaggagaagacattttgcgttaacggtggtgaatgctttatggtgaaggatctcagtaacccctccagatatctgtgcaaatgcccaaatgagttcacaggcgataggtgccaaaattacgtaatggcctccttttacaaggccgaagagctctatcagaagcgcgtcctgaccattaccggaatctgcatcgcactcctcgtggtcggtatcatgtgtgtggtggcctactgtaaaaccaaaaaacagagaaagaagttgcatgacaggctgagacagagtctgaggagcgagaggaacaatatgatgaacatcgctaacggacctcaccatcctaaccctccacctgaaaatgtgcagctcgttaatcaatatgtttctaaaaacgtcataagcagtgagcacatcgtggagagagaggccgagacaagtttctcaaccagccactatacctcaacagcccaccattccacaaccgtaacccaaacaccctcccatagctggtcaaacggccacactgagagtatcctctccgagtctcatagcgtgatcgtgatgtcctcagtcgagaattcccgtcacagttcccccacaggtggtcctagaggacgtctgaatggaacaggtggacctagagagtgcaacagttttctgcgtcacgcccgcgaaacccccgattcataccgtgattctccacactctgagaggtacgtgtcagctatgaccacacccgctagaatgtctccagtcgacttccacaccccaagcagtcccaaaagtccaccttccgaaatgagcccccctgtgtcttccatgaccgtttccatgccctctatggccgtttcccctttcatggaagaggaaagacccctgctgttggtgacaccccccagactgcgtgagaagaagttcgaccaccacccccagcaattctcttcttttcaccacaaccccgcacacgattccaattccttgcctgcctccccactgagaatcgtggaagacgaggagtatgagaccacccaagaatacgagcctgcccaagagccagtaaagaaactggctaacagtcgtcgcgcaaagcgtaccaagcccaacggacatatcgcaaacaggctcgaagtggacagcaacacttcatcccagagtagcaactcagagtctgagactgaggacgaacgcgtcggcgaggacactcccttccttggcatccagaatcccctggctgccagtcttgaggcaactcctgcatttaggctggcagattctagaaccaacccagcaggtcgtttctccacacaagaggagattcaagcccgtttgtccagcgttattgctaatcaagaccccattgcagtg

SEQ ID NO: 177001 - DNA, 1911 bp, Artificial Sequence
  derived and/or modified sequence
atgtcagaacggaaggagggccggggaaaaggtaagggaaagaagaaagaaagggggtcgggaaaaaaaccggaatcagctgccggcagccagagccccgccctcccccctcggttgaaagagatgaagtcacaggagtccgctgcagggagcaagttggtgcttcgctgcgagacctcctccgagtactcaagcttaagattcaaatggttcaagaacgggaacgagctgaaccgaaagaataaacctcagaatatcaaaattcaaaagaaaccgggaaaatccgaacttcggataaataaagcatccctggcagactctggtgagtatatgtgtaaggtaatctctaagttgggcaacgacagtgcctctgcgaacatcaccattgtggagtcaaacgagattataacaggcatgccggcctcgaccgagggtgcgtacgtctcttccgagtccccaattcgcatctccgtgagcacagagggtgcgaacacctcatcgtccacaagcaccagcactactgggacctctcacctggttaagtgtgcggaaaaggagaagacattttgcgtgaacggtggtgagtgtttcatggtaaaggacctgtccaatccaagtcggtatttatgcaagtgtccgaacgaatttaccggtgaccgctgtcaaaactatgttatggcatctttctacaaggccgaggagctctaccagaaacgggtgttgactatcaccggaatctgtatcgccctcctggtggttgggatcatgtgcgtcgtagcctactgcaagactaaaaagcagagaaaaaagctgcacgaccgactaagacagtccctgcgctctgagcgaaacaacatgatgaacattgcaaacgggcctcaccacccaaacccgccaccagaaaatgtccaattggtgaatcagtacgtttcaaagaacgtcatctccagtgagcacattgttgagcgggaagcagagactagtttctccactagccactataccagcacggcccaccactctacaaccgtaacacagacccctagccattcttggtcaaacgggcacaccgaaagcatcctatccgaaagccatagtgtgattgtgatgtcatcagtggagaattccagacacagctctccaaccggaggacctagaggacgactgaacggaacaggcggcccacgggaatgcaattctttcctgaggcacgcccgcgagactccagacagttaccgggatagcccccattctgaaagatacgtgtcagctatgaccacacccgcccggatgtctccagtggacttccacacaccttctagtcccaaaagcccgccttcagagatgtccccccccgtgagcagcatgacagtatccatgccttccatggctgtgtcgccttttatggaggaggaacgccctctgctccttgtcactccaccccgcttacgggaaaaaaagtttgaccaccatcctcagcagtttagcagcttccaccataatcccgcgcatgattcaaacagtcttccggcctccccgctgcgaattgtcgaagacgaagaatatgagaccacgcaggagtatgaacctgcccaggagccagtcaagaaattagcaaactctcggagggcaaaacggactaagccaaatggccacattgctaacaggctagaggtggactctaatacaagctcccaatctagtaatagtgagtctgagactgaagacgagcgagttggagaggatactccctttctaggtatccagaacccactggccgcttctcttgaggccacccccgcctttaggttagcagatagtcgcacaaatcccgccggacgattttcaacccaggaggaaatccaggccaggttgagtagtgtgatcgcaaatcaggatcccattgccgtg

SEQ ID NO: 177002 - DNA, 1911 bp, Artificial Sequence
  derived and/or modified sequence
atgtctgaaaggaaggaaggacggggcaaaggaaagggaaagaagaaggaaagagggtcaggaaagaagccagagtccgcagcaggaagccagtcccctgcattgccccccagacttaaagaaatgaagtcccaagaatccgcagcaggtagtaaactcgtgctccgatgcgagacgtcgtcggaatatagctcgctgagattcaaatggtttaagaacggaaatgaacttaatagaaagaataagccgcaaaacattaagattcaaaagaagcctggcaagtccgaactgcggattaacaaagcaagcctggccgattcaggagaatacatgtgcaaggtgatttccaaactgggaaacgactcggctagcgcgaacattactattgtcgaaagtaatgagattatcaccggtatgcccgcgagcactgagggcgcatacgtgtcgtcggaatcgccaataagaatctccgtttcaaccgaaggtgcgaatacttcaagctccaccagcacctcgaccaccggtacttcacacctggtcaagtgcgccgaaaaggaaaagaccttttgtgtcaatgggggagaatgctttatggtcaaggacctctcgaaccctagcaggtacctttgtaaatgtccaaacgaattcactggtgaccggtgtcagaactacgtgatggcatcgttttacaaagcagaagaactgtaccagaagcgggtgcttacgattactggtatctgtatcgcacttctggtggtcggcatcatgtgtgtggttgcatactgtaagactaaaaagcagcggaaaaagctccatgatcggctgcggcaatcgcttcgctccgaaagaaacaacatgatgaacatcgcgaacggacctcatcacccaaacccccctcccgagaacgtccagctcgtaaaccaatacgtaagcaaaaacgtgatttcctccgaacatattgtcgagcgagaggcagaaaccagcttttcaacttcacactacacttccactgcgcatcattcgaccacggtgactcagactccgtcgcattcgtggtcaaatggacacaccgagagtatcctgtcggaatcgcatagcgtgattgtcatgagttcggtggagaactcacggcactccagtccgactggaggacccagaggccgtcttaatggaaccggaggtcctcgggaatgcaattccttcctccggcatgcccgggaaacccctgacagctaccgtgacagcccacatagcgaacgctatgtcagcgcaatgaccaccccagctaggatgtcccctgtggactttcacacgccaagctcccctaagagcccgccctcagagatgtctccaccagtctcgtccatgacggtgtccatgccctcgatggcggtgtcaccctttatggaggaagaacgccctcttctgttggtgacccctcccaggcttcgcgagaagaaatttgatcatcatccccaacaattttcttcattccaccataaccctgcgcacgattcaaactcgttgccagcatcaccgcttaggatcgtggaagatgaggagtacgaaaccacccaggagtacgaaccagcgcaggaacctgtcaagaaacttgcgaactcgagacgagccaagcggaccaaacctaatggtcatatagcaaaccgtctggaggtggatagcaataccagctcgcaatcttccaatagcgagtcggaaaccgaggatgaaagggtgggtgaagataccccattcctgggtattcaaaatccacttgcagcatccctcgaagcgactcctgcgttccgtctggctgatagcagaactaacccagcaggtagattctccacccaagaggagattcaggcccgcctgtcctcagtgatagcaaaccaagatcccatcgccgtg

SEQ ID NO: 177003 - DNA, 1911 bp, Artificial Sequence
  derived and/or modified sequence
atgagcgagaggaaagaagggagagggaaaggcaaaggtaaaaagaaggagcgggggtcaggcaagaagcccgagagtgcggctgggtcccagagtcccgcgctgcctccccgtttgaaagaaatgaaatcacaggaatccgccgccggtagtaagctagtgctgcgatgcgaaactagcagcgagtattcctcgctgagattcaagtggttcaagaatgggaacgaacttaatagaaaaaacaagcctcagaatatcaagattcagaagaaaccagggaaatccgagctgcggataaacaaagcctctctggccgactcgggggagtatatgtgtaaagtcatctctaaattaggtaatgattctgcctcagcgaatataacaatcgtggaaagtaatgaaataataaccggcatgcccgccagcacagaaggggcatacgtgtcatcggagtcaccgatcagaataagcgtttccacagagggtgccaacacgtcttctagtaccagtacctcaacaaccgggactagtcacttggtaaagtgcgctgagaaagaaaagacgttttgcgtgaatggcggagaatgcttcatggttaaggacttgagcaatcccagcagatacctctgcaagtgtcctaacgagtttaccggcgaccgttgtcagaattacgttatggcgtccttctataaggctgaggagctttatcagaaacgagttctcacaattaccggcatttgcattgcgctgttggttgtgggcataatgtgcgtggtcgcttattgcaagaccaaaaagcagcgtaagaaactccacgatcgactaaggcagtccctgcgatcggaaagaaacaacatgatgaacatcgcaaatggtccacaccatcccaatccaccccctgaaaatgtgcaactggtgaaccagtatgtcagcaagaacgtcatctcctctgagcatatagtggagagagaagctgagacatctttttcaacctcacactatacctctaccgctcaccattccacaactgtcacccagactcccagtcactcttggagcaatggacacaccgagagcattctcagtgagtcgcactccgtgatcgtgatgtcctccgtggagaacagcaggcactctagtccaactggagggccacggggtaggctaaacggaacaggcggcccaagagagtgcaattccttcctgcgacatgcccgtgaaacacccgactcgtatcgagactcgcctcatagcgagcgatacgtctccgccatgaccacaccagcccgaatgagtcctgtggactttcataccccatcaagcccaaagtctccccctagcgagatgagcccaccagtgtctagtatgactgtgagcatgccctctatggcagtgagtccattcatggaagaggaaaggccgctgctgctggtgactccccctcggctgagggagaaaaaattcgatcatcatcctcagcagtttagttcttttcaccataaccccgcacatgactccaacagtttacctgcctcgccgctccgaatcgtcgaagacgaagagtacgaaaccacgcaggagtatgaacccgcccaggagcccgttaagaaactggccaactccagacgggctaaaaggactaagccgaatggtcacatcgctaaccgcctggaggttgacagtaatacaagtagccagtcaagcaatagcgagagtgagacggaggatgaacgtgtcggcgaagacaccccattcttgggtatacagaatccactggccgcatcattggaggcaacgccagctttccgtttggccgattcaaggactaatccagccggacgtttttctacacaggaagaaatccaggctagactctcctctgtcatagcaaaccaggaccctattgcggta

SEQ ID NO: 177004 - DNA, 1911 bp, Artificial Sequence
  derived and/or modified sequence
atgtccgagcggaaggagggtcgcggcaagggcaagggcaaaaaaaaagaacggggctcagggaaaaagccggagagcgctgccggctcccagtctcccgctcttcccccaagacttaaggaaatgaaaagccaagagtcagctgcaggttctaaactggtgcttaggtgcgagactagctccgaatacagttccctgaggtttaagtggttcaagaacggaaacgaactgaaccggaaaaataagccccagaatattaagatccagaaaaaacccggtaagtccgagctccgaatcaacaaggcgtcccttgctgactctggcgagtatatgtgtaaagtgatttccaagttggggaacgacagcgcttcagccaatatcacaattgtagagtctaatgaaatcatcacaggcatgcccgccagtacagaaggcgcatacgtgtctagtgagtcacctatcaggatatccgtatctaccgaaggagctaacacatcgtcctcaacttccacgtcgacaaccggtacttcccatcttgtgaagtgcgccgagaaagagaagaccttctgcgtaaacgggggagaatgttttatggtgaaggacctgtccaatccctcccgctatttatgcaagtgccccaacgagttcaccggtgaccggtgccagaattatgtgatggctagcttctacaaagccgaagagttgtaccagaagagagtgctgacgattaccggtatttgtatcgctcttctggtggttggaatcatgtgtgtcgttgcctactgtaaaacgaagaagcagcgcaagaagctgcacgatcgtctgcggcagtctctccggagcgaacgaaataatatgatgaatattgccaatggcccacaccatccaaaccccccccccgagaacgtacagctggttaaccaatacgtcagcaagaatgttatctcatctgagcacatcgtcgagagggaggcagagactagttttagtacctcacactacaccagtacggctcaccacagtactacagtgacacaaaccccctcccacagttggtcaaacgggcacaccgagagcatcctttccgaatcccattccgtaattgtgatgagtagcgtggagaattctcgtcactcgtccccgactggcggaccgcgcggcagactaaatggcaccggcggaccgcgggaatgtaactcatttctgcggcatgcccgcgagacaccagactcctaccgggactctccccactccgagcggtacgtctctgctatgacaacccccgccaggatgtctccagtagattttcacactccttcttctcctaagtcaccgcccagtgagatgagcccaccagtgagcagcatgacagtttccatgccttccatggctgtgtctcctttcatggaagaggaaaggcccctgctgcttgttaccccaccccgcctccgggagaagaagttcgatcaccatccccagcagttttcatcctttcaccacaaccccgctcatgacagtaacagcttacccgcgagccccctacgtatcgtggaagacgaggaatatgaaaccactcaagagtatgagcctgcccaagaaccagttaaaaagttggctaactcacgccgggcgaaacggactaaacccaatgggcacatcgctaatcgactagaggtggatagcaacactagttctcagtcgtctaacagtgagtccgaaacagaggatgagcgggtaggggaagacactccgtttttaggtattcaaaaccctctggctgcttccttagaagcgaccccggcatttcggctggccgattctagaacgaaccccgctggcaggttctcaactcaggaagagattcaggcacgactgagtagtgtaattgcgaatcaggatcctatcgctgta

SEQ ID NO: 177005 - DNA, 1911 bp, Artificial Sequence
  derived and/or modified sequence
atgtccgagagaaaagaaggacgaggcaagggaaaaggaaagaaaaaagagagaggcagtgggaaaaagcccgagagcgctgctggctctcaatctccagctctgcctccccggctgaaggaaatgaagagccaggagagcgcagccggcagcaaactggttttacgatgtgagacctccagtgaatacagcagcctccgctttaagtggttcaaaaacggaaacgaactgaataggaaaaataagccacagaacattaagatccagaaaaaacccggcaaatcggagctgcgaattaacaaggcctcactagccgactcaggagaatacatgtgtaaggtcatctcaaagctcggcaacgacagcgcttccgctaacattactattgtggagtccaacgaaatcatcaccggcatgcccgcttccactgagggcgcatacgtgagctctgagagcccgattagaatttccgtgagtacagaaggcgctaatacttccagctccacaagtacttctacgactggcacctcacatcttgtgaagtgcgccgaaaaagagaagaccttttgtgtcaatggcggggagtgttttatggtgaaggacttgtccaacccaagcagatacctttgcaagtgccccaacgagtttactggagacagatgtcagaactacgtgatggcctccttctacaaagccgaggagctttatcagaaacgggtgttaaccataacgggaatctgcatcgccctgttagttgtggggataatgtgcgttgtagcgtactgcaagacgaagaagcaaaggaagaagctccacgatcggctgaggcagtcacttagaagcgagcggaacaatatgatgaacatcgccaacggccctcaccatcctaatccccctccagagaatgttcagctcgtgaaccagtatgtcagcaagaatgtcatctccagcgaacatattgtggagcgcgaggccgagacgtctttcagcacgtcccattatacttcaactgctcatcattctactacagtgactcagactccttcacattcttggtccaatggacataccgagtccatcttgtctgaaagtcattctgtgattgtaatgtctagcgttgaaaactccagacactcctccccgactggcggacctcgaggtcgcttaaatggtactgggggaccacgggaatgtaactctttcctcagacacgccagagaaactcctgatagttacagagattcaccacattccgagcgatatgtctctgctatgacaactccagcaaggatgagccctgtcgacttccacaccccatcctccccaaagtcaccgccaagcgagatgagccctcctgtgtcctccatgacagtgtcaatgccgtccatggccgtgagtccatttatggaggaagagcgtccgctcctcttggtcacacccccacggctgagggaaaagaaatttgaccatcacccccagcagttcagctctttccaccataatcctgcacatgattccaacagccttccagcaagtcctttgagaatcgtagaggacgaagagtacgagacgacgcaggaatatgaacccgctcaagagccggtgaaaaagctggctaacagtagacgcgctaaacgcacaaaaccgaatggccatattgcaaaccggctggaggttgattctaatactagcagtcagagttccaactccgagagtgagactgaagacgagagggtaggggaggacaccccgtttttgggaatccaaaacccactcgccgcttcactggaggccacccccgctttccgcttggctgactcccgaaccaaccccgcgggaagattttcaacacaagaggagatccaggcccgtctgtcttctgtgatagctaaccaagacccaatagcggta

SEQ ID NO: 177006 - DNA, 1911 bp, Artificial Sequence
  derived and/or modified sequence
atgtcagagcgaaaggaaggacgaggtaagggaaagggtaagaagaaggagcgcggcagcggcaagaaacctgaatccgcagcagggtctcagtcccctgccttgcctcccaggttgaaggagatgaagtcacaggaatcagcggcgggcagcaaattagtgctgaggtgcgaaacaagcagtgagtacagttccctgagattcaaatggtttaaaaacggcaacgagttgaaccggaagaacaagccgcaaaacatcaaaatccaaaagaagcctggtaagtcagagctgcggatcaacaaagcgtcacttgccgactcaggtgaatatatgtgtaaggttatttccaagcttggtaatgattcagcatctgctaacattactatagtcgagtcaaacgaaataataacgggaatgccagcgagcacagagggggcctatgtctctagcgagagtcctatacgtatcagcgtgtccacagagggggcaaatacctccagcagcacctccacatcaaccacaggcacgtcccacttggtcaaatgtgctgagaaggagaaaactttttgcgttaatggtggagagtgtttcatggtgaaggacctttccaatcccagtcgctacttgtgtaaatgccccaatgaattcactggggacagatgtcagaattacgttatggcctcgttctataaggccgaagagctctaccaaaagcgagtactgactatcactgggatctgcatagccttgctggtggtcggaattatgtgcgtggttgcatattgtaaaacaaagaagcaacgaaaaaaactgcatgataggctgcgccagtcactgcgtagcgaacgtaacaacatgatgaacatcgcaaatggcccgcatcatccaaatcctcctccggagaacgtgcagctggtgaaccaatatgtgtcaaagaatgttatatcttcagagcatattgtagaacgcgaagcagaaacttccttttcaacctcccattataccagtaccgcacaccacagcacaaccgtcactcagacaccttcccattcctggagtaacggacacacggagagtatcctgtcggagagccacagcgtgatcgttatgagtagtgtggagaattcacgccacagcagtccgactggcggcccccgcgggcgtctaaacgggactggaggaccccgcgaatgcaatagtttcctgaggcacgctagggaaacccctgattcataccgggactcaccacactcagagcgctatgtgagtgcaatgacaacaccagctcggatgagccctgtggacttccacacgcccagttctcctaaaagccctccatccgaaatgtctcctccggtaagctctatgacggtgtcaatgccctcaatggcggtttccccttttatggaggaggagaggcccctgctgctcgtgaccccaccccgactgagggagaaaaagttcgaccaccacccccaacagttctcatcatttcaccacaatcccgcacacgactctaacagtcttccggcgagcccattgcgcatcgtcgaggacgaagagtacgagaccactcaggaatatgagccggctcaggagcccgtgaagaagctggccaactcccgacgggctaagcgtacaaagcctaatgggcacatagccaataggctagaggttgactcaaacacttcctctcagtcgtctaattcagagagcgagacagaggacgagagggtgggggaagatacacctttccttggcatccaaaatcccttggctgcgagtctggaagccaccccagctttcaggctggcagattctagaacaaacccagccggccgattctctacacaagaagagatacaggcgaggctctcatccgttatcgccaaccaggatcctatcgccgtg

SEQ ID NO: 177007 - DNA, 1911 bp, Artificial Sequence
  derived and/or modified sequence
atgtccgaacgtaaggagggtcggggcaaaggtaagggaaaaaaaaaggaaagaggcagcgggaaaaaacccgagagcgctgccggatctcagtcccccgccctaccacctcggctcaaagagatgaagagccaagaatcagctgctgggtctaagttagtcctcagatgcgagacctcatcagaatactcttcattgcgcttcaaatggttcaagaacggcaatgagctgaataggaagaacaagccacagaacataaagattcagaagaagcctggtaagagcgaactgaggataaacaaggccagcttagccgactccggggaatatatgtgtaaggtgatctctaagctgggaaatgattcagcctctgctaacattaccatagtcgagagcaatgagatcatcactggaatgccagcttccaccgagggagcctatgtgtcatccgagtctccaatccgcatttccgtctcaactgagggcgccaatacgtcttcatcaacaagcactagtactactgggacctctcatttagtgaagtgtgccgagaaggaaaaaactttctgtgtgaatgggggcgaatgcttcatggttaaagatttgagtaatcccagtcgttatctctgtaaatgcccaaatgagttcacgggcgaccggtgtcagaattacgttatggccagtttttacaaagctgaggagctgtatcaaaaaagagttctaaccatcacgggtatttgtatagctctgcttgtggtcgggattatgtgtgttgtagcttactgcaagactaaaaagcaacggaaaaaattacatgacaggctgaggcagtcactgcgctccgagcgcaacaacatgatgaatatagctaatggaccacaccacccgaaccccccccccgagaatgtccagctagtaaaccagtacgtgagcaagaatgtgatcagctccgagcatatcgtggaacgcgaagctgagacttccttttctacttcccattatacttctacggcacaccatagcactaccgtaactcaaacacctagtcattcttggagcaacgggcacacagagagcatcttgtccgaaagtcattcggtgattgtaatgagctcagttgagaattctcggcacagctcaccgacaggcggccctaggggcagactcaatggtaccggaggcccaagagagtgtaactctttcttgagacacgcacgggaaactcctgactcctatcgggattccccacatagcgagcgctacgtcagcgccatgacaacccccgccagaatgagtcccgttgattttcacacacccagctcccccaagtctcctccatctgaaatgtccccacccgtgagcagcatgaccgttagtatgccatccatggctgtctcgccatttatggaagaagagcgtcctttgctcctcgtaactccacctagactacgcgagaaaaaatttgaccatcatccccagcagttctcttcctttcaccacaatccagcccacgatagcaactctcttcccgcgagtccactgcggatagtggaggatgaggagtatgaaaccacccaggagtacgagccggcacaggagccagtgaagaaactggcgaactcgcgacgcgctaaaaggactaagcccaacgggcacatcgcaaataggctggaagtggattcgaacacctcatcgcagtcttccaacagcgagagcgaaacggaggacgagcgggttggcgaagacactccattcctcggaattcagaacccgctggccgcttctcttgaggcaacccccgcttttcgccttgccgatagtcggacgaaccccgctggccgctttagcacacaggaggagattcaggcaaggttaagcagcgtaattgcgaaccaagacccaatcgctgtt

SEQ ID NO: 177008 - DNA, 1911 bp, Artificial Sequence
  derived and/or modified sequence
atgtccgagagaaaagagggcaggggaaagggaaaggggaagaagaaggagcggggctccggaaaaaagcctgaatccgcagcaggatcgcagtctccggcgctgccgccaagactgaaggagatgaagtcacaggagtcggcggcgggatccaagctcgtgctgagatgcgaaacttccagcgagtactcgtcgctgagattcaaatggttcaagaacggaaatgagctgaacaggaagaacaaaccacagaacataaagatccaaaagaagcctggaaaaagcgaacttcggattaacaaggcttccttggctgattcaggggagtacatgtgcaaggtgatctccaagctgggaaacgattcggcgtcagcgaatatcacgatcgtcgaatcgaatgagatcatcactggaatgccggcctccacggaaggcgcctatgtgtcgtcggagtcccccatcagaatctccgtgtccaccgagggagcaaacacctcgtcgtcgacttcaactagcaccactgggacctcccacctggtgaagtgcgcggaaaaggaaaagacgttctgcgtcaacggaggcgaatgtttcatggtgaaggacctctcaaatccgagccggtacctgtgcaaatgtccaaacgagttcaccggagatcgctgccagaattacgtgatggcatcattttacaaagccgaagagctgtaccagaaacgggtcctgactatcactggcatctgcatcgccctcctggtcgtcggaatcatgtgcgtggtggcatactgcaagaccaagaagcagaggaagaaactgcacgaccgcctgagacagtcgctcagaagcgagaggaacaacatgatgaacatcgcgaacggaccacaccacccgaatccgccgcctgaaaacgtgcaactggtgaaccaatacgtgagcaaaaatgtcattagcagcgagcacatcgtggaaagggaagcggagacgagcttttctacctcgcactacacttccaccgcccatcattctaccaccgtgacccagactccgtcacactcatggtcgaatggtcatacggaatcgattctgtccgagagccactccgtcatcgtcatgtcgtcagtcgagaactcccggcactcaagcccgaccggaggcccccggggccggcttaatggaaccggagggccacgggagtgcaattccttcctgagacatgcaagagagactccagacagctacagggactccccacattccgagcggtatgtgtcagctatgactacgccggcacgcatgtccccagtggattttcacaccccgtcgtcgccaaaatcgcctccctcggagatgtcgccaccagtgtctagcatgactgtgtcgatgccgtccatggccgtgagcccgtttatggaagaagagcgcccacttttgctggtcaccccaccgcgcctccgggagaagaaattcgaccaccacccccagcagtttagctcattccatcataacccggcgcacgattcgaattcccttccggccagccccctgcgaatcgtggaggacgaggagtacgaaaccacccaagagtacgaacccgcccaagaaccggtgaaaaagctggccaattcgcgccgcgctaagaggaccaagccaaacggacacattgcgaataggctggaggtggacagcaacacctcaagccagtcatccaattcggagagcgagactgaggacgaacgcgtgggtgaagataccccattcctcggtatccagaacccgttggctgcatccctggaagcaactcccgcgtttcggctggcggactccagaactaacccagcgggacgcttttcgacgcaagaggagatccaggcccgcctgagctccgttatcgcgaatcaggaccctatcgcggtg

SEQ ID NO: 177009 - DNA, 1911 bp, Artificial Sequence
  derived and/or modified sequence
atgtctgagaggaaagaggggagggggaagggtaaagggaagaagaaggagcgaggctctggcaagaagcctgagagcgccgccggaagtcagtcacccgcgttgcctcctcgcctcaaggaaatgaagtcccaggaatccgccgccggatcgaagttagtgctgcggtgcgagacttcctcagaatacagctctctgaggtttaaatggttcaagaatgggaatgaacttaaccgtaagaataagcctcagaacatcaaaatccaaaaaaagccaggcaaaagtgaactgaggatcaataaggcctcattggctgacagcggagagtatatgtgcaaggtgatatccaagctcggtaacgatagcgctagtgccaatattaccatcgtggagtccaacgagatcattactggcatgcctgccagcactgagggagcttacgtcagtagcgagagccctatccgaatttctgtctcaactgagggtgcaaatacaagttcctccacctcaacaagcacaacagggacctcccaccttgtgaagtgcgccgagaaagaaaagacattctgtgtgaatgggggagaatgctttatggttaaggacttgagcaatccgagccgctatctttgcaagtgcccgaacgagtttacgggagacaggtgtcagaattacgttatggcttctttttacaaggcagaagaactatatcagaaacgggtgctcacgattaccggaatctgcatcgccctcctcgtggttggtattatgtgcgtcgtcgcatactgcaagactaaaaaacagagaaaaaagctgcacgaccggctgcggcagtcgttgaggtctgaaaggaataacatgatgaacatcgccaacggtccccatcaccctaatcccccaccggagaatgtgcaactggttaaccagtacgtttctaagaatgtcatctcgtccgagcacatcgtcgagcgggaggccgagacctctttcagtacctcacactatacgagtactgcccaccatagcacaaccgtgacgcaaactccctcgcactcttggagtaatggacacactgaaagcatcctgtccgaatcccactccgtgatcgtgatgtcttccgtcgaaaactccagacattcctctcccacaggtggacctaggggtcggctaaatggaaccggtggtccccgcgagtgcaacagtttcctgaggcatgcgcgggaaacaccagacagctaccgggatagtccgcattccgagcggtacgtctctgccatgactactcctgctcgaatgtctccagtcgatttccacacacccagcagcccaaagagtccgccatctgaaatgtcacctcccgtctctagcatgaccgtgtcaatgccatccatggcagttagtcctttcatggaggaggaacggcccttgctgttagtgactcctccccggctgcgggaaaagaagtttgaccatcaccctcagcagtttagctcattccaccacaaccccgcccacgatagcaactctcttcccgcttctccattacggatcgtcgaagacgaagagtatgaaacaactcaggagtatgaaccggcccaggagccagtaaaaaaattggctaacagccgtagagctaaacgcacgaagccaaatggacacattgcaaataggctggaggtagattcaaatacctcatctcagagctctaacagcgaaagtgagaccgaggacgaaagggtaggggaggacacccccttccttggtattcagaaccccctggctgcgagcctcgaggccactccagcttttcgtctggccgattcgagaacaaatccagccggacggttttccactcaggaggagattcaggcccgcctctcctccgtgatcgcgaatcaggaccccattgccgtg

SEQ ID NO: 177010 - DNA, 1911 bp, Artificial Sequence
  derived and/or modified sequence
atgtcggagagaaaagaaggtcgaggcaaagggaaaggaaagaagaaggaacgggggtcaggaaagaaacctgagtcggcggcagggagccagagcccagccctccctccaagactgaaagaaatgaagtcccaagaatccgcagcaggatcgaagctggtactgcgttgtgaaaccagctcggagtactcatccctgcggtttaagtggttcaaaaacggcaacgagctgaacaggaagaacaaacctcaaaacatcaagatccaaaagaagcccggtaagtcagagttgcgaattaacaaagcatccctggcagacagcggggaatacatgtgtaaggtcatatccaaactgggaaatgattcagcatccgcgaacattaccattgtggaaagtaacgagattatcacggggatgcctgccagcactgaaggtgcctacgtcagcagcgaatcaccaatcaggatttcggtgagcaccgaaggagcgaacaccagctcatcgacctccaccagcactaccggtacttcccatttggtgaaatgcgcagagaaggaaaagacgttttgtgtgaacggaggtgaatgttttatggtcaaggatcttagcaatccgtcgcggtacctgtgtaagtgtcctaatgagttcaccggagatagatgccagaattacgtgatggccagcttttacaaggccgaggaactgtaccaaaagcgcgttctcaccataaccggaatctgcatagcacttctggtggtgggtataatgtgcgtggtcgcttattgtaagactaagaaacaaagaaagaagttgcatgataggttgcggcagagccttcgatcagaacgaaacaacatgatgaacatcgccaatggaccccaccaccctaaccctcccccagagaatgtgcagcttgtcaaccaatatgtgtcgaagaatgtgattagctccgaacatattgtggaaagagaggccgaaaccagcttttcgacctcacattacacttccactgcgcaccattcaacgactgtgacgcagaccccgtctcattcgtggtcaaacggccacaccgagagcatcctttccgaatctcattccgtaattgtgatgagctcggtggaaaatagccgacatagctcgcctacgggtgggccacgaggcagattgaatggaaccggcggtccgcgggagtgcaattcctttctgcgacacgcgcgcgaaaccccggattcctacagggattcccctcattccgagagatacgtatcggcaatgactaccccagcgagaatgtccccagtggattttcatactcctagctcgcctaaatcccctccatcggagatgagcccacctgtttcgtcaatgaccgtgtcaatgccctcgatggcagtctcgccgttcatggaagaagaacgccctctgctccttgtcactccgcccagacttcgtgaaaagaaattcgaccatcacccccaacagttttcgtccttccaccataatcctgcacacgattctaactcgcttcccgcttcccctctcagaattgtggaggacgaggaatacgagactactcaggaatacgaaccggcacaggaacctgtgaagaagctggcaaattcgcgtcgagcaaagcgcacgaagccaaatgggcatatcgccaaccgcctcgaagtggactctaacacctcgtcgcaaagctcaaacagcgaatcagaaacggaagatgagagggtgggcgaggacacccctttcctgggaatccaaaatccccttgccgcatccctggaagcgactcctgcgttccgcctcgcagatagcagaactaacccagcaggtcgctttagcacccaagaagaaattcaggctagacttagctcagtgattgctaaccaagaccctattgcagtt

SEQ ID NO: 177011 - DNA, 1911 bp, Artificial Sequence
  derived and/or modified sequence
atgagtgaacggaaggaagggcgggggaaagggaaagggaaaaaaaaagaaagggggtcagggaaaaagcctgaatccgctgcagggagtcagtcgcccgccctacctccacggctcaaagagatgaaatctcaggaatctgcagctgggtccaaactcgttctccggtgtgaaacatcttccgaatattcaagtttaaggtttaagtggttcaaaaatggaaatgaactaaacagaaaaaataaaccccagaatataaaaatacagaaaaaacccggaaagagtgaactaagaatcaataaagcctcactagcggatagtggggaatatatgtgtaaagtaatatctaagctcggaaatgattctgcttctgctaatataacaatagtagaatccaatgaaataatcacagggatgcctgccagtactgaaggggcttatgtttcttccgagtcacctataagaatttccgttagtactgaaggggcgaacacgagttcaagtacatcaacatctacaacaggaacttctcatctggtcaaatgtgcggaaaaagaaaaaactttctgtgtcaatgggggggagtgtttcatggtgaaagatttatcgaacccatctcgctatctttgcaagtgccctaatgaatttacaggggatcgatgccagaactatgttatggcctcgttctataaagccgaagaactctatcaaaaacgggtccttacaattacaggaatctgtattgcacttctagttgtagggataatgtgtgtcgtagcctactgtaaaacaaaaaagcagagaaaaaaactacacgaccgcctgaggcagagtcttaggagtgaacggaataacatgatgaatatcgcaaatggaccccatcatccaaacccaccccccgaaaacgtgcagctagtcaatcaatacgtgtcgaaaaacgttatctcatctgaacatatagttgaacgagaagctgaaacatcttttagtacatcccactacacttctacagcgcaccattctactacagtaactcagacaccaagtcactcttggtctaacgggcacacagaatcaattctgtctgaatcccactcagtcatagttatgagttccgtggaaaattcacgacactcttcccccactgggggacctagagggaggctgaacggaactggggggcccagggaatgcaactcttttctgaggcatgcccgggaaacacctgattcctatcgagacagtcctcattctgaacggtatgtatctgccatgacgactccagctcggatgtctcctgtggatttccacactcccagttctcctaaatcccctcccagtgaaatgtcccctcccgtctcatcaatgacagttagtatgcccagtatggcagtctctccctttatggaagaagaacgccccttgctcctcgttactccacctcgactgagggaaaaaaaatttgatcatcatccacagcagtttagttcctttcaccacaatcctgctcatgatagtaatagtttacctgcatctcctctccgaatagtggaagatgaagaatatgaaactactcaggaatatgaaccagcccaggaacccgtgaaaaagctcgctaattctaggcgcgcaaaacgaacaaaaccaaacgggcacatcgccaaccggctggaagtggattctaacacatcctctcagtcatccaattcagaatctgaaacagaagatgaaagagtgggagaggacacaccattcttagggatccagaaccccctcgctgctagtctagaagccactcctgcttttcgactcgcagactcaaggactaaccctgccggacgattctcaacacaggaagagatacaagctcgcctgtcctctgtgatagcaaaccaggatcctatagccgtg

SEQ ID NO: 177012 - DNA, 1911 bp, Artificial Sequence
  derived and/or modified sequence
atgtcagaacgcaaggagggtcggggaaaggggaagggtaagaaaaaggaaagaggatccggtaaaaagcctgagtccgcagcaggtagccaatcaccggctctcccccctcgtcttaaggaaatgaaatcccaggaatcagcagcaggctcaaaacttgtgcttagatgtgaaacctcgagcgagtactccagcctgaggttcaaatggtttaagaatggaaacgagctgaatcgaaaaaacaagccacagaacatcaagattcaaaagaagccgggtaaatccgaactgaggatcaataaggcatcgctggcagattcgggagagtatatgtgtaaagtcatatccaagctcggaaacgactccgcatcggcaaacatcaccatcgttgaatccaacgagatcataaccggaatgcctgcatcaaccgaaggggcctacgtatcgtccgagtccccaatccgaatttccgttagtactgaaggagcaaatacttcatcctcgacctccacttccaccactgggaccagccacctggtgaagtgcgcggagaaggaaaagactttttgtgtgaacggaggcgagtgctttatggtcaaggacctgtccaacccttcgaggtacctgtgcaaatgtcctaatgagtttaccggcgatagatgtcaaaactacgtcatggcgagcttttacaaggctgaagaactttaccagaagagggtgcttactatcaccggcatttgcattgcacttttggttgtcggtattatgtgtgtggttgcctactgtaaaacgaagaaacaaagaaagaaactgcacgataggctgcgtcagagccttagatcagagcgtaacaatatgatgaatatcgcaaacggacctcaccaccccaatccccctcctgaaaatgtccaacttgtgaatcaatacgttagcaagaacgtcatttcatcggaacacattgtcgagcgggaagccgaaacctccttttccacttcacattacacctccactgcgcatcacagcaccactgtcactcagactcctagccactcctggtctaacggccataccgagtccatcctttcggaatcgcattctgtaatcgtgatgtcgagcgtggaaaattccagacattcatcccccactggaggccctaggggtcggcttaacggaaccggtggtccgcgcgaatgtaactctttcctgcgccatgcaagagagactcccgatagctaccgcgactccccccattcggaacgttatgtgagcgcaatgactactcccgctcgcatgagccctgtggactttcacactccatcaagcccgaagtcacctccctccgaaatgtcccctcctgtctcgagcatgacggtgtcgatgcctagcatggcagtgtcaccatttatggaggaggaacgtccgcttttgctggtgactccccctcgactgagggaaaagaaatttgatcatcatcctcagcagttctcgagcttccatcataatcctgcccatgactcgaactccctgcctgccagcccactgaggattgtggaagatgaagagtacgaaaccactcaagaatacgagcctgcacaagaacctgtgaagaagctcgcaaattcgcgacgggctaagaggaccaagcccaacggacatatcgctaaccgtctggaggtggattcgaacacttcgtctcaatcctccaactcggagtccgagactgaagatgaaagggtcggcgaggacacccccttcctggggattcaaaatccactcgcagcctccctcgaagcaaccccagcctttagactggctgattcccgaaccaacccagccggtcgcttctcaactcaggaggaaatacaagcaagactttctagcgtgattgctaatcaggatccaatcgccgtg

SEQ ID NO: 177013 - DNA, 1911 bp, Artificial Sequence
  derived and/or modified sequence
atgtcggaacgaaaagaaggtcgtggtaaaggtaaaggtaaaaaaaaagaacgaggttcgggtaaaaaaccggaatcggcggcgggttcgcaatcgccggcgttaccgccgcgattaaaagaaatgaaatcgcaagaatcggcggcgggttcgaaattagttttacgatgtgaaacgtcgtcggaatattcgtcgctacgatttaaatggtttaaaaatggtaatgaactaaatcgtaaaaataaaccgcaaaatataaaaatacaaaaaaaaccgggtaaatcggaattacgaataaataaagcgtcgttagcggattcgggtgaatatatgtgtaaagtaatatcgaaactaggtaatgattcggcgtcggcgaatataacgatagttgaatcgaatgaaataataacgggtatgccggcgtcgacggaaggtgcgtatgtatcgtcggaatcgccgatacgtatatcggtatcgacggaaggtgcgaatacgtcgtcgtcgacgtcgacgtcgacgacgggtacgtcgcatttagtaaaatgtgcggaaaaagaaaaaacgttttgtgttaatggtggtgaatgttttatggttaaagatctatcgaatccgtcgcgatatttatgtaaatgtccgaatgaatttacgggtgatcgttgtcaaaattatgttatggcgtcgttttataaagcggaagaactatatcaaaaacgagtattaacgataacgggtatatgtatagcgctattagtagtaggtataatgtgtgtagttgcgtattgtaaaacgaaaaaacaacgtaaaaaactacatgatcgtttacgtcaatcgttacgatcggaacgtaataatatgatgaatatagcgaatggtccgcatcatccgaatccgccgccggaaaatgtacaattagttaatcaatatgtatcgaaaaatgtaatatcgtcggaacatatagtagaacgagaagcggaaacgtcgttttcgacgtcgcattatacgtcgacggcgcatcattcgacgacggtaacgcaaacgccgtcgcattcgtggtcgaatggtcatacggaatcgatattatcggaatcgcattcggttatagtaatgtcgtcggtagaaaattcgcgtcattcgtcgccgacgggtggtccgcgtggtcgtttaaatggtacgggtggtccgcgtgaatgtaattcgtttttacgacatgcgcgtgaaacgccggattcgtatcgtgattcgccgcattcggaacgttatgtatcggcgatgacgacgccggcgcgaatgtcgccggttgattttcatacgccgtcgtcgccgaaatcgccgccgtcggaaatgtcgccgccggtatcgtcgatgacggtttcgatgccgtcgatggcggtttcgccgtttatggaagaagaacgtccgttattattagtaacgccgccgcgtttacgtgaaaaaaaatttgatcatcatccgcaacaattttcgtcgtttcatcataatccggcgcatgattcgaattcgctaccggcgtcgccgttacgtatagttgaagatgaagaatatgaaacgacgcaagaatatgaaccggcgcaagaaccggttaaaaaattagcgaattcgcgacgagcgaaacgaacgaaaccgaatggtcatatagcgaatcgactagaagttgattcgaatacgtcgtcgcaatcgtcgaattcggaatcggaaacggaagatgaacgagttggtgaagatacgccgtttttaggtatacaaaatccgttagcggcgtcgttagaagcgacgccggcgtttcgattagcggattcgcgtacgaatccggcgggtcgtttttcgacgcaagaagaaatacaagcgcgactatcgtcggtaatagcgaatcaagatccgatagcggtt

SEQ ID NO: 177014 - DNA, 1911 bp, Artificial Sequence
  derived and/or modified sequence
atgagcgaacgtaaggaaggtcggggaaaggggaaggggaagaagaaggaaaggggatccggtaagaagcctgaatcagcagcgggatcacaaagccccgctcttccgcctagactgaaggaaatgaagagccaagagtcggcagccggtagcaagttggtgctgaggtgcgagacttcgagcgagtatagctcgctgagatttaagtggttcaagaacggtaatgagttgaacagaaaaaacaaaccacagaacataaagattcaaaagaaacctggcaaatctgaacttcggatcaacaaagcgtcgctggcagactccggcgaatacatgtgtaaggtcatcagcaagctcgggaacgactcagccagcgcaaatatcaccattgtcgaatccaatgagattatcaccggaatgcctgcatcaaccgaaggcgcatacgtgtcaagcgaatccccgatcagaattagcgtctcgaccgagggagcaaacacctcatcatcgacttctacctccactaccggaacttcccacctcgtgaagtgtgcagagaaggagaaaacgttctgcgtgaacggtggggaatgctttatggtgaaggacctctcaaacccgagccgatacctgtgtaaatgtcctaatgaatttactggagataggtgtcagaactacgtgatggcttctttttacaaggcggaagaactttaccagaagcgggtgctgacgattacgggaatatgtattgcattgttggtggtgggcattatgtgtgtcgttgcttactgcaagacgaagaagcagcggaagaaactccatgacagattgcgccaatccctgagatcggaaaggaacaacatgatgaatatcgcgaatggccctcatcaccctaatcctcctccagaaaacgtccaacttgtcaaccaatacgtgtcgaagaacgtgatctccagcgaacacattgtggaaagagaagccgaaacctctttttccacttcccattacactagcacggcccaccattccactaccgtcacccaaaccccttcacactcgtggtcgaacggacataccgagtcaattctttccgagtcgcattcagtgatcgtgatgtcctcagtggaaaactcacgtcattcgagccccactggcggtcccagaggacgcctgaatggcaccggtggacctagagaatgtaactcgtttctgagacatgcaagagaaactccggacagctacagagattcgccccattccgaaaggtacgtttcggcaatgaccactccagcacgcatgtcgcctgtcgattttcatactcctagctcgccaaagtcgcctccatcggaaatgagcccacctgtgtcgtcaatgaccgtgtccatgcctagcatggccgtcagcccgttcatggaggaggagaggccactgcttcttgtgacgcccccgaggcttcgcgagaaaaagttcgatcatcatccacaacagttctcgtcgtttcatcataaccctgcacatgattcaaactcgctgcctgcctcaccactgaggatcgtggaagatgaagaatacgaaaccacccaggaatacgagccagcacaggaacccgtgaagaagctcgcgaactcacggcgagcaaagagaactaagcccaacgggcacatcgcaaacagacttgaggtggattccaacacctcgtcccagtcctcaaactcggagtccgaaaccgaggatgaaagagtgggagaagataccccttttctcgggatccaaaatcctcttgcagcttccttggaggcaaccccagcgttccgcctggccgatagccggactaaccctgcaggacgcttctcaacgcaggaagaaattcaagcacggctttctagcgtcatagcaaaccaagaccccattgcagtg

SEQ ID NO: 177015 - DNA, 1911 bp, Artificial Sequence
  derived and/or modified sequence
atgagtgagcgtaaagaaggccgtggcaagggcaaaggcaaaaaaaaagaacgcggctctggaaaaaaaccggaaagtgcagcaggcagtcaaagcccggcgctccctcctcgcctgaaagagatgaagagtcaggaatcagctgcgggatccaaacttgtgctgcggtgcgaaacatcatccgaatatagctcattacggtttaaatggtttaaaaacggtaacgaacttaatcgtaaaaacaagcctcaaaacattaaaattcagaaaaagccgggaaaatccgagctgagaattaacaaagcgtctctcgctgactctggcgagtatatgtgcaaggtcatcagcaaactggggaacgacagcgcgtccgccaacatcaccattgtagagagcaatgaaattattacaggaatgccagcgtcgaccgaaggtgcatatgtctcatcagaatccccaataaggatctctgtatcaacagaaggtgccaatacatcctcgtcaacttcgaccagcacaactgggacgagccatctcgttaaatgtgctgaaaaagaaaagactttctgtgtgaatggaggtgagtgttttatggtcaaagacctttcaaacccttctcgttatctttgtaaatgcccgaacgaatttacaggcgatcgctgtcagaattacgtgatggcatccttttacaaagccgaggagttatatcaaaaacgtgtccttacgataacaggaatttgcattgctctgctggttgttggtatcatgtgtgtagtggcatattgcaaaacaaaaaagcagaggaagaagctccatgaccggcttcgccagtctcttcgctctgaacgcaataatatgatgaacatcgcaaatgggccccaccatcctaatccaccaccggagaacgtacagctcgtcaaccaatatgtgtctaaaaatgttatttcatcagagcatattgtcgaacgcgaggctgagacctctttttcaacatctcattatacatctacagcacaccacagcacgactgtcactcaaacaccgtctcactcgtggtctaacggacatactgaaagcatcctgtctgagtctcattctgttatagtgatgagttcagtggagaattcgcgtcattcctcgcctacaggcggtccgagaggccgtcttaatggcacagggggtccgagagaatgtaatagctttctgcgtcatgcgagagaaactccagattcttatcgtgattcgccgcatagtgaaagatatgttagcgctatgaccacgccggctcgcatgtctccagtagatttccatacgccgtcgagccctaaatcaccgccgtctgaaatgtcacctccagtttcatcaatgacagttagcatgccttcaatggccgtgtcaccattcatggaagaggaaagaccccttttactcgttaccccgccgcgcttgcgcgaaaaaaagtttgaccatcatccgcagcagttcagctcctttcaccacaacccagcgcatgactcaaacagcttgccagcctcgccgctcagaattgttgaggatgaggaatacgaaacgacacaagagtatgaacctgcacaggagccggtcaaaaaactggcaaactctcggagagcaaagcgcacgaaaccgaacggccacattgccaatcgattagaagttgatagcaatacatcttcccaatcctcgaactcagagtccgaaacagaagatgaacgtgtgggggaagacacgccgtttctgggtattcagaatccgctggccgcatctcttgaggcaacaccggcatttcgattggcggatagccggacgaatcctgctggccgattttcaacacaagaggaaatccaggcgcggctgtcaagtgtcattgcgaatcaagacccgatcgccgtg

SEQ ID NO: 177016 - DNA, 1911 bp, Artificial Sequence
  derived and/or modified sequence
atgtcggagcggaaggaaggacgcggaaagggtaaggggaaaaagaaagagagaggatccggtaagaagccagaatcggcagccggctcccaatcacctgccctcccacctcgacttaaggaaatgaaatcccaagaatcggctgcgggttcaaaactggtcttgcgatgtgagacgtcatcggagtactcatcactcaggtttaagtggttcaaaaacggtaacgaactgaatcgtaaaaacaagcctcagaacattaagatccagaagaaaccaggaaaatccgagctgcgaattaacaaggcatcgcttgcagatagcggtgaatacatgtgtaaagtgatctcaaagctgggcaacgattcagcaagcgccaacattaccattgtggaatcgaacgagatcattaccggtatgcctgcgtccactgaaggagcatatgtctcctcagaatcgcctattaggatctcagtctcgacggaaggcgcgaatacgtcctcctccacctcaacctcgaccacgggaacttcccatctcgtgaagtgcgcagagaaagagaaaaccttctgtgtgaatggtggtgagtgttttatggtgaaagacctgagcaacccgtcgaggtacctgtgcaagtgtcctaatgaatttaccggggacagatgccagaactatgtgatggcttctttttacaaggcggaagaactttaccaaaagcgcgtacttaccattaccggaatctgcattgcccttctggtcgtgggaataatgtgtgtggtcgcatactgtaagaccaaaaagcagagaaagaagctccatgatagactgcgccagtcattgcgcagcgaacggaataacatgatgaacatcgcgaatggcccgcatcatccaaatccaccgcctgagaacgtgcaactcgtgaaccaatacgtgtcgaagaatgtcattagcagcgagcatattgtagagagagaggcagaaacttctttttcaacttcgcattacacttcgactgcgcatcactccactaccgtgacccagactccttcgcattcgtggtccaacggtcacaccgaatcgatactgtctgaatcccattcggtgattgtcatgtcgtcggtcgagaattcgagacattccagccccactggtggtccaagaggcagactcaacggtaccggtggcccccgtgagtgcaattccttcctgagacatgcaagagaaacccccgactcgtaccgcgattccccacactccgaacggtatgtgtccgcaatgaccacgccagcccggatgtccccagtggattttcacactccgtcatcgcctaagtcccctccctcggaaatgtccccacctgtgtcgtcgatgactgtgtcgatgcctagtatggccgtgtccccttttatggaagaagaaagacctcttctgctcgtgacccctccccgcctcagggaaaagaagtttgatcatcatccacaacaattttcgtcttttcatcataaccctgcacatgactcaaattcacttccagcgtcccccttgcgcatagttgaagatgaagagtatgaaaccacccaagagtacgagccagcccaagagcccgtgaagaaacttgcaaatagccgacgtgcaaagcggacgaaacctaatggacacatcgcaaatagactggaggtggattcaaatacttcctcgcaatcgtccaattccgagtccgaaaccgaagatgaacgcgtgggggaagatactcccttcctcggtatccaaaaccccctggcagcttcgcttgaagcaactccagcatttcgtttggctgattcacgaaccaatcccgccggaaggtttagcacccaagaagaaattcaggcgcgcctctcgtcagtgattgcaaaccaagaccccattgcagtg

SEQ ID NO: 177017 - DNA, 1911 bp, Artificial Sequence
  derived and/or modified sequence
atgtccgaacgcaaagaaggtcgcggtaaaggaaaagggaaaaagaaggaaagagggagcgggaagaaacccgagtccgcggccggctcccaatctccggcccttcctccacggttgaaagagatgaagtcccaggaatcggccgccggatcgaaactggttctgagatgcgagactagttcagaatatagtagtcttcgctttaagtggtttaaaaatggaaacgagcttaacaggaaaaataaacctcaaaacataaagatccaaaaaaagcctggcaagagtgagctaagaattaataaggcgtcattggctgattccggtgaatacatgtgtaaggtcattagtaagctcggaaatgactctgccagtgcaaatataaccattgtcgaatcgaacgaaatcattacaggaatgcccgcatccaccgagggtgcgtacgtttccagtgagtctcccattcgcatttccgtgtcaaccgaaggggcaaatacttcttcctcgaccagcactagcaccacggggaccagtcacttagttaagtgcgccgagaaagagaaaacattttgcgtgaacggaggagagtgctttatggtaaaagaccttagcaatccgtcaagatacttatgcaagtgccccaatgagttcactggtgacagatgccaaaattatgtaatggcctcattttacaaggctgaggagctttatcaaaaacgagtacttacgattacgggtatctgtattgccttgttagttgtgggtataatgtgcgttgtggcttactgcaaaactaagaaacaacggaagaagcttcatgatcggctccgtcaaagcctcagatctgagagaaacaacatgatgaacatcgctaacggtcctcatcatcctaacccacctcctgagaatgtccagttagttaaccaatacgtatccaagaatgtcatttcttccgagcacatagtggagagagaggctgaaacctctttttcaacctcacattacacgagtactgcacatcattccacaacagtcactcagacaccttctcattcatggtcaaatgggcataccgaatcaatactatcagaatcacatagtgtcatagtgatgtcttccgttgaaaacagcaggcattctagtcccaccggcggtcctaggggaaggttgaatggtactggcggtcctcgagaatgcaacagttttcttcggcatgcaagagagactccggattcatatagagatagtcctcattcagaaaggtatgtgagtgcgatgacaacaccagcacggatgtcacctgtggattttcacacaccatcaagtcctaagtccccaccgtcagagatgtctcccccagtttcctcaatgactgtttccatgcccagcatggcagtaagtccttttatggaggaggagagacctttgcttcttgtcactccccctagactaagggagaaaaagtttgatcaccacccgcagcaattttcttcattccaccataacccggcacatgattccaatagtttgcctgcttctcctttacgaatcgtggaagacgaagaatatgaaacaactcaggagtatgaaccagctcaggaaccggtcaagaagctggctaactcacgtcgtgcgaaaaggacaaaacctaacggtcatatcgcgaataggctggaagtggattccaacacatcatcacaatcctctaatagcgagtcagagactgaagatgagcgagtcggtgaagatactccattccttggtattcaaaaccctttggctgcaagcttggaggccactcctgcattcagacttgccgatagccgaaccaatccggccgggaggttttcgactcaagaagagattcaggctagattgtcatctgttatcgccaatcaagatccaatcgcagtt

SEQ ID NO: 177018 - DNA, 1911 bp, Artificial Sequence
  derived and/or modified sequence
atgtcagaacgcaaggaagggagaggtaagggaaaggggaagaaaaaagagagaggctcaggcaaaaagccagagtcagccgccggctcccaatcgcctgcacttccccctcgactgaaggaaatgaagtctcaagagtccgccgcaggctcgaaacttgtgctgcgttgcgaaacctccagcgaatactcgtcgctgagattcaaatggtttaagaatggtaatgagcttaacagaaagaataagccacagaacattaagattcaaaagaagccagggaagtctgagcttaggatcaataaagcatcacttgcagattccggggagtacatgtgtaaggtgatttcaaagctgggtaacgactctgcctcagcgaatatcaccattgtggaatcaaacgaaatcattactggaatgcctgcttcaaccgaaggggcatatgtctcatcggaaagcccaattcggatctctgtgtccaccgaaggagcaaatacctcgtcgtcaacctcgacttcgaccactggaacctcgcatttggtgaaatgtgcagagaaagaaaagacgttttgcgtcaatggaggtgaatgtttcatggtgaaggatctctcgaacccgtcccggtacttgtgcaaatgtccaaacgaatttactggtgatagatgtcagaattacgtgatggcttcgttctataaagcagaggagctgtaccaaaaaagagtgcttactattaccggcatctgtattgcactcctggtggtcggcatcatgtgcgtcgtggcctactgtaagactaagaagcaacgcaagaaacttcatgacagactccgacaatcactcagaagcgagcgcaacaatatgatgaacatcgcaaacggaccacaccatcccaaccctcctccggaaaatgtccagctggtcaaccagtacgttagcaagaatgtgatctcgtcagaacatattgtcgaacgagaggctgaaacctccttctccacttcgcattatacttcaaccgcacaccactcgaccaccgtcactcagacccctagccattcatggagcaatggccataccgagtcgatcctgtccgagtcccatagcgtgatcgtcatgtcctccgtcgaaaattcccggcattcctcgcctacgggaggtccaagaggacggctcaatggaactggaggaccgagagagtgcaactcgttcctccgtcatgcaagagaaactccagattcgtaccgtgactcaccacatagcgaaagatacgtgtcagcaatgaccactcccgcacgcatgagcccggtggattttcatacgccttcctcacctaagtctccgccctctgaaatgtcgccacccgtgtcgtcaatgacggtgtcaatgcctagtatggctgtgtcaccttttatggaagaggaacggccactgctgctcgtgacccctccaagacttagggagaagaagtttgatcatcaccctcagcagttttcttcgttccatcacaaccccgcccatgatagtaattcattgccggcttcccctctgcgaatcgtggaagatgaagagtatgaaaccacgcaagaatacgagccggcacaggaacccgtgaaaaaactggcaaatagccgccgcgcgaagcgcactaagcccaacggtcacattgcaaacaggcttgaagtggattcgaatacttcctcgcagtcgagcaactcagagtcagaaaccgaggatgagagagtgggtgaagatacccctttcttgggcattcaaaacccactcgcagcgtccctcgaggcgacccctgcctttagacttgccgatagccggactaatcctgcaggtcgtttttcgacccaagaggaaatccaggctcggctgtcctcggtgatcgcaaaccaagatcctattgcagtg

SEQ ID NO: 177019 - DNA, 1911 bp, Artificial Sequence
  derived and/or modified sequence
atgtcggagaggaaggaaggccggggaaaaggaaagggcaagaagaaggagaggggttctggtaagaagccggaatcagctgcaggatcccagagccccgctctgccgccccggctgaaggaaatgaaatcccaagagtcggcggcgggatcgaaactggtcctgaggtgcgagacttcgtcggaatactcatcgctgcgcttcaagtggtttaagaacggaaacgaattgaaccggaagaataaaccgcaaaacataaagatccaaaagaagccgggaaaatctgagctgagaataaacaaggcaagccttgcggattcaggtgaatacatgtgcaaggtgattagcaagctggggaatgacagcgcgtccgcaaacatcactatcgtggaatcaaacgagatcatcaccggaatgccggcaagcactgaaggagcctacgtgtcgtccgaaagccccatcagaatctccgtgtcgaccgaaggagccaacacctccagctccacctccacgtccaccactggaacttcgcacctcgtgaaatgcgccgagaaggaaaagactttctgcgtgaacggaggcgaatgcttcatggtgaaggacctgagcaacccgtcaagatacctgtgcaagtgcccgaacgaattcactggggatagatgccaaaactacgtgatggcttcattctacaaggcagaagagctgtaccagaaaagagtcctcaccatcactggcatttgcatcgccttgctggtggtgggtatcatgtgcgtggtcgcctactgtaagaccaagaagcagagaaaaaagctccatgaccgcctcaggcagtccctccggtcagaacgcaacaacatgatgaatatcgccaacggaccacatcatccgaacccgccgcctgaaaatgtgcagttggtcaaccaatacgtctcgaagaacgtgatctcgtcagaacatatcgtcgaaagagaggcggagacgagcttctccactagccactacacttcgaccgcgcatcattcgactactgtcacccagaccccgtcacattcctggtcgaacggacatactgagtcaatcctttcggaatcacatagcgtgatcgtgatgtcgagcgtggagaactccagacacagttcaccgactggtgggccacggggacgcttgaacggaaccggagggccaagggaatgtaattccttcctgcgccacgcacgcgagacgccggactcgtaccgagactcgccacactcagaacggtacgtgagcgccatgactaccccagcccggatgagccctgtggattttcataccccgagctcgccgaaatcgccgccatccgagatgtcgccacccgtgtcctccatgactgtgtcgatgccgagcatggccgtctcacctttcatggaggaagagcgcccacttcttctcgtgaccccgcctaggctgcgcgagaaaaagttcgaccaccacccgcagcagttctcatcgttccatcataatccggcccatgactcgaactcgctgccagcctcacctctccgcatcgtggaggatgaagaatatgagacgacccaggagtacgaacctgcccaggagccggttaagaaactggctaactcccggcgggcaaagagaactaagcctaatggtcacatcgccaaccggctggaagtcgattcgaacacctcgtcccagtcatccaattcggaatccgagactgaagatgagcgggtgggagaggatactccgttcctgggaatccagaacccgcttgccgcctcgctcgaggcaactcctgccttccgcctggccgattctcgcactaatcctgcgggacgcttttccacccaagaggaaatccaagcccgcctgtcctcggtgatcgcgaaccaagacccgatcgcagtg

SEQ ID NO: 177020 - DNA, 1911 bp, Artificial Sequence
  derived and/or modified sequence
atgagcgagaggaaagaagggcgggggaaggggaaagggaagaaaaaggaacggggatcaggaaagaagccggaatcggcagctggatcgcagtcgccagctctgccgccccgcttgaaggaaatgaaatcacaggagtcagccgcaggatcgaagttggtgctccgctgcgagacgtcgtccgagtactcctccttgcgcttcaagtggttcaagaacggtaatgaactgaacagaaagaacaagccacaaaacatcaagattcagaaaaagcccggaaaatcggagcttcggatcaacaaagcctcactcgcagactcgggtgaatacatgtgcaaggtgatctcgaagctcgggaacgactcagccagcgccaacatcactatcgtggaatcgaacgaaatcatcaccgggatgcctgctagcacggaaggggcctacgtgtcctcggaatcgcctatcagaatcagcgtctcaaccgaaggcgcgaatacttcctcctcaacttccacttccacgactggtacctcacatctggtcaagtgtgccgaaaaagaaaagaccttttgcgtgaacggcggcgaatgcttcatggtgaaagacctctcgaatccttccaggtacttgtgcaaatgcccgaacgagttcactggggaccgatgtcagaactacgtcatggcgtcgttctacaaggcagaggagctgtaccagaagcgcgtgttgactattactggcatttgtatcgctctgctcgtggtgggtatcatgtgcgttgtggcgtactgcaagacgaagaagcagcggaagaaactgcatgataggctgagacagagccttagatcggaacggaataacatgatgaacatcgccaacggaccgcaccacccgaatcctccgcctgagaatgtgcagctcgtgaaccaatacgtgtcgaaaaatgtgatctcctcagagcacattgtggaacgggaagcggaaactagcttcagtacctcacattatacctcaactgcacaccattcgactaccgtgacccagaccccgagccactcctggtccaacggacacaccgagtcaatcctctcagaaagccactcggtgatcgtgatgtcatccgtcgagaacagccgccattcaagccctactggcggaccaagaggacgcctcaacggaaccggagggccgcgggagtgcaactcgtttctgcgccatgcgcgagaaacccctgattcttatcgcgattcgccccactcagagcgctacgtgagcgccatgaccaccccggcacggatgagccctgtcgactttcacaccccctcctctccgaaaagcccaccgagcgaaatgagcccaccggtcagttcgatgactgtgtcgatgccctcgatggccgtgtccccattcatggaggaggaaaggcccctcctgctcgtcaccccaccgagactgcgggaaaagaagtttgatcatcatcctcagcagtttagctccttccatcacaacccggctcatgattcaaactcactgcctgcctcaccactgcggatcgtcgaggacgaagaatacgaaaccactcaagagtacgagccagctcaggaacctgtgaagaagctggccaattcgagacgcgcaaagcgcactaagccaaatggacacatcgcaaatcggctggaagtggatagcaacacctcctcccagtcctccaactcggaatcagagacggaggacgaacgcgtgggtgaggacacgcctttcctgggtatccaaaacccgctggccgccagcctcgaggcaactccggccttccggctggccgactcgcgcaccaaccccgcgggccgcttctccacccaagaggagatccaggccagactgagctccgtgatcgccaaccaagatccgatcgcagtc

SEQ ID NO: 177021 - DNA, 1911 bp, Artificial Sequence
  derived and/or modified sequence
atgagcgaaagaaaggaaggacgcggtaagggaaaaggaaaaaagaaggagcgcggctcaggaaagaagccggagtcagccgcaggctcgcagtccccggccctgcctccgaggctcaaagaaatgaagtctcaggagagcgctgctggcagcaagctggttctgcgctgcgaaacttcatcagagtacagctcgctccgttttaagtggtttaagaacggaaatgagctgaacagaaagaacaagcctcagaatatcaaaatccagaaaaaacccgggaaatccgaactgcggatcaataaggcttctctggccgacagcggtgaatacatgtgcaaagtgatctcaaaactgggtaacgattcagcctcggccaacattaccatcgtcgaatcaaacgaaatcatcacgggaatgccagcgagcactgaaggcgcctacgtgtccagcgagtcgccaatcagaatctccgtctccactgagggcgctaataccagctcctcaacgtctacctccaccactggcacgtcccacctggtgaagtgcgccgaaaaagaaaagactttctgtgtgaatggtggagaatgcttcatggtgaaggacctgtcgaatcctagccggtacctgtgtaaatgccctaatgaattcaccggggacagatgtcagaactacgttatggcttcattctacaaggccgaggaactctaccagaagcgcgtgctgaccatcacgggtatctgcatcgctttgctggtggtgggaatcatgtgcgtggtggcgtactgcaagaccaaaaagcagaggaaaaagctgcatgatagactgcgccaatcactccggtcggagcgcaataacatgatgaatatcgcaaacggcccgcatcaccctaacccgccaccggaaaacgtgcaactggtgaaccaatacgtgtccaaaaatgtgatcagcagcgagcatatcgtggagagggaggccgagacttccttctcgacctcacactacacttcgaccgctcaccattccactaccgtgactcagaccccgtcccacagttggtcgaatggacacactgaatcgatactgtcggaaagccattccgtgatagtcatgtcctctgtggagaattcacggcactcgtcgccgaccggtggaccacgcggaaggttgaacggaaccggaggcccgcgagaatgcaactcattccttcgccacgctcgggaaacgccggacagctaccgggattctccgcacagcgaacgctacgtgagtgcaatgaccactcctgcacgcatgtcgcctgtggattttcataccccatcatcccctaagtcacctccttcggagatgtcgcccccagttagctctatgaccgtgtcgatgccctcgatggcagtgtcaccattcatggaagaggaaagaccgcttctcctggtgactcctccaagactcagagagaaaaagtttgaccatcacccccaacagttcagcagcttccatcacaacccggcgcacgattcgaactcattgccggcatccccactgaggatcgtcgaagatgaggaatacgaaactactcaggagtacgaacctgcgcaggagccagtgaagaagctggcgaacagccgcagggcaaaacggacgaagccgaacggacacatcgcgaaccgccttgaagtggactccaacacttcatcccagtcgtcgaactccgagtcggaaactgaggacgaacgcgtgggagaagatactccgtttctcggaatccagaacccgctggcggccagcttggaggccacgccagcattcagactcgcagattccaggacgaacccagccggccggttctcaacgcaggaggaaattcaagcaagactgtctagcgtgatcgcgaaccaggacccgattgccgtc

SEQ ID NO: 177022 - DNA, 1911 bp, Artificial Sequence
  derived and/or modified sequence
atgagtgaaagaaaggaaggaaggggaaagggaaaggggaagaagaaggaacgtggaagcggtaagaaacctgagtcagctgccggatcacagtcccccgctctgcccccaagactcaaggaaatgaaatcacaagaaagcgccgcaggctcaaaacttgtgctgcgctgtgaaacctcaagcgaatattcgtcccttcgatttaagtggttcaagaacggaaacgagctgaacagaaagaataaaccacaaaacattaagatccaaaagaaaccagggaagtcagagctgagaattaacaaggcctcacttgcagacagcggagaatacatgtgcaaggtcatttccaaactcggaaacgatagcgcgtcggctaatatcactattgtggaatcaaacgagatcataacgggcatgcctgcctcgaccgagggggcatacgtcagctccgaatcgcctatcaggatatccgtgtccaccgagggagccaacacttcttcgtcaacctcaacctctaccactggaaccagtcacttggtgaagtgtgcagaaaaggaaaagactttttgtgtgaacggaggggagtgctttatggtcaaggatcttagcaacccctcgaggtacctttgtaagtgtcctaacgaatttaccggtgatcgctgtcagaattacgtgatggcctctttttacaaggcagaagaattgtaccagaaacgcgttcttaccatcaccggaatttgtattgccctgttggtggtgggcatcatgtgcgtcgtcgcgtactgcaaaactaagaagcaaaggaagaagttgcatgaccggctccgccaatctctgcgctcagaacgcaacaatatgatgaacatagcaaacggacctcatcaccctaatccacctcctgagaatgtgcagctcgtcaaccagtacgtgagcaagaatgtcattagcagcgagcatatagtcgaacgtgaggcagagacttcattctccacgtcgcattatacgtcgactgcgcaccattcgaccaccgttactcaaactccgtcccactcgtggagcaacggacatactgaatcaattctctcagagtcccacagcgtgatagtgatgagcagcgtggagaactcaaggcactcctccccaactggaggaccgcggggtagactcaatggaaccggaggacctcgagaatgcaatagctttctccggcacgcacgagaaacgccagattcctacagggattctccacatagcgagcggtacgtcagcgcaatgactactcctgcaagaatgtcccccgtggactttcacactccatctagcccgaagtcaccccctagcgagatgtccccaccagtctcatcgatgactgtgtccatgcctagcatggcagtgtcgccatttatggaagaagaaagacctcttctgctggtcactcctccacgacttcgtgagaaaaagttcgatcatcatccacagcagtttagcagctttcaccataacccggcccatgattcaaattccctgcccgcctcacctctgcgcatcgtggaagatgaagagtacgaaaccacccaggagtacgaaccagcacaggaacctgtgaaaaaacttgctaactcacggagagcaaagagaaccaaaccgaatggacacatagctaataggctggaggtcgactccaatacctcctcccaatcctctaattccgagtcggaaaccgaagatgagagagtgggagaggacaccccattcctgggaatacagaatcctctcgcggcctccctggaggccactcccgcatttcgactggcagacagccggacgaacccagccggaagattctcgactcaggaagaaatccaagcacgtctctcctcagttattgcgaatcaagatcccattgcagtg

SEQ ID NO: 177023 - DNA, 1911 bp, Artificial Sequence
  derived and/or modified sequence
atgagtgaacggaaggaaggcagaggcaagggcaagggaaagaaaaaggagcggggctccgggaagaaacccgagtctgccgcgggttcccagagccccgccttgccgcctagactcaaggaaatgaagagccaggagagcgcagcagggtcaaagctggtcttgagatgcgagacttccagcgagtattcctcacttagatttaagtggtttaagaatggcaacgagttgaatagaaagaacaagccccagaacattaaaatccagaagaagccagggaaatctgagctgcgaatcaataaggcgtcgctcgccgactccggggaatatatgtgcaaggtgataagcaagttagggaacgactcagcttccgccaacatcactatagtggagtcaaacgaaataattactgggatgccagccagtacagagggagcatacgtcagcagcgagagcccaatccgtatctctgtatcaacagagggcgctaacacgagctcttcaacgagtacctctactaccgggacttctcacctggtcaagtgtgccgaaaaggagaaaacgttctgcgtgaacggcggagaatgtttcatggtcaaagacttgtctaacccctccagatacctgtgcaaatgcccaaacgagtttactggggataggtgtcagaactacgtaatggctagtttttacaaggccgaggagctgtatcagaaacgagtcctgactatcaccggaatctgcattgcgctgctggtggtgggaatcatgtgtgtcgtagcctattgcaaaaccaagaagcagcggaagaaactccatgaccggctccggcagtcactgaggagtgaaagaaataatatgatgaacatcgccaacgggccccaccatccaaaccccccaccagaaaacgtccagctcgttaaccagtacgtgtctaaaaatgtaatttcttcagagcacatcgtggagagagaggcggagacttctttctctacctcacactacacgtctacagcccatcatagtaccactgtgactcagaccccgagccatagttggtccaacggtcacacagagtccatcctgtcagagagccatagcgttattgtgatgagcagcgtggaaaattcccgtcatagctctccaacaggcgggccacggggccgcctgaatggaaccggagggcctcgggagtgtaactccttcctgcgccatgcacgcgaaacacctgatagctatagagattcccctcatagtgagcgatatgtttcggcgatgactacgcccgctcgaatgagccctgtggatttccacacccccagctcccccaagtcccctccctccgaaatgagcccccccgtctcatctatgacagtgagtatgccctccatggccgtcagccccttcatggaagaagagcgaccgcttctcctcgtgaccccgccacggctgcgtgagaaaaaatttgatcaccaccctcagcagttcagctcattccatcataatcccgcacatgattcgaattctcttcctgcatctccccttaggatcgtggaagacgaggagtacgagaccacacaggaatatgaaccggcgcaagagcccgtgaagaagctcgcaaacagcaggcgggctaagcggaccaaacctaatggacacattgcaaacagactcgaggtggacagcaacacctcttcccaaagtagcaactccgagtctgaaaccgaggatgaacgggtaggggaggataccccattcctgggaattcagaaccctctggcagcatctcttgaggctaccccagcctttcggctggcggactctagaaccaatcctgctgggcgcttctcaacacaggaagagattcaagctaggctgtcaagtgtgattgcaaatcaggatcccattgctgtg

SEQ ID NO: 177024 - DNA, 1911 bp, Artificial Sequence
  derived and/or modified sequence
atgtctgaacgcaaggagggtcgcggcaagggaaagggaaaaaagaaagagcgcggctcaggaaagaaacctgaaagcgcagccggatcacagtccccggcactgccacccagactcaaagagatgaagagccaagaatcagctgctggttctaaactcgtcctgagatgcgagacctcatctgagtattccagcttgaggttcaaatggttcaagaacggtaatgagctgaacagaaaaaataagccccagaacatcaagatccagaaaaagcctggcaagtctgagctgaggattaacaaggcctctctggctgatagcggtgaatacatgtgtaaggtgatcagtaaacttggcaacgactcagcttccgctaacatcaccattgttgaatccaacgagatcattacaggtatgccagcttcaactgagggcgcatacgtgtcaagcgaaagtcctatcaggatctctgtctccacggagggcgcaaatacatcctcctccacttccaccagcacaaccggtacttcacatcttgtcaaatgtgcagaaaaggaaaaaacgttctgcgtgaatggtggtgaatgtttcatggtgaaggacctcagtaatccgtccaggtatctgtgcaaatgcccaaacgaattcaccggcgatcgctgccagaactacgtaatggcctctttttataaggccgaagagctttaccagaaaagggttctgacgattactggaatttgtattgccttgttggtggtgggcattatgtgcgtggtggcatactgcaagacaaagaagcagaggaagaagctgcatgataggctgaggcagagtctcaggagtgagagaaacaacatgatgaatatcgctaacggaccgcaccacccgaacccaccccccgagaatgtacaactggtgaatcaatacgttagcaaaaacgtcatttcttctgagcatatcgttgaacgcgaggccgagaccagtttttcaacttcccactacacctccaccgcccatcactccacgactgtcacccagacaccaagccacagctggtccaacggccacaccgagtcaattttgagtgagagtcatagtgtgatcgtgatgagctccgtggagaactctcgccacagtagcccgaccggcggaccacgcggtagactcaatggcacaggtggaccgagggaatgtaactctttcctcagacacgcccgcgagacaccagactcttacagagattcacctcactcagagagatacgtttctgccatgactactcctgcccgcatgtccccagtcgatttccacactccaagctctccgaaaagcccaccttccgaaatgtcccctcctgtctctagcatgactgtatctatgccttccatggcggtatccccattcatggaggaggagcgcccccttctgctggtcacacctcctcgcctgagagaaaaaaaattcgatcaccatccacaacagttctcttcctttcaccataaccctgctcatgactcaaattctctcccagcatctcctctcagaatcgtagaagacgaggagtacgaaactactcaggaatatgaacctgctcaggaacctgtgaagaagctcgccaactccaggagagccaagagaaccaaacccaacggacatatagcaaacagattggaagtggactctaacacctcctcccagtcatccaactccgaaagtgagacggaagatgagcgcgtgggagaagacacgccattcctgggtatccagaatccgctggccgccagccttgaagcaactcctgctttccgcctggctgatagcaggacgaaccccgctggtcgcttcagcacccaggaagaaatccaggcaagactgtcaagcgtgattgccaaccaggatccgatcgctgta

SEQ ID NO: 177025 - DNA, 1911 bp, Artificial Sequence
  derived and/or modified sequence
atgtctgagaggaaagaaggtcgcggaaaggggaagggaaagaagaaggagcgcggtagtggaaagaaacccgagagcgctgcaggctcccagtcacctgccctcccccctaggctcaaggagatgaaatcccaggaaagcgccgccgggagtaagctggtgctacgttgcgagacttcttcagagtatagctctttacggtttaaatggtttaagaatggcaacgaactcaatcggaagaacaaaccacagaatattaagattcagaagaaacctggaaagtcagaactgaggattaacaaagccagcctcgcagactccggcgaatacatgtgtaaagtgatatccaagttaggcaatgactccgcaagcgcaaatattactatagttgagagcaacgagatcataacaggaatgccggcgagtaccgagggcgcatatgtgtccagtgagagtccgattaggatttccgtgagtacggaaggcgctaatactagctcaagcacatccacttcaacaaccggaactagccatctcgtcaaatgcgcagagaaagaaaagacattctgtgtcaatggcggagagtgtttcatggtgaaagatctgtctaacccctctaggtatctgtgtaaatgtccaaacgagttcacaggggacagatgtcagaattatgtgatggcatcattctacaaggccgaggagctctatcagaaaagagtgctcacaatcactgggatctgcatcgctttactagtggttggcataatgtgtgtggttgcatattgtaagactaagaaacagcgtaagaaactgcacgatcggttaagacagagtctgaggtctgaacgtaataatatgatgaacatcgcaaacggcccacaccatccaaatcctccaccagaaaacgtacagctggtgaaccagtacgtttcaaagaacgtcatatcatccgagcatattgttgagcgtgaggccgaaaccagtttttccactagccattacacaagtaccgcacatcacagcactaccgtgacacaaacgcctagccacagctggtcaaatggacacacagagtccattttatcggagtcacatagtgtgatcgtgatgtctagtgtcgaaaactcacggcactcctctccaaccggagggccaaggggacgccttaacggcactgggggacctagggagtgtaattctttcctgagacatgctagggagaccccggattcctaccgggacagcccccattccgaacgatatgtctcagcaatgaccacgcccgcacggatgtctcctgttgactttcacacgccttcatccccgaaatcaccacccagcgagatgtcaccacccgtgtcttctatgaccgtatccatgccttcaatggccgtgagcccatttatggaggaagagcgacccctgctgttagtaaccccacctcgactgagagaaaagaaatttgaccatcatccccagcagttcagtagctttcaccacaatccagcgcacgactcgaattcgctgcccgccagtcccctcaggattgtcgaggacgaggagtatgaaactactcaggaatacgaacctgcccaagagccagttaagaagcttgccaattccagaagagcaaagcggaccaagcccaacggtcatatcgcaaatcgcctcgaggtcgactcaaataccagctctcaatcctccaactctgagagtgaaacagaagacgagagggtgggcgaagataccccattcctgggcatccagaaccccttggccgcgtccctcgaggcaacccccgcgttccgtctcgccgactctcgcaccaatcccgcaggaaggtttagcacacaagaagagatccaagcacgtctctcttccgtgatcgctaatcaggacccaatcgccgtc

SEQ ID NO: 177026 - DNA, 1911 bp, Artificial Sequence
  derived and/or modified sequence
atgagtgagcggaaggaagggcgcggcaaaggcaaaggtaagaagaaggagagagggagcggcaaaaaaccagagtccgctgccggctctcagagcccagccctgccaccacgactgaaagaaatgaagtcccaggaatccgccgccggaagtaagctagtcttacggtgtgaaacctcctcagaatattcttccctgcggttcaagtggttcaagaatggcaacgaactgaacaggaaaaacaagccccagaacattaagattcagaagaagccaggaaaatcagagcttcggatcaacaaggccagcctagctgatagtggcgaatatatgtgtaaggttattagcaagctaggcaatgactctgcaagcgcaaacattacaatagttgaaagcaacgagataattaccggtatgcccgcttccacagaaggcgcctacgtcagctccgaatcccctatccgtatttccgtttctactgaaggcgcaaacactagcagctccaccagtacaagtacaaccggcactagtcacctggtgaaatgtgccgaaaaggaaaagactttctgcgtgaatggtggagaatgtttcatggtgaaggatttaagtaatccttctagatatctgtgcaaatgtccaaacgaattcaccggcgataggtgtcagaattacgtgatggccagtttttacaaggctgaggaactgtaccagaaacgggttctgaccataactggcatatgcatcgctctccttgtagtgggaatcatgtgcgtggtggcatattgcaagacaaagaaacaacggaagaagctgcacgatagactgcgccagtctctgcgctctgagcggaataacatgatgaacatagcaaatggccctcaccaccccaatcctcccccagagaatgtgcagttagtgaatcagtacgtttctaagaatgtgatttcttctgaacacatcgtcgagagggaggctgagacctctttctccacctctcattatacaagcactgcacaccatagcaccactgtcactcagacaccctctcatagctggtctaacggtcatacagaaagcattctaagcgaatcacattcagttattgtgatgagctccgttgagaactctagacactcatcccccaccggcggacctcgtggcagattaaacggcaccggcgggcccagagagtgtaatagctttctacgacatgccagagaaactcccgacagctatcgagattctccacattccgagaggtacgtttccgctatgacaacccccgcccgaatgtcaccagtggattttcataccccaagtagtccaaagagtcctcccagcgagatgtctcctcccgtttcttccatgaccgtgagcatgccgtccatggctgtgagtcctttcatggaggaggagagacccctgctgctcgtgacacctccccggctgagagagaaaaagtttgatcaccaccctcaacagtttagttctttccatcataatccagcacacgacagcaattccttaccagcttctcccttgcgcattgttgaagacgaagaatacgaaacaacccaagagtacgagccagcacaggaaccagttaagaagctagctaactctagaagggccaaaagaactaagcccaacggccatattgctaacaggctagaagtggattctaacacttccagccaatcctccaattccgaatcagaaacagaggatgagcgggtgggcgaggacactccctttctgggaatacagaatccactggctgctagtctggaagctacccctgcatttcgtctggcagatagtaggactaaccccgctggccgtttttccacacaagaggagatccaggctaggctgagcagcgtcatagcaaaccaggaccctatcgctgtg

SEQ ID NO: 177027 - DNA, 1911 bp, Artificial Sequence
  derived and/or modified sequence
atgtcggaacggaaggaaggccggggaaagggtaagggaaaaaaaaaagagcgcggctctgggaagaagcctgagagcgcagctggctctcagtcccccgctctaccccccagactgaaagagatgaaatcacaggagtccgccgcaggcagcaagctggtcctgcgctgtgaaacctcttccgagtactctagccttagatttaaatggttcaagaacggtaatgaactcaatcgcaagaataagcctcagaacatcaagatccagaaaaagcctggtaagtccgaactccggattaacaaagcttctctggcagatagtggagagtacatgtgtaaggttatatcgaaactgggaaacgactccgccagcgccaatatcactatcgtggaatctaatgaaataatcactgggatgcccgcttccaccgagggggcctatgtgtcaagtgaatctccaatccgcatatctgtctccaccgaaggagccaacacaagttcgtccaccagtaccagtaccactggcaccagccacctcgtaaaatgcgctgagaaggagaaaacattttgcgtgaacggcggcgaatgttttatggtcaaggacctcagcaatccaagccgctatctttgcaaatgccccaatgagtttactggcgatcgctgccagaattatgtaatggcctcattttacaaagccgaggaactgtatcagaaaagagtgctgactataactggtatttgcatagccctattggtagtcggaattatgtgcgtggtggcttactgtaaaactaagaaacaaaggaaaaaactgcacgaccgtttgaggcagtcgttgcgctctgagcggaacaacatgatgaatatagcaaacggaccccaccatcccaatccacccccagagaacgttcagctggtgaaccagtacgtctctaagaacgtgataagttctgaacatattgtggagcgcgaagccgaaacctcattttccacgagccactatacgagtaccgctcaccacagcactacagtgactcaaaccccatcacattcttggagtaacggccataccgaaagtattcttagcgagagtcacagcgtcatcgtgatgtcttccgtggagaactctagacacagcagtcccacaggaggacccagaggcagacttaatgggacaggtggccctagagagtgcaactcttttttaagacacgcccgcgaaacacccgacagctaccgggactcacctcacagcgaacgctacgtcagcgccatgaccacgcccgcaaggatgagtccagtcgatttccatactccatcctcacctaagtcccctccatccgagatgtcgcctccggttagttctatgaccgtgtccatgccctcgatggccgtctccccgttcatggaggaggaacggccgctgctactggtgactcccccaaggctacgggagaaaaaatttgaccaccaccctcagcaattctcttcgtttcatcataatcccgctcacgatagcaactcactccctgcatcacctctgcggatcgtcgaagatgaggagtatgagaccacacaagagtatgagccggctcaagaacccgttaaaaagcttgccaattcacggagggctaagcgcaccaagccgaacggacacattgccaataggttggaagtggatagcaataccagttcacagtcttcaaattctgaaagtgaaactgaggacgaaagagtgggcgaagacactccattcctcggaattcaaaatcctcttgccgcgagcctggaggccactcccgcctttcgactggctgatagccgcaccaacccagccgggcggttctccacccaggaagaaatccaggcaagactcagctctgtgatcgctaaccaggatccaatcgctgta

SEQ ID NO: 177028 - DNA, 1911 bp, Artificial Sequence
  derived and/or modified sequence
atgtccgagaggaaagaaggacgcggaaagggaaagggcaagaagaaagaaaggggatcgggaaagaagccggagtccgccgccggaagccagtcgccggcgttgcctccgcggttgaaagaaatgaagtcccaagagagcgcagctggctccaagctcgtgctcagatgcgaaacttcctctgagtactcgtcgcttaggttcaagtggtttaagaacggaaatgaactgaaccgcaaaaacaagccgcaaaatatcaagatccagaaaaaaccaggcaagtctgaactgagaatcaacaaagcgtcgttggccgactcgggtgagtacatgtgtaaggtcatcagcaagctgggcaacgattcggccagcgccaacattaccatcgtagagtctaacgagatcatcaccggaatgccagcttccaccgagggcgcctacgtgtcctcagagagtccaatccgcatttccgtgtccactgagggagccaataccagctcctcaacctcgacttcgaccaccggtactagccacctggttaagtgcgcggaaaaggagaaaactttttgtgtgaatggcggagagtgtttcatggtgaaggatcttagcaatccgtcgcggtacctttgcaaatgcccaaacgaattcactggagacagatgtcagaactacgtcatggcatcattctacaaggcagaagaactgtaccagaagcgcgtcctgactattaccggaatctgcatcgcactcctggtcgtgggcatcatgtgcgtcgtggcctactgtaagaccaagaagcagcggaagaagctgcacgatcgactgcgccaatcgctccgctcagaacggaacaatatgatgaacattgcaaacggaccgcaccacccaaacccgcccccggagaatgtgcagttggtgaaccagtacgtctcgaagaacgtcatctcgagcgagcatatcgtcgagcgcgaagcagaaacttcattctcaacctcgcactacacttccactgcccatcattcaactactgtgacccaaaccccgagccactcttggtccaacgggcacaccgagtcaatcctgtcggagtcgcactcggtgatcgtcatgtcgtccgtggaaaactcacgccactcgtcccccactgggggaccgcgaggaagactgaatggcaccggaggacctcgcgaatgcaattccttcttgagacacgcgagagagacgccggactcctaccgcgactccccccactccgaacggtacgtgagcgcgatgactaccccggccagaatgagcccggtggacttccacactccatcgagcccgaaatcaccgccatccgagatgtccccgccggtgtcgagcatgaccgtctccatgccgagcatggccgtctcaccgttcatggaagaagagaggcctttgctcctcgtgactccaccgaggttgcgggagaaaaagttcgaccaccacccgcagcagttctcgtcatttcaccataatccggcccatgattcgaactccctccccgcatcgccactgagaatcgtggaagacgaagaatatgaaaccacccaggagtacgaacctgcccaggagccagtcaagaagctcgcaaactcaagaagagccaagagaaccaaacccaatggccacatcgcaaaccgcctcgaagtcgactccaacaccagctcccaatcctcgaacagcgaatctgaaaccgaagatgaaagagtgggagaggacactcctttcctggggattcaaaaccctctggcggccagcctggaggccacgcctgccttccgccttgcagattcacgcactaatcctgcggggagattctcaactcaggaagaaatccaggcccgcctgtcatcagtgattgctaaccaggatccgatcgccgtg

SEQ ID NO: 177029 - DNA, 1911 bp, Artificial Sequence
  derived and/or modified sequence
atgtccgagagaaaggaaggccggggtaagggaaagggcaagaagaaggagcgaggtagcggcaagaagcccgaatccgccgcgggctcgcagtcgccggcgctgcccccgagattgaaggagatgaagtcacaggaatcggccgcaggaagcaagctggtcctgcggtgtgaaacttcgagcgagtactcctcactgcggtttaagtggttcaagaatggtaacgaactgaaccggaaaaacaaaccacagaatatcaagatccagaagaagccgggtaagtccgaactgcgcatcaataaggcctcactggccgatagcggagaatacatgtgcaaggtgatctcgaaactgggcaacgattcggcctcggcgaacatcactatcgtcgaatccaacgaaatcatcactggtatgccagccagcactgagggagcctacgtgtcgagcgagtcacctatccgaatctccgtgtcaactgagggtgcaaacacgtcctcttccacgtccacctcgactaccgggacctcgcacctcgtcaaatgtgctgaaaaagaaaagacgttttgtgtgaatggcggagaatgcttcatggttaaggacctgagcaacccttcacgctacctctgcaagtgcccgaacgaattcacgggagacaggtgccagaactatgtgatggcatctttctataaggcggaggagttgtaccagaagcgtgtgctgactatcactggtatctgcatcgcactcctcgtcgtgggcatcatgtgcgtggtcgcctactgtaagaccaaaaagcagcgaaagaagctccatgaccggctgagacaatcgctgcggtcagaaagaaacaatatgatgaacattgcaaacggaccccatcatccaaacccgccgccagagaatgtgcaactcgtgaatcaatacgtgtcaaaaaacgtcatctcctcagaacacatcgttgaacgggaggcagagacttcgttctcgacctcccactacactagcaccgcgcaccattcgaccacggtgacccagaccccgtcgcattcgtggagcaacggtcacaccgaatccattctgtcagaatcccattccgtgatcgtgatgtcgtccgtcgagaactctcggcactcgtcgcctactggcggaccacgcggacggctgaacggaaccgggggtccccgcgagtgcaacagcttcctcagacacgcgcgcgagacgcctgactcctaccgcgactcgccacacagcgaacggtacgtgtcggcgatgaccactcctgcccggatgagcccggtagatttccataccccgagctcgcctaagtctccaccttcggagatgtcgcctcccgtctcgtctatgactgtgtccatgccgtccatggccgtcagcccattcatggaagaagaaagaccacttctgctggtgaccccaccacggctgagagaaaagaagttcgaccatcacccgcagcaattctcatcgttccaccacaatccggctcatgacagcaactcgctcccggcgagcccgctgaggatcgtggaggacgaggagtacgagactactcaggagtacgaaccggcccaagaaccggtcaagaaactcgccaactcgcgtagagcaaaacggactaaaccaaatggtcacatcgcgaatcgccttgaagtggactcgaacacctcgtcccagtcctcaaattcagaatcggaaaccgaagatgagcgcgtcggggaggacactccgttcttggggatccaaaacccactcgccgccagccttgaagccacgcccgcatttcgcctggcggactcacgcaccaatccggcagggaggttctcgacccaagaggaaatccaagcgagactctcgtcagtcatagctaatcaggacccgatcgcggtg

SEQ ID NO: 177030 - DNA, 1911 bp, Artificial Sequence
  derived and/or modified sequence
atgagcgaacggaaggaagggcgcggtaagggaaaaggaaagaagaaggagcgcggaagtggcaaaaagccggaatcagcggcaggaagccagtcgccagcgctgccgccgcggttgaaagagatgaaatcacaggaaagcgcggcgggctcgaaactggtgctgcgatgcgaaacctcgtccgaatactcgtcactgagattcaagtggttcaagaacggaaatgaactcaatcgcaagaataaaccccaaaacatcaagatccaaaagaaaccgggcaaatcggaactccggatcaataaggcgtccctggcggattccggggagtacatgtgtaaggtcatctctaagctgggcaacgactcagcctccgcaaacatcaccatcgtggagtccaacgagattatcaccggaatgccggcatcgacggagggcgcctacgtgtcgtccgagtcgccgatcaggatctcggtgtctaccgaaggtgccaacacctcaagctcaacctcgacttccactaccggaacgtcgcatttggttaagtgcgcagaaaaagaaaagaccttctgtgtgaacggaggtgaatgcttcatggtgaaagacctgtcaaatccaagcagatacctctgtaagtgcccgaatgaattcactggggaccggtgtcagaattacgttatggcctcattctacaaagcagaagaactgtaccagaagcgggtgctgactattaccggaatctgtatcgcgctgcttgtcgtggggatcatgtgcgtggtggcatactgcaagaccaagaagcaaagaaagaagttgcacgaccggctccgccaatcacttcgcagcgaacgcaacaacatgatgaatatcgcaaacgggcctcatcacccgaacccacctcccgaaaacgtgcagctggtcaaccaatacgtgtcaaaaaacgtgatctcgagcgaacacatcgtcgagagagaggccgagacttcgttttccacttcccattacacctccaccgcacaccattcgaccaccgttactcagaccccttcgcactcctggtcgaacgggcatactgagagcattctgtccgaatcgcattcggtgatcgtgatgagctccgtcgagaactcgcgccactcgagcccgactggaggaccaaggggacgtctcaatgggaccggaggaccgcgggaatgtaacagctttttgcgccacgcgagggagactcccgattcgtaccgagatagcccacactccgagagatacgtcagcgcgatgaccaccccagcgcggatgtcgccagtggacttccacaccccatcttctccaaaaagcccgccttccgaaatgtccccgccggtgtcgtcaatgaccgtctccatgccgtctatggcagtgtcccctttcatggaggaggaaagaccactccttctggtgaccccaccgaggctccgggagaagaagttcgatcaccaccctcagcagttctcatcttttcaccacaatcccgcacacgattcgaattccctgccggcctcgccactgagaatcgtggaggacgaggaatacgagactacccaagagtacgaacctgcacaggagccagtgaagaagctggccaattcacggagagcgaagagaaccaagccgaacggacacatcgccaatcggctggaggtcgacagcaacaccagctctcaaagctccaactccgagtcggaaaccgaggacgaacgcgttggagaggacaccccgttcctcggaattcagaaccccctggcggccagcctggaagccacgcctgcgttcaggctcgccgattcgcggactaaccctgctggacggttctcaactcaggaggagatccaagctcgcctgtcctcggtgatcgcaaatcaagacccgatagccgtg

SEQ ID NO: 177031 - DNA, 1911 bp, Artificial Sequence
  derived and/or modified sequence
atgtccgagcgcaaggagggcaggggcaagggcaagggaaaaaagaaagaacggggatccggcaaaaaaccagaatcggcagctggatcccagagcccagcgctgccgccccggctgaaggaaatgaagagccaggagagcgccgcgggaagcaaactcgtgctcaggtgcgaaacctccagcgagtactcatcccttcgctttaagtggttcaagaacggaaacgagctgaatcggaagaataaaccgcagaatatcaagattcaaaagaagcccggaaagtcagaacttcggatcaataaggcctcactcgctgacagcggagagtacatgtgtaaagtcatatcgaaactgggaaacgactcggcttcagcaaacataactattgtcgagtccaatgagatcatcactggaatgccggcctcgaccgaaggagcatacgtgtcctcggaaagcccgattcgcatctccgtgtcgactgaaggagcaaatacttcaagcagcacttcgacttcgaccaccggaacgtcgcaccttgtcaagtgcgccgaaaaagaaaagaccttctgtgtgaacggaggcgaatgcttcatggtgaaagacctgtctaacccgtcacggtatctttgcaagtgcccaaacgagttcaccggagatcggtgccagaactacgtgatggcttcattctacaaggccgaggagctgtatcagaaacgggtcctcacgatcaccgggatctgtatcgcactgctcgtggtcgggatcatgtgcgtggtggcttactgcaaaactaagaaacagagaaagaagttgcatgaccggcttcgccagtcactccgatcagaaaggaacaacatgatgaacatcgccaacgggcctcatcacccgaatcctccgcccgagaacgtgcagctggtcaaccaatatgtcagcaagaatgtgatctcatcggaacacatcgtcgagagagaggctgaaacttcgttctcaacctcacactacacttccaccgcacatcactcaactaccgtgacgcagaccccttcgcattcctggtccaacggacacactgaatcgatcctgtccgagtcacattccgtgatcgtcatgtcctcggtggagaactcgaggcactcgagcccgaccgggggaccgcgcggcagactgaatggtacgggcggacctagagaatgcaactcctttctccggcacgctagggaaactccggattcgtaccgggattcgccccattcggagcgctacgtgagcgctatgactaccccggcccgcatgagcccggtggatttccacaccccgtcctcacccaagtccccaccgtccgagatgtcgccgccagtgtcctcgatgacggtgagcatgccctcaatggcagtgtccccctttatggaagaggaacgcccgctgctgctcgtcactccgccgcgcctccgcgaaaagaagttcgaccaccatccgcaacaattctcctcattccaccacaatccggcacatgactccaacagcctgccggcgtccccgctgcggattgtcgaggacgaggagtacgaaaccacccaagagtacgaacccgcgcaagaaccggtcaaaaaactcgccaactcacggagagcaaagcggaccaagccgaacggacatatcgcgaatcgcctggaagtggactccaacacctcctcgcagtccagcaatagcgagtcggaaactgaagatgagagagtgggagaggacaccccatttcttggcatccagaacccactggccgcctccctcgaagccacccccgcgttccgcttggcagattcacggactaaccctgcgggacggttctccacccaggaagagattcaggcgaggctgtcctcagtgattgccaaccaggacccgattgccgtg

SEQ ID NO: 177032 - DNA, 1911 bp, Artificial Sequence
  derived and/or modified sequence
atgtctgaacgcaaggagggcaggggaaagggaaagggcaagaaaaaggaaagaggctcgggaaaaaagccagaatccgctgcgggctcccagtccccggccctgccgccgcgcctgaaggaaatgaaatcccaggaatccgccgccggaagcaaactggtgctgcgctgcgaaactagctcagagtactcctccctcagatttaagtggttcaaaaatggaaacgaattgaaccggaagaacaaaccccagaatatcaaaatccagaagaagccgggaaagagcgagctccggatcaacaaagccagcctggcagattcgggggagtacatgtgtaaggtgatcagcaagctgggtaacgactctgcgtcggccaatatcacgatcgtcgaatccaacgagattatcactgggatgccggcgtcaaccgagggagcctacgtttcctcagaatcaccaattcgcatctcggtgagcaccgaaggagccaacacgtcctcgagcacctctacctcaaccactggaactagccacctcgtgaaatgcgctgaaaaagaaaagactttctgcgtcaacggaggagaatgtttcatggtgaaggacttgtccaatccaagccgctacctgtgtaagtgcccgaacgagtttactggcgatcggtgccagaattacgtgatggccagcttctataaggccgaggagctgtatcaaaaacgcgtcttgactattactggcatctgcatcgcgctgctcgtggtaggaatcatgtgtgtggtggcctactgcaagaccaagaagcagcgaaagaagctccatgaccggctgcggcaatcattgcgaagtgaacgcaataacatgatgaacatcgccaatggcccccatcatccgaaccctccgccggagaacgttcagctggttaaccaatacgtcagtaagaatgtgatttcatcagagcatatcgtggaacgagaagccgaaacctcattctccactagccactacactagcactgcccaccactccactactgtcacccagaccccgtcgcatagctggagcaatgggcacactgagtccatcctgtcggagtcacactccgtgatcgtcatgtccagcgttgaaaattctcggcactcatctccaaccggaggaccacgcgggagactgaacggaaccggcggcccacgcgaatgcaactcgttcctcagacacgcgagagaaaccccggactcataccgggattccccgcattcggaaaggtacgtgtcggccatgaccactcccgctcgaatgtcaccggtcgatttccacactccttcatccccaaagagcccgccttcggagatgtccccgccagtgtcgtcgatgaccgtgtcaatgccgtccatggcggtcagccctttcatggaggaggaacgccctctcctgctcgtgactccaccgcgtctgcgggaaaagaagttcgaccaccacccacagcaattctcttcttttcatcacaatcccgcccatgactccaactcccttcccgccagccctctgcgcattgtggaggatgaggaatacgaaaccacgcaggagtacgagccggcccaggaaccagtcaaaaagctggctaatagccgacgcgctaagcggactaagccaaacgggcatatcgcaaaccggctcgaagtggactccaacacgagcagccaatctagcaactccgaaagcgaaacggaagatgagcgcgtgggagaggacactcccttcctgggtatccaaaatcctctggccgcgtcgctggaggccacccctgcgttccgcctggcggactcccgcactaatccggccggtcgcttttcaacgcaggaggaaatccaagcgcggctctcctcagtgatcgccaatcaggacccgatcgctgtg

SEQ ID NO: 177033 - DNA, 1911 bp, Artificial Sequence
  derived and/or modified sequence
atgtcggagaggaaggaaggacggggaaaggggaaaggtaaaaaaaaggagcgcggctccggcaagaagcctgaaagtgcagctggcagtcagagtcccgcactcccccccaggctaaaagagatgaagagccaggagtctgcagccggatccaaactagtcctacgatgtgaaacttcttccgagtactcgagcctgaggttcaagtggtttaagaacgggaacgagctgaaccgcaagaacaaaccccagaacatcaagatccaaaaaaaacctggaaagagcgagttaagaattaacaaagcatctctggccgactcaggagaatatatgtgcaaggtaatctcgaaattgggcaatgactccgcctccgccaacatcacgattgtcgaaagcaatgagataattacgggaatgcctgcttccacagagggggcttacgtgagctcagagtctcccatcaggatttcagtgtctaccgagggagcgaatacatcatctagcacctcgactagcacaacaggtactagtcacctggtcaagtgtgccgagaaggaaaagacgttttgcgtgaacggtggagaatgctttatggtgaaggatttgagcaacccttccagatacctttgcaagtgtcccaatgagttcaccggcgataggtgtcagaactacgttatggctagcttctacaaggctgaggagctgtaccagaagagagtcctcactatcactgggatttgcatcgcattgctagtggtcgggatcatgtgcgtcgtggcatattgtaaaaccaagaaacagaggaagaaattacatgatcggctgcgtcaatcgcttcgctcagaacgaaataatatgatgaatattgccaacggtccccatcaccctaaccccccacctgagaacgtacagcttgtgaaccagtacgttagcaagaacgtaatcagctccgagcatattgtggagcgtgaggccgaaacgagctttagcacatcacattacacgagcacggcgcaccactccacaactgttacccagactccgagccatagttggtcaaatggccataccgagtctatcctttctgagtcacacagcgtgatagtgatgtcgagcgtggagaatagtagacactcctctcccacgggggggcccagaggcaggctaaacgggactggcgggcccagagagtgcaacagtttcctccgccacgctagggagacccctgatagctatcgcgattctccccacagtgagcgctatgtgtctgccatgactaccccagcacgcatgtcaccagtcgacttccatactccgagctcacctaagtccccgcctagtgagatgtcgccgcctgtcagtagtatgactgtgagcatgcccagcatggccgtaagtccatttatggaggaagagaggcctttacttttagtcaccccgccacgtttgcgggaaaagaagttcgatcatcatccacagcagttctcaagctttcaccacaatcccgctcatgactctaatagcttgcccgcctccccacttaggatcgttgaggacgaggagtatgaaaccactcaagagtacgagccggctcaagagcctgtgaagaaattagcaaactctagacgagcaaagcgaacgaagcctaacggccacattgctaaccggctcgaggtggactccaatacctcctcccagtcatctaactctgagagtgagactgaggacgagagagtcggggaagacactccgtttctgggtatacagaatccgctcgcggcctccctggaagcaactcctgccttcaggctggctgacagtaggaccaaccctgcaggtcggttctcaactcaggaggaaatccaggcgcggctgtcctctgtgattgccaatcaggatcccatcgctgtg

SEQ ID NO: 177034 - DNA, 1911 bp, Artificial Sequence
  derived and/or modified sequence
atgtctgaaagaaaggaaggtcgaggtaaaggaaagggcaaaaagaaggagagaggtagcggaaagaagccggagtcagcggcaggatcccaatcgccagcactcccgccccggctcaaggagatgaagagccaagaaagcgcggcaggttcgaagctggtgcttcgctgtgaaacttcgtccgaatactcctcacttaggtttaagtggttcaagaacggaaacgagctgaataggaagaacaaacctcagaatatcaagatccaaaagaaacccggaaagtcggagctcaggatcaacaaggcctccttggccgactccggagagtatatgtgtaaggtgatctcgaaactcggaaatgactcggcctcagccaacatcactatcgtggaatccaacgagattatcaccggaatgcctgcatcgaccgagggtgcttacgtctccagcgaatcacctatcagaatttccgtgtcgacggaaggagcaaacacttcaagctcaacttcgacttccactaccggaacctcccatctcgtgaagtgcgcggaaaaggaaaagactttttgcgtgaacggaggagaatgctttatggtgaaggacctgtccaatccaagccgctacctttgcaagtgtcccaatgagtttaccggcgatcggtgtcagaactacgtgatggcgagcttttacaaagcagaagaattgtaccagaagagggtcttgactattactggaatctgcatagcactgctggttgtggggattatgtgtgtggttgcgtactgtaaaaccaagaaacagcggaagaaactgcacgaccggttgcgtcaaagccttcggtcagagcgtaataacatgatgaatattgcaaacgggccacatcaccctaatccacctcctgaaaacgttcagttggtgaaccagtatgtgtcgaagaatgtgattagcagtgaacatatagtagagagagaagcagaaacgtcattcagcacctcacattacacttcgaccgcgcatcattccaccaccgtgactcagactccgtcgcactcctggtcaaatggccacaccgaaagcatcctctccgaatcccactccgtgatcgtcatgtcgtcggtggagaactcgagacacagctcgcctaccggtggtcctcgagggagactgaacggtactggaggtcccagagagtgtaactcgttcctgcgccacgcccgtgaaacccctgattcctaccgggactccccccactcagaacggtacgtgtcggccatgactacccctgctcggatgtcccccgtggattttcacactcccagttcacctaaatcgccaccatccgaaatgtcacctcccgtgtcctctatgaccgtgtcgatgccttctatggcagtgtcaccgttcatggaggaggaaagacctctcctcctcgtcactccacctagactccgtgaaaagaaattcgatcaccatccccaacagttctcctcatttcaccataacccagcacatgactccaactcactgcctgccagccctcttagaattgttgaggatgaagagtatgaaaccactcaggaatacgagcccgcccaagaaccagtgaagaaacttgcaaattcgcgtagagccaaaaggaccaaacccaacggacatattgcaaatcggctcgaagtggactccaatacgagctcgcaaagcagtaacagcgagtcggaaaccgaagatgagcgggtgggggaggacactccttttctcgggatacaaaatcctcttgcagcttcacttgaagccaccccggcatttcgcttggcagatagcaggaccaaccctgcaggacggtttagcacccaagaagaaattcaggcacgactctcatcagtcattgcaaatcaagaccccattgcagtc

SEQ ID NO: 177035 - DNA, 1911 bp, Artificial Sequence
  derived and/or modified sequence
atgtccgaacgaaaagagggccggggcaaggggaaaggtaaaaagaaagagaggggatcaggaaagaagcctgagtcggcggctgggtcccaatcccccgccttaccgccgagattaaaagaaatgaagtctcaagaatccgcggcaggctcaaaactagtgctgagatgcgagacaagcagtgaatactcctctctgcgcttcaagtggttcaaaaatgggaacgagctgaacaggaaaaacaagcctcagaatattaagatccagaagaagcccggtaaaagtgaacttcgaatcaacaaggcatccctcgctgacagtggtgaatatatgtgtaaggtcatcagcaagctgggtaatgacagtgctagcgcaaacatcaccatcgtggagagcaacgagattatcacaggaatgcccgcctccaccgagggggcctatgttagctcagagagtccgataagaatttctgtgagcacagaaggcgccaatactagctctagtactagtacatctaccaccgggacctctcacttggtgaaatgcgcagagaaggagaagaccttttgcgttaatggaggcgaatgctttatggtgaaggatttgtctaacccttcccgctatctttgtaagtgccccaatgagtttaccggggaccggtgtcagaattacgtgatggccagtttttataaggccgaggagttatatcagaaacgagtgctgacaattacaggaatttgcattgccttgctggtcgtgggaatcatgtgcgtggtcgcatactgcaagactaagaagcagaggaagaagctccacgatcgactccgccagtcccttcgcagtgaaaggaataatatgatgaacatcgccaacggaccgcatcatcctaacccccctcctgaaaatgttcagttggtgaatcagtatgttagtaagaacgtgattagcagtgaacacatagtcgagcgggaggcagagacatccttcagtacatcgcattacacaagcactgcccaccattctactaccgttacacagactccaagccatagctggtcaaacggtcatactgagtcaatccttagtgagtctcactcggtgatcgtcatgagcagcgtagagaatagtcgacactctagccccaccggggggccccggggaaggctcaatgggaccggaggcccaagggaatgcaactcgttcctccggcacgcacgggagactcccgactcctatcgcgactccccacacagtgaacggtacgtcagtgctatgacaacgccagcccgaatgagccccgtagactttcatactccttcctccccaaaatcgcccccaagtgagatgtctcctcctgtcagctcaatgactgtgtcgatgccgtcaatggctgtaagtccgtttatggaggaggagcggcccctgctccttgtgactcctcccagacttagagaaaaaaaattcgaccatcacccacagcaattcagtagttttcaccacaatccggctcatgactcaaattccctgcccgcctcaccgttgcgcattgttgaagatgaggaatacgaaactactcaggagtacgagcctgctcaagaacctgtcaaaaaactcgcaaactccaggagagctaaaaggaccaagccaaatggccacattgcaaaccgtctcgaggtggactcaaacactagttcacagagctccaatagtgaaagcgagacagaagatgaacgagttggagaagatacacccttcctgggcattcagaatccgttggctgcctcactggaggctacccccgccttcaggttggcagactcgagaactaacccggcgggccgtttcagcacacaggaggaaatccaggcaaggttaagctccgttatcgctaatcaggatccgattgcagtc

SEQ ID NO: 177036 - DNA, 1911 bp, Artificial Sequence
  derived and/or modified sequence
atgtccgaacggaaggagggacgtggtaaggggaagggcaagaagaaggagcgtggctctggaaagaagcccgagtctgcagccggcagtcagtcacctgcgcttccacccagattgaaggaaatgaagtcccaggagagcgccgccggctcgaagctcgtgttgcgctgcgagacgtcttccgaatactccagcctgcgttttaagtggttcaagaatggtaacgaactcaaccgaaagaacaagcctcagaatatcaagatccaaaagaagcctgggaagagcgaactgcgcatcaacaaggcctctctcgccgacagcggcgagtacatgtgtaaggtcatctcgaagcttggaaatgacagtgcaagcgccaatatcaccattgtcgaaagtaacgagatcatcaccggcatgccagcctccacagagggcgcgtacgttagctcagagtctccgatacgcatttcggtctctaccgagggcgccaacacctcatcctccacctccacgtctactaccggaactagccacctagtgaagtgcgccgagaaggagaagactttttgtgtgaacggcggagagtgctttatggtgaaggatctgtccaaccccagtcgttacctgtgtaaatgtcctaacgagttcactggtgaccggtgccagaattacgtgatggcgtcgttctacaaggccgaggagctgtaccagaagcgggtccttacgatcaccggaatctgcatcgccttgttggtcgttggtatcatgtgcgttgttgcctactgtaagaccaaaaaacagcgcaaaaagctccacgacagactgcgacaatcattgcggagcgaacgcaacaatatgatgaacatcgctaacggccctcaccaccccaacccccccccggagaacgtccagctggtcaaccagtacgtatctaagaacgtaatcagctctgagcacatcgtggaacgcgaggccgagaccagcttctccacctcccattacacctccactgcccatcatagtaccaccgtcactcaaactccttcacattcatggtctaacggccacacagagtctatcctgagcgagtcacatagcgtcatcgttatgagctccgtcgaaaattcccgacacagctcccccaccggaggccctcgcggccgcctcaatggcaccggcggcccccgcgagtgtaattcgttcctacgtcacgcacgggagacccccgatagctaccgcgacagccctcactctgagcgttacgtgagcgccatgaccacccccgcccggatgtcgccggtcgatttccatacgccgagctcccctaagtcccctcccagcgaaatgagcccacctgtctcctcaatgaccgtatctatgccttcgatggccgtctccccttttatggaggaggagcgccccctacttcttgtcacgccgcctcgcctgcgtgagaagaagttcgatcatcatccccagcagttctcctcttttcaccacaacccggctcacgacagcaactcgcttcctgcctcccccttgcggattgtcgaggacgaggagtacgagaccacccaggaatacgagcccgctcaggaacctgttaagaagctggccaacagccggcgcgctaagcgcacaaaaccgaacggtcacatcgctaaccgccttgaagtcgacagcaacacctcctcgcagagctccaatagcgaatccgaaacggaggacgaacgtgtcggcgaggatactcccttcctcggtattcagaatcccttagccgcctccttggaggctaccccggcattccgtctcgccgacagccgtacgaacccagctggtcggttctccacgcaagaggagatacaggcacggctcagcagtgtgatcgcgaaccaggacccgattgccgtg

SEQ ID NO: 177037 - DNA, 1911 bp, Artificial Sequence
  derived and/or modified sequence
atgtccgaacgcaaggaggggagaggaaagggcaagggcaagaagaaggagagaggctccggtaaaaaacccgagtccgctgctggcagccaatctcctgcgctgcccccaaggctgaaggagatgaagtcccaggaaagcgccgctggttcaaaactcgtgctccgctgcgagacttcctcagaatactcctcactgaggtttaagtggttcaagaacgggaacgagctgaacagaaaaaacaagccacaaaacattaagatccagaagaagccgggaaagtcggagttgaggattaacaaagcctctctggccgattcaggagaatatatgtgcaaagtgatatccaagctcggaaacgatagcgcatccgctaatatcactattgtcgaatccaacgaaattataacgggaatgcccgctagcacggaaggcgcctacgtgtcttctgagtccccaataaggatcagcgtgtcaacggagggagcaaatacctcttcaagcacttccacttctacaaccggtacttctcatctagtaaagtgcgccgaaaaagaaaaaacattttgtgtgaacggcggtgagtgttttatggtgaaagacctctccaacccctctagatacctttgcaaatgccccaatgagttcacaggggatcgatgtcagaactatgttatggccagcttctacaaggccgaggaactataccagaagcgcgtgttaacaattactgggatatgtatagcgctgctggtcgtcgggattatgtgtgtggtggcctactgcaaaacaaagaagcaacgtaagaaactgcacgatagactcaggcagtccctgaggtccgagaggaataatatgatgaatatcgccaacggaccccatcatcccaacccccctcccgagaatgtgcagctggtcaaccaatacgtgtctaaaaatgtaatttcgtcagaacatatcgtggaaagagaggctgagacctctttctcaacgtctcattacacctctaccgcacatcattctacaaccgttacacagactccgagtcattcatggagcaatggtcacacggagtctattttatcggagtctcattctgtaatagtgatgagtagcgtcgagaactcacgtcattctagccccactggaggacctcggggaaggttgaatgggacggggggccccagagagtgcaattcattcctgaggcatgcccgcgagacgccggactcttaccgggattctccccactcagagaggtatgtatcggccatgaccacaccagcacgcatgtccccggtggactttcacacccctagctcgcccaagagccccccctctgaaatgtcaccaccggtcagcagcatgaccgtgtccatgccatctatggccgtcagcccatttatggaggaagagaggcccctcctcctggtcacaccacctcgcctgcgcgaaaaaaaattcgatcaccatccacagcagttttccagtttccatcacaaccctgctcacgattctaattcactcccagctagcccattgaggatcgtggaagacgaggaatatgaaacaacccaggaatacgagccagcacaggagcctgtaaagaaattggctaactccaggcgcgccaaaagaactaagccaaatgggcacatcgcaaatcgccttgaggtggactcgaatacctctagccagtccagcaactccgagtccgagactgaagatgaacgcgtgggtgaagataccccgttccttggtatccaaaaccccttagccgcatcactcgaagccactccagcttttcggctggccgactcccgcacaaacccggccgggcgctttagtactcaggaggagatccaggctaggctttcatccgtgatcgctaatcaggaccccatcgctgtc

SEQ ID NO: 177038 - DNA, 1911 bp, Artificial Sequence
  derived and/or modified sequence
atgtccgagcgcaaggaaggaagaggaaagggcaaaggaaaaaagaaggaacgaggaagcggaaaaaagcctgagtcggcagcgggaagccaatcccccgccctccctcctcggctcaaagagatgaagtcccaagaatccgctgccggttcgaagctcgtgttgagatgcgaaacgtcctccgagtactcgagcctgagatttaagtggtttaagaacggaaacgagcttaatcgaaagaataagcctcaaaacattaagatacagaaaaagcccggaaagagtgagctccgcatcaataaggcaagccttgcagactcgggagaatacatgtgtaaggtgatctcgaagctggggaacgactcagcctcggccaacattactattgtggaatcaaacgagatcattaccggaatgcctgcatcgaccgagggggcgtatgtgtcatcggagtccccaattagaattagcgtttcgaccgagggagcaaacacctcaagctccacgtcgactagcaccactggcacctcacatcttgtgaaatgtgcagaaaaagaaaaaaccttttgtgtaaatggaggagaatgtttcatggtcaaggatctctccaatccctcaagatacctttgtaagtgccccaatgaatttaccggtgaccggtgccagaactatgtgatggcgagcttctataaagcagaagaactgtaccagaaaagggtgctgaccataactgggatctgtattgcactccttgtggtcggtatcatgtgtgtcgtggcctactgtaaaactaaaaagcaacgtaagaaactccatgatagacttagacaatcactgagaagcgaaagaaataacatgatgaatattgcaaatggtccacaccatccaaacccaccaccagaaaacgtgcaactcgtgaaccagtacgtgagcaagaatgtaattagctcggaacacattgtggaaagggaagccgaaacgtctttctcaacttcgcattacacgtccactgcacatcattccaccaccgtgactcaaaccccttcgcattcatggtcaaatggacatactgaatcaattctgagcgaatcgcactcagtgatcgtcatgtccagcgtcgaaaattcaaggcacagctcacctaccggaggacctcgaggccgcctgaacggtaccggaggtcctcgcgaatgtaactctttcctgcgccatgctcgcgaaactccagattcgtaccgagacagcccgcactcagagaggtacgtgtcggccatgaccacccccgcaaggatgagcccggtcgattttcacactccgtcatcacccaagtctccaccaagcgagatgtcccctcctgtcagctccatgaccgtgtcaatgccaagcatggcagtgagcccttttatggaggaagagcggcctctccttcttgtgaccccaccacggctgagggaaaagaagttcgaccatcatccccagcagttttcttcctttcaccacaatccagcacatgattccaactcacttccagcatcccctctgagaatcgtggaagatgaagaatatgagacgacccaagaatacgagcctgcacaggagcctgtcaagaaactcgcaaatagcagacgcgccaaaagaactaagcctaacggacatattgctaacagacttgaggtcgatagcaacacctcatcgcaatcctccaactcggaaagcgaaaccgaggacgaacgggtgggtgaggacactccttttcttggaatacaaaacccgctggctgcatcgctggaggcgacccctgccttccggctcgccgattcaagaactaacccagcaggcagatttagcactcaagaagagattcaagccaggctgtcgtccgtgattgcaaatcaggatccaattgccgtg

SEQ ID NO: 177039 - DNA, 1911 bp, Artificial Sequence
  derived and/or modified sequence
atgtctgaaagaaaggaaggccgtggaaagggaaagggtaagaagaaagaacgaggttcgggaaaaaagccagaatccgcggcaggaagtcaatcacccgctttgccaccaagactaaaagaaatgaaatcccaggaatcagccgcaggctctaaacttgtactacgatgcgaaacctcatctgaatattcatcacttcgcttcaaatggttcaaaaatggaaacgaattgaatagaaaaaataaaccacaaaacattaagattcaaaaaaaaccaggtaaatctgaactgagaattaataaagctagtctagcagactcgggagaatatatgtgcaaagtcatatcgaagctcggaaacgattctgcatcggccaatattaccattgttgagtcgaatgaaattattacaggtatgccagcgtcgactgaaggggcctatgtatcatcggaatctccgattagaatctccgttagcaccgaaggtgcgaatacatcttctagcacatctacctcaacaacaggcacttctcacctcgtgaaatgtgcggaaaaggagaagacattttgcgtcaatggaggagaatgttttatggttaaagatctctcgaatccctctagatatttatgcaaatgtccaaatgaatttacaggcgaccgatgtcaaaattacgtgatggcgtcgttctataaggccgaggaattgtaccaaaaacgagttctgactattactggtatctgtatagctttgctcgtcgtaggaattatgtgtgttgttgcgtattgtaaaacgaaaaaacaacgaaagaagttgcatgaccgtttgcgtcaatccctccgttcggagagaaacaatatgatgaacatagctaatggtccacatcatccaaaccccccaccagagaatgttcaattggttaatcaatatgtcagtaagaatgtaatttctagtgagcatattgtggagcgagaggctgaaacatcctttagtacatcgcattacacctctacggcacatcattcaactacggtaacacagactccatctcactcctggtcaaatggacacactgaatcaatccttagcgaaagtcacagcgttatcgtgatgtctagtgttgaaaactccagacactctagtccgaccggtgggccaagggggcgactcaatggaacaggtggtccacgtgaatgtaatagttttctccgtcatgctcgagaaactccggattcttacagagactccccacacagcgaacgctatgtttcggctatgacaactccggcccgaatgtccccagtggactttcacacgccatcttccccaaaatcaccaccatcggagatgtctccaccagtatcttccatgacggttagtatgccatccatggcagtcagtccatttatggaagaagaacgcccattgttacttgttacgccgccacggctacgagaaaagaaatttgatcatcacccacagcaattttcctcattccatcataatccggcccacgatagcaatagcctcccagcgagtccccttcgtattgtagaagatgaagaatatgaaactactcaggaatatgaaccggcgcaggaaccagtgaagaaacttgctaatagtaggcgtgctaagcgaaccaagcctaacggacatatagctaatagacttgaggtagattccaatactagtagtcaaagttctaatagcgagagtgaaactgaagacgagcgcgtgggagaagatacaccattcttgggtattcagaaccccttggctgcaagcctggaagccactcctgcattcagactcgcagacagtcgtacgaatccggctggaagatttagcacccaggaagagatccaagctagattgtcgagcgttatcgctaaccaagatccgattgcagtg

SEQ ID NO: 177040 - DNA, 1911 bp, Artificial Sequence
  derived and/or modified sequence
atgtccgaacgtaaagagggccgaggaaaggggaaaggaaagaaaaaggaaaggggctctgggaagaagcctgagagcgcagccggaagtcaaagccctgccttacctccaaggttgaaggagatgaagagccaggagagtgccgctggaagcaaattagttctgcgttgcgagacaagttccgaatactcatccctgaggttcaagtggttcaaaaacggaaacgagctgaacagaaagaacaaaccacagaacattaaaattcagaagaaacccgggaagagcgagctgcggataaacaaagcatccctggcagattccggcgagtatatgtgcaaagtgatcagcaaactaggaaatgactctgcatccgctaacattaccatagtggaaagcaatgaaatcattaccggaatgccagcatctaccgagggcgcgtatgtgtcttccgagagccctatcagaatatccgtgtctaccgaaggagccaatacctctagttctacatctactagcaccacgggcaccagccacctggtgaagtgtgcagagaaggagaagacattctgcgtcaatggtggcgaatgcttcatggttaaggacctgtcaaatccatctaggtacttgtgtaagtgtcccaacgagttcaccggtgatcgatgccagaattatgttatggcttccttttacaaagccgaggaactctaccagaagagagtgctgacaatcacgggaatctgcatcgccctgttagttgtgggaatcatgtgtgttgtcgcctactgcaaaaccaagaaacaacgaaagaagctccacgacagactccgccagtccttgagaagtgaaagaaacaatatgatgaatatagccaatggacctcaccatcccaaccctccaccagagaacgttcagctagtcaaccagtatgtgtctaagaatgtgatttcaagtgagcacatagtcgagagagaagccgagacgagcttctcaacgagtcactacacctccactgcccatcactctacgactgtgacacagaccccgagccactcatggtccaacgggcacaccgagagtattctttcggaaagccactccgtcatcgtaatgtccagtgtagagaactccagacactcatcccccacgggtgggccacgcggccgactcaatggcaccggcgggcccagggaatgcaattcctttctgcgacacgcgagagaaacacccgattcgtatagggactcacctcacagtgaacgatacgtcagtgccatgacgaccccagctcgtatgtcacccgtggacttccacacaccatccagcccaaaatcaccccctagcgaaatgagtcctccagtgtcctctatgacagtctccatgcccagcatggccgtaagcccctttatggaagaagagaggcctctccttcttgtaacccctccccggctgagggaaaagaaatttgatcaccatccacagcagttttcctcttttcaccacaatccggcacatgacagcaattcgctgcctgcaagccctttaagaattgtggaggatgaagagtatgagacaacacaggagtatgaacccgctcaagagcccgtgaagaagctggcaaatagtaggagagccaagcgtaccaagcccaatggacacatagcgaaccgactggaagttgacagtaacacaagttcgcagtcttcgaactcagagagcgaaaccgaagacgagagagtgggggaagacactccctttttggggattcagaatccactagctgcctccctggaggcaactcccgctttccggctagctgacagcaggacgaacccggcaggtagattctccacccaggaagaaatccaggctaggttgagctctgtcatagcaaatcaggacccgatagcagtt

SEQ ID NO: 177041 - DNA, 1911 bp, Artificial Sequence
  derived and/or modified sequence
atgtcagagaggaaggaaggtcgcgggaagggaaagggcaagaagaaggaaagaggatccggtaagaagccagaatcggcagcagggagccagagcccagcccttcctcctagactgaaggagatgaagtcacaggaatctgctgcaggctcaaagctggtgctcaggtgtgaaacctcctccgagtactcctctcttcgttttaagtggttcaaaaacggaaacgaacttaataggaaaaacaagcctcagaatatcaagatacaaaagaagcctggtaagtcagaactgagaattaacaaggcctcgctcgccgattcgggtgagtacatgtgtaaggtcatttccaagctcggcaacgactccgcaagcgcgaacataactatagtggaatccaacgagattatcactggaatgccagcatcgaccgaaggtgcatacgtgtcctccgaatcccccattcggatttctgtctcaaccgagggagctaatacgtcctcctcaaccagcaccagcaccaccggtactagccatctggtgaagtgtgcagaaaaagaaaagacgttttgtgttaacggaggtgagtgctttatggtgaaggatctttctaatccttcgagatatctttgcaaatgtccgaacgagttcactggtgatagatgccagaattacgtgatggcttcgttttacaaggcggaagaactctaccagaaacgcgtgctgactataaccgggatttgtatagctctgctcgtcgtgggaattatgtgtgtggtcgcctactgcaagaccaaaaaacaaagaaagaagctgcatgatagacttagacaatcgcttcgctcggagagaaacaacatgatgaacattgcaaacggtcctcatcatcctaatcctccaccagagaacgtccaacttgtgaatcagtacgtgtcaaagaatgtgatcagctccgagcacatagtggaacgagaagcagaaacctcattctcgacgagccattatacctcgactgcgcatcattcaactactgtgacccaaactcctagccattcttggtcgaacgggcacaccgaatccattctttcagagagccatagcgtgatcgtcatgtcctcggtggaaaattccaggcattcaagccccaccggcggaccgcggggccgccttaatggtaccggtggtccgcgagaatgtaactcgtttctcagacatgcaagggaaacccccgattcgtatcgtgactcccctcatagcgagcggtacgtgtccgccatgaccactcctgctcggatgagcccagtggacttccacaccccttcgtcccccaaatcaccacccagcgaaatgtcgcccccagtgtcctcgatgactgtgtccatgccaagcatggcagtctcccccttcatggaggaagagcggcctctccttcttgtgaccccgccgagacttcgcgagaaaaagtttgaccatcatcctcaacagtttagcagctttcaccataaccctgcacacgatagcaactctctgccagcatcaccacttcgtattgtggaagatgaggagtacgaaacgacccaagagtacgagccagcacaagagccggtgaagaaactcgccaattcgagaagagcaaagcggactaagcccaatggacacattgctaacagactggaagtggatagcaatacctcatcgcaatcgagcaacagcgaatcggagactgaggatgagcgagtcggtgaggacacccctttccttggaatccagaatccactggcagcatccctcgaagcgactcccgcttttagactggcagattcgcgaactaatccagcaggccgtttcagcacccaggaagaaatccaagccagactttcttccgtcattgcgaaccaagatccaattgccgtg

SEQ ID NO: 177042 - DNA, 1911 bp, Artificial Sequence
  derived and/or modified sequence
atgtccgagcggaaagagggtcgagggaagggtaagggcaaaaagaaggagcggggatccggaaagaaaccggaatcggcggcgggatcccagtcgcctgccttgcctccaagactcaaggagatgaaatcccaggagtcggctgcgggctcgaagttggtgttgcgctgtgagacgtcgagcgaatactcctccctcagattcaagtggttcaagaacggaaacgaactgaatagaaagaacaagccacagaacatcaagatccagaaaaagcctggcaagtccgaactgcggatcaataaggcttcccttgcagactccggagaatacatgtgcaaagtgatttccaaactgggcaacgactcagcatccgccaatatcacgattgtcgaatcaaatgaaatcatcactggaatgccggcgtcaactgaaggagcgtacgttagcagcgaatccccaatcagaatctcggtgtccaccgaaggtgcaaacacttcatcatcgacctcgacctcgactactggcacctcgcatcttgtgaagtgcgctgagaaagaaaagactttctgtgtcaacgggggtgaatgcttcatggtgaaagacctgtcgaacccgtcaagatacctgtgtaagtgtccaaatgaattcactggggaccgatgccagaattacgtgatggcctcattctacaaggcggaggaactctatcagaagcgcgtcttgaccatcactggcatctgtattgctctgctcgtcgtgggaatcatgtgcgtggtggcatactgcaagactaaaaagcagcggaagaagctgcatgataggcttcggcagtccctgcgctcggagcggaacaacatgatgaacattgccaatggacctcaccacccaaacccgccgccagaaaacgtgcaattggtcaaccagtacgtctcgaaaaatgtgattagctccgagcacatcgtggagcgcgaggccgaaacctccttctccacttcgcactacacttcgaccgcccaccactcgactaccgtgactcagaccccttcgcactcgtggtccaacggacatactgaatcgatcttgtccgagagccattcagtcatcgtaatgtcaagcgtcgagaactcccgccattcatctccgactggagggccacgcgggcgcctgaatgggactgggggaccaagagaatgcaactcgttcctgagacatgcccgcgagactccggactcataccgcgatagcccgcactcggaacggtacgtgtccgctatgaccactcctgcccggatgtcgccggtggatttccatactccaagctcaccgaaatcgcccccgagcgagatgtcgccgccagtctcctcgatgaccgtgtcaatgccgtcgatggccgtgtcgccgttcatggaggaagagaggcctcttctgttggtgactccgccgcggctgcgggagaaaaagtttgatcatcacccccaacaattcagctccttccaccacaacccagcgcatgactcgaacagcctcccggcctcacccctgcggatcgtcgaggatgaggagtacgaaactacccaagagtacgaaccggctcaagaacctgtgaagaagctggccaattcccggcgagctaagagaaccaaaccgaacggacacatcgcgaatcggctcgaggtggactcaaacacttcgtctcagtcctccaattccgaatccgaaactgaagatgagcgcgtgggcgaggacaccccctttctcggaatccaaaatccgctcgcggcgtcgttggaagcgacgcctgcctttagacttgctgatagccggactaatccggcgggaagattttccacccaggaagagatccaggcgcggctctcctccgtcatcgccaatcaagaccccatcgcagtg

SEQ ID NO: 177043 - DNA, 1911 bp, Artificial Sequence
  derived and/or modified sequence
atgagtgagagaaaggagggtcgagggaagggaaaaggaaagaaaaaagagcggggcagcgggaagaaacctgagagcgcagcggggagccagtcacccgccctgccaccacggctcaaggaaatgaagagccaggagagcgcagcaggtagcaaactggttctgcggtgtgagaccagttctgagtatagttcactgcggttcaagtggtttaaaaacggaaacgagttgaaccggaagaacaagccacagaacatcaaaattcaaaagaagcccggtaagagcgagctgcgaattaataaggcctcactcgcggattctggggagtacatgtgtaaggtaatctcaaagttgggtaatgattccgcaagtgcaaatatcactatagtcgaatccaacgagattatcacaggcatgcccgcgtctacagaaggtgcctatgtctcctcagagtctcctattcggataagcgtgtccacggaaggggcaaacacctcaagctctacaagtacctctaccacaggcacttcacatttggtcaaatgtgccgagaaggaaaagacgttctgtgtgaacggcggagagtgttttatggtgaaagacttgtccaacccaagccggtatttgtgcaagtgcccgaatgaatttacaggcgatcggtgccagaactacgtgatggcatccttctacaaggctgaggagctgtaccagaagagagtgctgacaatcactgggatttgcattgccctgctggtggtcggcattatgtgcgtcgttgcgtattgtaagacaaagaagcagcgaaagaagttgcacgatcgactccgacaaagtttgaggtctgagaggaataatatgatgaacattgccaatggtcctcaccaccctaacccacctccagagaatgtgcagctggttaatcagtatgtctccaagaatgtgatcagctctgagcatattgtggagcgcgaggcggagacgagtttcagcaccagtcactatactagcacggctcatcacagcaccactgtcacccagacaccctcccacagctggtctaacgggcacaccgagagcatactgagcgaaagccacagcgtgatcgttatgtcctccgtggagaacagtcgccactccagtccaaccgggggacccaggggtcgacttaacggaaccggcggacctcgcgagtgtaacagtttcctgagacacgcccgcgagactcctgacagttatcgagattcccctcactccgagagatacgtgtccgccatgactacgcccgcacggatgagccctgtcgactttcatacccctagcagccccaagagtccaccctctgaaatgtctccgcctgtgagcagcatgactgtgagcatgccttctatggcagtgagcccctttatggaagaggaacggcccctcctcctggtgacccccccacgcctgagggaaaaaaaatttgaccatcacccgcagcagttctcttcctttcatcacaaccctgcccacgatagtaacagtctccccgccagtccattgcggattgtggaagatgaggaatacgagactacgcaggagtacgagcctgcccaggaaccagtgaaaaagctggccaacagccggagggccaagaggactaagcctaacggtcatattgccaatagactggaagtggattccaacaccagcagtcagagtagtaatagtgaaagcgagaccgaggatgaacgcgttggcgaagatacccctttcctggggattcaaaacccgctcgcagcatcactggaggctacaccggcgttcaggctggccgattccagaaccaaccccgctgggcggttctccacgcaggaagagatccaggcgcggctcagctccgtgattgcaaaccaggatcctatcgcagtg

SEQ ID NO: 177044 - DNA, 1911 bp, Artificial Sequence
  derived and/or modified sequence
atgtctgaaaggaaagaagggaggggcaagggcaaggggaaaaaaaaggaacggggatctgggaaaaagcccgagtccgcagcgggttcccaatcaccggcattgcctcctcggctgaaggagatgaagtcccaggagtcagcagcagggagcaagcttgtgctgcgctgtgaaacctctagcgaatatagtagcctccgctttaaatggtttaagaacggtaacgaattgaatcggaaaaataaaccgcagaacataaagattcagaaaaaaccgggcaaatccgagctcagaatcaacaaggcctccctcgcagactccggcgaatacatgtgtaaggtgatcagcaagctgggcaatgactccgcttctgcaaacataaccatcgttgaatccaatgagattatcacgggaatgcctgcctccaccgagggcgcttatgtgagctctgagtcccccatcaggataagcgtgagtacagaaggtgccaataccagctcatctactagtacgtccacgacaggcacatcccatctcgtgaaatgcgctgagaaagagaaaaccttctgtgtgaatgggggggaatgttttatggtcaaggatctgtctaacccgtcccgctatctctgtaaatgtcccaatgagtttactggagacagatgccagaactacgttatggctagcttttacaaggctgaggagctgtatcagaaaagagtgctgacaatcacaggtatttgcatcgctctgctggtcgtggggatcatgtgcgtggtagcctactgtaagactaaaaagcagaggaaaaaactgcacgacaggctgcggcagtcactccggagtgaacggaacaatatgatgaacatcgctaatgggccacaccatccaaaccccccccctgaaaatgtgcaacttgttaatcaatacgtgtccaaaaatgtgattagcagcgagcacattgttgaacgggaagctgagacttcttttagtacctctcattacaccagtaccgcccaccactcaaccactgtgactcagaccccaagccattcttggtccaacggacacacggaaagtatcttgtccgagtctcacagtgtgattgtcatgtcatcagtggaaaacagccgacactcatcaccgaccggaggtcctcgcggtagacttaatggcaccggtggccccagagagtgcaattctttcctgcgccacgctcgagagacaccggattcctatagggattcccctcacagtgaacggtatgtcagcgcgatgactacacccgccagaatgagtcctgtcgacttccacacaccaagctcccccaagagccctcccagcgagatgtccccccccgtgagttcaatgactgtcagcatgccgtctatggccgtcagcccattcatggaagaagagcggcctcttttgctcgttacccctcctcggcttcgggaaaagaagtttgatcaccacccacaacagttcagcagtttccatcacaatccggcacacgacagcaatagtcttcccgctagtcccctgaggatcgtagaggacgaggaatacgaaacgacacaagaatacgaacccgcccaagagccagtgaagaaacttgccaattctagaagagcaaaacgcacaaagcctaacggtcacatcgcaaatcggctggaagtggactcaaatacaagtagtcagagcagtaattccgagagtgagaccgaagatgagcgggtcggggaggacacacctttcctggggatccagaaccctctggctgcgtccctcgaagcaactcccgcatttcgccttgctgattcaaggactaatcccgccgggcgcttttctacacaggaagagatccaggctcgcttgagctctgtgattgctaaccaggacccaatcgcagtg

SEQ ID NO: 177045 - DNA, 1911 bp, Artificial Sequence
  derived and/or modified sequence
atgtctgaacggaaagaaggtcgggggaaggggaaaggcaaaaaaaaagaacgcggctcgggaaagaagcctgagtctgcagcgggcagccaaagtcctgccctgcctccccgcctgaaggagatgaagtcccaggagtcagccgcggggtccaaattggtgctgaggtgcgagacttcttccgagtactcctcgttgcgatttaagtggtttaagaatggcaatgaactcaatcgaaagaacaagccccagaatataaaaattcagaaaaagccgggcaaaagcgaactccgaattaataaggccagcctggctgacagcggtgagtacatgtgcaaggtgatatccaagctggggaacgatagtgcaagtgccaatatcacaatcgttgagagtaatgaaattatcaccggaatgcctgcgtccacagagggtgcatatgtctcttctgagagcccaatcaggatatccgtttctacggagggtgctaacacatcgtcatcaacatccactagcaccaccggaacctctcatttagtcaaatgcgcagagaaggagaagacattctgcgtgaatgggggggaatgctttatggtcaaggatctgagcaatccctcgaggtacctgtgtaagtgtcccaatgaatttaccggggacagatgccagaactacgtgatggcgtctttctataaggctgaggaactctaccaaaagcgtgtgctgacaatcactggtatttgtattgccctacttgtcgtggggatcatgtgcgtggtggcttactgtaagaccaagaagcagaggaagaaactacacgaccgcctgcgacagtctctgaggtcggagaggaataatatgatgaacatcgcgaacggccctcatcatccaaacccacctcccgaaaatgtacagcttgtgaaccagtatgttagcaaaaacgtcatttcctcggaacacatagtggaacgggaagcggagacctcctttagcactagccactataccagcactgcccaccacagcaccacggtgactcagacaccctcgcactcatggtcaaacggacacactgagagtatcttgtcagagagccactcagtgattgtgatgtcctccgttgaaaattcgagacatagctctcctaccggaggacctagaggacgccttaacggcacgggagggccccgagaatgcaatagcttccttagacatgcccgtgagacgcccgactcatatcgagatagcccgcactctgaacggtacgtctccgccatgacaacacctgcaagaatgagcccggtcgactttcacactccctcgtccccaaaatcccccccttctgagatgagtccccccgtgtcttcaatgacggtcagcatgccatccatggccgtgagcccatttatggaagaggagcggccacttctgctggttacacccccccgattacgggagaagaagtttgaccaccacccccagcaatttagttctttccatcataatccagcgcatgacagcaatagtttgccggctagccctctgaggatcgttgaggacgaggagtatgagacaacccaggagtacgagccagcacaggaacccgtgaagaagctggcaaattcccggcgggcgaagcggaccaaacctaacggacacatcgctaaccggctcgaggtggatagcaatacgtcttcacagtcttctaactctgagtctgagactgaggatgaacgggtcggcgaagacacacctttcttaggaatacaaaaccctctggccgccagcctggaggctactcccgcatttcgacttgctgattctcgcacaaaccctgcgggcaggttttcgacacaggaggaaatccaggctcggctttcaagcgtcatagcaaaccaggatcctatagccgtg

SEQ ID NO: 177046 - DNA, 1911 bp, Artificial Sequence
  derived and/or modified sequence
atgtccgagcggaaagaagggagagggaagggcaagggcaagaaaaaggagcgggggtcagggaagaaacccgaaagtgctgcgggatcccagtctccagcgctgccgccaaggctgaaggagatgaaatcccaagagtccgctgcaggttccaaactcgtactccgctgcgagaccagtagcgaatattcaagtctaagatttaaatggttcaaaaacggaaatgaactcaatcgaaaaaacaagccacagaatattaagatacaaaaaaagccaggtaagtccgaactgcgtatcaataaggcttctttggctgattccggtgagtacatgtgtaaagtcatatcgaagctgggcaacgactctgcaagtgccaatatcaccatcgtggaatctaacgagattataacggggatgcctgcgagcaccgaaggcgcgtacgttagctccgagagccccattcgtataagcgtatccaccgaaggagccaacacctccagttcaacaagcacctccacgacgggcacctcccatctggtcaaatgtgcggagaaggagaagacgttctgtgtgaatggcggcgaatgtttcatggtgaaagacctctccaatccttctcggtatctgtgcaaatgccccaatgaattcacaggtgatagatgccaaaattacgtaatggcctccttttataaagctgaggagctctatcagaagcgggtgctgacaattacaggcatatgtatcgctctccttgtggtggggatcatgtgcgtggtggcatactgcaaaacaaagaaacagaggaaaaagttgcacgatcgcttacggcaatccctgcgtagcgaaagaaacaacatgatgaacattgctaacggccctcatcatcccaaccccccacccgagaacgttcaactggtgaatcagtacgtctctaaaaatgtgatctcctccgaacacatcgtcgaacgcgaagccgaaacaagctttagcacaagtcactatacgtcaaccgcgcaccattccaccacagtgactcaaacgccaagtcattcctggagcaatggtcacaccgagagcattctgagcgagtcccattccgttattgtcatgagttctgtggagaattcacgacactcatccccaaccggcggccctcgcggtagactgaatggcacggggggacccagggagtgtaatagctttctgcgacacgctcgcgaaacgcccgacagttaccgggacagtccccacagtgagcgatatgtgagtgctatgacaacccccgccagaatgagtccagttgacttccacactccttcgtctccgaagtcaccgccttctgagatgtcaccccccgtgtcctcaatgaccgttagcatgccaagtatggccgtgtctccatttatggaggaggagcggcctctgcttctcgtgacaccacccaggctaagggagaaaaagtttgatcaccatccccagcaattcagttcattccatcataaccccgcccacgactccaactcgctgccagcttcccctctgagaattgtcgaggacgaggagtatgaaaccactcaggaatatgagcccgcccaggagccggtcaaaaagttggccaattctcgccgggcaaaacgaactaaaccaaatggccatattgcaaacaggctggaggtggacagcaatacttccagccagagctccaacagcgagagcgaaacagaagatgaacgggtcggggaggatactccattcttaggtattcaaaatcctctggcagcctctctcgaggccacaccagccttcaggctcgcagacagcaggaccaacccagctggtagattttcaacacaggaggagattcaagccagactgagctccgtaattgcaaaccaggacccaattgccgtg

SEQ ID NO: 177047 - DNA, 1911 bp, Artificial Sequence
  derived and/or modified sequence
atgtccgaacggaaggaaggcagaggaaagggaaagggcaagaagaaggaacgcgggtcaggtaagaagccagagtccgcggccggcagccaaagcccagcacttcctcctcggctcaaggagatgaaatcccaagaaagcgcggctggctcgaaacttgtgctccggtgtgaaacttcctcggaatacagcagcctgcggttcaagtggtttaagaatgggaacgagctgaaccgtaagaataagcctcagaacataaagattcaaaagaaaccgggcaaatcagaactgcggatcaataaggcgagcctggccgacagcggcgagtacatgtgcaaggtcattagcaaacttggtaatgattccgcatcggcaaacatcactattgtggagtcgaatgagattatcacgggaatgcctgccagcaccgaaggagcatatgtctcatctgagagcccgattcgaatttcagtgagcactgagggggcaaacacgtcctcctcgacctcaacttccactactggtacttcccatcttgtcaagtgcgcggaaaaagagaaaaccttctgtgtgaacggtggcgaatgttttatggtgaaggacctgtcaaatccatcaagatacctttgcaaatgcccaaacgaattcaccggcgaccgatgccagaactacgtgatggcatcattctataaggccgaagagttgtaccagaagagagttcttaccatcactggaatttgtatcgcactgctcgtggttggaataatgtgcgtcgtggcctactgtaagactaaaaagcagcgtaagaaactgcacgatagactgcggcaatcgcttcgcagcgaacgtaacaatatgatgaacatcgcaaatggtcctcaccaccctaaccctccgcccgaaaatgtgcaacttgtgaaccagtacgtgtccaaaaacgtgatctcatccgagcacatagtggaaagagaagccgaaacttccttctcaacgtcgcattatacttcaaccgcacaccactcaaccactgtgactcagactccaagccattcgtggtccaacggccataccgaatcgattctgtcggaatcacacagcgtcattgtcatgtcgagcgtggaaaacagcaggcatagctcgcctactggagggccccgcggtagacttaatggtaccggtggtccaagagaatgcaacagctttctgcgccacgctcgcgaaacccctgattcataccgggattcgccacatagcgaacgctacgtctccgcaatgactacccccgcccgcatgtcacctgtcgattttcacactccttcctcgccaaagtcaccgccctcagaaatgagcccgcctgtgtcgtcgatgaccgtgtccatgccttcaatggcagtgtcaccatttatggaagaggagcggccattgctgctcgtgaccccaccgaggcttagagaaaagaagtttgatcaccatccacaacaattttctagcttccatcataaccctgctcacgattccaattcgctgcccgcttcccctctgagaattgtggaggatgaagagtatgaaaccactcaagaatacgaaccagcccaggagcctgtcaagaaactcgcgaattcacgcagagcaaagcgaacgaagcctaatggacatatcgcaaatcgactcgaagtcgacagcaacactagctcacagtcgagcaactcggaatcggagactgaagatgaaagggtcggcgaggacacccccttcctcggcattcaaaaccccctggccgcgtctctggaggccacgccggcatttcgccttgcagactcgcgaactaacccagcaggtagattttccacccaggaagagattcaggcaagactgtcgtctgtcatcgcaaatcaagatcctattgcagtg

SEQ ID NO: 177048 - DNA, 1911 bp, Artificial Sequence
  derived and/or modified sequence
atgtccgagcgcaaagagggtcgaggcaaaggcaaaggaaagaagaaagagcgggggtccggaaagaagcccgagagtgccgcaggctcacaaagccctgcgctgccacctaggctaaaggaaatgaaatcacaggagtctgccgctggcagcaagttagtgctacgttgtgaaacatcctcggagtattcatccttgagattcaaatggttcaagaacggcaatgagctgaatcgcaagaataagccccaaaacatcaaaattcagaagaagcccgggaagtcggagctgcgtattaataaagcctctcttgccgattcgggggagtacatgtgtaaggttatcagtaagctcggaaatgactcagcttccgcgaatatcactatcgtggagtctaacgagattatcacgggcatgcccgcttcgaccgaaggcgcttacgtgagttcggagtcacctatccgcatttccgtctcaacggaaggggcaaatacttccagttctacctcaacttcaaccaccggtacgagccatctagtaaagtgtgccgagaaggagaagactttttgtgtgaacggtggggaatgctttatggtaaaggatttgagtaacccttctcggtatttgtgcaagtgtccgaatgaattcacaggcgaccggtgtcaaaactacgtgatggcctctttttataaggccgaggagttgtatcagaaacgtgtcctgaccatcaccgggatttgcattgcgcttctggtcgtgggaataatgtgcgtcgtggcctattgcaagaccaagaagcagcgtaaaaagctacacgacaggctacgacaatctctgcgttctgaacgaaacaacatgatgaatattgccaatggtccccaccacccaaacccgccacctgagaacgtccaactcgtcaatcagtacgtatccaagaacgtgatcagcagtgagcacatcgttgaacgggaggctgagacgtcattttctacgtcccactatactagcaccgctcatcatagcactacagtaactcagaccccgtcgcattcctggtccaatggtcatacagaatctatcctctctgagtcgcattcagtaatcgtcatgtcttccgtcgagaacagtcgacactctagcccaactggtggtcctcgtggacggctcaatgggaccggaggtcctcgtgagtgtaactcgttcttgcgccatgcccgggagactccggacagctatcgagatagcccacacagcgaaaggtatgttagtgcgatgactaccccagcacgcatgtcccctgttgacttccatacaccatcttcgcctaaaagcccaccgtcagagatgagtccgcccgtcagttcgatgaccgtgagcatgccctcgatggctgtcagcccatttatggaggaggaaagacctctgctgctcgtcactccccctcgactccgggagaagaaatttgatcatcatccccagcagtttagttcttttcatcataacccagcacatgatagtaacagtcttcctgcatcccccctgcgtatcgttgaggatgaggagtacgaaacaactcaagagtacgaacccgctcaggagcctgtgaagaaacttgctaacagtaggcgcgccaaacgtactaagcctaatggacatatcgctaatcggttagaggtggactctaatacgtcgagccaatcttcaaactcagagagcgaaactgaggatgagagagtgggagaggatacccccttccttggtatccaaaatcctctcgctgcaagcctcgaggcaactccagcatttcgactggcggactcgcgaacgaatccagccggtagattctccacgcaggaagaaattcaagcgagattgtcgtccgtcatagctaaccaggatcccatcgctgtg

SEQ ID NO: 177049 - DNA, 1911 bp, Artificial Sequence
  derived and/or modified sequence
atgagcgagaggaaggagggtcgcggtaaagggaaagggaaaaaaaaggagagaggctcggggaaaaaaccggagagtgctgctggctctcagagccccgcattgcctccacgcctgaaagagatgaaatcccaggagagtgctgcaggttccaagcttgttttgagatgtgaaacctcttcggagtattcttccttgaggtttaaatggttcaagaacggaaatgaactgaatagaaagaataagccacagaacattaagatacagaagaagcccggcaaatctgagcttaggataaataaggcatctctcgccgattccggggaatacatgtgtaaagttatctctaaacttggtaatgacagcgcctctgctaatatcaccatcgtggaatccaatgaaatcattactgggatgccagcatccacagagggagcctacgtgagcagcgaatccccgatcaggatctccgtttccacagaaggcgctaacacttcgagtagtaccagtacatctactactgggacttctcatttggtaaaatgcgccgagaaagaaaaaaccttctgcgtgaatggcggagagtgctttatggtaaaggatctgtcaaatccatctagatacttatgcaagtgtcccaatgagtttactggggataggtgtcagaattacgtgatggcttctttttacaaagccgaagagctgtatcagaagagagtgctaacaatcaccggcatttgcattgccctgctagtagtgggtattatgtgcgtggtagcttactgcaagacaaaaaagcagcggaaaaaattgcatgataggcttcgtcaatctttgcggtccgagagaaacaacatgatgaacattgcgaatggaccccatcaccctaatcctcctcccgaaaacgtgcagctggtaaaccagtacgtatctaaaaatgtgatttcaagcgagcacatcgtggaacgggaggctgagacaagtttcagcacatcccactacacaagtacggcccaccactctacaactgtcactcagaccccctctcactcttggtccaatggtcatacagaatccatcctgagcgaaagccatagcgtaatagtgatgtcatccgttgagaactccaggcactcctcccctaccggtgggccccgtggccggctgaacggtacgggcggcccacgcgaatgtaacagcttcctgcggcatgcaagggaaactccagacagttatagagactcaccgcattctgaaaggtatgtgagtgccatgaccacacccgcgagaatgtccccagtcgattttcatacaccttcatctccgaaaagtcccccttcagagatgtcccctcccgtgtcttctatgaccgtgtccatgcctagcatggcagttagccccttcatggaagaggagcgccccctcctgcttgtgactcctccaagactcagggagaaaaaattcgaccaccacccacagcagtttagttctttccatcacaaccccgcacacgattcaaactcgctgccggccagccctcttagaattgtagaagacgaggagtacgagaccacccaagagtacgaacctgctcaggagcccgtgaagaagcttgccaattcacgccgagctaagcgtaccaagccaaatggtcacatagcaaaccgattggaggtggatagcaacacttcctctcagtcctccaatagcgaaagcgaaaccgaagacgagagggttggagaagatacaccattccttggaattcagaaccctctggcggcctctctggaggcaacccctgctttcaggctggcagacagccgcacaaaccctgccggacgcttttcaactcaagaagaaattcaggcccgactaagcagcgtaatcgcaaaccaggatccgatcgctgtg

SEQ ID NO: 177050 - DNA, 1914 bp, Artificial Sequence
  derived and/or modified sequence
atgagcgagagaaaggagggcagaggcaagggcaagggcaagaagaaggagagaggcagcggcaagaagcccgagagcgccgccggcagccagagccccgccctgccccccagactgaaggagatgaagagccaggagagcgccgccggcagcaagctggtgctgagatgcgagaccagcagcgagtacagcagcctgagattcaagtggttcaagaacggcaacgagctgaacagaaagaacaagccccagaacatcaagatccagaagaagcccggcaagagcgagctgagaatcaacaaggccagcctggccgacagcggcgagtacatgtgcaaggtgatcagcaagctgggcaacgacagcgccagcgccaacatcaccatcgtggagagcaacgagatcatcaccggcatgcccgccagcaccgagggcgcctacgtgagcagcgagagccccatcagaatcagcgtgagcaccgagggcgccaacaccagcagcagcaccagcaccagcaccaccggcaccagccacctggtgaagtgcgccgagaaggagaagaccttctgcgtgaacggcggcgagtgcttcatggtgaaggacctgagcaaccccagcagatacctgtgcaagtgccccaacgagttcaccggcgacagatgccagaactacgtgatggccagcttctacaaggccgaggagctgtaccagaagagagtgctgaccatcaccggcatctgcatcgccctgctggtggtgggcatcatgtgcgtggtggcctactgcaagaccaagaagcagagaaagaagctgcacgacagactgagacagagcctgagaagcgagagaaacaacatgatgaacatcgccaacggcccccaccaccccaaccccccccccgagaacgtgcagctggtgaaccagtacgtgagcaagaacgtgatcagcagcgagcacatcgtggagagagaggccgagaccagcttcagcaccagccactacaccagcaccgcccaccacagcaccaccgtgacccagacccccagccacagctggagcaacggccacaccgagagcatcctgagcgagagccacagcgtgatcgtgatgagcagcgtggagaacagcagacacagcagccccaccggcggccccagaggcagactgaacggcaccggcggccccagagagtgcaacagcttcctgagacacgccagagagacccccgacagctacagagacagcccccacagcgagagatacgtgagcgccatgaccacccccgccagaatgagccccgtggacttccacacccccagcagccccaagagcccccccagcgagatgagcccccccgtgagcagcatgaccgtgagcatgcccagcatggccgtgagccccttcatggaggaggagagacccctgctgctggtgaccccccccagactgagagagaagaagttcgaccaccacccccagcagttcagcagcttccaccacaaccccgcccacgacagcaacagcctgcccgccagccccctgagaatcgtggaggacgaggagtacgagaccacccaggagtacgagcccgcccaggagcccgtgaagaagctggccaacagcagaagagccaagagaaccaagcccaacggccacatcgccaacagactggaggtggacagcaacaccagcagccagagcagcaacagcgagagcgagaccgaggacgagagagtgggcgaggacacccccttcctgggcatccagaaccccctggccgccagcctggaggccacccccgccttcagactggccgacagcagaaccaaccccgccggcagattcagcacccaggaggagatccaggccagactgagcagcgtgatcgccaaccaggaccccatcgccgtgtag

SEQ ID NO: 177051 - DNA, 1452 bp, Artificial Sequence
  derived and/or modified sequence
atgcagatccccaagcacatcagcatcgaggacatcaccgccaccagcaccagcaccaccggcaccagccacctggtgaagtgcgccgagaaggagaagaccttctgcgtgaacggcggcgagtgcttcatggtgaaggacctgagcaaccccagcagatacctgtgcaagtgccccaacgagttcaccggcgacagatgccagaactacgtgatggccagcttctacaaggccgaggagctgtaccagaagagagtgctgaccatcaccggcatctgcatcgccctgctggtggtgggcatcatgtgcgtggtggcctactgcaagaccaagaagcagagaaagaagctgcacgacagactgagacagagcctgagaagcgagagaaacaacatgatgaacatcgccaacggcccccaccaccccaaccccccccccgagaacgtgcagctggtgaaccagtacgtgagcaagaacgtgatcagcagcgagcacatcgtggagagagaggccgagaccagcttcagcaccagccactacaccagcaccgcccaccacagcaccaccgtgacccagacccccagccacagctggagcaacggccacaccgagagcatcctgagcgagagccacagcgtgatcgtgatgagcagcgtggagaacagcagacacagcagccccaccggcggccccagaggcagactgaacggcaccggcggccccagagagtgcaacagcttcctgagacacgccagagagacccccgacagctacagagacagcccccacagcgagagatacgtgagcgccatgaccacccccgccagaatgagccccgtggacttccacacccccagcagccccaagagcccccccagcgagatgagcccccccgtgagcagcatgaccgtgagcatgcccagcatggccgtgagccccttcatggaggaggagagacccctgctgctggtgaccccccccagactgagagagaagaagttcgaccaccacccccagcagttcagcagcttccaccacaaccccgcccacgacagcaacagcctgcccgccagccccctgagaatcgtggaggacgaggagtacgagaccacccaggagtacgagcccgcccaggagcccgtgaagaagctggccaacagcagaagagccaagagaaccaagcccaacggccacatcgccaacagactggaggtggacagcaacaccagcagccagagcagcaacagcgagagcgagaccgaggacgagagagtgggcgaggacacccccttcctgggcatccagaaccccctggccgccagcctggaggccacccccgccttcagactggccgacagcagaaccaaccccgccggcagattcagcacccaggaggagatccaggccagactgagcagcgtgatcgccaaccaggaccccatcgccgtgtag

SEQ ID NO: 177052 - DNA, 2102 bp, Artificial Sequence
  derived and/or modified sequence
taatacgactcactatagggaaataagagagaaaagaagagtaagaagaaatataagagccaccatgtcagagcggaaagaaggaaggggaaagggtaaagggaagaaaaaggaacgcggatcggggaagaaaccggaatcagccgctggctcacagtcgccggcactgccaccccggctcaaggagatgaagagccaggaatccgcggctgggtcgaagcttgtgttgagatgcgaaacgtccagcgagtactcatcacttcggtttaagtggtttaagaatggaaacgagctcaataggaagaacaagccccagaatatcaagatccagaagaaacccgggaaatccgaacttcggatcaacaaagcgtccctggcggactccggggagtacatgtgtaaagtcatcagcaaactcggtaacgattcagcctccgctaatatcacgatcgtcgagtcgaatgagatcattaccggtatgccggcgtccacggagggagcatatgtgtcgtcggaaagccccatcaggatttccgtgtcgactgaaggagcaaatacaagctcgtccaccagcacgagcacgacggggacgtcacatctcgtgaaatgcgccgaaaaggagaaaactttctgcgtcaatggtggagaatgcttcatggtgaaggatctttcaaacccctcccggtacctctgcaaatgtccgaacgagtttaccggggaccggtgtcagaactatgtaatggccagcttctataaagccgaagagctgtaccagaagcgagtgttgacgatcacaggcatctgcattgcactccttgtcgtaggaatcatgtgtgtggtggcgtattgcaaaacaaagaagcagcgcaaaaagttgcacgaccgactgcgccagtcgttgaggagcgagcgaaacaatatgatgaatattgcaaatgggccccatcacccgaacccgccacccgagaacgtacaactggtgaaccagtatgtctcgaaaaacgtcatctcgtcggaacatatcgtggaacgggaggcggaaacaagcttcagcacatcgcactacacgagcactgcccaccactccacgaccgtgacacagacgcccagccactcatggtcgaacggtcatacagagtcgatcctgtcagagtcccattcagtaattgtaatgtcgtccgtcgaaaattcaaggcactcaagccccacgggagggcctagaggccgcctcaacgggactggcggtcctcgagaatgtaattccttcttgagacacgcgagggaaacgcccgattcgtacagagattcaccccactcggagcgctatgtcagcgcgatgaccactcccgccagaatgtcgccggtggattttcatacaccttcgtcccctaagtcaccgcctagcgagatgtcgccgcctgtatcatccatgacagtgagcatgccctcgatggccgtgtcaccgtttatggaggaggaaaggcccctgttgttggtcacaccaccaagacttcgggagaaaaagttcgaccaccatccgcagcagttctcgtcgttccaccataatccggcgcacgatagcaactccctcccggcatcgcctctccggattgtcgaagatgaggagtacgaaacgacccaagaatacgaacccgcgcaagagccggtaaagaagctcgcaaatagcagaagggcgaaacgcaccaaaccaaacggacacattgcgaacaggcttgaggtcgacagcaatacctcgtcccagtcgtcaaactccgagagcgagacagaggacgagcgagtcggggaggacacaccttttctcggaatccaaaacccgcttgcagcgtcgttggaagccacgccagcgtttagacttgcggactcacggactaaccctgccggaaggttctcgacgcaagaggagattcaggctaggttgtcctcggtgattgctaatcaggaccccatcgccgtgtgataataggctgccttctgcggggcttgccttctggccatgcccttcttctctcccttgcacctgtacctcttggtctttgaataaagcctgagtaggaaggcggccgctcgagcatgcatctaga

SEQ ID NO: 177053 - DNA, 2060 bp, Artificial Sequence
  derived and/or modified sequence
gggaaataagagagaaaagaagagtaagaagaaatataagagccaccatgtcagagcggaaagaaggaaggggaaagggtaaagggaagaaaaaggaacgcggatcggggaagaaaccggaatcagccgctggctcacagtcgccggcactgccaccccggctcaaggagatgaagagccaggaatccgcggctgggtcgaagcttgtgttgagatgcgaaacgtccagcgagtactcatcacttcggtttaagtggtttaagaatggaaacgagctcaataggaagaacaagccccagaatatcaagatccagaagaaacccgggaaatccgaacttcggatcaacaaagcgtccctggcggactccggggagtacatgtgtaaagtcatcagcaaactcggtaacgattcagcctccgctaatatcacgatcgtcgagtcgaatgagatcattaccggtatgccggcgtccacggagggagcatatgtgtcgtcggaaagccccatcaggatttccgtgtcgactgaaggagcaaatacaagctcgtccaccagcacgagcacgacggggacgtcacatctcgtgaaatgcgccgaaaaggagaaaactttctgcgtcaatggtggagaatgcttcatggtgaaggatctttcaaacccctcccggtacctctgcaaatgtccgaacgagtttaccggggaccggtgtcagaactatgtaatggccagcttctataaagccgaagagctgtaccagaagcgagtgttgacgatcacaggcatctgcattgcactccttgtcgtaggaatcatgtgtgtggtggcgtattgcaaaacaaagaagcagcgcaaaaagttgcacgaccgactgcgccagtcgttgaggagcgagcgaaacaatatgatgaatattgcaaatgggccccatcacccgaacccgccacccgagaacgtacaactggtgaaccagtatgtctcgaaaaacgtcatctcgtcggaacatatcgtggaacgggaggcggaaacaagcttcagcacatcgcactacacgagcactgcccaccactccacgaccgtgacacagacgcccagccactcatggtcgaacggtcatacagagtcgatcctgtcagagtcccattcagtaattgtaatgtcgtccgtcgaaaattcaaggcactcaagccccacgggagggcctagaggccgcctcaacgggactggcggtcctcgagaatgtaattccttcttgagacacgcgagggaaacgcccgattcgtacagagattcaccccactcggagcgctatgtcagcgcgatgaccactcccgccagaatgtcgccggtggattttcatacaccttcgtcccctaagtcaccgcctagcgagatgtcgccgcctgtatcatccatgacagtgagcatgccctcgatggccgtgtcaccgtttatggaggaggaaaggcccctgttgttggtcacaccaccaagacttcgggagaaaaagttcgaccaccatccgcagcagttctcgtcgttccaccataatccggcgcacgatagcaactccctcccggcatcgcctctccggattgtcgaagatgaggagtacgaaacgacccaagaatacgaacccgcgcaagagccggtaaagaagctcgcaaatagcagaagggcgaaacgcaccaaaccaaacggacacattgcgaacaggcttgaggtcgacagcaatacctcgtcccagtcgtcaaactccgagagcgagacagaggacgagcgagtcggggaggacacaccttttctcggaatccaaaacccgcttgcagcgtcgttggaagccacgccagcgtttagacttgcggactcacggactaaccctgccggaaggttctcgacgcaagaggagattcaggctaggttgtcctcggtgattgctaatcaggaccccatcgccgtgtgataataggctgccttctgcggggcttgccttctggccatgcccttcttctctcccttgcacctgtacctcttggtctttgaataaagcctgagtaggaag

SEQ ID NO: 177054 - DNA, 1914 bp, Artificial Sequence
  derived and/or modified sequence
atgagcgaaaggaaggagggccggggtaagggaaagggaaaaaaaaaagagcgaggtagcggcaagaagcccgaaagtgcagccgggagccagtcaccagcgcttccaccccggctcaaggagatgaaatcccaggaatccgctgctggaagtaaattagtgctgagatgcgaaacaagttctgagtattctagcttgcgatttaagtggtttaaaaacggcaacgagctgaatcggaagaataaaccacagaacataaagatccagaagaagcccggtaagtcggagctaaggatcaataaggcaagcttggctgactctggcgagtatatgtgcaaagtaatttctaagctcgggaatgacagcgccagtgccaacatcactattgtcgagagtaatgaaatcattactgggatgcccgcgtccaccgaaggcgcctacgtgagctctgaatcgccaattagaatatctgtctctacagaaggcgcgaacacaagctcaagcaccagcacgtcaaccaccggaacttcacacctggtgaagtgcgcagagaaggagaaaacgttttgtgtgaacggtggcgaatgttttatggtgaaggacctcagcaatccttcccggtatctttgcaaatgtcctaatgaattcactggcgaccggtgccaaaactacgttatggctagtttttacaaagcagaagagctataccaaaagagggtcttgacaatcactggcatatgtatagctcttcttgtggtgggtatcatgtgcgtagtcgcttactgtaagacgaagaagcagcgcaagaagctccatgacaggcttcggcagagtcttaggtctgaacgaaataacatgatgaatattgccaacggacctcaccatccaaatccaccgccagagaatgttcagcttgtgaatcagtatgtctccaagaacgtaatctcatctgaacacatcgtggagcgcgaggctgagacatcgttcagtacttcacactatacatcaactgcgcatcactctaccacagtcactcagactcccagccactcgtggagcaatggccacactgaatctatacttagcgaatcccattctgtgattgttatgtcttctgtggagaatagcagacattctagtcccactgggggtccaagaggccggcttaacgggacagggggtccacgggaatgtaactcctttcttcgccatgctcgggaaacaccagattcgtacagggactccccgcacagcgaaaggtatgtctcagctatgacaacgccagctaggatgtctcctgtcgactttcacaccccatcatcaccgaagtctcccccctcagaaatgagcccaccagtttcctctatgaccgttagtatgcccagcatggcagtgagtccattcatggaagaggagcgccctctgctccttgtgacccctcctcgccttcgcgagaaaaagttcgaccaccacccccagcagttcagctcattccatcataatccggctcacgattccaactctctacccgcctcacctcttaggatagtggaggatgaggaatatgagacgactcaggagtacgagcctgcccaggagccagtaaagaaattggccaattcaaggcgagcaaagaggactaaacccaatggccacatcgcaaaccgtctggaggttgactccaatacctccagtcaatcatcaaattcagaatctgagaccgaggacgagcgcgtaggagaggacacacccttcctcgggatccagaacccgctggcagccagcctcgaggccacaccagcattccgactagccgactcacgaaccaaccccgctgggcggttctcaacccaggaggaaatacaagcgcgtctgtccagtgtgatagcaaaccaagaccctatcgccgtgtag

SEQ ID NO: 177055 - DNA, 1452 bp, Artificial Sequence
  derived and/or modified sequence
atgcaaatacccaaacacattagcatagaggacataaccgcaacgtccacaagtaccacaggcacttcccacttggtcaaatgcgcagaaaaagaaaagaccttctgtgtgaatggaggggagtgcttcatggttaaggacttaagtaaccccagtcggtacttgtgcaagtgcccaaacgagtttactggggataggtgccagaattacgttatggcctcattttacaaggcagaagaattgtatcagaaacgggtgctcacgatcaccggcatttgtatcgcgttgttggtggtcgggataatgtgtgtcgtagcatattgcaagactaaaaagcagcggaagaagttacacgatcgtttgaggcaaagcctgagaagtgagcggaacaacatgatgaacatcgccaacggtccacaccatcccaacccgccgcccgaaaacgtccagctggtgaaccaatatgtgtctaagaatgttatcagctccgaacacatagtagagcgggaggcggagacaagtttctccacgagccactacaccagtacagcacatcacagcacaaccgttactcagacaccctcgcattcttggtcgaacggtcatacagaatctattctctcagagagtcatagcgtgatcgtaatgtcctccgtggagaatagccgtcatagttctccgactgggggcccccgcggacggctaaatggtaccggtggcccacgtgagtgcaactcatttttaagacatgcaagggaaacacctgatagctatagggactcccctcactccgaacgctatgtttcagccatgacaacgccagcccgaatgagccccgtggacttccatactccatcctcaccaaagtcaccgcccagtgagatgagtcctcccgtgtcatccatgacagtgtccatgccgtccatggccgtgtccccgttcatggaggaggagcgtcctttactattagtcacccccccccgtttacgggaaaagaaattcgaccatcaccctcaacagttcagcagttttcaccacaatcccgcacacgacagcaattcacttcctgcatccccactgcgaatcgtggaagatgaagagtatgaaaccacccaggaatatgaaccagcacaggaacctgttaagaaactcgcgaactcccggcgggcaaagagaacaaaaccgaacggacacatcgctaaccgactagaagttgacagcaatacctctagccagagcagcaattctgagagtgagacagaagatgagagggtgggtgaggacacaccattcctggggattcaaaatcccctcgcggcatccctggaagccaccccggcctttcggctggccgatagccgaaccaacccggccggaagattctcgacccaggaggaaatacaggcaagactgtcctcagtgattgcaaaccaagaccctatcgcggtgtag

SEQ ID NO: 177056 - DNA, 1914 bp, Artificial Sequence
  derived and/or modified sequence
atgtctgagaggaaggagggccggggcaagggcaagggcaagaagaaggagcggggcagcggcaagaagccagagagcgctgctggcagccagagccctgccctgcccccccggctgaaggagatgaagagccaggagagcgctgctggcagcaagctggtgctgcgctgtgagaccagcagcgagtacagcagcctgcgcttcaagtggttcaagaatggaaatgagctgaacaggaagaacaagccccagaacatcaagatccagaagaagccaggcaagtctgagctgcgcatcaacaaggccagcctggccgacagcggggagtacatgtgcaaggtgatcagcaagctgggcaatgacagcgccagcgccaacatcaccatcgtggagagcaatgagatcatcaccggcatgcctgccagcacagaaggagcctacgtgagcagcgagagccccatccgcatctctgtgtccacagagggcgccaacaccagcagcagcaccagcaccagcaccaccggcaccagccacctggtgaagtgtgccgagaaggagaagaccttctgtgtgaatggaggagagtgcttcatggtgaaggacctgagcaaccccagccgctacctgtgcaagtgccccaatgagttcaccggggaccgctgccagaactacgtgatggccagcttctacaaggccgaggagctgtaccagaagagggtgctgaccatcaccggcatctgcatcgccctgctggtggtgggcatcatgtgtgtggtggcctactgcaagaccaagaagcagaggaagaagctgcatgaccggctgcggcagagcctgcggagtgaaagaaacaacatgatgaacatcgccaacggcccccaccaccccaaccccccaccagaaaatgtgcagctggtgaaccagtatgtgtccaagaatgtcatcagcagcgagcacatcgtggagcgggaggccgagaccagcttcagcaccagccactacaccagcacagcccaccacagcaccaccgtgacccagacccccagccacagctggagcaatggccacacagagagcatcctgtctgagagccacagcgtcatcgtgatgagctctgtggagaacagccgccacagcagccccaccggcggcccccggggccgcctgaatggcaccggcggcccccgggagtgcaacagcttcctgcggcatgcccgggagaccccagacagctacagagacagcccccacagcgagagatatgtgtctgccatgaccaccccagccaggatgagccctgtggacttccacacccccagcagccccaagagccccccatctgagatgagcccccctgtgtcctccatgacagtgtccatgcccagcatggctgtgagccccttcatggaggaggagcggcccctgctgctggtgaccccaccccggctgcgggagaagaagtttgaccaccacccccagcagttcagcagcttccaccacaacccagcccatgacagcaacagcctgcctgccagccccctgcgcatcgtggaggatgaggagtatgagaccacccaggagtatgagcccgcccaggagcctgtgaagaagctggccaacagccggcgggccaagaggaccaagcccaacggccacatcgccaaccggctggaggtggacagcaacaccagcagccagagcagcaacagcgagagcgagacagaagatgagcgggtgggggaggacacccccttcctgggcatccagaaccccctggccgccagcctggaggccaccccagccttccggctggccgacagcaggaccaacccagctggccgcttcagcacccaggaggagatccaggcccggctgagctctgtgattgccaaccaggaccccatcgctgtgtag

SEQ ID NO: 177057 - DNA, 1452 bp, Artificial Sequence
  derived and/or modified sequence
atgcagatccccaagcacatcagcattgaggacatcacagccaccagcaccagcaccaccggcaccagccacctggtgaagtgtgccgagaaggagaagaccttctgtgtgaatggaggagagtgcttcatggtgaaggacctgagcaaccccagccgctacctgtgcaagtgccccaatgagttcaccggggaccgctgccagaactacgtgatggccagcttctacaaggccgaggagctgtaccagaagagggtgctgaccatcaccggcatctgcatcgccctgctggtggtgggcatcatgtgtgtggtggcctactgcaagaccaagaagcagaggaagaagctgcatgaccggctgcggcagagcctgcggagtgaaagaaacaacatgatgaacatcgccaacggcccccaccaccccaaccccccaccagaaaatgtgcagctggtgaaccagtatgtgtccaagaatgtcatcagcagcgagcacatcgtggagcgggaggccgagaccagcttcagcaccagccactacaccagcacagcccaccacagcaccaccgtgacccagacccccagccacagctggagcaatggccacacagagagcatcctgtctgagagccacagcgtcatcgtgatgagctctgtggagaacagccgccacagcagccccaccggcggcccccggggccgcctgaatggcaccggcggcccccgggagtgcaacagcttcctgcggcatgcccgggagaccccagacagctacagagacagcccccacagcgagagatatgtgtctgccatgaccaccccagccaggatgagccctgtggacttccacacccccagcagccccaagagccccccatctgagatgagcccccctgtgtcctccatgacagtgtccatgcccagcatggctgtgagccccttcatggaggaggagcggcccctgctgctggtgaccccaccccggctgcgggagaagaagtttgaccaccacccccagcagttcagcagcttccaccacaacccagcccatgacagcaacagcctgcctgccagccccctgcgcatcgtggaggatgaggagtatgagaccacccaggagtatgagcccgcccaggagcctgtgaagaagctggccaacagccggcgggccaagaggaccaagcccaacggccacatcgccaaccggctggaggtggacagcaacaccagcagccagagcagcaacagcgagagcgagacagaagatgagcgggtgggggaggacacccccttcctgggcatccagaaccccctggccgccagcctggaggccaccccagccttccggctggccgacagcaggaccaacccagctggccgcttcagcacccaggaggagatccaggcccggctgagctctgtgattgccaaccaggaccccatcgctgtgtag

SEQ ID NO: 177058 - DNA, 1914 bp, Artificial Sequence
  derived and/or modified sequence
atgagcgagcggaaggagggccggggcaagggcaagggcaagaagaaagaaaggggctctggaaagaaacccgaatccgccgcgggttcccaatcgccagctctgcctcccaggttgaaggaaatgaaaagccaggagtccgccgctggttctaagttggtgctaaggtgcgaaacctccagcgagtactcaagtctgaggttcaagtggtttaaaaatggaaacgagttaaataggaaaaataagccacaaaacatcaaaattcagaagaagcccggaaaatcagaactccgaattaataaagccagcctggccgacagcggagagtatatgtgcaaagtaatcagcaaactgggtaacgacagtgcctcggctaatatcactattgtggagagcaatgagattatcacgggtatgccagcgagcacagaaggcgcttacgtgtcttccgagagtcctatcagaattagcgtgagtacagagggggccaacaccagttcaagtacatccacatctaccaccggtacatcacacctcgtcaagtgcgcagagaaggagaagacgttctgtgtcaacgggggagagtgctttatggtcaaagacctctccaacccctcacggtacttgtgtaagtgtcctaacgaattcaccggcgacaggtgccagaattacgtgatggcctctttttataaagctgaggagctgtaccaaaaacgcgtgctcactataaccggaatttgcatcgctcttctggtcgtaggcataatgtgtgtcgtcgcctattgcaagactaagaagcagcggaaaaaactgcacgaccggctgaggcagagcctgagatctgagcgcaataacatgatgaatattgctaacgggccccaccatcctaatccacctccagagaatgtacaacttgtgaaccagtacgtgtctaagaacgttatatcttcagagcacatagtagagagggaagcagaaacatcttttagtacgtcacactatacctctaccgcccatcattccaccacagtcacccagaccccttctcacagttggagtaatgggcataccgaatcgatcctgagcgagagccattcagtgatagtgatgtcaagtgtggaaaactcccgccacagctcccctactggaggcccgaggggtcggctgaatggaacaggcggcccacgcgagtgtaatagctttctgagacacgcccgcgaaacaccagacagctaccgcgactctcctcattctgagcgctacgtgagtgctatgaccacacctgccaggatgagtccggttgactttcatacccccagcagccccaagtcacccccttcagagatgagcccacctgtgagtagtatgaccgtcagcatgccttcaatggccgttagtcctttcatggaggaagagaggccattgctgcttgtgacgcctccacggctgcgggaaaaaaagtttgaccatcatccccagcagttctctagctttcatcacaatcctgcccatgactccaattcgcttcctgcctctccattaagaattgtagaggatgaggagtacgagaccactcaagagtacgagccagcccaggagccagtgaaaaagctggccaactctaggcgggccaaacgtacaaaaccaaatggccatatcgccaatcggctcgaggtggacagcaacacaagttcccagtcctcgaacagcgaatcagaaacagaggacgaaagagtgggcgaagataccccattcctggggatccaaaatcccttagccgcctcgttggaggccacaccggcttttcgcctcgccgattcacggactaatccagcaggacgattttcgactcaagaggagatacaggcccggctatcttctgtgatagcaaatcaggatcccatcgcggtctag

SEQ ID NO: 177059 - DNA, 1452 bp, Artificial Sequence
  derived and/or modified sequence
atgcagatccccaagcacatcagcatcgaggacatcaccgccacctcaacatcaacgaccggcacctcacacctggttaaatgtgccgaaaaggaaaaaacattttgcgttaatgggggcgagtgtttcatggttaaggacctcagcaatccaagtcgctacctgtgtaaatgtccaaatgagttcaccggagaccgctgccagaattatgttatggcctctttctataaagcagaagaattatatcagaaaagggtcctcaccattacgggcatttgtattgcactccttgttgtcggaatcatgtgtgtcgtcgcatattgcaaaacgaagaagcagcgcaaaaaactgcatgacagactccggcagagtctgagaagcgagaggaacaacatgatgaacattgccaacggaccacatcatcctaatccccccccagagaatgtgcagctcgttaaccaatatgtgagcaagaacgtcatctcttccgaacacattgtggagcgagaggccgaaactagctttagcacaagtcattatacctcgactgcccatcattctactaccgtgacacagactccttctcattcttggagcaacggacacacagaatccattctctcagagagccacagcgttattgttatgtcctcggtcgagaacagccgtcactcctctcctactggagggcccagaggaaggctgaatgggaccggtggcccgcgcgagtgtaatagctttcttcgccacgcacgggagactcctgatagctatagggattcccctcacagtgagcgatacgtcagcgctatgactacccccgctcggatgagcccggttgactttcatactccctcaagcccaaaatcaccccccagcgagatgagccctcctgtatcctcaatgacagtgtcaatgcctagtatggctgtgtctccgttcatggaagaagagagaccgctcttactcgtgactcctccccgtttgcgggaaaagaagtttgatcaccacccccagcagttctcttcatttcatcacaaccctgcgcacgattctaacagcctgcctgcttcacccctccgcattgtggaggacgaagagtacgaaacaacccaagagtatgagcctgcgcaggagcccgtaaagaagcttgccaattcgagaagggcaaaaaggacaaagccaaatggccacatagctaataggctggaggtggacagcaatacttcctcccagtcttccaacagtgaaagcgagaccgaggatgaacgagttggcgaggataccccgtttctgggcatccagaatcctctcgccgccagcctggaggccactcctgcatttcgtcttgcagattccaggaccaacccagccggccggttttccacacaggaggagatccaggctagattgtcatcggtgatcgcaaaccaggatccaatcgctgtttag

SEQ ID NO: 177060 - DNA, 1914 bp, Artificial Sequence
  derived and/or modified sequence
atgagcgagagaaaagagggtaggggtaaaggtaagggaaagaagaaagaacgcggatctggcaaaaaacctgagtctgccgcaggatcccagagcccggctctcccaccaaggctgaaggagatgaaatcgcaagagtccgctgcaggttcaaagctggtgctgcgatgcgaaacttcctctgaatattcttcccttaggtttaagtggttcaagaatgggaacgagctaaatcggaagaacaagccgcagaacatcaagattcagaagaaacccggaaaatccgagctccgaattaataaggccagcttggctgattctggggaatatatgtgtaaggttatcagcaagcttggcaatgactctgcttcggcaaacattaccatagttgaatctaacgagattattacagggatgcctgcatctacagagggagcctatgtgagctccgaatcccccatccgaatttccgtcagcacggaaggtgccaatacatcctcttcgacatcaacttccactaccggtacatcccatctcgtaaagtgcgccgagaaagagaaaacattttgcgtcaatggaggcgagtgttttatggtcaaggatttgagtaatccgtcacgctatctgtgcaagtgccccaatgaattcacgggggacagatgtcaaaactacgttatggcctctttctataaggctgaggagctctatcagaagcgtgtgctcaccattaccggcatctgtatcgcactgctggtcgtgggaattatgtgtgttgttgcttattgcaagactaaaaagcagagaaaaaaactccacgacagactcagacagtctctgagaagtgagcgcaacaatatgatgaacatcgcaaacggtccgcaccaccccaatcctccgccagaaaacgtccagttggtgaaccagtatgtgagtaaaaatgtgatttccagcgaacacatcgttgagagagaggctgagacctctttctccacaagccactacaccagcactgcccaccactctaccaccgtgactcagacacctagccactcctggagcaatgggcataccgagagcatcctgtctgaatcccactctgttatcgtcatgtcctccgtcgagaattcgcggcattcttctcctactggtgggcctcgtggcaggcttaatggaacaggtggtccaagggagtgtaacagctttctcaggcatgctagagaaactcccgacagctacagagactccccacattccgagcgttacgtgtcggccatgaccacaccagcccgtatgagccccgtggattttcacaccccttcaagtcctaagagcccgccatccgagatgagccccccagtctctagcatgaccgtgtccatgcccagtatggccgtaagcccgttcatggaagaagaacggccactactgctggtgaccccgcctcggttgcgagagaaaaagttcgatcatcacccccagcaattttcatcctttcaccacaaccccgctcatgattcaaacagtttgcccgcttctcccctgagaatcgtagaagatgaagagtatgaaacaactcaagaatacgagccagctcaggaaccggttaagaagctagccaacagtcgtagggctaagaggaccaagcccaatgggcatatcgccaacagacttgaagtggatagtaacacaagttctcagagctcaaattctgagtcagaaactgaagatgagagggtcggagaagacaccccattcctgggaattcagaaccccctggccgcatccctcgaagctacgccggcattcagactggctgattcccgcacaaatcccgctggacgcttcagtacccaggaagaaatccaggcccgattatccagtgttatcgccaaccaggacccaatcgcggtttag

SEQ ID NO: 177061 - DNA, 1452 bp, Artificial Sequence
  derived and/or modified sequence
atgcagatccccaaacacattagcattgaagacatcacagccacctcaaccagtaccacaggtacatcccaccttgtcaagtgcgcggagaaggagaagactttctgcgttaacggcggagaatgcttcatggtgaaagacctgagtaacccaagccgttacctgtgtaagtgcccaaacgagttcaccggcgatcggtgccagaattatgtaatggccagcttttataaggccgaagagttatatcagaaaagagttttgactataactggcatttgcatagctttgcttgtcgtggggataatgtgcgtggtcgcctattgcaagaccaagaagcagcggaagaagctccatgatagattacgccagagcctgcgctccgagcgcaataacatgatgaacattgccaatggaccccatcatcctaatccaccccctgagaacgtccagctcgtgaaccagtacgtgagcaagaacgtgatttctagcgaacacattgtggagcgggaagccgagactagtttcagcacatctcattatacctctacagcccatcactccacaaccgtcactcagacgccttctcattcgtggtccaatggacacaccgagtccatcttgtctgaaagtcactcagtcatcgtcatgtcctctgttgaaaactccaggcatagctccccaacgggaggccctcgtggcaggttgaacggtactggaggccctcgcgagtgcaacagcttcctgcggcatgccagagaaacccccgattcttatcgggacagtcctcatagcgagcgctacgtaagtgcaatgactactcctgctagaatgtcacccgtcgatttccacacaccctcgagtcccaaatctcctccctctgaaatgtctcctccagtgtcaagcatgaccgtcagcatgccctccatggctgtgtcccctttcatggaggaagagaggcctctgcttctggtaacccccccaagactgcgagaaaaaaaatttgaccaccatcctcagcagttcagttccttccaccataatccagcgcatgattccaacagcctgccagcttctccccttcgcatcgtggaggatgaggagtacgagacaacacaggagtacgagccagcacaggagcctgtcaaaaaactggctaactctcgacgagctaagagaactaagccaaacggacatattgcgaaccggctggaggttgactccaatacatcatcccagagctcgaattcggaatctgaaacagaggacgagagggtgggagaggatactcctttcctgggaatacagaatccattggcggcttctctggaggctactcctgcatttaggctggccgacagtcgaactaaccctgcaggtagattttctacccaggaagaaattcaggcacggctgtcttccgttatcgccaatcaggatcctatcgctgtgtag

SEQ ID NO: 177062 - DNA, 2483 bp, Artificial Sequence
  derived and/or modified sequence
gtggctgcggggcaattgaaaaagagccggcgaggagttccccgaaacttgttggaactccgggctcgcgcggaggccaggagctgagcggcggcggctgccggacgatgggagcgtgagcaggacggtgataacctctccccgatcgggttgcgagggcgccgggcagaggccaggacgcgagccgccagcggtgggacccatcgacgacttcccggggcgacaggagcagccccgagagccagggcgagcgcccgttccaggtggccggaccgcccgccgcgtccgcgccgcgctccctgcaggcaacgggagacgcccccgcgcagcgcgagcgcctcagcgcggccgctcgctctccccctcgagggacaaacttttcccaaacccgatccgagcccttggaccaaactcgcctgcgccgagagccgtccgcgtagagcgctccgtctccggcgagatgtccgagcgcaaagaaggcagaggcaaagggaagggcaagaagaaggagcgaggctccggcaagaagccggagtccgcggcgggcagccagagcccagccttgcctccccgattgaaagagatgaaaagccaggaatcggctgcaggttccaaactagtccttcggtgtgaaaccagttctgaatactcctctctcagattcaagtggttcaagaatgggaatgaattgaatcgaaaaaacaaaccacaaaatatcaagatacaaaaaaagccagggaagtcagaacttcgcattaacaaagcatcactggctgattctggagagtatatgtgcaaagtgatcagcaaattaggaaatgacagtgcctctgccaatatcaccatcgtggaatcaaacgagatcatcactggtatgccagcctcaactgaaggagcatatgtgtcttcagagtctcccattagaatatcagtatccacagaaggagcaaatacttcttcatctacatctacatccaccactgggacaagccatcttgtaaaatgtgcggagaaggagaaaactttctgtgtgaatggaggggagtgcttcatggtgaaagacctttcaaacccctcgagatacttgtgcaagtgcccaaatgagtttactggtgatcgctgccaaaactacgtaatggccagcttctacaaggcggaggagctgtaccagaagagagtgctgaccataaccggcatctgcatcgccctccttgtggtcggcatcatgtgtgtggtggcctactgcaaaaccaagaaacagcggaaaaagctgcatgaccgtcttcggcagagccttcggtctgaacgaaacaatatgatgaacattgccaatgggcctcaccatcctaacccaccccccgagaatgtccagctggtgaatcaatacgtatctaaaaacgtcatctccagtgagcatattgttgagagagaagcagagacatccttttccaccagtcactatacttccacagcccatcactccactactgtcacccagactcctagccacagctggagcaacggacacactgaaagcatcctttccgaaagccactctgtaatcgtgatgtcatccgtagaaaacagtaggcacagcagcccaactgggggcccaagaggacgtcttaatggcacaggaggccctcgtgaatgtaacagcttcctcaggcatgccagagaaacccctgattcctaccgagactctcctcatagtgaaaggtatgtgtcagccatgaccaccccggctcgtatgtcacctgtagatttccacacgccaagctcccccaaatcgcccccttcggaaatgtctccacccgtgtccagcatgacggtgtccatgccttccatggcggtcagccccttcatggaagaagagagacctctacttctcgtgacaccaccaaggctgcgggagaagaagtttgaccatcaccctcagcagttcagctccttccaccacaaccccgcgcatgacagtaacagcctccctgctagccccttgaggatagtggaggatgaggagtatgaaacgacccaagagtacgagccagcccaagagcctgttaagaaactcgccaatagccggcgggccaaaagaaccaagcccaatggccacattgctaacagattggaagtggacagcaacacaagctcccagagcagtaactcagagagtgaaacagaagatgaaagagtaggtgaagatacgcctttcctgggcatacagaaccccctggcagccagtcttgaggcaacacctgccttccgcctggctgacagcaggactaacccagcaggccgcttctcgacacaggaagaaatccaggccaggctgtctagtgtaattgctaaccaagaccctattgctgtataaaacctaaataaacacatagattcacctgtaaaactttattttatataataaagtattccaccttaaattaaacaatttattttattttagcagttctgcaaatagaaaa

SEQ ID NO: 177063 - DNA, 3127 bp, Artificial Sequence
  derived and/or modified sequence
gaggccaggggagggtgcgaaggaggcgcctgcctccaacctgcgggcgggaggtgggtggctgcggggcaattgaaaaagagccggcgaggagttccccgaaacttgttggaactccgggctcgcgcggaggccaggagctgagcggcggcggctgccggacgatgggagcgtgagcaggacggtgataacctctccccgatcgggttgcgagggcgccgggcagaggccaggacgcgagccgccagcggtgggacccatcgacgacttcccggggcgacaggagcagccccgagagccagggcgagcgcccgttccaggtggccggaccgcccgccgcgtccgcgccgcgctccctgcaggcaacgggagacgcccccgcgcagcgcgagcgcctcagcgcggccgctcgctctccccctcgagggacaaacttttcccaaacccgatccgagcccttggaccaaactcgcctgcgccgagagccgtccgcgtagagcgctccgtctccggcgagatgtccgagcgcaaagaaggcagaggcaaagggaagggcaagaagaaggagcgaggctccggcaagaagccggagtccgcggcgggcagccagagcccagccttgcctccccgattgaaagagatgaaaagccaggaatcggctgcaggttccaaactagtccttcggtgtgaaaccagttctgaatactcctctctcagattcaagtggttcaagaatgggaatgaattgaatcgaaaaaacaaaccacaaaatatcaagatacaaaaaaagccagggaagtcagaacttcgcattaacaaagcatcactggctgattctggagagtatatgtgcaaagtgatcagcaaattaggaaatgacagtgcctctgccaatatcaccatcgtggaatcaaacgagatcatcactggtatgccagcctcaactgaaggagcatatgtgtcttcagagtctcccattagaatatcagtatccacagaaggagcaaatacttcttcatctacatctacatccaccactgggacaagccatcttgtaaaatgtgcggagaaggagaaaactttctgtgtgaatggaggggagtgcttcatggtgaaagacctttcaaacccctcgagatacttgtgcaagtgccaacctggattcactggagcaagatgtactgagaatgtgcccatgaaagtccaaaaccaagaaagtgcccaaatgagtttactggtgatcgctgccaaaactacgtaatggccagcttctacaaggcggaggagctgtaccagaagagagtgctgaccataaccggcatctgcatcgccctccttgtggtcggcatcatgtgtgtggtggcctactgcaaaaccaagaaacagcggaaaaagctgcatgaccgtcttcggcagagccttcggtctgaacgaaacaatatgatgaacattgccaatgggcctcaccatcctaacccaccccccgagaatgtccagctggtgaatcaatacgtatctaaaaacgtcatctccagtgagcatattgttgagagagaagcagagacatccttttccaccagtcactatacttccacagcccatcactccactactgtcacccagactcctagccacagctggagcaacggacacactgaaagcatcctttccgaaagccactctgtaatcgtgatgtcatccgtagaaaacagtaggcacagcagcccaactgggggcccaagaggacgtcttaatggcacaggaggccctcgtgaatgtaacagcttcctcaggcatgccagagaaacccctgattcctaccgagactctcctcatagtgaaaggtatgtgtcagccatgaccaccccggctcgtatgtcacctgtagatttccacacgccaagctcccccaaatcgcccccttcggaaatgtctccacccgtgtccagcatgacggtgtccatgccttccatggcggtcagccccttcatggaagaagagagacctctacttctcgtgacaccaccaaggctgcgggagaagaagtttgaccatcaccctcagcagttcagctccttccaccacaaccccgcgcatgacagtaacagcctccctgctagccccttgaggatagtggaggatgaggagtatgaaacgacccaagagtacgagccagcccaagagcctgttaagaaactcgccaatagccggcgggccaaaagaaccaagcccaatggccacattgctaacagattggaagtggacagcaacacaagctcccagagcagtaactcagagagtgaaacagaagatgaaagagtaggtgaagatacgcctttcctgggcatacagaaccccctggcagccagtcttgaggcaacacctgccttccgcctggctgacagcaggactaacccagcaggccgcttctcgacacaggaagaaatccaggccaggctgtctagtgtaattgctaaccaagaccctattgctgtataaaacctaaataaacacatagattcacctgtaaaactttattttatataataaagtattccaccttaaattaaacaatttattttattttagcagttctgcaaatagaaaacaggaaaaaaacttttataaattaaatatatgtatgtaaaaatgtgttatgtgccatatgtagcaattttttacagtatttcaaaacgagaaagatatcaatggtgcctttatgttatgttatgtcgagagcaagttttgtacagttacagtgattgcttttccacagtatttctgcaaaacctctcatagattcagtttttgctggcttcttgtgcattgcattatgatgttgactggatgtatgatttgcaagacttgcaactgtccctctgtttgcttgtagtagcacccgatcagtatgtcttgtaatggcacatccatccagatatgcctctcttgtgtatgaagttttctttgctttcagaatatgaaatgagttgtgtctactctgccagccaaaggtttgcctcattgggctctgagataatagtagatccaacagcatgctactattaaatacagcaagaaactgcattaagtaatgttaaatattaggaagaaagtaatactgtgattt

SEQ ID NO: 177064 - DNA, 1716 bp, Artificial Sequence
  derived and/or modified sequence
agcttctgctccagagcttcatcttcaggaaccacctaagcatttttttccccagtaggagttcagtctgctcattatacctaattgcaaaggagctatattcagagcaagaataataatttcagattttttaactggacttcaaagagcaggaaagtatgcagattcctaaacacataagcattgaagatattacagctacatctacatccaccactgggacaagccatcttgtaaaatgtgcggagaaggagaaaactttctgtgtgaatggaggggagtgcttcatggtgaaagacctttcaaacccctcgagatacttgtgcaagtgcccaaatgagtttactggtgatcgctgccaaaactacgtaatggccagcttctacaaggcggaggagctgtaccagaagagagtgctgaccataaccggcatctgcatcgccctccttgtggtcggcatcatgtgtgtggtggcctactgcaaaaccaagaaacagcggaaaaagctgcatgaccgtcttcggcagagccttcggtctgaacgaaacaatatgatgaacattgccaatgggcctcaccatcctaacccaccccccgagaatgtccagctggtgaatcaatacgtatctaaaaacgtcatctccagtgagcatattgttgagagagaagcagagacatccttttccaccagtcactatacttccacagcccatcactccactactgtcacccagactcctagccacagctggagcaacggacacactgaaagcatcctttccgaaagccactctgtaatcgtgatgtcatccgtagaaaacagtaggcacagcagcccaactgggggcccaagaggacgtcttaatggcacaggaggccctcgtgaatgtaacagcttcctcaggcatgccagagaaacccctgattcctaccgagactctcctcatagtgaaaggtatgtgtcagccatgaccaccccggctcgtatgtcacctgtagatttccacacgccaagctcccccaaatcgcccccttcggaaatgtctccacccgtgtccagcatgacggtgtccatgccttccatggcggtcagccccttcatggaagaagagagacctctacttctcgtgacaccaccaaggctgcgggagaagaagtttgaccatcaccctcagcagttcagctccttccaccacaaccccgcgcatgacagtaacagcctccctgctagccccttgaggatagtggaggatgaggagtatgaaacgacccaagagtacgagccagcccaagagcctgttaagaaactcgccaatagccggcgggccaaaagaaccaagcccaatggccacattgctaacagattggaagtggacagcaacacaagctcccagagcagtaactcagagagtgaaacagaagatgaaagagtaggtgaagatacgcctttcctgggcatacagaaccccctggcagccagtcttgaggcaacacctgccttccgcctggctgacagcaggactaacccagcaggccgcttctcgacacaggaagaaatccaggccaggctgtctagtgtaattgctaaccaagaccctattgctgtataaaacctaaataaacacatagattcacctgtaaaactttattttatataataaagtattccaccttaaattaaacaatttattttattttagcagttctgcaaataga

SEQ ID NO: 177065 - RNA, 2060 nt, Artificial Sequence
  derived and/or modified sequence
gggaaauaagagagaaaagaagaguaagaagaaauauaagagccaccaugucagagcggaaagaaggaaggggaaaggguaaagggaagaaaaaggaacgcggaucggggaagaaaccggaaucagccgcuggcucacagucgccggcacugccaccccggcucaaggagaugaagagccaggaauccgcggcugggucgaagcuuguguugagaugcgaaacguccagcgaguacucaucacuucgguuuaagugguuuaagaauggaaacgagcucaauaggaagaacaagccccagaauaucaagauccagaagaaacccgggaaauccgaacuucggaucaacaaagcgucccuggcggacuccggggaguacauguguaaagucaucagcaaacucgguaacgauucagccuccgcuaauaucacgaucgucgagucgaaugagaucauuaccgguaugccggcguccacggagggagcauaugugucgucggaaagccccaucaggauuuccgugucgacugaaggagcaaauacaagcucguccaccagcacgagcacgacggggacgucacaucucgugaaaugcgccgaaaaggagaaaacuuucugcgucaaugguggagaaugcuucauggugaaggaucuuucaaaccccucccgguaccucugcaaauguccgaacgaguuuaccggggaccggugucagaacuauguaauggccagcuucuauaaagccgaagagcuguaccagaagcgaguguugacgaucacaggcaucugcauugcacuccuugucguaggaaucaugugugugguggcguauugcaaaacaaagaagcagcgcaaaaaguugcacgaccgacugcgccagucguugaggagcgagcgaaacaauaugaugaauauugcaaaugggccccaucacccgaacccgccacccgagaacguacaacuggugaaccaguaugucucgaaaaacgucaucucgucggaacauaucguggaacgggaggcggaaacaagcuucagcacaucgcacuacacgagcacugcccaccacuccacgaccgugacacagacgcccagccacucauggucgaacggucauacagagucgauccugucagagucccauucaguaauuguaaugucguccgucgaaaauucaaggcacucaagccccacgggagggccuagaggccgccucaacgggacuggcgguccucgagaauguaauuccuucuugagacacgcgagggaaacgcccgauucguacagagauucaccccacucggagcgcuaugucagcgcgaugaccacucccgccagaaugucgccgguggauuuucauacaccuucguccccuaagucaccgccuagcgagaugucgccgccuguaucauccaugacagugagcaugcccucgauggccgugucaccguuuauggaggaggaaaggccccuguuguuggucacaccaccaagacuucgggagaaaaaguucgaccaccauccgcagcaguucucgucguuccaccauaauccggcgcacgauagcaacucccucccggcaucgccucuccggauugucgaagaugaggaguacgaaacgacccaagaauacgaacccgcgcaagagccgguaaagaagcucgcaaauagcagaagggcgaaacgcaccaaaccaaacggacacauugcgaacaggcuugaggucgacagcaauaccucgucccagucgucaaacuccgagagcgagacagaggacgagcgagucggggaggacacaccuuuucucggaauccaaaacccgcuugcagcgucguuggaagccacgccagcguuuagacuugcggacucacggacuaacccugccggaagguucucgacgcaagaggagauucaggcuagguuguccucggugauugcuaaucaggaccccaucgccgugugauaauaggcugccuucugcggggcuugccuucuggccaugcccuucuucucucccuugcaccuguaccucuuggucuuugaauaaagccugaguaggaag

SEQ ID NO: 177066 - protein, 241 aa, Artificial Sequence
  derived and/or modified sequence
MSERKEGRGKGKGKKKERGSGKKPESAAGSQSPALPPRLKEMKSQESAAGSKLVLRCETSSEYSSLRFKWFKNGNELNRKNKPQNIKIQKKPGKSELRINKASLADSGEYMCKVISKLGNDSASANITIVESNEIITGMPASTEGAYVSSESPIRISVSTEGANTSSSTSTSTTGTSHLVKCAEKEKTFCVNGGECFMVKDLSNPSRYLCKCPNEFTGDRCQNYVMASFYSTSTPFLSLPE

SEQ ID NO: 177067 - DNA, 1740 bp, Artificial Sequence
  derived and/or modified sequence
gaggccaggggagggtgcgaaggaggcgcctgcctccaacctgcgggcgggaggtgggtggctgcggggcaattgaaaaagagccggcgaggagttccccgaaacttgttggaactccgggctcgcgcggaggccaggagctgagcggcggcggctgccggacgatgggagcgtgagcaggacggtgataacctctccccgatcgggttgcgagggcgccgggcagaggccaggacgcgagccgccagcggtgggacccatcgacgacttcccggggcgacaggagcagccccgagagccagggcgagcgcccgttccaggtggccggaccgcccgccgcgtccgcgccgcgctccctgcaggcaacgggagacgcccccgcgcagcgcgagcgcctcagcgcggccgctcgctctccccctcgagggacaaacttttcccaaacccgatccgagcccttggaccaaactcgcctgcgccgagagccgtccgcgtagagcgctccgtctccggcgagatgtccgagcgcaaagaaggcagaggcaaagggaagggcaagaagaaggagcgaggctccggcaagaagccggagtccgcggcgggcagccagagcccagccttgcctccccgattgaaagagatgaaaagccaggaatcggctgcaggttccaaactagtccttcggtgtgaaaccagttctgaatactcctctctcagattcaagtggttcaagaatgggaatgaattgaatcgaaaaaacaaaccacaaaatatcaagatacaaaaaaagccagggaagtcagaacttcgcattaacaaagcatcactggctgattctggagagtatatgtgcaaagtgatcagcaaattaggaaatgacagtgcctctgccaatatcaccatcgtggaatcaaacgagatcatcactggtatgccagcctcaactgaaggagcatatgtgtcttcagagtctcccattagaatatcagtatccacagaaggagcaaatacttcttcatctacatctacatccaccactgggacaagccatcttgtaaaatgtgcggagaaggagaaaactttctgtgtgaatggaggggagtgcttcatggtgaaagacctttcaaacccctcgagatacttgtgcaagtgcccaaatgagtttactggtgatcgctgccaaaactacgtaatggccagcttctacagtacgtccactccctttctgtctctgcctgaataggagcatgctcagttggtgctgctttcttgttgctgcatctcccctcagattccacctagagctagatgtgtcttaccagatctaatattgactgcctctgcctgtcgcatgagaacattaacaaaagcaattgtattacttcctctgttcgcgactagttggctctgagatactaataggtgtgtgaggctccggatgtttctggaattgatattgaatgatgtgatacaaattgatagtcaatatcaagcagtgaaatatgataataaaggcatttcaaagtctcacttttattgataaaataaaaatcattctactgaacagtccatcttctttatacaatgaccacatcctgaaaagggtgttgctaagctgtaaccgatatgcacttgaaatgatggtaagttaattttgattcagaatgtgttatttgtcacaaataaacataataaaaggagttcagatgtttttcttcattaaccaaaaaaaaaaaaaaa

SEQ ID NO: 177068 - protein, 296 aa, Artificial Sequence
  derived and/or modified sequence
MEIYSPDMSEVAAERSSSPSTQLSADPSLDGLPAAEDMPEPQTEDGRTPGLVGLAVPCCACLEAERLRGCLNSEKICIVPILACLVSLCLCIAGLKWVFVDKIFEYDSPTHLDPGGLGQDPIISLDATAASAVWVSSEAYTSPVSRAQSESEVQVTVQGDKAVVSFEPSAAPTPKNRIFAFSFLPSTAPSFPSPTRNPEVRTPKSATQPQTTETNLQTAPKLSTSTSTTGTSHLVKCAEKEKTFCVNGGECFMVKDLSNPSRYLCKCPNEFTGDRCQNYVMASFYSTSTPFLSLPE

SEQ ID NO: 177069 - DNA, 2374 bp, Artificial Sequence
  derived and/or modified sequence
ggcttaactgatgcctgcctgcctctctttgatttgatggcctttattccttctaattggataaaataggaagtcactggcagtcctgtgtggctggggatactgattttactcagaccagcctgcagctctagagtgtgggtagagagcggggagtgggggttgggagagggggaggaaagagagagaggagagaggacgggcttggatgaagaagggaaagaaagagaaagagactgaagcagagaagagccgcagaggaagaaagtgaatgagcactcaagaaggacaaagaggagtagtcgggggtggggtggaggcagggcggggaagggagtgaccgcccctcctggctgcactcttgcctccggagccctctgatcctgtttgcagtgatgctccgagggcaggcacctgctgctctgtaatgattcagcccctttcagccgtcgtcgcgttaacacaacaggatgctgttgctattgtcactactgcctctcctgccgccgctgctgctgccgccgccgccaccgccgctggtcctccttctgcttttacttctcctgcatgacagttgttttcttcatctgagcagacaccagcttcagatgctcgaggtgagaaacatgcctttcagtttgggctactggtttacttaattaatcagccggcagctccgtcgatctattttcgtccctgtcctcttgacgagcccgggatggtttggagtagcatttaaaagaactagaaaagtggcccagaaacagcagcttaaagaattattacgatatactttgattttgtagttgctaggagcttttcttccccccttgcatctttctgaactcttcttgattttaataatggccttggacttggacgatttatcgatttccccctgtaagatgctgtatcatttggttgggggggcctctgcgtggtaatggaccgtgagagcggccaggccttcttctggaggtgagccgatggagatttattccccagacatgtctgaggtcgccgccgagaggtcctccagcccctccactcagctgagtgcagacccatctcttgatgggcttccggcagcagaagacatgccagagccccagactgaagatgggagaacccctggactcgtgggcctggccgtgccctgctgtgcgtgcctagaagctgagcgcctgagaggttgcctcaactcagagaaaatctgcattgtccccatcctggcttgcctggtcagcctctgcctctgcatcgccggcctcaagtgggtatttgtggacaagatctttgaatatgactctcctactcaccttgaccctggggggttaggccaggaccctattatttctctggacgcaactgctgcctcagctgtgtgggtgtcgtctgaggcatacacttcacctgtctctagggctcaatctgaaagtgaggttcaagttacagtgcaaggtgacaaggctgttgtctcctttgaaccatcagcggcaccgacaccgaagaatcgtatttttgccttttctttcttgccgtccactgcgccatccttcccttcacccacccggaaccctgaggtgagaacgcccaagtcagcaactcagccacaaacaacagaaactaatctccaaactgctcctaaactttctacatctacatccaccactgggacaagccatcttgtaaaatgtgcggagaaggagaaaactttctgtgtgaatggaggggagtgcttcatggtgaaagacctttcaaacccctcgagatacttgtgcaagtgcccaaatgagtttactggtgatcgctgccaaaactacgtaatggccagcttctacagtacgtccactccctttctgtctctgcctgaataggagcatgctcagttggtgctgctttcttgttgctgcatctcccctcagattccacctagagctagatgtgtcttaccagatctaatattgactgcctctgcctgtcgcatgagaacattaacaaaagcaattgtattacttcctctgttcgcgactagttggctctgagatactaataggtgtgtgaggctccggatgtttctggaattgatattgaatgatgtgatacaaattgatagtcaatatcaagcagtgaaatatgataataaaggcatttcaaagtctcacttttattgataaaataaaaatcattctactgaacagtccatcttctttatacaatgaccacatcctgaaaagggtgttgctaagctgtaaccgatatgcacttgaaatgatggtaagttaattttgattcagaatgtgttatttgtcacaaataaacataataaaaggagttcagatgtttttcttcattaaccaaaaaaaaaaaaaaa

SEQ ID NO: 177070 - DNA, 891 bp, Artificial Sequence
  derived and/or modified sequence
atggagatctacagccccgacatgagcgaggtggccgccgagagaagcagcagccccagcacccagctgagcgccgaccccagcctggacggcctgcccgccgccgaggacatgcccgagccccagaccgaggacggcagaacccccggcctggtgggcctggccgtgccctgctgcgcctgcctggaggccgagagactgagaggctgcctgaacagcgagaagatctgcatcgtgcccatcctggcctgcctggtgagcctgtgcctgtgcatcgccggcctgaagtgggtgttcgtggacaagatcttcgagtacgacagccccacccacctggaccccggcggcctgggccaggaccccatcatcagcctggacgccaccgccgccagcgccgtgtgggtgagcagcgaggcctacaccagccccgtgagcagagcccagagcgagagcgaggtgcaggtgaccgtgcagggcgacaaggccgtggtgagcttcgagcccagcgccgcccccacccccaagaacagaatcttcgccttcagcttcctgcccagcaccgcccccagcttccccagccccaccagaaaccccgaggtgagaacccccaagagcgccacccagccccagaccaccgagaccaacctgcagaccgcccccaagctgagcaccagcaccagcaccaccggcaccagccacctggtgaagtgcgccgagaaggagaagaccttctgcgtgaacggcggcgagtgcttcatggtgaaggacctgagcaaccccagcagatacctgtgcaagtgccccaacgagttcaccggcgacagatgccagaactacgtgatggccagcttctacagcaccagcacccccttcctgagcctgcccgagtag

SEQ ID NO: 177071 - DNA, 891 bp, Artificial Sequence
  derived and/or modified sequence
atggaaatatattcaccagacatgagcgaagtagcagccgaaagaagtagcagtccctctacgcagctaagcgccgaccccagcctggacgggctcccggctgcggaggatatgcctgaaccccaaaccgaggacggacgcacccccggactggttgggctggccgtgccttgctgcgcttgtttagaagcggaacgcctgcggggctgtctcaatagtgagaaaatttgcattgtgcctatcttggcctgtttggtaagcctctgcttgtgcattgccggcctgaaatgggtctttgtggacaagatatttgagtatgacagtccaacacacttagatccgggcggattagggcaggatcctattatctcactggacgcaactgctgcctccgccgtctgggtgtctagcgaagcttatacaagccccgtttctagagcccagagtgaatccgaagtgcaggtgactgttcagggggataaagctgtggtgtcattcgagccttctgccgcccctacacccaaaaataggatatttgccttcagctttcttccttccactgccccatcctttccttcacctacacggaaccccgaggttcgaacacctaagtcggcaactcagccacagacgacagaaaccaatttgcagacggcacctaagctcagcactagcacctctacgactggcacctcacatttggttaagtgtgcagaaaaggagaaaactttctgcgtgaatggaggggagtgttttatggtcaaggatctgtctaatccaagccgatacctgtgcaagtgcccgaatgaattcaccggggataggtgtcagaattatgtgatggcaagcttttacagtacttcaactcctttcctgtctctccccgagtag

SEQ ID NO: 177072 - DNA, 891 bp, Artificial Sequence
  derived and/or modified sequence
atggagatctacagcccagacatgtctgaggtggccgctgagaggagcagcagccccagcacccagctgtctgctgaccccagcctggatggcctgcctgctgctgaggacatgcctgagccccagacagaagatggccgcaccccaggcctggtgggcctggccgtgccctgctgtgcctgcctggaggccgagcggctgcggggctgcctgaacagcgagaagatctgcatcgtgcccatcctggcctgcctggtgtccctgtgcctgtgcatcgccggcctgaagtgggtgtttgtggacaagatctttgaatatgacagccccacccacctggaccccggcggcctgggccaggaccccatcatcagcctggatgccacagctgccagcgctgtgtgggtgtcctctgaggcctacaccagccctgtgtcccgggcccagagcgagagcgaggtgcaggtgacagtgcagggcgacaaggctgtggtgtcctttgagcccagcgctgcccccacccccaagaaccgcatctttgccttctccttcctgcccagcacagcccccagcttccccagccccaccaggaaccctgaggtgaggacccccaagagcgccacccagccccagaccacagagaccaacctgcagacagcccccaagctgagcaccagcaccagcaccaccggcaccagccacctggtgaagtgtgccgagaaggagaagaccttctgtgtgaatggaggagagtgcttcatggtgaaggacctgagcaaccccagccgctacctgtgcaagtgccccaatgagttcaccggggaccgctgccagaactacgtgatggccagcttctacagcaccagcacccccttcctgagcctgcctgagtag

SEQ ID NO: 177073 - DNA, 891 bp, Artificial Sequence
  derived and/or modified sequence
atggagatctacagccccgacatgagcgaggtggccgccgagcggtcttcaagcccaagtacacagctgtctgcggacccgtcactggacggtctgccagccgccgaggacatgcctgaaccccagacagaggacggacgaacaccagggttggtcgggcttgcggtgccttgctgtgcctgcctggaagcggaaaggctgcgcggctgcctcaatagtgagaaaatatgcatcgtgccaatcctggcttgccttgtgtctttatgtctgtgtatcgctggactgaagtgggtgtttgtggacaagatctttgagtatgacagccctacgcatctcgaccctggcggattgggtcaggatccgatcatcagcctggacgctacggcggcgtcagccgtctgggtctcaagtgaagcttatacttcacctgtttcaagggctcagtcagagtctgaggtacaggtcacagtgcagggggacaaggctgtggtgtcattcgaaccttcagctgcccccactcctaagaatcgcatctttgcgttttccttcctgccctctaccgcaccctcatttccatccccgactagaaacccagaggtgcgcacccctaaatctgcgacccagcctcagactacggaaaccaacctccaaaccgcccctaagctgtccacaagcacaagtactaccggcacttcccacctggtaaagtgcgcggagaaagagaagaccttctgtgtgaacggaggagaatgtttcatggtgaaggaccttagtaatccttcacgatatttgtgcaaatgtcctaatgagttcaccggggatcgttgtcaaaattatgtgatggcatcattttattcgaccagtactcccttcctctctttgccagaatag

SEQ ID NO: 177074 - DNA, 891 bp, Artificial Sequence
  derived and/or modified sequence
atggaaatttacagcccagacatgtctgaagttgccgcagagcgcagctccagtccatcaacccaactgtcggctgatccatcccttgacggactccccgctgctgaggacatgcctgaaccccagaccgaagatggcagaactcccggactcgtaggcctggcggtgccttgttgcgcttgtctggaggccgagcggcttcgagggtgtcttaacagtgaaaagatctgcatcgtgcccattttagcttgcctcgtgtcactgtgtttatgtatagctggtcttaagtgggtgttcgtagataagattttcgagtatgattcaccaacccacctggaccccggagggctgggacaggatcctatcatttctctcgatgctactgctgcctccgctgtgtgggtgtcctcagaagcctacacgagcccggtcagtagggctcagagcgaatccgaagtgcaggtcactgttcaaggcgataaagcggttgtcagcttcgaaccttcagccgcacctacccctaaaaatcggatttttgccttttcatttctgccgagtacagcacctagttttccttcccccacccgaaaccccgaagtgcgtacacctaagtcggctacacagccgcaaactacagagacaaatttacagactgcccctaaattgtcaactagcacttcaacgactggaactagtcatctcgtgaagtgcgcagaaaaggagaaaaccttttgtgttaatggtggagaatgcttcatggtaaaggatctttccaacccctcacggtatctgtgcaagtgtcctaatgagtttactggagatcggtgccagaactatgtgatggcaagtttctactcaacctccacgccgttcttgtcactccctgagtag

SEQ ID NO: 177075 - DNA, 1330 bp, Artificial Sequence
  derived and/or modified sequence
atggagatttattccccagacatgtctgaggtcgccgccgagaggtcctccagcccctccactcagctgagtgcagacccatctcttgatgggcttccggcagcagaagacatgccagagccccagactgaagatgggagaacccctggactcgtgggcctggccgtgccctgctgtgcgtgcctagaagctgagcgcctgagaggttgcctcaactcagagaaaatctgcattgtccccatcctggcttgcctggtcagcctctgcctctgcatcgccggcctcaagtgggtatttgtggacaagatctttgaatatgactctcctactcaccttgaccctggggggttaggccaggaccctattatttctctggacgcaactgctgcctcagctgtgtgggtgtcgtctgaggcatacacttcacctgtctctagggctcaatctgaaagtgaggttcaagttacagtgcaaggtgacaaggctgttgtctcctttgaaccatcagcggcaccgacaccgaagaatcgtatttttgccttttctttcttgccgtccactgcgccatccttcccttcacccacccggaaccctgaggtgagaacgcccaagtcagcaactcagccacaaacaacagaaactaatctccaaactgctcctaaactttctacatctacatccaccactgggacaagccatcttgtaaaatgtgcggagaaggagaaaactttctgtgtgaatggaggggagtgcttcatggtgaaagacctttcaaacccctcgagatacttgtgcaagtgcccaaatgagtttactggtgatcgctgccaaaactacgtaatggccagcttctacagtacgtccactccctttctgtctctgcctgaataggagcatgctcagttggtgctgctttcttgttgctgcatctcccctcagattccacctagagctagatgtgtcttaccagatctaatattgactgcctctgcctgtcgcatgagaacattaacaaaagcaattgtattacttcctctgttcgcgactagttggctctgagatactaataggtgtgtgaggctccggatgtttctggaattgatattgaatgatgtgatacaaattgatagtcaatatcaagcagtgaaatatgataataaaggcatttcaaagtctcacttttattgataaaataaaaatcattctactgaacagtccatcttctttatacaatgaccacatcctgaaaagggtgttgctaagctgtaaccgatatgcacttgaaatgatggtaagttaattttgattcagaatgtgttatttgtcacaa

SEQ ID NO: 177076 - protein, 462 aa, Artificial Sequence
  derived and/or modified sequence
MSERKEGRGKGKGKKKERGSGKKPESAAGSQSPALPPRLKEMKSQESAAGSKLVLRCETSSEYSSLRFKWFKNGNELNRKNKPQNIKIQKKPGKSELRINKASLADSGEYMCKVISKLGNDSASANITIVESNEIITGMPASTEGAYVSSESPIRISVSTEGANTSSSTSTSTTGTSHLVKCAEKEKTFCVNGGECFMVKDLSNPSRYLCKCQPGFTGARCTENVPMKVQNQEKAEELYQKRVLTITGICIALLVVGIMCVVAYCKTKKQRKKLHDRLRQSLRSERNNMMNIANGPHHPNPPPENVQLVNQYVSKNVISSEHIVEREAETSFSTSHYTSTAHHSTTVTQTPSHSWSNGHTESILSESHSVIVMSSVENSRHSSPTGGPRGRLNGTGGPRECNSFLRHARETPDSYRDSPHSERHNLIAELRRNKAHRSKCMQIQLSATHLRSSSIPHLGFIL

SEQ ID NO: 177077 - DNA, 3220 bp, Artificial Sequence
  derived and/or modified sequence
gaggccaggggagggtgcgaaggaggcgcctgcctccaacctgcgggcgggaggtgggtggctgcggggcaattgaaaaagagccggcgaggagttccccgaaacttgttggaactccgggctcgcgcggaggccaggagctgagcggcggcggctgccggacgatgggagcgtgagcaggacggtgataacctctccccgatcgggttgcgagggcgccgggcagaggccaggacgcgagccgccagcggtgggacccatcgacgacttcccggggcgacaggagcagccccgagagccagggcgagcgcccgttccaggtggccggaccgcccgccgcgtccgcgccgcgctccctgcaggcaacgggagacgcccccgcgcagcgcgagcgcctcagcgcggccgctcgctctccccctcgagggacaaacttttcccaaacccgatccgagcccttggaccaaactcgcctgcgccgagagccgtccgcgtagagcgctccgtctccggcgagatgtccgagcgcaaagaaggcagaggcaaagggaagggcaagaagaaggagcgaggctccggcaagaagccggagtccgcggcgggcagccagagcccagccttgcctccccgattgaaagagatgaaaagccaggaatcggctgcaggttccaaactagtccttcggtgtgaaaccagttctgaatactcctctctcagattcaagtggttcaagaatgggaatgaattgaatcgaaaaaacaaaccacaaaatatcaagatacaaaaaaagccagggaagtcagaacttcgcattaacaaagcatcactggctgattctggagagtatatgtgcaaagtgatcagcaaattaggaaatgacagtgcctctgccaatatcaccatcgtggaatcaaacgagatcatcactggtatgccagcctcaactgaaggagcatatgtgtcttcagagtctcccattagaatatcagtatccacagaaggagcaaatacttcttcatctacatctacatccaccactgggacaagccatcttgtaaaatgtgcggagaaggagaaaactttctgtgtgaatggaggggagtgcttcatggtgaaagacctttcaaacccctcgagatacttgtgcaagtgccaacctggattcactggagcaagatgtactgagaatgtgcccatgaaagtccaaaaccaagaaaaggcggaggagctgtaccagaagagagtgctgaccataaccggcatctgcatcgccctccttgtggtcggcatcatgtgtgtggtggcctactgcaaaaccaagaaacagcggaaaaagctgcatgaccgtcttcggcagagccttcggtctgaacgaaacaatatgatgaacattgccaatgggcctcaccatcctaacccaccccccgagaatgtccagctggtgaatcaatacgtatctaaaaacgtcatctccagtgagcatattgttgagagagaagcagagacatccttttccaccagtcactatacttccacagcccatcactccactactgtcacccagactcctagccacagctggagcaacggacacactgaaagcatcctttccgaaagccactctgtaatcgtgatgtcatccgtagaaaacagtaggcacagcagcccaactgggggcccaagaggacgtcttaatggcacaggaggccctcgtgaatgtaacagcttcctcaggcatgccagagaaacccctgattcctaccgagactctcctcatagtgaaagacataaccttatagctgagctaaggagaaacaaggcacacagatccaaatgcatgcagatccagctatcagcaactcatcttagatcttcttccattccccatttgggcttcattctctaagaccccttggcctttaggaaggtatgtgtcagccatgaccaccccggctcgtatgtcacctgtagatttccacacgccaagctcccccaaatcgcccccttcggaaatgtctccacccgtgtccagcatgacggtgtccatgccttccatggcggtcagccccttcatggaagaagagagacctctacttctcgtgacaccaccaaggctgcgggagaagaagtttgaccatcaccctcagcagttcagctccttccaccacaaccccgcgcatgacagtaacagcctccctgctagccccttgaggatagtggaggatgaggagtatgaaacgacccaagagtacgagccagcccaagagcctgttaagaaactcgccaatagccggcgggccaaaagaaccaagcccaatggccacattgctaacagattggaagtggacagcaacacaagctcccagagcagtaactcagagagtgaaacagaagatgaaagagtaggtgaagatacgcctttcctgggcatacagaaccccctggcagccagtcttgaggcaacacctgccttccgcctggctgacagcaggactaacccagcaggccgcttctcgacacaggaagaaatccaggccaggctgtctagtgtaattgctaaccaagaccctattgctgtataaaacctaaataaacacatagattcacctgtaaaactttattttatataataaagtattccaccttaaattaaacaatttattttattttagcagttctgcaaatagaaaacaggaaaaaaacttttataaattaaatatatgtatgtaaaaatgtgttatgtgccatatgtagcaattttttacagtatttcaaaacgagaaagatatcaatggtgcctttatgttatgttatgtcgagagcaagttttgtacagttacagtgattgcttttccacagtatttctgcaaaacctctcatagattcagtttttgctggcttcttgtgcattgcattatgatgttgactggatgtatgatttgcaagacttgcaactgtccctctgtttgcttgtagtagcacccgatcagtatgtcttgtaatggcacatccatccagatatgcctctcttgtgtatgaagttttctttgctttcagaatatgaaatgagttgtgtctactctgccagccaaaggtttgcctcattgggctctgagataatagtagatccaacagcatgctactattaaatacagcaagaaactgcattaagtaatgttaaatattaggaagaaagtaatactgtgatttaaaaaaaact

SEQ ID NO: 177078 - DNA, 744 bp, Artificial Sequence
  derived and/or modified sequence
atgagcgagagaaaggagggcagaggcaagggcaagggcaagaagaaggagagaggcagcggcaagaagcccgagagcgccgccggcagccagagccccgccctgccccccagactgaaggagatgaagagccaggagagcgccgccggcagcaagctggtgctgagatgcgagaccagcagcgagtacagcagcctgagattcaagtggttcaagaacggcaacgagctgaacagaaagaacaagccccagaacatcaagatccagaagaagcccggcaagagcgagctgagaatcaacaaggccagcctggccgacagcggcgagtacatgtgcaaggtgatcagcaagctgggcaacgacagcgccagcgccaacatcaccatcgtggagagcaacgagatcatcaccggcatgcccgccagcaccgagggcgcctacgtgagcagcgagagccccatcagaatcagcgtgagcaccgagggcgccaacaccagcagcagcaccagcaccagcaccaccggcaccagccacctggtgaagtgcgccgagaaggagaagaccttctgcgtgaacggcggcgagtgcttcatggtgaaggacctgagcaaccccagcagatacctgtgcaagtgccagcccggcttcaccggcgccagatgcaccgagaacgtgcccatgaaggtgcagaaccaggagagcgcccagatgagcctgctggtgatcgccgccaagaccacctag

SEQ ID NO: 177079 - DNA, 1389 bp, Artificial Sequence
  derived and/or modified sequence
atgagcgagagaaaggagggcagaggcaagggcaagggcaagaagaaggagagaggcagcggcaagaagcccgagagcgccgccggcagccagagccccgccctgccccccagactgaaggagatgaagagccaggagagcgccgccggcagcaagctggtgctgagatgcgagaccagcagcgagtacagcagcctgagattcaagtggttcaagaacggcaacgagctgaacagaaagaacaagccccagaacatcaagatccagaagaagcccggcaagagcgagctgagaatcaacaaggccagcctggccgacagcggcgagtacatgtgcaaggtgatcagcaagctgggcaacgacagcgccagcgccaacatcaccatcgtggagagcaacgagatcatcaccggcatgcccgccagcaccgagggcgcctacgtgagcagcgagagccccatcagaatcagcgtgagcaccgagggcgccaacaccagcagcagcaccagcaccagcaccaccggcaccagccacctggtgaagtgcgccgagaaggagaagaccttctgcgtgaacggcggcgagtgcttcatggtgaaggacctgagcaaccccagcagatacctgtgcaagtgccagcccggcttcaccggcgccagatgcaccgagaacgtgcccatgaaggtgcagaaccaggagaaggccgaggagctgtaccagaagagagtgctgaccatcaccggcatctgcatcgccctgctggtggtgggcatcatgtgcgtggtggcctactgcaagaccaagaagcagagaaagaagctgcacgacagactgagacagagcctgagaagcgagagaaacaacatgatgaacatcgccaacggcccccaccaccccaaccccccccccgagaacgtgcagctggtgaaccagtacgtgagcaagaacgtgatcagcagcgagcacatcgtggagagagaggccgagaccagcttcagcaccagccactacaccagcaccgcccaccacagcaccaccgtgacccagacccccagccacagctggagcaacggccacaccgagagcatcctgagcgagagccacagcgtgatcgtgatgagcagcgtggagaacagcagacacagcagccccaccggcggccccagaggcagactgaacggcaccggcggccccagagagtgcaacagcttcctgagacacgccagagagacccccgacagctacagagacagcccccacagcgagagacacaacctgatcgccgagctgagaagaaacaaggcccacagaagcaagtgcatgcagatccagctgagcgccacccacctgagaagcagcagcatcccccacctgggcttcatcctgtag

SEQ ID NO: 177080 - DNA, 744 bp, Artificial Sequence
  derived and/or modified sequence
atgtccgaacgtaaagaaggaagaggcaagggaaagggtaagaagaaggagaggggtagtgggaaaaaaccagagtcagcagcaggttcacaaagtcctgcccttccaccgcgcctgaaagagatgaaatcccaagaaagcgccgctggatcaaaactcgtcctgcgctgtgagacatcatccgaatatagcagtctgaggttcaagtggtttaagaacgggaacgaactcaaccggaagaataagccccagaatattaaaatacagaagaagccggggaaatccgagctacgtatcaacaaagcatctctggccgatagcggggaatacatgtgcaaagtgatttctaagctagggaatgattctgccagcgccaacatcactatcgtggagtcgaatgagatcattaccggaatgcccgcatccacagaaggagcatatgtttcctccgagtcccccattagaattagcgtgtcaactgagggagcaaataccagctcaagcacttctacatctaccactggtacttctcatctggtgaaatgcgccgaaaaggaaaagactttctgcgtaaatggcggcgaatgctttatggttaaagatttgtccaacccatcccgctacctttgcaagtgccagccagggtttactggagcaagatgcacagaaaacgtgcccatgaaggtgcagaaccaggaatcagctcaaatgtccctactggtcatagccgcgaagactacatag

SEQ ID NO: 177081 - DNA, 1389 bp, Artificial Sequence
  derived and/or modified sequence
atgtccgaacgcaaagagggccgtgggaagggaaaaggaaagaaaaaagagagggggagtggtaagaagccagagtccgccgccgggtcacagagccccgcccttcccccgcggctgaaggaaatgaagtctcaggagtcggcggccggttcaaagctagtgttacgttgcgagacttcgagcgagtactcctcactgaggttcaaatggttcaagaacggaaatgaactcaatcgtaagaataaacctcagaacattaagattcagaagaagcctggaaaatccgagctgcggataaataaggcctcgctcgcagactcaggagagtacatgtgcaaagtgatcagtaagcttgggaatgactctgccagcgctaatataacaatcgttgaaagtaacgagataatcaccggaatgcctgcctccacagagggcgcatatgttagttcagaaagccctattagaattagcgtgagtacagaaggtgcgaacacttcaagctcaacaagtacgagtactaccggtacaagccatttagtaaagtgcgccgagaaggaaaaaactttctgcgtcaacggcggcgaatgtttcatggtcaaggacctgagtaacccaagtcgctacctgtgtaagtgtcagcctggtttcactggtgcacgctgcacagagaacgtacctatgaaggtccagaatcaggaaaaagccgaggaactttatcagaagagagtattgacgatcactggtatctgtatcgcactcttagtcgtagggatcatgtgcgtggtggcgtattgtaaaactaagaaacagagaaaaaaactccatgacaggctgagacagtcgctgaggtccgagcggaataacatgatgaatattgctaacggccctcaccatcccaaccctccacctgaaaacgttcagctggtgaatcaatacgtctctaaaaatgtgataagcagcgaacatatcgtagagcgggaagctgagacctcattcagtactagtcactataccagtaccgctcaccattcaacaactgtgactcagaccccctcacatagctggtcaaacggtcatactgagagtatcctgtccgagagtcacagcgtgattgtaatgtctagcgttgagaactccagacactccagtcctactggcgggccacgaggacggcttaacggtacggggggcccacgggagtgcaattcttttctgcgtcacgctagagaaacgccagactcttaccgggatagcccccactccgagagacacaatctcattgccgagctgcgtcgcaacaaagcacatcggagcaagtgcatgcagattcaactgtccgccacacacttgcgctcgtcgagcataccgcacttgggcttcatcctatag

SEQ ID NO: 177082 - DNA, 744 bp, Artificial Sequence
  derived and/or modified sequence
atgtctgagaggaaggagggccggggcaagggcaagggcaagaagaaggagcggggcagcggcaagaagccagagagcgctgctggcagccagagccctgccctgcccccccggctgaaggagatgaagagccaggagagcgctgctggcagcaagctggtgctgcgctgtgagaccagcagcgagtacagcagcctgcgcttcaagtggttcaagaatggaaatgagctgaacaggaagaacaagccccagaacatcaagatccagaagaagccaggcaagtctgagctgcgcatcaacaaggccagcctggccgacagcggggagtacatgtgcaaggtgatcagcaagctgggcaatgacagcgccagcgccaacatcaccatcgtggagagcaatgagatcatcaccggcatgcctgccagcacagaaggagcctacgtgagcagcgagagccccatccgcatctctgtgtccacagagggcgccaacaccagcagcagcaccagcaccagcaccaccggcaccagccacctggtgaagtgtgccgagaaggagaagaccttctgtgtgaatggaggagagtgcttcatggtgaaggacctgagcaaccccagccgctacctgtgcaagtgccagcccggcttcaccggggcccgctgcacagaaaatgtgcccatgaaggtgcagaaccaggagagcgcccagatgagcctgctggtgattgctgccaagaccacctag

SEQ ID NO: 177083 - DNA, 1389 bp, Artificial Sequence
  derived and/or modified sequence
atgtctgagaggaaggagggccggggcaagggcaagggcaagaagaaggagcggggcagcggcaagaagccagagagcgctgctggcagccagagccctgccctgcccccccggctgaaggagatgaagagccaggagagcgctgctggcagcaagctggtgctgcgctgtgagaccagcagcgagtacagcagcctgcgcttcaagtggttcaagaatggaaatgagctgaacaggaagaacaagccccagaacatcaagatccagaagaagccaggcaagtctgagctgcgcatcaacaaggccagcctggccgacagcggggagtacatgtgcaaggtgatcagcaagctgggcaatgacagcgccagcgccaacatcaccatcgtggagagcaatgagatcatcaccggcatgcctgccagcacagaaggagcctacgtgagcagcgagagccccatccgcatctctgtgtccacagagggcgccaacaccagcagcagcaccagcaccagcaccaccggcaccagccacctggtgaagtgtgccgagaaggagaagaccttctgtgtgaatggaggagagtgcttcatggtgaaggacctgagcaaccccagccgctacctgtgcaagtgccagcccggcttcaccggggcccgctgcacagaaaatgtgcccatgaaggtgcagaaccaggagaaggccgaggagctgtaccagaagagggtgctgaccatcaccggcatctgcatcgccctgctggtggtgggcatcatgtgtgtggtggcctactgcaagaccaagaagcagaggaagaagctgcatgaccggctgcggcagagcctgcggtctgagaggaacaacatgatgaacatcgccaacggcccccaccaccccaaccccccaccagaaaatgtgcagctggtgaaccagtatgtgtccaagaatgtcatcagcagcgagcacatcgtggagcgggaggccgagaccagcttcagcaccagccactacaccagcacagcccaccacagcaccaccgtgacccagacccccagccacagctggagcaatggccacacagagagcatcctgtctgagagccacagcgtgattgtgatgagctctgtggagaacagccgccacagcagccccactggaggcccccggggccgcctgaatggaactggaggcccccgggagtgcaacagcttcctgcggcatgcccgggagaccccagacagctacagagacagcccccacagcgagcggcacaacctgattgctgagctgcggaggaacaaggcccacaggagcaagtgcatgcagatccagctgagcgccacccacctgcggagcagcagcatcccccacctgggcttcatcctgtag

SEQ ID NO: 177084 - DNA, 744 bp, Artificial Sequence
  derived and/or modified sequence
atgagcgagcggaaggagggccggggcaagggcaagggcaagaagaaggaaaggggcagcgggaaaaagcccgaatctgctgccgggagccagagtcccgcactgccaccaaggctgaaggagatgaaaagccaggagagtgcagccgggtcgaagcttgtgttaaggtgcgagacatcctcagagtattccagcttgagatttaagtggttcaagaatgggaatgaactaaaccgtaagaataagcctcagaatatcaaaatccagaaaaaaccagggaaaagcgaacttcggatcaataaagcctctctggctgactccggagagtatatgtgtaaggtcatctcaaagctgggaaatgactctgcctcggccaacatcacaattgtggaatccaatgaaataattaccggaatgccagcatctacggagggcgcttatgtcagcagcgaatcccccattcgaatctccgtgagtaccgagggggctaacacctcgagttccacctctacgagcaccacaggcaccagccatctggtgaaatgtgcagagaaagagaaaacgttctgcgtgaacggaggggagtgtttcatggtgaaagacctgtcaaacccttcaaggtacctatgtaaatgtcagccgggatttacaggcgctaggtgcacagaaaatgtcccgatgaaagtacaaaaccaggaaagtgcccaaatgagcctgctggtgatagctgcaaagaccacatag

SEQ ID NO: 177085 - DNA, 1389 bp, Artificial Sequence
  derived and/or modified sequence
atgagcgagcggaaggagggccggggcaagggcaagggcaagaagaaggagaggggttccggcaagaaacccgaatctgccgccggctcccagagtcctgcgctaccacctaggctgaaggaaatgaaaagtcaagagagtgcagctggcagcaaactagtattacgatgcgaaacctccagcgaatacagcagtttacggttcaagtggtttaaaaacgggaacgagttgaatcggaagaataagcctcagaatattaagatccagaaaaagccaggaaagagcgagcttagaatcaacaaggcatctctcgctgatagcggagaatatatgtgcaaggtgatctctaagcttggcaacgacagtgcttcggcgaacatcactattgtggagtcaaatgaaattatcacggggatgcctgctagcaccgagggggcttacgttagcagcgagagcccgatccggatctctgtgtccacagaaggcgcgaatacttcttcctccacctctacttccacgacaggcacctcccatcttgtgaagtgcgctgagaaggaaaagacgttctgcgtgaacggaggggaatgcttcatggtgaaagatctgagcaatccgagtagatacctgtgtaaatgccagcctgggttcacaggagcccgatgcaccgagaatgtgcccatgaaagtgcaaaatcaggagaaagcggaggagttataccagaagagggtcctaacaataaccggaatctgtattgccctactggtcgtgggtatcatgtgcgtggttgcatactgtaaaacaaaaaaacagcggaagaaactccatgatcgactgcgccagagcctgcggtccgaaaggaataacatgatgaacatagctaatgggccccatcatccaaaccctcctccagaaaatgtgcagttggtaaatcagtatgtgagtaaaaatgttatcagttccgagcatatagtggaacgcgaggcggagacttccttctccacctctcactacacctcgaccgcacatcattcaactaccgttacacaaactccatctcacagttggagcaatgggcacaccgaatccatcttgtccgagagccacagcgtgattgtaatgtcttccgtcgagaactcccggcatagcagtcctactggaggacccaggggaaggttaaacggcaccggaggaccaagagagtgcaactcctttctgcggcatgctagagagactccagactcctacagagactctccccattccgaaagacataaccttatagccgaactcagacgcaacaaggcccaccgctctaagtgcatgcaaattcaactgtcggcaactcatctgcggtcttcttccatcccacatctcggctttattctttag

SEQ ID NO: 177086 - DNA, 744 bp, Artificial Sequence
  derived and/or modified sequence
atgtccgagcgtaaagaggggcgaggcaaggggaaaggcaagaagaaggagagggggtccggaaaaaaacccgaatctgcagcagggtcacagtcaccagcgctgcccccacggcttaaggaaatgaagagccaagaaagtgcggctggttccaaacttgttctgagatgcgagacctcttccgaatatagctccttgaggttcaaatggtttaagaatggcaatgagctcaaccgtaagaacaagccacagaatatcaaaatccagaagaagcccggaaagagcgaattgcgtattaataaggcctctctagccgatagcggtgagtatatgtgtaaggtgatttccaaactggggaacgacagtgccagtgccaatataacgatcgttgagtctaacgagattatcacaggtatgcctgcctccactgagggggcatatgtctcatctgagtcaccaattcgaatatctgtgagcactgagggcgctaatacatcgtcttctacttctacatccaccacgggcactagccatctcgtaaagtgcgcggagaaagagaagacattctgcgttaatggcggagagtgctttatggtgaaggatctctctaacccttctaggtatctttgcaagtgccagccagggtttactggtgctaggtgcactgaaaatgtacccatgaaggtccaaaaccaggaaagcgcacagatgtcactactggtcattgccgcaaagactacatag

SEQ ID NO: 177087 - DNA, 1389 bp, Artificial Sequence
  derived and/or modified sequence
atgtccgaacgcaaggagggacgcggtaaggggaagggcaaaaaaaaagaacgcggaagtggaaagaaacctgagtctgcagccggaagtcagtcaccagcccttcctccccgtctgaaggaaatgaaatcacaagaaagtgcagctggctcaaagctggtcctgaggtgcgagacttctagtgaatattctagcttgagatttaaatggttcaagaatgggaatgagcttaatagaaaaaataagccgcaaaatatcaaaattcagaagaaacccggaaaatccgagttaagaataaacaaggccagccttgctgattctggagaatatatgtgtaaggttatctcaaagctgggcaacgactccgcaagtgccaacatcacaatcgtggagtccaacgagataatcacaggcatgccggcatcaacagagggcgcttatgtgtcaagtgaatctcctatcagaatctccgtatcgaccgagggcgctaacacatcctcctcaaccagtacctccaccacaggcacttcccatctcgtcaagtgtgctgagaaagaaaaaaccttttgcgtaaacggaggcgaatgttttatggtgaaagatctgtcaaacccctcacggtacctctgtaaatgtcagcccggtttcacaggggcaagatgtacagaaaatgttcctatgaaggttcagaatcaggagaaggcggaagagctgtatcagaaaagggtgctcaccattacaggtatctgcatcgccctgctggtggtcgggatcatgtgcgtagttgcttactgcaaaacgaagaagcaaagaaaaaagctgcacgacaggctccggcagagcctgagatccgaaaggaataacatgatgaatattgcaaatggccctcaccaccccaatcctccccctgagaatgtgcagctcgtcaaccagtatgtgagtaagaacgtgatctcaagcgagcatatagtggaacgggaggcagaaacctctttctctacttctcactatacgtcaacagcacaccattccaccactgtcacacagaccccctcacacagctggtcgaatggccacaccgaatccattctgtccgaaagtcactccgtgatcgtcatgagcagtgttgagaactccagacatagctcacctacaggaggcccacggggaagactcaacggaaccggaggccctagggagtgcaacagcttcctacgccatgctagggaaaccccggattcgtacagagatagcccacacagcgaacgccataatcttatcgccgaacttcggagaaacaaagctcatcggagcaaatgcatgcagatacagctctctgccacccacctccggtcgtcaagcattcctcatcttgggttcatcctgtag

SEQ ID NO: 177088 - DNA, 1769 bp, Artificial Sequence
  derived and/or modified sequence
tcgctctccccctcgagggacaaacttttcccaaacccgatccgagcccttggaccaaactcgcctgcgccgagagccgtccgcgtagagcgctccgtctccggcgagatgtccgagcgcaaagaaggcagaggcaaagggaagggcaagaagaaggagcgaggctccggcaagaagccggagtccgcggcgggcagccagagcccagccttgcctccccgattgaaagagatgaaaagccaggaatcggctgcaggttccaaactagtccttcggtgtgaaaccagttctgaatactcctctctcagattcaagtggttcaagaatgggaatgaattgaatcgaaaaaacaaaccacaaaatatcaagatacaaaaaaagccagggaagtcagaacttcgcattaacaaagcatcactggctgattctggagagtatatgtgcaaagtgatcagcaaattaggaaatgacagtgcctctgccaatatcaccatcgtggaatcaaacgagatcatcactggtatgccagcctcaactgaaggagcatatgtgtcttcagagtctcccattagaatatcagtatccacagaaggagcaaatacttcttcatctacatctacatccaccactgggacaagccatcttgtaaaatgtgcggagaaggagaaaactttctgtgtgaatggaggggagtgcttcatggtgaaagacctttcaaacccctcgagatacttgtgcaagtgccaacctggattcactggagcaagatgtactgagaatgtgcccatgaaagtccaaaaccaagaaaaggcggaggagctgtaccagaagagagtgctgaccataaccggcatctgcatcgccctccttgtggtcggcatcatgtgtgtggtggcctactgcaaaaccaagaaacagcggaaaaagctgcatgaccgtcttcggcagagccttcggtctgaacgaaacaatatgatgaacattgccaatgggcctcaccatcctaacccaccccccgagaatgtccagctggtgaatcaatacgtatctaaaaacgtcatctccagtgagcatattgttgagagagaagcagagacatccttttccaccagtcactatacttccacagcccatcactccactactgtcacccagactcctagccacagctggagcaacggacacactgaaagcatcctttccgaaagccactctgtaatcgtgatgtcatccgtagaaaacagtaggcacagcagcccaactgggggcccaagaggacgtcttaatggcacaggaggccctcgtgaatgtaacagcttcctcaggcatgccagagaaacccctgattcctaccgagactctcctcatagtgaaagacataaccttatagctgagctaaggagaaacaaggcacacagatccaaatgcatgcagatccagctatcagcaactcatcttagatcttcttccattccccatttgggcttcattctctaagaccccttggcctttaggaaggtatgtgtcagccatgaccaccccggctcgtatgtcacctgtagatttccacacgccaagctcccccaaatcgcccccttcggaaatgtctccacccgtgtccagcatgacggtgtccatgccttccatggcggtcagccccttcatggaagaagagagacctctacttctcgtgacaccaccaaggctgcgggagaagaagtttgaccatcaccctcagcagttcagctccttccaccacaaccccgcgc

SEQ ID NO: 177089 - protein, 422 aa, Artificial Sequence
  derived and/or modified sequence
MRWRRAPRRSGRPGPRAQRPGSAARSSPPLPLLPLLLLLGTAALAPGAAAGNEAAPAGASVCYSSPPSVGSVQELAQRAAVVIEGKVHPQRRQQGALDRKAAAAAGEAGAWGGDREPPAAGPRALGPPAEEPLLAANGTVPSWPTAPVPSAGEPGEEAPYLVKVHQVWAVKAGGLKKDSLLTVRLGTWGHPAFPSCGRLKEDSRYIFFMEPDANSTSRAPAAFRASFPPLETGRNLKKEVSRVLCKRCALPPRLKEMKSQESAAGSKLVLRCETSSEYSSLRFKWFKNGNELNRKNKPQNIKIQKKPGKSELRINKASLADSGEYMCKVISKLGNDSASANITIVESNATSTSTTGTSHLVKCAEKEKTFCVNGGECFMVKDLSNPSRYLCKCPNEFTGDRCQNYVMASFYSTSTPFLSLPE

SEQ ID NO: 177090 - DNA, 1987 bp, Artificial Sequence
  derived and/or modified sequence
tttttttttttgcccttatacctcttcgcctttctgtggttccatccacttcttccccctcctcctcccataaacaactctcctacccctgcacccccaataaataaataaaaggaggagggcaaggggggaggaggaggagtggtgctgcgaggggaaggaaaagggaggcagcgcgagagagccgggcagagtccgaaccgacagccagaagcccgcacgcacctcgcaccatgagatggcgacgcgccccgcgccgctccgggcgtcccggcccccgggcccagcgccccggctccgccgcccgctcgtcgccgccgctgccgctgctgccactactgctgctgctggggaccgcggccctggcgccgggggcggcggccggcaacgaggcggctcccgcgggggcctcggtgtgctactcgtccccgcccagcgtgggatcggtgcaggagctagctcagcgcgccgcggtggtgatcgagggaaaggtgcacccgcagcggcggcagcagggggcactcgacaggaaggcggcggcggcggcgggcgaggcaggggcgtggggcggcgatcgcgagccgccagccgcgggcccacgggcgctggggccgcccgccgaggagccgctgctcgccgccaacgggaccgtgccctcttggcccaccgccccggtgcccagcgccggcgagcccggggaggaggcgccctatctggtgaaggtgcaccaggtgtgggcggtgaaagccgggggcttgaagaaggactcgctgctcaccgtgcgcctggggacctggggccaccccgccttcccctcctgcgggaggctcaaggaggacagcaggtacatcttcttcatggagcccgacgccaacagcaccagccgcgcgccggccgccttccgagcctctttcccccctctggagacgggccggaacctcaagaaggaggtcagccgggtgctgtgcaagcggtgcgccttgcctccccgattgaaagagatgaaaagccaggaatcggctgcaggttccaaactagtccttcggtgtgaaaccagttctgaatactcctctctcagattcaagtggttcaagaatgggaatgaattgaatcgaaaaaacaaaccacaaaatatcaagatacaaaaaaagccagggaagtcagaacttcgcattaacaaagcatcactggctgattctggagagtatatgtgcaaagtgatcagcaaattaggaaatgacagtgcctctgccaatatcaccatcgtggaatcaaacgctacatctacatccaccactgggacaagccatcttgtaaaatgtgcggagaaggagaaaactttctgtgtgaatggaggggagtgcttcatggtgaaagacctttcaaacccctcgagatacttgtgcaagtgcccaaatgagtttactggtgatcgctgccaaaactacgtaatggccagcttctacagtacgtccactccctttctgtctctgcctgaataggagcatgctcagttggtgctgctttcttgttgctgcatctcccctcagattccacctagagctagatgtgtcttaccagatctaatattgactgcctctgcctgtcgcatgagaacattaacaaaagcaattgtattacttcctctgttcgcgactagttggctctgagatactaataggtgtgtgaggctccggatgtttctggaattgatattgaatgatgtgatacaaattgatagtcaatatcaagcagtgaaatatgataataaaggcatttcaaagtctcacttttattgataaaataaaaatcattctactgaacagtccatcttctttatacaatgaccacatcctgaaaagggtgttgctaagctgtaaccgatatgcacttgaaatgatggtaagttaattttgattcagaatgtgttatttgtcacaaataaacataataaaaggagttcagatgtttttcttcattaaccaaa

SEQ ID NO: 177091 - DNA, 1266 bp, Artificial Sequence
  derived and/or modified sequence
atgcgctggcggagagcaccacgacgatccggacggcctggtcctagggcacagcggccaggttctgcagcgagaagctccccacctctcccactgcttcctcttcttctcctgcttggaactgctgcacttgcacctggcgcagcagctggaaacgaggcagcaccagcaggagcatcagtgtgttactcctcaccaccatccgttggaagcgtccaagaacttgcacaacgcgccgctgtggtgattgagggaaaggtgcacccgcaacggcgccaacaaggagcactggataggaaggcggcagcagcagcgggtgaggccggcgcctggggcggtgaccgggagccgcctgcagcgggacctcgggcacttggacctcctgcagaagagccccttctcgcggcaaacggtacggtgccatcgtggccgactgcgccagtgcctagcgcaggagaaccgggcgaggaggccccctacctggtgaaagtgcatcaagtgtgggcagtcaaggcaggcggacttaagaaagattccctccttacggtgcgtctgggtacgtggggacatcctgcgtttccttcgtgtggtagactcaaagaggacagccgctatatctttttcatggaacctgatgcaaactccacgtccagagcgccagcagcattccgggcatcctttccacccctggagactggaagaaatcttaagaaggaggtgtcccgcgtgctttgcaagcgatgtgcacttccgcctcgtttgaaggaaatgaagtcgcaggaatcggcagcaggtagcaagctggtgctgcgatgtgaaacctcgtccgaatactcctccctcaggttcaaatggttcaagaatggaaacgagttgaatcgcaaaaacaagccacaaaacattaagatccaaaagaagcctggaaagtccgaactcagaatcaataaagcatctctcgccgattccggtgaatacatgtgtaaggtcatcagcaagctggggaatgattcggcttcagcaaacattactattgtcgaatcgaatgcaaccagcacctcaactactggtacctcgcatctggtgaagtgtgcggaaaaagagaaaaccttttgtgtgaatggtggtgaatgctttatggtcaaagatctgtctaacccttcaaggtacctgtgtaagtgtccaaacgaatttaccggcgatagatgtcagaattacgtgatggcgtcgttttactcgacctccaccccatttctcagcctgcctgag

SEQ ID NO: 177092 - DNA, 1266 bp, Artificial Sequence
  derived and/or modified sequence
atgcggtggagacgggccccacgaagatccggcagaccaggtcctcgggcccagaggccaggctctgctgcgcggtcatcaccacctctgcccttgctgccgctcttgctgttgctcgggaccgctgctctcgcccccggtgccgccgccggaaacgaagccgcacctgccggtgcatccgtgtgttattccagccccccgtccgttggctctgtgcaggagttggcccaacgggcggctgtagtgattgaaggaaaagtgcacccacaacgaaggcagcagggcgccctggatagaaaagccgctgccgccgccggcgaggcaggtgcatggggtggtgatagggagccaccagccgccggacctcgcgcacttgggccacccgccgaagaacccttgctcgccgcgaacggtacagtgccaagctggccaactgcccctgttccaagcgccggggaaccaggcgaagaggccccttacctggtgaaggtgcaccaggtctgggcggtgaaagccggcgggttgaagaaagattctcttctgacagtgcggctgggcacttggggccacccagcctttccctcctgcgggaggttgaaggaggacagcagatatatcttcttcatggaacctgacgcgaatagcacctccagagctccggctgcatttcgcgcctcttttccccccctggagactggtcgaaatctcaagaaggaagtgagccgcgtgctgtgtaagcgctgtgctttgcctccccggctgaaggagatgaaatctcaagagtcagctgctgggtctaagcttgtcctgcggtgcgagaccagctctgagtacagcagtcttagattcaaatggttcaaaaacggtaacgaactcaatagaaagaacaagcctcaaaatatcaaaatccaaaagaagccaggcaagagtgaactcaggattaacaaagcatcactggctgatagcggcgaatacatgtgtaaggtcatatctaaacttggaaatgacagtgcaagcgccaacataactatcgttgaatcaaatgccactagtactagcactacgggaacctcccatctggtgaagtgcgccgagaaagagaaaaccttttgcgtgaatgggggcgagtgtttcatggtaaaggatctcagcaacccttctagatacctgtgcaaatgccctaacgagtttacgggcgacagatgtcagaattacgtcatggcatccttttattccaccagcaccccgttcttgtccctgccagaa

SEQ ID NO: 177093 - DNA, 1266 bp, Artificial Sequence
  derived and/or modified sequence
atgcgttggcggagagctccccgccgcagcgggcgcccaggtcctcgggcacagcgacctggaagtgccgcgcgctcaagcccgcctttgccactgctgccactgctgctgctactgggcaccgctgcgctggctccaggtgcggcggctggtaacgaggcagccccagcgggagccagcgtttgctactcatctccacctagcgtgggttctgtgcaggaactggcacagcgcgccgcggtggtgatcgaaggcaaagttcatcctcaacgacgtcagcaaggcgctctggaccgtaaggcagctgctgcagccggcgaggccggggcttggggcggtgatcgcgagccaccggctgccggtcctcgggcactgggcccacctgcagaagagccactgctggcggcgaacggtaccgtgcctagctggccaaccgcgccggtcccgtccgccggtgagcctggtgaggaagccccttacctcgtgaaagtccatcaagtctgggcggtcaaagcaggtggcttgaaaaaggatagcctgctcaccgttcgcctgggtacttggggccacccggcgttcccttcctgcggccgactgaaagaagattcacgctacatcttcttcatggagcctgatgcaaactctacgtcccgagcgccggctgcatttcgagcctctttccctccattggaaacggggcgaaacctgaaaaaggaggtgagcagggtcctgtgcaagcgttgcgccctgccgcccagactgaaagagatgaagagccaggaatccgcagcgggcagcaagctggttctgcggtgcgaaactagctcggagtacagctctctgcgatttaagtggttcaagaacggaaatgaactaaaccgcaagaacaagccccaaaatattaaaattcaaaagaaaccgggtaagtcagaactgcgcatcaacaaggcgtcacttgcagatagcggggagtacatgtgtaaagtgattagcaagcttggtaatgattctgcgtccgccaatatcacgatcgttgagtctaatgctacctcgacgtccacgaccggtacctcccacctggtcaaatgtgctgagaaggaaaaaacgttttgtgtaaacggtggtgaatgcttcatggtgaaagatttgagcaacccaagccgctacctgtgcaaatgccctaacgaattcacaggtgatcgttgccagaattatgtgatggcaagtttctacagcacctcgactcctttcctgagcttgccggag

SEQ ID NO: 177094 - DNA, 1266 bp, Artificial Sequence
  derived and/or modified sequence
atgcgctggcgtcgtgcccctcgtcgctctggtaggcccggtccccgcgctcagcgtcccggcagtgccgctcgcagctcacctcccctccccctcctccctctgcttctgctgctgggcactgcagctttggcccccggtgccgctgccggtaacgaagccgcacctgctggcgcttccgtctgctattcttccccacccagtgtcggtagtgtgcaggagcttgcccaaagagctgccgtcgtaattgagggtaaagtacaccctcagcgcagacagcagggagctctggatcgcaaggcagccgccgctgccggtgaggccggtgcctggggcggcgacagagagcccccagccgcaggtcccagagcactcggccccccagcagaagagcccctgttggccgccaacggaaccgtgcccagctggcctaccgcccccgtaccaagcgccggcgagcccggagaggaagccccatatttggtcaaggttcatcaggtgtgggccgtgaaggcaggaggtttgaagaaagattctctcctgactgtaagactgggtacctggggccatccagctttccccagttgcggccgtctcaaggaagacagccgctacatttttttcatggagcctgatgccaatagcactagccgcgcccccgctgcatttcgcgctagcttcccaccccttgagaccggaagaaacctcaagaaagaagtgtctagggtgctgtgcaagaggtgtgcactgcccccacgcctcaaggaaatgaagtctcaggagtccgccgcaggtagcaagctggtacttcgctgcgagacctccagtgagtactcatccctgaggttcaaatggttcaagaatggaaacgagctgaaccgtaagaacaaacctcagaacattaaaatacagaagaaacctggaaaatccgaactgcgcatcaataaggcctcccttgccgatagcggcgaatacatgtgtaaggtcatctccaagttgggtaacgattccgcttccgccaatattaccattgtggagtccaatgccacatctacatcaaccaccggaacctctcatctcgttaagtgcgccgaaaaggaaaagaccttttgcgttaatggtggtgaatgtttcatggtcaaggacctgagcaacccctcacgctatctctgcaaatgccccaacgagtttaccggcgaccgttgtcagaattatgtcatggcatcattctactctacctcaacccctttcctcagtctgcccgaa

SEQ ID NO: 177095 - DNA, 1266 bp, Artificial Sequence
  derived and/or modified sequence
atgcgttggcggagagcgccaagacgatcagggcgacctggtcccagagcgcagcggcccgggtcagcagcccggagctcccctccccttccacttctccctctgcttcttctgctggggaccgcagcgctggctccaggtgcagccgcaggaaacgaggctgctcctgctggagcctcagtgtgttactcgtcccctccaagcgtgggatcggtgcaagaactggcacagagggccgcagtggtcatagagggcaaagtccatcctcaacgtcgtcagcaaggagcactggataggaaagcggcagccgctgcgggggaagcgggtgcatggggcggtgaccgggaaccacctgccgctgggcctcgagccctgggaccgcccgcagaagagccccttcttgcagccaacggcaccgtcccttcctggcccacggcacctgtcccatcagcaggggaaccgggagaagaagcaccttacctggttaaggttcatcaagtctgggcggtgaaggcaggtggtctgaaaaaggactccctgctcaccgtgaggctcggtacctggggtcacccagccttcccatcgtgtggtagactcaaggaggattcccgctacatcttctttatggagccagacgcgaattcaacttcgagggccccagctgcgtttcgtgcctcatttccaccattggaaactgggcgtaacctcaagaaggaagtctccagagtcttgtgcaaacggtgtgcactcccacctaggcttaaggagatgaagtcacaagagtccgccgcaggatcgaaactggtgcttaggtgcgagacttcatcggaatactctagcctgagatttaagtggtttaagaacgggaacgaacttaatcgcaagaacaagcctcaaaacattaagatccagaaaaagccaggaaagtcagaactcaggattaacaaggcatcgctcgcagatagcggcgagtacatgtgtaaggtcatttccaagctcggaaacgattcagcctcggcaaatatcaccatcgtggaatcaaacgcaacgtcgacctcgactaccggaacctcgcaccttgtcaaatgtgcagaaaaagagaaaactttttgcgtcaatggtggcgaatgtttcatggtgaaggatctctcgaatcccagccgatacttgtgcaaatgtccgaatgagttcactggtgaccgctgccagaactatgttatggcctccttttactctacctcgacgcccttcctgtcgcttcctgag

SEQ ID NO: 177096 - DNA, 1266 bp, Artificial Sequence
  derived and/or modified sequence
atgagatggcgccgggctccgcgccggtcgggacggccgggccctcgtgcacagagaccgggttcggcagcgcgaagctctcccccgttgcctcttttgccgctgctccttttgcttggcacggctgcacttgccccgggggcggcggccggaaacgaagcagcaccggccggggcgtccgtttgttattcgtcacctccgtccgtcggatccgtgcaggaactcgcgcaacgcgcggcagtagttattgaaggaaaggtccatccgcagagacgtcagcaaggcgcgttagatcgcaaagcggccgcggcagccggagaagctggtgcatggggaggagatcgtgagccgccggcagcaggccctcgagccctggggccaccggcggaagagccgcttcttgctgccaacggaaccgtacctagctggcctacagctccggtcccgagcgccggcgaaccaggcgaagaagctccgtatcttgtcaaagtgcaccaagtgtgggctgtaaaagcgggcggacttaaaaaagactcgcttcttacggtaagacttggcacgtggggccatccggcttttccaagctgtggacgactaaaggaagatagccgctatatatttttcatggagccggatgcaaattccacgagtcgcgcaccggcggcgtttagggcttcctttccgccactggaaacaggccgcaacttgaaaaaggaagtaagccgggtgctttgtaagcgttgcgcactgcctcctcggctgaaggaaatgaaaagtcaagaaagcgcggcaggctcaaaattagttctgcgatgcgaaacgagctctgagtattcatcgcttagatttaaatggtttaaaaacggcaacgaattgaatcgcaagaataaacctcagaacatcaaaatccaaaaaaagcctggaaaaagtgagttgagaattaacaaagccagcctggcggactcgggagaatatatgtgtaaagttatttctaagctgggcaatgattccgcatccgcgaatattacaatagttgaaagcaatgccaccagtacctctacgaccggtacgtcacacctagtcaaatgcgcggagaaagaaaaaacgttttgcgtcaatggcggagaatgttttatggtgaaggatctttcaaatccgtccaggtacttatgcaaatgccctaacgagtttactggagatagatgtcaaaattatgttatggctagtttttatagtacatctactccgtttctcagcctgcctgag

SEQ ID NO: 177097 - DNA, 1266 bp, Artificial Sequence
  derived and/or modified sequence
atgaggtggcgccgggcacctcggcgaagcggtcggccgggaccccgggcacaacggcctggatcggcagctcggagctccccgcctctgccgcttttgcccctgctgctgttgctgggaacggctgcacttgcaccaggtgccgccgcgggaaatgaggctgcaccggctggtgcatcggtgtgctactcctctccgccgtccgtgggaagcgtgcaggagctggcacaaagagccgcggtggtgatcgaaggaaaggtgcacccgcaacgcagacaacaaggggccctggaccggaaggctgcggcggcggccggcgaagctggggcttggggtggcgaccgtgaaccaccggccgccggcccgcgcgcgcttggacctccggcggaggaacctcttcttgccgcaaatggaactgtgccttcctggccgactgccccggtcccatccgcgggtgaacccggagaggaagctccctacctggttaaggtgcatcaggtgtgggccgtgaaagcaggcgggctgaagaaggacagtctgctgactgtgaggctgggcacctggggccacccagccttcccgtcctgcggaaggctgaaggaggactcgagatacatcttctttatggaacccgacgcaaactccacctcaagggcccctgccgctttccgcgcctcgttcccgcctctggaaaccggacgcaatctcaagaaggaagtgtcccgggtgctgtgcaagagatgtgcattgccacctcggttgaaagaaatgaagtctcaagaatcagccgcaggatcaaaactcgtgctccgttgcgagacttcatcggaatactcgtcgctcagattcaagtggttcaaaaacggaaatgagctcaatcggaagaataaaccgcagaatatcaagattcaaaagaagccgggtaagtcagaactgaggatcaacaaggcctccctcgccgactcgggtgagtacatgtgcaaggtcatctcgaagctgggaaatgacagcgcctcagctaacattacgattgttgagtccaacgccaccagcacttcgactacgggcacctcccacctcgtcaagtgcgcagagaaggaaaagaccttctgcgtgaatggaggagagtgcttcatggtcaaagatctgagcaatccatcgcgatacctctgtaaatgtccaaacgaattcactggcgacaggtgccagaattacgtgatggcctcgttttactcaactagcactccgtttctgtcgctgccagaa

SEQ ID NO: 177098 - DNA, 1266 bp, Artificial Sequence
  derived and/or modified sequence
atgaggtggagaagagctccaaggaggtccgggcgacccgggcctcgggcccagcgtccgggctccgctgcccgatcatcacctcctctgcccttgcttcctctactcctattactaggcaccgcagccctggcccctggagccgccgccggaaacgaggcggcccccgccggagcttcggtttgttactcgtcacctccatccgtaggctctgtgcaggaactcgctcagcgcgctgctgtggtcatcgagggtaaagtccatccacaaagaaggcagcaaggggctctggatcgcaaggctgcagctgcagcaggtgaggccggcgcctggggaggcgaccgagagccaccagccgccggtcctagagctctaggacctcctgccgaggagcctctgctggccgcaaatggcacagtcccgtcgtggccgactgcccctgtcccaagcgctggggagcccggggaggaagcaccctacctggtgaaggtacaccaggtctgggctgtgaaggctggcggcttgaagaaagattcccttctgaccgttcgtctcggcacttggggacaccccgccttcccttcttgcggaaggttaaaagaggatagtcgctacatctttttcatggagccagatgctaattcaacgtcacgcgcacctgctgctttccgggcctcgttcccccctttggagaccggtcggaacctcaagaaggaagtgtctagagtgctctgcaagcgctgtgcactgccaccgaggctgaaggaaatgaagtcccaggagtcagccgccgggtctaagctggtgctgaggtgcgagacgtcaagcgagtattcatctcttaggtttaaatggtttaagaacggaaatgagctgaaccggaagaacaagccacaaaatattaagatacagaagaaaccagggaagtccgagcttagaatcaataaagctagcctcgccgacagcggcgagtatatgtgcaaagtgatatctaagctgggaaatgatagcgccagcgcgaacataaccatcgtggagagcaacgctacctccaccagcacgacaggaacgtcacatctggtgaaatgcgccgagaaggagaagactttctgtgtaaacgggggtgagtgcttcatggtgaaggacctgagtaaccctagtaggtatttgtgtaaatgcccaaatgagtttactggtgatcggtgtcagaattatgtcatggctagtttctactccacttctacgccttttctatccctacctgaa

SEQ ID NO: 177099 - DNA, 1266 bp, Artificial Sequence
  derived and/or modified sequence
atgagatggaggcgcgcccctcgtagatcggggcgtcctggtcctagagcgcaaagacctggatccgcagctagatcgtcccctccacttccgctcctgcctcttctgctgcttctgggaaccgccgcattggcacctggagcggcagcaggcaatgaagccgcgccagcaggcgcctcagtgtgttactcctcccctccatcagtcggatcggtgcaggaattggcacagagagcagcagtggtcattgagggaaaggtgcatccacaacgcagacaacagggggcgctggatcgtaaggctgcagcggccgccggtgaggcaggtgcttggggcggggaccgcgaaccaccggcagcaggacctcgggcacttggcccacccgctgaggaaccccttctggccgcaaacggaaccgtgccttcctggccaactgcgccagtgcctagcgcgggtgaaccaggagaagaggcaccttaccttgtcaaagtgcatcaagtgtgggctgtgaaagccggtggcctcaaaaaggacagcctgctgaccgtgcgccttggaacttggggacatcctgcctttccaagctgcggtagactgaaggaggattcacgttacattttctttatggaacctgacgccaattcgacctcgcgcgctcctgctgcattcagagcatccttccctccccttgaaaccggtcgcaaccttaagaaggaggtttctcgggtgctttgtaaaagatgtgcactcccgccaagactcaaggagatgaagtcccaagagtccgcagccggcagcaagctggtgctccgttgtgaaacgagcagcgaatactccagcctgaggtttaagtggtttaagaacggaaatgaacttaatcgcaaaaacaaaccgcagaacattaagatccagaagaagccgggtaagtcagaactgcgcattaacaaggcgtcgctcgcagatagcggcgaatacatgtgtaaggtgatttcgaagctcggaaacgattccgcctcggccaatatcaccattgtcgaaagcaacgctaccagcacttcgactaccggaacttcccaccttgttaaatgcgcggaaaaggaaaagaccttttgcgtgaatggaggtgagtgctttatggtgaaggacctctcgaatccttcgcgatacctttgtaaatgtcctaatgagtttaccggtgacagatgtcaaaactacgtcatggcctccttttactccacttccaccccgttcctttcgctccctgaa

SEQ ID NO: 177100 - DNA, 1266 bp, Artificial Sequence
  derived and/or modified sequence
atgcggtggagaagggctcctcgccgtagtggtcgtcccggtcctagggcccaaaggcctggatcagctgcgcgatctagtcctcctctccctctgctgccattactgctccttcttggcacggccgcgcttgcccctggtgcagctgcagggaacgaggcggctccagccggagcgtcggtgtgttactccagccccccttccgtagggtcagtgcaagagttagcccaacgagctgccgttgtgattgagggaaaggtccatccccagcgacgccagcaaggcgctcttgatcgcaaagctgcggcggcagctggggaggcaggagcctgggggggagatagagagccaccagctgcaggtccccgggctcttggtcccccagccgaggaacccttgttggccgctaacggcactgttccaagctggcccaccgcccccgttccgtctgccggggagcccggggaggaggctccatacctggtaaaagttcaccaagtatgggcagtaaaggctgggggcctcaagaaggacagcctcttgaccgtgcgccttggaacctggggtcatcccgctttcccatcatgcggccgacttaaggaagactctcggtacattttttttatggagcctgacgccaactcaacgagccgcgcccctgcggcattccgcgcttccttccctccccttgagaccggccgcaacttaaagaaggaggtaagtcgggttctctgtaagagatgtgcactaccgcctcgcctgaaagaaatgaagagccaggagtcggcggctgggtccaagctagtattgcggtgcgagacgtcatctgagtactccagtctacgtttcaagtggtttaaaaacgggaacgagctgaaccgcaagaacaaaccacaaaacataaagattcagaaaaagccaggtaagtctgaacttcgcattaataaagcatcgcttgcagacagcggtgagtatatgtgtaaggtgatctcaaagctgggtaacgatagcgcatcagcgaacatcactatcgtggaatccaatgccacatcgacctcgacgaccggtacttcgcaccttgttaaatgcgccgaaaaggagaagacattttgtgtgaacggaggtgagtgcttcatggtcaaggacctgtccaacccctcacgctacctgtgcaagtgtcccaacgagtttacaggcgataggtgtcagaactatgtcatggcttcattttacagcacgtcgactccgttcttgtcactccctgag

SEQ ID NO: 177101 - DNA, 1266 bp, Artificial Sequence
  derived and/or modified sequence
atgcggtggagaagagctccgcgaaggtcgggacggcctgggccgcgggcccagcgtcccggtagcgcggcgaggagctcgccgccgcttcctcttctgcccctccttctcctgctgggcacggccgccctggcacccggagcggcggcaggaaatgaggcagcccccgccggcgcgagcgtgtgctactcgtctccaccgtccgtgggcagcgtgcaagagctcgctcaacgggccgccgtggtgatcgagggaaaggttcatccacaaaggcgccagcagggcgccctcgataggaaagctgcagcagcggcgggcgaagccggggcatggggaggagatcgagaaccgcccgccgcaggaccgcgggcgctgggtcctccagccgaggaacccttgctcgcagcgaacggaaccgtcccgtcctggcctactgcaccggtcccgagcgcaggtgagccaggcgaagaggcaccgtacctggtgaaggtccatcaggtctgggctgtcaaggctggaggcctcaagaaggattcgcttctgaccgtgagacttggaacctggggccacccagcattccccagctgcggacgcttgaaagaggactcgcgctacatctttttcatggaaccagacgccaattcaacctcgcgcgcaccggcggcattccgggcttccttcccgcccctggagactggacgaaacctgaaaaaggaggttagccgcgtgctgtgcaaaagatgcgcgctcccaccaagacttaaggaaatgaagtcgcaggagagcgcagccggcagcaaactcgtgctcaggtgtgaaaccagttccgagtacagctcgctgagattcaagtggttcaaaaacggtaacgagctgaacagaaagaacaagcctcagaatatcaagatccaaaagaaaccaggaaagtcggaactccgcatcaacaaagcatccctggctgactccggggaatacatgtgcaaggtcatcagcaagctcggtaatgattcggcctcagcgaacattactattgtcgagtcaaacgcaactagcacctcgaccactggaacctcgcacctcgtgaaatgcgccgagaaggaaaagaccttttgcgtgaatggaggggaatgctttatggtaaaggacctgtcgaatccgtcaaggtatctctgcaagtgtccgaacgaattcaccggagacagatgtcaaaactacgtgatggcatccttctactccacttcaactccgtttctcagtctcccggaa

SEQ ID NO: 177102 - DNA, 1266 bp, Artificial Sequence
  derived and/or modified sequence
atgaggtggaggagggcccctcggcgatccgggcgccccggacctcgggcacagaggcccggatccgcagcacgctcttctcccccactgccccttctacctcttctgcttctgttgggcacagcagccctggcccccggcgccgctgctggtaacgaggccgccccagcaggcgcctccgtatgttattcttctccacccagcgttggttctgtccaggagctggcacagcgcgcagcagtcgtgattgagggaaaggtgcacccacaacgtagacaacagggggcacttgatcggaaagccgcagcggcggctggggaagccggcgcgtggggcggagacagagaacctcctgcagccgggccaagagccttaggcccacctgctgaggagccattactggcagcaaatggaacagtcccatcttggcctacggcaccggtgccaagtgcgggggaacctggcgaggaggctccctatctagtcaaagtccaccaggtgtgggcggtgaaggctggagggctaaagaaggattcactacttactgtgcggcttgggacctgggggcatcctgcttttcctagttgcggccgattgaaagaggattctaggtacatattcttcatggagccagacgctaattctactagcagagcacctgcggcctttcgcgcctcttttcctccactagaaacgggccgaaatttaaaaaaagaggtctcccgggtgttgtgcaaaagatgcgctcttcctcctcggcttaaggagatgaagtcccaggagtcagccgcaggaagtaaacttgttcttcgctgcgagacatccagcgagtacagctctctgcggtttaagtggttcaagaacggaaatgaactcaaccggaaaaacaagccccagaacatcaagattcagaaaaaaccaggtaagagcgagcttcgcattaacaaagccagccttgctgattctggggagtacatgtgtaaagtgataagcaaactcgggaacgactctgcatccgctaacattactatagtcgagagcaacgcaacatctacatcaacaacaggtacctcccacctggttaagtgcgctgaaaaagagaagactttttgcgttaacggcggagaatgttttatggtcaaggacctgagtaacccctcaaggtacctctgtaagtgccccaacgaatttactggcgaccggtgtcagaactatgttatggcatccttctattcaacttctactcctttcctgagcctgcctgaa

SEQ ID NO: 177103 - DNA, 1266 bp, Artificial Sequence
  derived and/or modified sequence
atgcggtggagacgcgccccgcggaggagcggcaggcccggaccgcgcgcccaaagacctggaagcgcagctagatcgagcccgcctctccctctgctcccactcttgctgttgctgggtactgcggcacttgcaccgggcgcggccgctgggaatgaagccgccccagccggtgcctccgtgtgctattcgtcaccaccgtccgtcggatcagtgcaagagttggcgcaacgcgcggcagtggtgatcgagggaaaggtgcacccgcaacggcgccagcagggagctctcgaccgcaaagcagccgctgcggccggagaagcaggcgcctggggaggcgaccgcgaaccgccagctgccggtccacgggccttgggtcccccagcagaggaaccattgctggctgccaatggcaccgtcccaagctggccaactgcgccggtgccctccgcgggagagccgggagaagaggcaccgtaccttgtgaaggtgcatcaagtgtgggcagtgaaggccggtggactgaaaaaggactcactgctcaccgtgaggctgggtacttggggacacccggccttcccatcatgtggcaggttgaaagaggactcccggtacatcttcttcatggaaccggatgcaaactcaacttcaagagccccagccgctttccgcgcatcgttcccgccgcttgagacgggaagaaatctgaagaaggaagtgtctcgcgtgttgtgcaagagatgtgccttgccccccagacttaaggaaatgaagtcgcaggaaagcgcagcgggaagcaagctggtcctccgatgcgaaacctcctccgagtactcatcgctcagattcaagtggttcaaaaacggaaacgagttgaaccgcaaaaacaagcctcagaatatcaagatccagaagaaaccagggaagtccgaactccgcatcaacaaagcctcactggccgattccggagagtacatgtgcaaggtgatcagcaaattgggcaacgattctgcttcggcaaatatcaccatcgtggagagcaacgccacttccacctcgactactggaacttcgcatctcgtgaagtgcgcggaaaaagaaaagactttctgcgtgaacgggggagaatgcttcatggttaaggacctcagcaacccgtcccggtacctgtgcaaatgcccgaatgagttcaccggggacaggtgtcagaactacgtgatggcgtcattctacagcacgagcactccgtttctttctctgccggaa

SEQ ID NO: 177104 - DNA, 1266 bp, Artificial Sequence
  derived and/or modified sequence
atgcgctggaggcgcgctccaagaagatctgggaggcctggacccagagctcaacgtcccggcagcgccgctaggagctcaccccccctgccactcctgccactactgctactcctgggaacagccgccctcgctcctggagctgcggccgggaatgaggcggccccagcgggcgcctctgtttgttactcatccccaccctcagtgggtagcgttcaggaattggcacagagagccgcggtcgtaattgaaggcaaggttcatccgcagcgcagacagcagggcgccctggacaggaaagccgccgccgcggccggcgaggccggagcttggggcggtgaccgagagccaccggctgccgggcctcgggccttggggcctccagccgaggaacccctgctagctgccaacggcacagtgccttcctggccaaccgcccctgtccccagcgctggagagcccggggaagaagctccctatctcgtcaaggtccatcaggtgtgggccgtgaaagccggaggtctgaaaaaggactccttgttaacggttcgcctgggaacatgggggcatccggcttttccctcctgtggccgattaaaagaagactcaaggtacattttctttatggagcccgatgctaattctacgagtcgggctcccgcggcgttccgagcgagtttcccacctctggagaccggccgtaacctgaagaaagaggtctctcgggttctgtgtaagcgctgcgccctgccacccaggctgaaagagatgaagtcccaagagtccgctgctggctcaaaactggtgctgcgctgcgaaacatcctccgaatacagctcgctgcgtttcaagtggtttaaaaatgggaatgagctcaatcggaagaacaagcctcaaaacatcaagatccagaagaaacccggcaagagcgaactccgcatcaataaagcatctctggctgacagcggggagtacatgtgcaaagtcatttcaaagctgggcaacgactccgcgtcagccaacatcactatagtggagtctaatgcaacctccactagtactactggcacaagccacctggtgaagtgcgccgaaaaggaaaaaactttctgtgttaacggaggggagtgcttcatggtcaaggatctgagcaacccatctcggtacttgtgcaagtgccctaacgagttcactggcgatcgatgccagaattacgtgatggcaagcttttactctacttccaccccctttctgtctttgccagag

SEQ ID NO: 177105 - DNA, 1266 bp, Artificial Sequence
  derived and/or modified sequence
atgaggtggcgccgggcaccaagaaggagcggccgccccggccctcgcgcccagaggccgggatcggcagcccggtcaagtcccccactgcccctactgcctcttctattgttgctcgggacggctgctttggccccaggcgccgctgccgggaatgaagccgccccagcgggcgcgtcggtctgctacagcagccctcccagtgtagggtccgtccaggaactggcgcagcgcgccgccgtcgtaatcgagggaaaggttcacccacaacggcgacagcaaggtgctctggatcgcaaggcagctgctgccgctggagaagctggggcgtggggtggagatagggaaccacccgcagcaggccctcgggctctggggcctcctgctgaagaacccctccttgccgcgaatggcaccgtcccgtcttggcctactgctccagtcccctccgccggtgagccaggagaggaagccccatatctggtgaaggtgcaccaggtctgggcagttaaggctggcggtctgaagaaagattcacttctgacggtgcggctgggtacctggggccacccggccttcccttcctgtggccgcctcaaggaggactcacggtatattttttttatggaacctgatgccaattcgacctcccgtgcaccggccgcgtttagggcctcctttccacctctggagactggcagaaatctcaagaaagaggtgagtcgcgtgctatgcaaacgctgtgcactgccgccgagactgaaggagatgaaaagtcaagaatccgcggccggctctaaacttgtcctgcgctgcgagacttcttctgaatattcgagtttgcgattcaagtggttcaagaacggaaatgagctcaaccgcaaaaacaaaccccagaatataaaaattcagaaaaaacccggaaaatcagagctgagaatcaataaggcaagcctggccgatagcggcgagtatatgtgcaaagttatatctaagttaggaaatgatagcgctagtgctaacattacgattgtggagtccaatgccacatccacttcaacgacaggaacttcccatctcgtgaaatgtgcagagaaggaaaaaacgttttgtgtcaatgggggggaatgtttcatggtgaaggatctctccaatccatctagatatctgtgcaagtgccctaacgagttcaccggcgatcggtgccaaaattatgtgatggcaagcttctattccacttccacgccttttctttccctgcctgag

SEQ ID NO: 177106 - DNA, 1266 bp, Artificial Sequence
  derived and/or modified sequence
atgcggtggagacgggcgcccaggcgctcgggtcggccggggccgcgggcacaacgcccgggctcggctgctcgatccagcccgccattgcctctgcttccactgctgctgcttttggggactgcggcgctcgccccgggcgcagctgctggaaatgaagcggccccagccggtgcgtccgtgtgctactcctcgccgccgtccgtgggttccgtgcaagagctcgcccaaagggcggctgtggtgatcgagggaaaggtgcacccgcagcgcaggcagcagggagccctcgataggaaagcggccgcagccgcgggagaggctggagcctggggcggagacagagaaccgcctgcggccggaccgagagcactgggcccaccagccgaggaaccgctgctggccgccaacggaacggtcccatcgtggccaactgcccccgttccgtcggcgggagaaccaggagaagaagccccgtacctggttaaggtgcaccaagtgtgggctgtgaaagcaggaggtctgaagaaagattcactccttaccgtgcgcctgggaacctggggacatccagcgttcccgtcgtgcggcaggctgaaggaggacagcaggtacattttctttatggaaccggatgccaacagcacctcacgggcccctgctgctttccgcgcctcctttccgcccctcgagactggtagaaacctcaagaaggaagtgtcaagagtgctttgcaagcgctgcgctctccctccacgcttgaaggagatgaagagccaagagtcagctgcaggctcaaagctggtgctccggtgcgaaacctcgagcgagtacagttccctccgctttaagtggttcaagaatggaaatgagctgaaccgcaagaataaaccgcagaatatcaagattcagaaaaaaccgggcaaatccgaactgcggatcaacaaggccagcctggccgactcgggcgaatacatgtgcaaagtgatttcgaagctggggaacgactccgcgagcgccaatatcactatcgtcgaatctaacgccacctccacctctaccactggcacctcccacctcgtcaagtgtgcggagaaggaaaagacgttctgtgtcaacggaggcgagtgtttcatggtgaaggacctctcgaatccaagcaggtacctgtgcaagtgtcctaacgaattcaccggagacagatgtcaaaactacgtcatggcctccttctactcaacttcaactcctttcctgagtctgcccgag

SEQ ID NO: 177107 - DNA, 1266 bp, Artificial Sequence
  derived and/or modified sequence
atgcgatggcgccgagccccgagaaggtctgggaggcccggtccacgggctcagaggcccggttccgcggcccgatccagtcccccgttacctcttttgcccctcttgcttctgctcggaactgcggccctggctcctggcgccgctgccggaaacgaggcagctcctgccggggctagtgtgtgctatagcagtccaccttcggtaggctccgtacaagaactcgcccagcgcgctgctgtcgtcattgaggggaaggtacacccacagcgccggcagcaaggcgctttagataggaaggccgccgcagccgcgggagaagcaggcgcatggggcggggatagggaaccacccgcggccggccctcgtgcactgggccccccagcggaggagccacttctggcagccaacgggaccgtgcctagttggcctactgcacccgtccctagcgccggagagcctggagaggaggcaccttatttagttaaagtgcaccaggtgtgggcagtgaaggctgggggcctgaaaaaagacagcctcctgacagtacggctaggcacctggggacaccccgcatttccatcttgtggcaggctgaaagaggactcccgctacatattctttatggaaccggatgccaattctacctcacgggctcctgccgcctttagagcaagctttcctcctcttgagactgggcggaacctgaagaaagaagtttctcgggtactgtgcaaacgttgcgccctgccccctcggctcaaggaaatgaaaagccaggaatcagctgctggaagtaagcttgtgctccgatgcgaaaccagcagtgagtactcttcactgcggtttaaatggttcaaaaatggcaacgagctgaacagaaagaataagcctcagaacatcaagattcaaaaaaaacccggaaaatcagaattgcgcatcaacaaggcaagcctggccgactcgggtgaatatatgtgcaaagtcataagcaagctcggaaacgactccgcctccgccaacatcactattgttgagtctaacgcgacctccacctcaacaacaggaacgagccatctggtgaagtgcgccgagaaagaaaaaactttctgcgtgaacgggggggaatgttttatggttaaggatctgtctaatcccagtcgctatctgtgtaagtgccctaacgaatttacaggggaccgctgtcagaactatgtgatggctagcttctactcgacatccacacctttcctaagcctgccagaa

SEQ ID NO: 177108 - DNA, 1266 bp, Artificial Sequence
  derived and/or modified sequence
atgagatggcgaagggcgccgcgccggtccggaaggcctggtccaagagcacagaggcccggtagcgccgcaagatcgtcaccccctctgcctcttttgccccttcttcttttgctgggaaccgcagctctggcgcctggtgccgcggccggtaacgaagctgcacctgcgggagcatcagtctgttactcgtccccacccagcgtgggatccgtgcaggaactcgcacagagggccgcggtggttatcgaaggaaaggtccatcctcaaagacgccaacaaggagcacttgatagaaaagccgcggcagcagccggggaggctggagcatggggaggagatcgtgaaccgccggcagcaggacctagagcacttggtcctcccgccgaggagcctctcctcgctgcaaacgggaccgtgcctagctggcccaccgctcccgtgccaagcgcaggagaacctggggaagaggcaccctaccttgtgaaagtacaccaggtttgggcggtcaaggctggggggctgaagaaggactccctcctgactgtgcgccttggaacctgggggcacccagcattcccatcgtgtgggaggctcaaggaagattcgcggtacattttcttcatggaacctgatgcaaactccacttcgcgtgcacccgcagcatttagggcatccttccctcctctggaaaccggaagaaacctgaagaaggaggtcagcagagtgctctgtaaaagatgtgcgcttccaccaagacttaaagagatgaagtcccaagaatccgcggccggatccaagctggtcctgagatgtgaaacttcttcagagtactcatcactgcggttcaaatggtttaagaacggcaacgaactgaacagaaaaaacaaaccacaaaacattaagattcagaagaagccaggaaagtccgaacttaggataaacaaggcatcacttgcagatagcggagagtacatgtgcaaggtgatatccaaactgggaaacgactccgcatcggcaaatatcaccatcgtggaaagcaacgcgacttcaacgtccactaccggcacgtcacatctcgtgaagtgcgcagaaaaggaaaagactttttgcgtcaatggtggagagtgttttatggtgaaggacctgtccaacccttctcgctacctgtgcaagtgtcctaacgaattcacgggggaccgatgtcaaaactacgtgatggcaagtttctatagcacttcaacccctttcctctcgttgcccgaa

SEQ ID NO: 177109 - DNA, 1266 bp, Artificial Sequence
  derived and/or modified sequence
atgcgctggcggcgcgcacctcggaggtcgggcagacccggccccagagcacagcggccgggatcggccgcgcgctcttccccgccgctgccgctgcttccgctgctcctgcttttggggaccgccgcgctggcccctggtgccgctgcaggaaacgaagccgcaccggctggcgcgtcagtgtgctactccagcccgccgtcagtcggttcagtacaagaacttgctcaacgggcagccgttgtgatcgaaggcaaggtgcacccgcagagacgtcagcagggagccctggatcggaaggccgcggccgccgcgggtgaggcgggggcctggggaggcgacagagagccaccggcggccgggcctcgcgctttgggtcccccagcagaggaaccgctcctggcggcgaacggaacggtcccgtcttggccaaccgctccggtgccctcggctggggagcctggagaggaagccccctacctggtgaaagtgcaccaagtctgggctgtgaaggctggaggcctcaaaaaggactcactcctgaccgtgaggttgggcacttggggacatccggcgtttccttcctgtggccggctgaaagaggactcaaggtacatattctttatggagccggacgctaacagcacttcgagggccccagccgccttccgtgcatccttcccgccgcttgaaaccggacggaacctgaaaaaggaagtgagtcgggtgctgtgtaagcgctgtgcacttccacctcgcctcaaggagatgaagtcgcaggaaagcgcagctgggagcaaactggtgttgcgatgcgaaacctccagcgaatactcatccctgaggttcaagtggttcaaaaacggaaatgagctcaacagaaaaaacaaacctcagaatatcaagatccaaaagaagccaggaaagtcggagctgcgaattaacaaggcgtcgctggcagactcaggcgagtacatgtgtaaggtgatctccaagctcggaaatgactccgcgtcggcaaatatcaccatcgtggaatcgaatgcaacctccacttcgaccactggcactagccatctggtgaagtgcgcggagaaagaaaagacgttctgcgtgaacggaggagaatgcttcatggttaaagacctttcgaacccgtcgcgctacctctgcaaatgcccaaacgaatttacgggggaccgctgccagaattatgtgatggcgtccttctactccacgtccacccctttcctgtcactgcctgaa

SEQ ID NO: 177110 - DNA, 1266 bp, Artificial Sequence
  derived and/or modified sequence
atgagatggagaagagcaccaagaagatcaggaagaccaggtcctagagcacaaagaccaggaagtgctgctaggtcttcaccaccacttccattacttcctttacttcttttacttggaacagcagcattagcaccaggtgctgctgctggtaacgaagccgcaccagccggagcaagtgtttgttattcatctcctccttctgttggatcagttcaagaattagctcaaagggcagctgttgttatagaaggaaaagttcatccacaaagaagacaacaaggtgctcttgatcgaaaggcagcagcagccgctggagaagcaggtgcttggggaggagatagagaacctccagctgcagggccaagagcattaggaccacctgctgaagagcctttattagcagctaatggaactgttccatcatggccaacagctccagttccttcagctggtgagccaggagaagaagcaccatatcttgtaaaagttcatcaagtttgggccgttaaagcaggaggtcttaaaaaagattctttacttacagtaagattaggaacttggggacacccagcattcccatcatgtggtagactcaaagaagatagtaggtatattttttttatggaacctgatgctaattctacatctagggcaccagctgcatttagagcttcatttccaccattagaaactggaagaaacttaaaaaaagaagtttcaagagtgttatgtaagcgatgtgcacttccaccaagacttaaggaaatgaaaagtcaagaatcagctgctggatcaaaattagtattgagatgtgaaacttcgtctgaatactcctcattaagatttaaatggtttaaaaatggaaatgaattgaacagaaagaacaaaccacaaaacattaaaattcaaaaaaaaccaggaaaaagtgaactaagaattaataaagcttctttagcagattccggagagtatatgtgtaaagtaatttctaaacttggaaatgattcagcatcagctaatattacaattgtagaaagtaatgcaacttctacatctacaacagggacttcacatctagttaaatgtgcagaaaaagaaaaaacattttgtgtaaatggtggagaatgttttatggtaaaagatttatctaatccttcacgttatctttgcaaatgtccaaatgaatttactggagatagatgtcaaaattatgttatggcttcattttattcaactagtacaccatttttatcacttccagaa

SEQ ID NO: 177111 - DNA, 1266 bp, Artificial Sequence
  derived and/or modified sequence
atgcggtggcgccgggccccacggcggtcgggtcgcccgggaccgagagcacagaggccgggctccgccgctcgctcctcgccgcctcttccactccttcctctcctgctgctgctgggcactgcggccctggcacccggcgcggcggccgggaatgaggcggcccctgcgggagcctcagtgtgctactcgtcaccgccatccgtggggagcgtgcaggaactggcccagagagcggccgtggtgattgaggggaaggtgcacccacaacgcagacagcagggagcattggatcgaaaggccgcagccgctgctggagaagccggagcatggggtggagacagagaaccccccgcagctgggccccgggccctcggaccaccggccgaagagccgttgctggccgcgaacggaactgtgccgtcatggccgacggcgcccgtcccgtccgccggagaaccaggtgaagaggccccgtacctcgtcaaagtgcatcaggtgtgggccgtgaaggcgggagggctgaagaaggattcgctcctgaccgttaggttgggcacctggggacatccagctttcccgtcctgcggacggttgaaagaggattcgcggtatatcttttttatggagccggacgctaactcgaccagcagagcccctgccgcgttccgcgctagcttcccacctctggagactggacgcaatcttaagaaggaggtcagccgcgtgctgtgcaagaggtgtgcactgcctccgcggcttaaggagatgaagtctcaagaatcagccgcaggaagcaaactggtcctgagatgcgaaacctcgtccgaatactcgtcgctgcgtttcaaatggttcaaaaacggcaacgagctgaaccgcaagaacaagccgcaaaacattaaaatccaaaagaaacctggaaagagcgagctccgcatcaataaggcctcactggctgacagcggtgaatacatgtgtaaagtgatctccaaactcggcaacgactcggcatccgcaaacatcaccatcgtggagagcaatgcgacttccactagcactaccggcacgtcacacctggttaagtgcgcggaaaaggaaaagaccttctgcgtcaacggaggcgaatgcttcatggtcaaggatctgagtaatccatccaggtacctctgtaagtgcccgaacgaattcaccggcgaccgctgccagaattacgtgatggcttcattctactctacctcgactccgtttctctccctcccagaa

SEQ ID NO: 177112 - DNA, 1266 bp, Artificial Sequence
  derived and/or modified sequence
atgcgctggcgtcgagctccaaggcgatcaggccgaccaggtccaagagcccagcgcccgggatctgcagcccgatctagcccccccctgcctttattaccactcctgctcctgctcgggacagctgctctggctcctggagccgcagctggcaatgaagctgccccagctggcgccagtgtctgttatagctccccaccctccgtcggatctgtgcaggagctggcccagagagccgctgtggttatcgagggtaaggtccatcctcagcgtcggcagcagggcgctctggatagaaaggcagcagctgccgctggagaggcaggcgcttggggcggggatcgcgaaccacctgctgccggccccagagcccttgggccacctgccgaggagccactgctggccgcaaacggcacagtccctagttggcccactgcccctgtcccatccgctggagagccaggcgaggaggccccatacctggtgaaggttcaccaggtatgggcagtgaaggctggaggactaaagaaggatagtctgcttaccgtgcgcctcgggacctggggacaccctgcctttccgtcatgcgggcgtctgaaggaagacagtcgctacatcttcttcatggaaccagatgccaactcaacatccagggccccagctgctttcagggctagttttccaccgctggagactggtcggaaccttaaaaaagaagttagtcgtgtgctgtgtaaaaggtgcgccctgcctccccgactgaaggagatgaaatcccaggagtccgccgccggtagcaagctggtgttacggtgcgagacatcatccgagtattctagtctgcgcttcaagtggttcaagaacggcaacgagctgaatcggaagaataagccacaaaacattaagatacagaagaagccaggcaagtcagaactccgtattaataaagcatccctggccgattctggcgaatacatgtgtaaggtcataagcaagctgggtaatgattcagcttccgcaaacataaccatcgtagagtctaatgcaaccagcacttctacaaccggcacctctcatctggtgaagtgtgcagagaaagaaaaaacattctgtgtgaatggcggcgagtgcttcatggtgaaagatctgagcaatcctagccggtacctgtgtaagtgccccaacgaattcactggcgaccggtgtcagaattatgtgatggccagtttctactctacctcaaccccatttctgagcctgcctgag

SEQ ID NO: 177113 - DNA, 1266 bp, Artificial Sequence
  derived and/or modified sequence
atgagatggcgccgcgctcctagaaggtccgggaggcctggtccacgggcgcagcggccaggtagcgccgcccggtcctcacccccattacccctactgccgttgctgcttctgttgggaacagcagccctggcaccgggcgccgcggcaggaaacgaggcagcccctgccggagcttctgtctgttacagctctcccccttcagtcgggtcagtgcaggaactggcccagcgcgcagctgtcgtaattgaagggaaggttcatccccagcgacgacagcaaggcgctctggatcggaaggccgcagcagctgcgggggaagctggagcctgggggggcgatcgcgagccaccagccgcgggacctcgtgctctcggacctcccgccgaagaaccactgctcgcggccaacggaacagtaccttcctggccaacagcccccgtgccgtcggctggcgagcccggagaggaggccccataccttgttaaggttcaccaagtttgggctgttaaagctggtggcctcaagaaggattccctgctgacagtccgcttagggacttggggacatcctgctttcccttcttgtggccgacttaaagaggactcgcggtatattttctttatggagcctgacgctaactccacaagtcgtgcccctgccgcatttcgggcctcatttcccccgctcgaaacaggaagaaatcttaaaaaagaggtgtctcgcgtcctttgtaagcgctgcgcccttcctccccgtcttaaagagatgaaatctcaggagtctgccgcggggtcgaaactggtgctccgatgtgagacatcttccgagtattcatcactgaggtttaagtggttcaagaacgggaatgagcttaacagaaagaataagccacagaacattaaaatacagaagaagcctggtaaaagcgaattgcggataaacaaagcaagcctcgccgattcaggagagtatatgtgcaaggtgatttccaagctgggaaatgatagtgcttctgcgaatatcaccatcgttgagtccaacgctacctccaccagtacaaccgggacgtcgcatttggttaagtgtgccgagaaagagaagaccttttgtgtcaatggaggggaatgtttcatggttaaggatttaagcaaccccagcaggtacctgtgcaagtgtccgaatgagtttacaggtgatcggtgccagaactacgtgatggcttctttctactcaacgagtacaccttttctgtctctccctgag

SEQ ID NO: 177114 - DNA, 1266 bp, Artificial Sequence
  derived and/or modified sequence
atgcgatggagacgcgcacctcgtagatcagggcgacctggtcctcgggcccagcgtcccggtagcgccgcaagaagctccccaccccttccactcctgcctctgctcctgctcctgggtactgctgcactggcgcccggagcagcggcaggtaacgaggcagcacccgcgggggcctctgtgtgttactcctcacccccctctgtgggatcggtgcaagaacttgcgcagcgcgcggcggtggtgattgaggggaaggtgcatccacaaagaaggcagcagggtgctcttgatagaaaggcggcagccgcggcgggagaggccggtgcatggggcggcgacagggagcctccggcagcgggaccacgcgctctcggccctccagctgaagaacctctcctggcagcaaacggaaccgtgccgtcatggccaactgcacctgtccctagcgcaggcgaaccaggcgaagaggctccttaccttgtgaaagtccaccaggtttgggcagtcaaggcgggaggtcttaagaaagactctcttctgaccgtgcgcctgggaacctggggtcatccagcgtttccgagttgtggacggttgaaggaagattcaaggtacattttctttatggagcctgatgccaactctacctccagggcccctgcagcgttcagagcgtcgtttccacccctggagacgggtcggaatctcaagaaggaagtatcccgtgtactctgtaaacgttgtgcactgccgcctagactgaaagaaatgaagtcccaagagtccgcagccggatcgaaacttgtgctgcggtgtgaaacgtcctcagaatactcatccctgagattcaagtggttcaaaaatggaaatgagttgaaccgtaagaacaagccacaaaacataaagattcaaaagaagcctggcaagtcggaacttagaataaacaaggcctcccttgcggattcgggagaatacatgtgtaaagtcatttccaagctcgggaatgactcggcaagcgcaaacattactatcgtcgaatccaatgcaacgtccacctcgactaccggtacttcacacttggtcaagtgcgccgaaaaggaaaaaactttttgcgtgaatggaggcgaatgctttatggtcaaggatctgtcaaaccctagccgctacctgtgtaaatgtcctaatgagtttaccggtgaccgctgccaaaactatgtgatggcatcattctactcgacgtccaccccctttctctcccttccggaa

SEQ ID NO: 177115 - DNA, 1266 bp, Artificial Sequence
  derived and/or modified sequence
atgcgctggcggcgagctcctaggagaagcggccggccaggacctagggcacaacggcctggaagcgcagcaagatcgtcgccacctctgcctcttctcccactcctgcttctgctcgggactgcagccctggcacctggcgccgcagcaggcaatgaagcagctccagcaggagcatcggtgtgctactcgtcgcccccatcggtggggtccgtgcaggagctggcccaacgggcagcagtcgtgatagaaggcaaggtgcatcctcagagacgacagcagggagcacttgatagaaaggccgccgcagccgcgggtgaagccggggcatggggaggcgatcgtgaaccaccggccgcagggccgagagcactgggaccgcctgcagaggaaccgctcctggcagcgaatggaaccgtgccgtcctggccaaccgcccccgtgccatcagcgggggaaccaggagaagaggccccttacttggtgaaagtccatcaggtgtgggcagtgaaggcaggtggcctcaagaaggactcgctgcttactgtgagactgggtacttggggtcatccagcatttcctagctgcgggagacttaaggaagattccaggtacatctttttcatggaaccagatgcaaactcaactagcagggcccccgcagcatttagggcgtcctttcccccacttgaaaccggacgaaatctgaagaaggaggtgtcgcgtgtgctgtgcaagagatgtgcccttcctccgcgcctgaaggaaatgaaatcacaagaatcggcagctggttccaagttggtcctgcgctgcgagacttcatcggaatactcgtccctgcgtttcaaatggtttaagaacggcaacgaactgaatcggaagaacaaacctcaaaacatcaaaatacagaaaaaacccggcaagtcggagctgcgcatcaacaaggcatcgctggcggattcgggtgagtacatgtgtaaagtcatctcgaagctcggaaatgactcagcatcggcaaacatcaccattgttgaatccaacgcaacttccacctcgaccaccggcactagccacctcgtgaagtgtgcagaaaaggaaaagaccttttgtgtcaatggaggtgaatgttttatggtgaaggatctcagcaatccgtcgagatacctgtgtaaatgtccaaacgaatttactggagatcgttgtcaaaactacgtgatggcgtccttttactctacctcgacgccttttctttcgctgccagaa

SEQ ID NO: 177116 - DNA, 1266 bp, Artificial Sequence
  derived and/or modified sequence
atgaggtggcgcagagcaccacgacgttccggtcgacccggaccacgggcacaacgccccggatcagccgcgagatccagtcctccactgcccctcttgcccctcctccttcttctgggaactgcagcgcttgcacctggtgcagcagcaggaaacgaggcagccccggctggtgcgagcgtctgttactcaagccccccatccgtcggatcagtccaagaactcgcacagagagcggccgtcgtgattgaaggaaaggtccatccacaacgcagacaacaaggagcccttgatagaaaagccgcggccgcagctggagaagcaggcgcttggggaggtgaccgagaacccccggcagcgggacctcgcgcacttggacctcctgctgaggagccactgctggcagcaaacgggaccgtgccatcatggcctactgctcccgtgcctagcgcaggcgaaccaggagaggaggcaccttacttggtgaaagtgcatcaggtctgggctgttaaggcaggtggcctgaaaaaggactcgctgctgactgtgcgcctcggcacttggggtcatcccgcatttccctcatgtgggcgtctcaaggaggattcgaggtacatattctttatggaacctgatgctaactccacctcccgtgcaccggcagcatttagggcatcctttccaccactcgaaactggaagaaacctcaagaaagaggtgtccagggtgctttgcaagcgatgtgctctcccaccacggctgaaggaaatgaaatcgcaagagtcggcagcaggaagcaaactggtgctccgctgtgaaacttcgtcagaatactcctcgctgagattcaagtggtttaagaatggtaacgagctgaataggaaaaacaaacctcagaatatcaagattcagaaaaaaccaggaaagtcagagttgaggatcaacaaggcatcgctcgcagatagcggggagtacatgtgcaaagtcatttccaaacttgggaatgactctgcgtccgcgaacattactattgtggaatcaaatgcaacctccacctcgaccaccggtacctcgcatcttgtgaagtgtgcagaaaaagaaaagacgttttgcgtcaacggaggtgaatgttttatggtcaaagatttgtcgaacccatctcgctatttgtgcaaatgtccaaacgagttcaccggagatcgatgtcagaattacgtgatggcgtccttctactcgacttcgaccccatttctttccctccctgaa

SEQ ID NO: 177117 - DNA, 1266 bp, Artificial Sequence
  derived and/or modified sequence
atgaggtggcgtagagcccctcgacgatctggccgacccggccctagagcgcagcgccctggatccgctgcccggagctcacctccactgccgttgctgcccctcctgctgctacttggcaccgctgccctcgctccaggggccgctgcaggcaacgaggccgcacccgctggggcatctgtgtgctatagctctcctccgagtgttggtagcgtgcaggagttggctcagcgtgccgccgtcgtcatagaagggaaagtgcatccccagcgtcgacagcagggcgcgctagacaggaaagccgcggccgcggcaggggaggccggtgcatggggcggagaccgcgagcctccagcagcaggaccacgggctctcggtcctcctgcagaagaaccgctgctcgcggccaacggaaccgtgccaagttggcccactgcacccgtccccagtgcaggcgagccgggagaagaagctccctatctcgtgaaagtgcaccaggtgtgggctgttaaggcagggggactaaagaaggatagtttgctgactgtccgcctagggacctgggggcacccggcattcccttcgtgcgggagactaaaggaggacagccggtatatttttttcatggagcccgacgctaactctacaagccgcgcccctgcagctttcagggctagcttccctccacttgaaaccgggagaaacctgaaaaaagaggtgtcgagagtgctctgcaagagatgtgcactgccaccccgcctgaaagagatgaagtcccaggagtcagccgccggctccaaactggtccttagatgtgaaaccagctcagaatatagttctctgcggtttaaatggtttaaaaatggcaatgagctgaaccgcaaaaataaacctcagaacattaagatccagaaaaaacccggaaagagtgagctgcgaatcaacaaagcatccctggccgatagtggggagtacatgtgtaaagtgatatctaagctggggaacgatagcgcatctgccaacatcacaatcgttgaatccaacgccacgtccacttccaccaccggcacaagtcacctcgtgaaatgtgcggagaaagaaaaaaccttttgtgtaaatgggggcgagtgctttatggtgaaagacctgtcgaaccctagccggtatttgtgcaagtgccctaacgagtttacaggagatagatgccagaactatgtgatggcctccttttacagcacttcaacgccattcctatcacttcccgag

SEQ ID NO: 177118 - DNA, 1266 bp, Artificial Sequence
  derived and/or modified sequence
atgcgatggcgacgagcgccgcgacgttcgggtcgaccgggtccgcgtgcgcaacgtccgggttcggcggcgcgttcgtcgccgccgttaccgttattaccgttattattattattaggtacggcggcgttagcgccgggtgcggcggcgggtaatgaagcggcgccggcgggtgcgtcggtatgttattcgtcgccgccgtcggttggttcggttcaagaattagcgcaacgtgcggcggtagttatagaaggtaaagtacatccgcaacgacgacaacaaggtgcgttagatcgtaaagcggcggcggcggcgggtgaagcgggtgcgtggggtggtgatcgtgaaccgccggcggcgggtccgcgtgcgttaggtccgccggcggaagaaccgctactagcggcgaatggtacggtaccgtcgtggccgacggcgccggtaccgtcggcgggtgaaccgggtgaagaagcgccgtatctagtaaaagttcatcaagtatgggcggtaaaagcgggtggtttaaaaaaagattcgttattaacggtacgattaggtacgtggggtcatccggcgtttccgtcgtgtggtcgtttaaaagaagattcgcgttatatattttttatggaaccggatgcgaattcgacgtcgcgtgcgccggcggcgtttcgtgcgtcgtttccgccgttagaaacgggtcgaaatctaaaaaaagaagtatcgcgtgtactatgtaaacgttgtgcgttaccgccgcgtttaaaagaaatgaaatcgcaagaatcggcggcgggttcgaaactagttctacgttgtgaaacgtcgtcggaatattcgtcgttacgatttaaatggtttaaaaatggtaatgaactaaatcgaaaaaataaaccgcaaaatataaaaatacaaaaaaaaccgggtaaatcggaattacgaataaataaagcgtcgctagcggattcgggtgaatatatgtgtaaagttatatcgaaactaggtaatgattcggcgtcggcgaatataacgatagtagaatcgaatgcgacgtcgacgtcgacgacgggtacgtcgcatttagtaaaatgtgcggaaaaagaaaaaacgttttgtgtaaatggtggtgaatgttttatggttaaagatttatcgaatccgtcgcgatatctatgtaaatgtccgaatgaatttacgggtgatcgttgtcaaaattatgtaatggcgtcgttttattcgacgtcgacgccgtttttatcgctaccggaa

SEQ ID NO: 177119 - DNA, 1266 bp, Artificial Sequence
  derived and/or modified sequence
atgagatggcgtcgtgcgccaaggcgctcaggacgacctggacctagagcgcaacggcccggctcggccgccagatcaagcccgcctcttcctctgctgcccctgctccttctcctgggcaccgctgccctggcacctggagctgcagcaggcaacgaagcagcccctgcgggtgcaagcgtgtgttactcttccccaccttcggtcggtagcgtgcaggagcttgcacaacgtgcagcagtcgtgattgaaggcaaagtccatccacagcgtagacaacaaggggctcttgaccgcaaagcagcagccgcagctggcgaagcaggggcatggggaggtgaccgagagccgccagcggcaggaccgcgcgcgctcggaccacctgcagaagagcctctgctcgccgcgaatggaactgtgccttcatggcctactgcacccgtccctagcgcgggggaacccggagaagaggcaccctacctggtcaaagttcatcaagtgtgggctgtgaaagcagggggactgaaaaaggattcgttgctgactgtgcgcttgggcacgtggggacacccagcttttcccagctgtggacggctgaaggaagattcgcgctacatattctttatggaacccgatgccaactccacttccagggcaccagcagcttttcgtgcatcgtttccgcccctggagacgggcaggaacctgaagaaagaagtctccagagtcctgtgcaagaggtgtgcactgccgccaaggctgaaggaaatgaagtctcaggaatccgcagctgggtccaaactggtgcttcgatgtgagactagcagcgaatactcgtcacttagattcaaatggttcaaaaatggtaacgagcttaataggaaaaacaaaccccaaaacattaagatccagaagaaaccgggtaagtcggaactccgcataaacaaggcatccttggcagactccggtgaatacatgtgtaaggtcattagcaagctggggaatgattcagcgtccgcaaacatcaccatcgtggagtccaatgcaacctcgacttccactaccggtacgtcgcaccttgtgaagtgcgcagaaaaggaaaaaaccttttgcgtgaacggtggggaatgttttatggtgaaggacctgagcaatccctcccgatacctctgtaagtgccctaatgaattcactggggatcggtgtcaaaactacgtgatggccagcttctactctacgtcgactccctttctctccctccctgag

SEQ ID NO: 177120 - DNA, 1266 bp, Artificial Sequence
  derived and/or modified sequence
atgcgctggcgcagagctcctagaaggtcaggcagaccaggtcctagggcacagcgacccggaagcgcagcccgctcatcacccccgctgccactcctgccccttctgcttctgctgggaacggccgccctcgcccctggtgcagcagccggaaatgaagccgcaccggcaggcgcctccgtgtgctactccagcccaccttcggtcggaagcgtgcaggagttggcgcagcgcgcagcagtcgtgatcgagggtaaggtgcaccctcagagacgccagcaaggcgcactggataggaaagcggcagcagcggcaggagaagccggagcatggggcggagatcgcgaacctccagcagcaggcccaagagcacttggtccccccgcagaagagcctctccttgcagcgaatggcaccgtgccctcgtggcccaccgcacctgtgccttcagcaggcgaacctggagaggaagcaccctacttggtcaaggtccatcaggtctgggcagtgaaggcgggtgggctgaagaaggactccctgcttactgtgcgtttgggtacgtgggggcaccctgcctttccctcatgcgggcgactgaaagaggactcccggtacatcttctttatggagccagacgcaaattcgacctcccgggcaccagccgcattcagagcgtcctttccccctcttgaaactggtagaaaccttaagaaggaggtgtcacgggttctgtgcaagcgctgtgcccttcctcctaggctcaaggaaatgaagagccaagaaagcgcggcaggatcaaagctggtgcttagatgcgaaacgtcgtcggagtacagctcgctcagattcaaatggttcaagaacgggaacgagctcaacaggaagaacaaaccacagaacataaagatacagaagaaacccggtaaatcggaacttagaatcaataaggcatccctggccgattccggtgaatacatgtgtaaagtgatctccaagctgggaaacgattcagcatcagcgaacatcaccatcgtcgagtcaaacgcaacctcgacttccaccaccggtacttcgcatctggtgaagtgtgctgaaaaagaaaagactttctgtgtcaatggaggtgaatgcttcatggtgaaagacctttccaacccatcgagatacctgtgtaaatgtcctaatgaatttaccggcgatcgctgtcagaactacgtcatggcatcattttacagcaccagcaccccgtttctttcgcttcccgag

SEQ ID NO: 177121 - DNA, 1266 bp, Artificial Sequence
  derived and/or modified sequence
atgaggtggagacgagccccgcgtagaagcggacgcccaggaccacgcgctcagcggccgggttcggcggcccggagctctccacccctgccgcttcttccactgctcctcctgcttggaaccgcagccctcgctccgggcgcggcagctggcaacgaagccgcgccggccggagcttcggtgtgctactccagcccaccgtctgtcggatcagtccaggagttggcacaacgcgcagcggtcgtcatcgaagggaaggtgcatccacaacggcggcagcaaggcgccctggaccgtaaagccgctgccgccgccggagaggccggggcgtggggtggagatagagaaccgccggcggcaggacctcgggcactcggaccaccggcagaagaaccactgctcgccgccaacggaaccgttccgtcctggcccactgcccctgtgccgtcagcaggtgaaccgggtgaagaggccccttacttggtgaaagtgcaccaggtgtgggccgtgaaggcaggaggactgaagaaggactcactcctgaccgttcgactggggacctggggtcatccggccttcccaagctgcggaaggctgaaggaggactccagatatatcttcttcatggaaccggatgccaactctacttccagagcgcctgctgctttcagagctagcttcccaccgctggaaactggccggaatctcaagaaggaagtcagcagagtgttgtgcaaaagatgtgccctgccgcctaggctcaaggagatgaaatcacaggagtcagcggcgggcagcaagctggtgctgcggtgtgagacgtcgtccgagtactccagcctgcggttcaaatggtttaagaatggcaacgagctcaatcgtaaaaacaagccgcaaaacattaagatccaaaagaagccagggaagagcgagctgcggattaacaaagcatccctcgcggatagcggagagtacatgtgcaaggtgatctcaaagctgggaaatgactcggcctcggccaacatcaccatcgtggaatccaatgcaacgtcgacctcgaccactggtacttcccacttggtcaagtgcgccgaaaaagagaaaactttctgtgtcaatgggggagaatgcttcatggtcaaggacctgagcaacccgtcgagatacctgtgtaagtgtcctaacgaattcaccggagacaggtgtcaaaactacgtgatggcgtccttttactcaacttcgaccccgtttctgtcgctgccggag

SEQ ID NO: 177122 - DNA, 1266 bp, Artificial Sequence
  derived and/or modified sequence
atgagatggcgaagggccccacggagaagcggcagacccggacctcgtgcccaacgccccggatcagcagccagatcgtcacctcctcttcccctgctcccactgttgctgcttttgggaaccgcagcactggccccaggtgcagcagccggaaacgaggcagcaccggctggagcgagcgtgtgctattcatcgccgccaagcgtaggatctgtccaggagctggcacaacgggcagcggtcgtgatcgaagggaaggttcatcctcagaggcgccaacagggagcattggatcggaaggcagctgccgctgcaggagaggcaggcgcatggggaggagatcgggaacctccagccgccgggcctcgcgcattgggcccgcctgcagaagaaccactgctcgctgcaaatggtacggtgccttcgtggcctaccgcgcctgtgccatccgcaggagagccgggtgaagaggccccctacctcgtgaaggtgcatcaagtgtgggcagtgaaggccggaggactgaaaaaagactcccttttgactgtcaggcttggtacttggggacatcctgcatttccttcgtgcgggcggctgaaggaagattcaagatacatcttctttatggagccagacgcaaattcgacttcgcgggcacctgcagcattccgggcgtcatttccaccacttgaaactgggagaaatctcaaaaaggaggtgtcgcgtgtcctttgcaaacgctgtgcactgccacctcgcctcaaggaaatgaagtcccaagagtcggcagcaggatccaagctcgtcctgagatgcgaaacctcctccgaatactcgtcgctgagatttaagtggtttaagaacggtaacgagctcaacaggaagaacaagccacagaacattaagattcagaagaagccaggaaaaagcgagctgaggattaacaaggcatctctggcagattcaggcgagtacatgtgtaaagtgatttccaaacttggaaatgattcggcgagcgcaaacataaccatcgttgagtcaaatgccacgtccacgtcgactaccggaacctcacatctcgtgaagtgtgcagaaaaagaaaaaactttctgtgtgaatgggggagagtgttttatggtgaaggatctgagcaatccatcccgttacctttgcaagtgtcccaacgaattcaccggtgatcgttgccagaactacgtgatggcgagcttctactccacgagcactccattccttagcctcccagaa

SEQ ID NO: 177123 - DNA, 1266 bp, Artificial Sequence
  derived and/or modified sequence
atgcgctggagacgggccccgaggcgatcgggtcggccgggcccacgcgcccaaagacctggatcggccgcccgatcctcaccacctctgccgctcctgcctttgcttctccttctgggcactgccgcgctcgccccgggagctgcggcgggaaacgaggctgcaccggccggcgcgtcggtgtgctactcatcacctccgtcggtggggtcggtccaagaactggctcagagagccgccgtcgtgatcgagggaaaggtccacccgcagagacgccagcagggtgctctggaccggaaggcagcggcagctgcaggcgaggcgggcgcctggggtggtgatcgcgaaccccctgcagctggacctcgggctctcggaccgccggccgaagaaccacttctggcggctaacggtactgtcccatcgtggccgacggccccggttccttcggcaggagaaccgggtgaagaggccccttacttggtgaaggttcaccaagtgtgggcggtcaaagcaggcggtctgaagaaggatagcctgctcaccgtgcgcctcggtacctggggtcatcccgcctttccaagctgcgggcggctgaaagaggactccagatacatcttcttcatggaaccggatgcgaattccacttcaagggccccggccgcttttagggcctccttcccgccgctggagactggaaggaacctgaagaaggaagtatctcgcgtgctgtgcaagagatgtgcgctccctccccgcctgaaggagatgaagtcgcaagaaagcgctgcgggttcgaagttggtgctgcggtgcgaaacttcgtccgaatacagctcgctgcggttcaagtggtttaagaatgggaacgagttgaatcggaagaataagccgcagaacatcaagatccagaagaagccaggtaagagcgagctcagaatcaataaggcgtcgctggccgactcaggcgagtacatgtgcaaagtgatttccaagctgggaaacgactccgcctcagctaacatcaccatcgtggaatccaatgcgacctcaacctcgaccaccggaaccagtcacctcgtcaaatgtgcagagaaggaaaagactttttgtgtcaacggaggagagtgcttcatggtcaaagacctcagcaacccgtcacgctacctctgtaagtgtccgaatgagtttaccggcgaccggtgccagaattacgtcatggcttccttttacagcacttcgacgccgttcctctctctgccagag

SEQ ID NO: 177124 - DNA, 1266 bp, Artificial Sequence
  derived and/or modified sequence
atgaggtggcggcgcgcgcctcggcgctccgggcgtcccggaccacgcgcgcagcgccccggatctgctgctagaagctccccaccgctgccgcttctccccctcctgctcctgttgggtaccgcggcactggcccccggagcggccgccggcaacgaagccgcccccgcgggagcaagcgtctgttactcgagcccgccctcagtgggttccgtgcaggaactggcgcagagggccgcggtggtcatcgagggaaaggtgcaccctcaaaggcggcagcaaggcgcactggacagaaaagccgctgccgcagcaggggaagcaggagcatggggtggcgaccgcgaacccccagccgccgggccgcgggccctgggccctccagcagaggagccactgttggcggctaacggaaccgtgccaagctggcccactgccccggtgccgtcagccggcgagccgggagaggaagctccctacttggtgaaggtgcatcaagtgtgggcggtgaaagcgggaggactgaagaaggactcgttgctgactgtccggctgggaacctgggggcatccggccttcccgtcatgcgggcgcctgaaagaggattcaaggtacatcttctttatggaaccagacgccaactcgacttcacgggctccggcggcttttcgggcgtcgttcccgcccctcgaaaccggaaggaatcttaagaaagaggtgtcgcgcgtgctctgcaagaggtgcgcgctgcctccacggctcaaggaaatgaagtcacaagaatcggctgccggatcgaagctggtccttcggtgtgaaacttcgtccgagtatagctcgctccgcttcaagtggttcaagaacggaaatgaactgaaccggaagaataagccgcagaatatcaagatccagaagaagcctggaaaatccgaacttcgcatcaacaaggcaagcctcgccgactcgggagaatacatgtgtaaggtgatctccaaactggggaacgattcggcttcagctaacattaccatcgtcgaatccaacgcgacttccacctcgaccactggaactagccacctggtgaagtgtgccgagaaggaaaagaccttctgcgtgaatgggggcgagtgcttcatggtgaaggacctgagcaatcccagcagatacctgtgcaagtgcccgaacgagtttaccggagatagatgccaaaactatgtcatggcctcattctactcaacttcgactccttttctctcattgcctgag

SEQ ID NO: 177125 - DNA, 1266 bp, Artificial Sequence
  derived and/or modified sequence
atgcgctggaggagagcacctcggcggagtggaagacctggcccgagggctcaaaggccagggagcgccgctaggtcttctcctccccttccacttctgccactcctgctgttgctcgggaccgcagcactggcgcctggcgccgctgcaggcaatgaggccgccccagctggggcttctgtgtgttattcttcacccccgtctgttggatcagtacaggaactggcccagcgtgctgccgtggtgattgagggtaaggtgcatccccagcgcaggcagcaaggtgccttggatcgtaaagcagctgctgctgcgggagaggcgggcgcgtggggcggggatagggaacctccggcagccggacccagagctctcggaccgcccgctgaggaacccctgctcgccgccaatggaaccgtgccatcatggccaacagcgcccgtaccatccgcaggcgaaccgggcgaggaagcaccctacttagtgaaagttcaccaagtctgggcagtcaaagctggcgggcttaagaaagatagtttgctcacagtccgcctcggaacgtggggccaccctgcctttccctcctgtgggagactgaaggaagactctcgatatatattcttcatggagcctgatgctaacagcacttctcgggctcctgccgcctttcgcgcaagtttcccaccactcgaaacggggcggaacttgaagaaagaagtctcgcgggtcctttgcaaacgctgtgccctgccacctagactgaaagagatgaaatctcaggaatcagctgcgggatcaaagctggttctgcggtgcgaaacaagtagcgaatatagctctctaaggttcaaatggtttaaaaatggcaacgaactgaaccgtaagaataaaccacagaatatcaagatccagaagaaaccggggaaaagcgagctgaggatcaacaaggcgtccctggccgatagtggcgagtatatgtgcaaggtcatctcgaagttgggaaatgacagcgcctcagcaaacatcacaatagtagagtctaatgcaacatccaccagtacaacaggaacttctcaccttgtgaagtgtgctgagaaagaaaaaacgttttgcgtgaacggaggtgagtgtttcatggtcaaggacctgtcgaatcctagtcgctatctctgcaagtgtccaaatgaatttacaggtgacaggtgccagaactacgtgatggccagcttctattctacatccacaccgtttttgtctctccctgaa

SEQ ID NO: 177126 - DNA, 1266 bp, Artificial Sequence
  derived and/or modified sequence
atgcgctggagaagggcccctcgcaggagcggacgcccgggacctagggcccaacggccgggatcggccgccaggagctccccgccgctcccgctgctgcccttgctgttgctgctcggaaccgcggccctcgctccgggagccgccgctggaaatgaagcggccccagcgggtgcaagcgtctgctacagctcaccaccgtcggtgggcagcgtgcaggagcttgcccagcgggcagctgtggtcattgagggaaaggtccacccacagcggcgccagcaaggggccctggataggaaggccgccgctgccgcaggggaggctggtgcttggggcggagatcgggaaccgccggccgcggggccaagagcgctcggcccgcccgcggaagaaccactgctggccgccaacggcaccgtgccgtcatggccgactgcacctgtgccgtccgctggagagcctggggaggaagcgccgtacctggtgaaggtgcatcaagtgtgggcagtgaaagccgggggactcaagaaagactcgctgctgactgtgcgccttggaacctggggtcatccggcctttccgtcatgcgggcggctgaaggaggactcacgttacatcttcttcatggagccggacgccaattcgacctcacgggcgccagcggcattccgggctagctttccgccactggagacgggccgcaaccttaagaaagaagtgagccgtgtgctctgcaagaggtgcgccctgccaccacgcctgaaggagatgaagtcccaggagtcagccgccggcagcaagctggtgctgaggtgtgaaaccagctccgaatactcgtcgcttcgcttcaagtggttcaagaacggaaacgagctgaatagaaaaaacaagccacagaacatcaaaatccaaaagaagccgggaaaatccgagctgagaatcaacaaggcttccttggctgactctggggagtatatgtgcaaagtgatctctaagctcggaaacgattcagcatcggccaacattacgatcgtcgagtcgaacgcaaccagcacctccactactggcacctcgcacctggtgaagtgcgccgagaaagaaaagaccttctgcgttaatggaggagagtgtttcatggtcaaagacctgagcaacccatcccgctatctgtgcaagtgtcctaacgaattcaccggcgaccggtgccaaaactacgtgatggcttccttctactccacctcaactccattcctgtcactgcctgaa

SEQ ID NO: 177127 - DNA, 1266 bp, Artificial Sequence
  derived and/or modified sequence
atgaggtggcgtagagcaccgcgacgtagcggccggcccggcccccgcgctcagaggcccggcagcgctgccagatcctcacctcccttgccactgcttccattgctgctgctgctaggcactgcagcgttggcccctggggccgctgcaggcaatgaagccgcgcccgccggagcttctgtgtgttatagcagccccccctccgttgggtcagttcaggagttagctcaaagagccgccgtcgttatcgaggggaaggtgcatccccaacgaaggcagcagggggcgctggatcgcaaggcagctgcggctgccggggaagcaggggcctgggggggggaccgcgagcctccagccgctggcccccgggccctgggtccccccgccgaagagccacttcttgccgccaatggaacagtcccttcatggccaacagcccccgtgccatcagctggggagcctggagaagaagccccatacctcgtaaaagttcatcaggtgtgggccgtaaaagcaggtggccttaagaaggattctctgctgaccgtccggctgggcacctgggggcaccctgcgttcccatcttgcggacggctgaaggaggactcgcggtatatattctttatggaaccggacgcgaactccacgtcccgtgctcctgcggcttttagagcttcatttcccccgctcgaaacaggaaggaacttaaagaaagaagtatcaagggtgctgtgtaaacgctgtgccctgcctcctagactcaaggagatgaaatctcaggaaagcgccgccggatctaaattggttctgcgctgcgaaacctcatcagagtactcctccttaaggttcaagtggtttaaaaatgggaacgagctgaacaggaagaacaagcctcagaacatcaaaattcagaagaagcccggcaagtctgagctgcgaatcaacaaagctagtttggcagactccggcgagtacatgtgtaaagtcatctctaagcttgggaatgattctgcctccgctaatataacaatcgttgaatctaacgcgaccagcaccagtacgacaggcacatctcatctggtcaagtgcgccgagaaggaaaaaaccttttgcgtcaacgggggcgaatgttttatggtcaaggacttatccaatccctccaggtacttgtgtaagtgccctaatgagtttaccggggatagatgccagaattacgttatggcttccttttactcaacctctacgccattcctgagcttgcccgag

SEQ ID NO: 177128 - DNA, 1266 bp, Artificial Sequence
  derived and/or modified sequence
atgcgatggcgacgcgctcccaggcggtccgggcgtcccggtcctagagcccagagacccggaagcgccgccaggtctagcccccctcttcctctgctgccgctgttgcttctgttgggcaccgctgcactcgcccctggggcagccgcaggaaatgaagctgctcctgccggcgcctctgtgtgctattctagtccaccatcggtcggttctgttcaggaacttgctcaacgagctgctgtggtgattgaaggcaaagttcatccccagcggcgacaacaaggtgctttggaccggaaagcagctgcagcagcaggcgaggcaggggcctggggcggcgatagggagcctccagcagccggaccaagagcactcggtccgccagcggaagagcccttactagcggcaaacggcaccgtgcccagctggcctaccgcacctgtgccaagcgcaggtgaaccaggagaggaagctccttacttggttaaggtacatcaggtttgggctgttaaagctggtggacttaagaaagactctttattgacagtgaggctgggaacttggggtcaccccgcattcccttcgtgtggtcgactgaaggaggacagcaggtacatcttcttcatggagcctgatgctaactccacctccagggctccagccgctttcagggccagtttcccaccgctggaaaccgggaggaaccttaagaaggaagtgtcacgagtcctttgcaagcggtgcgccctaccacctagactgaaagagatgaaaagtcaggagagcgctgctgggtcaaagctcgtgctgcgttgcgagacatcctctgaatatagttccttgcgattcaagtggtttaagaacgggaacgaactgaatcgaaagaacaagccccagaacattaaaatccaaaagaaacccggaaaatcagaactccgaatcaacaaagcttcactggcagactccggcgagtacatgtgtaaggtaatcagcaagctcgggaatgacagcgcctccgccaacatcactattgttgaaagcaacgccaccagtaccagtactactggcacatcacatctggtgaaatgtgcagagaaggagaagactttctgcgttaacggaggggagtgcttcatggtgaaagacctgtcaaacccaagcagatatctgtgtaaatgtcctaatgagtttacgggagacagatgtcagaactacgtgatggcgtcattctacagcacctccactcctttcctgtctctgccagag

SEQ ID NO: 177129 - DNA, 1266 bp, Artificial Sequence
  derived and/or modified sequence
atgaggtggaggagagctccccggcgttccggccgacccggtcctagggcccagagaccaggttccgcggctaggagctctccgcctctgcccctcctgccattgttgctgctcctgggtacagcagccctcgcccccggcgccgcagcaggtaacgaagccgcccctgccggggcttcagtttgctattcttcaccccccagcgtgggaagcgtccaggagctggcgcagagagccgccgtggtgatagagggcaaagtccacccacaacgccgccagcagggggccctggaccggaaggcagcagcggccgccggggaggctggagcttggggcggggatcgggagccacccgctgcagggccgcgggcattgggaccacccgccgaagagcccttgctagcagcgaatggcactgttccctcttggccaactgcaccagtgccttccgctggcgagccaggcgaagaagcaccctacctagtcaaagtgcaccaggtctgggctgttaaggctggcggattgaagaaggactccttgctaactgtacgcttgggcacatgggggcaccccgcttttccttcatgtgggaggcttaaagaagacagcaggtacattttcttcatggagccagacgcaaacagcacgtcccgcgctcctgcagccttccgcgctagcttcccaccactggaaactggacgaaaccttaagaaagaggtgtcgagggtactttgtaagaggtgtgccctgcccccacgtctgaaagagatgaagagccaggagtccgcggccggttctaagttagttctgcgctgtgagaccagcagcgaatactcatcgctccggtttaaatggttcaaaaatgggaacgaattgaatcggaagaataaacctcagaatatcaaaattcaaaaaaaacctggaaagtcagagctgcgaatcaacaaggcctcgttagccgattccggcgaatatatgtgtaaggtaatcagcaagctgggcaacgactccgcctccgcaaatatcaccatagtagaaagcaatgcaacatcgacatccaccacgggcacaagccacctagtaaaatgcgccgagaaagagaaaaccttttgtgtaaatggcggcgaatgcttcatggttaaagatctcagcaatccctcgcgttatctgtgtaaatgtcccaatgaatttacgggcgataggtgccagaactacgttatggcatccttctactccacgtcgaccccgtttctaagcctccctgaa

SEQ ID NO: 177130 - DNA, 1266 bp, Artificial Sequence
  derived and/or modified sequence
atgagatggcgccgagcccctagacggtctggaagacctggaccgagagcccagcgccctggctcagccgctcgttcaagcccacctctacctctgctccctttgttacttttacttggaacagccgcactggcccctggagctgcagcgggcaacgaagccgccccagctggcgcctctgtgtgttatagttcgcccccgtccgtcggctccgtccaggagctagctcagcgggccgccgtcgtcattgaagggaaggtgcatccccaacgaagacagcagggtgctttagacaggaaagcggccgctgcagctggcgaagccggtgcgtggggcggagatagggagccacccgctgcaggccccagagccctcggtcccccagcagaggagcctctccttgccgccaatgggaccgtgcctagttggcctaccgccccagtcccttccgcaggagaacctggggaagaggccccctatctggttaaggtccaccaagtgtgggctgttaaagctggcgggttgaaaaaagactccttgctaactgtccgactaggaacgtggggacaccccgcctttcctagctgtggcagactcaaagaggattctcgttatattttcttcatggagcccgatgccaactccacgtccagggcacccgccgcatttcgagcgagctttccaccactcgagacaggtaggaacttgaagaaggaggtaagccgcgtcctatgcaagaggtgtgccttgccaccacgactgaaagagatgaaatctcaggaatctgcagccgggtccaaactcgtgttacggtgtgagacgagctccgagtattcgtcccttaggtttaaatggtttaagaacggtaatgagcttaacaggaagaacaagccgcaaaatattaaaatccagaaaaagcccggcaaaagcgaactgcgaatcaataaggcctcgcttgcagacagcggggagtacatgtgtaaagtgatctctaagctgggcaacgactccgccagcgccaacatcactatagttgagtctaacgcaacatccacgtcaacaacaggtacttcccacctagtcaagtgtgcagaaaaagaaaagaccttttgcgtcaacgggggggagtgttttatggtgaaggacctcagcaatcccagcagatatctgtgcaagtgccccaacgagtttaccggggatcgatgtcaaaattacgtgatggcctccttctacagcaccagcacccccttcctgagcttacccgag

SEQ ID NO: 177131 - DNA, 1266 bp, Artificial Sequence
  derived and/or modified sequence
atgcggtggagacgggcgcctcgccgctccgggcggccagggccacgcgcgcagcggccaggatccgcagcccgctcgagcccgccgctcccgctgctcccactgctcttgctgttgggaactgcggccctggccccgggggcggcggcaggcaatgaagccgccccggctggagcttccgtgtgttactcatccccgccatccgtcggaagcgtgcaggaactggcccagcgggccgccgtggtgatcgagggcaaagtccaccctcagcgacgccaacagggagcccttgatcgcaaagctgccgccgcagctggagaggctggagcgtggggaggggaccgggaaccgccggccgcgggaccgagagcgctcggccccccggccgaagagcctctgctggcggcaaatggtaccgtgccatcgtggccgactgcgcctgtcccaagtgctggagagccgggtgaggaggccccatacctcgtgaaagtgcaccaggtgtgggcagtgaaggccggaggattgaagaaggactcgctgttgactgtgcggctgggcacctggggccatccggcgtttccaagctgcggtagactcaaggaggactccagatacatcttctttatggaaccggatgcgaattcaacttcaagagccccggccgccttccgggcgtcgttccctcctctggaaactgggcggaatctgaaaaaggaagtatcccgcgtgctctgtaagcgttgcgccctgccgccgcgcctgaaggaaatgaagtcacaggaatctgccgcgggatcgaaactggtgcttcgctgcgagacttcttccgagtactcgtcccttcgcttcaagtggttcaaaaatggcaacgagcttaacagaaagaataagccacagaatatcaagatccagaaaaagcctggcaagtcagagctcagaatcaacaaagcctcactggccgattcaggcgagtacatgtgcaaggttatcagcaagctggggaacgacagcgcttcagctaatatcaccatcgtggagtctaacgcaacttcgactagcaccaccggaacctcacacctggtcaagtgcgctgagaaagaaaaaactttctgcgtgaacggaggagaatgctttatggtgaaggatctttcaaacccttcgaggtacttgtgcaagtgtccaaatgagtttactggcgatagatgtcaaaactacgtgatggcctcgttctactccacttcgactccgtttctgtcactgcctgaa

SEQ ID NO: 177132 - DNA, 1266 bp, Artificial Sequence
  derived and/or modified sequence
atgcggtggcgcagggcccccagaagaagcggccggcctggcccaagggctcagagacccggcagcgccgcccggtcttcacctcctctgccccttctgccactgctcctgctgctgggcacagccgcgctggctcctggggccgctgctgggaatgaggccgctcctgctggtgcatcagtttgctactcatctcccccgagcgtaggctccgttcaggagcttgcgcagagagccgcggtggtgatcgaaggtaaggtccaccctcaaaggcgccagcagggggctttggacagaaaagccgctgcggcagccggtgaggccggtgcttggggaggggacagagaaccccctgctgccggacctagggctctgggccctccagcagaggagccactgctggcagctaatggtaccgtgccttcttggcctaccgctcctgtgccctctgccggtgagcccggtgaagaggccccctatctggtgaaggttcatcaggtttgggctgttaaggcaggcggattgaagaaggatagtctgctgacagttaggctcggaacttggggacaccccgcatttccatcttgcgggcgccttaaggaagatagccgctatatctttttcatggaaccggatgcaaacagtacatcacgcgcccctgctgcctttcgcgcgagttttcccccactggaaacaggcaggaatttgaagaaagaagtttctcgggtactgtgcaaacgatgtgcccttcccccgaggctgaaggaaatgaagtcacaggagtccgcggcagggtccaaacttgtacttaggtgtgagacatctagtgagtatagcagcttgcgctttaaatggtttaagaatgggaatgagttgaaccggaagaataaaccacagaatattaagattcagaagaagcccggtaagagcgaactgcggataaacaaagcctctctcgctgacagcggtgagtatatgtgcaaggtgatctccaaactggggaacgactccgcttccgctaacattactatagtggagtctaacgcaacctccacttctactaccggaactagccacctcgtcaagtgcgccgagaaagagaagacgttttgcgtgaacggcggggagtgcttcatggtgaaagatctgagcaacccttcaagatacctgtgtaagtgccccaacgaattcaccggcgacagatgccagaattacgttatggcctctttctacagcacctccacacccttcttgtcccttccagag

SEQ ID NO: 177133 - DNA, 1266 bp, Artificial Sequence
  derived and/or modified sequence
atgcgctggcggagggcgcctcggcgatctggtcgcccgggtccacgggctcagcgacctggaagtgccgccaggagctcccctccactgccgctgcttcccttgctgcttcttctgggaaccgcagccctggctcctggcgcagcggcaggtaacgaggccgcaccggcaggcgcttctgtttgctactcttctcctccttcagttgggagcgttcaggaacttgctcaaagggcggcagtcgtaatcgaaggtaaggtgcaccctcagaggcgacaacaaggggctctggataggaaggctgcggctgcggcgggcgaggctggggcttggggcggggaccgcgaacctcccgcggctggtccccgagccttgggacccccggcggaggaaccacttctcgccgccaacgggaccgtcccctcttggcctacagccccagtcccgtctgccggagagcccggggaggaagctccatatttggtgaaagtgcatcaggtctgggctgttaaagccgggggcctcaagaaagacagtctgcttacagtacgactcgggacctgggggcatcccgcatttccttcctgtggtagacttaaggaggacagtcggtatatcttcttcatggagccggacgccaactccacctcaagagcgccggccgccttccgggcgagtttccctcccctcgaaacaggacggaacctgaagaaggaagtcagcagggtgctctgtaaacgctgcgctttgcctcccaggctgaaagagatgaagtctcaggagtctgctgctgggtccaagttggtgttgcggtgtgagacaagctctgagtactcatccctgaggttcaagtggtttaaaaacggtaacgagctgaataggaagaataagcctcagaatattaagatccagaagaaaccagggaagtctgagctgcgaatcaataaggcttccctggcagattccggcgaatatatgtgtaaggttatctctaaacttggaaacgattctgccagtgctaatattaccatcgtcgagtccaacgcgacatctacgtctacaactggaacaagtcacctggtcaaatgtgccgagaaggaaaagactttctgtgttaatggcggcgaatgctttatggtcaaagacctgagtaatccttcacgctacctctgtaagtgccctaacgagtttaccggagatcgatgtcagaattacgtaatggcgagcttttacagcacgtctacacctttcttgtccctccccgaa

SEQ ID NO: 177134 - DNA, 1266 bp, Artificial Sequence
  derived and/or modified sequence
atgaggtggcggcgggcaccgcggcgatccggacgcccgggaccacgcgctcaaagaccgggctcggctgcccgatcatccccgccgctcccgctgctgccgctcttgttgctgctgggaaccgccgccctggccccgggagctgcagctgggaacgaggcagcgcccgcgggagctagcgtgtgctattcgagcccgccgagcgtcggatccgtgcaggaactcgcacagcgcgctgccgtcgtgatcgagggcaaagtgcacccccaaaggagacagcagggagcactcgatcgcaaggctgcggcggcagccggggaagccggtgcctggggaggcgatcgggaaccaccggctgcggggccgcgcgccctcggcccgcctgcggaggagccgttgttggccgccaatggtactgtgccatcatggcctaccgctccggtgccctcggcaggggagccgggagaagaggctccctacctggtcaaggttcatcaggtgtgggctgtgaaggctggcggcctcaaaaaggactcgctgctgactgtgaggctgggaacctggggacacccggccttcccgtcgtgcggacggctgaaggaggactcccggtatatcttcttcatggagcctgacgcgaacagcacgtccagggctccagctgcatttagggcctcattcccgccactggagactgggaggaacctgaagaaggaggtgtcgcgcgtgctctgcaagagatgcgcactgccaccgcgcctgaaggaaatgaagtcccaagaatcagcagctggatccaagctggttctgcgctgcgaaacttcatccgaatactcctcgctcagattcaagtggtttaagaacgggaatgaactgaatagaaaaaacaagcctcagaatatcaagatccaaaagaagccaggaaaatcagagctgagaatcaataaagcaagccttgctgactcaggagaatacatgtgcaaggtgatctcaaaactgggaaatgactcagcgtccgccaatatcaccatcgtcgaatcaaacgcaacttccacttcgaccaccggaacctcccatctggtgaagtgtgctgaaaaggagaaaactttctgtgtcaacggaggggagtgcttcatggtcaaggacctgtcgaacccatcacggtacttgtgcaagtgcccaaacgaattcaccggcgaccgctgccaaaactacgtgatggcctcattctacagcacgtcaaccccgtttctgagccttcctgag

SEQ ID NO: 177135 - DNA, 1266 bp, Artificial Sequence
  derived and/or modified sequence
atgaggtggcgcagggcacctcgcagatctggtcgccccggtccgagggctcagcgccccggaagtgccgctaggtcttcaccacccctgcccctcctccccctgttgttgctcctcggtacggcagcattggcaccaggcgcagctgcaggcaacgaggccgctcccgccggagcgtcagtctgttattcatctccacctagcgtgggatccgtccaagaactggctcagagggctgctgttgttatagagggcaaagtccatccccagaggaggcagcaaggcgctttggacaggaaagctgctgccgctgctggcgaggccggcgcatggggcggcgacagagagcctccggctgcgggcccgagagccttgggacctccagctgaagaacctctgctggccgccaatggaactgtcccatcttggcctactgccccggttcctagcgcaggtgaaccgggcgaagaggctccatacttggtcaaggtgcaccaagtctgggccgttaaggctggtggactgaagaaagattcactcctgaccgtgaggctcggcacttggggacaccctgcattcccaagctgtggcagactgaaggaagattccaggtacatcttttttatggaaccagacgccaatagtacgagtagagctccggccgccttccgcgcgagttttcctccacttgagactggtaggaatctcaagaaagaggtgagtagggtcctctgtaagaggtgcgccctgccccctaggctgaaggagatgaaatcacaagagtcagccgccggtagcaagctggttctgcgctgtgaaaccagttcagagtactcctctcttaggttcaagtggttcaagaacggcaatgaactgaatagaaagaacaagccccagaatatcaagatccaaaagaagcccggaaagtccgagttgaggataaataaggctagcctggctgattccggtgagtatatgtgcaaggtcatttctaaactcggcaacgacagtgctagtgctaacatcactatcgttgaaagtaatgccacttccaccagtaccaccggaaccagccatctggtcaagtgcgccgagaaggagaagactttttgcgtgaacggtggcgagtgcttcatggttaaagatttgtctaacccgtccaggtacctttgcaagtgtcctaacgaattcactggagaccgctgtcaaaactacgttatggcttccttttactctactagcaccccatttctctcattgcctgaa

SEQ ID NO: 177136 - DNA, 1266 bp, Artificial Sequence
  derived and/or modified sequence
atgcggtggcggcgggccccgcggcggtcaggacgtcccggcccacgggctcagaggcctggatctgcggccagatcatccccgccgctgcctctgcttccgctcctgctgctgctcggcaccgccgccctcgccccgggcgccgcggcgggcaatgaagccgcgccagcaggcgcaagcgtgtgctactcgtccccaccgtccgtcggctcggtgcaggaactggcccaacgcgctgcggtggtgattgagggaaaagtgcacccacagcggaggcagcagggagcgctcgacaggaaggctgccgccgccgccggagaggctggggcatggggaggcgatagggaaccaccggccgcgggaccgagggccctgggaccgccggccgaggagcctctcctggctgctaacgggactgtgccgtcctggccaaccgcgccagtgccgtcggcaggagagcctggagaagaagccccctacctggtgaaagtccaccaggtctgggcagtgaaggccggcggtctgaagaaggattcgctgcttacggtgcgcctgggcacctggggtcacccagcgtttccttcgtgcggacgcctgaaagaggattcgcggtacattttctttatggagcccgacgcaaacagcacttcacgcgctcctgccgcatttcgcgcctctttcccacccctcgaaaccggacgcaatctcaagaaagaagtgtcgagagtcttgtgtaagagatgcgcactcccgccgagactgaaagaaatgaaatcgcaagaatctgcggctggctcaaagctggtcctccgctgcgagacgagctcggaatactcgagccttagattcaagtggttcaagaacggaaacgagcttaaccgcaagaacaaaccgcagaatatcaagatccagaagaagccgggaaagtccgaactccgcatcaacaaggctagcctcgctgattcaggagagtatatgtgtaaggtgatcagcaagctcggaaatgactcagcgtcggcgaatatcaccatcgtggaatccaatgcgacttccacgtcgactactggcacctcccacctggtgaagtgtgccgaaaaagaaaaaactttttgcgtgaacggcggggaatgtttcatggtgaaagatcttagcaacccctctcgttatctgtgcaagtgcccgaacgagttcactggagatcgctgtcagaactacgtgatggcgagcttctactcgacctccactccgttcctgtcgctgcctgag

SEQ ID NO: 177137 - DNA, 1266 bp, Artificial Sequence
  derived and/or modified sequence
atgagatggagacgcgcaccgcgccggtccggccgcccgggtccaagggcccaacggcccggatcggcggcacggagctcgccgccgcttccgctgctgccactgctgctgcttctgggaactgccgccctggcccctggagctgctgcggggaacgaagccgcgcccgcgggggctagcgtctgctacagctccccaccctcagtcggatcggtgcaggagctggcccagcgggctgcagtggtgatcgagggtaaagtgcatccacaaagacgccaacagggggccctggatcgcaaagctgccgcggctgcgggagaagcgggcgcgtggggtggagatcgggagccaccggccgccggacctcgcgcgctgggacctccggccgaggaaccgctgctcgccgctaatggaacggtgccgtcctggccaacggcgcctgtgccgtcggcgggagagcccggagaggaagccccgtacctcgtgaaggtgcaccaggtgtgggccgttaaggcgggaggcctcaaaaaagattccctcctgactgtgcgcttgggcacttggggccatccggcgttccctagctgtggcagactgaaggaggactcgcgctacatcttctttatggaacctgatgcaaacagcacctcccgcgcaccagcggctttccgggcgagctttccgccactcgaaactggacgcaacctcaaaaaggaggtatcccgagtgctgtgcaaacgctgcgctctgccgcctagactcaaggaaatgaagtcgcaagaatcagctgcgggatccaagctggtgctcagatgtgaaaccagctcagaatacagctccctgcgattcaaatggttcaaaaacggaaacgaattgaatagaaagaacaagccgcagaacatcaagatccaaaagaaaccgggcaagagcgaactgcgcatcaataaagcatcgctggcagactccggagagtacatgtgcaaggtgattagtaagctgggaaacgactccgcttcagcgaacatcaccatcgtggaatcgaatgcgacctcaacctccactaccggaacttcgcatctggtcaagtgtgccgagaaggaaaaaactttctgcgtgaacggaggagaatgcttcatggtgaaggacttgtcgaatccgagccggtacctgtgcaagtgcccgaacgaatttactggagacagatgccaaaactacgtcatggcatcattctactcgacgagcactccttttctgagcctccccgag

SEQ ID NO: 177138 - DNA, 1266 bp, Artificial Sequence
  derived and/or modified sequence
atgcggtggcgccgtgcaccacggagatctgggagaccaggacccagagctcagcggcccgggtcggctgctcgaagttctcctcctttgccactactgccgcttctgctacttcttggaacagcggctcttgcccctggagctgccgcggggaacgaagctgcacctgccggagcatcggtctgttattcatcccctccatcggtggggtctgtgcaggaactcgcccagagagcagctgttgtcatagaaggaaaagttcacccccagaggcggcagcagggagccttggatcgaaaagcagccgcagcggcaggagaagcaggagcgtggggaggagaccgcgaaccccctgccgctggaccccgagcactagggccacccgctgaggaaccattgctggctgccaatgggacagtaccctcttggcccactgcacccgttccctctgctggagaacctggggaagaagctccatatctcgtgaaagtacatcaggtgtgggctgttaaagccgggggactaaaaaaagactcgttgctcacagtgaggctcggaacatggggacatccagcgttcccctcttgtggacgcttaaaagaggactcacgctacatcttcttcatggaacccgatgcaaattcaacttcacgggctcccgccgcctttagagctagttttcctccactcgaaactgggcggaaccttaaaaaagaagtatcaagggtgctgtgcaaacggtgcgcactgcctccaagattgaaggagatgaaatcccaggaatccgccgcagggtctaaattagtgcttcggtgtgaaacttcttcagaatattcatctttacgcttcaaatggttcaaaaatggaaacgaactgaacaggaaaaacaaacctcagaacatcaagatccagaagaagccaggaaaatctgagctcagaataaataaagcatctctcgctgatagtggggaatatatgtgcaaagtcattagtaaacttggaaatgatagtgcttctgctaatatcacaattgtcgagtcgaatgcaacatcaacttcaacaacaggaacaagtcatctggtaaaatgcgcagaaaaagaaaaaacattctgtgtgaacgggggggagtgctttatggtaaaagatctgtcaaacccctcaaggtatctctgcaaatgcccaaatgagtttactggagatcgctgtcaaaactatgttatggcttcgttttactctacatcgacaccttttctgtctctcccagag

SEQ ID NO: 177139 - DNA, 1266 bp, Artificial Sequence
  derived and/or modified sequence
atgaggtggcggagggcaccaagaaggtccggccggccaggacctcgtgcccagcgacctggaagcgctgctagaagctcccctcctctgcccctgctccccctgcttcttttattgggaactgctgcactggctcccggagccgctgctgggaacgaggcagcgcccgcaggcgcttcggtttgttatagcagtcctccctctgtgggtagcgttcaggagctggctcaaagggccgcagtcgttatcgagggaaaagtccacccccagagaagacagcaaggggcgttagataggaaggctgcagcagctgctggggaagctggagcatggggaggggatcgcgagccacccgccgccggccctcgcgcacttgggcctccagctgaagaaccgcttttggccgccaacggcacggtgccctcatggcctaccgccccagtgccgtcagcaggagaacctggcgaggaagccccctacctcgttaaggttcaccaagtctgggctgtcaaagctggcgggctcaagaaggactccctcctgacagtgcgtcttggcacatggggacatccagccttcccctcttgtggccgcctcaaggaagattccaggtatatcttcttcatggagcctgatgcaaattctaccagccgcgcacctgctgcctttcgggcttcctttcccccgcttgaaacaggtaggaatctgaagaaagaggtgtcacgcgtgctctgcaaaagatgtgcactgcccccgcgactaaaggaaatgaagtctcaagaatccgcagcaggatctaagcttgtgctgaggtgcgaaacatcgtctgagtattcttctcttaggtttaagtggttcaaaaacgggaatgaattgaacaggaaaaacaagccacagaacatcaagatccaaaaaaaacctggaaagagcgagctgaggattaacaaggcttctcttgccgattctggcgagtacatgtgcaaagtcatttccaaactgggcaacgacagtgcttcagctaacattactatcgtcgagagtaacgcaaccagcacgtctactaccggcacaagtcacctcgttaagtgtgccgaaaaggagaagaccttctgtgtcaacggcggggagtgttttatggtcaaagatctctcgaacccaagcagatacctgtgtaagtgcccaaacgagtttacaggcgaccgctgccagaactacgtgatggcaagcttttactcaaccagtactcctttcttgagcctgcccgaa

SEQ ID NO: 177140 - DNA, 1266 bp, Artificial Sequence
  derived and/or modified sequence
atgcggtggcggcgtgctcctagaagatcagggagacccggtcctcgtgctcaacgcccgggatccgcagctcgttcgagtcccccactgccattactgccgcttcttttactgcttgggacagccgcgcttgctccgggagcggcagcaggtaatgaggctgcccctgccggagccagtgtgtgttactccagtccgccttctgtaggctctgtgcaagaactcgcacagcgagccgcggttgtgattgagggaaaagttcacccacagcggagacagcagggagcacttgacagaaaagctgctgccgcagctggagaagctggcgcttggggaggagatcgcgaaccaccagcagccggacctcgagcgttgggcccgccagctgaggaaccacttttagctgctaacggcactgtgccaagttggccaacggccccagttccatccgctggtgagccgggggaggaggcaccttatctcgtcaaggttcatcaagtttgggcagtgaaagcaggaggactaaaaaaggactcactattgacagtgcgcttaggtacgtggggccacccagcatttccgtcatgtggtcgacttaaagaagattcccgatatattttctttatggagccagacgcaaactccacttcccgagcaccggcggcgtttagggcgtcgtttccacctttagaaaccgggagaaatcttaagaaagaagttagccgggttctttgtaagcgatgtgcgttaccaccgagattgaaagaaatgaaatcgcaagagtcggctgcaggatccaaactggtattgcgttgcgagacttcatctgagtactcatcacttcgttttaaatggtttaaaaatggaaacgagcttaaccgaaaaaacaaaccacagaatattaaaatacagaagaaaccggggaaatcagagttgaggatcaacaaggcatctcttgcggattccggagagtacatgtgcaaggttatatcaaaattgggaaatgactctgcctcagctaacattactattgtggagagtaatgctacaagtacatcaaccacaggaacatcccacctcgtaaaatgcgcggaaaaggaaaaaaccttctgtgtcaacggaggtgaatgtttcatggtgaaagatttgtctaacccaagccgttatttgtgtaaatgtcccaatgagttcacaggagaccgttgccaaaattatgtgatggcttctttctattcaacttcaacaccattcttgtcattgccagag

SEQ ID NO: 177141 - DNA, 1266 bp, Artificial Sequence
  derived and/or modified sequence
atgagatggagacgtgcccccagacgctccggtaggccaggacctcgcgctcagcgacccggcagtgccgccaggagttctcctcccctccccttactcccccttttgttgttgcttggtacagctgccctggctcccggcgccgcagctggaaacgaagctgcgcccgctggggcgtctgtgtgttacagctccccacctagcgtgggcagtgtacaagaactggcacagagagctgcagtggtcatcgaaggcaaagtgcaccctcaaaggaggcaacaaggagccctggacaggaaggcagccgcggccgctggcgaagcaggcgcttggggaggagatcgggaacctcccgctgccgggccgagggctttgggacccccagcggaggaacctctcctcgctgctaacggaactgttccaagctggccaacagcccccgtgccatcggctggcgagccaggggaggaggcaccgtacctggtgaaagtgcatcaggtttgggcggtaaaagccggggggctgaaaaaagatagtctcctcaccgtgagactggggacttgggggcaccccgcttttccctcatgtggaagactaaaggaggatagccgttatatcttctttatggagcccgatgcaaattccacctccagagccccagcagcctttagggcttcgttccctcctctcgaaaccggccgcaacctaaaaaaggaagtgtccagggtcctttgtaagagatgcgctctgccccccaggttgaaagaaatgaaaagccaggagagtgccgcagggtctaaactcgtcctcaggtgcgagaccagctcggagtatagcagtctgagattcaaatggtttaaaaatggaaacgaacttaaccgaaaaaataagcctcagaacataaaaatccaaaaaaagccaggcaaatcggagctccggatcaacaaggcatctctggctgactcaggagagtacatgtgtaaagtgataagcaagctcgggaacgattctgcatcagcaaatatcaccatcgtagaatctaacgctactagtactagcaccacagggacctcacatttggtgaaatgtgcagaaaaggagaagaccttctgtgtcaacggaggggagtgcttcatggttaaagatctttctaatccaagtagatacctctgtaaatgccctaatgaattcacaggcgatcgatgccagaactacgtgatggccagtttttactccacttccacaccatttctgagcctgcctgaa

SEQ ID NO: 177142 - DNA, 1266 bp, Artificial Sequence
  derived and/or modified sequence
atgagatggcgaagagcaccaagacggtcaggacggcccggtccccgggctcaacggccaggatctgcagcaaggtcgagccctccattgccacttctgccattgttgctcctcctgggcaccgcagcacttgcaccaggagccgcagcagggaatgaagcggcacccgcaggcgcaagcgtgtgctactcgtcacctccttcagtgggatccgtgcaggagcttgcacagcgagcggccgtggtgattgaaggaaaagtacacccgcaacgtaggcagcagggtgccctggaccgcaaggcagccgccgccgcaggcgaggcgggtgcctggggtggagatcgagaaccacctgcagcaggaccaagagcgctggggcctcccgctgaagagccactgcttgccgcaaacggaactgtgcctagctggccgaccgcgccggttcctagcgcaggcgagcctggggaagaggcaccttaccttgtcaaagtgcaccaggtttgggctgtcaaggcgggcggactgaaaaaagattcactgcttaccgtcaggctgggcacttggggtcatcctgccttcccatcgtgtggcaggcttaaggaggactctcggtacattttctttatggaacctgacgcgaactcaacctccagggccccggccgcgttcagagcatcctttcctcctttggaaaccggccgtaatctgaagaaggaggtgtcccgagtgttgtgcaaacgctgcgcattgccgccaagactgaaggaaatgaagtcgcaagaatcagccgcaggatcgaaacttgtcctccgttgtgaaacttcgagcgaatattcctcacttcgcttcaaatggtttaagaatggaaacgaactcaatagaaagaacaagcctcaaaacatcaagattcaaaagaaaccgggtaaaagcgagctccgcatcaacaaagcatcgcttgccgatagcggtgaatacatgtgcaaagtgatttcaaagctgggaaacgattctgcgtccgctaatatcactatagtggagtcgaacgcaacgtccacgagtaccactggtactagccatcttgtgaagtgtgcggaaaaggaaaagactttttgcgtgaatggtggggaatgttttatggtcaaggatctctccaaccctagtcgttacctttgtaagtgtccgaacgagttcactggagatcgttgtcaaaactacgtgatggccagcttttacagcacctccaccccgtttctgtctctccccgaa

SEQ ID NO: 177143 - DNA, 1266 bp, Artificial Sequence
  derived and/or modified sequence
atgcgatggcgaagggccccaagacgaagcggccgacccggcccgcgcgcccagaggcccgggtctgctgctcgatcttcccccccccttccactgctcccccttttattgttgttgggcactgccgctctggcccctggggcggcggcgggcaacgaagccgcccccgccggcgcctccgtgtgctatagcagccctccaagcgtggggagcgttcaggagctcgctcaacgtgctgccgtggtcatcgaaggaaaagtccacccccagcgccgccaacagggcgccctggaccggaaagccgccgctgccgcgggcgaagccggggcttggggaggagatcgcgaaccccctgcagcaggtcccagggccctcgggccccccgctgaagaaccacttctggcagctaatggaacagttccatcttggcctactgcgccggtgccatccgctggggaacccggcgaagaagccccgtacttggtgaaggttcaccaggtttgggccgtgaaagctggcgggcttaaaaaggattcattgttgactgtcaggcttgggacctgggggcatcccgctttcccttcctgtgggcgtctcaaagaagactctagatatatctttttcatggagccagatgcgaattccacctctcgagcccctgccgcctttcgggcctcattcccaccgctcgagaccggccgaaacctgaagaaagaggtaagtcgagtcctgtgtaaaaggtgtgcccttcctccccgccttaaggagatgaaatcacaggagtccgctgctggatccaagttagtcctgaggtgcgagacatcaagcgagtattccagcctgcgctttaaatggtttaagaatgggaacgaactaaatagaaagaacaagccccagaacatcaagattcagaagaaacctggaaaatccgagctgcgaatcaacaaagcttctctggccgactctggagagtatatgtgtaaagttatttcaaagcttggtaacgactccgccagcgccaacattaccatcgtggaatcaaacgccacttcgaccagcaccaccggcacttctcatttggtgaagtgtgcagaaaaagagaaaacattctgcgtgaacggtggtgaatgtttcatggtgaaggacttgagtaacccatcccggtatctgtgcaagtgccccaacgagttcactggcgatcgctgccagaattatgtgatggcttctttttactctacttccacccctttcctgagtcttccagag

SEQ ID NO: 177144 - DNA, 1266 bp, Artificial Sequence
  derived and/or modified sequence
atgaggtggcgacgggcgcctcgtcgctctggccgacccggtccaagagctcagcgccctggaagcgcagcacgcagttcgcctcccctacctctgctccctcttctgctgcttctcggcacagcggcactggcgccaggggccgcagcgggaaatgaagccgccccagcaggtgcatccgtgtgttactctagccccccatccgtggggagtgtgcaggaactcgcacagagggcagccgtggtaatcgaaggcaaagtccaccctcaacgcaggcaacagggagcactggacaggaaagccgccgcagctgccggagaggcgggcgcatggggcggagatagggaaccccctgcagccggacctagggctctcggacctcctgccgaagagcccctcctagccgccaacggaacggtcccctcatggcccaccgcgccagttccctctgccggggagcccggtgaggaggctccctacctggtgaaggtccatcaggtatgggcggttaaggctggaggtctgaagaaagacagtctgctaaccgtaagactcggcacatggggtcatcccgctttccctagctgtggacgcctgaaagaagattctaggtacatttttttcatggaaccagacgccaactcaacttccagggccccagcagccttcagagcttcctttcccccactggagacaggacggaatcttaagaaagaggtgagccgggttctgtgcaaacgatgcgcgctgcccccacgcctcaaggagatgaagtcacaggaaagcgcagcaggatctaagctcgttcttcgctgcgaaacgagctccgagtactcttctcttagatttaaatggtttaagaacgggaatgagttaaataggaagaacaaaccccagaatattaagattcagaagaaaccaggaaagtcagaactccgtattaataaagccagcctggccgattccggtgagtacatgtgtaaagtcataagcaaactgggcaacgactccgccagcgccaatatcacaatcgtggagagtaatgccacaagtactagcaccacaggtacctctcaccttgtcaaatgcgccgagaaagagaagacattctgcgtgaacggtggcgagtgctttatggtgaaggatctttcaaacccgtcacgttatttatgtaaatgccctaacgaatttacaggggaccgctgccagaattatgtgatggctagcttctactcaacaagcacaccttttctgtcactgccagaa

SEQ ID NO: 177145 - DNA, 1266 bp, Artificial Sequence
  derived and/or modified sequence
atgaggtggcgacgggctcccagacgcagtgggcgccccggccctagggcccagcgccctggcagtgctgcacggtcttcgcccccactcccactcttgcccctgctgctgttgctagggaccgcagccctagccccaggcgccgcagctggaaacgaagcggcgccagctggtgcatcagtatgttactcatcacccccttccgtaggctccgttcaagagctggctcagcgggccgccgtggtaatagaggggaaagtgcatcctcagaggaggcagcagggagctctcgaccgcaaggccgccgctgcggccggcgaggccggggcctggggaggtgatagagagcctccagcggctgggccgcgcgctctcgggccgcccgccgaggaacctctcctggctgcaaatggtactgtgccgagttggcccactgcccctgttcccagcgcaggtgagcccggtgaggaagccccctatctagtgaaagtccatcaggtctgggcagtgaaggctgggggccttaaaaaggactctctgctgacagttcggctaggaacctggggacatcccgccttcccgtcctgcggacgcctgaaagaagattctcgctatattttttttatggagccggatgcaaacagtacgagccgggcgccagccgccttccgggcttcctttccgcctctcgaaactggtcggaatctcaagaaggaagtatcacgcgtgctctgcaagcgatgcgccctcccaccgcgtcttaaggaaatgaagagccaggaaagtgcagcgggatccaaactggtgttgcggtgcgaaactagcagtgagtactcctccttgcgctttaagtggtttaaaaatggaaatgagctgaataggaaaaacaaacctcagaacattaagatacagaagaagcctggaaagtccgagttgagaatcaataaggctagtctcgctgactccggggaatacatgtgtaaggtaatttccaagctgggcaacgactcggccagcgccaacatcacgattgtggagagcaatgcaacctctaccagtactacgggcacaagccacctggtcaaatgcgctgaaaaagagaaaacattctgcgttaacggaggcgagtgtttcatggtgaaggacctgagcaaccccagcagatatttgtgcaagtgccctaatgaattcacgggcgaccggtgccagaattacgtcatggcaagcttttactcaacgagtaccccgtttctgtccttgcctgag

SEQ ID NO: 177146 - DNA, 1266 bp, Artificial Sequence
  derived and/or modified sequence
atgaggtggcgacgcgcacccagaaggtccggcagaccagggcctagggcacaaaggccaggaagcgctgcccgatcttcgcccccactgccgcttcttccactcttgctgttgctggggaccgccgctctcgcaccaggagcagccgccggcaacgaagcagcaccggcaggggcatccgtgtgttactccagcccaccctcagtgggttcggtccaggagctggcacaacgcgcggcagttgtgatcgagggaaaagtgcatccacaacgtcgccagcagggagctttggatcgaaaagcagccgcggcggcgggtgaagcgggagcatggggaggagatcgagaacctccagcggcagggcctagagcactgggacccccagcagaagaaccgcttcttgcagcaaacgggactgtcccttcgtggccaaccgcgcccgtcccgtcagctggtgagcctggcgaagaggcaccatacctcgttaaggtgcaccaagtttgggccgtgaaagcggggggccttaagaaagattcgctgcttaccgtgagacttgggacttggggccatccagcattccctagctgtggcagactcaaggaggactccaggtacattttcttcatggaaccagatgccaactccacctcgcgagcccctgcggcatttcgcgcatcttttccacctctggaaactggacgaaatctgaaaaaggaagtctcccgagtgctgtgcaagcggtgtgcactgcctcctagactgaaggagatgaagtcccaagaatcggcagcaggctccaagctcgtccttcggtgtgaaacgtccagcgaatactcgtcactccggtttaagtggtttaagaacgggaacgaacttaaccgtaaaaacaagcctcagaacattaagattcagaagaagcctggcaagtcggaactcagaatcaataaggcatcgctggctgattcgggggagtacatgtgtaaggtcatttcaaaacttggcaacgactcagcaagcgcaaacattacgattgtggagtcaaatgcaacctcgacttccaccaccggtaccagccatctggtgaaatgcgccgagaaggagaaaactttttgcgtgaacggtggagagtgttttatggtcaaggatctgtccaatcctagccgttatctgtgcaagtgtcctaacgaatttaccggtgaccgttgtcaaaactacgtgatggccagcttctactcgacctccactcctttcctgtccctgccggaa

SEQ ID NO: 177147 - DNA, 1266 bp, Artificial Sequence
  derived and/or modified sequence
atgaggtggcgccgcgcaccgcggcgctccggtcgcccgggaccacgggcccagcgaccaggctccgcggcccgcagctcgccgcctctgcccctcctcccgcttctcctgttgctgggaaccgctgccctcgccccaggagctgcggcagggaatgaggctgccccggcgggagcttccgtctgctactcgagccccccgtcagtgggttcggtgcaggaactggcccaacgcgctgccgtcgtcatcgagggaaaggtgcatcctcagagacgacagcaaggcgccctcgaccggaaagctgcggctgcagcgggggaagcgggagcatggggtggcgacagggaaccgccggcggcaggcccgagagcgctgggacctccggcagaggagccgcttctggccgccaatggcactgtgcctagctggcctaccgcgccggtgccatccgcgggggaaccgggagaggaggcgccctatctggtcaaagtgcatcaagtgtgggcagtgaaagcgggaggactgaagaaggacagcttgcttactgtacggctggggacctggggacacccagccttcccgtcatgcgggcgcttgaaggaggactcccgatacatcttcttcatggaaccggacgctaactccacctcacgggcgccggcggcgttccgcgcttcgttcccgccgctcgagactggaagaaacctcaagaaggaagtgagcagagtgctgtgtaagcggtgtgccctgccgcctcgcttgaaagaaatgaagtcgcaagagtccgccgccggatcgaagctcgtgctgcggtgcgaaacctcgtccgagtactcgtcgctgcgcttcaaatggtttaagaatggtaacgaactgaaccggaaaaacaagccacagaatatcaaaatccagaaaaagcctggaaagtccgaactgagaatcaataaggctagtctggccgacagcggagaatacatgtgcaaggtgatctccaagctgggaaatgattccgcaagcgctaacatcacgatcgtggagtccaacgccaccagcacctcgaccaccggcacctcacatctcgtgaaatgcgccgagaaagaaaaaaccttttgtgtcaatggaggagaatgtttcatggtgaaggatttgtccaaccctagcaggtacctttgcaaatgtccaaacgagttcacgggagatagatgtcaaaactacgtgatggcctccttttacagcacttctactccgttcctcagcctgcccgaa

SEQ ID NO: 177148 - DNA, 1266 bp, Artificial Sequence
  derived and/or modified sequence
atgcgctggagacgagctcctcgacgctctggtagaccaggtcctagagctcagcgacctggaagcgcagcccggtcatcacctccactgccgctgttgccactccttttgctgcttggaaccgctgcactcgcaccaggggcggccgcaggtaacgaggcagcccctgcaggcgcaagcgtgtgctacagttcacctcctagcgtgggatcggtgcaagaactggctcagagagctgcagtcgtgatagagggaaaggtgcatccgcagcgtcgccaacaaggagcccttgacagaaaggccgcagccgcagcgggcgaggcaggtgcatggggtggtgacagagagccacctgccgcaggcccgcgcgcgctcggtcctccagcagaagaacctctgcttgccgccaacggaaccgtgccatcgtggccaaccgcaccagtgccttcggccggagagcccggggaagaagcaccctacttggtgaaggtccatcaggtgtgggccgtcaaggcaggaggactcaagaaggactcgttgctcactgttagactcgggacttggggtcacccggcatttcctagctgcggtaggctcaaggaagatagcaggtacattttctttatggaaccagatgcaaattcaacttccagagcgccagccgctttcagagcatcgtttccaccactggaaaccggaagaaacctgaaaaaggaggtgtcaagggtgctgtgcaagcgctgtgcactgcctccaagactgaaggagatgaagtcccaagagtcagccgccggttcaaagctggtcctcaggtgtgagactagcagcgaatactcctcccttcgcttcaaatggttcaagaatggaaacgaactcaaccgaaaaaacaagccacagaatatcaaaatccagaaaaagcctggaaagtcagagttgcgcataaacaaggcctcgcttgcagattctggtgaatacatgtgtaaagtgatttccaagctcggcaacgattccgcatccgcgaacattactatagtggagtcgaatgcaactagcacctcaaccaccggaacctcccatctggtgaaatgcgccgaaaaagaaaaaacgttttgtgttaacggaggagaatgttttatggtgaaggatctcagcaacccatccagatacctgtgcaagtgccctaacgaatttacgggagatcgctgtcagaactatgtcatggcatcgttttacagcaccagcacgccctttctttccctgccagag

SEQ ID NO: 177149 - DNA, 1266 bp, Artificial Sequence
  derived and/or modified sequence
atgaggtggcgcagagctccccggcggtctggaagacccggcccccgcgcccagcggcccgggtcagccgcccgaagtagtccacctttaccattgttgcccctgctgctgctgctgggaaccgcggccctggcgcccggtgctgccgccggtaacgaggccgccccggccggtgcttccgtatgctacagttctccacctagcgttggtagcgttcaggagcttgcacagcgagccgctgtcgtcattgagggcaaagtgcaccctcagaggcgccagcagggtgcccttgacagaaaggctgccgctgctgcaggcgaggcaggcgcatgggggggcgaccgagagccacctgcggccggccctcgtgcactggggcccccagctgaagagcctcttttagctgccaatggcaccgtgccgagttggcccacagcacctgtaccttccgccggcgagcccggggaagaagccccctaccttgtgaaagtgcaccaggtgtgggctgtgaaggccggcggcttgaagaaagatagtctgttgaccgtgaggttgggcacctggggccatcctgcttttccatcttgcgggcgactgaaagaagacagccggtacatcttctttatggagcctgacgcaaattctactagccgcgcccccgcggcgtttcgcgcatcatttccacctctggaaaccggccggaatctgaaaaaagaggttagccgtgtactttgtaaaaggtgcgccctgccgccgcggttgaaggagatgaagtcccaggagtctgcagccggttccaaattagttctgagatgcgaaacatctagcgagtatagttcactgcgctttaagtggtttaaaaacggaaatgaactcaacagaaagaacaagccacagaatattaagatacaaaagaaacccggaaagagcgagctgagaatcaacaaggcttcactcgcagacagtggagagtatatgtgcaaagtgatatcaaaacttggcaacgactccgcatctgcaaacattacaatcgtggaatccaacgctacctcaacttctactaccggtactagccatttggtgaaatgtgctgagaaggagaagacgttctgcgtgaacggaggcgaatgcttcatggtgaaggacctgagtaacccatctagatatctgtgcaagtgtcccaacgagtttaccggcgatcggtgccagaactatgtgatggcaagtttttactctacttcgaccccatttctgtcattgcctgaa

SEQ ID NO: 177150 - DNA, 1266 bp, Artificial Sequence
  derived and/or modified sequence
atgcggtggaggagagctcccagacgctccgggagacctgggccgagagcccaaagacccgggagcgctgccaggagcagcccacccttaccacttttgccccttctgcttcttctggggaccgcagccctggctccgggcgccgcggccggaaatgaggccgctcctgccggcgcgagcgtgtgttactcctccccccccagcgttggcagcgtccaagagctggcccagagagctgcggttgtcatagagggcaaggtgcatccacagagaaggcagcagggtgctctcgaccggaaggccgccgcagccgccggtgaggccggcgcctggggcggagacagggagcctccggccgccggtccgcgagcactgggtccacctgccgaggagcctctgctggcggcaaacggaactgtcccctcatggccaacagcccccgtgccgagtgctggagagcccggcgaagaagctccataccttgtgaaggttcaccaggtgtgggctgtgaaagccggaggacttaagaaagactctctcttgacagtcaggctgggtacctggggtcatcccgccttccccagctgcggtcggctcaaagaagacagtcggtacatcttctttatggaacccgatgcaaacagcacctcccgagcacccgccgctttccgggccagcttcccccccctcgaaacgggaaggaacctgaagaaggaagtgtcacgcgtgctctgtaagcggtgcgccctgccgccccggttgaaagaaatgaagtcccaggaaagcgccgccggatccaagctggtgctgcgatgcgagaccagctcagaatattcgagtttgcgctttaaatggtttaagaacggtaatgagctaaacaggaaaaacaaaccccagaacatcaagattcaaaagaagccaggcaagtcggaactccgcataaataaagcctccctggcagattcgggtgaatatatgtgtaaagtgatatcgaaactcggcaatgactccgcttctgcgaacatcacaatcgttgaaagtaatgcaacgtcaacctccaccacaggaaccagtcacctcgtcaagtgtgccgagaaagaaaagacattctgtgtgaacggtggagaatgcttcatggtgaaggatctgtctaatcctagtcgttatttgtgcaaatgcccgaatgaattcacaggagaccgctgccaaaactacgtcatggcatctttttatagcacctctaccccctttctcagccttccagag

SEQ ID NO: 177151 - DNA, 1266 bp, Artificial Sequence
  derived and/or modified sequence
atgcgctggaggagggctcctcggcgttcggggcgtccggggccccgggcccagcgccctgggagcgccgcaagatcctctccgccgctccccctcctgccgctcctactgctgcttggtacggccgcactagcaccaggggcagcagcagggaacgaagcagctcccgcaggggcgagtgtgtgttacagctcccctccctcagtgggatctgtccaggaattggctcagcgtgctgccgttgtaatcgaagggaaggtccacccccaaaggagacaacagggtgccctggaccggaaggctgctgccgctgccggagaggccggtgcctgggggggcgaccgcgaaccgcccgcagccgggccacgcgctctcggccctccggcagaagagccactgttggctgccaacggcaccgtgcctagctggccaacggcccctgtgccttctgctggtgagcctggcgaagaggccccttatctggtgaaagtgcatcaggtatgggctgtgaaagccgggggcctcaagaaggattccttactgactgtgcggttgggaacatgggggcacccagcctttccttcgtgtggccggctaaaggaagactcacggtatattttctttatggaacctgacgctaactctacctcaagagctccggcggcttttcgggcctcctttccccctctcgagacagggagaaatctgaaaaaggaagttagtcgcgtcctctgcaaacggtgtgcattgccccctcgattaaaagagatgaagagtcaggagtcagcggcggggagcaagctggtgttgcggtgcgaaaccagtagtgagtacagctcccttagatttaaatggttcaagaatggaaatgaactgaaccggaaaaataagcctcagaatatcaaaatacagaaaaaaccaggaaagtccgagcttaggatcaacaaggcctcccttgccgatagcggggaatacatgtgtaaagtgatctctaagttagggaatgactcagcctcagccaacattactattgtggagagcaacgcaacatcaactagtaccaccggaacatcacatcttgtgaaatgcgctgagaaagaaaagacgttctgcgtgaacggaggagagtgcttcatggtgaaagacctgtctaatccctcacgctatttgtgcaaatgcccaaacgaattcactggggataggtgtcaaaactatgtgatggcttcattttatagcacatccacgcctttcctgagcctgcctgag

SEQ ID NO: 177152 - DNA, 1266 bp, Artificial Sequence
  derived and/or modified sequence
atgcggtggagacgggcacctagacggtctggaagacccggacctagggctcaaagacccggctccgctgccaggtcctcacccccgctgcccctccttcctctccttctgctattggggactgccgcactggcacctggcgccgccgccggcaatgaggcagcgcctgcaggagcctcagtttgttactcaagccctccatctgtgggcagtgtgcaggaacttgctcagagggcggccgtcgtgatcgagggtaaggtccacccacagcgccggcagcagggggctctcgatcgtaaagcggccgcagcggcaggtgaggccggagcctggggcggggaccgggagcccccggccgctggcccccgagccctggggccaccagccgaagaacccctgctggcggcaaacgggacagtcccttcctggcctactgcgcctgtcccgtctgcaggggagccaggagaggaagcgccatatctagttaaggtgcaccaggtgtgggcagtaaaagcggggggtctgaaaaaggatagtctgctgactgtgcgactagggacttggggtcacccagctttcccaagctgtggacgcctaaaagaagactctcggtacatctttttcatggagcctgatgcgaattctactagccgtgctccagcagcttttcgagccagtttccctcccctggagacagggaggaatctgaagaaagaggtttctcgggtgctgtgtaagaggtgcgcactgcccccacgccttaaagagatgaaaagccaggagtccgcggcaggcagcaagctggtgctcagatgcgaaacgtcatcggaatattcaagcttgcgattcaagtggttcaagaacgggaacgagctaaatcggaagaacaagccccaaaacataaagatccagaagaaacccggaaagtccgagctgcggattaacaaggcttccttggctgactcgggcgaatatatgtgcaaagtgattagcaaactcggaaatgatagcgcatccgccaatatcactattgtggagagcaacgctacttccacttccaccactggaaccagccacttggtgaagtgtgccgaaaaggaaaagacattctgtgtgaatggaggggagtgctttatggtgaaggatctctctaatccatcccgctacctctgtaagtgccccaacgagttcacaggcgacagatgccagaactatgtcatggccagtttttactcgacgtctactccctttttaagccttcccgaa

SEQ ID NO: 177153 - DNA, 1266 bp, Artificial Sequence
  derived and/or modified sequence
atgcgatggcgccgagccccccgacgaagtggtcggccgggaccccgtgcgcagaggcctggcagcgctgcccggagctctccgccgttgcctctcctccccttgcttcttctgctgggtactgcagcactcgcgcctggtgccgccgccggtaacgaggccgccccggcaggtgcttcggtgtgttactcgtcgcccccatccgttggttccgttcaggaactcgcccagagggccgcagtcgtcattgagggcaaggtgcacccacagcgtcgtcaacaaggggcgcttgaccgcaaagcagcggccgccgctggtgaggctggtgcttggggcggtgatcgggagccccctgctgccggcccgcgcgccctgggtcccccggctgaggagccccttctcgcggccaatggcaccgtccccagctggcccacggcccctgttccgtctgctggagaacccggtgaggaagcgccttatctggttaaggtgcaccaggtttgggctgtcaaggcgggcggtctgaagaaggactccctgctgaccgtgcgcctgggcacgtggggtcatccggctttcccatcgtgcggcagactcaaggaggattcccgctacattttcttcatggagcccgatgctaacagcacatctagggcgccggccgccttccgagcaagcttcccgcctctcgagactggacgcaatctgaaaaaggaggtgtcccgtgtactttgtaagcgttgtgcactcccgccccgcctgaaggaaatgaaatcccaagagtcggctgccggatccaagctcgttctgcgttgcgagaccagtagcgaatactcgtctctgcgcttcaaatggttcaagaacggtaatgagctcaatcgcaaaaacaagccccagaatattaagattcagaagaagcctggtaagtccgagctcaggatcaacaaggcatccttagccgattcgggagaatacatgtgcaaggttatttctaagctcggaaacgactccgcgtccgccaacatcacaatcgtagagagtaacgcgacctctaccagcacgacaggcacttcgcacttggtaaaatgcgcagaaaaggagaagacattctgcgttaacggcggggaatgttttatggtcaaggatttgtcaaatccaagccgttatctctgcaagtgcccgaatgagttcactggagaccgctgccagaattatgtcatggcaagcttctacagtacctcgacaccgttcctctcactgcctgag

SEQ ID NO: 177154 - DNA, 1266 bp, Artificial Sequence
  derived and/or modified sequence
atgcggtggcgccgcgcccctcgccgctctggacggcccggccctagggcacaaagacccggctccgccgctagatcaagtcctcccttgcctctgctcccactcctattattgctcggcaccgcagctctggcgccaggcgccgctgctgggaacgaggccgctcctgccggagcatctgtgtgttattccagtcctccctccgtggggagcgtccaggagcttgcccagcgcgccgccgttgtcattgagggcaaggtgcatccccaaaggaggcagcaaggtgctctcgaccggaaggctgcggccgctgccggtgaagcaggcgcctggggcggagacagggaaccgccagccgcagggcccagggcgcttggcccgcctgccgaggaacccctactcgccgcaaacgggaccgttccgagctggcctacggcccctgtcccgagcgccggcgagcctggggaggaagccccgtatctagtgaaggtccaccaggtctgggccgtgaaggccggcgggcttaaaaaggatagcttactaaccgtgcgtctggggacctggggtcaccctgcatttccatcctgtgggcggctgaaagaggatagccggtatatttttttcatggagcctgacgccaactctacaagtagagcacccgcggcctttcgagcctcattcccaccgctagaaaccggaagaaatctcaagaaagaggtctcacgggtgttgtgtaagcgatgtgcgctgcccccaaggctaaaggagatgaaatctcaggagagcgcggccggcagtaagctggtattgcgctgcgagacaagctcagagtatagttccttgcggtttaaatggttcaagaatggaaacgagctcaaccgcaagaataagccacaaaacattaaaatacaaaagaaacccggtaaatctgagctcaggattaataaggcctctttagcagacagtggtgaatacatgtgcaaagtgatttcgaaacttggaaatgactcagcctccgcaaatatcaccatagtggagtctaacgcaacatctacctcgaccaccgggacatctcacctcgtcaagtgcgcagagaaagagaagacgttttgcgtgaacggtggtgaatgtttcatggtcaaggatctcagtaatccatctaggtacctctgcaagtgccctaatgagtttacaggggatcgctgccaaaactacgtaatggcttccttctacagcacctccaccccgtttttgtccctccctgaa

SEQ ID NO: 177155 - DNA, 1266 bp, Artificial Sequence
  derived and/or modified sequence
atgcgctggagaagggcccccaggcggagcgggcgaccggggcctagagcacaacgccctggatcagcggcaagaagctcgcctcctctccctctccttcctttgctgcttcttctggggactgcagcactcgcccctggagcggcagcggggaacgaggcagccccggctggtgcatcggtgtgttactccagcccaccaagcgtggggagcgtgcaagaactcgcccaaagagccgccgtggtgatcgaaggcaaagtgcatcctcagagaaggcaacagggtgcactggataggaaggcagccgcagcagcaggtgaggcgggtgcctggggaggtgaccgcgagccaccagccgccggcccaagagcacttggcccccctgccgaagagccactcctcgcagcaaatggaactgtcccatcatggcctaccgcccctgtcccttcggcaggtgaacctggggaggaggctccctacttggtcaaggtgcatcaagtgtgggcagtcaaagcggggggactgaaaaaggattcccttcttactgtgcggttgggtacttggggccatcctgcctttccatcctgcggacgtctcaaggaagatagcagatacatcttcttcatggaacctgacgcgaatagcacctctcgcgcacctgcagcatttagagcatcgtttccacccctggagactggacgtaatctcaagaaggaggtcagcagagtcctctgcaaacggtgtgcacttccacctagactgaaggagatgaagagccaagaaagcgcagctggttcaaaacttgtcctgcgatgtgaaacctcctcagagtactcgtccctgagatttaagtggttcaaaaatggaaacgagctcaatcgaaagaacaaaccacaaaacatcaagatccagaaaaaaccagggaagagcgaactgaggataaacaaggcatcactcgccgattccggagaatacatgtgcaaggtcatttccaagttgggcaatgattccgcatctgccaacattaccattgtcgaaagcaacgcaacctctacttcaaccactggaacctcgcaccttgtgaaatgcgcagaaaaagagaaaactttctgtgtgaacggaggagaatgttttatggtgaaggacctgagcaacccctcgagatacctttgtaaatgccccaacgaatttactggggatcgatgccaaaactacgtgatggcatcgttttactcaacgtcgactccttttttgtcactccctgaa

SEQ ID NO: 177156 - DNA, 1266 bp, Artificial Sequence
  derived and/or modified sequence
atgcgctggagaagggcacctcggcgctcaggaagaccaggtccgcgagcccagcggccgggttcagccgcgagatctagcccaccgctgcctctgctgccgctgcttctcctgttgggcaccgccgcgctggcgccgggagccgcagccggaaacgaggccgcgccagcgggcgcatcagtgtgctactcatcgccgccgtccgtgggatccgtgcaggagctcgctcaaagagctgccgtggtgatcgagggaaaagtgcatccgcagcgccggcagcaaggtgccttggaccggaaagccgcggcggccgcgggagaggctggggcatggggaggtgatagagaacctccagcagcaggaccacgcgcgctcggaccgccagccgaagagccgctcctggctgcaaatgggactgtgccctcatggccgacggccccggtgccatccgcaggagaaccaggcgaagaggcgccatacctggtcaaggtgcaccaggtgtgggctgtgaaagcaggaggtctgaagaaggactctctgctcactgtgcgactcggaacctggggtcaccccgcattccctagctgcggacgcctgaaagaggactcgagatacattttcttcatggaaccggacgcgaactcgaccagccgcgcacctgcggcgttcagagcgagctttccgcctctcgagactgggagaaacctgaaaaaagaagtctcgcgcgtgctgtgcaagcggtgcgcgctgcccccgcgcctgaaagaaatgaaatcgcaggagtcggcggcggggagcaaactggtgctgaggtgcgaaacttcttccgaatactcgtcgctgcggttcaaatggttcaagaatgggaatgaactgaaccgcaaaaacaaaccgcaaaatatcaagatccagaaaaaacctggaaagtcggagctcagaatcaacaaagcctccctggcagatagcggagagtacatgtgcaaagtcatctccaagctcggaaatgactcggcgagcgctaacattaccatcgtcgaaagcaacgcgacctcgaccagcacgaccgggactagccacctggtgaagtgcgcggaaaaggaaaagactttctgcgtcaacggcggggaatgctttatggtcaaggacttgtccaacccgtcgcgctacctgtgtaagtgcccgaatgagttcaccggcgatcgctgtcagaactacgtgatggctagcttctacagcacctcgaccccattcctttcactgccggag

SEQ ID NO: 177157 - DNA, 1266 bp, Artificial Sequence
  derived and/or modified sequence
atgcgatggaggcgggcccctcggaggagtggccgcccgggtcccagagctcagcggcctggcagcgcggcgaggtctagtcctcccctgcccttgcttccattactgctcctgctgggaaccgcagcactggcgcccggcgcggccgctggaaatgaggctgcacccgccggcgctagcgtgtgctattcttcccctccctcggtcggatcagtacaggagctggcacagcgggctgcagtggtcatcgaagggaaagtgcatcctcagcggcgccaacagggagccttagaccgcaaggcggctgctgctgctggcgaggctggagcctggggaggtgaccgagagcctcccgccgctgggccgcgggccctcggacccccagcggaggagccactgctagccgccaacgggacagtgccctcttggcccacagctcccgtcccttctgcaggtgaacctggcgaagaggcaccatacctcgtgaaggtgcaccaagtctgggccgtcaaagctggcggtctcaagaaggatagtctgttaaccgttcgcctgggtacgtggggacacccagcctttcctagctgcggccggctgaaggaggattctaggtacatcttcttcatggagccggatgcaaacagcacctcaagagcaccagcagcatttagggcgagtttcccaccactggagaccggtaggaaccttaagaaggaggtgtctcgagtcttgtgtaaaaggtgtgcactacctccgaggctcaaggagatgaagtcccaggaatctgccgccggtagcaagttggtactgaggtgtgagacttcatcagagtatagttcactcaggttcaaatggtttaaaaacggaaacgaactgaaccggaagaataagccgcagaacattaaaattcagaaaaagcctggtaaatccgaattgcggatcaacaaagctagtctcgccgatagtggggaatacatgtgtaaggttatttcaaagttaggcaacgacagtgcttcggccaacattactatcgtggagtcaaacgccacatctaccagcactaccggaaccagccacctcgtcaaatgtgctgaaaaggaaaagaccttttgcgtcaatggcggtgagtgttttatggtgaaggacctcagcaatccatcacggtacttatgcaaatgtcccaatgagtttaccggagatagatgccaaaactacgtgatggcttctttctactcgacctcaactccctttctctccttacccgag

SEQ ID NO: 177158 - DNA, 1266 bp, Artificial Sequence
  derived and/or modified sequence
atgcggtggcgcagggcgccgcgacggtccgggaggcctgggccgagggctcaacgcccgggcagtgccgcgagaagctccccaccacttccgctgcttccacttctcttgctgcttggaactgccgcactggctccaggagccgcggcaggtaacgaagcggccccggcgggagctagcgtgtgttacagctcaccaccgtccgtgggctccgtccaggagctggcgcagcgggcggccgtggtgatcgagggcaaggtccatccacagagacggcaacaaggagcgctcgacaggaaagctgcggcagcggcgggagaggccggagcttggggaggagatcgggaacccccagcggctggccccagagcactggggccccctgccgaagaaccgctgctggccgcaaatgggactgtcccaagttggccaaccgccccggtgccttccgccggagagcccggtgaggaagccccgtacttggtaaaggtgcatcaggtatgggcagtgaaggcaggcggcctcaagaaggattccctcctgaccgtgcgcctggggacctggggacacccagccttcccgtcgtgcggacggcttaaggaagatagcagatacatcttcttcatggagcctgacgctaacagcactagcagggccccggccgctttccgtgcgtcgtttcctcctctcgaaaccggccggaatctgaaaaaggaggtgagccgtgttctgtgcaagcgctgcgccctgccgccgcggcttaaggagatgaaatcgcaagagtcggcggctggaagcaaattggttctcagatgtgagacttcctccgaatactcgtcactgaggttcaagtggttcaaaaatggtaacgaactgaatcgaaagaacaaaccacaaaacatcaaaatccagaagaaaccgggaaagtcagagctccgcatcaacaaggcgtcgctggccgattcaggcgagtatatgtgcaaggtgatttccaaacttggaaacgacagcgcctcagcgaacattacgatcgtcgaatccaatgccaccagcactagcaccaccggaacttcgcacctggtcaagtgcgctgaaaaagaaaagaccttctgcgtgaatggtggggaatgtttcatggtgaaagacctgtccaacccgtcgcgctacctgtgtaagtgccctaacgaatttactggcgaccggtgccagaactacgtgatggcatcgttttactctacctccacgccgtttttgtcactccccgaa

SEQ ID NO: 177159 - DNA, 1266 bp, Artificial Sequence
  derived and/or modified sequence
atgcgctggagaagggccccaagacggtccggtcggccggggccacgggcgcagcggccaggatcagcagcccgcagctcgccgccgctcccacttctcccgctgctcttgctcctgggaaccgcggctctggccccgggagcggcagccggcaacgaagctgccccggcaggtgctagcgtgtgctactcgtctccgccaagcgttggctcagtgcaggagctcgcgcagcgcgccgccgtggtcatagaaggaaaggtccacccgcagcgacggcagcaaggagcccttgacaggaaggccgcggctgccgctggggaggccggcgcatggggcggagacagagagccgccagccgcggggcccagggcccttgggccgccagcggaggaaccactgctcgcggcgaacggtaccgtcccgtcatggccaactgcgccggtcccatcggccggcgaacccggagaagaagcaccttacttggtcaaagtgcaccaagtctgggcagtcaaggcggggggactgaaaaaggactctctgctgaccgtgcgactcggtacttggggtcaccctgcctttccgtcctgcggccgcctcaaggaggacagccgctacatcttcttcatggagcccgatgccaatagcaccagcagagcgcctgctgccttccgcgcctcctttccaccgcttgagactggacggaatctcaaaaaggaagtgtcgcgggtcctgtgcaaaagatgtgccctcccgccgcgcctgaaagagatgaagtcccaagagagcgcagccggatccaagctcgtgctcaggtgtgaaactagctccgaatatagctcgctgcgtttcaagtggttcaaaaacggaaatgagctgaatcgaaagaacaagcctcagaatatcaaaattcaaaagaaaccaggcaagtcagaactccggatcaataaggcgtcactggcggactcaggagagtatatgtgcaaggtcatttcgaaattgggtaatgacagcgcgtccgccaatatcaccatcgtggaatccaacgcaactagcacttccactaccggtactagccatctggtcaaatgtgctgaaaaagagaaaactttttgcgtgaacggtggagagtgcttcatggtgaaagatctgtcgaacccatcgcgctacttgtgcaagtgcccaaatgagttcaccggggaccgctgtcagaattacgtgatggcaagtttttactcgacgtccacgccattcttgtcactgccggag

SEQ ID NO: 177160 - DNA, 1266 bp, Artificial Sequence
  derived and/or modified sequence
atgcgatggagacgcgcacctcgccggagcggacgtcctgggccacgggcgcaaagacccgggtccgcggcaagaagctcccctccacttccactccttcctctcctgctgctgctcggaacggccgcgcttgctcctggagcagcggctggtaacgaagcagctcctgcgggggcaagcgtctgctacagctcgcccccgtctgtgggcagcgtgcaggaactggcccaaagggcagcggtcgtgatcgaagggaaggtgcatccccagcgacggcaacaaggggccctcgatcggaaggccgccgcggcagccggagaggccggggcatggggcggagatagggagcccccagcagcaggtcctagagccctgggaccaccggcagaggaaccattgctggcagcaaacggtaccgtcccttcctggcctaccgctcctgtgccttcagctggggaacctggggaagaggccccatatctggtgaaggtccatcaggtgtgggcagtcaaggcaggtggactcaaaaaggattcgctcctgacggtccgactcggtacttggggacatccagcgttcccaagctgcggcagacttaaggaagatagcagatacattttctttatggaacccgacgcaaacagcaccagcagggccccagcagccttccgtgcatcctttcccccgctggaaaccggccggaaccttaagaaagaggtgagtagagtgctgtgtaagaggtgtgcacttccaccacggctgaaagagatgaaatcgcaagaatccgcagcaggttcgaagctggtccttagatgtgaaacttcctcagagtactcctcactgcgctttaagtggttcaagaacggtaatgagctgaaccgcaagaacaagccccagaacataaagatccaaaagaagcctggaaaatccgaactgcggattaacaaagcctcgctggcagattcgggagaatacatgtgtaaggtcattagcaagctgggtaacgacagcgcctccgcgaacataaccattgtggaatcaaatgccacctcgacttccaccactggcactagccatctcgtgaaatgtgccgaaaaggaaaagaccttttgtgtgaatgggggagaatgctttatggtgaaggatcttagcaatccttcacggtatctttgtaaatgccctaacgagtttaccggtgaccggtgtcaaaactacgtgatggcgagcttctactcgacttctactccatttctgtcgcttccagag

SEQ ID NO: 177161 - DNA, 1266 bp, Artificial Sequence
  derived and/or modified sequence
atgagatggcggcgagccccccgccgatcaggaaggcctgggccccgcgcccagcggccagggagcgccgcacggagctccccccctctgcctctcctgcccttattactcctgttggggactgccgcactcgccccaggcgccgcagctggaaatgaggccgcccctgcaggagcttctgtgtgctactcttcccccccttcggtggggtccgtacaggaactagcccagagagccgccgtcgtcatcgaggggaaggtgcaccctcagcggcgccagcaaggagccctcgatcggaaagcagctgctgccgccggagaagcaggcgcttgggggggggacagagagcctcctgcagccggcccgcgggccctcggcccacccgctgaagaaccgctcctggctgcaaacggaaccgtgccatcgtggccaaccgctccagtgccgtctgctggagagcccggcgaggaggccccttatctcgtaaaggtgcatcaggtgtgggctgttaaggctggaggcctcaaaaaagactcgctgctcacggttaggctggggacgtggggccacccggccttccccagctgtggccgattgaaagaagatagtcgatatatcttttttatggagccagacgccaacagtacctccagggcgccggcagcctttcgggccagctttcctccacttgaaacgggacggaaccttaaaaaagaggtcagcagagtgctgtgcaaaagatgtgcgctgcctccacgacttaaggagatgaaaagccaggagtcagccgctggatccaaacttgtactgaggtgtgagacgtcttccgagtattctagccttaggtttaagtggtttaaaaacggcaacgagctaaacaggaaaaataaaccccagaacattaagattcagaagaagcctggcaaatccgaactccgtatcaataaggcgtccctcgctgattccggggaatatatgtgcaaggtgatctcaaagctggggaatgacagcgccagcgccaacatcaccattgtggagtcaaatgccacatccacttcgacgaccggaactagtcacttggttaagtgtgcagaaaaagagaagactttttgtgtgaatggcggagagtgctttatggtgaaagatctgtccaatccttcccggtacctctgtaagtgtcctaacgaatttacgggagatcgttgccagaattatgtcatggccagcttttacagcacgagtacccccttcttaagcttacccgag

SEQ ID NO: 177162 - DNA, 1266 bp, Artificial Sequence
  derived and/or modified sequence
atgcgctggagaagggcccctagacgatctggccggccgggtccacgagcacagcgcccaggttccgcggccagaagtagccctcctcttccattactgcctctgctgctgttactgggcaccgccgccctggctccaggcgcagcagcaggtaacgaagccgcacccgccggagctagtgtgtgttattcttcccccccttctgtcggatctgtgcaggagctcgcccagcgggcagctgttgttatagagggaaaggttcacccccagcggcggcaacagggggctctggataggaaggccgcagcagctgctggagaggcaggcgcctggggaggcgaccgggaacccccagctgccggcccgagggcactgggccccccagccgaagagccactgcttgcagcaaatgggaccgtgccctcttggcctactgctccagtaccctcagccggcgaacccggagaggaggcaccctatctggtgaaggtccaccaggtctgggccgtgaaggccggcggcttgaaaaaggacagcttgctgaccgtccggttgggaacttggggccacccagcatttccttcatgcgggagacttaaagaagacagcagatatatcttttttatggaacccgatgcgaacagcacttccagagcccctgcggccttcagagcttcatttcccccgctggagacaggaagaaaccttaaaaaggaagtaagccgggtcttgtgtaaacgctgcgctttgcctccaaggctcaaggagatgaagtcacaggaatcagcggcaggatccaaactggttctgcgatgtgaaacatctagtgaatattcttctctgagattcaagtggttcaaaaatggaaatgaactgaaccgtaaaaacaagcctcaaaacatcaaaattcagaagaagcctgggaagtccgagctgcgaataaacaaagcttcccttgccgacagcggcgaatacatgtgtaaagtgatcagcaagttaggcaacgatagcgcctcagcaaatattacaattgtggagtcaaacgccacctccacctctacgaccggtacctctcatctcgtaaagtgtgccgaaaaggaaaaaacgttctgcgtaaacggcggagaatgttttatggtgaaggacctttctaaccccagccgttacttgtgtaaatgtccaaacgaattcaccggtgataggtgtcagaattatgtcatggctagtttctacagcacatctacccccttcctcagtctcccagaa

SEQ ID NO: 177163 - DNA, 1266 bp, Artificial Sequence
  derived and/or modified sequence
atgaggtggaggcgagcaccaaggagaagtggtagacccgggcctcgagctcagcgccctggctctgccgcacgctctagccctcccctgcccctcctgcctctgctcctcctactgggaacggcagcattggccccaggagcagcagccggcaatgaagctgcacctgcaggggcctccgtgtgctattctagtcccccaagtgtgggtagcgtgcaagaactggcccagcgagcggcggtggtgattgagggcaaagtgcacccacagagaaggcagcagggggcactggatcgaaaagccgccgccgccgctggcgaggcaggcgcctggggcggtgaccgagagcctcctgcagcgggacctcgggctctgggcccgccagcggaggagcctctgttagccgctaacggcacagtgccttcgtggcctactgcccctgtacctagcgccggggagccaggtgaggaggctccctaccttgtcaaagttcatcaagtgtgggccgtgaaggccggtggactcaagaaagattcgctcctcacagtgaggcttggaacatggggccaccccgcttttccttcctgtggccgactgaaggaggactctaggtatattttctttatggagcccgatgccaatagcacatcaagagctcctgcagctttcagagccagcttccctccacttgaaacgggccgaaatttgaagaaagaagtgtccagagtgctctgcaaaagatgcgcgctcccacctaggctaaaagaaatgaagtctcaagaatctgccgctgggagtaagcttgtgctcaggtgcgaaacctccagcgagtattcctctctgagatttaaatggtttaaaaatggaaacgagctcaacaggaagaataagccccagaatataaaaattcagaaaaagcctgggaagagcgagctccgaatcaacaaagctagcctggctgattccggggaatacatgtgtaaagttatctcgaagcttggcaacgattctgcttcagccaacattacaattgtcgaatccaatgcaactagtacctccaccaccggcaccagccacctggtgaagtgcgctgagaaagaaaagaccttctgcgtcaacggcggcgaatgctttatggtgaaagacctaagcaacccatctcgttacctctgtaagtgccccaatgaattcaccggcgaccgttgtcaaaattatgtcatggcttccttttacagcacctcaactccctttctgtccctcccagaa

SEQ ID NO: 177164 - DNA, 1266 bp, Artificial Sequence
  derived and/or modified sequence
atgaggtggcgtcgcgccccacggcgttccgggcggcctggccccagggcccagcggccgggatcggccgcgaggtcctcacccccattgccgctgcttccccttttgttgctccttgggacggcagctttggccccaggggcagccgcagggaacgaagcggcccccgcaggagcttcagtgtgctactccagtccccccagcgttgggtccgtgcaggagctggcacagcgggccgctgtagtcatcgaaggtaaggtccatccccagaggagacagcagggagcactcgatcgaaaagcagcagctgcagccggggaagcaggagcatggggtggggacagagaacctcccgccgccggaccccgggcacttggcccccccgccgaagagcccctgctggctgctaacggaaccgtaccctcttggcccacggctccagtgcccagcgctggggaacccggagaggaggccccatacctcgtcaaagtccaccaagtatgggccgtcaaggctgggggactaaaaaaagattcactgcttacagtgcggctgggtacatgggggcaccccgctttccctagctgtggccgcctgaaggaagattcccgatatatttttttcatggagccagatgccaattctacgagccgtgccccagctgcatttcgagcaagctttcctcctctggaaacaggtcggaatctgaagaaagaggtttcaagggttttatgtaagagatgtgccttgccccctaggctgaaagagatgaaaagtcaggagagcgccgcaggatctaagctggtcctcagatgcgagacttcgtccgaatacagcagcctcaggtttaaatggttcaaaaatggaaacgaactgaaccgcaagaataagccccagaacataaaaattcaaaagaagccaggcaagtccgaactgcggattaataaagctagtctggccgatagcggagaatatatgtgcaaagtgatttctaagctcggaaacgactcggcttctgccaacatcacgatagtcgaatcaaacgccacttccacgtctaccaccggaacctcacatttggtgaagtgcgctgagaaagagaagacgttctgcgttaacggcggagaatgttttatggtaaaagatttgagtaacccttcccggtacctctgcaagtgtcctaatgagtttacaggggataggtgccagaactatgtcatggccagcttttactccacctccactccctttctttctttgcctgag

SEQ ID NO: 177165 - DNA, 1266 bp, Artificial Sequence
  derived and/or modified sequence
atgcgctggaggcgggctccacgccggtctggacgccccggaccgagagcacagcgaccaggctccgcagcaaggtcatcgccaccacttcccctccttcccctcctcctgctgcttggtaccgccgcgcttgcacctggggccgcagccggtaatgaagcggcgcctgccggagcctcggtttgttactcatcacctcctagcgtcggtagcgtccaagagctcgctcaacgcgcggcggtcgtcatcgaaggaaaggtccatccgcagagacgccaacaaggggcactggatcggaaagccgcagccgcagctggcgaggcaggagcctggggaggtgatagagaacctccagcggcaggcccgcgtgctctgggccctcctgctgaggagcctcttcttgccgccaatggcactgtcccatcgtggccaaccgcaccggtgccgtccgccggagagcctggggaagaagccccttacctggtgaaggtgcaccaagtgtgggcagtgaaggcaggcgggctgaaaaaggattccctcctcactgtgagactggggacttggggacacccggctttcccttcctgcggcagactcaaagaggactcccgatacatattcttcatggaaccagacgcgaactcaacctcgagagcacctgccgcatttcgggcgagcttcccacctctggaaaccgggagaaaccttaagaaggaggtgtccagagtgctgtgtaagcggtgcgcacttccgccccgacttaaggaaatgaagtcccaagaatcggcagcaggttccaaacttgtgctgaggtgcgaaacctcgtccgagtattcctcactcaggttcaagtggttcaagaatgggaatgaactcaacagaaaaaacaaacctcaaaacatcaagattcaaaagaaaccaggcaaatcagagctccgcatcaacaaagcgtctctggcagattcgggagagtacatgtgtaaggtgatttccaagctgggaaacgattcggcgtcagcaaatatcaccatagtcgaaagcaatgccacgtcgactagcactaccggaactagccacctggtgaagtgtgccgaaaaggaaaagacgttctgtgtgaacggaggagagtgctttatggtcaaagatctgagcaacccaagcagatacctctgcaagtgtcctaacgagtttactggggaccggtgtcagaattatgtcatggcatcgttttactccaccagcacgccttttctttcactgccagag

SEQ ID NO: 177166 - DNA, 1266 bp, Artificial Sequence
  derived and/or modified sequence
atgaggtggagacgggctccaagacgatctggacgccccggaccgcgtgcacaaaggcctggctcggcggcgagaagcagccctccgctcccgctcctcccacttcttctgcttcttggaactgcagccctggcccctggtgccgcagccggtaatgaagcagcacccgccggcgcatccgtgtgttactcctcacctcccagcgtcggttctgtccaagaactggcacagagagcagccgtggtcatcgagggtaaggtgcacccacaacgtaggcaacagggcgcgctggatcggaaggcagccgcagcagctggagaagcaggagcatggggaggtgatcgagaacctccggcagctggtcctcgtgccctcggtccgccagcagaagaacctcttctggcagctaatggtactgttccgtcatggccaactgccccggtgccgtcggcaggcgagcccggcgaagaggctccttacctcgtgaaggtgcatcaagtgtgggcagtgaaggccggaggtcttaagaaggacagcctgctgacggtgaggttgggaacctgggggcatcctgctttcccatcctgtgggagactgaaggaagattcgcgttacatattcttcatggaaccagacgccaattcgacttcgagagccccagcagcattccgcgcttcatttcctcccctcgaaaccgggagaaaccttaagaaagaggtgtcccgggtgctctgcaagagatgtgcacttccaccccgacttaaagagatgaagagccaggaaagcgcagcgggaagcaaattggtcctgcgatgcgaaacctcttctgaatactcctcccttagatttaagtggttcaagaacggcaatgagctgaaccggaagaacaaaccacaaaacatcaagattcagaaaaaaccagggaaatccgaactccgcatcaacaaggccagcctggccgattccggggaatacatgtgcaaggtgattagcaagctcggaaacgatagcgcatcggcgaacattactattgtcgaatccaacgcaacttcaacctcaactacgggcacttcccatctggttaagtgtgcagaaaaggaaaaaactttttgcgtcaacggcggcgagtgctttatggtcaaggatctgtcgaacccctcgcgttatctctgcaaatgtccgaatgagtttacgggggatcgatgtcagaattacgtcatggcttccttctattcaacctctacgccttttcttagcctgcctgag

SEQ ID NO: 177167 - DNA, 1266 bp, Artificial Sequence
  derived and/or modified sequence
atgcgttggcgccgcgcgcccagacggagtggccgccctggtccacgggctcagcgcccaggaagcgccgccaggtccagtccacccttgcccttactgcctctacttttgttgctcgggaccgcggccttggctcccggggctgccgctgggaacgaagccgcgcctgccggcgcgtccgtgtgctacagttctcctcctagcgttggctcagtgcaagaactcgcgcaacgcgccgcggtcgtcatcgagggtaaagtccaccctcagcggcgacagcagggcgcactagatcgcaaggccgcagccgccgccggcgaagctggagcctgggggggcgatagagagccaccagcagccgggccacgtgccttaggaccaccagctgaggagcccctactcgcggctaacgggacagttccctcgtggcccacagctccagtgccaagtgccggagagcccggagaggaggccccttatctggtgaaggtccaccaggtttgggcagtgaaagctggtggcctgaaaaaggactcgctactgacggtcaggctgggcacatggggccaccccgcctttccgtcctgtggtcgtctaaaggaagacagccgatacattttctttatggaacccgacgcaaacagcacctccagagcaccggcggcgtttcgtgcctctttccccccactagagaccggcagaaacttgaagaaagaggtcagtcgcgtactgtgcaagcgttgtgcgctaccccccaggctgaaggaaatgaagtcccaggagtcagcggccggctctaagcttgttttgaggtgtgagacaagctcagagtatagctctcttaggtttaaatggtttaagaatgggaatgaactgaaccggaagaataagccgcagaacatcaagatacagaagaagccgggtaagagcgagctgcgaattaacaaggcatccctggcagattctggtgaatatatgtgcaaggtcatcagcaaactgggtaatgactctgcctcagctaatataactatcgtggagtccaacgctacctccactagcaccactggcacttcacaccttgtgaagtgtgcagagaaggaaaaaactttttgtgtgaacggaggtgaatgcttcatggtgaaggacctgtcaaatccttccagatatctgtgcaagtgccccaacgagttcacgggagaccggtgccagaactatgtgatggcttctttttattccacaagtacgccctttctgagtcttcctgag

SEQ ID NO: 177168 - DNA, 1266 bp, Artificial Sequence
  derived and/or modified sequence
atgagatggaggcgggcaccaagacgatccggcagacccggcccccgagctcagaggcctggaagtgccgcacggtccagtcctcctctgcccctgctgcctcttttgctcctgctgggaacggctgctctggccccaggtgctgcggcaggaaacgaagcagcacccgcaggggcatccgtgtgctactccagtcccccctccgtggggtctgtgcaggaattggctcaacgagcagcagtggtgattgagggtaaagttcacccccagcgcaggcagcagggagcactcgatagaaaggcagcggccgcggccggcgaggctggagcctggggcggcgatagagagccacccgctgcaggtcctcgtgcattaggaccccccgcagaagagcccctgttggctgctaacggaaccgtaccctcttggccgaccgcccctgttcccagcgctggtgagcctggtgaagaggcgccgtaccttgtgaaagtccatcaagtttgggcagttaaggctgggggcctgaagaaagacagtctgctcactgtgaggttgggaacctggggccacccagcattccccagttgtggacgacttaaagaggacagtaggtacatcttttttatggaacctgacgctaacagcacgagtcgggctcccgctgcctttagagcctcttttcctccactagaaacgggtaggaatcttaagaaggaagtctcgcgggtcctgtgtaagcggtgcgcgctgccaccacgccttaaagagatgaagagtcaagaaagcgcagcgggttctaaactcgttttgcgctgcgagacaagtagtgagtattcttcccttcgctttaaatggttcaagaacggcaatgaactaaaccggaagaacaagccgcaaaatattaagatacagaagaagccagggaagtcagagctgcgcattaacaaagcatctctggccgactctggcgagtatatgtgtaaggtcatctctaagctgggcaatgattcagcgagcgcgaatatcacgattgttgagtctaacgctacgtcgacctcaaccacaggcacgagccatcttgtgaagtgtgctgagaaggaaaagactttctgcgttaatggcggagaatgcttcatggtgaaggacctaagtaatccaagtaggtatctgtgtaagtgcccgaacgagttcacaggagatagatgtcaaaactacgttatggcgtctttctacagcacatctacacctttcctgagcctccctgaa

SEQ ID NO: 177169 - DNA, 1266 bp, Artificial Sequence
  derived and/or modified sequence
atgcgttggagaagagcaccccgacgctcaggtaggcctggtccacgtgctcaaagaccgggcagtgctgcgaggtcaagccctcctttgcccttgttacccttgttgttgttgctcggaactgctgcgcttgccccaggtgccgctgccggtaacgaggctgcgcccgctggtgcatcggtttgttattccagtccacccagcgtgggaagcgtgcaggaattggcacagcgagctgccgttgtaattgagggtaaggttcaccctcagagacgtcaacagggcgccctggatcgaaaagctgcagcagctgctggagaagctggtgcgtggggtggggatagagagcctccagctgctggtcctcgggcgctgggaccacctgccgaagagccgttattggctgccaacggcaccgtaccatcatggcccaccgctcccgtgccctcagctggagagcctggagaagaagctccatatttggtgaaggttcatcaagtgtgggctgtgaaggctggcggactcaagaaagattctcttcttacagtgcgactaggtacctggggccatcctgcctttcctagctgcggtcgtctgaaggaggatagccgatatattttttttatggagcctgatgctaactcaacttccagggcgcctgccgcttttagagcctcatttccccctttggagactggaagaaacctgaaaaaagaggttagcagagttctgtgcaagaggtgtgctcttccccctaggctcaaagagatgaagtcccaagagagcgcggcgggatcaaaacttgtcctcaggtgtgagacttcgtcggaatattcgtcattgcggttcaaatggttcaaaaatggcaacgagttgaaccgtaaaaataaacctcaaaatataaagattcaaaaaaagcctggtaagtctgagttaagaataaataaggcctctctcgctgacagtggtgagtacatgtgcaaggtcatatccaaattgggaaatgattccgcttctgcgaatattacaatcgtggagagtaatgcaacctccactagcacaacaggtacctcacatctcgtgaaatgtgccgagaaggaaaaaactttttgtgttaacggcggtgagtgctttatggtcaaagatcttagcaatccttctcgatacttatgtaagtgcccgaatgagttcaccggtgataggtgccagaattacgttatggccagtttttattctacttctacaccttttctttctcttcctgaa

SEQ ID NO: 177170 - DNA, 1266 bp, Artificial Sequence
  derived and/or modified sequence
atgaggtggaggcgggctcctcgcagatcaggccgcccgggtccgagggctcagcgcccgggatccgccgcccgctcctccccaccgctcccgctgctgccgctgcttctcctgctcggcaccgctgctctggcgccaggcgcggcggcgggaaatgaggccgcccctgctggggccagcgtgtgctactcgagcccaccgagcgtgggatccgtgcaggagctcgcacagcgggccgcagtggtcatcgaaggaaaggtccatccgcagcgccggcaacagggagcgcttgacagaaaggctgccgcagccgctggcgaggccggggcatggggaggagacagagaaccacctgccgccgggcctcgcgcgcttggaccgccggctgaagaacccctgctcgcggcgaatggaacggtgccatcctggccgactgccccggtgccttcggctggggagcccggagaagaggcaccttatctcgtcaaggtgcaccaagtctgggcggtcaaagctggaggtctgaagaaagactcgcttctcactgttcgcctcggaacttgggggcacccggcatttccgtcctgtggccgtctgaaggaggacagccgatacatcttcttcatggaaccagacgccaactcgactagccgtgcacctgccgcttttcgcgcatcgtttccaccactggaaaccggacgcaacttgaagaaggaggtgtcacgggtgctgtgtaaacgctgtgcgcttcccccgaggttgaaggagatgaagtcacaggagtccgccgccggttcgaagctcgtgcttagatgcgaaacctccagcgaatactcttcgttgagatttaagtggttcaagaacggcaacgaactcaatcgcaaaaacaagcctcagaacattaagatccagaaaaaaccgggaaagtccgaattgcggattaacaaggcctcgttggctgattccggagagtacatgtgcaaagtgatttctaaactgggtaatgacagcgcctcagcgaacatcacgatcgtggaatccaacgcaacttcaacgtcgaccaccggtacctcacacctcgtcaagtgcgctgaaaaggagaaaaccttctgtgtgaacggaggagaatgcttcatggtgaaggacctttcgaatccttcacggtacctctgcaagtgtccgaatgagttcaccggagatcggtgccagaactacgtcatggcgtcgttctacagcacttcgaccccattcctttcgttgccagag

SEQ ID NO: 177171 - DNA, 1266 bp, Artificial Sequence
  derived and/or modified sequence
atgagatggagacgggccccacggcggtcaggccgtcccggccctagagcccagaggccgggaagcgctgcacgttcctccccacctctgccgcttctccctctactgcttctgctcggtactgcagccctggcccccggggcagctgccggcaacgaggcagctcctgccggcgcgtctgtgtgttactcttcccccccatcagtcggatccgtacaggagcttgctcagagggccgccgtcgtgattgagggtaaagtgcacccccaacggaggcagcagggagcccttgacagaaaggcagccgccgccgcaggcgaagccggggcatggggaggggatagggagccgcctgccgccgggcctcgggctctggggcctcctgccgaagaaccactcttggctgccaacggaacagtcccgtcatggcccaccgctcctgtgccttcagcgggcgaacccggggaggaagccccatacctggtcaaggtccatcaggtttgggcggtaaaagcaggcgggctaaaaaaagacagtctgctgaccgtacgcctgggaacttgggggcaccctgccttcccatcctgtgggcgactgaaggaagacagtaggtacattttctttatggagcctgacgccaacagcactagtcgtgctcccgccgcctttagagcgagctttccccctttagagactggtcggaacctcaagaaggaggtaagtcgggtgttgtgtaaacgatgcgccctaccccctcgcctgaaggaaatgaagagtcaagagtcagcagcaggaagcaagctggttctgaggtgtgagacaagttccgaatattcttcactacggttcaagtggttcaaaaacggtaacgagctgaacaggaagaacaagccccagaacattaagatacagaagaaacccgggaagtctgagctccgtatcaataaagcctcactagctgactctggcgagtatatgtgcaaggtgatttcaaaactcggcaatgacagtgcgtctgctaacatcacaattgtcgaaagtaacgccaccagtacaagtactaccggcacgagccacctggtgaagtgcgccgaaaaggaaaagactttttgcgtgaacggcggggaatgtttcatggtcaaggatctttcgaaccctagcagatacctctgcaagtgcccgaacgagtttacaggcgacaggtgccagaattacgtaatggcctccttctacagtaccagtactccttttttaagcctgcctgag

SEQ ID NO: 177172 - DNA, 1266 bp, Artificial Sequence
  derived and/or modified sequence
atgcggtggcggcgcgctcctaggcgatctggaaggcctgggccgcgggcccagaggcctggatcagcagccagatcttctccaccattgccactgctcccacttctgctgctcttggggacggcagcactagcacccggggcagcagccgggaatgaagccgccccagcaggagcttccgtatgctacagttcacccccatccgtcggatccgtgcaggaactggcccagagagctgctgtggtaatcgaagggaaagtacatcctcaacggcggcaacagggagctctagatcgaaaggccgctgcagcagcaggagaagctggggcctggggaggggacagggaacccccagctgctgggccccgcgcattagggccacctgctgaagaaccattactcgccgctaacggaactgtgccctcctggcctactgctccagtcccttctgctggggaaccaggggaggaagcaccctatttagtcaaagtacatcaggtatgggctgtcaaggctggagggctcaaaaaagattcccttttaacagtgcgcctgggaacatggggacatcccgcatttccctcctgcgggaggttaaaagaagatagtagatacatcttcttcatggaacccgatgcgaactctacttctcgggctcccgctgcttttagagcatcgtttccccctcttgaaactggaaggaaccttaaaaaagaagtcagtcgggtgctctgcaaacggtgtgccctacccccacgacttaaagaaatgaaatcccaggaatcagctgctggaagtaaacttgttctcaggtgcgaaacatcctctgaatactcatctcttagattcaaatggttcaaaaacgggaatgaactgaacagaaaaaacaagccacagaatataaaaattcagaaaaaacccgggaaatctgagctccggataaataaagcctcactagcagatagtggagaatatatgtgtaaggttatttctaaactagggaacgattctgctagtgctaatattactatagttgaatccaatgcgacatctacatcaacaacaggaacttcccacctcgtgaagtgtgccgaaaaagaaaaaacattctgtgtcaatggaggggaatgtttcatggtgaaagatctctctaaccccagtcgctatttatgtaaatgtcctaacgaatttactggggacaggtgccagaattacgttatggcctcattttattccacatctactcccttcttgagtcttcctgag

SEQ ID NO: 177173 - DNA, 1266 bp, Artificial Sequence
  derived and/or modified sequence
atgcgatggcgccgggcaccacggcgctcaggaaggccaggcccacgggcccaacgcccaggctccgcggcccgaagctccccccctttgcctctccttcccctcctgctgttattagggaccgcagcactggcaccaggcgcagcagctggcaacgaggccgcaccagccggggctagtgtgtgctacagcagcccaccaagcgtcggctctgtacaggaactagcacaacgtgccgccgtcgtgattgagggaaaggttcatccgcaacggagacaacaaggcgcgctggataggaaggccgcagccgctgcaggagaggctggcgcctgggggggtgatcgcgagccacccgcagccggtcccagggcattggggccccctgccgaggagccattactggccgcgaacggcacagtcccatcctggccgacagccccagtaccttcagctggagagcccggtgaagaggccccctatctggtcaaggttcatcaagtctgggcagtgaaagctggagggctaaagaaggactcgctcctgaccgtgcgcctgggcacttggggccaccctgcttttccatcttgcggcaggctgaaagaggacagcaggtatatcttttttatggagcccgacgctaatagtacctctcgcgccccggccgcctttcgcgcctcatttcctcctttggagaccggaagaaacctgaagaaagaagtttcaagggtgctgtgtaaaaggtgtgccttgcctcctagactgaaggagatgaaatcgcaggagagtgctgccggctcaaaattggtgttgcgatgtgagactagctccgagtattcgagcctgaggttcaaatggtttaaaaacggaaacgaacttaataggaagaacaagccccaaaatattaaaattcagaaaaaacctgggaaatctgagctaaggattaacaaggccagtttagcagatagcggtgaatatatgtgtaaggttatcagtaaattgggaaacgactctgccagtgccaatatcacgatagtagagtcaaacgcaacttccacgtcaacaacgggaacatcccaccttgtgaagtgcgccgaaaaggagaagaccttctgcgtgaatggcggcgagtgtttcatggttaaggatctgagcaatccttctagatacttatgtaagtgcccaaatgagtttaccggggacagatgccagaactatgtgatggcatccttttattcgacatcaactcctttcttaagtctgcctgag

SEQ ID NO: 177174 - DNA, 1266 bp, Artificial Sequence
  derived and/or modified sequence
atgcggtggcggcgtgctcccaggcgctccgggcgtccaggtcccagggcccaacgacctgggtctgctgcgcgctcatctccgcctttaccattgctgcccctgctactcctactcggtaccgcagcccttgcgccgggcgccgcagcagggaatgaggcggcaccagctggcgcaagcgtgtgctactcgtcaccgccatccgtggggagtgtgcaggaattggctcagcgggccgctgttgtcatcgagggaaaagtgcacccacagcgccggcagcagggggcactcgatagaaaggccgccgcagccgcaggggaggcgggcgcatggggcggcgatagagagccccctgcagcaggtcctagggctctggggcctcctgccgaagaacctttattggctgctaatgggaccgttccgtcgtggcccaccgcaccagtgccatctgcaggagaaccaggagaagaggctccttacctggtgaaagtgcaccaagtgtgggcagtgaaggcgggcggcctaaagaaggactcactgctgacagtccgcctcggcacgtggggacatccagccttccccagttgcggtagattgaaagaagacagtcgctacatcttctttatggaacccgacgctaactctacaagtcgggcacccgccgcattccgggctagcttcccgcctcttgagactggccggaatctaaagaaggaagtgtcccgagttctttgtaagcgatgtgccctgccgcctaggctgaaggagatgaagtcccaggaatcagccgcagggtcgaaattggttcttcgctgcgaaacatcctccgagtattcaagtctgcgctttaagtggtttaaaaacggcaatgaactgaatagaaagaataagcctcagaacattaaaatacaaaagaagcccgggaagagcgagctgaggatcaacaaagcgtcactggccgattctggagagtatatgtgcaaagtgatttccaagctgggaaatgactccgccagcgctaatatcaccatagttgagtccaatgccaccagcaccagtactaccggtactagccatctcgtaaaatgcgccgaaaaggaaaaaactttttgtgttaatggcggcgaatgtttcatggtgaaagatctaagtaacccctcacgatacctgtgtaaatgcccgaatgaatttactggggacagatgccagaattacgtaatggctagcttctattccactagcactccgtttctgtctctgccagaa

SEQ ID NO: 177175 - DNA, 1266 bp, Artificial Sequence
  derived and/or modified sequence
atgcgatggcgacgagccccgcgaaggtctggcaggccaggtccccgcgcccaaaggccaggttcggcagcacgatcgtcaccacccctgcctctgttgcccctgttgttgctcctcggaacggctgccttggccccgggtgctgcggccggtaacgaggccgccccagccggtgcttctgtgtgttattcgtccccgccctccgtcggtagtgttcaggagctggcccagagagctgccgtggtgatcgaaggcaaggttcacccgcagagacgccagcaaggtgcgctggatcgcaaagccgcagccgctgccggcgaggctggtgcttggggaggggaccgtgagcctccggccgccggcccgcgcgcgctgggccctcccgcagaagaacccctgctcgccgcgaatggcactgtgccgagctggccgactgcaccagtgccctcagcaggagaaccgggcgaagaggccccatacctggtgaaggtgcaccaggtctgggcggtgaaggctggcggcctgaagaaagattcactgctgacggttaggctcggcacctggggccaccccgccttcccaagctgcgggcggctgaaggaggattctaggtatatcttttttatggaaccagacgcaaacagtaccagccgcgccccggccgcctttcgggctagcttccccccattggaaactgggcgtaatcttaaaaaggaggtatcgcgggtcctgtgcaagcgttgcgctttgccaccccgtctgaaggaaatgaaatcccaggagagtgccgcgggctcgaagctagtgctacggtgcgaaacgagttccgagtactccagccttcgttttaagtggtttaagaacggcaacgaactgaatcgaaagaacaaacctcagaatatcaaaatccagaagaagcccggaaagagcgaactacgcatcaataaggcgagcttggccgacagtggcgagtacatgtgcaaggtgatctcgaaattggggaacgattccgcttccgcgaatatcaccatagtggagagcaatgcgacgagcacctcgactactggtacgagtcatttggtaaagtgcgctgagaaggagaagaccttctgtgtgaacggcggagaatgctttatggtgaaggatctgtccaatcccagccggtacttgtgcaagtgccccaatgagtttaccggcgaccgctgtcaaaattacgtgatggcctccttctacagcacgagtaccccattcttgagtctgccggaa

SEQ ID NO: 177176 - DNA, 1266 bp, Artificial Sequence
  derived and/or modified sequence
atgcgctggaggcgggcaccaagacgctcaggtcgcccgggaccccgcgcccagagacccggcagtgcagctcgcagcagtccccccctccccctgcttccactgctgttgctgctcggcaccgctgccctcgcacctggcgccgccgccggcaacgaagccgcacccgccggtgctagtgtgtgctattcttcacctccgtctgttggttctgttcaggagctcgcacagcgtgccgctgtggttatcgaaggtaaggtgcacccacagaggcgccagcagggggctcttgacaggaaggccgcagcagctgcgggcgaagccggtgcttggggaggggaccgcgaacctccagccgctgggcctagggcgctgggaccacccgccgaagaaccactgcttgcagccaacggtacagtgccttcatggcctactgccccggttccaagtgccggcgaacctggcgaggaggccccctatttggtgaaggtgcatcaggtatgggcggtgaaggctgggggattgaagaaggattccctgttgacggtgaggctgggtacctggggacatcctgctttccctagctgtggcagactgaaggaagatagcagatatatcttcttcatggagcccgacgctaatagcactagcagagctccggcggccttccgagcaagctttccaccactggagactggacggaacttaaagaaggaggttagccgagtgctgtgcaagcgatgtgctttgccaccccgcctgaaggagatgaaaagtcaggaaagcgcagctggatcaaaactggtcttacgatgtgaaacctcgtcagaatactcctccctccggtttaagtggtttaagaacgggaacgaacttaatagaaaaaacaaaccgcagaatatcaagatccagaagaagccagggaaatctgagctgcggatcaacaaagcttctctggcagattccggcgaatatatgtgcaaagtgatatctaaactcggcaatgatagtgccagcgccaacatcactatcgttgaatcaaacgccacctcaaccagcacaaccggaacctctcacctggtcaagtgcgctgaaaaagagaagacgttctgcgtcaacgggggcgaatgttttatggtgaaggacttgtcaaatccatctaggtatctgtgcaagtgtcccaatgagttcactggggacagatgccagaattacgtgatggcctcattttacagcacttcgacgccgttcttgtccctccccgaa

SEQ ID NO: 177177 - DNA, 1269 bp, Artificial Sequence
  derived and/or modified sequence
atgagatggagaagagcccccagaagaagcggcagacccggccccagagcccagagacccggcagcgccgccagaagcagcccccccctgcccctgctgcccctgctgctgctgctgggcaccgccgccctggcccccggcgccgccgccggcaacgaggccgcccccgccggcgccagcgtgtgctacagcagcccccccagcgtgggcagcgtgcaggagctggcccagagagccgccgtggtgatcgagggcaaggtgcacccccagagaagacagcagggcgccctggacagaaaggccgccgccgccgccggcgaggccggcgcctggggcggcgacagagagccccccgccgccggccccagagccctgggcccccccgccgaggagcccctgctggccgccaacggcaccgtgcccagctggcccaccgcccccgtgcccagcgccggcgagcccggcgaggaggccccctacctggtgaaggtgcaccaggtgtgggccgtgaaggccggcggcctgaagaaggacagcctgctgaccgtgagactgggcacctggggccaccccgccttccccagctgcggcagactgaaggaggacagcagatacatcttcttcatggagcccgacgccaacagcaccagcagagcccccgccgccttcagagccagcttcccccccctggagaccggcagaaacctgaagaaggaggtgagcagagtgctgtgcaagagatgcgccctgccccccagactgaaggagatgaagagccaggagagcgccgccggcagcaagctggtgctgagatgcgagaccagcagcgagtacagcagcctgagattcaagtggttcaagaacggcaacgagctgaacagaaagaacaagccccagaacatcaagatccagaagaagcccggcaagagcgagctgagaatcaacaaggccagcctggccgacagcggcgagtacatgtgcaaggtgatcagcaagctgggcaacgacagcgccagcgccaacatcaccatcgtggagagcaacgccaccagcaccagcaccaccggcaccagccacctggtgaagtgcgccgagaaggagaagaccttctgcgtgaacggcggcgagtgcttcatggtgaaggacctgagcaaccccagcagatacctgtgcaagtgccccaacgagttcaccggcgacagatgccagaactacgtgatggccagcttctacagcaccagcacccccttcctgagcctgcccgagtag

SEQ ID NO: 177178 - DNA, 1269 bp, Artificial Sequence
  derived and/or modified sequence
atgaggtggcgccgggctccaagaaggtctggacgccccggtcctcgtgcacagaggcctggctcggccgcgcggtcttcgcctcccctgccgcttctgccactgttgctcttgctcgggacagccgccctggcgcctggcgcagccgcaggaaacgaagcagccccggccggcgcctccgtgtgctacagcagccctcctagcgttgggtccgtgcaagaactggcccaacgcgctgcggtcgtgattgaggggaaggtacaccctcagcggaggcagcagggcgcacttgacagaaaggccgccgctgccgccggggaagccggcgcatggggcggcgatcgggaaccccccgccgcaggccctagggcattgggcccccccgccgaggaacccttactggccgcgaatggcaccgtgccatcctggcccacagcgcccgtcccctctgcgggagaacctggagaggaagccccctatcttgtgaaagtacatcaggtctgggccgtgaaggccggaggcctcaagaaagactctctgttgactgtcaggctaggcacatggggacacccagcgtttccatcttgtgggaggcttaaagaagatagcaggtacattttttttatggaacccgatgctaatagtacaagccgggctcccgcggccttccgtgcgtccttcccccccctcgagaccggcaggaatctgaagaaagaagtgagcagggttctgtgcaagcgctgtgcacttcctccgaggctgaaggaaatgaaatcccaggagtccgcagctggttccaagttggtcctccgctgtgaaacaagttccgagtatagttcgctccggttcaaatggtttaagaacgggaacgaactgaataggaagaacaaaccccaaaacataaagatccagaaaaaacccggcaagtcggaactcaggatcaacaaagcttccctggccgacagcggggaatacatgtgtaaggttatctctaaactcggcaatgactctgcttctgccaatataacaatcgttgaatccaatgcgacatcaacgtcaacaacaggcacctctcacctggtgaaatgcgcggaaaaagaaaagacattctgcgttaatggcggcgaatgctttatggtcaaagatctgtctaacccctccaggtatctgtgtaagtgtccaaatgagtttacaggtgatagatgccagaactatgttatggcctctttctattctacctctaccccctttctttcactgccggaatag

SEQ ID NO: 177179 - DNA, 1269 bp, Artificial Sequence
  derived and/or modified sequence
atgcgctggaggcgggccccccggcgcagcggccggcccggcccccgggcccagaggcctggcagcgctgcccggagcagcccccccctgcccctgctgcccctgctgctgctgctgggcacagctgccctggcccctggagctgctgctggaaatgaggccgccccagctggggcctctgtgtgctacagcagcccccccagcgtgggctctgtgcaggagctggcccagagagctgctgtggtgattgagggcaaggtgcacccccagaggcggcagcagggcgccctggacaggaaggctgctgctgctgctggggaggccggggcctggggcggggaccgggagcccccagctgctggcccccgggccctgggccccccagctgaggagcccctgctggccgccaatggaacagtgcccagctggcccacagcccctgtgcccagcgctggggagcccggggaggaggccccctacctggtgaaggtgcaccaggtgtgggccgtgaaggccggcggcctgaagaaggacagcctgctgactgtgcggctgggcacctggggccacccagccttccccagctgtggccgcctgaaggaggacagccgctacatcttcttcatggagccagatgccaacagcaccagccgggccccagctgccttccgggccagcttcccccccctggagaccggcaggaacctgaagaaggaggtgtcccgggtgctgtgcaagagatgtgccctgcccccccggctgaaggagatgaagagccaggagagcgctgctggcagcaagctggtgctgcgctgtgagaccagcagcgagtacagcagcctgcgcttcaagtggttcaagaatggaaatgagctgaacaggaagaacaagccccagaacatcaagatccagaagaagccaggcaagtctgagctgcgcatcaacaaggccagcctggccgacagcggggagtacatgtgcaaggtgatcagcaagctgggcaatgattctgccagcgccaacatcaccatcgtggagagcaatgccaccagcaccagcaccaccggcaccagccacctggtgaagtgtgccgagaaggagaagaccttctgtgtgaatggaggagagtgcttcatggtgaaggacctgagcaaccccagccgctacctgtgcaagtgccccaatgagttcaccggggaccgctgccagaactacgtgatggccagcttctacagcaccagcacccccttcctgagcctgcctgagtag

SEQ ID NO: 177180 - DNA, 1269 bp, Artificial Sequence
  derived and/or modified sequence
atgcggtggcggcgggccccccggcggagcggccggcccggcccccgcgcacagcgacccgggagcgcagccaggtcttctccacccctgccattacttccccttctcctcctccttggaactgcggccctggcccccggagccgcagccggaaatgaggccgccccggccggggcgagcgtttgttattcttcacccccatcagttggtagcgtgcaggagctggctcagcgggctgctgtggtcatcgagggtaaggtccacccgcagcgcaggcaacagggagcccttgacaggaaagccgccgccgccgccggcgaggcgggcgcttgggggggcgacagagaacctccggctgcaggtcctagagctttggggcctccagcagaagaacctctgctggccgcaaacggaacagtgcctagctggcccaccgctccagtcccaagcgccggagagcccggtgaggaagccccctatctagtgaaagttcatcaagtgtgggccgtcaaagcgggcggcctgaaaaaagacagtttacttaccgtacggcttggaacatggggacaccctgcattccctagctgtggccgcctgaaggaggactcacggtacattttcttcatggagcccgacgccaactctacgagcagggctccagccgccttcagggcttctttccccccgctggagacagggcgcaacttaaagaaagaggtgagtcgggttctctgcaagagatgtgcgcttccacccaggctgaaggagatgaagtcacaggaatccgccgcaggctccaagctcgtcctgcgttgtgaaaccagctcagaatatagtagcctgcgctttaagtggttcaagaatggaaacgaactgaacagaaagaataaaccacagaacattaagattcagaaaaaaccaggaaagtccgagttgaggataaataaagctagtctggccgactccggagagtatatgtgtaaagtgattagcaaattaggaaatgattctgcctctgcaaatatcaccatcgtggaatcaaacgctacatcgacaagcaccacaggaaccagccacctggtgaagtgcgccgagaaggagaaaactttttgcgttaatggcggggagtgctttatggtcaaggatttgtcaaatcccagtcgttacctgtgtaagtgccctaatgagtttactggagaccgatgtcaaaactatgtgatggcatcattttattccacatcaactcccttccttagtctgcccgaatag

SEQ ID NO: 177181 - DNA, 1269 bp, Artificial Sequence
  derived and/or modified sequence
atgaggtggagacgtgcaccaagaaggtcgggaaggccagggccacgggcacagcgccctggttctgccgcacgcagcagtcccccactgcccctgctccccctcctactgctgctgggaactgctgccctggcaccaggcgctgcagccggaaacgaggctgcacccgcaggggcttccgtttgctactcaagcccaccatccgtgggctccgtccaggagttagcccagcgcgcagccgtggtaattgagggaaaggtccatcctcagagacgccaacaaggagcactcgaccgaaaggctgccgctgccgcaggagaggctggagcatgggggggagatagggaaccacccgctgctggccctagggcccttggcccacctgctgaagaacccctacttgccgctaacggaactgtgccttcctggcctactgctccggtgcccagtgccggagagcccggtgaggaggccccatacctggtgaaagtgcatcaggtgtgggctgtgaaagccggtggattaaagaaggatagcctgctcactgtgaggttggggacatggggccatcccgcttttccatcgtgtgggcgactcaaggaagacagccgctatatattttttatggagccagacgcaaattccacatctcgcgctcccgctgcttttcgagctagcttcccaccgctggaaaccggacgaaacttaaagaaggaagtgtctagagtgctgtgcaaacggtgcgcattgccccctcggttgaaggagatgaaaagccaggagtccgcagctggctcaaaactggtcctccggtgcgagactagtagcgagtacagcagtctgcgattcaagtggttcaaaaatgggaatgagcttaacaggaagaacaaacctcagaacatcaaaattcagaaaaagcctggcaagtcggagcttcgcattaataaagcctctctagccgactcaggagaatatatgtgtaaagtgatctccaaacttgggaatgatagtgctagtgccaacattacaatcgtggagtcaaatgcaactagcactagcactaccggtacatctcatctcgtgaaatgcgcagagaaagagaagaccttttgtgtgaatggaggagagtgcttcatggttaaagacctgagcaacccgagtcggtacctgtgcaagtgtcctaatgaatttaccggggaccggtgtcagaattatgttatggcctccttttatagtacctccactccatttttgagcctcccggagtag

SEQ ID NO: 177182 - DNA, 1955 bp, Artificial Sequence
  derived and/or modified sequence
ttttttttgcccttatacctcttcgcctttctgtggttccatccacttcttccccctcctcctcccataaacaactctcctacccctgcacccccaataaataaataaaaggaggagggcaaggggggaggaggaggagtggtgctgcgaggggaaggaaaagggaggcagcgcgagagagccgggcagagtccgaaccgacagccagaagcccgcacgcacctcgcaccatgagatggcgacgcgccccgcgccgctccgggcgtcccggcccccgggcccagcgccccggctccgccgcccgctcgtcgccgccgctgccgctgctgccactactgctgctgctggggaccgcggccctggcgccgggggcggcggccggcaacgaggcggctcccgcgggggcctcggtgtgctactcgtccccgcccagcgtgggatcggtgcaggagctagctcagcgcgccgcggtggtgatcgagggaaaggtgcacccgcagcggcggcagcagggggcactcgacaggaaggcggcggcggcggcgggcgaggcaggggcgtggggcggcgatcgcgagccgccagccgcgggcccacgggcgctggggccgcccgccgaggagccgctgctcgccgccaacgggaccgtgccctcttggcccaccgccccggtgcccagcgccggcgagcccggggaggaggcgccctatctggtgaaggtgcaccaggtgtgggcggtgaaagccgggggcttgaagaaggactcgctgctcaccgtgcgcctggggacctggggccaccccgccttcccctcctgcgggaggctcaaggaggacagcaggtacatcttcttcatggagcccgacgccaacagcaccagccgcgcgccggccgccttccgagcctctttcccccctctggagacgggccggaacctcaagaaggaggtcagccgggtgctgtgcaagcggtgcgccttgcctccccgattgaaagagatgaaaagccaggaatcggctgcaggttccaaactagtccttcggtgtgaaaccagttctgaatactcctctctcagattcaagtggttcaagaatgggaatgaattgaatcgaaaaaacaaaccacaaaatatcaagatacaaaaaaagccagggaagtcagaacttcgcattaacaaagcatcactggctgattctggagagtatatgtgcaaagtgatcagcaaattaggaaatgacagtgcctctgccaatatcaccatcgtggaatcaaacgctacatctacatccaccactgggacaagccatcttgtaaaatgtgcggagaaggagaaaactttctgtgtgaatggaggggagtgcttcatggtgaaagacctttcaaacccctcgagatacttgtgcaagtgcccaaatgagtttactggtgatcgctgccaaaactacgtaatggccagcttctacagtacgtccactccctttctgtctctgcctgaataggagcatgctcagttggtgctgctttcttgttgctgcatctcccctcagattccacctagagctagatgtgtcttaccagatctaatattgactgcctctgcctgtcgcatgagaacattaacaaaagcaattgtattacttcctctgttcgcgactagttggctctgagatactaataggtgtgtgaggctccggatgtttctggaattgatattgaatgatgtgatacaaattgatagtcaatatcaagcagtgaaatatgataataaaggcatttcaaagtctcacttttattgataaaataaaaatcattctactgaacagtccatcttctttatacaatgaccacatcctgaaaagggtgttgctaagctgtaaccgatatgcacttgaaatgatggtaagttaattttgattcagaatgtgttatttgtcacaaataaacataataaaagg

SEQ ID NO: 177183 - protein, 640 aa, Artificial Sequence
  derived and/or modified sequence
MSERKEGRGKGKGKKKERGSGKKPESAAGSQSPALPPRLKEMKSQESAAGSKLVLRCETSSEYSSLRFKWFKNGNELNRKNKPQNIKIQKKPGKSELRINKASLADSGEYMCKVISKLGNDSASANITIVESNEIITGMPASTEGAYVSSESPIRISVSTEGANTSSSTSTSTTGTSHLVKCAEKEKTFCVNGGECFMVKDLSNPSRYLCKCQPGFTGARCTENVPMKVQNQEKAEELYQKRVLTITGICIALLVVGIMCVVAYCKTKKQRKKLHDRLRQSLRSERNNMMNIANGPHHPNPPPENVQLVNQYVSKNVISSEHIVEREAETSFSTSHYTSTAHHSTTVTQTPSHSWSNGHTESILSESHSVIVMSSVENSRHSSPTGGPRGRLNGTGGPRECNSFLRHARETPDSYRDSPHSERYVSAMTTPARMSPVDFHTPSSPKSPPSEMSPPVSSMTVSMPSMAVSPFMEEERPLLLVTPPRLREKKFDHHPQQFSSFHHNPAHDSNSLPASPLRIVEDEEYETTQEYEPAQEPVKKLANSRRAKRTKPNGHIANRLEVDSNTSSQSSNSESETEDERVGEDTPFLGIQNPLAASLEATPAFRLADSRTNPAGRFSTQEEIQARLSSVIANQDPIAV

SEQ ID NO: 177184 - protein, 648 aa, Artificial Sequence
  derived and/or modified sequence
MSERKEGRGKGKGKKKERGSGKKPESAAGSQSPALPPRLKEMKSQESAAGSKLVLRCETSSEYSSLRFKWFKNGNELNRKNKPQNIKIQKKPGKSELRINKASLADSGEYMCKVISKLGNDSASANITIVESNEIITGMPASTEGAYVSSESPIRISVSTEGANTSSSTSTSTTGTSHLVKCAEKEKTFCVNGGECFMVKDLSNPSRYLCKCQPGFTGARCTENVPMKVQNQEKHSGEPFPEAEELYQKRVLTITGICIALLVVGIMCVVAYCKTKKQRKKLHDRLRQSLRSERNNMMNIANGPHHPNPPPENVQLVNQYVSKNVISSEHIVEREAETSFSTSHYTSTAHHSTTVTQTPSHSWSNGHTESILSESHSVIVMSSVENSRHSSPTGGPRGRLNGTGGPRECNSFLRHARETPDSYRDSPHSERYVSAMTTPARMSPVDFHTPSSPKSPPSEMSPPVSSMTVSMPSMAVSPFMEEERPLLLVTPPRLREKKFDHHPQQFSSFHHNPAHDSNSLPASPLRIVEDEEYETTQEYEPAQEPVKKLANSRRAKRTKPNGHIANRLEVDSNTSSQSSNSESETEDERVGEDTPFLGIQNPLAASLEATPAFRLADSRTNPAGRFSTQEEIQARLSSVIANQDPIAV

SEQ ID NO: 177185 - protein, 247 aa, Artificial Sequence
  derived and/or modified sequence
MSERKEGRGKGKGKKKERGSGKKPESAAGSQSPALPPRLKEMKSQESAAGSKLVLRCETSSEYSSLRFKWFKNGNELNRKNKPQNIKIQKKPGKSELRINKASLADSGEYMCKVISKLGNDSASANITIVESNEIITGMPASTEGAYVSSESPIRISVSTEGANTSSSTSTSTTGTSHLVKCAEKEKTFCVNGGECFMVKDLSNPSRYLCKCQPGFTGARCTENVPMKVQNQESAQMSLLVIAAKTT

SEQ ID NO: 177186 - DNA, 3078 bp, Artificial Sequence
  derived and/or modified sequence
gaggccaggggagggtgcgaaggaggcgcctgcctccaacctgcgggcgggaggtgggtggctgcggggcaattgaaaaagagccggcgaggagttccccgaaacttgttggaactccgggctcgcgcggaggccaggagctgagcggcggcggctgccggacgatgggagcgtgagcaggacggtgataacctctccccgatcgggttgcgagggcgccgggcagaggccaggacgcgagccgccagcggtgggacccatcgacgacttcccggggcgacaggagcagccccgagagccagggcgagcgcccgttccaggtggccggaccgcccgccgcgtccgcgccgcgctccctgcaggcaacgggagacgcccccgcgcagcgcgagcgcctcagcgcggccgctcgctctccccctcgagggacaaacttttcccaaacccgatccgagcccttggaccaaactcgcctgcgccgagagccgtccgcgtagagcgctccgtctccggcgagatgtccgagcgcaaagaaggcagaggcaaagggaagggcaagaagaaggagcgaggctccggcaagaagccggagtccgcggcgggcagccagagcccagccttgcctccccgattgaaagagatgaaaagccaggaatcggctgcaggttccaaactagtccttcggtgtgaaaccagttctgaatactcctctctcagattcaagtggttcaagaatgggaatgaattgaatcgaaaaaacaaaccacaaaatatcaagatacaaaaaaagccagggaagtcagaacttcgcattaacaaagcatcactggctgattctggagagtatatgtgcaaagtgatcagcaaattaggaaatgacagtgcctctgccaatatcaccatcgtggaatcaaacgagatcatcactggtatgccagcctcaactgaaggagcatatgtgtcttcagagtctcccattagaatatcagtatccacagaaggagcaaatacttcttcatctacatctacatccaccactgggacaagccatcttgtaaaatgtgcggagaaggagaaaactttctgtgtgaatggaggggagtgcttcatggtgaaagacctttcaaacccctcgagatacttgtgcaagtgccaacctggattcactggagcaagatgtactgagaatgtgcccatgaaagtccaaaaccaagaaaaggcggaggagctgtaccagaagagagtgctgaccataaccggcatctgcatcgccctccttgtggtcggcatcatgtgtgtggtggcctactgcaaaaccaagaaacagcggaaaaagctgcatgaccgtcttcggcagagccttcggtctgaacgaaacaatatgatgaacattgccaatgggcctcaccatcctaacccaccccccgagaatgtccagctggtgaatcaatacgtatctaaaaacgtcatctccagtgagcatattgttgagagagaagcagagacatccttttccaccagtcactatacttccacagcccatcactccactactgtcacccagactcctagccacagctggagcaacggacacactgaaagcatcctttccgaaagccactctgtaatcgtgatgtcatccgtagaaaacagtaggcacagcagcccaactgggggcccaagaggacgtcttaatggcacaggaggccctcgtgaatgtaacagcttcctcaggcatgccagagaaacccctgattcctaccgagactctcctcatagtgaaaggtatgtgtcagccatgaccaccccggctcgtatgtcacctgtagatttccacacgccaagctcccccaaatcgcccccttcggaaatgtctccacccgtgtccagcatgacggtgtccatgccttccatggcggtcagccccttcatggaagaagagagacctctacttctcgtgacaccaccaaggctgcgggagaagaagtttgaccatcaccctcagcagttcagctccttccaccacaaccccgcgcatgacagtaacagcctccctgctagccccttgaggatagtggaggatgaggagtatgaaacgacccaagagtacgagccagcccaagagcctgttaagaaactcgccaatagccggcgggccaaaagaaccaagcccaatggccacattgctaacagattggaagtggacagcaacacaagctcccagagcagtaactcagagagtgaaacagaagatgaaagagtaggtgaagatacgcctttcctgggcatacagaaccccctggcagccagtcttgaggcaacacctgccttccgcctggctgacagcaggactaacccagcaggccgcttctcgacacaggaagaaatccaggccaggctgtctagtgtaattgctaaccaagaccctattgctgtataaaacctaaataaacacatagattcacctgtaaaactttattttatataataaagtattccaccttaaattaaacaatttattttattttagcagttctgcaaatagaaaacaggaaaaaaacttttataaattaaatatatgtatgtaaaaatgtgttatgtgccatatgtagcaattttttacagtatttcaaaacgagaaagatatcaatggtgcctttatgttatgttatgtcgagagcaagttttgtacagttacagtgattgcttttccacagtatttctgcaaaacctctcatagattcagtttttgctggcttcttgtgcattgcattatgatgttgactggatgtatgatttgcaagacttgcaactgtccctctgtttgcttgtagtagcacccgatcagtatgtcttgtaatggcacatccatccagatatgcctctcttgtgtatgaagttttctttgctttcagaatatgaaatgagttgtgtctactctgccagccaaaggtttgcctcattgggctctgagataatagtagatccaacagcatgctactattaaatacagcaagaaactgcattaagtaatgttaaatattaggaagaaagtaatactgtgatttaaaaaaaact

SEQ ID NO: 177187 - DNA, 1923 bp, Artificial Sequence
  derived and/or modified sequence
atgagcgagagaaaggagggcagaggcaagggcaagggcaagaagaaggagagaggcagcggcaagaagcccgagagcgccgccggcagccagagccccgccctgccccccagactgaaggagatgaagagccaggagagcgccgccggcagcaagctggtgctgagatgcgagaccagcagcgagtacagcagcctgagattcaagtggttcaagaacggcaacgagctgaacagaaagaacaagccccagaacatcaagatccagaagaagcccggcaagagcgagctgagaatcaacaaggccagcctggccgacagcggcgagtacatgtgcaaggtgatcagcaagctgggcaacgacagcgccagcgccaacatcaccatcgtggagagcaacgagatcatcaccggcatgcccgccagcaccgagggcgcctacgtgagcagcgagagccccatcagaatcagcgtgagcaccgagggcgccaacaccagcagcagcaccagcaccagcaccaccggcaccagccacctggtgaagtgcgccgagaaggagaagaccttctgcgtgaacggcggcgagtgcttcatggtgaaggacctgagcaaccccagcagatacctgtgcaagtgccagcccggcttcaccggcgccagatgcaccgagaacgtgcccatgaaggtgcagaaccaggagaaggccgaggagctgtaccagaagagagtgctgaccatcaccggcatctgcatcgccctgctggtggtgggcatcatgtgcgtggtggcctactgcaagaccaagaagcagagaaagaagctgcacgacagactgagacagagcctgagaagcgagagaaacaacatgatgaacatcgccaacggcccccaccaccccaaccccccccccgagaacgtgcagctggtgaaccagtacgtgagcaagaacgtgatcagcagcgagcacatcgtggagagagaggccgagaccagcttcagcaccagccactacaccagcaccgcccaccacagcaccaccgtgacccagacccccagccacagctggagcaacggccacaccgagagcatcctgagcgagagccacagcgtgatcgtgatgagcagcgtggagaacagcagacacagcagccccaccggcggccccagaggcagactgaacggcaccggcggccccagagagtgcaacagcttcctgagacacgccagagagacccccgacagctacagagacagcccccacagcgagagatacgtgagcgccatgaccacccccgccagaatgagccccgtggacttccacacccccagcagccccaagagcccccccagcgagatgagcccccccgtgagcagcatgaccgtgagcatgcccagcatggccgtgagccccttcatggaggaggagagacccctgctgctggtgaccccccccagactgagagagaagaagttcgaccaccacccccagcagttcagcagcttccaccacaaccccgcccacgacagcaacagcctgcccgccagccccctgagaatcgtggaggacgaggagtacgagaccacccaggagtacgagcccgcccaggagcccgtgaagaagctggccaacagcagaagagccaagagaaccaagcccaacggccacatcgccaacagactggaggtggacagcaacaccagcagccagagcagcaacagcgagagcgagaccgaggacgagagagtgggcgaggacacccccttcctgggcatccagaaccccctggccgccagcctggaggccacccccgccttcagactggccgacagcagaaccaaccccgccggcagattcagcacccaggaggagatccaggccagactgagcagcgtgatcgccaaccaggaccccatcgccgtgtag

SEQ ID NO: 177188 - DNA, 1947 bp, Artificial Sequence
  derived and/or modified sequence
atgagcgagagaaaggagggcagaggcaagggcaagggcaagaagaaggagagaggcagcggcaagaagcccgagagcgccgccggcagccagagccccgccctgccccccagactgaaggagatgaagagccaggagagcgccgccggcagcaagctggtgctgagatgcgagaccagcagcgagtacagcagcctgagattcaagtggttcaagaacggcaacgagctgaacagaaagaacaagccccagaacatcaagatccagaagaagcccggcaagagcgagctgagaatcaacaaggccagcctggccgacagcggcgagtacatgtgcaaggtgatcagcaagctgggcaacgacagcgccagcgccaacatcaccatcgtggagagcaacgagatcatcaccggcatgcccgccagcaccgagggcgcctacgtgagcagcgagagccccatcagaatcagcgtgagcaccgagggcgccaacaccagcagcagcaccagcaccagcaccaccggcaccagccacctggtgaagtgcgccgagaaggagaagaccttctgcgtgaacggcggcgagtgcttcatggtgaaggacctgagcaaccccagcagatacctgtgcaagtgccagcccggcttcaccggcgccagatgcaccgagaacgtgcccatgaaggtgcagaaccaggagaagcacagcggcgagcccttccccgaggccgaggagctgtaccagaagagagtgctgaccatcaccggcatctgcatcgccctgctggtggtgggcatcatgtgcgtggtggcctactgcaagaccaagaagcagagaaagaagctgcacgacagactgagacagagcctgagaagcgagagaaacaacatgatgaacatcgccaacggcccccaccaccccaaccccccccccgagaacgtgcagctggtgaaccagtacgtgagcaagaacgtgatcagcagcgagcacatcgtggagagagaggccgagaccagcttcagcaccagccactacaccagcaccgcccaccacagcaccaccgtgacccagacccccagccacagctggagcaacggccacaccgagagcatcctgagcgagagccacagcgtgatcgtgatgagcagcgtggagaacagcagacacagcagccccaccggcggccccagaggcagactgaacggcaccggcggccccagagagtgcaacagcttcctgagacacgccagagagacccccgacagctacagagacagcccccacagcgagagatacgtgagcgccatgaccacccccgccagaatgagccccgtggacttccacacccccagcagccccaagagcccccccagcgagatgagcccccccgtgagcagcatgaccgtgagcatgcccagcatggccgtgagccccttcatggaggaggagagacccctgctgctggtgaccccccccagactgagagagaagaagttcgaccaccacccccagcagttcagcagcttccaccacaaccccgcccacgacagcaacagcctgcccgccagccccctgagaatcgtggaggacgaggagtacgagaccacccaggagtacgagcccgcccaggagcccgtgaagaagctggccaacagcagaagagccaagagaaccaagcccaacggccacatcgccaacagactggaggtggacagcaacaccagcagccagagcagcaacagcgagagcgagaccgaggacgagagagtgggcgaggacacccccttcctgggcatccagaaccccctggccgccagcctggaggccacccccgccttcagactggccgacagcagaaccaaccccgccggcagattcagcacccaggaggagatccaggccagactgagcagcgtgatcgccaaccaggaccccatcgccgtgtag

SEQ ID NO: 177189 - DNA, 1923 bp, Artificial Sequence
  derived and/or modified sequence
atgagcgagcggaaagaaggacgcgggaaggggaaggggaagaagaaagagaggggttctggtaagaagcccgagtctgcggccggtagccagagtcccgcattaccaccacggcttaaagagatgaagtctcaggagtccgctgccggaagtaagctagtgctgcgttgtgagaccagctccgagtatagttctctgagatttaagtggtttaaaaacgggaacgagttgaatcggaagaacaagccacagaacatcaagatccagaaaaagcccggtaagtcagagctcaggattaacaaagccagcctggccgactcaggggagtatatgtgcaaagtcatcagtaagctcgggaacgattcagcaagtgccaacataaccatcgtcgaaagcaatgaaattataaccgggatgcccgccagcaccgaaggtgcctatgtatcttcagaatcgcccatcaggattagtgttagtaccgagggcgctaacaccagcagttcaacctccacatctactactgggacttctcacttagttaagtgcgccgagaaagaaaagacgttctgtgtaaatggaggggagtgttttatggtcaaagacctgtccaacccgagtcgttacctgtgcaagtgccagcctggtttcactggtgcacgctgcacggaaaacgtccccatgaaggtccagaatcaggagaaggccgaagaactgtatcagaagcgggtgctgactattacgggcatctgtatcgcgcttcttgttgtgggcatcatgtgcgtcgtggcttattgtaagacgaagaagcaacgcaaaaagctgcacgacaggctgcgacagtcactgcggtcagagagaaacaatatgatgaatatcgcgaacgggccacaccaccctaatccaccccctgaaaatgtgcagctcgtgaatcagtacgtgtccaaaaacgttatctctagcgaacatatcgtggaacgagaggctgaaacatccttctccacctcacattatacttctaccgcccatcattccacaacagtaactcagaccccatcgcactcctggtctaacggccatactgagtctatcctaagcgagagccactcagtgatcgtgatgtcctccgtggagaactctcggcacagttctcccacggggggccccagagggcgactaaacggaaccggcggccctcgcgagtgcaactcctttctgagacatgccagagagacccccgactcgtatcgcgatagtccccatagtgagcggtacgtgtccgccatgactacgcctgccagaatgtcaccagtggatttccacactccatcgtcccctaagtctccaccgagcgagatgtctccaccggttagtagtatgacagtgtctatgccatccatggctgtgagtccctttatggaggaggaacggccactgctgttagtgacccccccacggcttagggagaagaaattcgaccaccatccccagcaattcagctctttccatcataatcctgcccacgactctaactccctgcctgctagcccactcagaatcgtcgaggacgaggagtacgagaccacccaagagtatgaaccagcccaggaacctgtgaagaagttagctaattccaggcgtgccaagagaaccaaaccaaatgggcatatcgcaaacaggcttgaggtggactcaaacactagctcccagagttctaacagcgagtccgagaccgaagatgaaagagtgggcgaggatactcccttcctgggaatccaaaaccccttagcggccagcctggaagctacgccggccttcagactggccgactcacgaacaaaccccgccggtcgcttctcaacccaggaggaaattcaggcccgcctgagcagtgtgatagccaaccaagaccctattgccgtgtag

SEQ ID NO: 177190 - DNA, 1947 bp, Artificial Sequence
  derived and/or modified sequence
atgagtgagaggaaggaaggtcggggaaagggcaaaggcaagaaaaaggaacgcgggtcaggcaaaaaacccgaatctgctgcaggcagccagtcgcctgccctgccgccgcgactgaaggaaatgaaatctcaggaatctgcagctggtagtaaacttgtgctgagatgcgaaacctcctcggaatactcctctcttaggtttaaatggtttaaaaatggaaatgagttgaaccgcaagaataagccccagaatatcaagatccagaagaaaccaggaaaaagtgaactcagaataaacaaagcctcccttgcagattctggggagtacatgtgcaaggttatttctaaactaggcaatgactcagcgtctgcaaatatcacaatagtggagagtaatgagatcatcacaggcatgcccgctagtaccgaaggcgcttatgtctcgtccgagtcaccaatcaggatctcagtttccacggaaggcgccaatacaagcagttccacttccacctcaacgactggaacctcacatctggttaagtgtgcagagaaggagaagactttctgcgtgaacggaggggaatgcttcatggtcaaggacctgagtaacccctctagatacttgtgtaaatgccaaccaggctttacaggcgctcgttgtactgaaaatgtgccaatgaaagtccagaatcaggaaaaacacagtggtgagccattccccgaggctgaggagctctatcagaagagagtcctgactataaccggcatctgcattgccttactggtggtggggatcatgtgtgtagtcgcctactgcaaaaccaaaaagcagcgcaagaaattgcatgacagattgcggcagagtctccggtcagagcggaataatatgatgaacattgctaacggaccgcatcacccaaatcccccgccagaaaacgtacaactcgtgaatcagtacgtttctaaaaatgtgatttcctctgagcatattgtcgaaagggaggctgaaacctctttttcaacaagtcattatacatcgaccgctcatcactcaaccaccgtcacgcagactccttcccacagttggtctaatggacatacagaaagtatattgagcgagtcccactctgtgatcgtgatgtcgagtgttgagaactcacgccactcatctcccactggaggtcccagaggccggcttaatggcacaggaggtccaagggaatgcaactccttccttaggcacgcgcgggaaactccagacagttaccgagacagcccccactctgagcgctacgtatccgctatgacaacgcccgcccgaatgagcccggtggactttcatactcctagttctccaaaatcgcctccatctgaaatgtctcctcccgtatcaagtatgaccgtttccatgccgtcaatggctgtgtccccttttatggaggaggaaaggccattgctcctggtcacgcctccccgcctgagagagaaaaagttcgatcaccatcctcagcaattttccagcttccatcacaatccagctcacgatagcaacagtcttcctgcaagcccattgcgcattgtggaggatgaagagtatgaaactacacaagagtatgaacccgcgcaggaaccggtgaaaaagctggccaattctcgtcgcgctaagaggacgaagcccaacggacacatcgcaaaccgtctggaggtggactcgaacacttcatcccagagttcgaacagcgaatccgagacagaggacgagcgcgtgggagaagacaccccttttctcggcattcagaatcctcttgctgcttcacttgaagcaactccggcctttcgtctggcagatagcaggactaatccggcggggcgcttctctacccaggaggagatccaggctcggctatcatctgtgatagctaatcaggatcctattgcggtgtag

SEQ ID NO: 177191 - DNA, 1923 bp, Artificial Sequence
  derived and/or modified sequence
atgtccgaaaggaaggagggcagaggtaagggaaagggaaagaagaaagaacgaggttccggtaagaagcccgagagtgccgccggctcgcagtcccccgccctgccaccacgcctgaaggaaatgaagtcccaagagtccgctgcgggcagcaagcttgtgctccggtgcgagaccagcagcgaatactcaagccttcgcttcaagtggtttaaaaacgggaatgaactgaaccgcaaaaataaacctcaaaatatcaagattcagaagaagccaggcaagtccgagttaagaatcaacaaagcatcattggctgacagtggagaatacatgtgtaaagtgattagcaagctgggcaacgactccgcctccgcgaacatcactatcgtagagtcaaacgagatcataactggcatgccagcctcgacagagggggcctatgtgtcaagcgagtcaccaatcaggatttctgtcagcactgagggtgccaacacaagtagctctaccagtacctccacgactgggaccagtcacctcgtgaagtgcgccgagaaggagaaaactttctgcgtcaatggcggcgagtgctttatggttaaggatcttagcaacccgtctaggtatctttgtaaatgtcagcccggattcaccggagctcggtgtacagaaaacgtccccatgaaagtacagaaccaagaaaaagctgaggagctataccaaaagcgcgtcctgaccattacagggatctgcattgcactgttagtggttgggattatgtgtgtggtggcttattgcaaaaccaagaagcagaggaaaaaactccatgataggctgcgccagtcattaagatcagagcggaacaacatgatgaatatcgcaaatgggccacaccaccctaatccaccacccgaaaatgtacagctcgtcaatcagtatgtctccaaaaatgtgatctcttccgagcacatagttgagcgagaggccgagacgtccttctcaacttctcactacacgtcaacggcccatcattccacaactgtcacacagaccccctctcactcttggtcgaatggccatacagagtccattctgagcgaatcccactccgtgattgtgatgtcaagcgtggagaactcacgacacagctcccccacgggcggtccccgcggtagactgaacggaaccggaggtcctcgggaatgcaactcatttctgaggcacgcccgcgaaacacccgatagttaccgagacagtccacattcagagcgatacgtcagcgctatgaccacacctgccaggatgagtcccgtggactttcacactcccagctccccaaagtctccaccctctgaaatgtcgccgccagtcagttccatgaccgtttctatgccatcgatggccgtctctccctttatggaagaagaaagaccactcctccttgtcacgcctcccagactgcgggagaagaaattcgatcaccaccctcaacaattcagttcgttccaccacaatccagcccacgattccaactctttaccagcttcgcccctgagaattgtggaagacgaggagtacgagacgacgcaagagtacgagcccgctcaggagccagtaaaaaaattagccaatagccggcgggctaaacggaccaagcccaacggtcacattgccaatagactggaggtcgactccaatacaagttctcaaagctccaactctgagagcgagacagaggacgagcgagtcggcgaagatacccctttccttggcatccagaatccattagccgcctcactcgaagccactcctgcttttaggctggctgacagccgaacaaatcctgccggacggttttcaacacaagaggagattcaggctcggctgtcttctgtgatcgccaaccaggatcccatcgccgtgtag

SEQ ID NO: 177192 - DNA, 1923 bp, Artificial Sequence
  derived and/or modified sequence
atgtctgagaggaaggagggccggggcaagggcaagggcaagaagaaggagcggggcagcggcaagaagccagagagcgctgctggcagccagagccctgccctgcccccccggctgaaggagatgaagagccaggagagcgctgctggcagcaagctggtgctgcgctgtgagaccagcagcgagtacagcagcctgcgcttcaagtggttcaagaatggaaatgagctgaacaggaagaacaagccccagaacatcaagatccagaagaagccaggcaagtctgagctgcgcatcaacaaggccagcctggccgacagcggggagtacatgtgcaaggtgatcagcaagctgggcaatgacagcgccagcgccaacatcaccatcgtggagagcaatgagatcatcaccggcatgcctgccagcacagaaggagcctacgtgagcagcgagagccccatccgcatctctgtgtccacagagggcgccaacaccagcagcagcaccagcaccagcaccaccggcaccagccacctggtgaagtgtgccgagaaggagaagaccttctgtgtgaatggaggagagtgcttcatggtgaaggacctgagcaaccccagccgctacctgtgcaagtgccagcccggcttcaccggggcccgctgcacagaaaatgtgcccatgaaggtgcagaaccaggagaaggccgaggagctgtaccagaagagggtgctgaccatcaccggcatctgcatcgccctgctggtggtgggcatcatgtgtgtggtggcctactgcaagaccaagaagcagaggaagaagctgcatgaccggctgcggcagagcctgcggtctgagaggaacaacatgatgaacatcgccaacggcccccaccaccccaaccccccaccagaaaatgtgcagctggtgaaccagtatgtgtccaagaatgtcatcagcagcgagcacatcgtggagcgggaggccgagaccagcttcagcaccagccactacaccagcacagcccaccacagcaccaccgtgacccagacccccagccacagctggagcaatggccacacagagagcatcctgtctgagagccacagcgtgattgtgatgagctctgtggagaacagccgccacagcagccccactggaggcccccggggccgcctgaatggaactggaggcccccgggagtgcaacagcttcctgcggcatgcccgggagaccccagacagctacagagacagcccccacagcgagcgctacgtgtctgccatgaccaccccagccaggatgagccctgtggacttccacacccccagcagccccaagagcccccccagcgagatgagcccccctgtgtcctccatgacagtgtccatgcccagcatggctgtgagccccttcatggaggaggagcggcccctgctgctggtgaccccaccccggctgcgggagaagaagtttgaccaccacccccagcagttcagcagcttccaccacaacccagcccatgacagcaacagcctgcctgccagccccctgagaattgtggaggatgaggagtatgagaccacccaggagtatgagcccgcccaggagcctgtgaagaagctggccaacagcagaagagccaagaggaccaagcccaacggccacatcgccaaccggctggaggtggacagcaacaccagcagccagagcagcaacagcgagagcgagacagaagatgagcgggtgggggaggacacccccttcctgggcatccagaaccccctggccgccagcctggaggccaccccagccttccggctggccgacagcaggaccaacccagctggccgcttcagcacccaggaggagatccaggcccggctgagcagcgtcatcgccaaccaggaccccatcgctgtgtag

SEQ ID NO: 177193 - DNA, 1947 bp, Artificial Sequence
  derived and/or modified sequence
atgtctgagaggaaggagggccggggcaagggcaagggcaagaagaaggagcggggcagcggcaagaagccagagagcgctgctggcagccagagccctgccctgcccccccggctgaaggagatgaagagccaggagagcgctgctggcagcaagctggtgctgcgctgtgagaccagcagcgagtacagcagcctgcgcttcaagtggttcaagaatggaaatgagctgaacaggaagaacaagccccagaacatcaagatccagaagaagccaggcaagtctgagctgcgcatcaacaaggccagcctggccgacagcggggagtacatgtgcaaggtgatcagcaagctgggcaatgacagcgccagcgccaacatcaccatcgtggagagcaatgagatcatcaccggcatgcctgccagcacagaaggagcctacgtgagcagcgagagccccatccgcatctctgtgtccacagagggcgccaacaccagcagcagcaccagcaccagcaccaccggcaccagccacctggtgaagtgtgccgagaaggagaagaccttctgtgtgaatggaggagagtgcttcatggtgaaggacctgagcaaccccagccgctacctgtgcaagtgccagcccggcttcaccggggcccgctgcacagaaaatgtgcccatgaaggtgcagaaccaggagaagcacagcggggagcccttccctgaggccgaggagctgtaccagaagagggtgctgaccatcaccggcatctgcatcgccctgctggtggtgggcatcatgtgtgtggtggcctactgcaagaccaagaagcagaggaagaagctgcatgaccggctgcggcagagcctgcggtctgagaggaacaacatgatgaacatcgccaacggcccccaccaccccaaccccccaccagaaaatgtgcagctggtgaaccagtatgtgtccaagaatgtcatcagcagcgagcacatcgtggagcgggaggccgagaccagcttcagcaccagccactacaccagcacagcccaccacagcaccaccgtgacccagacccccagccacagctggagcaatggccacacagagagcatcctgtctgagagccacagcgtgattgtgatgagctctgtggagaacagccgccacagcagccccactggaggcccccggggccgcctgaatggaactggaggcccccgggagtgcaacagcttcctgcggcatgcccgggagaccccagacagctacagagacagcccccacagcgagcgctacgtgtctgccatgaccaccccagccaggatgagccctgtggacttccacacccccagcagccccaagagcccccccagcgagatgagcccccctgtgtcctccatgacagtgtccatgcccagcatggctgtgagccccttcatggaggaggagcggcccctgctgctggtgaccccaccccggctgcgggagaagaagtttgaccaccacccccagcagttcagcagcttccaccacaacccagcccatgacagcaacagcctgcctgccagccccctgagaattgtggaggatgaggagtatgagaccacccaggagtatgagcccgcccaggagcctgtgaagaagctggccaacagcagaagagccaagaggaccaagcccaacggccacatcgccaaccggctggaggtggacagcaacaccagcagccagagcagcaacagcgagagcgagacagaagatgagcgggtgggggaggacacccccttcctgggcatccagaaccccctggccgccagcctggaggccaccccagccttccggctggccgacagcaggaccaacccagctggccgcttcagcacccaggaggagatccaggcccggctgagcagcgtcatcgccaaccaggaccccatcgctgtgtag

SEQ ID NO: 177194 - DNA, 1923 bp, Artificial Sequence
  derived and/or modified sequence
atgagcgagcggaaggagggccggggcaagggcaagggcaagaagaaagaacgtggctccggtaaaaaacccgaatctgccgccgggtcacaaagtcctgccctcccccctcggctgaaagagatgaaatctcaggaatcagctgccggaagcaaattggtcctccgttgcgaaacaagtagtgagtactccagcttaaggttcaaatggttcaagaacggaaacgaactgaatcgtaagaataaacctcagaacattaaaatccagaagaaaccaggtaaaagcgagctgaggatcaataaggcctctttagcggacagtggcgaatacatgtgtaaagttatttccaaactcgggaacgattcagcttctgccaacatcactattgtggaatccaacgagattattacggggatgcctgccagtacggaaggcgcgtacgtctcgtccgaatcacccattcgtatttccgtcagcacagaaggagccaatacttcctcttcaacatccacatcaacgaccggaaccagccatctggtgaaatgcgccgagaaagaaaaaaccttttgcgtgaacggtggggagtgcttcatggttaaggatctaagcaatcctagtaggtatctttgtaaatgccagcctgggtttaccggtgcccgatgtacggaaaacgttcctatgaaagtgcagaatcaggaaaaagcagaagagctctaccagaagcgagtactgacaatcactggcatttgcattgccttgttagtggtaggcatcatgtgcgtggtagcgtattgtaagacaaagaagcagcggaaaaaactccacgaccggttacgtcagtcactgcggtcagaaagaaacaacatgatgaacatcgcaaacggaccccaccaccctaatccgcctcctgagaacgtgcagctcgtcaaccaatacgtctcaaagaacgtcatttcttcagaacatattgtggagcgcgaagccgagacatctttttctacaagccactacacttcgactgcccatcattccaccactgtcacccagaccccaagtcacagctggtccaatgggcacaccgagtcaattctgagtgagagtcacagcgttatcgtcatgagttcagtcgaaaactctcgacactcttctcccactggcggcccacgcggaagacttaacggaactggaggcccacgagagtgtaatagttttctacgccacgctagagagacacccgattcctatagggacagccctcactctgaacggtatgtgtcagccatgactacgcccgcacgaatgtctcccgtggacttccacaccccttcttctcccaagtcccccccatcggagatgtcacccccagtgagttccatgactgtgtcaatgccttccatggcggtgtccccgttcatggaggaggagcggccactgcttctggtgacccctcctcggttgagagagaagaaattcgatcatcacccacagcagttcagctcattccaccacaatccggctcatgactcaaacagcctgcccgcatctcccctaaggattgtggaagacgaagaatatgaaacaactcaagaatatgagccagcacaggaacccgtaaaaaaactcgccaacagcagaagagccaagcgaaccaagccaaatgggcacattgccaatagattggaagtggatagcaacacttcgtcacagagctcaaactccgagagtgaaaccgaggacgaacgtgtgggagaagacacacccttcctcggcatccagaatcctttggcggccagcctcgaggctacccccgctttccgtctggccgacagccgaaccaatccggcagggagattcagcacacaagaggaaattcaggctcggttgtccagtgtcatcgccaaccaggatccaatagccgtgtag

SEQ ID NO: 177195 - DNA, 1947 bp, Artificial Sequence
  derived and/or modified sequence
atgagcgagcggaaggagggccggggcaagggcaagggcaagaagaaggagcgaggcagtgggaagaagccagaaagcgccgcaggatctcagtcaccggctctgccaccaagactgaaggagatgaaatcgcaggaatcagcagccgggtccaagcttgtcctgagatgcgaaacgtcgtctgaatattccagcctgagatttaaatggtttaaaaacggtaacgagctgaatcggaagaacaaaccccaaaatataaagattcagaagaagcctgggaagtcggagctgaggattaataaggcatccttggctgactcgggggaatatatgtgcaaggtgattagtaagttgggcaacgacagcgcctctgccaatatcactatcgtggagagcaatgaaattatcaccggtatgcccgctagcaccgagggcgcgtatgtgagcagtgaatcaccgatcaggatcagcgtgtctactgagggggctaacacctctagcagcactagcacttccactactggaacatcacatctggtcaaatgtgcagaaaaggagaagaccttctgcgttaatggaggtgagtgctttatggtgaaagacctgtccaatccctcacggtatctatgtaaatgccaacctggatttacaggtgccagatgcactgaaaatgtgcctatgaaggtgcaaaatcaggaaaagcactctggcgaacctttccccgaagccgaggaactgtaccaaaagagagtgctgacaatcacaggcatctgcatcgcactccttgtcgttgggataatgtgtgtcgtagcctattgcaagaccaagaagcagagaaagaaattgcatgaccggctccgacagtccctacgctcagagcggaacaatatgatgaacatagctaacggcccccaccacccaaaccctccaccagaaaacgtgcagttggtgaatcagtacgtctcaaaaaacgttatcagctccgaacacattgtcgaaagagaagccgagactagcttttcaaccagccactacacctcaacagctcatcactccactacggtaactcagactccatctcattcttggtccaacggccacactgaatcaatattgtccgaatcacactccgtcatagtgatgagcagcgtggagaatagtcgacattcaagccccaccggcggcccccggggccgactcaatggaactggcggccccagggagtgtaattctttcctgaggcacgctcgcgagacgcctgactcttacagagattccccccatagcgaacgttatgtgtctgctatgacgacccctgcacgcatgtcccctgtggacttccacacaccttcaagcccaaagagtccgccgtcggagatgagcccccccgtcagctctatgaccgtgtctatgccaagtatggctgtctcgccctttatggaagaggagcgtccactgcttctggtcactcccccacgccttagagaaaagaagtttgaccatcacccccagcaatttagcagctttcaccacaacccggcgcatgacagcaacagcttgccggccagcccactgcgaattgtcgaggatgaggaatatgagaccacgcaggaatacgagccagctcaggagcccgtcaaaaaactggccaactcccggagagccaaaagaactaaacccaacggacacatcgctaatcgccttgaagtggatagtaataccagtagccaatcttccaactctgaaagcgaaactgaagatgaaagggtgggggaagataccccatttctgggcatacagaaccctctggctgcgtctctggaagcaaccccagccttccggctcgctgacagccgcaccaatcctgccggccgctttagtacacaggaggagatacaggcacggctcagcagcgtgattgcaaaccaggatcccatagccgtgtag

SEQ ID NO: 177196 - DNA, 1923 bp, Artificial Sequence
  derived and/or modified sequence
atgagcgagcggaaggagggccggggcaagggcaagggcaagaagaaggaacgaggaagcgggaagaaacccgagtctgcggctggatctcagagtccagcactaccccccagactgaaagagatgaaaagtcaggaatccgcagccggaagtaaacttgttctgaggtgtgagacctcatcagaatacagtagcttgagatttaagtggtttaagaacggaaatgaactgaatcgaaaaaacaagccacagaacatcaagatccagaaaaaaccaggaaagtccgaactgcggattaacaaagcaagcctcgcggatagtggagagtatatgtgcaaggtaatctcaaagctgggcaacgatagcgcatctgcgaacatcaccatcgtcgagtcgaacgagatcatcactggcatgcccgcctcaaccgagggcgcgtatgtttcttccgagagcccaatccgcattagcgttagcaccgagggggccaatacatcctcttcaacaagtacctcaaccaccggtacctctcacctagtcaagtgtgccgagaaagagaaaactttctgtgtgaacggaggcgaatgctttatggttaaggatctgtccaacccctctagatatttgtgtaagtgccagcccgggtttacaggtgctcggtgcacggagaacgtgcctatgaaggtccaaaatcaagagaaggcagaagagctgtaccagaaaagagtcctaacaatcacagggatttgtattgcactgttggtcgtgggcataatgtgtgtggttgcctattgtaagaccaagaagcagcggaagaagctgcatgatcggctcagacaaagtcttagaagtgagcggaataacatgatgaacatcgccaacggtccgcaccatcccaacccaccccctgagaatgtgcagctggtgaatcagtacgtttcaaagaacgtaatctcttcagagcatattgtcgagcgggaggctgagacgagtttcagcacctctcactatactagcacagcacaccattcaacaacagtgacccaaactcccagccattcatggagtaatgggcatactgaaagcattctctccgagagccactcagttatagtgatgagttctgtggagaacagccggcatagcagcccaaccggcggtccacgcgggcgcctcaacgggaccggagggccgcgggaatgcaatagctttctgagacacgcacgcgaaacccccgacagctacagagattcgccacactcagagcgatatgtttccgccatgaccacccctgctagaatgtctcccgtagattttcacacccccagctcaccaaagtcccccccctctgaaatgtcccccccagtgtcatctatgaccgtcagtatgcccagcatggctgtgagcccttttatggaggaagaaagacccctccttctcgttacaccccctcggctgcgcgaaaaaaaattcgatcatcatccacagcaattctctagtttccaccataacccggctcatgactcaaactccttgccagcctcaccccttagaatcgtagaggatgaggagtacgagaccacgcaggagtatgagcccgcacaggagccagtgaaaaagctggctaacagtcggcgggccaaacggaccaagccaaatgggcatattgctaatcgcctggaagtggactccaacacctccagtcagtccagtaattccgagtccgagaccgaagacgagagggtcggcgaagataccccttttctcggaatccagaatcccttggcagcctccctggaagccacccctgcattccggctggctgacagccggactaatcccgcaggtcgtttcagtactcaggaagaaattcaagctcgactttccagtgtgatcgctaatcaggatcccatagctgtgtag

SEQ ID NO: 177197 - DNA, 1923 bp, Artificial Sequence
  derived and/or modified sequence
atgagtgaaagaaaggaggggcgaggtaaaggcaaaggaaaaaagaaagaaaggggaagcggcaagaagccagagagcgccgcaggaagccagtctcctgccctgccccctagactgaaggaaatgaaatcccaggaaagcgctgccggatcaaagctggtgcttagatgcgaaactagcagcgagtattcgagcctccgtttcaaatggttcaaaaatggtaacgaactaaatcgcaaaaataagccgcagaacattaaaatccaaaaaaagccgggaaaaagtgagctcagaatcaataaagcgtccctcgcagatagcggggagtacatgtgcaaagtgattagtaagctgggaaatgactctgcctcagccaatatcacaattgtcgaatctaacgaaatcatcacaggtatgcccgcttctacagagggtgcttacgtgagcagcgagagcccaatcaggattagtgtttctaccgagggcgctaacacatcatcctccacctccacctctactaccgggactagtcacctcgtaaagtgtgccgagaaagaaaagacattttgtgtcaacggcggagagtgttttatggtgaaggacttgtccaatccgagccggtatctgtgcaagtgccagcccggatttaccggggctcgctgcaccgagaacgtgcccatgaaagtgcagaatcaggaaaaggcagaagaactgtaccagaaacgggtcctgactatcacgggcatatgcattgccctgctcgtggtagggatcatgtgcgtagtggcctactgcaagacaaaaaaacagcgcaaaaaactgcacgaccgcctgaggcaatctctgcgctccgaacgaaacaacatgatgaacatcgcaaacggtccccatcaccccaatcctcccccagaaaacgtgcagttagtaaatcaatacgtgtctaagaatgtgatttcctctgagcacatcgtcgagcgagaggccgaaacaagcttctcgactagtcactacacgtccacagcgcatcactcaaccactgtgacccagaccccatctcatagctggtccaacgggcataccgagtcgattttgagcgaatcccattcagtaatcgtgatgtcatcggtcgagaacagtcgccactcttcccccacaggagggcctcggggaagacttaacggaactggcggaccgagggagtgtaacagctttctgcggcatgctcgagagacccccgacagctaccgtgactctcctcatagcgaaaggtacgtgtccgccatgacgacccctgcccgaatgagtccggttgattttcatactccgtcctcccctaagagcccaccctcagaaatgagccctccagtgagttctatgaccgtatccatgccttcaatggcagtttccccattcatggaagaggaacggccactgctgctggttacgcctccaagacttagggaaaagaagtttgaccatcaccctcagcaattttcatccttccatcataacccagctcatgactcgaatagcctccccgcatcgcctctgagaatcgtggaagacgaggaatatgagactacgcaggaatacgaaccagcacaggagcccgtgaaaaagctggctaattccaggcgggcaaagaggacaaagcccaacggacacatcgcaaaccgactggaggtcgattctaacacctcctctcagtcttctaattctgagtccgaaaccgaggatgaacgggtcggtgaagacacgccatttcttggtatccagaatccactggcggcttctctcgaggctaccccagcctttaggctcgctgattcaaggacaaatcccgctggaagattcagcacccaggaggagatacaggccaggttgtcttctgtgatagcaaaccaagacccaattgccgtctag

SEQ ID NO: 177198 - DNA, 1947 bp, Artificial Sequence
  derived and/or modified sequence
atgagcgagcgcaaagaaggcaggggtaaaggaaagggaaaaaagaaagagcgcggttctggcaagaaaccagagtctgctgcgggatcccaatccccagcactgccgccaaggctgaaggaaatgaagagccaggaaagcgccgcaggctcaaagctagtgctccggtgtgaaacgtccagcgaatactcttccctgcggtttaagtggttcaagaatgggaatgagttgaataggaaaaacaagccacaaaatatcaagattcaaaagaaacctgggaaaagtgagttaagaattaacaaagcctccctggccgattcaggagaatacatgtgtaaggtgatttcaaaactggggaacgactcggcttctgctaatatcacaattgtcgaaagcaacgagatcattactggaatgcctgcgagcactgaaggagcttatgtgagctccgagtcaccaatacggatcagcgtgagcaccgagggcgcaaacacaagtagcagcacctctacctccaccaccggaacatcacacctggtgaaatgtgccgagaaagaaaaaactttctgcgttaatggaggcgaatgtttcatggtgaaggatctgagcaacccttcccgctatctttgtaaatgtcaacccggtttcaccggagctaggtgtacagagaatgtcccgatgaaagtgcaaaatcaggagaaacactccggcgagccatttccagaagccgaggaactataccagaaaagagtcctaactattacaggtatttgcattgccttactggtggtagggatcatgtgcgtcgtagcatactgtaagaccaagaagcaacgaaagaagctccatgaccggctccggcagtcactgaggtccgagcgcaacaacatgatgaacatagccaatggcccacatcaccctaaccctcctcctgaaaatgtgcaactagtgaatcagtacgtgagcaaaaacgtgattagttcggagcacatcgtggagagagaagccgaaacgtccttttctacctcccactatacgagcaccgcccatcacagcacaactgtgacccaaacaccatctcactcgtggtccaatggtcacacagagagcatactaagtgagagccattccgttattgtcatgagtagcgttgagaattcccgccactcctctccaaccgggggtcccaggggacgcctcaacggcaccggagggccacgcgaatgcaatagctttctgcgtcacgcaagggagacgcccgattcatatcgggattcgccacattctgaacgctatgtgtctgccatgacgacccccgctcgcatgagccctgtcgattttcataccccctcctcacccaagagcccgccatctgagatgtcacccccagtgtcttctatgactgtatcaatgcctagcatggctgtttccccctttatggaggaagaaagacctctgctgctggtgacaccgcctagacttcgggaaaagaagtttgaccaccatccacaacaattttcatcgtttcatcataatccagcacatgactctaacagcttacctgcttcgcctcttagaattgttgaagacgaggagtacgaaactactcaggaatatgaaccagcccaagagcccgtaaaaaagcttgccaattccaggagagcgaaacgaaccaaacccaatggacacattgcaaaccggctggaggtagactctaacaccagcagccagagctcaaactcagagtccgagaccgaagacgagagggtgggagaggataccccgttcctgggcattcagaatccattggcagcttcattagaagccaccccagccttccggcttgctgactcgaggacaaatcctgctggccgttttagcacccaggaggagatacaggctagactctcttcggtgatagccaaccaggatcccattgccgtctag

SEQ ID NO: 177199 - DNA, 1923 bp, Artificial Sequence
  derived and/or modified sequence
atgtctgaaagaaaggaagggaggggcaaagggaagggtaagaagaaggagagagggtccggaaagaaacctgagtcagccgctgggtctcagtcccctgcccttcctccacgtctgaaggaaatgaagagccaggagagcgccgctggcagcaagctcgtgctgagatgcgagacatcatccgaatactcttcactacgattcaaatggttcaagaacgggaacgagctcaaccgaaaaaacaagccccagaacatcaagatccaaaagaaacctgggaaaagtgagttgcgcattaacaaggctagtctggccgattctggcgaatacatgtgcaaagtaatctcaaaactcgggaacgattctgcctcagcgaacattactatcgtggaatccaatgagatcattacgggcatgcccgcaagcacagagggcgcatatgtgtctagcgaatcgcctataagaattagcgtgtccaccgaaggcgcaaacacctctagctccacatccactagtaccacaggcaccagccacctggtcaaatgcgcagagaaggagaagaccttttgcgtgaatggcggtgaatgcttcatggtgaaagatctcagcaatcctagccggtatctctgcaaatgccagccgggattcacaggggcacggtgcactgagaatgtcccgatgaaggttcagaaccaggagaaggccgaggaattgtatcagaagagagttctgacaatcaccgggatctgcatcgccttactggtggtcggcattatgtgtgtagttgcttactgtaagactaaaaagcaacggaagaagctacacgatagactaagacagagcttacggagcgagcgcaacaacatgatgaatatcgctaatggaccccaccatccaaatccacccccagagaacgtgcaactggtgaaccagtatgtctctaagaatgtgatttcttcagagcatatagtagagcgggaggcggagactagctttagcacctctcattacacgtctacggctcatcattctacaactgtgacccagaccccaagccacagctggagcaacgggcacacagagagcatcctgtccgagtctcattccgttatcgtcatgagtagcgtggagaactcgagacacagtagtcctactggcggtcccaggggcagactcaacggcacaggaggtccccgagagtgcaactccttcctgcgacacgctagggagactcctgattcgtaccgagattctccccatagtgaacgctacgtctctgcgatgactaccccagcccgtatgtctcctgtcgactttcacacgccatcgtccccaaagagcccgcctagtgagatgtccccaccagtgagctccatgacagtgtctatgccttctatggccgtctctcccttcatggaggaggagcgcccactgctactcgttacgccgcctcgattgagggagaagaagtttgaccaccacccacagcagttctctagcttccaccacaatccagcccatgactctaattcgctccctgcaagtccactgaggatcgtcgaagacgaggaatacgagactactcaggagtatgagccagcacaggagcctgtgaagaagctcgctaattcccggagggccaagagaactaaaccaaacggacatatcgcgaacaggctggaagtggactctaatacctcctcccagagttccaactctgagtcagaaaccgaagatgaacgagttggcgaggatacgccattcctggggattcagaaccctctggctgcatctctggaggctactccagcctttaggcttgctgatagtaggacgaaccccgcagggaggttctccactcaggaggagatccaggctaggctatcctcagtcattgcaaatcaagatccaattgccgtgtag

SEQ ID NO: 177200 - DNA, 3068 bp, Artificial Sequence
  derived and/or modified sequence
gaggccaggggagggtgcgaaggaggcgcctgcctccaacctgcgggcgggaggtgggtggctgcggggcaattgaaaaagagccggcgaggagttccccgaaacttgttggaactccgggctcgcgcggaggccaggagctgagcggcggcggctgccggacgatgggagcgtgagcaggacggtgataacctctccccgatcgggttgcgagggcgccgggcagaggccaggacgcgagccgccagcggtgggacccatcgacgacttcccggggcgacaggagcagccccgagagccagggcgagcgcccgttccaggtggccggaccgcccgccgcgtccgcgccgcgctccctgcaggcaacgggagacgcccccgcgcagcgcgagcgcctcagcgcggccgctcgctctccccctcgagggacaaacttttcccaaacccgatccgagcccttggaccaaactcgcctgcgccgagagccgtccgcgtagagcgctccgtctccggcgagatgtccgagcgcaaagaaggcagaggcaaagggaagggcaagaagaaggagcgaggctccggcaagaagccggagtccgcggcgggcagccagagcccagccttgcctccccgattgaaagagatgaaaagccaggaatcggctgcaggttccaaactagtccttcggtgtgaaaccagttctgaatactcctctctcagattcaagtggttcaagaatgggaatgaattgaatcgaaaaaacaaaccacaaaatatcaagatacaaaaaaagccagggaagtcagaacttcgcattaacaaagcatcactggctgattctggagagtatatgtgcaaagtgatcagcaaattaggaaatgacagtgcctctgccaatatcaccatcgtggaatcaaacgagatcatcactggtatgccagcctcaactgaaggagcatatgtgtcttcagagtctcccattagaatatcagtatccacagaaggagcaaatacttcttcatctacatctacatccaccactgggacaagccatcttgtaaaatgtgcggagaaggagaaaactttctgtgtgaatggaggggagtgcttcatggtgaaagacctttcaaacccctcgagatacttgtgcaagtgccaacctggattcactggagcaagatgtactgagaatgtgcccatgaaagtccaaaaccaagaaaaggcggaggagctgtaccagaagagagtgctgaccataaccggcatctgcatcgccctccttgtggtcggcatcatgtgtgtggtggcctactgcaaaaccaagaaacagcggaaaaagctgcatgaccgtcttcggcagagccttcggtctgaacgaaacaatatgatgaacattgccaatgggcctcaccatcctaacccaccccccgagaatgtccagctggtgaatcaatacgtatctaaaaacgtcatctccagtgagcatattgttgagagagaagcagagacatccttttccaccagtcactatacttccacagcccatcactccactactgtcacccagactcctagccacagctggagcaacggacacactgaaagcatcctttccgaaagccactctgtaatcgtgatgtcatccgtagaaaacagtaggcacagcagcccaactgggggcccaagaggacgtcttaatggcacaggaggccctcgtgaatgtaacagcttcctcaggcatgccagagaaacccctgattcctaccgagactctcctcatagtgaaaggtatgtgtcagccatgaccaccccggctcgtatgtcacctgtagatttccacacgccaagctcccccaaatcgcccccttcggaaatgtctccacccgtgtccagcatgacggtgtccatgccttccatggcggtcagccccttcatggaagaagagagacctctacttctcgtgacaccaccaaggctgcgggagaagaagtttgaccatcaccctcagcagttcagctccttccaccacaaccccgcgcatgacagtaacagcctccctgctagccccttgaggatagtggaggatgaggagtatgaaacgacccaagagtacgagccagcccaagagcctgttaagaaactcgccaatagccggcgggccaaaagaaccaagcccaatggccacattgctaacagattggaagtggacagcaacacaagctcccagagcagtaactcagagagtgaaacagaagatgaaagagtaggtgaagatacgcctttcctgggcatacagaaccccctggcagccagtcttgaggcaacacctgccttccgcctggctgacagcaggactaacccagcaggccgcttctcgacacaggaagaaatccaggccaggctgtctagtgtaattgctaaccaagaccctattgctgtataaaacctaaataaacacatagattcacctgtaaaactttattttatataataaagtattccaccttaaattaaacaatttattttattttagcagttctgcaaatagaaaacaggaaaaaaacttttataaattaaatatatgtatgtaaaaatgtgttatgtgccatatgtagcaattttttacagtatttcaaaacgagaaagatatcaatggtgcctttatgttatgttatgtcgagagcaagttttgtacagttacagtgattgcttttccacagtatttctgcaaaacctctcatagattcagtttttgctggcttcttgtgcattgcattatgatgttgactggatgtatgatttgcaagacttgcaactgtccctctgtttgcttgtagtagcacccgatcagtatgtcttgtaatggcacatccatccagatatgcctctcttgtgtatgaagttttctttgctttcagaatatgaaatgagttgtgtctactctgccagccaaaggtttgcctcattgggctctgagataatagtagatccaacagcatgctactattaaatacagcaagaaactgcattaagtaatgttaaatattaggaagaaagtaatactgtgattt

SEQ ID NO: 177201 - DNA, 3092 bp, Artificial Sequence
  derived and/or modified sequence
gaggccaggggagggtgcgaaggaggcgcctgcctccaacctgcgggcgggaggtgggtggctgcggggcaattgaaaaagagccggcgaggagttccccgaaacttgttggaactccgggctcgcgcggaggccaggagctgagcggcggcggctgccggacgatgggagcgtgagcaggacggtgataacctctccccgatcgggttgcgagggcgccgggcagaggccaggacgcgagccgccagcggtgggacccatcgacgacttcccggggcgacaggagcagccccgagagccagggcgagcgcccgttccaggtggccggaccgcccgccgcgtccgcgccgcgctccctgcaggcaacgggagacgcccccgcgcagcgcgagcgcctcagcgcggccgctcgctctccccctcgagggacaaacttttcccaaacccgatccgagcccttggaccaaactcgcctgcgccgagagccgtccgcgtagagcgctccgtctccggcgagatgtccgagcgcaaagaaggcagaggcaaagggaagggcaagaagaaggagcgaggctccggcaagaagccggagtccgcggcgggcagccagagcccagccttgcctccccgattgaaagagatgaaaagccaggaatcggctgcaggttccaaactagtccttcggtgtgaaaccagttctgaatactcctctctcagattcaagtggttcaagaatgggaatgaattgaatcgaaaaaacaaaccacaaaatatcaagatacaaaaaaagccagggaagtcagaacttcgcattaacaaagcatcactggctgattctggagagtatatgtgcaaagtgatcagcaaattaggaaatgacagtgcctctgccaatatcaccatcgtggaatcaaacgagatcatcactggtatgccagcctcaactgaaggagcatatgtgtcttcagagtctcccattagaatatcagtatccacagaaggagcaaatacttcttcatctacatctacatccaccactgggacaagccatcttgtaaaatgtgcggagaaggagaaaactttctgtgtgaatggaggggagtgcttcatggtgaaagacctttcaaacccctcgagatacttgtgcaagtgccaacctggattcactggagcaagatgtactgagaatgtgcccatgaaagtccaaaaccaagaaaagcattctggagaaccctttccagaggcggaggagctgtaccagaagagagtgctgaccataaccggcatctgcatcgccctccttgtggtcggcatcatgtgtgtggtggcctactgcaaaaccaagaaacagcggaaaaagctgcatgaccgtcttcggcagagccttcggtctgaacgaaacaatatgatgaacattgccaatgggcctcaccatcctaacccaccccccgagaatgtccagctggtgaatcaatacgtatctaaaaacgtcatctccagtgagcatattgttgagagagaagcagagacatccttttccaccagtcactatacttccacagcccatcactccactactgtcacccagactcctagccacagctggagcaacggacacactgaaagcatcctttccgaaagccactctgtaatcgtgatgtcatccgtagaaaacagtaggcacagcagcccaactgggggcccaagaggacgtcttaatggcacaggaggccctcgtgaatgtaacagcttcctcaggcatgccagagaaacccctgattcctaccgagactctcctcatagtgaaaggtatgtgtcagccatgaccaccccggctcgtatgtcacctgtagatttccacacgccaagctcccccaaatcgcccccttcggaaatgtctccacccgtgtccagcatgacggtgtccatgccttccatggcggtcagccccttcatggaagaagagagacctctacttctcgtgacaccaccaaggctgcgggagaagaagtttgaccatcaccctcagcagttcagctccttccaccacaaccccgcgcatgacagtaacagcctccctgctagccccttgaggatagtggaggatgaggagtatgaaacgacccaagagtacgagccagcccaagagcctgttaagaaactcgccaatagccggcgggccaaaagaaccaagcccaatggccacattgctaacagattggaagtggacagcaacacaagctcccagagcagtaactcagagagtgaaacagaagatgaaagagtaggtgaagatacgcctttcctgggcatacagaaccccctggcagccagtcttgaggcaacacctgccttccgcctggctgacagcaggactaacccagcaggccgcttctcgacacaggaagaaatccaggccaggctgtctagtgtaattgctaaccaagaccctattgctgtataaaacctaaataaacacatagattcacctgtaaaactttattttatataataaagtattccaccttaaattaaacaatttattttattttagcagttctgcaaatagaaaacaggaaaaaaacttttataaattaaatatatgtatgtaaaaatgtgttatgtgccatatgtagcaattttttacagtatttcaaaacgagaaagatatcaatggtgcctttatgttatgttatgtcgagagcaagttttgtacagttacagtgattgcttttccacagtatttctgcaaaacctctcatagattcagtttttgctggcttcttgtgcattgcattatgatgttgactggatgtatgatttgcaagacttgcaactgtccctctgtttgcttgtagtagcacccgatcagtatgtcttgtaatggcacatccatccagatatgcctctcttgtgtatgaagttttctttgctttcagaatatgaaatgagttgtgtctactctgccagccaaaggtttgcctcattgggctctgagataatagtagatccaacagcatgctactattaaatacagcaagaaactgcattaagtaatgttaaatattaggaagaaagtaatactgtgattt

SEQ ID NO: 177202 - DNA, 2354 bp, Artificial Sequence
  derived and/or modified sequence
aaacttgttggaactccgggctcgcgcggaggccaggagctgagcggcggcggctgccggacgatgggagcgtgagcaggacggtgataacctctccccgatcgggttgcgagggcgccgggcagaggccaggacgcgagccgccagcggtgggacccatcgacgacttcccggggcgacaggagcagccccgagagccagggcgagcgcccgttccaggtggccggaccgcgcgagcgcctcagcgcggccgctcgctctccccctcgagggacaaacttttcccaaacccgatccgagcccttggaccaaactcgcctgcgccgagagccgtccgcgtagagcgctccgtctccggcgagatgtccgagcgcaaagaaggcagaggcaaagggaagggcaagaagaaggagcgaggctccggcaagaagccggagtccgcggcgggcagccagagcccagccttgcctccccgattgaaagagatgaaaagccaggaatcggctgcaggttccaaactagtccttcggtgtgaaaccagttctgaatactcctctctcagattcaagtggttcaagaatgggaatgaattgaatcgaaaaaacaaaccacaaaatatcaagatacaaaaaaagccagggaagtcagaacttcgcattaacaaagcatcactggctgattctggagagtatatgtgcaaagtgatcagcaaattaggaaatgacagtgcctctgccaatatcaccatcgtggaatcaaacgagatcatcactggtatgccagcctcaactgaaggagcatatgtgtcttcagagtctcccattagaatatcagtatccacagaaggagcaaatacttcttcatctacatctacatccaccactgggacaagccatcttgtaaaatgtgcggagaaggagaaaactttctgtgtgaatggaggggagtgcttcatggtgaaagacctttcaaacccctcgagatacttgtgcaagtgccaacctggattcactggagcaagatgtactgagaatgtgcccatgaaagtccaaaaccaagaaaaggcggaggagctgtaccagaagagagtgctgaccataaccggcatctgcatcgccctccttgtggtcggcatcatgtgtgtggtggcctactgcaaaaccaagaaacagcggaaaaagctgcatgaccgtcttcggcagagccttcggtctgaacgaaacaatatgatgaacattgccaatgggcctcaccatcctaacccaccccccgagaatgtccagctggtgaatcaatacgtatctaaaaacgtcatctccagtgagcatattgttgagagagaagcagagacatccttttccaccagtcactatacttccacagcccatcactccactactgtcacccagactcctagccacagctggagcaacggacacactgaaagcatcctttccgaaagccactctgtaatcgtgatgtcatccgtagaaaacagtaggcacagcagcccaactgggggcccaagaggacgtcttaatggcacaggaggccctcgtgaatgtaacagcttcctcaggcatgccagagaaacccctgattcctaccgagactctcctcatagtgaaaggtatgtgtcagccatgaccaccccggctcgtatgtcacctgtagatttccacacgccaagctcccccaaatcgcccccttcggaaatgtctccacccgtgtccagcatgacggtgtccatgccttccatggcggtcagccccttcatggaagaagagagacctctacttctcgtgacaccaccaaggctgcgggagaagaagtttgaccatcaccctcagcagttcagctccttccaccacaaccccgcgcatgacagtaacagcctccctgctagccccttgaggatagtggaggatgaggagtatgaaacgacccaagagtacgagccagcccaagagcctgttaagaaactcgccaatagccggcgggccaaaagaaccaagcccaatggccacattgctaacagattggaagtggacagcaacacaagctcccagagcagtaactcagagagtgaaacagaagatgaaagagtaggtgaagatacgcctttcctgggcatacagaaccccctggcagccagtcttgaggcaacacctgccttccgcctggctgacagcaggactaacccagcaggccgcttctcgacacaggaagaaatccaggccaggctgtctagtgtaattgctaaccaagaccctattgctgtataaaacctaaataaacacatagattcacctgtaaaactttattttatataataaagtattccaccttaaatt

SEQ ID NO: 177203 - protein, 428 aa, Artificial Sequence
  derived and/or modified sequence
MALRGVSVRLLSRGPGLHVLRTWVSSAAQTEKGGRTQSQLAKSSRPEFDWQDPLVLEEQLTTDEILIRDTFRTYCQERLMPRILLANRNEVFHREIISEMGELGVLGPTIKGYGCAGVSSVAYGLLARELERVDSGYRSAMSVQSSLVMHPIYAYGSEEQRQKYLPQLAKGELLGCFGLTEPNSGSDPSSMETRAHYNSSNKSYTLNGTKTWITNSPMADLFVVWARCEDGCIRGFLLEKGMRGLSAPRIQGKFSLRASATGMIIMDGVEVPEENVLPGASSLGGPFGCLNNARYGIAWGVLGASEFCLHTARQYALDRMQFGVPLARNQLIQKKLADMLTEITLGLHACLQLGRLKDQDKAAPEMVSLLKRNNCGKALDIARQARDMLGGNGISDEYHVIRHAMNLEAVNTYEVVQMCSLKRRWNSL

SEQ ID NO: 177204 - DNA, 987 bp, Artificial Sequence
  derived and/or modified sequence
atggccctccggggcgttagcgtgcgtctgttgtcgagagggcccggactgcatgtactgcggacatgggtaagcagcgccgcccagactgcctctagacccgagttcgattggcaagatcctttggtgctggaggagcaattgactacagatgagatattgatcagagacacctttaggacttactgccaggaacgcctcatgccccgcattctcttggcgaaccggaatgaggggtatggttgcgcgggggtgagctccgtcgcctatgggcttttagctcgagagttggaacgcgttgactccggctacaggagcgctatgagtgtccagtcttccctcgttatgcaccccatctatgcttatggaagtgaggaacagaggcagaaatatctgccacagttggccaaaggggagttgttaggatgctttggactcacagagcctaacagcggtagcgatccgtcaagcatggagactcgtgcacattataactcgagcaacaaatcatacaccctgaatggcaccaagacctggatcaccaatagccctatggcggacctatttgtcgtgtgggctcggtgcgaggacggttgtataagagggtttctgctggagaaaggcatgaggggccttagtgccccccggatccagggaaagttcagtcttagagcctcggccaccggcatgatcataatggacggagtggaggtgccagaagaaaacgtcctccctggcgccagcagccttggtggtccctttggctgtcttaataacgcgcgctacgggatcgcatggggcgttctgggtgcttccgagttctgcctgcacaccgcacgccagtatgccttggacagaatgcagttcggcgtccccctcgcgcgaaaccagctgattcagaaaaagcttgccgatatgttgacggagattacactcggcctgcacgcgtgtctccagttggggcggcttaaagaccaagataaatag

SEQ ID NO: 177205 - DNA, 1287 bp, Artificial Sequence
  derived and/or modified sequence
atggctttgcgtggagtgtccgtccgcctgctgtcccggggacctggcctgcatgtattgagaacatgggtctcatccgcagctcagacagagaaaggagggcggacacaaagtcagctggccaagagctccagacctgagtttgattggcaggatcctctggtgttagaagagcaacttactactgatgaaatcttaattagggacaccttccgcacgtattgtcaggagcgtttgatgccgagaatcctgcttgctaaccgaaacgaagtgtttcaccgggaaatcatctctgagatgggcgaattgggagttctgggtcctacaataaaaggctatggctgtgcaggggtctcctctgtggcttacgggcttctcgcgcgcgaattagagagagtggactccggttatcggagtgccatgagcgtgcagtctagtttggtgatgcatccgatctacgcatacggatccgaggagcaaaggcaaaaatacctaccccagctggccaagggcgaactgctgggatgtttcgggctaactgaaccaaatagcggcagcgacccatccagcatggagacccgcgcacactacaactctagcaacaagagctatacactaaacggcacaaaaacctggataactaactcgccaatggctgatctgttcgttgtttgggcaaggtgcgaggacgggtgcatccgagggtttctactcgagaaagggatgagggggctgagtgctccccgtatccaggggaagttttccctgcgggcatcagccacaggtatgattatcatggatggggtggaggtgcccgaagagaacgtgctgccgggagcctcatctctcggcggccctttcggttgcctaaataacgcaagatacggcattgcatggggagttctcggggctagcgagttctgtttacacaccgccaggcaatacgcactggaccgcatgcagtttggggtgcctctggccaggaatcagttgatccagaagaagctggctgacatgctgaccgagataactttggggctgcacgcctgcctgcaattgggaagactcaaagatcaggataaggctgcacctgaaatggtcagcctgctcaagagaaataactgcggtaaagccctggacattgctcgccaagctcgggatatgctcgggggtaatgggatatcagatgaatatcacgttatacgccatgcgatgaatctggaagctgtgaatacatatgaagtggtgcagatgtgttccctgaagcggaggtggaatagcttgtag

SEQ ID NO: 177206 - DNA, 1109 bp, Artificial Sequence
  derived and/or modified sequence
agttgcactgtagcctcggcagtgaaccgggaggtactaccaggtcgccgtcgttgctccgctcgctctgagagagcatggccctgagaggcgtctccgtgcggctgctgagccgcggacccggcctgcacgtccttcgcacgtgggtctcgtcggcggcgcagaccgcctcgcgtcccgagtttgactggcaggacccgctggtgctggaggagcagctgaccacagatgagatcctcatcagggacaccttccgcacctactgccaggagagactcatgcctcgcatcctgttggccaatcgcaacgaaggatatggctgtgctggggtttcgtctgtggcctatgggctcctggcccgagagctggagcgggtggacagtggctacaggtcggcgatgagtgtccagtcctccctcgtcatgcaccctatctatgcctatggcagcgaggaacagcggcagaagtacctgccccagctggccaagggggagctcctgggctgcttcgggctcacagagcccaacagcggaagtgaccccagcagcatggagaccagagcccactacaactcatccaacaagagctacaccctcaatgggaccaagacctggatcacgaactcgcctatggccgatctgtttgtagtgtgggctcggtgtgaagatggctgcattcggggcttcctgctggagaaggggatgcggggtctctcggcccccaggatccagggcaagttctcgctgcgggcctcagccacaggcatgatcatcatggacggtgtggaggtgccagaggagaatgtgctccctggtgcatccagcctggggggtcccttcggctgcctgaacaacgcccggtacggcatcgcgtggggcgtgcttggagcttcggagttctgcttgcacacagcccggcagtacgccctcgacaggatgcagtttggtgtcccactggccaggaaccagctgattcagaagaagctggcagacatgctcactgagattaccctgggccttcacgcctgcctgcagctcggccgcttgaaggaccaggacaagtaggggctgtgtggtgggggcggggggatggcagcggtggctggagga

SEQ ID NO: 177207 - DNA, 1589 bp, Artificial Sequence
  derived and/or modified sequence
agttgcactgtagcctcggcagtgaaccgggaggtactaccaggtcgccgtcgttgctccgctcgctctgagagagcatggccctgagaggcgtctccgtgcggctgctgagccgcggacccggcctgcacgtccttcgcacgtgggtctcgtcggcggcgcagaccgagaaaggcgggagaacacagagccaactggctaagtcctcgcgtcccgagtttgactggcaggacccgctggtgctggaggagcagctgaccacagatgagatcctcatcagggacaccttccgcacctactgccaggagagactcatgcctcgcatcctgttggccaatcgcaacgaagtttttcatcgggagatcatttcggagatgggggagttgggtgtgctgggccccaccatcaaaggatatggctgtgctggggtttcgtctgtggcctatgggctcctggcccgagagctggagcgggtggacagtggctacaggtcggcgatgagtgtccagtcctccctcgtcatgcaccctatctatgcctatggcagcgaggaacagcggcagaagtacctgccccagctggccaagggggagctcctgggctgcttcgggctcacagagcccaacagcggaagtgaccccagcagcatggagaccagagcccactacaactcatccaacaagagctacaccctcaatgggaccaagacctggatcacgaactcgcctatggccgatctgtttgtagtgtgggctcggtgtgaagatggctgcattcggggcttcctgctggagaaggggatgcggggtctctcggcccccaggatccagggcaagttctcgctgcgggcctcagccacaggcatgatcatcatggacggtgtggaggtgccagaggagaatgtgctccctggtgcatccagcctggggggtcccttcggctgcctgaacaacgcccggtacggcatcgcgtggggcgtgcttggagcttcggagttctgcttgcacacagcccggcagtacgccctcgacaggatgcagtttggtgtcccactggccaggaaccagctgattcagaagaagctggcagacatgctcactgagattaccctgggccttcacgcctgcctgcagctcggccgcttgaaggaccaggacaaggctgcccccgagatggtttctctgctgaagaggaataactgtgggaaagccctggacatcgcccgccaggcccgagacatgctgggggggaatgggatttctgacgagtatcacgtgatccggcacgccatgaacctggaggccgtgaacacctacgaagtcgttcagatgtgttccttaaaaagaagatggaattctctgtagagcgtctcaatccacttttaaccatggatgagagcagactccatttaccctgaaatagcagcttctcttgagaggagagtgacatggaagcaactccgtctgctgcagctgaccccctcacactgagttcacagtgcgccctccctccctcccatctgggggtagtgccttatgctgggtgttggagcagagtgagggagaggaaaataaagacctgcacatctg

SEQ ID NO: 177208 - DNA, 987 bp, Artificial Sequence
  derived and/or modified sequence
atggccctgcggggcgtgtctgtgcggctgctgagccggggccctggcctgcacgtgctgcggacctgggtgagcagcgctgcccagacagccagcaggcctgagtttgactggcaggaccccctggtgctggaggagcagctgaccacagatgagatcctgatccgggacaccttccgcacctactgccaggagcggctgatgccccgcatcctgctggccaacagaaatgaaggctacggctgtgccggcgtgtcctctgtggcctacggcctgctggcccgggagctggagcgggtggacagcggctaccgcagcgccatgtctgtgcagagcagcctggtgatgcaccccatctatgcctacggcagcgaggagcagaggcagaagtacctgccccagctggccaagggggagctgctgggctgcttcggcctgacagagcccaacagcggcagtgaccccagctccatggagacccgggcccactacaacagcagcaacaagagctacaccctgaatggcaccaagacctggatcaccaacagccccatggctgacctgtttgtggtgtgggcccgctgtgaagatggctgcatccggggcttcctgctggagaagggcatgaggggcctgagcgccccccgcatccagggcaagttcagcctgcgggccagcgccaccggcatgatcatcatggatggagtggaggtgcctgaagaaaatgtgctgcccggggccagcagcctgggcggccccttcggctgcctgaacaatgcccgctatggcatcgcctggggcgtgctgggcgccagcgagttctgcctgcacacagcccggcagtatgccctggacaggatgcagtttggagtgcccctggccaggaaccagctgatccagaagaagctggccgacatgctgacagagatcaccctgggcctgcacgcctgcctgcagctgggccgcctgaaggaccaggacaagtag

SEQ ID NO: 177209 - DNA, 1287 bp, Artificial Sequence
  derived and/or modified sequence
atggccctgcggggcgtgtctgtgcggctgctgagccggggccctggcctgcacgtgctgcggacctgggtgagcagcgctgcccagacagagaagggcggccgcacccagagccagctggccaagagcagcaggcctgagtttgactggcaggaccccctggtgctggaggagcagctgaccacagatgagatcctgatccgggacaccttccgcacctactgccaggagcggctgatgccccgcatcctgctggccaacagaaatgaggtgttccaccgggagatcatcagcgagatgggagagctgggcgtgctgggccccaccatcaagggctacggctgtgccggcgtgtcctctgtggcctacggcctgctggcccgggagctggagcgggtggacagcggctacagaagtgccatgtctgtgcagagcagcctggtgatgcaccccatctatgcctacggcagcgaggagcagaggcagaagtacctgccccagctggccaagggggagctgctgggctgcttcggcctgacagagcccaacagcggcagtgaccccagctccatggagacccgggcccactacaacagcagcaacaagagctacaccctgaatggcaccaagacctggatcaccaacagccccatggctgacctgtttgtggtgtgggcccgctgtgaagatggctgcatccggggcttcctgctggagaagggcatgaggggcctgagcgccccccgcatccagggcaagttcagcctgcgggccagcgccaccggcatgatcatcatggatggagtggaggtgcctgaggagaatgtgctgcccggggccagcagcctgggcggccccttcggctgcctgaacaatgcccgctatggaattgcctggggcgtgctgggcgccagcgagttctgcctgcacacagcccggcagtatgccctggacaggatgcagtttggagtgcccctggccaggaaccagctgatccagaagaagctggccgacatgctgacagagatcaccctgggcctgcacgcctgcctgcagctgggccgcctgaaggaccaggacaaggccgcccctgagatggtgtccctgctgaagaggaacaactgtgggaaggccctggacatcgcccggcaggcccgggacatgctgggcggcaatggcatcagtgatgagtaccacgtgatcagacatgccatgaacctggaggccgtgaacacctatgaggtggtgcagatgtgcagcctgaagaggcgctggaacagcctgtag

SEQ ID NO: 177210 - DNA, 987 bp, Artificial Sequence
  derived and/or modified sequence
atggccctgcggggcgtgagcgtgcggctgctgagccggggccccggtctgcacgtattacgcacctgggtctcatctgcagctcagactgctagccgccctgaattcgactggcaggacccactggttctggaggagcagctgacaacagatgagatactcataagagacacgtttcgaacctactgtcaggagcgtcttatgccccgaattcttctcgctaatcgtaacgagggctatgggtgtgcaggagtgtcttcagttgcctatgggctgcttgcaagggaactcgagagagtggacagtggataccgcagcgcaatgtccgtgcagagtagtctagtcatgcaccccatttacgcctatggcagtgaagagcagcgccagaagtatctaccacagctggccaaaggagaattgctgggctgctttggcctaactgaaccaaattccggatccgatccgtcctctatggaaacgcgcgcacattacaacagttcgaacaaatcctacacactgaatggcactaagacctggatcactaatagtccaatggccgacctgttcgtggtttgggcacgatgcgaggacggttgcatacggggctttcttctcgagaaaggaatgaggggactatccgccccgcgtatccaaggtaagttttcccttagagccagcgccactggcatgatcatcatggatggggtggaagtccccgaggaaaacgtgctccccggtgcttcttccctcggcggaccattcgggtgtttaaataatgcaagatatggcatcgcctggggcgtcctgggcgccagcgaattctgcttacatacagcacgacagtatgccctggacagaatgcagtttggagtgcctctagctcggaatcagctcatacagaaaaagctggcagatatgttaacagagattacgttaggcttacatgcatgcctgcaacttggccggttgaaggatcaagacaagtag

SEQ ID NO: 177211 - DNA, 1287 bp, Artificial Sequence
  derived and/or modified sequence
atggccctgcggggcgtgagcgtgcggctgctgagccggggccccggcctgcatgtgcttcgtacttgggtttcttccgccgcccaaacagaaaaagggggccgcacacagagccagctcgcaaaatcgtcacggcccgagtttgactggcaagacccactggtgcttgaggaacagctcaccactgacgagattctgatccgcgacaccttcagaacatactgccaggaaaggctgatgcctaggatactcctggctaatcggaacgaagtgtttcaccgggagataatatcggagatgggcgagctgggggtcctcggaccaaccataaaagggtacggctgtgccggggttagcagtgtggcctacggtctgctcgccagagagctggaacgagtggacagcggataccgcagtgctatgtccgtgcagagcagcctagtgatgcatccgatctacgcgtacggaagcgaggaacagcggcagaagtatctgccccagctcgctaagggtgagctcctgggctgcttcgggctcacagaacccaactctgggagcgatccctcaagtatggaaactagagcccactataatagttcaaacaagtcttacactctgaacgggacaaagacctggattacgaattcaccaatggctgatctgtttgtggtgtgggcccggtgcgaggatggctgcatccggggatttctgctcgagaaggggatgcggggcttgagcgctcctcggatccaaggaaaattctcgttaagggcatcagccacaggtatgataatcatggacggagtggaagtgcctgaggagaacgtcctgcccggtgcgtcaagtctgggcggcccgttcggatgtttaaataatgctcgatatggaatcgcatggggtgtgttgggcgcctccgagttctgcctccacaccgcacggcagtatgcccttgaccgaatgcaatttggggttccgctcgctagaaaccagttgattcagaagaagctggctgacatgcttacggaaatcactctcggacttcacgcctgtctacagttgggacgccttaaggatcaggacaaggctgcccctgaaatggtctctctgttaaagaggaataattgtgggaaggctctggacatcgccagacaagcaagagacatgctgggggggaatgggattagcgacgaataccacgtgattcggcacgcgatgaatctggaagctgtgaacacctacgaggttgtccagatgtgctctctaaagagacggtggaattccctatag

SEQ ID NO: 177212 - DNA, 987 bp, Artificial Sequence
  derived and/or modified sequence
atggcactccgaggggtttctgtgagactgctaagccgtggacccggtttacacgtgttacgtacgtgggtatccagcgctgctcagactgcctctcgaccagagtttgattggcaggaccctctcgtgcttgaagaacaattgaccacggacgagatacttattcgggatacctttaggacatactgccaggagcgtctcatgccccgaattcttctggctaaccggaatgagggttacggctgcgctggggtcagtagtgtggcctacggcctcctggctcgggaactggaacgggtggattcaggatatcgaagcgccatgagcgtccaaagcagtctggtaatgcatccaatctacgcctacggaagcgaagagcagaggcagaagtatctgccacaattggcgaagggcgaacttctgggctgttttggcctaaccgagcccaattcggggtccgaccccagctctatggagactcgggctcactacaacagctcaaataaatcatacaccctaaatggtaccaagacctggataaccaacagtccgatggcagacctttttgtggtgtgggcaagatgtgaggacgggtgcatacggggatttctgttggagaagggtatgagggggctcagcgctccacgcattcagggcaagttctcattacgagcttccgccaccggtatgatcattatggacggtgtagaggttccggaagaaaacgttctcccaggtgcgagttccctgggcggtccctttggctgccttaacaatgccaggtacggcatagcctggggagtgctgggcgcttcagaattctgcctgcatacagccaggcaatacgctctggacaggatgcaatttggtgtccctctggccagaaaccagctgattcagaagaagcttgcggatatgctcacagaaatcaccctggggctgcacgcttgtctgcagctggggaggctgaaggatcaggacaagtag

SEQ ID NO: 177213 - DNA, 1287 bp, Artificial Sequence
  derived and/or modified sequence
atggccttgcgcggagtgtcggttagactcctgtctagaggcccagggctgcacgtactccgtacatgggtgagcagcgctgcccagaccgaaaaaggtgggaggactcagtctcagctcgcaaaaagctcgaggccagagtttgactggcaggacccgctagtgcttgaagaacagttgactactgatgagatcttaatcagggacacctttaggacctattgccaggagcgcctcatgcctcggattttgctggccaaccggaatgaggtcttccacagggagatcatctcagaaatgggcgaactgggggtactgggcccaactattaaggggtacggttgcgctggtgtgagctcagtcgcttacggcctgctagctcgcgaactggagagggttgactccgggtatcggagtgctatgtccgttcagtcatctctggtgatgcacccaatctacgcatatggatccgaggaacagcgccaaaaatacctgccccagttggccaagggcgaactgctgggatgcttcggcctgacggagcccaatagtgggtccgaccctagctctatggaaaccagggcccattataattcaagcaacaagagctacactttgaatggtaccaaaacatggattactaactctcccatggcggatctgtttgtggtgtgggctagatgcgaggacgggtgcataagaggatttttgttggagaaaggcatgagaggcctgagcgccccacggattcagggtaaattctctcttagggcctcggccacgggtatgatcataatggatggggtcgaggtacctgaggagaacgttctgcccggtgcaagttctctaggaggtcctttcggttgcttaaacaatgcccgatatggtattgcctggggcgttctaggtgctagcgaattttgcttgcacacagcgcgacagtacgcactggacaggatgcagtttggtgtcccattggcgaggaaccaactgatccaaaaaaagctcgcagacatgctaacagaaattaccctcgggctgcacgcttgcttacaactgggtcggcttaaagaccaagacaaagccgctcccgagatggtctccttactgaaacgcaataactgtggcaaagccttagatatcgccagacaagcccgagacatgttgggaggaaacgggattagcgacgaataccacgtaatcagacacgcaatgaatctagaagctgtaaatacatacgaagtggtccagatgtgctccctcaaacgtaggtggaactctctctag

SEQ ID NO: 177214 - DNA, 987 bp, Artificial Sequence
  derived and/or modified sequence
atggccctgagaggcgtgagcgtgagactgctgagcagaggccccggcctgcacgtgctgagaacctgggtgagcagcgccgcccagaccgccagcagacccgagttcgactggcaggaccccctggtgctggaggagcagctgaccaccgacgagatcctgatcagagacaccttcagaacctactgccaggagagactgatgcccagaatcctgctggccaacagaaacgagggctacggctgcgccggcgtgagcagcgtggcctacggcctgctggccagagagctggagagagtggacagcggctacagaagcgccatgagcgtgcagagcagcctggtgatgcaccccatctacgcctacggcagcgaggagcagagacagaagtacctgccccagctggccaagggcgagctgctgggctgcttcggcctgaccgagcccaacagcggcagcgaccccagcagcatggagaccagagcccactacaacagcagcaacaagagctacaccctgaacggcaccaagacctggatcaccaacagccccatggccgacctgttcgtggtgtgggccagatgcgaggacggctgcatcagaggcttcctgctggagaagggcatgagaggcctgagcgcccccagaatccagggcaagttcagcctgagagccagcgccaccggcatgatcatcatggacggcgtggaggtgcccgaggagaacgtgctgcccggcgccagcagcctgggcggccccttcggctgcctgaacaacgccagatacggcatcgcctggggcgtgctgggcgccagcgagttctgcctgcacaccgccagacagtacgccctggacagaatgcagttcggcgtgcccctggccagaaaccagctgatccagaagaagctggccgacatgctgaccgagatcaccctgggcctgcacgcctgcctgcagctgggcagactgaaggaccaggacaagtag

SEQ ID NO: 177215 - DNA, 1287 bp, Artificial Sequence
  derived and/or modified sequence
atggccctgagaggcgtgagcgtgagactgctgagcagaggccccggcctgcacgtgctgagaacctgggtgagcagcgccgcccagaccgagaagggcggcagaacccagagccagctggccaagagcagcagacccgagttcgactggcaggaccccctggtgctggaggagcagctgaccaccgacgagatcctgatcagagacaccttcagaacctactgccaggagagactgatgcccagaatcctgctggccaacagaaacgaggtgttccacagagagatcatcagcgagatgggcgagctgggcgtgctgggccccaccatcaagggctacggctgcgccggcgtgagcagcgtggcctacggcctgctggccagagagctggagagagtggacagcggctacagaagcgccatgagcgtgcagagcagcctggtgatgcaccccatctacgcctacggcagcgaggagcagagacagaagtacctgccccagctggccaagggcgagctgctgggctgcttcggcctgaccgagcccaacagcggcagcgaccccagcagcatggagaccagagcccactacaacagcagcaacaagagctacaccctgaacggcaccaagacctggatcaccaacagccccatggccgacctgttcgtggtgtgggccagatgcgaggacggctgcatcagaggcttcctgctggagaagggcatgagaggcctgagcgcccccagaatccagggcaagttcagcctgagagccagcgccaccggcatgatcatcatggacggcgtggaggtgcccgaggagaacgtgctgcccggcgccagcagcctgggcggccccttcggctgcctgaacaacgccagatacggcatcgcctggggcgtgctgggcgccagcgagttctgcctgcacaccgccagacagtacgccctggacagaatgcagttcggcgtgcccctggccagaaaccagctgatccagaagaagctggccgacatgctgaccgagatcaccctgggcctgcacgcctgcctgcagctgggcagactgaaggaccaggacaaggccgcccccgagatggtgagcctgctgaagagaaacaactgcggcaaggccctggacatcgccagacaggccagagacatgctgggcggcaacggcatcagcgacgagtaccacgtgatcagacacgccatgaacctggaggccgtgaacacctacgaggtggtgcagatgtgcagcctgaagagaagatggaacagcctgtag

SEQ ID NO: 177216 - protein, 194 aa, Artificial Sequence
  derived and/or modified sequence
MAAPQDVHVRICNQEIVKFDLEVKALIQDIRDCSGPLSALTELNTKVKEKFQQLRHRIQDLEQLAKEQDKESEKQLLLQEVENHKKQMLRKTTKESLAQTSSTITESLMGISRMMAQQVQQSEEAMQSLVTSSRTILDANEEFKSMSGTIQLGRKLITKYNRRELTDKLLIFLALALFLATVLYIVKKRLFPFL

SEQ ID NO: 177217 - DNA, 585 bp, Artificial Sequence
  derived and/or modified sequence
atggccgccccccaggacgtgcacgtgagaatctgcaaccaggagatcgtgaagttcgacctggaggtgaaggccctgatccaggacatcagagactgcagcggccccctgagcgccctgaccgagctgaacaccaaggtgaaggagaagttccagcagctgagacacagaatccaggacctggagcagctggccaaggagcaggacaaggagagcgagaagcagctgctgctgcaggaggtggagaaccacaagaagcagatgctgagaaagaccaccaaggagagcctggcccagaccagcagcaccatcaccgagagcctgatgggcatcagcagaatgatggcccagcaggtgcagcagagcgaggaggccatgcagagcctggtgaccagcagcagaaccatcctggacgccaacgaggagttcaagagcatgagcggcaccatccagctgggcagaaagctgatcaccaagtacaacagaagagagctgaccgacaagctgctgatcttcctggccctggccctgttcctggccaccgtgctgtacatcgtgaagaagagactgttccccttcctgtag

SEQ ID NO: 177218 - DNA, 585 bp, Artificial Sequence
  derived and/or modified sequence
atggctgcgccccaagatgtccatgtgagaatttgcaatcaggagatagtgaaattcgacctggaggtgaaagccctaattcaagatataagggactgctccggccctctgtcagcactcaccgaactaaacacaaaggtcaaggagaagttccagcagttgcgccacaggatccaagatctggaacagctggctaaagaacaagataaagagagtgaaaagcaactgctgctccaggaggtcgaaaaccacaagaagcaaatgctgcgtaaaacaaccaaagagtccctcgcgcagacctccagtaccataaccgaatccctgatggggataagcagaatgatggcacaacaggtgcagcaatcagaagaggccatgcagtccctagtgacatccagtaggactatcctagacgctaatgaggagtttaagtccatgagcgggaccatccagcttggccggaagctcattaccaaatataataggcgcgaactcacagataagctgctgatcttcctagccctcgctttgtttctcgccacagtcctgtatattgtaaagaagcgcttgttcccttttctttag

SEQ ID NO: 177219 - DNA, 585 bp, Artificial Sequence
  derived and/or modified sequence
atggccgccccccaggatgtgcacgtgcgcatctgcaaccaggagatcgtgaagtttgacctggaggtgaaggccctgatccaggacatccgggactgcagcggccccctgagcgccctgacagagctgaacaccaaggtgaaggagaagttccagcagctgcggcaccgcatccaggacctggagcagctggccaaggagcaggacaaggagagcgagaagcagctgctgctgcaggaggtggagaaccacaagaagcagatgctgaggaagaccaccaaggagagcctggcccagaccagcagcaccatcacagagagcctgatgggcatcagcaggatgatggcccagcaggtgcagcagagcgaggaggccatgcagagcctggtgaccagcagcaggaccatcctggatgccaatgaggagttcaagtccatgagcggcaccatccagctgggcaggaagctgatcaccaagtacaacagaagagagctgacagacaagctgctgatcttcctggccctggccctcttcctggccaccgtgctgtacatcgtgaagaagaggctcttccccttcctgtag

SEQ ID NO: 177220 - DNA, 585 bp, Artificial Sequence
  derived and/or modified sequence
atggccgccccccaggacgtgcacgtgcggatctgcaaccaggagattgtaaaattcgacctggaagttaaggcactgatccaggatattagagactgcagtggaccactgtctgccttgacggagcttaatacgaaggtcaaagagaaattccagcagctgcggcatcgcattcaggacctagagcagctcgcaaaagagcaggataaggaaagtgagaagcaactgctgttacaagaagtggagaaccataagaagcagatgctgcggaaaaccaccaaggagtcgctcgcacagacctcctcaaccattacagagagcctgatggggatttctagaatgatggcacagcaggtgcagcaatctgaggaggccatgcagagcctcgtaacaagttctaggaccatcctcgacgccaacgaggaatttaaaagtatgtctgggactatccagctgggacggaagttgatcactaaatataatcggagggagttaacggataaactcctgatctttctggcattggctttattccttgctacagtgttatacatagtgaaaaagcggctgtttccttttctatag

SEQ ID NO: 177221 - DNA, 585 bp, Artificial Sequence
  derived and/or modified sequence
atggctgctccacaagacgtgcatgtgcggatttgtaatcaggagattgttaagttcgacttagaggtgaaggctctaattcaggacatacgggattgtagcggcccattgagtgcgttgaccgagctgaatacaaaggtgaaagagaagttccagcagttaagacataggattcaggacttggaacagctcgcgaaagaacaggacaaagaaagtgagaagcagttactgcttcaagaggtcgaaaaccataagaagcagatgttgagaaaaacgaccaaggagtcccttgctcaaacctcaagcactatcaccgagagcttaatgggcatttcgagaatgatggcacaacaggtccaacagtcggaagaagccatgcagtctctggtcacctcatctagaacaatcttggatgctaacgaggagtttaagagtatgtcaggaactatccagctcgggagaaaactgattactaagtacaaccgacgtgagcttactgacaagctcctcatattcctggcccttgctctgttcttggccaccgtgctttacattgtgaagaaacgcctatttccctttttatag

SEQ ID NO: 177222 - DNA, 721 bp, Artificial Sequence
  derived and/or modified sequence
atggcggctccccaagacgtccacgtccggatctgtaaccaagagattgtcaaatttgacctggaggtgaaggcgcttattcaggatatccgtgattgttcaggacccttaagtgctcttactgaactgaatactaaagtaaaagagaaatttcaacagttgcgtcacagaatacaggacctggagcagttggctaaagagcaagacaaagaatcagagaaacaacttctactccaggaagtggagaatcacaaaaagcagatgctcaggaaaaccaccaaagagagcctggcccagacatccagtaccatcactgagagcctcatggggatcagcaggatgatggcccagcaggtccagcagagcgaggaggccatgcagtctctagtcacttcttcacgaacgatcctggatgcaaatgaagaatttaagtccatgtcgggcaccatccagctgggccggaagcttatcacaaaatacaatcgccgggagctgacggacaagcttctcatcttccttgcgctagccctgtttcttgctacggtcctctatattgtgaaaaagcggctctttccatttttgtgagatcccaaaggtgccagttctggccctttcagctcctgtttcaggatctgtcctggttcctgagctctaggctgctaagctgagccacacacccctccgtttgcaccagttgcctgcaggttggatggaacacagt

SEQ ID NO: 177223 - protein, 271 aa, Artificial Sequence
  derived and/or modified sequence
MAAPQDVHVRICNQEIVKFDLEVKALIQDIRDCSGPLSALTELNTKVKEKFQQLRHRIQPVLYQRAFIWTASTFFFKLTYSLTDFSSTQHDFNSPTTPVTFSDLEQLAKEQDKESEKQLLLQEVENHKKQMLSNQASWRKANLTCKIAIDNLEKAELLQGGDLLRQRKTTKESLAQTSSTITESLMGISRMMAQQVQQSEEAMQSLVTSSRTILDANEEFKSMSGTIQLGRKLITKYNRRELTDKLLIFLALALFLATVLYIVKKRLFPFL

SEQ ID NO: 177224 - DNA, 1339 bp, Artificial Sequence
  derived and/or modified sequence
ctctagggggcgctgccccgagactgggtggggagggaaagaaggtggtgcgaaaacgcgtttgaacttgggtcctgccgctgcccgtagccggcgtccccaacatggcggctccccaagacgtccacgtccggatctgtaaccaagagattgtcaaatttgacctggaggtgaaggcgcttattcaggatatccgtgattgttcaggacccttaagtgctcttactgaactgaatactaaagtaaaagagaaatttcaacagttgcgtcacagaatacagccagttctctatcaaagggcatttatttggactgcttccacatttttttttaagctaacttattccctgacagacttttcttcaactcagcatgacttcaactctccaactacacctgttaccttcagtgacctggagcagttggctaaagagcaagacaaagaatcagagaaacaacttctactccaggaagtggagaatcacaaaaagcagatgctcagcaatcaggcctcatggaggaaagctaatctcacctgcaaaattgcaatcgacaatctagagaaagcagaacttcttcagggaggagatctcttaaggcaaaggaaaaccaccaaagagagcctggcccagacatccagtaccatcactgagagcctcatggggatcagcaggatgatggcccagcaggtccagcagagcgaggaggccatgcagtctctagtcacttcttcacgaacgatcctggatgcaaatgaagaatttaagtccatgtcgggcaccatccagctgggccggaagcttatcacaaaatacaatcgccgggagctgacggacaagcttctcatcttccttgcgctagccctgtttcttgctacggtcctctatattgtgaaaaagcggctctttccatttttgtgagatcccaaaggtgccagttctggccctttcagctcctgtttcaggatctgtcctggttcctgagctctaggctgctaagctgagccacacacccctccgtttgcaccagttgcctgcaggttggatggaacacagtgccccacttttctgcaagtagctggcttgtaaagggtgaacagagccatgggaggaaggtctggcattgggatgccgccctggggacatacgaaccgcctccttccaccattgtgcactatgggaggccgctgctgcgtggagcacttaaagtccagcctccaggaccggatgcccctcctgtctcccgctcccatcgtgcccttaaatgccagatctggtggagggaagagagaagaggtaggaagaaaggtgatgaaaactcctggtcattccttgaataa

SEQ ID NO: 177225 - DNA, 816 bp, Artificial Sequence
  derived and/or modified sequence
atggccgcccctcaagacgtccacgtgagaatatgtaaccaggagatcgtgaagtttgatttagaagtgaaagctctgatccaggacatccgggactgctctggtccactcagcgctctcacagagctgaatactaaggtgaaagagaagttccagcagctgcgccataggattcagcctgttctttatcaacgggctttcatctggactgctagtacctttttcttcaagcttacgtatagtttgactgatttctctagcacgcagcatgactttaactcccccaccacacctgtaaccttctcagacctggaacagctggctaaggaacaggacaaggagtccgagaaacagctcttactgcaggaggtcgagaaccacaagaagcagatgctgagtaatcaggcttcatggagaaaggccaacctgacctgcaagatagctatcgataatctggagaaagctgaactgctgcaggggggagatctactaaggcagaggaagactacaaaggagtccctggctcagacctctagcaccattactgaatcgttgatggggatctcgagaatgatggcccagcaagtgcagcagagcgaagaagcgatgcagagtctagtcaccagctcccgaactatcctcgatgccaacgaggagtttaagtccatgtctggtacgatacaattgggcaggaagctgattaccaagtacaatcgccgagagctcacagacaagcttctgatatttctggctctggctctctttctggccacagtcctctatattgtcaaaaagcggttgttcccctttctgtag

SEQ ID NO: 177226 - DNA, 816 bp, Artificial Sequence
  derived and/or modified sequence
atggccgccccccaggatgtgcacgtgcgcatctgcaaccaggagatcgtgaagtttgacctggaggtgaaggccctgatccaggacatccgggactgcagcggccccctgagcgccctgacagagctgaacaccaaggtgaaggagaagttccagcagctgcggcaccgcatccagcctgtgctgtaccagagggccttcatctggacagccagcaccttcttcttcaagctgacctacagcctgacagacttcagcagcacccagcacgacttcaacagccccaccacccctgtgaccttcagtgacctggagcagctggccaaggagcaggacaaggagagcgagaagcagctgctgctgcaggaggtggagaaccacaagaagcagatgctgagcaaccaggcctcctggaggaaggccaacctgacctgcaagatcgccatcgacaacctggagaaggccgagctgctgcagggcggggacctgctgcggcagaggaagaccaccaaggagagcctggcccagaccagcagcaccatcacagagagcctgatgggcatcagcaggatgatggcccagcaggtgcagcagagcgaggaggccatgcagagcctggtgaccagcagcaggaccatcctggatgccaatgaggagttcaagtccatgagcggcaccatccagctgggcaggaagctgatcaccaagtacaacagaagagagctgacagacaagctgctgatcttcctggccctggccctcttcctggccaccgtgctgtacatcgtgaagaagaggctcttccccttcctgtag

SEQ ID NO: 177227 - DNA, 816 bp, Artificial Sequence
  derived and/or modified sequence
atggccgccccccaggacgtgcacgtgcggatctgcaaccaggagatcgtcaaattcgatctcgaggtcaaggctttgattcaggacattcgagactgtagtggccctctgagtgccctgaccgaactcaacaccaaggtgaaggagaaatttcagcagctccggcacaggattcagcctgtgctttaccagcgcgcgttcatctggacagcttccacattttttttcaaacttacgtattctctgacagacttttctagtactcaacatgacttcaatagcccaaccacaccagttactttctctgatctggagcaactagcaaaagaacaggacaaggagtctgaaaaacaattgctgctccaggaagttgaaaaccacaaaaagcagatgcttagcaatcaggcttcttggagaaaggccaacctgacctgcaaaatagctattgacaacttggaaaaggccgagctgctgcaaggaggggacttactaagacagcggaaaactaccaaggaaagtctcgctcagacctcttctacgataactgagtccctcatgggaatcagtagaatgatggcgcagcaggtacagcagtctgaggaagcaatgcagtcactggtcacatcctcccggactatcctagacgctaatgaggagtttaagagcatgtcaggaaccattcagctcggcagaaagctgataaccaaatacaatagacgtgagttaactgataagcttctgattttcctggcactggctctcttccttgccactgtgttgtatatcgtaaaaaagaggttgttcccatttctctag

SEQ ID NO: 177228 - DNA, 816 bp, Artificial Sequence
  derived and/or modified sequence
atggcggctcctcaggacgtacacgtccggatctgtaaccaggagattgtgaagttcgatcttgaggtcaaggcgttaatacaggatattcgtgattgcagcggaccactgagcgcactgacggaactaaacaccaaggtgaaagagaagtttcaacaacttaggcacaggatccagcctgtcttataccagcgcgcatttatatggaccgcttcgaccttctttttcaaactgacatattcactgaccgatttctcgagcactcagcatgactttaactctccgactacacctgtaaccttttctgacctggagcagctcgccaaagagcaggataaagaatccgagaaacagctgctccttcaggaggtggaaaatcacaaaaaacagatgctcagtaatcaagcctcctggcggaaggcgaaccttacatgcaagatagccatagataaccttgaaaaagccgagttactgcaggggggtgatcttttgaggcagcgcaagacaacaaaggagtcactggcacagacgtcttctactatcactgaaagcttgatgggcatctctcggatgatggcccaacaggtgcagcagagcgaggaggccatgcaatctttggtcacaagtagccgtacgattcttgacgctaatgaagagttcaaaagcatgagtggtaccattcagctcgggcgaaaactcatcaccaagtacaacagaagagagttgacggataagctcctgatattcttggcactcgcactgttcctggcaaccgttctgtatattgtgaagaagagacttttcccgtttctttag

SEQ ID NO: 177229 - DNA, 816 bp, Artificial Sequence
  derived and/or modified sequence
atggccgccccccaggacgtgcacgtgagaatctgcaaccaggagatcgtgaagttcgacctggaggtgaaggccctgatccaggacatcagagactgcagcggccccctgagcgccctgaccgagctgaacaccaaggtgaaggagaagttccagcagctgagacacagaatccagcccgtgctgtaccagagagccttcatctggaccgccagcaccttcttcttcaagctgacctacagcctgaccgacttcagcagcacccagcacgacttcaacagccccaccacccccgtgaccttcagcgacctggagcagctggccaaggagcaggacaaggagagcgagaagcagctgctgctgcaggaggtggagaaccacaagaagcagatgctgagcaaccaggccagctggagaaaggccaacctgacctgcaagatcgccatcgacaacctggagaaggccgagctgctgcagggcggcgacctgctgagacagagaaagaccaccaaggagagcctggcccagaccagcagcaccatcaccgagagcctgatgggcatcagcagaatgatggcccagcaggtgcagcagagcgaggaggccatgcagagcctggtgaccagcagcagaaccatcctggacgccaacgaggagttcaagagcatgagcggcaccatccagctgggcagaaagctgatcaccaagtacaacagaagagagctgaccgacaagctgctgatcttcctggccctggccctgttcctggccaccgtgctgtacatcgtgaagaagagactgttccccttcctgtag

SEQ ID NO: 177230 - protein, 237 aa, Artificial Sequence
  derived and/or modified sequence
MAAPQDVHVRICNQEIVKFDLEVKALIQDIRDCSGPLSALTELNTKVKEKFQQLRHRIQPVLYQRAFIWTASTFFFKLTYSLTDFSSTQHDFNSPTTPVTFSDLEQLAKEQDKESEKQLLLQEVENHKKQMLRKTTKESLAQTSSTITESLMGISRMMAQQVQQSEEAMQSLVTSSRTILDANEEFKSMSGTIQLGRKLITKYNRRELTDKLLIFLALALFLATVLYIVKKRLFPFL

SEQ ID NO: 177231 - DNA, 714 bp, Artificial Sequence
  derived and/or modified sequence
atggccgccccccaggacgtgcacgtgagaatctgcaaccaggagatcgtgaagttcgacctggaggtgaaggccctgatccaggacatcagagactgcagcggccccctgagcgccctgaccgagctgaacaccaaggtgaaggagaagttccagcagctgagacacagaatccagcccgtgctgtaccagagagccttcatctggaccgccagcaccttcttcttcaagctgacctacagcctgaccgacttcagcagcacccagcacgacttcaacagccccaccacccccgtgaccttcagcgacctggagcagctggccaaggagcaggacaaggagagcgagaagcagctgctgctgcaggaggtggagaaccacaagaagcagatgctgagaaagaccaccaaggagagcctggcccagaccagcagcaccatcaccgagagcctgatgggcatcagcagaatgatggcccagcaggtgcagcagagcgaggaggccatgcagagcctggtgaccagcagcagaaccatcctggacgccaacgaggagttcaagagcatgagcggcaccatccagctgggcagaaagctgatcaccaagtacaacagaagagagctgaccgacaagctgctgatcttcctggccctggccctgttcctggccaccgtgctgtacatcgtgaagaagagactgttccccttcctgtag

SEQ ID NO: 177232 - DNA, 714 bp, Artificial Sequence
  derived and/or modified sequence
atggccgctcctcaagacgttcacgtgaggatttgtaatcaggaaattgttaaattcgatctggaagtcaaggctcttatccaggacattcgcgactgcagcggacctttaagcgctctcactgaactgaataccaaagtcaaagagaaatttcagcaattgcgccaccggattcagccagtgctttatcaacgtgcatttatctggactgcgagcaccttcttttttaagctcacatatagcttgactgatttctcatctacccagcacgattttaactcccctaccacaccagtgacttttagtgatctggagcagcttgcaaaagagcaggacaaggaaagcgagaaacaactgctgcttcaggaggttgaaaaccataagaagcagatgctgcggaagacaacaaaagagagtctggcacagacgagctccaccattacggagagcctaatgggtatcagccgcatgatggcccagcaggtgcaacagagcgaagaggctatgcaaagcttagtcacctctagccgcacaatactggatgccaatgaggagtttaagtccatgagcgggaccattcagctggggcggaagttgataacgaaatacaatcgccgcgagctgacagataaacttctcatctttctggcattagcactttttctggccacagtcctctatatcgttaagaagagactttttccttttctctag

SEQ ID NO: 177233 - DNA, 714 bp, Artificial Sequence
  derived and/or modified sequence
atggccgccccccaggatgtgcacgtgcgcatctgcaaccaggagatcgtgaagtttgacctggaggtgaaggccctgatccaggacatccgggactgcagcggccccctgagcgccctgacagagctgaacaccaaggtgaaggagaagttccagcagctgcggcaccgcatccagcctgtgctgtaccagagggccttcatctggacagccagcaccttcttcttcaagctgacctacagcctgacagacttcagcagcacccagcacgacttcaacagccccaccacccctgtgaccttcagtgacctggagcagctggccaaggagcaggacaaggagagcgagaagcagctgctgctgcaggaggtggagaaccacaagaagcagatgctgaggaagaccaccaaggagagcctggcccagaccagcagcaccatcacagagagcctgatgggcatcagcaggatgatggcccagcaggtgcagcagagcgaggaggccatgcagagcctggtgaccagcagcaggaccatcctggatgccaatgaggagttcaagtccatgagcggcaccatccagctgggcaggaagctgatcaccaagtacaacagaagagagctgacagacaagctgctgatcttcctggccctggccctcttcctggccaccgtgctgtacatcgtgaagaagaggctcttccccttcctgtag

SEQ ID NO: 177234 - DNA, 714 bp, Artificial Sequence
  derived and/or modified sequence
atggccgccccccaggacgtgcacgtgcggatctgcaaccaggagatcgttaaatttgacctcgaagtaaaggccttgatccaggatatccgcgactgctcgggccccctgtccgcgctgaccgagttgaacacgaaggtgaaggaaaagttccagcagctgaggcaccggattcagcctgttctgtatcaacgcgccttcatctggacggcaagcaccttcttcttcaaactgacttactctttaactgatttttcatctacccagcatgactttaattcaccaactacacctgtgaccttcagcgatctcgagcagttggccaaagaacaagacaaggagtcggaaaagcagctcctgctacaagaagtcgagaaccacaagaagcaaatgctgcggaagaccacgaaagaatcactcgcccagactagttccacaattactgaatctcttatgggcatcagcaggatgatggcccagcaggtccagcagtctgaagaagccatgcagagcctggtcacatctagtagaaccattttggacgccaacgaggagtttaagtccatgtcagggaccatacagctgggcaggaagctgattacgaaatacaatcgtcgggagttaacagataaacttcttatctttctcgctttggccctctttctagctacagtactgtatatcgtgaagaagaggctgtttccctttctctag

SEQ ID NO: 177235 - DNA, 714 bp, Artificial Sequence
  derived and/or modified sequence
atggccgcaccacaggacgtacatgttagaatctgcaaccaggaaatcgtcaaatttgatctagaggtcaaggctctcattcaggacatcagagactgcagtggtccactgtcggccctgaccgaactaaacacgaaagtgaaggaaaagtttcaacagctccgacaccggattcagcctgtattgtaccagagagcattcatctggacagccagtacgtttttcttcaaactcacttattctctgactgatttttcgtccacccagcatgacttcaactctccaaccacccccgtcacgtttagcgatctggaacaactggcaaaggagcaggacaaggagagcgagaaacaattgcttctccaagaagtggagaatcacaaaaagcagatgctccggaagaccaccaaggagagcttggcacaaacctcaagcacaattacagagagtctcatgggtatttctcgaatgatggcccagcaggtgcagcagagcgaggaggccatgcaatcccttgtgacttcctcccggacaatcttggatgccaacgaggagttcaaaagcatgtccggcacaatccagctgggcagaaaactgataaccaagtacaaccgcagagaactgaccgataagctccttatctttttggcattagctcttttcctggccacggttctttacatcgtaaagaaacgactttttccatttctgtag

SEQ ID NO: 177236 - DNA, 1143 bp, Artificial Sequence
  derived and/or modified sequence
gtccccaacatggcggctccccaagacgtccacgtccggatctgtaaccaagagattgtcaaatttgacctggaggtgaaggcgcttattcaggatatccgtgattgttcaggacccttaagtgctcttactgaactgaatactaaagtaaaagagaaatttcaacagttgcgtcacagaatacagccagttctctatcaaagggcatttatttggactgcttccacatttttttttaagctaacttattccctgacagacttttcttcaactcagcatgacttcaactctccaactacacctgttaccttcagtgacctggagcagttggctaaagagcaagacaaagaatcagagaaacaacttctactccaggaagtggagaatcacaaaaagcagatgctcaggaaaaccaccaaagagagcctggcccagacatccagtaccatcactgagagcctcatggggatcagcaggatgatggcccagcaggtccagcagagcgaggaggccatgcagtctctagtcacttcttcacgaacgatcctggatgcaaatgaagaatttaagtccatgtcgggcaccatccagctgggccggaagcttatcacaaaatacaatcgccgggagctgacggacaagcttctcatcttccttgcgctagccctgtttcttgctacggtcctctatattgtgaaaaagcggctctttccatttttgtgagatcccaaaggtgccagttctggccctttcagctcctgtttcaggatctgtcctggttcctgagctctaggctgctaagctgagccacacacccctccgtttgcaccagttgcctgcaggttggatggaacacagtgccccacttttctgcaagtagctggcttgtaaagggtgaacagagccatgggaggaaggtctggcattgggatgccgccctggggacatacgaaccgcctccttccaccattgtgcactatgggaggccgctgctgcgtggagcacttaaagtccagcctccaggaccggatgcccctcctgtctcccgctcccatcgtgcccttaaatgccagatctggtggagggaagagagaagaggtaggaagaaaggtgatgaaaactcctggtcattccttgaataaa

SEQ ID NO: 177237 - protein, 844 aa, Artificial Sequence
  derived and/or modified sequence
MRQVCCSALPPPPLEKGRCSSYSDSSSSSSERSSSSSSSSSESGSSSRSSSNNSSISRPAAPPEPRPQQQPQPRSPAARRAAARSRAAAAGGMRRDPAPGFSMLLFGVSLACYSPSLKSVQDQAYKAPVVVEGKVQGLVPAGGSSSNSTREPPASGRVALVKVLDKWPLRSGGLQREQVISVGSCVPLERNQRYIFFLEPTEQPLVFKTAFAPLDTNGKNLKKEVGKILCTDCATRPKLKKMKSQTGQVGEKQSLKCEAAAGNPQPSYRWFKDGKELNRSRDIRIKYGNGRKNSRLQFNKVKVEDAGEYVCEAENILGKDTVRGRLYVNSVSTTLSSWSGHARKCNETAKSYCVNGGVCYYIEGINQLSCKCPVGYTGDRCQQFAMVNFSKAEELYQKRVLTITGICVALLVVGIVCVVAYCKTKKQRKQMHNHLRQNMCPAHQNRSLANGPSHPRLDPEEIQMADYISKNVPATDHVIRRETETTFSGSHSCSPSHHCSTATPTSSHRHESHTWSLERSESLTSDSQSGIMLSSVGTSKCNSPACVEARARRAAAYNLEERRRATAPPYHDSVDSLRDSPHSERYVSALTTPARLSPVDFHYSLATQVPTFEITSPNSAHAVSLPPAAPISYRLAEQQPLLRHPAPPGPGPGPGPGPGPGADMQRSYDSYYYPAAGPGPRRGTCALGGSLGSLPASPFRIPEDDEYETTQECAPPPPPRPRARGASRRTSAGPRRWRRSRLNGLAAQRARAARDSLSLSSGSGGGSASASDDDADDADGALAAESTPFLGLRGAHDALRSDSPPLCPAADSRTYYSLDSHSTRASSRHSRGPPPRAKQDSAPL

SEQ ID NO: 177238 - DNA, 2535 bp, Artificial Sequence
  derived and/or modified sequence
atgaggcaagtatgctgctctgcgctcccacccccccctctggaaaaaggacgatgcagctcatattccgattcttcttcctcctccagcgaaagaagttcttctagcagctcctcatcgagcgaatctggttcttcctctcgctcatcctctaacaactcctctatctcaagacccgcagcaccacccgaacctaggcctcagcagcaaccacagcctcggagccctgctgcgaggcgcgccgccgcacgttctagagcggcagccgcgggaggcatgcgcagagatccagcccccggtttctccatgctcctatttggcgtgtccctggcctgttacagccccagcctcaagagcgttcaagatcaggcatataaggcacctgtcgttgtagaaggaaaagtgcaaggcctagtccccgccgggggctctagctccaattcaacgagggagccaccagcctctggtagggttgccttggtcaaggtgctggataaatggccactgcggtctggtggcctgcagcgagaacaggtgatctctgttggctcctgcgttcccctagagaggaaccagcggtatattttctttctggagccaacagagcagccattagtctttaagactgctttcgcacctctggacacaaacggaaaaaacctgaagaaagaagtgggaaagattttatgtacagactgtgctacaaggcccaaactgaagaaaatgaagtcacagaccggccaggtgggagaaaagcagtccctgaagtgtgaagccgccgcaggcaacccccaacccagttaccggtggtttaaagatggcaaagaactgaatcggagccgcgatattcgcattaaatatggtaatggtagaaagaactcccgactgcaattcaacaaggtgaaagtggaagacgccggagaatacgtatgcgaagctgagaatattctcggtaaggatacggtgagaggccggttatacgttaattctgtgtctaccaccctgagttcgtggagcggtcatgcccggaaatgtaacgaaaccgctaagtcatattgtgtgaacggtggtgtatgctactatatcgagggaattaaccagttgagctgcaaatgccccgtggggtacactggcgacaggtgccagcagtttgcgatggtgaacttttccaaggctgaagagctgtaccagaagagggtgctgacaattaccgggatctgcgtagccctgctggttgtcgggatcgtctgcgtagtagcttactgcaaaactaagaaacagagaaaacagatgcataaccatctcagacagaatatgtgcccagcccatcagaatcggtcactggccaacggcccttctcatcccagactggaccctgaggaaattcaaatggccgattacatttcaaagaacgtaccggccacagaccatgtaatcagacgggagacagaaactacgttctcaggtagccactcctgtagtccaagccaccactgctcaacagccacacctacttcatctcaccggcacgaatcccatacctggagcctagagcggtcagagtctctcacctccgacagccagtcaggtattatgctgtcctctgtcggtactagcaaatgtaatagccccgcctgtgtggaagccagagctaggcgggccgccgcttacaatctcgaggaaagacgaagggccaccgcaccgccgtatcacgactcggtcgacagcctcagggactcacctcactccgagcgctacgtctcagcactgaccacccctgcaaggctttcccccgtcgatttccattattctctggctacccaggtccccaccttcgagatcacatcgccaaattctgcccacgcagtatcacttccaccagccgccccaatttcctaccggcttgccgagcagcagcctctactgcgacatcccgcccccccagggccggggccaggcccagggcctgggcctggtcctggagctgacatgcagagaagctatgactcctactattatcccgccgccgggcccggccctcgtagagggacctgcgctttgggtggaagcctggggtcattgccagcatctccctttagaatcccagaagatgacgagtacgagacaacccaagagtgtgcgccccctcctccacctcgacctcgcgcacgcggagcctcacgtcgaacttccgccggccctaggcgatggcgcagatctaggctcaacgggctggcagcccaacgggcaagggccgcccgcgactctctctccctgtcaagtggatccggcggggggtcagcctctgcctctgatgacgacgccgacgacgccgacggagctctggctgctgagtcaaccccttttctgggcttgcgcggagctcacgatgccctgcgtagcgactctcctcctttatgccccgccgccgactctcgaacatactacagcctggactctcattctacacgtgcctcttcacggcattcacgaggtccccccccaagggctaagcaagatagcgcccccctctag

SEQ ID NO: 177239 - DNA, 2535 bp, Artificial Sequence
  derived and/or modified sequence
atgaggcaggtgtgctgcagcgccctgcccccaccacccctggagaagggccgctgcagcagctacagcgacagcagcagcagcagcagcgagaggagcagcagcagcagcagcagcagcagcgagagcggcagcagcagccgcagcagcagcaacaacagcagcatcagcaggcctgctgcccctcctgagccccggccccagcagcagccccagcccaggagccctgctgccaggagagctgctgcccggagcagagctgctgctgctgggggcatgaggcgggaccctgcccctggcttctccatgctgctgtttggagtgtccctggcctgctacagccccagcctgaagtctgtgcaggaccaggcctacaaggcccctgtggtggtggagggcaaggtgcagggcctggtgcctgctgggggcagcagcagcaacagcacccgggagcccccagccagcggccgggtggccctggtgaaggtgctggacaagtggcccctgcggagcggcggcctgcagcgggagcaggtgatctctgtgggcagctgtgtgcccctggagaggaaccagcgctacatcttcttcctggagcccacagagcagcccctggtgttcaagacagcctttgcccccctggacaccaacgggaagaacctgaagaaggaggtgggcaagatcctgtgcacagactgtgccacccggcccaagctgaagaagatgaagagccagacaggccaggtgggggagaagcagagcctgaagtgtgaggccgctgctggcaacccccagcccagctaccgctggttcaaggatggcaaggagctgaacagaagccgggacatccgcatcaagtatggaaatggaaggaagaacagccggctgcagttcaacaaggtgaaggtggaggatgctggggagtatgtgtgtgaggccgagaacatcctgggcaaggacacagtgcggggccgcctgtatgtgaacagcgtgtccaccaccctgagctcctggagcggccacgccaggaagtgcaatgaaacagccaagagctactgtgtgaatggaggagtgtgctactacatcgagggcatcaaccagctgagctgcaagtgccctgtgggctacacaggagaccgctgccagcagtttgccatggtgaacttcagcaaggccgaggagctgtaccagaagagggtgctgaccatcaccggcatctgtgtggccctgctggtggtgggcatcgtgtgtgtggtggcctactgcaagaccaagaagcagaggaagcagatgcacaaccacctgcggcagaacatgtgcccagcccaccagaacagaagcctggccaacggccccagccacccccggctggaccctgaggagatccagatggctgactacatcagcaagaatgtgcctgccacagaccacgtgatccggcgggagacagagaccaccttcagcggcagccacagctgcagccccagccaccactgcagcacagccacccccaccagcagccacagacatgagagccacacctggagcctggagaggtctgagagcctgaccagtgacagccagagcggcatcatgctgagctctgtgggcaccagcaagtgcaacagccctgcctgtgtggaggcccgggcccggcgggctgctgcctacaacctggaggagaggagaagagccacagccccaccctaccatgattctgtggacagcctgcgggacagcccccacagcgagcgctacgtgtctgccctgaccaccccagcccggctgagccctgtggacttccactacagcctggccacccaggtgcccacctttgagatcaccagccccaacagcgcccatgctgtgtccctgcccccagctgcccccatctcctaccgcctggccgagcagcagcccctgctgcggcacccagcccctcctggccctggccctggccctggccctggccctggccctggagctgacatgcagaggagctatgacagctactactacccagctgctggccctggcccccggcggggcacctgtgccctgggcggcagcctgggcagcctgcctgccagccccttccgcatcccagaagatgatgaatatgagaccacccaggagtgtgcccctcctcctccaccccggccccgggcccggggggccagcaggaggaccagcgctggcccccggcgctggaggaggagccggctgaatggcctggccgcccagagggcccgggccgcccgggacagcctgagcctgagcagcggcagcggcggcggcagcgccagcgccagtgatgatgatgctgatgatgctgatggagccctggccgctgagagcacccccttcctgggcctgcggggggcccatgatgccctgcggagtgacagcccccccctgtgcccagctgctgacagcaggacctactacagcctggacagccacagcacccgggccagcagccgccacagccggggccccccaccccgggccaagcaggacagcgcccccctgtag

SEQ ID NO: 177240 - DNA, 2535 bp, Artificial Sequence
  derived and/or modified sequence
atgcggcaggtgtgctgcagcgccctgccccccccccccctggagaagggccgctgctccagctacagtgatagttcgagtagctccagtgagcgctcgtcgtcctcaagcagttcttcaagcgagtctggcagtagcagccggtcttctagcaacaatagcagcattagtcggccagctgccccccccgagccccggccccagcagcagccccagccccggagccctgctgcccgccgggccgccgcacgttccagagccgccgcggctggcggcatgaggagggatcctgcccctggctttagcatgctactctttggcgtttctctagcctgttattctccgtccctgaaatccgtacaggatcaagcctataaagcgcccgtagtagtcgagggcaaggtgcagggcctagtccctgcaggtggctcaagctctaacagtacgagggaaccgcccgcatctggccgcgtggccctggttaaagttctggacaagtggcctctgcggagcggtggcctccagcgtgaacaagtcatctccgtaggctcctgtgtgccactggaacgcaaccaacgctacatctttttcctggagcctaccgaacaaccattggtcttcaaaacagcattcgctcccctcgacacaaatggcaaaaacctcaagaaagaggtgggaaaaatcttatgtaccgactgcgccacacgaccaaaactgaaaaagatgaagtctcaaaccggacaggttggcgagaaacagtccctcaaatgcgaggccgccgctgggaatcctcagccctcctaccgctggtttaaagatgggaaggagctgaaccgctcccgggacatccggattaaatatgggaacggtcggaaaaacagtcgcctacagttcaacaaagtcaaagtggaggatgccggggaatacgtgtgtgaagccgagaacatcctgggcaaagacacagtgagggggaggctgtacgtgaactccgtgtctacaacattatcatcctggagtggccacgctcgaaaatgcaacgaaaccgcaaaaagctattgcgtcaatggtggggtgtgttactatatcgaaggaattaaccagctgtcatgcaaatgccccgtaggctatacaggagacaggtgtcagcagttcgctatggttaacttctctaaggccgaggaattgtaccaaaagcgagtactgacaatcactggtatttgcgtcgcgctgctagttgtgggcattgtgtgtgtagtggcgtattgcaaaactaagaaacaacgtaaacagatgcacaatcacttgaggcaaaacatgtgtcccgcgcatcagaacagatccttggctaacggaccttcacaccctagactggaccccgaggagatacaaatggctgactacatttcaaaaaatgtgcccgcaactgaccacgtcatccgcagagaaactgagaccacgtttagcggttcccactcatgctctccgtctcaccattgctctacagctactccgacaagctcccaccgtcatgagagccatacttggtctttggaaaggtccgagagcctaacctccgactctcaatccggaattatgttgagctccgtgggaactagtaagtgcaattcaccagcctgcgtggaagccagggcgaggcgagcagccgcctataacttagaggaaagacgccgggcaaccgctcctccttaccacgacagcgtggatagcctccgtgacagtccccactccgaacggtacgtttccgcactcaccactcctgccaggctctcgcccgtagactttcactactctctggccacacaggtccctacattcgagatcacttcacccaacagtgcgcatgccgtgtcgctacccccggcagctcccatttcatacaggcttgctgaacagcagcccttgctcaggcatccggcccctcccggccccggacccggaccagggcccggacctggccctggcgccgatatgcagcggtcctatgattcttattattatccagcagccggccctggtccccgaagggggacctgtgccctgggcggttccctggggagcctccccgcgtcaccatttagaattcctgaagacgatgagtatgagacaacccaggaatgtgccccaccaccaccccctcgtccgcgagcaaggggtgcatccagacgtacatcagccggacctagaagatggcgtcggagtagactgaacggactcgcagcacagcgagcacgtgccgctcgggatagcctgtctctgagtagcggttcagggggagggtccgcctctgcaagtgatgacgacgccgacgatgctgatggagcgcttgcggccgagagcacaccatttttgggactgcgaggcgcacacgacgccttgcggtcagactctcccccactgtgtcccgccgcagatagtcggacctactattctctcgactcccacagcactcgagcatcctcccgacacagccggggtcctcctccacgggctaagcaggacagtgcccctttgtag

SEQ ID NO: 177241 - DNA, 2535 bp, Artificial Sequence
  derived and/or modified sequence
atgcggcaggtttgctgctcagcgctgccgccgccgccactggagaagggtcggtgcagcagctacagcgacagcagcagcagcagcagcgagaggagcagcagcagcagcagcagcagcagcgagagcggcagcagcagcaggagcagcagcaacaacagcagcatctctcgtcccgctgcgcccccagagccgcggccgcagcaacagccgcagccccgcagccccgcagcccggagagccgccgcccgttcgcgagccgcagccgccggcggcatgaggcgcgacccggcccccggcttctccatgctgctcttcggtgtgtcgctcgcctgctactcgcccagcctcaagtcagtgcaggaccaggcgtacaaggcacccgtggtggtggagggcaaggtacaggggctggtcccagccggcggctccagctccaacagcacccgagagccgcccgcctcgggtcgggtggcgttggtaaaggtgctggacaagtggccgctccggagcggggggctgcagcgcgagcaggtgatcagcgtgggctcctgtgtgccgctcgaaaggaaccagcgctacatctttttcctggagcccacggaacagcccttagtctttaagacggcctttgcccccctcgataccaacggcaaaaatctcaagaaagaggtgggcaagatcctgtgcactgactgcgccacccggcccaagttgaagaagatgaagagccagacgggacaggtgggtgagaagcaatcgctgaagtgtgaggcagcagccggtaatccccagccttcctaccgttggttcaaggatggcaaggagctcaaccgcagccgagacattcgcatcaaatatggcaacggcagaaagaactcacgactacagttcaacaaggtgaaggtggaggacgctggggagtatgtctgcgaggccgagaacatcctggggaaggacaccgtccggggccggctttacgtcaacagcgtgagcaccaccctgtcatcctggtcggggcacgcccggaagtgcaacgagacagccaagtcctattgcgtcaatggaggcgtctgctactacatcgagggcatcaaccagctctcctgcaagtgtcctgtgggatacaccggggacaggtgtcagcagttcgcaatggtcaacttctccaaagccgaggagctgtaccagaagagggtcctgaccatcacgggcatctgcgtggctctgctggtcgtgggcatcgtctgtgtggtggcctactgcaagaccaaaaaacagcggaagcagatgcacaaccacctccggcagaacatgtgcccggcccatcagaaccggagcttggccaatgggcccagccacccccggctggacccagaggagatccagatggcagattatatttccaagaacgtgccagccacagaccatgtcatcaggagagaaactgagaccaccttctctgggagccactcctgttctccttctcaccactgctccacagccacacccacctccagccacagacacgagagccacacgtggagcctggaacgttctgagagcctgacttctgactcccagtcggggatcatgctatcatcagtgggtaccagcaaatgcaacagcccagcatgtgtggaggcccgggcaaggcgggcagcagcctacaacctggaggagcggcgcagggccaccgcgccaccctatcacgattccgtggactcccttcgcgactccccacacagcgagaggtacgtgtcggccctgaccacgcccgcgcgcctctcgcccgtggacttccactactcgctggccacgcaggtgccaactttcgagatcacgtcccccaactcggcgcacgccgtgtcgctgccgccggcggcgcccatcagttaccgcctggccgagcagcagccgttactgcggcacccggcgccccccggcccgggacccggacccgggcccgggcccgggcccggcgcagacatgcagcgcagctatgacagctactattaccccgcggcggggcccggaccgcggcgcgggacctgcgcgctcggcggcagcctgggcagcctgcctgccagccccttccgcatccccgaggacgacgagtacgagaccacgcaggagtgcgcgcccccgccgccgccgcggccgcgcgcgcgcggtgcgtcccgcaggacgtcggcggggccccggcgctggcgccgctcgcgcctcaacgggctggcggcgcagcgcgcacgggcggcgagggactcgctgtcgctgagcagcggctcgggcggcggctcagcctcggcgtcggacgacgacgcggacgacgcggacggggcgctggcggccgagagcacacctttcctgggcctgcgtggggcgcacgacgcgctgcgctcggactcgccgccactgtgcccggcggccgacagcaggacttactactcactggacagccacagcacgcgggccagcagcagacacagccgcgggccgcccccgcgggccaagcaggactcggcgccactctag

SEQ ID NO: 177242 - DNA, 2535 bp, Artificial Sequence
  derived and/or modified sequence
atgcgacaggtttgttgctcagcactgccccctcccccactcgagaagggtcgttgctcatcttatagcgattctagtagttcgtcatccgaacgatccagcagttccagcagcagcagtagcgaatccggatcctcctccaggtctagctcgaataacagcagcataagtcggccagcggctccccctgagccgagaccacagcagcaaccacagcccagatcgccagcagcaagaagagcagccgcaaggtcccgggcagccgcagcgggaggcatgaggagggatcccgcaccaggcttcagcatgctcctgttcggagtttctctggcctgctacagtccctccttgaaatccgtccaagatcaagcctacaaagcccctgtggtggtcgaggggaaagttcagggactcgtgcccgctggcggttcttcctccaacagcacccgggagcctccagcctccggtcgcgtcgctctcgtgaaggtcctagataaatggccgctgaggtctggcggactgcaaagagagcaggtcataagcgttggaagctgtgtgccccttgagaggaaccagaggtacatcttcttcctcgagccaacagagcagcccctcgtgtttaagacggccttcgctccgcttgacaccaatgggaaaaacctaaagaaggaggttggaaagatcttatgtaccgattgtgcaaccaggcccaaattgaagaagatgaagagccagaccggacaggtgggtgagaaacagagtcttaaatgcgaggctgcagccggaaacccccagccttcctaccgatggtttaaggacggcaaagagctcaacagatcccgggacatccgtattaagtatggcaatggaagaaagaactcccgcctgcagtttaacaaagtaaaagtggaagacgcaggcgagtacgtctgtgaagccgaaaatattctgggaaaagacacagttcggggtcgcctttacgtgaattctgtgtccacaacactttctagctggagtgggcatgccaggaagtgtaatgaaactgcgaaatcatattgcgtgaacggcggagtctgctactatatcgaaggcattaaccagctgtcatgtaagtgccccgtgggttatacaggggataggtgccagcaatttgccatggtaaactttagtaaagcagaggagctctaccaaaaaagagttttaaccattactgggatctgtgttgcactacttgttgtgggcatcgtttgtgtcgttgcttactgcaagaccaagaaacaaaggaaacaaatgcataaccacctgcgccagaacatgtgccccgcacatcaaaatcgtagtctggctaacggtccgagtcacccaaggttagaccctgaggaaatccagatggctgactacattagtaagaatgtgccagcgacagaccatgttatccgtagagaaacagaaaccacgttttctggatcccattcctgcagtccaagccatcactgctctaccgccacacctaccagtagtcatcggcatgagtctcacacatggtcattagaacgatcagaaagtctcacctctgattcccagtcaggcattatgcttagttccgtaggtacatctaaatgcaattcccccgcatgtgtcgaagccagggcgaggagagccgcagcatacaatctggaggagcggagacgagccacagctccaccttaccatgatagcgttgacagccttcgcgactccccacattcggagaggtatgttagtgccctcactactcccgctagactgtccccagtcgactttcactactccctggcgacccaggtgccaacgttcgagattactagccccaacagtgcacacgcagtgagcttaccacctgctgccccaatttcatacaggttagcagaacaacagcctctgcttagacacccagctccccctggcccaggacccggaccgggtccagggccaggacccggagctgatatgcaacgcagctacgatagctactactatccagcagcagggcctgggccacgcagagggacatgtgccctgggtggaagtctggggtcactgcccgcatcacccttcaggattccggaagatgacgagtacgaaacaactcaggaatgcgcccctccgccacctcctcgaccacgggctagaggcgcttctcgtcgcaccagtgccggaccacggcgttggcgacgaagcagactaaatgggttggccgctcagcgcgcacgggctgctagggattctctgagtctgagcagcggcagcggagggggatccgcttccgcatcagatgatgacgccgatgacgctgatggagccctggctgccgagtccacaccgtttctcggactacgcggtgcacacgacgcactgaggtcagactctcccccactgtgtccagctgccgactcaaggacctactattcgctcgacagtcactcaacacgcgcatcatctagacactcaaggggccctccaccgagagcaaaacaagacagcgcacccttgtag

SEQ ID NO: 177243 - DNA, 2535 bp, Artificial Sequence
  derived and/or modified sequence
atgagacaggtgtgctgcagcgccctgccccccccccccctggagaagggcagatgcagcagctacagcgacagcagcagcagcagcagcgagagaagcagcagcagcagcagcagcagcagcgagagcggcagcagcagcagaagcagcagcaacaacagcagcatcagcagacccgccgccccccccgagcccagaccccagcagcagccccagcccagaagccccgccgccagaagagccgccgccagaagcagagccgccgccgccggcggcatgagaagagaccccgcccccggcttcagcatgctgctgttcggcgtgagcctggcctgctacagccccagcctgaagagcgtgcaggaccaggcctacaaggcccccgtggtggtggagggcaaggtgcagggcctggtgcccgccggcggcagcagcagcaacagcaccagagagccccccgccagcggcagagtggccctggtgaaggtgctggacaagtggcccctgagaagcggcggcctgcagagagagcaggtgatcagcgtgggcagctgcgtgcccctggagagaaaccagagatacatcttcttcctggagcccaccgagcagcccctggtgttcaagaccgccttcgcccccctggacaccaacggcaagaacctgaagaaggaggtgggcaagatcctgtgcaccgactgcgccaccagacccaagctgaagaagatgaagagccagaccggccaggtgggcgagaagcagagcctgaagtgcgaggccgccgccggcaacccccagcccagctacagatggttcaaggacggcaaggagctgaacagaagcagagacatcagaatcaagtacggcaacggcagaaagaacagcagactgcagttcaacaaggtgaaggtggaggacgccggcgagtacgtgtgcgaggccgagaacatcctgggcaaggacaccgtgagaggcagactgtacgtgaacagcgtgagcaccaccctgagcagctggagcggccacgccagaaagtgcaacgagaccgccaagagctactgcgtgaacggcggcgtgtgctactacatcgagggcatcaaccagctgagctgcaagtgccccgtgggctacaccggcgacagatgccagcagttcgccatggtgaacttcagcaaggccgaggagctgtaccagaagagagtgctgaccatcaccggcatctgcgtggccctgctggtggtgggcatcgtgtgcgtggtggcctactgcaagaccaagaagcagagaaagcagatgcacaaccacctgagacagaacatgtgccccgcccaccagaacagaagcctggccaacggccccagccaccccagactggaccccgaggagatccagatggccgactacatcagcaagaacgtgcccgccaccgaccacgtgatcagaagagagaccgagaccaccttcagcggcagccacagctgcagccccagccaccactgcagcaccgccacccccaccagcagccacagacacgagagccacacctggagcctggagagaagcgagagcctgaccagcgacagccagagcggcatcatgctgagcagcgtgggcaccagcaagtgcaacagccccgcctgcgtggaggccagagccagaagagccgccgcctacaacctggaggagagaagaagagccaccgcccccccctaccacgacagcgtggacagcctgagagacagcccccacagcgagagatacgtgagcgccctgaccacccccgccagactgagccccgtggacttccactacagcctggccacccaggtgcccaccttcgagatcaccagccccaacagcgcccacgccgtgagcctgccccccgccgcccccatcagctacagactggccgagcagcagcccctgctgagacaccccgccccccccggccccggccccggccccggccccggccccggccccggcgccgacatgcagagaagctacgacagctactactaccccgccgccggccccggccccagaagaggcacctgcgccctgggcggcagcctgggcagcctgcccgccagccccttcagaatccccgaggacgacgagtacgagaccacccaggagtgcgcccccccccccccccccagacccagagccagaggcgccagcagaagaaccagcgccggccccagaagatggagaagaagcagactgaacggcctggccgcccagagagccagagccgccagagacagcctgagcctgagcagcggcagcggcggcggcagcgccagcgccagcgacgacgacgccgacgacgccgacggcgccctggccgccgagagcacccccttcctgggcctgagaggcgcccacgacgccctgagaagcgacagcccccccctgtgccccgccgccgacagcagaacctactacagcctggacagccacagcaccagagccagcagcagacacagcagaggccccccccccagagccaagcaggacagcgcccccctgtag

SEQ ID NO: 177244 - protein, 858 aa, Artificial Sequence
  derived and/or modified sequence
MRQVCCSALPPPPLEKGRCSSYSDSSSSSSERSSSSSSSSSESGSSSRSSSNNSSISRPAAPPEPRPQQQPQPRSPAARRAAARSRAAAAGGMRRDPAPGFSMLLFGVSLACYSPSLKSVQDQAYKAPVVVEGKVQGLVPAGGSSSNSTREPPASGRVALVKVLDKWPLRSGGLQREQVISVGSCVPLERNQRYIFFLEPTEQPLVFKTAFAPLDTNGKNLKKEVGKILCTDCATRPKLKKMKSQTGQVGEKQSLKCEAAAGNPQPSYRWFKDGKELNRSRDIRIKYGNGRKNSRLQFNKVKVEDAGEYVCEAENILGKDTVRGRLYVNSVSTTLSSWSGHARKCNETAKSYCVNGGVCYYIEGINQLSCKCPNGFFGQRCLEKLPLRLYMPDPKQSFLSFELSKAEELYQKRVLTITGICVALLVVGIVCVVAYCKTKKQRKQMHNHLRQNMCPAHQNRSLANGPSHPRLDPEEIQMADYISKNVPATDHVIRRETETTFSGSHSCSPSHHCSTATPTSSHRHESHTWSLERSESLTSDSQSGIMLSSVGTSKCNSPACVEARARRAAAYNLEERRRATAPPYHDSVDSLRDSPHSERYVSALTTPARLSPVDFHYSLATQVPTFEITSPNSAHAVSLPPAAPISYRLAEQQPLLRHPAPPGPGPGPGPGPGPGADMQRSYDSYYYPAAGPGPRRGTCALGGSLGSLPASPFRIPEDDEYETTQECAPPPPPRPRARGASRRTSAGPRRWRRSRLNGLAAQRARAARDSLSLSSGSGGGSASASDDDADDADGALAAESTPFLGLRGAHDALRSDSPPLCPAADSRTYYSLDSHSTRASSRHSRGPPPRAKQDSAPL

SEQ ID NO: 177245 - protein, 858 aa, Artificial Sequence
  derived and/or modified sequence
MRQVCCSALPPPPLEKGRCSSYSDSSSSSSERSSSSSSSSSESGSSSRSSSNNSSISRPAAPPEPRPQQQPQPRSPAARRAAARSRAAAAGGMRRDPAPGFSMLLFGVSLACYSPSLKSVQDQAYKAPVVVEGKVQGLVPAGGSSSNSTREPPASGRVALVKVLDKWPLRSGGLQREQVISVGSCVPLERNQRYIFFLEPTEQPLVFKTAFAPLDTNGKNLKKEVGKILCTDCATRPKLKKMKSQTGQVGEKQSLKCEAAAGNPQPSYRWFKDGKELNRSRDIRIKYGNGRKNSRLQFNKVKVEDAGEYVCEAENILGKDTVRGRLYVNSVSTTLSSWSGHARKCNETAKSYCVNGGVCYYIEGINQLSCKCPNGFFGQRCLEKLPLRLYMPDPKQKHLGFELKEAEELYQKRVLTITGICVALLVVGIVCVVAYCKTKKQRKQMHNHLRQNMCPAHQNRSLANGPSHPRLDPEEIQMADYISKNVPATDHVIRRETETTFSGSHSCSPSHHCSTATPTSSHRHESHTWSLERSESLTSDSQSGIMLSSVGTSKCNSPACVEARARRAAAYNLEERRRATAPPYHDSVDSLRDSPHSERYVSALTTPARLSPVDFHYSLATQVPTFEITSPNSAHAVSLPPAAPISYRLAEQQPLLRHPAPPGPGPGPGPGPGPGADMQRSYDSYYYPAAGPGPRRGTCALGGSLGSLPASPFRIPEDDEYETTQECAPPPPPRPRARGASRRTSAGPRRWRRSRLNGLAAQRARAARDSLSLSSGSGGGSASASDDDADDADGALAAESTPFLGLRGAHDALRSDSPPLCPAADSRTYYSLDSHSTRASSRHSRGPPPRAKQDSAPL

SEQ ID NO: 177246 - DNA, 2577 bp, Artificial Sequence
  derived and/or modified sequence
atgcgccaagtctgttgtagtgcactgcccccacccccactcgaaaagggaagatgttcaagctactctgatagttcgagctcgtcctctgaacggagctcctcatcttcatcttctagtagtgagtccggctcaagcagcagaagttcttctaacaactcctcgatctcccgccccgctgctccacctgagccccgcccccagcagcaaccccagccaaggtccccagctgctcgacgggctgctgctagaagccgggcagctgcagccgggggcatgcgcagggatcccgcccctggattctcaatgctgctgtttggagtgagcctcgcttgttatagcccctcccttaagtctgtgcaggaccaggcatacaaggccccagtagttgtagaggggaaggtccaggggctcgtccctgctggcggctcctcgtctaactctacaagggagcctccagccagtggtcgagttgcacttgttaaggtactggacaaatggcctctgagatctggtggcctgcagcgagaacaggttataagcgtcggttcctgcgtgccgctggagcggaatcagcggtacatttttttcctggaaccgactgaacaaccgctggtattcaagacagcatttgcacctctggacacaaatggaaaaaacctgaagaaggaggttggcaagatcctctgtaccgattgcgcaacacgcccaaaactgaaaaagatgaagagtcagacagggcaggtaggagagaaacagtcgcttaaatgtgaggcagctgccggaaaccctcagccttcatatagatggttcaaggatggtaaggaactgaacagaagccgcgacatcagaataaagtacggcaacgggcgtaagaacagtcggcttcaatttaataaagttaaagtggaagacgccggcgagtatgtgtgtgaagcagagaacattcttggaaaagatactgttcgcggccgcctttatgtgaactcagtgtcaacaaccctgtcttcctggagtggacatgctcgcaaatgtaatgagaccgcgaaatcctattgcgtcaatggcggggtgtgttattacattgagggcattaaccaactctcctgcaagtgccccaacggattctttggccaacgctgcctggaaaaattgccgctgaggctgtacatgccagacccaaagcagtcctttctctcttttgagctgtcaaaggccgaggagctgtaccagaaacgcgtgctcactataaccggaatttgtgtagccctgttggtggttggaatcgtctgcgtggtggcatactgcaagacaaagaaacaacgtaagcagatgcataaccatctccgtcagaatatgtgtcccgcacaccagaacagatcgcttgcaaacggcccatcccacccacggttggaccctgaggagattcagatggccgattacatctccaaaaatgttcccgctactgatcacgtgatccgacgcgaaactgagaccacgttcagcgggtcccacagttgttcaccatcccaccactgctccaccgccacacctacatccagccaccggcacgagtctcacacctggagtctcgaaaggagcgagagtctcacctctgattcccagtcaggaatcatgctctcttctgtcggaacctcaaagtgcaattcgccagcctgtgtggaggcaagagcgagaagggccgccgcctataatctggaagagcggagaagagccacagcccccccttatcacgacagcgtcgatagcttgagagacagtccacactcagagaggtatgttagtgcactgacaactcctgcccgcctgagccccgtggatttccactatagtctggctacacaggtgcccacattcgagatcacaagccctaattccgcgcacgccgtgagcctacccccagcagccccgatctcatataggctcgcagaacagcagccactactgagacatccggccccacccggcccaggaccaggtcccggccccgggcccggcccaggcgccgacatgcaaaggtcatatgattcctactactaccccgcagcaggccccggcccccgccgagggacctgcgccctgggcggatctctggggtcgctccccgcctccccctttcgcatcccagaggacgatgagtatgaaactactcaagaatgtgcaccaccccccccaccccgccccagagcgcgcggtgcaagtcggcgcacctctgcgggcccgaggcggtggaggagatcccgcctcaacggcctcgctgcccaaagggcgagggcagctagggacagcctctcgctgagctcggggagcggggggggaagcgctagcgccagcgacgatgacgccgatgatgccgacggggctctcgctgccgagtctactccttttttaggcctgcgtggagcccatgatgccttaagaagcgactcccctcctctctgtccagcggctgattcgagaacatattactcactcgactcacattctactcgagcatcaagcaggcactcccgaggacccccaccgcgggccaaacaagatagcgctcctttatag

SEQ ID NO: 177247 - DNA, 2577 bp, Artificial Sequence
  derived and/or modified sequence
atgaggcaggtgtgctgctctgctctgccgccgcccccactggaaaaaggccgatgttcttcgtactcagactctagcagctcctcttctgagcgcagcagcagttctagtagtagttctagcgaaagcggaagctcttcacggagcagcagtaacaacagctcaatttcacggccagctgcccctcccgaaccacgtccccagcagcagccgcagcctcggtcccccgccgccaggcgggcggccgctcgtagcagagctgccgccgctggcgggatgagacgggaccccgctccgggctttagcatgctgctgttcggtgtgagccttgcttgttactcaccctccctgaagtctgtgcaggaccaggcctacaaggccccagtagtggtggaaggaaaggttcagggcctggtgccagctggcggttcctccagtaatagcacaagagagccccccgcttctggacgtgtcgctctcgtgaaagttttggacaaatggccactgcgaagcggaggtttgcagagagagcaagtcattagcgttggttcatgtgtgccactcgaaaggaatcagcgctacatttttttcctggagcctaccgagcagcctctggtttttaaaaccgcgtttgcaccactggatactaatggcaagaatctcaaaaaggaggttggaaagatcctgtgcaccgactgtgccactaggcctaaactgaagaagatgaagtctcagaccggacaagtgggcgagaagcagtctctcaagtgtgaggcggctgctggcaaccctcagccgtcctacagatggtttaaggatggcaaggagctgaaccgcagccgagacattcgcattaagtatggcaacggccgtaaaaatagccgcctgcaattcaataaagtcaaggtagaagacgcaggcgaatatgtgtgcgaagccgaaaacattctgggaaaggatacggtgcgtgggcgattgtacgtcaactcagtaagcacaacgctgtcttcttggagcggccatgccagaaaatgtaacgagactgcaaaaagctattgtgtcaatggaggggtctgttactatatcgaagggattaatcagctcagttgtaagtgccctaacggcttttttggccaaaggtgtctcgagaaacttcctctgcggttgtacatgccagatccgaagcagaagcatcttggtttcgaacttaaagaagcagaagaactgtatcagaagcgagttcttactattaccggaatctgcgtggcattgcttgttgtgggaatcgtttgcgtggttgcctactgcaaaaccaagaagcagcgaaaacagatgcacaaccacctgcggcagaacatgtgcccagcacaccaaaaccggagcctcgctaatggaccttctcatccaaggttggatccagaggagatccagatggccgattacataagcaaaaacgtgcccgctacagatcatgttatcaggcgcgagaccgagacaacctttagcggcagtcacagctgttccccaagccaccattgctcaacagccacgccgaccagctctcatagacacgagtcccacacctggtccctcgagcgtagcgagagtctaacctcagattcacagagcgggattatgctctcttccgtgggcacatccaagtgtaacagcccagcatgtgtggaggctagggctcgacgggccgcggcatataatttggaggaacgcagacgcgccaccgctccaccataccacgacagcgtggactctctgcgcgattccccccatagcgaaaggtatgtatcggctcttacaaccccggcgcgcctgagccctgtcgacttccactattccctggctacccaagtccccacgtttgagataacaagtcctaactccgctcatgctgtgtcgctgccccccgctgccccaatcagctatcgactggctgagcagcagccactcctgagacacccagctccacctgggccagggccaggtcccggaccgggacccggtccgggggcagacatgcaacggagctatgatagttattactatccagccgccggtccaggaccgcgacgaggaacatgcgccttgggaggttccctggggtcgctccccgctagccctttccgcatcccagaggatgatgagtacgagacaacacaggagtgcgcccccccacccccacctcgtccccgggcgaggggggcctctcgcagaacaagcgctggcccccgcaggtggcggcgcagccgcctgaacggcctggccgcccagcgggctagagccgctcgggattcactgagcctgtcatccggctcagggggtggatctgcaagcgccagtgacgacgacgctgacgacgccgacggagcactggccgcagagtccaccccattcctcggtctgcgcggggcccatgatgctcttcggagtgacagtccgcccttatgtcccgctgctgattccagaacatattatagtctggattcccattccacacgggcgtccagccgacactcccggggcccaccaccgcgggccaagcaggacagcgcacccctgtag

SEQ ID NO: 177248 - DNA, 2577 bp, Artificial Sequence
  derived and/or modified sequence
atgaggcaggtgtgctgcagcgccctgcccccaccacccctggagaagggccgctgcagcagctacagcgacagcagcagcagcagcagcgagaggagcagcagcagcagcagcagcagcagcgagagcggcagcagcagccgcagcagcagcaacaacagcagcatcagcaggcctgctgcccctcctgagccccggccccagcagcagccccagcccaggagccctgctgccaggagagctgctgcccggagcagagctgctgctgctgggggcatgaggcgggaccctgcccctggcttctccatgctgctgtttggagtgtccctggcctgctacagccccagcctgaagtctgtgcaggaccaggcctacaaggcccctgtggtggtggagggcaaggtgcagggcctggtgcctgctgggggcagcagcagcaacagcacccgggagcccccagccagcggccgggtggccctggtgaaggtgctggacaagtggcccctgcggagcggcggcctgcagcgggagcaggtgatctctgtgggcagctgtgtgcccctggagaggaaccagcgctacatcttcttcctggagcccacagagcagcccctggtgttcaagacagcctttgcccccctggacaccaacgggaagaacctgaagaaggaggtgggcaagatcctgtgcacagactgtgccacccggcccaagctgaagaagatgaagagccagacaggccaggtgggggagaagcagagcctgaagtgtgaggccgctgctggcaacccccagcccagctaccgctggttcaaggatggcaaggagctgaacagaagccgggacatccgcatcaagtatggaaatggaaggaagaacagccggctgcagttcaacaaggtgaaggtggaggatgctggggagtatgtgtgtgaggccgagaacatcctgggcaaggacacagtgcggggccgcctgtatgtgaacagcgtgtccaccaccctgagctcctggagcggccacgccaggaagtgcaatgaaacagccaagagctactgtgtgaatggaggagtgtgctactacatcgagggcatcaaccagctgagctgcaagtgccccaacggcttcttcggccagcgctgcctggagaagctgcccctgcggctgtacatgccagaccccaagcagagcttcctgagctttgagctgagcaaggccgaggagctgtaccagaagagggtgctgaccatcaccggcatctgtgtggccctgctggtggtgggcatcgtgtgtgtggtggcctactgcaagaccaagaagcagaggaagcagatgcacaaccacctgcggcagaacatgtgcccagcccaccagaacagaagcctggccaacggccccagccacccccggctggaccctgaggagatccagatggctgactacatcagcaagaatgtgcctgccacagaccacgtgatccggcgggagacagagaccaccttcagcggcagccacagctgcagccccagccaccactgcagcacagccacccccaccagcagccacagacatgagagccacacctggagcctggagaggtctgagagcctgaccagtgacagccagagcggcatcatgctgagctctgtgggcaccagcaagtgcaacagccctgcctgtgtggaggcccgggcccggcgggctgctgcctacaacctggaggagaggagaagagccacagccccaccctaccatgattctgtggacagcctgcgggacagcccccacagcgagcgctacgtgtctgccctgaccaccccagcccggctgagccctgtggacttccactacagcctggccacccaggtgcccacctttgagatcaccagccccaacagcgcccatgctgtgtccctgcccccagctgcccccatctcctaccgcctggccgagcagcagcccctgctgcggcacccagcccctcctggccctggccctggccctggccctggccctggccctggagctgacatgcagaggagctatgacagctactactacccagctgctggccctggcccccggcggggcacctgtgccctgggcggcagcctgggcagcctgcctgccagccccttccgcatcccagaagatgatgaatatgagaccacccaggagtgtgcccctcctcctccaccccggccccgggcccggggggccagcaggaggaccagcgctggcccccggcgctggaggaggagccggctgaatggcctggccgcccagagggcccgggccgcccgggacagcctgagcctgagcagcggcagcggcggcggcagcgccagcgccagtgatgatgatgctgatgatgctgatggagccctggccgctgagagcacccccttcctgggcctgcggggggcccatgatgccctgcggagtgacagcccccccctgtgcccagctgctgacagcaggacctactacagcctggacagccacagcacccgggccagcagccgccacagccggggccccccaccccgggccaagcaggacagcgcccccctgtag

SEQ ID NO: 177249 - DNA, 2577 bp, Artificial Sequence
  derived and/or modified sequence
atgaggcaggtgtgctgcagcgccctgcccccaccacccctggagaagggccgctgcagcagctacagcgacagcagcagcagcagcagcgagaggagcagcagcagcagcagcagcagcagcgagagcggcagcagcagccgcagcagcagcaacaacagcagcatcagcaggcctgctgcccctcctgagccccggccccagcagcagccccagcccaggagccctgctgccaggagagctgctgcccggagcagagctgctgctgctgggggcatgaggcgggaccctgcccctggcttctccatgctgctgtttggagtgtccctggcctgctacagccccagcctgaagtctgtgcaggaccaggcctacaaggcccctgtggtggtggagggcaaggtgcagggcctggtgcctgctgggggcagcagcagcaacagcacccgggagcccccagccagcggccgggtggccctggtgaaggtgctggacaagtggcccctgcggagcggcggcctgcagcgggagcaggtgatctctgtgggcagctgtgtgcccctggagaggaaccagcgctacatcttcttcctggagcccacagagcagcccctggtgttcaagacagcctttgcccccctggacaccaacgggaagaacctgaagaaggaggtgggcaagatcctgtgcacagactgtgccacccggcccaagctgaagaagatgaagagccagacaggccaggtgggggagaagcagagcctgaagtgtgaggccgctgctggcaacccccagcccagctaccgctggttcaaggatggcaaggagctgaacagaagccgggacatccgcatcaagtatggaaatggaaggaagaacagccggctgcagttcaacaaggtgaaggtggaggatgctggggagtatgtgtgtgaggccgagaacatcctgggcaaggacacagtgcggggccgcctgtatgtgaacagcgtgtccaccaccctgagctcctggagcggccacgccaggaagtgcaatgaaacagccaagagctactgtgtgaatggaggagtgtgctactacatcgagggcatcaaccagctgagctgcaagtgccccaacggcttcttcggccagcgctgcctggagaagctgcccctgcggctgtacatgccagaccccaagcagaagcacctgggctttgagctgaaggaggccgaggagctgtaccagaagagggtgctgaccatcaccggcatctgtgtggccctgctggtggtgggcatcgtgtgtgtggtggcctactgcaagaccaagaagcagaggaagcagatgcacaaccacctgcggcagaacatgtgcccagcccaccagaacagaagcctggccaacggccccagccacccccggctggaccctgaggagatccagatggctgactacatcagcaagaatgtgcctgccacagaccacgtgatccggcgggagacagagaccaccttcagcggcagccacagctgcagccccagccaccactgcagcacagccacccccaccagcagccacagacatgagagccacacctggagcctggagaggtctgagagcctgaccagtgacagccagagcggcatcatgctgagctctgtgggcaccagcaagtgcaacagccctgcctgtgtggaggcccgggcccggcgggctgctgcctacaacctggaggagaggagaagagccacagccccaccctaccatgattctgtggacagcctgcgggacagcccccacagcgagcgctacgtgtctgccctgaccaccccagcccggctgagccctgtggacttccactacagcctggccacccaggtgcccacctttgagatcaccagccccaacagcgcccatgctgtgtccctgcccccagctgcccccatctcctaccgcctggccgagcagcagcccctgctgcggcacccagcccctcctggccctggccctggccctggccctggccctggccctggagctgacatgcagaggagctatgacagctactactacccagctgctggccctggcccccggcggggcacctgtgccctgggcggcagcctgggcagcctgcctgccagccccttccgcatcccagaagatgatgaatatgagaccacccaggagtgtgcccctcctcctccaccccggccccgggcccggggggccagcaggaggaccagcgctggcccccggcgctggaggaggagccggctgaatggcctggccgcccagagggcccgggccgcccgggacagcctgagcctgagcagcggcagcggcggcggcagcgccagcgccagtgatgatgatgctgatgatgctgatggagccctggccgctgagagcacccccttcctgggcctgcggggggcccatgatgccctgcggagtgacagcccccccctgtgcccagctgctgacagcaggacctactacagcctggacagccacagcacccgggccagcagccgccacagccggggccccccaccccgggccaagcaggacagcgcccccctgtag

SEQ ID NO: 177250 - DNA, 2577 bp, Artificial Sequence
  derived and/or modified sequence
atgcggcaggtgtgctgcagcgccctgccccccccccccctggagaagggaaggtgctcttcttattccgattctagttccagttcatctgaaagaagctcaagttccagcagctcttcatctgaaagcggatcctcttccagaagctcctccaacaactcctccattagtcgccctgcggcccctccggaacctcgaccccagcagcagccccaaccccggtcccctgctgcgaggcgggccgcagctagatcccgggctgctgctgccggtgggatgagacgcgacccggcccctggcttctccatgttgctcttcggggtttctctggcctgttacagcccatctctgaaatccgttcaggatcaggcctacaaagctccagtcgtggttgaaggaaaagtccaggggttggtaccggcaggcggctcatctagcaattccaccagagagcctcccgcctccggcagggtcgccctggtaaaggtgctagataagtggcccctgaggtccggcgggctgcagcgagaacaagtgatctccgtggggagctgcgtgcctctggaacgcaatcaacggtatattttttttcttgagcccactgagcaacctctggtttttaagaccgcattcgcccctctagatactaacggcaaaaacctcaagaaggaagtgggcaaaatcctctgtacggattgcgccacccgccccaaacttaagaaaatgaaatctcaaactggacaagtgggagaaaaacagtcgctgaaatgtgaggctgctgccggcaatccacagccctcctaccgctggttcaaggatggcaaagaattgaaccggtcgcgggacataagaataaagtatgggaatggaaggaaaaacagcaggctgcagtttaacaaggtaaaagtcgaagacgctggtgagtacgtatgtgaggccgaaaacattctgggcaaagatacagtgcgcggcagactttatgtgaactccgtatctaccaccctgtcttcctggagcgggcatgctcgaaagtgcaatgaaacagctaagtcatattgcgtgaacggaggcgtgtgctactatattgaaggcatcaaccagctgagctgcaaatgccccaatggcttctttggtcagagatgcctcgagaagctcccattgcgcctttatatgcctgatcccaagcagtcttttctgtcattcgagctgtccaaggcagaggagctctatcagaagagagtgctgactattacggggatttgcgtggccctgctggttgtgggcatcgtgtgtgttgtcgcttactgcaagacaaaaaagcaaaggaagcagatgcacaaccacctcagacagaatatgtgccccgcccatcagaatcgtagcttggcgaacgggccctcccatccgaggctcgaccctgaggagatacagatggcggattacatatctaagaacgttccagccactgaccacgtgattcggagggaaaccgagacgaccttttcagggtcccatagttgtagtccctctcaccattgctccactgctacaccaactagctcccaccggcacgaatctcatacatggagcctcgagcggtccgaatctctgaccagtgactcacagtccggtattatgctctcaagcgtgggcacatctaagtgcaacagccccgcctgtgtcgaggcgagggctcgacgagccgccgcttataatctcgaggaacgccggcgggcaactgccccaccgtatcacgattctgtggacagcttacgggatagccctcattctgaaagatatgtgtctgctctgactacgcctgcccggttgtcccccgtggacttccattattccctggccacccaagttccaacgtttgagataacaagcccaaattctgctcatgcagtctccttacccccagccgcaccgatcagctaccggctggccgagcaacagcctttgcttagacaccctgctccccccggtcccggaccaggtccggggcctgggccaggtccaggagcagatatgcagcgctcttacgactcatattactaccccgcagcgggccctgggcccaggagagggacatgtgctctcggaggcagtctgggtagcctgccagccagcccgttccggatcccagaagatgatgagtatgaaaccacccaggagtgtgcacccccccctccgccacgacctcgagcccgtggggcctcccggcgaacttccgccggaccacggcgatggcgcaggagtcgactaaatgggctggccgctcagcgggcaagggccgcccgcgattctttaagtctcagctccggatcaggcggaggcagcgcatctgctagcgacgacgatgctgacgatgccgacggcgccctagccgcagaatccacacccttcttgggcttgcgaggtgctcacgatgccttgcggtcagactcccctcctttatgtccagctgcagattcaaggacttattactcactcgacagtcactctactcgggcatcgagtaggcacagtaggggtcctcccccccgagccaaacaggactccgctcccctgtag

SEQ ID NO: 177251 - DNA, 2577 bp, Artificial Sequence
  derived and/or modified sequence
atgcggcaggtgtgctgcagcgccctgccccccccccccctggagaaggggcgatgtagttcatactctgacagttcttctagctcatcagagcgctcttcgtcatcctcatccagctctagcgaatctggtagctcaagtcgctccagcagtaacaactcctccatttcgcggccagccgccccgccagagcccaggccccaacaacagcctcagccccggagtccagcagctcgacgagcagctgccaggagccgggccgcggctgccggcgggatgcggcgggacccggcccccggcttcagcatgctgttgttcggagtgtcacttgcctgttatagtccctccctgaaaagcgtccaagatcaggcctacaaggccccggtggtggtggaggggaaggtgcagggactcgttccggctggcggctcgagtagcaactctacgagagagcctcccgcctccggccgggtagcattggtgaaagtgctggataagtggcccctgcggagcggaggtctgcagagggaacaggtgatatcagtgggtagttgcgtcccgttggagaggaaccagagatacatattttttcttgagcccacagagcagcctctggtgttcaaaacagccttcgcacctttagacacaaacgggaaaaacctgaaaaaggaagtgggcaaaatactgtgcaccgattgtgccacaagaccaaagctgaaaaagatgaaatctcagacgggacaggtaggagaaaagcagtcccttaagtgtgaggcagcagctggaaatcctcagccatcttacagatggttcaaagacggaaaagagctgaacaggtccagggatatccgaattaagtatggcaacgggaggaagaatagccggctgcagtttaataaggtcaaagtcgaagatgctggcgaatacgtgtgcgaagcagaaaacattctgggtaaggataccgttcgagggcggctatacgtgaattccgtcagcacaaccctgtctagctggtcgggacatgcgcggaagtgcaacgagactgctaagagctattgtgtgaatggtggagtctgctattacatcgaaggaataaatcagctttcgtgcaagtgtcccaacggatttttcgggcagcgatgcctagagaaactgcccctgcgcctgtacatgccagatcccaagcaaaagcatctcggttttgaattaaaagaggcagaggagctctatcagaaaagggttcttacgattactggaatttgtgtggccttactggtagtgggtattgtgtgtgttgtagcctattgtaagactaagaagcagagaaaacaaatgcataatcacctacgccagaacatgtgtcctgcccaccagaataggtccttagcaaatggtcctagccatccccgcctggatccagaggaaattcagatggcagactatatcagtaaaaacgtacctgcgaccgaccatgtgatccgcagagaaacggaaacaacattttctggatctcacagttgttcaccgagccaccactgttccaccgcaacccctacctcttcccacagacatgaatctcatacctggtctctcgaaagaagcgagtccctcacctctgattcccagtctggaattatgctctcgtccgtggggaccagcaagtgtaattcgcccgcatgcgtcgaggctcgggcccgaagggcagctgcctataatctggaggagcggagaagggccacagctccaccctaccatgatagcgttgatagtctgagagactctcctcatagtgaacggtatgtctcagccctgaccaccccagcccgcttaagtccagtcgatttccactactccctggccacacaggttcccacctttgagatcaccagccccaatagtgctcatgcagttagtctgcctcccgccgcgccgatctcctaccgattggctgaacagcagcctctcctgagacacccggcacctcccggcccaggtcctgggcctggacctggacctggtcctggcgctgacatgcaaaggtcctacgacagctactattatcccgcagcaggtcctggcccaaggaggggaacttgcgccctcggagggtcactgggctccctgccagcttccccttttcgcatccccgaggacgacgaatatgagacaacccaggaatgcgcacctccaccacctcccaggccaagagcacggggggcgtctcggagaacatctgccggacccagacgctggagacgttcccgcctgaatggcctggcggcgcagagagcaagagccgcccgggatagcctgagcctttcatccggttcaggaggcgggtctgctagcgcgtccgacgacgatgcggacgatgccgacggagccctggctgccgaatcaactcctttcctcggcctacgaggcgcccatgatgctcttaggtctgacagtccgcctctatgcccggccgcagatagcagaacgtactattcgttggacagtcactccacaagggcttcttcacggcattcacgaggtccaccgccgagagcaaagcaggactccgctcccctgtag

SEQ ID NO: 177252 - DNA, 3044 bp, Artificial Sequence
  derived and/or modified sequence
cctccaggtcctggcgcacagggtgggagcgctgcgctgcgccgcgctgcgcatcgcggcccgcttgccgcctgccccctgccctagctgggccacctccccgggctgccggtggagggctaagaggcgctaacgttacgctgtttccggttttccagcgggctctgtttcccctcccaaggcggcggcggctgagcggcggagccccccaaatggcctggccagatgcggcaggtttgctgctcagcgctgccgccgccgccactggagaagggtcggtgcagcagctacagcgacagcagcagcagcagcagcgagaggagcagcagcagcagcagcagcagcagcgagagcggcagcagcagcaggagcagcagcaacaacagcagcatctctcgtcccgctgcgcccccagagccgcggccgcagcaacagccgcagccccgcagccccgcagcccggagagccgccgcccgttcgcgagccgcagccgccggcggcatgaggcgcgacccggcccccggcttctccatgctgctcttcggtgtgtcgctcgcctgctactcgcccagcctcaagtcagtgcaggaccaggcgtacaaggcacccgtggtggtggagggcaaggtacaggggctggtcccagccggcggctccagctccaacagcacccgagagccgcccgcctcgggtcgggtggcgttggtaaaggtgctggacaagtggccgctccggagcggggggctgcagcgcgagcaggtgatcagcgtgggctcctgtgtgccgctcgaaaggaaccagcgctacatctttttcctggagcccacggaacagcccttagtctttaagacggcctttgcccccctcgataccaacggcaaaaatctcaagaaagaggtgggcaagatcctgtgcactgactgcgccacccggcccaagttgaagaagatgaagagccagacgggacaggtgggtgagaagcaatcgctgaagtgtgaggcagcagccggtaatccccagccttcctaccgttggttcaaggatggcaaggagctcaaccgcagccgagacattcgcatcaaatatggcaacggcagaaagaactcacgactacagttcaacaaggtgaaggtggaggacgctggggagtatgtctgcgaggccgagaacatcctggggaaggacaccgtccggggccggctttacgtcaacagcgtgagcaccaccctgtcatcctggtcggggcacgcccggaagtgcaacgagacagccaagtcctattgcgtcaatggaggcgtctgctactacatcgagggcatcaaccagctctcctgcaaatgtccaaatggattcttcggacagagatgtttggagaaactgcctttgcgattgtacatgccagatcctaagcaaagttttctttcttttgaattgtcaaaagccgaggagctgtaccagaagagggtcctgaccatcacgggcatctgcgtggctctgctggtcgtgggcatcgtctgtgtggtggcctactgcaagaccaaaaaacagcggaagcagatgcacaaccacctccggcagaacatgtgcccggcccatcagaaccggagcttggccaatgggcccagccacccccggctggacccagaggagatccagatggcagattatatttccaagaacgtgccagccacagaccatgtcatcaggagagaaactgagaccaccttctctgggagccactcctgttctccttctcaccactgctccacagccacacccacctccagccacagacacgagagccacacgtggagcctggaacgttctgagagcctgacttctgactcccagtcggggatcatgctatcatcagtgggtaccagcaaatgcaacagcccagcatgtgtggaggcccgggcaaggcgggcagcagcctacaacctggaggagcggcgcagggccaccgcgccaccctatcacgattccgtggactcccttcgcgactccccacacagcgagaggtacgtgtcggccctgaccacgcccgcgcgcctctcgcccgtggacttccactactcgctggccacgcaggtgccaactttcgagatcacgtcccccaactcggcgcacgccgtgtcgctgccgccggcggcgcccatcagttaccgcctggccgagcagcagccgttactgcggcacccggcgccccccggcccgggacccggacccgggcccgggcccgggcccggcgcagacatgcagcgcagctatgacagctactattaccccgcggcggggcccggaccgcggcgcgggacctgcgcgctcggcggcagcctgggcagcctgcctgccagccccttccgcatccccgaggacgacgagtacgagaccacgcaggagtgcgcgcccccgccgccgccgcggccgcgcgcgcgcggtgcgtcccgcaggacgtcggcggggccccggcgctggcgccgctcgcgcctcaacgggctggcggcgcagcgcgcacgggcggcgagggactcgctgtcgctgagcagcggctcgggcggcggctcagcctcggcgtcggacgacgacgcggacgacgcggacggggcgctggcggccgagagcacacctttcctgggcctgcgtggggcgcacgacgcgctgcgctcggactcgccgccactgtgcccggcggccgacagcaggacttactactcactggacagccacagcacgcgggccagcagcagacacagccgcgggccgcccccgcgggccaagcaggactcggcgccactctagggccccgccgcgcgcccctccgccccgcccgccccactatctttaaggagaccagagaccgcctactggagagaaaggaggaaaaaagaaataaaaatatttttattttctataaaaggaaaaaagtataacaaaatgttttattttcattttagcaaaaattgtcttataatactagctaacggcaaaggcgtttttatagggaaactatttatatgtaacatcctgatttacagcttcgg

SEQ ID NO: 177253 - DNA, 2923 bp, Artificial Sequence
  derived and/or modified sequence
cggttttccagcgggctctgtttcccctcccaaggcggcggcggctgagcggcggagccccccaaatggcctggccagatgcggcaggtttgctgctcagcgctgccgccgccgccactggagaagggtcggtgcagcagctacagcgacagcagcagcagcagcagcgagaggagcagcagcagcagcagcagcagcagcgagagcggcagcagcagcaggagcagcagcaacaacagcagcatctctcgtcccgctgcgcccccagagccgcggccgcagcaacagccgcagccccgcagccccgcagcccggagagccgccgcccgttcgcgagccgcagccgccggcggcatgaggcgcgacccggcccccggcttctccatgctgctcttcggtgtgtcgctcgcctgctactcgcccagcctcaagtcagtgcaggaccaggcgtacaaggcacccgtggtggtggagggcaaggtacaggggctggtcccagccggcggctccagctccaacagcacccgagagccgcccgcctcgggtcgggtggcgttggtaaaggtgctggacaagtggccgctccggagcggggggctgcagcgcgagcaggtgatcagcgtgggctcctgtgtgccgctcgaaaggaaccagcgctacatctttttcctggagcccacggaacagcccttagtctttaagacggcctttgcccccctcgataccaacggcaaaaatctcaagaaagaggtgggcaagatcctgtgcactgactgcgccacccggcccaagttgaagaagatgaagagccagacgggacaggtgggtgagaagcaatcgctgaagtgtgaggcagcagccggtaatccccagccttcctaccgttggttcaaggatggcaaggagctcaaccgcagccgagacattcgcatcaaatatggcaacggcagaaagaactcacgactacagttcaacaaggtgaaggtggaggacgctggggagtatgtctgcgaggccgagaacatcctggggaaggacaccgtccggggccggctttacgtcaacagcgtgagcaccaccctgtcatcctggtcggggcacgcccggaagtgcaacgagacagccaagtcctattgcgtcaatggaggcgtctgctactacatcgagggcatcaaccagctctcctgcaaatgtccaaatggattcttcggacagagatgtttggagaaactgcctttgcgattgtacatgccagatcctaagcaaaagcaccttggatttgaattaaaggaagccgaggagctgtaccagaagagggtcctgaccatcacgggcatctgcgtggctctgctggtcgtgggcatcgtctgtgtggtggcctactgcaagaccaaaaaacagcggaagcagatgcacaaccacctccggcagaacatgtgcccggcccatcagaaccggagcttggccaatgggcccagccacccccggctggacccagaggagatccagatggcagattatatttccaagaacgtgccagccacagaccatgtcatcaggagagaaactgagaccaccttctctgggagccactcctgttctccttctcaccactgctccacagccacacccacctccagccacagacacgagagccacacgtggagcctggaacgttctgagagcctgacttctgactcccagtcggggatcatgctatcatcagtgggtaccagcaaatgcaacagcccagcatgtgtggaggcccgggcaaggcgggcagcagcctacaacctggaggagcggcgcagggccaccgcgccaccctatcacgattccgtggactcccttcgcgactccccacacagcgagaggtacgtgtcggccctgaccacgcccgcgcgcctctcgcccgtggacttccactactcgctggccacgcaggtgccaactttcgagatcacgtcccccaactcggcgcacgccgtgtcgctgccgccggcggcgcccatcagttaccgcctggccgagcagcagccgttactgcggcacccggcgccccccggcccgggacccggacccgggcccgggcccgggcccggcgcagacatgcagcgcagctatgacagctactattaccccgcggcggggcccggaccgcggcgcgggacctgcgcgctcggcggcagcctgggcagcctgcctgccagccccttccgcatccccgaggacgacgagtacgagaccacgcaggagtgcgcgcccccgccgccgccgcggccgcgcgcgcgcggtgcgtcccgcaggacgtcggcggggccccggcgctggcgccgctcgcgcctcaacgggctggcggcgcagcgcgcacgggcggcgagggactcgctgtcgctgagcagcggctcgggcggcggctcagcctcggcgtcggacgacgacgcggacgacgcggacggggcgctggcggccgagagcacacctttcctgggcctgcgtggggcgcacgacgcgctgcgctcggactcgccgccactgtgcccggcggccgacagcaggacttactactcactggacagccacagcacgcgggccagcagcagacacagccgcgggccgcccccgcgggccaagcaggactcggcgccactctagggccccgccgcgcgcccctccgccccgcccgccccactatctttaaggagaccagagaccgcctactggagagaaaggaggaaaaaagaaataaaaatatttttattttctataaaaggaaaaaagtataacaaaatgttttattttcattttagcaaaaattgtcttataatactagctaacggcaaaggcgtttttatagggaaactatttatatgtaacatcctgatttacagcttcggaaaaaaaaaagaaacaacaaaaaaaa

SEQ ID NO: 177254 - DNA, 2577 bp, Artificial Sequence
  derived and/or modified sequence
atgcgtcaggtgtgttgtagcgcgctgccccctccccctctagagaaaggaaggtgttcatcctactctgatagctcatcttcaagcagcgaacgttcgtcctcgtcgagctcctcatcgagcgaatccggctcctcctctcggagcagcagtaacaattcatctatttcccgccctgccgctcctccagagcctaggcctcagcagcagccccaacccaggtcgcctgctgccaggagggccgctgcaaggtcgcgagccgctgccgcaggaggtatgaggagggatcccgctcccggatttagcatgctgctatttggggtgagtcttgcctgctactccccaagcttgaaaagcgtgcaagatcaggcatataaagcccctgtcgtggtggaaggaaaggtgcagggtctggtgcccgcaggaggcagcagctccaactcaacacgcgaaccacctgcttctgggcgagtggctctcgttaaggttctcgacaaatggccactgcgcagcggcggacttcagagggagcaggtcatatcggttggctcttgcgtccccctcgagaggaaccagagatacattttcttcctggagcccaccgaacagcccctggttttcaagacagcctttgctccactcgacaccaacggcaaaaatttaaaaaaagaggtgggcaagatattgtgtactgattgtgccaccagaccgaaactgaagaaaatgaaatcccagactggccaggtcggcgagaaacagtccctgaagtgtgaggctgctgccggaaatcctcagccgagttaccggtggtttaaggatggtaaagagctgaaccgctctagagatatcaggatcaagtatggcaatggacgaaaaaactcaagactgcagtttaacaaggtgaaggtggaggacgctggcgagtatgtctgtgaggccgaaaacattctgggaaaagatactgtgcgtggccgtctgtatgtgaatagcgtctctacgactctcagctcatggtcagggcacgctcggaaatgcaacgagactgccaaaagttattgcgtgaacggcggtgtgtgctactatattgaaggaatcaaccagttgagctgcaagtgtcccaacgggttcttcggccagcgctgtctggagaagctgccgttgaggctgtatatgcctgaccctaaacagtccttcctgtccttcgaattgtcaaaagcagaagagttgtatcagaaacgagtgctaaccattaccggaatttgcgtagcgctactggtcgtgggcatcgtttgcgtcgttgcatattgcaaaaccaagaaacagcgtaagcaaatgcacaaccatctgagacagaacatgtgccctgctcaccagaaccggtccctggcgaatgggcctagccatcctcggttggaccctgaggaaatccagatggcagattacatctccaaaaacgtgcccgctactgatcacgtcatccggagagaaactgagaccaccttcagtggatctcacagctgttccccaagccatcattgcagtacggcaacccctacaagcagccaccgtcatgagtctcatacatggtcacttgaacgctccgagtctctaacatctgattcccagtccggaataatgctgagctccgttggcacctcgaagtgtaactcacccgcatgcgtggaggctagggctcggcgagctgctgcttataatctcgaggaacggagacgcgcaaccgccccaccctatcatgattccgttgactcactgcgagattcacctcatagtgagcgctacgtgagcgccttgacaaccccggctcgactcagtccggttgattttcattactccttggctactcaggtgccaacttttgagataacaagcccaaattcagctcatgcagtctctttgccgcctgcggcacccatctcgtaccgactcgcagaacagcagcctctgcttcggcacccggctccaccaggtcccggacctggacccggtccgggtccagggccaggagccgatatgcagaggtcctacgatagctactactaccccgctgccggaccgggacccaggcgtggaacttgcgcactaggcggatccctgggatcccttcctgcatcccctttcaggattcccgaagatgatgaatatgagactacccaggaatgtgctccccctccccctcccagacctcgtgccaggggtgccagtcgaagaacctctgcagggccaaggaggtggcgtaggagtcgtctcaacggcttggccgctcagagagcccgagccgcacgcgactctttgagtttgagtagcggcagcgggggaggctctgcttctgccagtgatgatgacgctgatgacgccgacggggctcttgccgcagaaagcacaccctttctgggcctgcggggtgcacatgatgcccttcgttctgacagcccgccactgtgtccagccgctgactccagaacatactactctttagattctcattctacacgcgcaagctcgagacactcccggggtccccctcctagagctaaacaggactcagcccctctatag

SEQ ID NO: 177255 - DNA, 2577 bp, Artificial Sequence
  derived and/or modified sequence
atgcgccaagtgtgttgcagcgctctgcccccaccccctctagaaaagggacgctgttccagctactcagatagttcaagcagcagcagtgaaaggtccagcagctcttctagttcaagttctgaatcaggaagtagttcaagatccagctctaacaactcaagcatctcccgtccagctgccccacccgaacccagaccacagcaacagccacagcccagatctcctgccgctcgcagagctgcggctcggagcagggccgcagccgcaggaggcatgcgccgagaccctgccccaggattcagtatgctgctttttggagtgtctctggcatgctactccccttcccttaagagcgttcaggatcaggcttacaaagcccctgttgtggttgagggaaaagtgcaagggctggtgcctgcaggtggttcatccagcaattctacaagagagcctccagccagcggccgagtggccctggttaaggtcttggataagtggccattgcgaagcggaggcctccagagggagcaggtgatctcagttggctcatgcgttcccctggaacggaatcaaaggtatattttcttccttgagccaactgagcaaccactagtgtttaagacggcattcgccccactggacactaatggtaagaatctcaagaaagaagttggaaagattttgtgtacagactgcgccaccagaccaaaactgaagaaaatgaagtcacagactggacaggtaggcgagaaacagagcctgaagtgcgaggccgcagctgggaatcctcagccttcgtaccgctggttcaaggacggaaaagagctgaataggtctcgcgacatccggattaagtatggaaacggaagaaaaaattctagattacagttcaacaaggtcaaggttgaggacgcaggcgagtacgtctgcgaggccgagaacatcttagggaaagatactgtgcgcggtcgtctgtatgtcaacagtgtatccaccacattgagttcatggtctggccatgcccgaaagtgcaacgagactgcaaagtcttactgcgtaaacggcggtgtctgctactacattgaagggataaaccaactgagctgcaaatgtcccaacggcttctttgggcagagatgtttagagaaactgcccctaaggctctacatgcccgaccccaaacagaaacacttggggttcgaattaaaagaggccgaggagctgtatcagaagcgcgtgttgacgattactggtatttgcgtcgcactgcttgtcgtaggtattgtgtgcgtggtggcctactgtaagaccaaaaagcagaggaagcagatgcacaatcacctaagacagaatatgtgccctgcccatcaaaaccggagcctcgctaatggcccttctcacccccgtttggacccagaagaaattcagatggccgactacatcagtaagaatgtgcctgctaccgatcacgtaatacgacgggaaacagaaacaaccttctctggctctcactcctgttcacctagccatcactgttccacggccacacctacgtcatcgcatcggcatgaaagccacacctggagtctcgaacgttctgagagccttacgtctgactcacaaagcgggatcatgctgtccagtgtcgggacaagcaagtgtaattcacccgcttgcgtcgaggcaagggcacgcagagctgctgcctacaacttagaggagcggaggcgggctacagcccctccttaccatgactccgtggacagcctaagggacagcccacactctgaacgatacgttagcgccctaactacaccagcccgtttgtccccagttgacttccactattctcttgccacacaagtaccaactttcgaaatcacttcccccaattccgcccacgctgtctccctgcctccagcagcgcctatcagttaccgtctcgccgagcagcaaccattgttacgacacccagcacccccaggcccagggccaggacctgggcctgggccagggccaggcgctgatatgcagcggtcttacgactcttactactaccccgcagccggtcccggaccacggaggggaacatgcgcactggggggatcccttggctccctgccagctagtccattcagaatccctgaagatgatgagtatgagaccactcaagaatgcgctccaccacctcctcctcggcctagagctcgaggcgcatctaggagaacttccgccggtccgagacggtggaggcgcagccgccttaacggcctcgcagcccaacgcgcaagagctgcacgagattctctgagtctgtcgtctggctccggagggggatctgcctccgcctcggacgacgatgccgacgacgcagacggggctctggccgctgagtccacaccctttctcgggttacggggtgctcatgatgccctgcggtcagactctccacctttgtgcccagccgcagattcgcgtacctactattctttagacagtcattctactcgggcatcatcccgtcattccagaggaccacctccacgggctaaacaggattccgcacctttatag

SEQ ID NO: 177256 - DNA, 2577 bp, Artificial Sequence
  derived and/or modified sequence
atgagacaggtgtgctgcagcgccctgccccccccccccctggagaagggcagatgcagcagctacagcgacagcagcagcagcagcagcgagagaagcagcagcagcagcagcagcagcagcgagagcggcagcagcagcagaagcagcagcaacaacagcagcatcagcagacccgccgccccccccgagcccagaccccagcagcagccccagcccagaagccccgccgccagaagagccgccgccagaagcagagccgccgccgccggcggcatgagaagagaccccgcccccggcttcagcatgctgctgttcggcgtgagcctggcctgctacagccccagcctgaagagcgtgcaggaccaggcctacaaggcccccgtggtggtggagggcaaggtgcagggcctggtgcccgccggcggcagcagcagcaacagcaccagagagccccccgccagcggcagagtggccctggtgaaggtgctggacaagtggcccctgagaagcggcggcctgcagagagagcaggtgatcagcgtgggcagctgcgtgcccctggagagaaaccagagatacatcttcttcctggagcccaccgagcagcccctggtgttcaagaccgccttcgcccccctggacaccaacggcaagaacctgaagaaggaggtgggcaagatcctgtgcaccgactgcgccaccagacccaagctgaagaagatgaagagccagaccggccaggtgggcgagaagcagagcctgaagtgcgaggccgccgccggcaacccccagcccagctacagatggttcaaggacggcaaggagctgaacagaagcagagacatcagaatcaagtacggcaacggcagaaagaacagcagactgcagttcaacaaggtgaaggtggaggacgccggcgagtacgtgtgcgaggccgagaacatcctgggcaaggacaccgtgagaggcagactgtacgtgaacagcgtgagcaccaccctgagcagctggagcggccacgccagaaagtgcaacgagaccgccaagagctactgcgtgaacggcggcgtgtgctactacatcgagggcatcaaccagctgagctgcaagtgccccaacggcttcttcggccagagatgcctggagaagctgcccctgagactgtacatgcccgaccccaagcagagcttcctgagcttcgagctgagcaaggccgaggagctgtaccagaagagagtgctgaccatcaccggcatctgcgtggccctgctggtggtgggcatcgtgtgcgtggtggcctactgcaagaccaagaagcagagaaagcagatgcacaaccacctgagacagaacatgtgccccgcccaccagaacagaagcctggccaacggccccagccaccccagactggaccccgaggagatccagatggccgactacatcagcaagaacgtgcccgccaccgaccacgtgatcagaagagagaccgagaccaccttcagcggcagccacagctgcagccccagccaccactgcagcaccgccacccccaccagcagccacagacacgagagccacacctggagcctggagagaagcgagagcctgaccagcgacagccagagcggcatcatgctgagcagcgtgggcaccagcaagtgcaacagccccgcctgcgtggaggccagagccagaagagccgccgcctacaacctggaggagagaagaagagccaccgcccccccctaccacgacagcgtggacagcctgagagacagcccccacagcgagagatacgtgagcgccctgaccacccccgccagactgagccccgtggacttccactacagcctggccacccaggtgcccaccttcgagatcaccagccccaacagcgcccacgccgtgagcctgccccccgccgcccccatcagctacagactggccgagcagcagcccctgctgagacaccccgccccccccggccccggccccggccccggccccggccccggccccggcgccgacatgcagagaagctacgacagctactactaccccgccgccggccccggccccagaagaggcacctgcgccctgggcggcagcctgggcagcctgcccgccagccccttcagaatccccgaggacgacgagtacgagaccacccaggagtgcgcccccccccccccccccagacccagagccagaggcgccagcagaagaaccagcgccggccccagaagatggagaagaagcagactgaacggcctggccgcccagagagccagagccgccagagacagcctgagcctgagcagcggcagcggcggcggcagcgccagcgccagcgacgacgacgccgacgacgccgacggcgccctggccgccgagagcacccccttcctgggcctgagaggcgcccacgacgccctgagaagcgacagcccccccctgtgccccgccgccgacagcagaacctactacagcctggacagccacagcaccagagccagcagcagacacagcagaggccccccccccagagccaagcaggacagcgcccccctgtag

SEQ ID NO: 177257 - DNA, 2577 bp, Artificial Sequence
  derived and/or modified sequence
atgagacaggtgtgctgcagcgccctgccccccccccccctggagaagggcagatgcagcagctacagcgacagcagcagcagcagcagcgagagaagcagcagcagcagcagcagcagcagcgagagcggcagcagcagcagaagcagcagcaacaacagcagcatcagcagacccgccgccccccccgagcccagaccccagcagcagccccagcccagaagccccgccgccagaagagccgccgccagaagcagagccgccgccgccggcggcatgagaagagaccccgcccccggcttcagcatgctgctgttcggcgtgagcctggcctgctacagccccagcctgaagagcgtgcaggaccaggcctacaaggcccccgtggtggtggagggcaaggtgcagggcctggtgcccgccggcggcagcagcagcaacagcaccagagagccccccgccagcggcagagtggccctggtgaaggtgctggacaagtggcccctgagaagcggcggcctgcagagagagcaggtgatcagcgtgggcagctgcgtgcccctggagagaaaccagagatacatcttcttcctggagcccaccgagcagcccctggtgttcaagaccgccttcgcccccctggacaccaacggcaagaacctgaagaaggaggtgggcaagatcctgtgcaccgactgcgccaccagacccaagctgaagaagatgaagagccagaccggccaggtgggcgagaagcagagcctgaagtgcgaggccgccgccggcaacccccagcccagctacagatggttcaaggacggcaaggagctgaacagaagcagagacatcagaatcaagtacggcaacggcagaaagaacagcagactgcagttcaacaaggtgaaggtggaggacgccggcgagtacgtgtgcgaggccgagaacatcctgggcaaggacaccgtgagaggcagactgtacgtgaacagcgtgagcaccaccctgagcagctggagcggccacgccagaaagtgcaacgagaccgccaagagctactgcgtgaacggcggcgtgtgctactacatcgagggcatcaaccagctgagctgcaagtgccccaacggcttcttcggccagagatgcctggagaagctgcccctgagactgtacatgcccgaccccaagcagaagcacctgggcttcgagctgaaggaggccgaggagctgtaccagaagagagtgctgaccatcaccggcatctgcgtggccctgctggtggtgggcatcgtgtgcgtggtggcctactgcaagaccaagaagcagagaaagcagatgcacaaccacctgagacagaacatgtgccccgcccaccagaacagaagcctggccaacggccccagccaccccagactggaccccgaggagatccagatggccgactacatcagcaagaacgtgcccgccaccgaccacgtgatcagaagagagaccgagaccaccttcagcggcagccacagctgcagccccagccaccactgcagcaccgccacccccaccagcagccacagacacgagagccacacctggagcctggagagaagcgagagcctgaccagcgacagccagagcggcatcatgctgagcagcgtgggcaccagcaagtgcaacagccccgcctgcgtggaggccagagccagaagagccgccgcctacaacctggaggagagaagaagagccaccgcccccccctaccacgacagcgtggacagcctgagagacagcccccacagcgagagatacgtgagcgccctgaccacccccgccagactgagccccgtggacttccactacagcctggccacccaggtgcccaccttcgagatcaccagccccaacagcgcccacgccgtgagcctgccccccgccgcccccatcagctacagactggccgagcagcagcccctgctgagacaccccgccccccccggccccggccccggccccggccccggccccggccccggcgccgacatgcagagaagctacgacagctactactaccccgccgccggccccggccccagaagaggcacctgcgccctgggcggcagcctgggcagcctgcccgccagccccttcagaatccccgaggacgacgagtacgagaccacccaggagtgcgcccccccccccccccccagacccagagccagaggcgccagcagaagaaccagcgccggccccagaagatggagaagaagcagactgaacggcctggccgcccagagagccagagccgccagagacagcctgagcctgagcagcggcagcggcggcggcagcgccagcgccagcgacgacgacgccgacgacgccgacggcgccctggccgccgagagcacccccttcctgggcctgagaggcgcccacgacgccctgagaagcgacagcccccccctgtgccccgccgccgacagcagaacctactacagcctggacagccacagcaccagagccagcagcagacacagcagaggccccccccccagagccaagcaggacagcgcccccctgtag

SEQ ID NO: 177258 - protein, 852 aa, Artificial Sequence
  derived and/or modified sequence
MRQVCCSALPPPPLEKGRCSSYSDSSSSSSERSSSSSSSSSESGSSSRSSSNNSSISRPAAPPEPRPQQQPQPRSPAARRAAARSRAAAAGGMRRDPAPGFSMLLFGVSLACYSPSLKSVQDQAYKAPVVVEGKVQGLVPAGGSSSNSTREPPASGRVALVKVLDKWPLRSGGLQREQVISVGSCVPLERNQRYIFFLEPTEQPLVFKTAFAPLDTNGKNLKKEVGKILCTDCATRPKLKKMKSQTGQVGEKQSLKCEAAAGNPQPSYRWFKDGKELNRSRDIRIKYGNGRKNSRLQFNKVKVEDAGEYVCEAENILGKDTVRGRLYVNSVSTTLSSWSGHARKCNETAKSYCVNGGVCYYIEGINQLSCKCPVGYTGDRCQQFAMVNFSTRLGGDVEEAEELYQKRVLTITGICVALLVVGIVCVVAYCKTKKQRKQMHNHLRQNMCPAHQNRSLANGPSHPRLDPEEIQMADYISKNVPATDHVIRRETETTFSGSHSCSPSHHCSTATPTSSHRHESHTWSLERSESLTSDSQSGIMLSSVGTSKCNSPACVEARARRAAAYNLEERRRATAPPYHDSVDSLRDSPHSERYVSALTTPARLSPVDFHYSLATQVPTFEITSPNSAHAVSLPPAAPISYRLAEQQPLLRHPAPPGPGPGPGPGPGPGADMQRSYDSYYYPAAGPGPRRGTCALGGSLGSLPASPFRIPEDDEYETTQECAPPPPPRPRARGASRRTSAGPRRWRRSRLNGLAAQRARAARDSLSLSSGSGGGSASASDDDADDADGALAAESTPFLGLRGAHDALRSDSPPLCPAADSRTYYSLDSHSTRASSRHSRGPPPRAKQDSAPL

SEQ ID NO: 177259 - DNA, 2559 bp, Artificial Sequence
  derived and/or modified sequence
atgaggcaggtttgttgctccgccctacccccccctccactggagaaggggcgctgctctagctactctgactcatctagttcgtctagcgagcggagtagcagttcgtccagcagcagttccgaatcaggcagttcatccagatcgtcatcaaacaatagcagtatttctcgcccagctgcacctcctgaaccgcgcccccagcagcagccgcagccaaggtccccagcagctcgacgagccgctgcacgaagccgcgcagccgcagccggaggtatgcgaagagatccagccccagggttctctatgttgctgttcggtgtcagcctggcctgttattcccctagtctcaagagtgtgcaggaccaggcctacaaggcccccgtggtggtcgaaggcaaggttcaaggcctggtgcccgcaggcggaagcagttccaattcaactcgcgaaccaccagcaagtggtagagtggcactcgtgaaggtgctagacaagtggcctctccgcagcgggggattgcagcgggaacaggtcatcagtgttgggagttgtgtgccactggaacggaaccagcggtatattttcttcctggagcccaccgaacagcccctggtatttaagactgctttcgcccctctggacaccaacggtaaaaatctcaagaaagaggtcgggaagatcctttgtacagattgtgctaccagaccaaagctgaagaaaatgaagtcacagaccggccaggtcggtgaaaagcaatcccttaagtgcgaagccgcagccggcaatccacaaccatcttaccgttggttcaaggacggcaaagaactgaatcgaagccgcgacattcggattaagtatggcaatggaaggaaaaacagcaggctgcagttcaacaaagtcaaagtagaggacgcaggagagtatgtatgtgaggcggagaacattctgggtaaagacacagttcgggggcgcttgtacgtgaacagtgtttccacaacgctttcaagttggtccggacatgcacggaagtgtaatgagacagcaaagtcatattgcgtaaacgggggcgtgtgctactacatagagggtattaatcagttgtcttgtaagtgtccagtcggctatacaggtgaccgatgtcagcagttcgcaatggtcaatttctctactcgccttggcggtgacgtagaagaagcagaggaattgtaccaaaaacgggtgcttacgattaccggcatttgcgtagctctgctggtggttggtatagtgtgcgtggtggcttactgcaagaccaagaaacaaaggaagcaaatgcacaatcacctcagacagaatatgtgtccagcccaccagaaccgaagcctggccaatggcccatcccaccccaggctggatcctgaggaaattcagatggcagactacatctctaagaatgttcccgccaccgatcacgtcattagacgagagacagagaccactttttcaggtagccactcctgcagccccagccatcattgtagtacggctacacctacaagctcccacagacatgaatctcatacgtggtctctcgagagaagtgaaagcctaactagcgatagccagagcggaattatgctgtcgtcagtgggcacaagcaagtgcaatagcccagcatgtgtcgaagctcgagcccggagggcagcagcctacaatcttgaagagagacggagggcgaccgctcctccttaccatgatagcgtggatagtctacgtgattccccacactcagaaaggtacgtttccgccctcaccacacccgctcgactgtcacctgtcgatttccactattctttggcaacacaggtgccaacctttgagatcacaagtccaaacagcgcccacgctgtgagcctgcccccagccgcgcccatttcttaccggctggctgaacagcaaccgctgctgagacaccccgcacctcccggaccggggccaggccctgggcctggaccaggacccggggccgatatgcagcggtcatatgattcatactactaccccgctgcagggcccggcccacgaagagggacatgtgccttggggggcagcctcggctcattgcctgcatcccccttccgcattcctgaggatgatgagtacgagaccactcaagaatgcgccccaccccctccacccagaccaagagcgcggggtgcctctcgcagaaccagtgccggcccacgcaggtggcggagatcgaggttgaacggcttggcagcccagagggctcgggctgcccgagactcactctcgctgagcagtgggagcggaggaggctccgcctccgcatccgacgatgacgccgacgatgcagacggtgccctggcagcggagtctactccctttctcggccttagaggcgcccacgacgccttacggagcgattcaccccccctttgccccgccgctgactcacgcacatattactctctggattctcacagtacgcgggcttccagccgccatagcagagggccaccccctcgcgccaagcaggattccgctcctctgtag

SEQ ID NO: 177260 - DNA, 2559 bp, Artificial Sequence
  derived and/or modified sequence
atgaggcaggtgtgctgcagcgccctgcccccaccacccctggagaagggccgctgcagcagctacagcgacagcagcagcagcagcagcgagaggagcagcagcagcagcagcagcagcagcgagagcggcagcagcagccgcagcagcagcaacaacagcagcatcagcaggcctgctgcccctcctgagccccggccccagcagcagccccagcccaggagccctgctgccaggagagctgctgcccggagcagagctgctgctgctgggggcatgaggcgggaccctgcccctggcttctccatgctgctgtttggagtgtccctggcctgctacagccccagcctgaagtctgtgcaggaccaggcctacaaggcccctgtggtggtggagggcaaggtgcagggcctggtgcctgctgggggcagcagcagcaacagcacccgggagcccccagccagcggccgggtggccctggtgaaggtgctggacaagtggcccctgcggagcggcggcctgcagcgggagcaggtgatctctgtgggcagctgtgtgcccctggagaggaaccagcgctacatcttcttcctggagcccacagagcagcccctggtgttcaagacagcctttgcccccctggacaccaacgggaagaacctgaagaaggaggtgggcaagatcctgtgcacagactgtgccacccggcccaagctgaagaagatgaagagccagacaggccaggtgggggagaagcagagcctgaagtgtgaggccgctgctggcaacccccagcccagctaccgctggttcaaggatggcaaggagctgaacagaagccgggacatccgcatcaagtatggaaatggaaggaagaacagccggctgcagttcaacaaggtgaaggtggaggatgctggggagtatgtgtgtgaggccgagaacatcctgggcaaggacacagtgcggggccgcctgtatgtgaacagcgtgtccaccaccctgagctcctggagcggccacgccaggaagtgcaatgaaacagccaagagctactgtgtgaatggaggagtgtgctactacatcgagggcatcaaccagctgagctgcaagtgccctgtgggctacacaggagaccgctgccagcagtttgccatggtgaacttcagcacccggctgggcggagatgtggaggaggccgaggagctgtaccagaagagggtgctgaccatcaccggcatctgtgtggccctgctggtggtgggcatcgtgtgtgtggtggcctactgcaagaccaagaagcagaggaagcagatgcacaaccacctgcggcagaacatgtgcccagcccaccagaacagaagcctggccaacggccccagccacccccggctggaccctgaggagatccagatggctgactacatcagcaagaatgtgcctgccacagaccacgtgatccggcgggagacagagaccaccttcagcggcagccacagctgcagccccagccaccactgcagcacagccacccccaccagcagccacagacatgagagccacacctggagcctggagaggtctgagagcctgaccagtgacagccagagcggcatcatgctgagctctgtgggcaccagcaagtgcaacagccctgcctgtgtggaggcccgggcccggcgggctgctgcctacaacctggaggagaggagaagagccacagccccaccctaccatgattctgtggacagcctgcgggacagcccccacagcgagcgctacgtgtctgccctgaccaccccagcccggctgagccctgtggacttccactacagcctggccacccaggtgcccacctttgagatcaccagccccaacagcgcccatgctgtgtccctgcccccagctgcccccatctcctaccgcctggccgagcagcagcccctgctgcggcacccagcccctcctggccctggccctggccctggccctggccctggccctggagctgacatgcagaggagctatgacagctactactacccagctgctggccctggcccccggcggggcacctgtgccctgggcggcagcctgggcagcctgcctgccagccccttccgcatcccagaagatgatgaatatgagaccacccaggagtgtgcccctcctcctccaccccggccccgggcccggggggccagcaggaggaccagcgctggcccccggcgctggaggaggagccggctgaatggcctggccgcccagagggcccgggccgcccgggacagcctgagcctgagcagcggcagcggcggcggcagcgccagcgccagtgatgatgatgctgatgatgctgatggagccctggccgctgagagcacccccttcctgggcctgcggggggcccatgatgccctgcggagtgacagcccccccctgtgcccagctgctgacagcaggacctactacagcctggacagccacagcacccgggccagcagccgccacagccggggccccccaccccgggccaagcaggacagcgcccccctgtag

SEQ ID NO: 177261 - DNA, 2559 bp, Artificial Sequence
  derived and/or modified sequence
atgcggcaggtgtgctgcagcgccctgccccccccccccctggagaaaggaaggtgcagctcctactcagattccagttccagcagctccgagcggagttctagttcgtcttcatcatcttcagaatccggatcctccagcagatccagtagcaataactcaagcatttccaggccggcggctcctcctgaaccaaggccgcagcagcagccacagccacgcagtccggcagctcgtcgcgctgcagcaaggtctagagccgcagccgccggcggaatgaggcgagatcctgctcctgggttcagtatgctgctatttggtgtctccctagcctgctactcaccaagcttgaagtctgtgcaagatcaggcgtacaaggccccagtcgtggtcgagggaaaggttcagggccttgtgcccgctggggggtcctcctccaactccacccgcgaaccaccggcatcgggaagagtggctctggtcaaagtcctggacaaatggcccctgaggagcggtgggctccagagagaacaggttataagcgttggaagttgtgtgccactcgagcggaaccaacgctatatcttcttcctggaacctaccgagcagcctctcgtctttaaaaccgcattcgcccctctggatacgaacggtaagaacctgaagaaggaagttggcaaaatcctgtgtacagactgcgctactcggccgaaactcaaaaaaatgaaaagccagactggtcaggtaggagagaagcaaagcttaaagtgtgaggctgccgccggcaacccacagccatcatatcgctggttcaaggatggcaaagagttgaaccggagtcgtgacatcagaattaagtatgggaacgggagaaagaattctaggcttcagtttaataaagttaaggtggaggatgccggagaatacgtgtgcgaggcagaaaatatcctgggcaaagacaccgtcagaggccggctgtacgttaacagtgtctctactacactcagcagctggagcggacatgcaaggaagtgtaacgaaacagccaagagctactgcgtaaacggcggcgtttgttattatatcgaggggatcaatcaactatcgtgcaaatgccccgtcgggtacaccggcgaccggtgccaacagtttgccatggttaatttcagcacacgattggggggagacgttgaggaggcagaggagctgtatcaaaagagagtactgaccatcaccggcatttgtgtggcgctcctggtggttggcatcgtctgtgtggttgcctattgtaagacgaagaagcagagaaagcagatgcacaaccacctccggcagaacatgtgtccagcccaccaaaacaggagccttgccaacggacccagtcacccccgtttagatccggaagagatccagatggccgactacatttcgaaaaacgtacccgccaccgaccacgtcatccgaagggagacagagaccacgttttccggtagtcattcttgtagcccatcccaccactgctctaccgcgacccctacctccagccataggcacgaaagccacacctggagtttggaaaggtccgaatccttaaccagcgattctcaatcaggcattatgcttagttcagtgggcacttccaagtgtaattctccggcatgtgtcgaggctcgggctaggagagccgcagcctataacctcgaagagcggcggagggcaacggcacccccatatcatgattccgttgactcacttagagacagtcctcatagcgaacgttacgtctccgccctgacaactcccgcgcggttaagcccagtcgattttcactacagccttgcaacccaagtaccaacattcgaaattactagccctaactccgctcatgctgtaagcctccccccagctgcccctatctcctacaggttagcggagcaacagcctctgctcagacatccagctcctcccggtccaggccccggccccgggcccgggcccggtcctggagcggacatgcagcgcagctacgactcctattactacccggccgccgggccgggtcctcgccggggcacctgtgctctggggggctcactcgggagccttccagcaagcccgttcaggattcccgaggacgacgaatatgagaccacacaagagtgcgcccctcccccacccccgagacctcgcgctcggggagcctccagacgtacttccgctggaccacggaggtggagaagatcacgccttaatggactggctgcccagcgcgctagagcagcccgcgactcactgagcctgtccagtgggtccggaggtggatctgccagtgctagcgatgacgatgctgacgatgctgacggcgcgcttgctgccgagtctactcccttcctgggtctgaggggggctcatgatgccctcaggtcagattctcctcccctatgccctgctgccgactccaggacatactatagccttgattcccactctacaagggcttctagccggcattccagagggccccccccccgagctaagcaggacagtgcaccgctctag

SEQ ID NO: 177262 - DNA, 3026 bp, Artificial Sequence
  derived and/or modified sequence
cctccaggtcctggcgcacagggtgggagcgctgcgctgcgccgcgctgcgcatcgcggcccgcttgccgcctgccccctgccctagctgggccacctccccgggctgccggtggagggctaagaggcgctaacgttacgctgtttccggttttccagcgggctctgtttcccctcccaaggcggcggcggctgagcggcggagccccccaaatggcctggccagatgcggcaggtttgctgctcagcgctgccgccgccgccactggagaagggtcggtgcagcagctacagcgacagcagcagcagcagcagcgagaggagcagcagcagcagcagcagcagcagcgagagcggcagcagcagcaggagcagcagcaacaacagcagcatctctcgtcccgctgcgcccccagagccgcggccgcagcaacagccgcagccccgcagccccgcagcccggagagccgccgcccgttcgcgagccgcagccgccggcggcatgaggcgcgacccggcccccggcttctccatgctgctcttcggtgtgtcgctcgcctgctactcgcccagcctcaagtcagtgcaggaccaggcgtacaaggcacccgtggtggtggagggcaaggtacaggggctggtcccagccggcggctccagctccaacagcacccgagagccgcccgcctcgggtcgggtggcgttggtaaaggtgctggacaagtggccgctccggagcggggggctgcagcgcgagcaggtgatcagcgtgggctcctgtgtgccgctcgaaaggaaccagcgctacatctttttcctggagcccacggaacagcccttagtctttaagacggcctttgcccccctcgataccaacggcaaaaatctcaagaaagaggtgggcaagatcctgtgcactgactgcgccacccggcccaagttgaagaagatgaagagccagacgggacaggtgggtgagaagcaatcgctgaagtgtgaggcagcagccggtaatccccagccttcctaccgttggttcaaggatggcaaggagctcaaccgcagccgagacattcgcatcaaatatggcaacggcagaaagaactcacgactacagttcaacaaggtgaaggtggaggacgctggggagtatgtctgcgaggccgagaacatcctggggaaggacaccgtccggggccggctttacgtcaacagcgtgagcaccaccctgtcatcctggtcggggcacgcccggaagtgcaacgagacagccaagtcctattgcgtcaatggaggcgtctgctactacatcgagggcatcaaccagctctcctgcaagtgtcctgtgggatacaccggggacaggtgtcagcagttcgcaatggtcaacttctccacaagactagggggagatgtagaggaagccgaggagctgtaccagaagagggtcctgaccatcacgggcatctgcgtggctctgctggtcgtgggcatcgtctgtgtggtggcctactgcaagaccaaaaaacagcggaagcagatgcacaaccacctccggcagaacatgtgcccggcccatcagaaccggagcttggccaatgggcccagccacccccggctggacccagaggagatccagatggcagattatatttccaagaacgtgccagccacagaccatgtcatcaggagagaaactgagaccaccttctctgggagccactcctgttctccttctcaccactgctccacagccacacccacctccagccacagacacgagagccacacgtggagcctggaacgttctgagagcctgacttctgactcccagtcggggatcatgctatcatcagtgggtaccagcaaatgcaacagcccagcatgtgtggaggcccgggcaaggcgggcagcagcctacaacctggaggagcggcgcagggccaccgcgccaccctatcacgattccgtggactcccttcgcgactccccacacagcgagaggtacgtgtcggccctgaccacgcccgcgcgcctctcgcccgtggacttccactactcgctggccacgcaggtgccaactttcgagatcacgtcccccaactcggcgcacgccgtgtcgctgccgccggcggcgcccatcagttaccgcctggccgagcagcagccgttactgcggcacccggcgccccccggcccgggacccggacccgggcccgggcccgggcccggcgcagacatgcagcgcagctatgacagctactattaccccgcggcggggcccggaccgcggcgcgggacctgcgcgctcggcggcagcctgggcagcctgcctgccagccccttccgcatccccgaggacgacgagtacgagaccacgcaggagtgcgcgcccccgccgccgccgcggccgcgcgcgcgcggtgcgtcccgcaggacgtcggcggggccccggcgctggcgccgctcgcgcctcaacgggctggcggcgcagcgcgcacgggcggcgagggactcgctgtcgctgagcagcggctcgggcggcggctcagcctcggcgtcggacgacgacgcggacgacgcggacggggcgctggcggccgagagcacacctttcctgggcctgcgtggggcgcacgacgcgctgcgctcggactcgccgccactgtgcccggcggccgacagcaggacttactactcactggacagccacagcacgcgggccagcagcagacacagccgcgggccgcccccgcgggccaagcaggactcggcgccactctagggccccgccgcgcgcccctccgccccgcccgccccactatctttaaggagaccagagaccgcctactggagagaaaggaggaaaaaagaaataaaaatatttttattttctataaaaggaaaaaagtataacaaaatgttttattttcattttagcaaaaattgtcttataatactagctaacggcaaaggcgtttttatagggaaactatttatatgtaacatcctgatttacagcttcgg

SEQ ID NO: 177263 - DNA, 2559 bp, Artificial Sequence
  derived and/or modified sequence
atgaggcaagtgtgttgcagtgctttgccccctccgccactggagaaaggtagatgcagcagttacagcgatagctcgtcttcctcttccgaaaggagctcaagttcgagctcctcctcttccgagagcggatcctcgagcaggagctcttccaataacagttccatctccaggcccgcagctccgccagaacctagacctcagcaacagccacagccacgttctcctgctgcacgcagagcagctgccagatccagggccgcagccgcaggtggaatgcgccgagacccagcaccaggattcagcatgctgctctttggcgttagtcttgcatgttactctccaagcctgaagagcgtgcaagaccaagcttacaaggccccagtggtcgtagaaggaaaggttcaaggcctcgttccagctggtggctcgtcttccaattcaacccgcgaacccccagcttccgggcgagtggcgcttgtaaaggtgctggacaagtggcctttgaggagtggtggtctccagcgcgaacaggtcatcagtgtcgggtcctgtgttcctttggaacgtaaccagcgatatatcttcttccttgagccaacggagcagccgcttgtttttaaaactgcttttgcccctctggacaccaacggcaagaacttaaaaaaggaggtgggcaagattctgtgcacggactgtgctacgcggccaaagctcaaaaaaatgaagtcccagacaggacaggtgggtgaaaagcaaagtctaaagtgtgaggctgctgcaggaaatccacagccaagctacaggtggttcaaggatggtaaggaactaaatagaagtcgagatattagaatcaaatatggaaacggtaggaaaaattctaggctgcaattcaataaagtgaaagttgaggacgcaggggagtacgtttgtgaggccgagaacatcctgggcaaagacaccgtgcgcggtcggctatatgtgaacagcgtatcgaccactctctcatcctggtcgggacatgccaggaagtgcaatgagacagccaaatcgtactgtgtgaacgggggagtgtgttattatattgaggggatcaaccaactgagctgtaagtgtcctgttggatatacaggagaccgttgccagcagttcgcaatggtgaatttttctacacggctagggggagatgtggaggaggccgaagaattgtatcagaagcgcgtgttgaccatcaccggcatttgtgtggcgttgcttgttgtcgggatcgtgtgcgttgtggcctactgcaagaccaagaagcagaggaagcaaatgcacaatcacctcaggcaaaatatgtgtcctgcacatcagaacagatccctcgcaaacggaccctcacacccacgcctagacccagaggagatacaaatggccgattacattagcaaaaatgtgcctgctactgaccatgtgattcgtcgtgaaaccgaaactacttttagcgggagtcattcctgcagcccaagtcaccactgttccacagctacacccaccagtagccatcgtcacgagtctcatacttggtccctggaaagatctgaaagcctcacatctgattcccagtcaggaatcatgttaagctctgttggcacctccaaatgtaacagtcctgcctgtgtcgaggccagagcacgtagggctgcggcttacaaccttgaggagagaagacgcgcaacagctcccccttatcacgattctgtcgattctctgcgcgattctccccactctgagcgctacgtctcagctttgacaactcccgctagactgagccccgttgatttccactattccttggccacccaagtgccgaccttcgagatcactagtcccaactcggcacacgccgtctccctgcctccagcagctccaatcagttatagactggcggaacagcagccactgctaagacacccagcacccccaggtcctgggccagggcctgggcctggaccagggccaggtgccgacatgcagcgatcctatgacagctactactaccctgctgcgggaccagggcctcgcagaggtacctgtgccctggggggttccctcggatcactgcctgcctcccccttccggataccagaggatgatgaatacgaaacaacacaggagtgcgcaccccctccccctccacgtccaagggctcgaggcgcatcaaggaggacctccgcaggacccagacggtggcggcgtagccggctgaacggtctggctgcgcagagggcgcgagctgctcgcgacagcctgtcattatcatccggaagcggaggcggtagtgcctctgcatctgacgacgacgccgacgatgccgatggtgcacttgctgccgaaagcactccattcttagggttgcggggtgctcatgatgcattgcgttcagattctcctcccctgtgtcccgctgccgattccaggacctactacagcctggattcccattccactcgtgcctccagccgacactctagaggaccccctcctcgtgccaaacaggacagcgccccattatag

SEQ ID NO: 177264 - DNA, 2559 bp, Artificial Sequence
  derived and/or modified sequence
atgagacaggtgtgctgcagcgccctgccccccccccccctggagaagggcagatgcagcagctacagcgacagcagcagcagcagcagcgagagaagcagcagcagcagcagcagcagcagcgagagcggcagcagcagcagaagcagcagcaacaacagcagcatcagcagacccgccgccccccccgagcccagaccccagcagcagccccagcccagaagccccgccgccagaagagccgccgccagaagcagagccgccgccgccggcggcatgagaagagaccccgcccccggcttcagcatgctgctgttcggcgtgagcctggcctgctacagccccagcctgaagagcgtgcaggaccaggcctacaaggcccccgtggtggtggagggcaaggtgcagggcctggtgcccgccggcggcagcagcagcaacagcaccagagagccccccgccagcggcagagtggccctggtgaaggtgctggacaagtggcccctgagaagcggcggcctgcagagagagcaggtgatcagcgtgggcagctgcgtgcccctggagagaaaccagagatacatcttcttcctggagcccaccgagcagcccctggtgttcaagaccgccttcgcccccctggacaccaacggcaagaacctgaagaaggaggtgggcaagatcctgtgcaccgactgcgccaccagacccaagctgaagaagatgaagagccagaccggccaggtgggcgagaagcagagcctgaagtgcgaggccgccgccggcaacccccagcccagctacagatggttcaaggacggcaaggagctgaacagaagcagagacatcagaatcaagtacggcaacggcagaaagaacagcagactgcagttcaacaaggtgaaggtggaggacgccggcgagtacgtgtgcgaggccgagaacatcctgggcaaggacaccgtgagaggcagactgtacgtgaacagcgtgagcaccaccctgagcagctggagcggccacgccagaaagtgcaacgagaccgccaagagctactgcgtgaacggcggcgtgtgctactacatcgagggcatcaaccagctgagctgcaagtgccccgtgggctacaccggcgacagatgccagcagttcgccatggtgaacttcagcaccagactgggcggcgacgtggaggaggccgaggagctgtaccagaagagagtgctgaccatcaccggcatctgcgtggccctgctggtggtgggcatcgtgtgcgtggtggcctactgcaagaccaagaagcagagaaagcagatgcacaaccacctgagacagaacatgtgccccgcccaccagaacagaagcctggccaacggccccagccaccccagactggaccccgaggagatccagatggccgactacatcagcaagaacgtgcccgccaccgaccacgtgatcagaagagagaccgagaccaccttcagcggcagccacagctgcagccccagccaccactgcagcaccgccacccccaccagcagccacagacacgagagccacacctggagcctggagagaagcgagagcctgaccagcgacagccagagcggcatcatgctgagcagcgtgggcaccagcaagtgcaacagccccgcctgcgtggaggccagagccagaagagccgccgcctacaacctggaggagagaagaagagccaccgcccccccctaccacgacagcgtggacagcctgagagacagcccccacagcgagagatacgtgagcgccctgaccacccccgccagactgagccccgtggacttccactacagcctggccacccaggtgcccaccttcgagatcaccagccccaacagcgcccacgccgtgagcctgccccccgccgcccccatcagctacagactggccgagcagcagcccctgctgagacaccccgccccccccggccccggccccggccccggccccggccccggccccggcgccgacatgcagagaagctacgacagctactactaccccgccgccggccccggccccagaagaggcacctgcgccctgggcggcagcctgggcagcctgcccgccagccccttcagaatccccgaggacgacgagtacgagaccacccaggagtgcgcccccccccccccccccagacccagagccagaggcgccagcagaagaaccagcgccggccccagaagatggagaagaagcagactgaacggcctggccgcccagagagccagagccgccagagacagcctgagcctgagcagcggcagcggcggcggcagcgccagcgccagcgacgacgacgccgacgacgccgacggcgccctggccgccgagagcacccccttcctgggcctgagaggcgcccacgacgccctgagaagcgacagcccccccctgtgccccgccgccgacagcagaacctactacagcctggacagccacagcaccagagccagcagcagacacagcagaggccccccccccagagccaagcaggacagcgcccccctgtag

SEQ ID NO: 177265 - protein, 661 aa, Artificial Sequence
  derived and/or modified sequence
MASTDYSTYSQAAAQQGYSAYTAQPTQGYAQTTQAYGQQSYGTYGQPTDVSYTQAQTTATYGQTAYATSYGQPPTVEGTSTGYTTPTAPQAYSQPVQGYGTGAYDTTTATVTTTQASYAAQSAYGTQPAYPAYGQQPAATAPTRPQDGNKPTETSQPQSSTGGYNQPSLGYGQSNYSYPQVPGSYPMQPVTAPPSYPPTSYSSTQPTSYDQSSYSQQNTYGQPSSYGQQSSYGQQSSYGQQPPTSYPPQTGSYSQAPSQYSQQSSSYGQQSSFRQDHPSSMGVYGQESGGFSGPGENRSMSGPDNRGRGRGGFDRGGMSRGGRGGGRGGMGAGERGGFNKPGGPMDEGPDLDLGPPVDPDEDSDNSAIYVQGLNDSVTLDDLADFFKQCGVVKMNKRTGQPMIHIYLDKETGKPKGDATVSYEDPPTAKAAVEWFDGKDFQGSKLKVSLARKKPPMNSMRGGLPPREGRGMPPPLRGGPGGPGGPGGPMGRMGGRGGDRGGFPPRGPRGSRGNPSGGGNVQHRAGDWQCPNPGCGNQNFAWRTECNQCKAPKPEGFLPPPFPPPGGDRGRGGPGGMRGGRGGLMDRGGPGGMFRGGRGGDRGGFRGGRGMDRGGFGGGRRGGPGGPPGPLMEQMGGRRGGRGGPGKMDKGEHRQERRDRPY

SEQ ID NO: 177266 - protein, 437 aa, Artificial Sequence
  derived and/or modified sequence
MIVFVRFNSSHGFPVEVDSDTSIFQLKEVVAKRQGVPADQLRVIFAGKELRNDWTVQNCDLDQQSIVHIVQRPWRKGQEMNATGGDDPRNAAGGCEREPQSLTRVDLSSSVLPGDSVGLAVILHTDSRKDSPPAGSPAGRSIYNSFYVYCKGPCQRVQPGKLRVQCSTCRQATLTLTQEFFFKCGAHPTSDKETSVALHLIATNSRNITCITCTDVRSPVLVFQCNSRHVICLDCFHLYCVTRLNDRQFVHDPQLGYSLPCVAGCPNSLIKELHHFRILGEEQYNRYQQYGAEECVLQMGGVLCPRPGCGAGLLPEPDQRKVTCEGGNGLGCGFAFCRECKEAYHEGECSAVFEASGTTTQAYRVDERAAEQARWEAASKETIKKTTKPCPRCHVPVEKNGGCMHMKCPQPQCRLEWCWNCGCEWNRVCMGDHWFDV

SEQ ID NO: 177267 - DNA, 1314 bp, Artificial Sequence
  derived and/or modified sequence
atgattgtgtttgttaggtttaacagtagccacgggttccccgtcgaagtggactctgacacctccatctttcagctcaaagaggtggtggctaaacggcaaggggttcccgccgaccagctgagagttatctttgccggcaaggagctgcgtaatgattggaccgtgcagaactgcgacctggaccagcagtctatagtgcatattgtgcagagaccatggagaaaggggcaggaaatgaatgccacaggcggtgacgacccacggaatgcggccggggggtgcgaaagggagcctcaaagtctaacccgggtggatctgagtagttccgtgcttcctggagacagcgtggggctcgccgtgatcttgcacaccgatagtaggaaggattcgccaccggctgggagtccagccggccgctccatttataatagcttctacgtttattgcaaaggaccatgccagcgggttcagcctggaaagttgagagtgcagtgttcaacttgtcgacaggctacgttaacactcacccaagagtttttctttaagtgtggcgcccatccgacaagtgataaagagacctcagtcgccctgcacctgattgccaccaacagcaggaacatcacatgtattacctgcacagatgtgcgctcacctgttctcgtcttccaatgcaattcaaggcatgtgatttgccttgattgcttccacctgtactgtgtgactcgcttaaatgatcgccagttcgtgcatgatcctcagttaggttatagtctcccttgtgtagccggttgcccaaacagccttattaaagagctacatcattttcgcatcctgggcgaggaacagtacaacaggtatcagcagtatggtgcggaggaatgtgtgttgcagatgggtggcgtgctctgcccgagacctggctgtggcgccggactactgccagagccagaccagcgcaaagtaacctgcgagggaggcaatggactcggttgtggtttcgctttttgccgagagtgcaaggaggcctatcacgagggagaatgctccgccgtatttgaggcgagtggcaccaccactcaggcttatcgggtggatgagagagccgccgaacaggcaaggtgggaagccgccagcaaggagacaataaagaagacgactaagccctgcccgcggtgtcatgtgccagtcgaaaagaatggcggatgtatgcatatgaagtgtccgcagccccagtgtcgtcttgagtggtgctggaattgcgggtgcgagtggaacagggtgtgcatgggggaccactggtttgatgtgtag

SEQ ID NO: 177268 - DNA, 1314 bp, Artificial Sequence
  derived and/or modified sequence
atgattgtgtttgtgcgcttcaacagcagccacggcttccctgtggaggtggacagcgacaccagcatcttccagctgaaggaggtggtggccaagaggcagggcgtgcctgctgaccagctgcgggtcatctttgctgggaaggagctgagaaatgactggacagtgcagaactgtgacctggaccagcagagcatcgtgcacatcgtgcagaggccctggaggaagggccaggagatgaatgccactggaggagatgaccccagaaatgctgctgggggctgtgagcgggagccccagagcctgaccagggtggacctgagcagctctgtgctgcccggggacagcgtgggcctggccgtcatcctgcacacagacagcaggaaggacagccccccagctggcagccctgctggccgcagcatctacaacagcttctacgtgtactgcaagggcccctgccagagggtgcagcccgggaagctgcgggtgcagtgcagcacctgccggcaggccaccctgaccctgacccaggagttcttcttcaagtgtggggcccaccccaccagtgacaaggagacctctgtggccctgcacctgattgccaccaacagcaggaacatcacctgcatcacctgcacagatgtgcgcagccctgtgctggtgttccagtgcaacagcagacatgtgatctgcctggactgcttccacctgtactgtgtgacccggctgaatgaccggcagtttgtgcatgacccccagctgggctacagcctgccctgtgtggccggctgccccaacagcctcatcaaggagctgcaccacttccgcatcctgggggaggagcagtacaaccgctaccagcagtacggggctgaggagtgtgtgctgcagatgggcggcgtgctgtgccccaggcctggctgtggggccggcctgctgcctgagccagaccagaggaaggtgacctgtgagggcggcaatggcctgggctgcggctttgccttctgccgggagtgcaaggaggcctaccatgaaggagagtgcagcgctgtgtttgaggccagcggcaccaccacccaggcctacagagtggatgaaagagctgctgagcaggcccgctgggaggccgccagcaaggagaccatcaagaagaccaccaagccctgcccccgctgccacgtgcctgtggagaagaatggaggctgcatgcacatgaagtgcccccagccccagtgccgcctggagtggtgctggaactgtggctgtgagtggaacagagtgtgcatgggagaccactggtttgatgtgtag

SEQ ID NO: 177269 - DNA, 1314 bp, Artificial Sequence
  derived and/or modified sequence
atgatcgtgttcgtgcggttcaacagcagccacggcttccccgtggaggtggatagcgacaccagtattttccagctgaaagaagtggtcgctaagcgccagggcgttccagctgatcaactgagagttatctttgccgggaaggagcttcgcaatgactggactgtacaaaattgtgacctagatcaacaatcaatcgtgcatattgtgcagaggccgtggcgtaaagggcaagagatgaacgccactggcggagacgacccaaggaacgccgcgggcggctgcgagcgggagcctcagagtctcactcgcgtggacctgagttcttccgtcttgcctggggattcagtggggctggcagtgatcctgcacaccgacagccgaaaggattcaccacccgccgggtcccccgccggacgctcaatctacaactccttctacgtgtactgcaaagggccatgccagcgggtgcaacccggcaaactcagggttcagtgctctacatgtcgccaggcaactcttaccctcactcaggaattcttctttaagtgtggggctcaccctacctctgacaaagagacctccgtcgctctgcatctcatcgcaaccaatagccgaaacataacgtgtattacctgcaccgatgtccgatcccctgtgctcgttttccagtgtaattcccgacacgttatctgccttgactgcttccacctttactgcgtgacaagactgaacgatcgacaatttgtgcacgatccccagctggggtactcgctcccgtgcgtcgccggttgccccaactctctgattaaagaacttcatcacttcagaattcttggggaagagcagtacaatagataccagcagtacggagctgaagagtgcgtgctgcagatgggcggggtgctctgccccagacctggttgtggggccggtttgctgccagagcctgatcagcggaaagtcacatgtgaaggaggcaatggattgggttgtggatttgcattctgtcgggaatgtaaggaggcctaccacgaaggagagtgctccgccgtattcgaagcatcagggactacaacacaggcatatcgagtggacgaacgggcggccgagcaggcccgctgggaagccgcatcaaaggagacaatcaagaagactactaaaccgtgtcccaggtgccatgtccctgtcgagaagaacggagggtgcatgcatatgaagtgtcctcagcctcagtgtaggttggaatggtgctggaattgtggatgtgagtggaatcgcgtttgcatgggcgaccactggttcgacgtatag

SEQ ID NO: 177270 - DNA, 2877 bp, Artificial Sequence
  derived and/or modified sequence
cctggaggatttaacccaggagagccgctggtgggaggcgcggctggcgccgctgcgcgcatgggcctgttcctggcccgcagccgccacctacccagtgaccatgatagtgtttgtcaggttcaactccagccatggtttcccagtggaggtcgattctgacaccagcatcttccagctcaaggaggtggttgctaagcgacagggggttccggctgaccagttgcgtgtgattttcgcagggaaggagctgaggaatgactggactgtgcagaattgtgacctggatcagcagagcattgttcacattgtgcagagaccgtggagaaaaggtcaagaaatgaatgcaactggaggcgacgaccccagaaacgcggcgggaggctgtgagcgggagccccagagcttgactcgggtggacctcagcagctcagtcctcccaggagactctgtggggctggctgtcattctgcacactgacagcaggaaggactcaccaccagctggaagtccagcaggtagatcaatctacaacagcttttatgtgtattgcaaaggcccctgtcaaagagtgcagccgggaaaactcagggtacagtgcagcacctgcaggcaggcaacgctcaccttgacccaggaatttttctttaaatgtggagcacaccccacctctgacaaggaaacatcagtagctttgcacctgatcgcaacaaatagtcggaacatcacttgcattacgtgcacagacgtcaggagccccgtcctggttttccagtgcaactcccgccacgtgatttgcttagactgtttccacttatactgtgtgacaagactcaatgatcggcagtttgttcacgaccctcaacttggctactccctgccttgtgtggctggctgtcccaactccttgattaaagagctccatcacttcaggattctgggagaagagcagtacaaccggtaccagcagtatggtgcagaggagtgtgtcctgcagatggggggcgtgttatgcccccgccctggctgtggagcggggctgctgccggagcctgaccagaggaaagtcacctgcgaagggggcaatggcctgggctgtgggtttgccttctgccgggaatgtaaagaagcgtaccatgaaggggagtgcagtgccgtatttgaagcctcaggaacaactactcaggcctacagagtcgatgaaagagccgccgagcaggctcgttgggaagcagcctccaaagaaaccatcaagaaaaccaccaagccctgtccccgctgccatgtaccagtggaaaaaaatggaggctgcatgcacatgaagtgtccgcagccccagtgcaggctcgagtggtgctggaactgtggctgcgagtggaaccgcgtctgcatgggggaccactggttcgacgtgtagccagggcggccgggcgccccatcgccacatcctgggggagcatacccagtgtctaccttcattttctaattctcttttcaaacacacacacacacgcgcgcgcgcgcacacacactcttcaagtttttttcaaagtccaactacagccaaattgcagaagaaactcctggatccctttcactatgtccatgaaaaacagcagagtaaaattacagaagaagctcctgaatccctttcagtttgtccacacaagacagcagagccatctgcgacaccaccaacaggcgttctcagcctccggatgacacaaataccagagcacagattcaagtgcaatccatgtatctgtatgggtcattctcacctgaattcgagacaggcagaatcagtagctggagagagagttctcacatttaatatcctgccttttaccttcagtaaacaccatgaagatgccattgacaaggtgtttctctgtaaaatgaactgcagtgggttctccaaactagattcatggctttaacagtaatgttcttatttaaattttcagaaagcatctattcccaaagaaccccaggcaatagtcaaaaacatttgtttatccttaagaattccatctatataaatcgcattaatgaaataccaactatgcgtaaatcaacttgtcacaaagtgagaaattatgaaagttaatttgaatgttgaatgtttgaattacagggaagaaatcaagttaatgtactttcattccctttcatgatttgcaactttagaaagaaattgtttttctgaaagtatcaccaaaaaatctatagtttgattctgagtattcattttgcaacttggagattttgctaatacatttggctccactgtaaatttaatagataaagtgcctataaaggaaacacgtttagaaatgatttcaaaatgatattcaatcttaacaaaagtgaacattattaaatcagaatctttaaagaggagcctttccagaactaccaaaatgaagacacgcccgactctctccatcagaagggtttatacccctttggcacaccctctctgtccaatctgcaagtcccagggagctctgcataccaggggttccccaggagagaccttctcttaggacagtaaactcactagaatattccttatgttgacatggattggatttcagttcaatcaaactttcagcttttttttcagccattcacaacacaatcaaaagattaacaacactgcatgcggcaaaccgcatgctcttacccacactacgcagaagagaaagtacaaccactatcttttgttctacctgtattgtctgacttctcaggaagatcgtgaacataactgagggcatgagtctcactagcacatggaggcccttttggatttagagactgtaaattattaaatcggcaacagggcttctctttttagatgtagcactgaaa

SEQ ID NO: 177271 - DNA, 1314 bp, Artificial Sequence
  derived and/or modified sequence
atgatcgtctttgttcggttcaactcttcacacggtttccctgttgaggtcgattcagataccagcatttttcagctgaaagaagtcgtggccaagaggcagggcgtgccagccgaccaactgagggtgattttcgcagggaaggaattgaggaatgattggactgtccaaaactgcgatctggaccagcaaagcatcgtacatattgtgcaacgtccctggcgcaaaggacaggagatgaatgccaccggaggagacgatcctcgcaatgccgcagggggttgtgagagggagccccagtctctgacccgggtggacctcagttcgagtgtactgccgggtgactccgtgggacttgcggtaatcctgcacaccgactctcgtaaagattctccaccagctggcagccctgcgggacggtccatatacaactccttttatgtgtactgcaagggcccatgccaaagggtgcagccgggaaagctgcgggttcagtgttccacatgccgtcaggctacattgacactcacccaggaattcttttttaaatgtggagcccaccctacaagtgataaggagacttccgttgctctacatctcatagccactaactctagaaacattacttgcataacctgcaccgacgtccgtagcccagtcctcgtcttccagtgtaattctcgtcacgtgatctgtctggactgtttccatctgtattgcgtgacgcgtcttaatgaccggcagttcgtccacgatccacagctgggctactccctgccctgtgttgcagggtgtccaaattctctgataaaagaactgcatcactttaggatccttggtgaggaacagtacaacagataccagcagtacggcgctgaagagtgcgtgctccagatgggcggagtcctgtgtccgaggccgggatgtggcgcaggactgctgcctgagccggatcaacgtaaggtgacatgcgaaggtggcaacggcctagggtgtgggtttgccttttgtagagaatgcaaagaagcctatcatgaaggagagtgcagcgcagtgttcgaggcaagtggcaccacaacacaagcttatcgcgttgatgagagggcagccgagcaggcaagatgggaagctgcctcaaaagaaacgatcaagaagaccaccaagccatgtccaagatgccacgttccggtagagaaaaatgggggttgcatgcatatgaagtgccctcagccacaatgccgattggaatggtgttggaattgcgggtgtgagtggaacagagtgtgcatgggagaccattggtttgatgtctag

SEQ ID NO: 177272 - DNA, 1314 bp, Artificial Sequence
  derived and/or modified sequence
atgatcgtgttcgtgagattcaacagcagccacggcttccccgtggaggtggacagcgacaccagcatcttccagctgaaggaggtggtggccaagagacagggcgtgcccgccgaccagctgagagtgatcttcgccggcaaggagctgagaaacgactggaccgtgcagaactgcgacctggaccagcagagcatcgtgcacatcgtgcagagaccctggagaaagggccaggagatgaacgccaccggcggcgacgaccccagaaacgccgccggcggctgcgagagagagccccagagcctgaccagagtggacctgagcagcagcgtgctgcccggcgacagcgtgggcctggccgtgatcctgcacaccgacagcagaaaggacagcccccccgccggcagccccgccggcagaagcatctacaacagcttctacgtgtactgcaagggcccctgccagagagtgcagcccggcaagctgagagtgcagtgcagcacctgcagacaggccaccctgaccctgacccaggagttcttcttcaagtgcggcgcccaccccaccagcgacaaggagaccagcgtggccctgcacctgatcgccaccaacagcagaaacatcacctgcatcacctgcaccgacgtgagaagccccgtgctggtgttccagtgcaacagcagacacgtgatctgcctggactgcttccacctgtactgcgtgaccagactgaacgacagacagttcgtgcacgacccccagctgggctacagcctgccctgcgtggccggctgccccaacagcctgatcaaggagctgcaccacttcagaatcctgggcgaggagcagtacaacagataccagcagtacggcgccgaggagtgcgtgctgcagatgggcggcgtgctgtgccccagacccggctgcggcgccggcctgctgcccgagcccgaccagagaaaggtgacctgcgagggcggcaacggcctgggctgcggcttcgccttctgcagagagtgcaaggaggcctaccacgagggcgagtgcagcgccgtgttcgaggccagcggcaccaccacccaggcctacagagtggacgagagagccgccgagcaggccagatgggaggccgccagcaaggagaccatcaagaagaccaccaagccctgccccagatgccacgtgcccgtggagaagaacggcggctgcatgcacatgaagtgcccccagccccagtgcagactggagtggtgctggaactgcggctgcgagtggaacagagtgtgcatgggcgaccactggttcgacgtgtag

SEQ ID NO: 177273 - protein, 316 aa, Artificial Sequence
  derived and/or modified sequence
MIVFVRFNSSHGFPVEVDSDTSIFQLKEVVAKRQGVPADQLRVIFAGKELRNDWTVQEFFFKCGAHPTSDKETSVALHLIATNSRNITCITCTDVRSPVLVFQCNSRHVICLDCFHLYCVTRLNDRQFVHDPQLGYSLPCVAGCPNSLIKELHHFRILGEEQYNRYQQYGAEECVLQMGGVLCPRPGCGAGLLPEPDQRKVTCEGGNGLGCGFAFCRECKEAYHEGECSAVFEASGTTTQAYRVDERAAEQARWEAASKETIKKTTKPCPRCHVPVEKNGGCMHMKCPQPQCRLEWCWNCGCEWNRVCMGDHWFDV

SEQ ID NO: 177274 - DNA, 951 bp, Artificial Sequence
  derived and/or modified sequence
atgatagtcttcgtaaggttcaacagctctcacgggttccccgtcgaggtcgatagcgatacctcaattttccagttaaaagaggtggtggctaaacgtcagggagtaccggcagaccagctgcgtgtcatcttcgctggcaaggaactcagaaacgactggaccgtccaagaattttttttcaagtgcggcgctcacccgacctccgacaaagagacatcagtggcactgcacctaattgctactaatagtcgtaatattacctgcattacctgcactgacgttaggtctccagtgctggtgtttcagtgtaattcgaggcacgtaatctgtctagattgtttccatctgtattgtgtgacacgtctcaacgacagacagtttgtacacgacccccagttaggctactcgcttccatgcgttgcggggtgtcccaactctttgattaaagagttgcaccacttccgaattttgggtgaggagcaatataatcggtaccagcaatatggagctgaggagtgtgtcctgcagatgggaggcgtcctgtgtccaagacccggctgcggagccggactcttgcccgagcctgatcagagaaaggttacctgcgagggagggaacggacttggctgtggcttcgccttttgccgtgaatgcaaagaggcgtatcatgaaggcgagtgctccgcggtgttcgaagcatccggcactaccacccaggcctatcgcgtggatgagagagcagccgagcaagcaagatgggaggccgctagcaaagagaccattaaaaaaaccaccaaaccctgtcctcggtgccatgtgcctgtggagaaaaatggcgggtgtatgcatatgaaatgcccacagcctcaatgccgcctcgagtggtgttggaactgtggatgtgaatggaatagagtgtgtatgggggaccactggttcgacgtatag

SEQ ID NO: 177275 - DNA, 951 bp, Artificial Sequence
  derived and/or modified sequence
atgattgtgtttgtgcgcttcaacagcagccacggcttccctgtggaggtggacagcgacaccagcatcttccagctgaaggaggtggtggccaagaggcagggcgtgcctgctgaccagctgcgggtcatctttgctgggaaggagctgagaaatgactggacagtgcaggagttcttcttcaagtgtggggcccaccccaccagtgacaaggagacctctgtggccctgcacctgattgccaccaacagcaggaacatcacctgcatcacctgcacagatgtgcgcagccctgtgctggtgttccagtgcaacagccgccacgtgatctgcctggactgcttccacctgtactgtgtgacccggctgaatgaccggcagtttgtgcatgacccccagctgggctacagcctgccctgtgtggccggctgccccaacagcctcatcaaggagctgcaccacttccgcatcctgggggaggagcagtacaaccgctaccagcagtatggagcagaagaatgtgtgctgcagatgggcggcgtgctgtgcccccggcccggctgtggggccggcctgctgcctgagccagaccagaggaaggtgacctgtgagggcggcaatggcctgggctgcggctttgccttctgccgggagtgcaaggaggcctaccacgagggagaatgttctgctgtgtttgaggccagcggcaccaccacccaggcctacagagtggatgaaagagctgctgagcaggcccgctgggaggccgccagcaaggagaccatcaagaagaccaccaagccctgcccccgctgccacgtgcctgtggagaagaatggaggctgcatgcacatgaagtgcccccagccccagtgccgcctggagtggtgctggaactgtggctgtgagtggaacagagtgtgcatgggagaccactggtttgatgtgtag

SEQ ID NO: 177276 - DNA, 951 bp, Artificial Sequence
  derived and/or modified sequence
atgatcgtgttcgtgcggttcaacagcagccacggcttccccgtggaggttgactcagacacttcgatttttcaattaaaagaagtggtagccaaacgacagggcgtgcccgctgaccaattgagagttatctttgctggcaaagaacttcggaatgattggactgtccaagagttcttctttaaatgtggtgcccatccaacatccgacaaagagacttccgtggccctgcaccttatcgctaccaactccagaaatattacgtgcatcacatgcaccgacgtgcgcagtcctgtccttgtttttcagtgcaatagcagacacgtgatctgtctggattgttttcacctgtactgcgtcacaaggctgaacgaccgccagtttgtgcacgacccacagctcgggtattctttgccatgtgtggccggctgcccaaactccctcatcaaggagctacatcacttcaggatcctgggtgaggagcaatataaccgttaccagcagtatggggcagaggaatgtgtgctccagatgggaggcgttctgtgtccccgcccggggtgcggagctggattactgccggagcctgatcaacggaaagtgacctgcgaagggggtaatgggctggggtgcgggttcgccttctgcagagaatgtaaagaggcctaccacgagggagaatgcagtgcggtcttcgaggccagtgggacaacaacgcaggcttaccgggtcgacgagcgggcggccgagcaagctcgctgggaggctgctagcaaagaaacaatcaagaagaccactaagccctgtcccaggtgtcatgtgcctgtggagaaaaacggggggtgcatgcacatgaaatgccctcagccgcagtgtaggctcgaatggtgctggaactgtggctgcgagtggaatcgggtttgcatgggggaccattggttcgacgtttag

SEQ ID NO: 177277 - DNA, 2514 bp, Artificial Sequence
  derived and/or modified sequence
cctggaggatttaacccaggagagccgctggtgggaggcgcggctggcgccgctgcgcgcatgggcctgttcctggcccgcagccgccacctacccagtgaccatgatagtgtttgtcaggttcaactccagccatggtttcccagtggaggtcgattctgacaccagcatcttccagctcaaggaggtggttgctaagcgacagggggttccggctgaccagttgcgtgtgattttcgcagggaaggagctgaggaatgactggactgtgcaggaatttttctttaaatgtggagcacaccccacctctgacaaggaaacatcagtagctttgcacctgatcgcaacaaatagtcggaacatcacttgcattacgtgcacagacgtcaggagccccgtcctggttttccagtgcaactcccgccacgtgatttgcttagactgtttccacttatactgtgtgacaagactcaatgatcggcagtttgttcacgaccctcaacttggctactccctgccttgtgtggctggctgtcccaactccttgattaaagagctccatcacttcaggattctgggagaagagcagtacaaccggtaccagcagtatggtgcagaggagtgtgtcctgcagatggggggcgtgttatgcccccgccctggctgtggagcggggctgctgccggagcctgaccagaggaaagtcacctgcgaagggggcaatggcctgggctgtgggtttgccttctgccgggaatgtaaagaagcgtaccatgaaggggagtgcagtgccgtatttgaagcctcaggaacaactactcaggcctacagagtcgatgaaagagccgccgagcaggctcgttgggaagcagcctccaaagaaaccatcaagaaaaccaccaagccctgtccccgctgccatgtaccagtggaaaaaaatggaggctgcatgcacatgaagtgtccgcagccccagtgcaggctcgagtggtgctggaactgtggctgcgagtggaaccgcgtctgcatgggggaccactggttcgacgtgtagccagggcggccgggcgccccatcgccacatcctgggggagcatacccagtgtctaccttcattttctaattctcttttcaaacacacacacacacgcgcgcgcgcgcacacacactcttcaagtttttttcaaagtccaactacagccaaattgcagaagaaactcctggatccctttcactatgtccatgaaaaacagcagagtaaaattacagaagaagctcctgaatccctttcagtttgtccacacaagacagcagagccatctgcgacaccaccaacaggcgttctcagcctccggatgacacaaataccagagcacagattcaagtgcaatccatgtatctgtatgggtcattctcacctgaattcgagacaggcagaatcagtagctggagagagagttctcacatttaatatcctgccttttaccttcagtaaacaccatgaagatgccattgacaaggtgtttctctgtaaaatgaactgcagtgggttctccaaactagattcatggctttaacagtaatgttcttatttaaattttcagaaagcatctattcccaaagaaccccaggcaatagtcaaaaacatttgtttatccttaagaattccatctatataaatcgcattaatgaaataccaactatgcgtaaatcaacttgtcacaaagtgagaaattatgaaagttaatttgaatgttgaatgtttgaattacagggaagaaatcaagttaatgtactttcattccctttcatgatttgcaactttagaaagaaattgtttttctgaaagtatcaccaaaaaatctatagtttgattctgagtattcattttgcaacttggagattttgctaatacatttggctccactgtaaatttaatagataaagtgcctataaaggaaacacgtttagaaatgatttcaaaatgatattcaatcttaacaaaagtgaacattattaaatcagaatctttaaagaggagcctttccagaactaccaaaatgaagacacgcccgactctctccatcagaagggtttatacccctttggcacaccctctctgtccaatctgcaagtcccagggagctctgcataccaggggttccccaggagagaccttctcttaggacagtaaactcactagaatattccttatgttgacatggattggatttcagttcaatcaaactttcagcttttttttcagccattcacaacacaatcaaaagattaacaacactgcatgcggcaaaccgcatgctcttacccacactacgcagaagagaaagtacaaccactatcttttgttctacctgtattgtctgacttctcaggaagatcgtgaacataactgagggcatgagtctcactagcacatggaggcccttttggatttagagactgtaaattattaaatcggcaacagggcttctctttttagatgtagcactgaaa

SEQ ID NO: 177278 - DNA, 951 bp, Artificial Sequence
  derived and/or modified sequence
atgatagtattcgtgaggtttaattcatcgcacggattccccgtggaagttgacagcgacacatcgattttccaactgaaggaggtcgtcgctaaacgtcagggagtccctgccgatcaactgcgcgtgatcttcgctggtaaggaactgagaaacgattggacagtgcaagaattctttttcaaatgtggggcacacccaacttccgataaagagacctccgttgccctgcatcttattgctaccaattctcgcaatatcacttgcatcacttgcaccgacgtgcgcagcccggtgctagtattccagtgtaactctaggcacgtgatctgcctggattgttttcacctgtactgtgtgacacggctgaacgatcgccagttcgttcacgacccccagctgggctatagtctcccctgtgtggctgggtgtcctaatagcttgattaaggaattacaccacttccggattttgggcgaagagcagtacaatagataccagcagtacggcgcagaggagtgcgtgctccaaatgggaggtgtgctttgccccaggcctggatgtggggcaggactcttgcccgagccagatcagaggaaggtcacctgtgaaggtggcaacgggctaggatgcgggttcgctttctgccgggaatgcaaggaggcctaccatgagggcgagtgtagcgcagtttttgaggccagtggcactacaacacaagcgtacagagtcgatgagagggccgcagaacaggctcgctgggaagcggcaagtaaagagactatcaagaagacgaccaaaccgtgtcccagatgccatgttcccgttgagaaaaatgggggatgcatgcatatgaagtgtcctcaaccccagtgcaggttggagtggtgctggaattgcggctgcgagtggaacagggtttgcatgggagatcactggttcgatgtgtag

SEQ ID NO: 177279 - DNA, 951 bp, Artificial Sequence
  derived and/or modified sequence
atgatcgtgttcgtgagattcaacagcagccacggcttccccgtggaggtggacagcgacaccagcatcttccagctgaaggaggtggtggccaagagacagggcgtgcccgccgaccagctgagagtgatcttcgccggcaaggagctgagaaacgactggaccgtgcaggagttcttcttcaagtgcggcgcccaccccaccagcgacaaggagaccagcgtggccctgcacctgatcgccaccaacagcagaaacatcacctgcatcacctgcaccgacgtgagaagccccgtgctggtgttccagtgcaacagcagacacgtgatctgcctggactgcttccacctgtactgcgtgaccagactgaacgacagacagttcgtgcacgacccccagctgggctacagcctgccctgcgtggccggctgccccaacagcctgatcaaggagctgcaccacttcagaatcctgggcgaggagcagtacaacagataccagcagtacggcgccgaggagtgcgtgctgcagatgggcggcgtgctgtgccccagacccggctgcggcgccggcctgctgcccgagcccgaccagagaaaggtgacctgcgagggcggcaacggcctgggctgcggcttcgccttctgcagagagtgcaaggaggcctaccacgagggcgagtgcagcgccgtgttcgaggccagcggcaccaccacccaggcctacagagtggacgagagagccgccgagcaggccagatgggaggccgccagcaaggagaccatcaagaagaccaccaagccctgccccagatgccacgtgcccgtggagaagaacggcggctgcatgcacatgaagtgcccccagccccagtgcagactggagtggtgctggaactgcggctgcgagtggaacagagtgtgcatgggcgaccactggttcgacgtgtag

SEQ ID NO: 177280 - protein, 287 aa, Artificial Sequence
  derived and/or modified sequence
MPHNSIRSGHGGLNQLGGAFVNGRPLPEVVRQRIVDLAHQGVRPCDISRQLRVSHGCVSKILGRYYETGSIRPGVIGGSKPKVATPKVVEKIGDYKRQNPTMFAWEIRDRLLAEGVCDNDTVPSVSSINRIIRTKVQQPFNLPMDSCVATKSLSPGHTLIPSSAVTPPESPQSDSLGSTYSINGLLGIAQPGSDKRKMDDSDQDSCRLSIDSQSSSSGPRKHLRTDAFSQHHLEPLECPFERQHYPEAYASPSHTKGEQEVNTLAMPMATPPTPPTARPGASPTPAC

SEQ ID NO: 177281 - DNA, 864 bp, Artificial Sequence
  derived and/or modified sequence
atgccccacaacagcatcagaagcggccacggcggcctgaaccagctgggcggcgccttcgtgaacggcagacccctgcccgaggtggtgagacagagaatcgtggacctggcccaccagggcgtgagaccctgcgacatcagcagacagctgagagtgagccacggctgcgtgagcaagatcctgggcagatactacgagaccggcagcatcagacccggcgtgatcggcggcagcaagcccaaggtggccacccccaaggtggtggagaagatcggcgactacaagagacagaaccccaccatgttcgcctgggagatcagagacagactgctggccgagggcgtgtgcgacaacgacaccgtgcccagcgtgagcagcatcaacagaatcatcagaaccaaggtgcagcagcccttcaacctgcccatggacagctgcgtggccaccaagagcctgagccccggccacaccctgatccccagcagcgccgtgaccccccccgagagcccccagagcgacagcctgggcagcacctacagcatcaacggcctgctgggcatcgcccagcccggcagcgacaagagaaagatggacgacagcgaccaggacagctgcagactgagcatcgacagccagagcagcagcagcggccccagaaagcacctgagaaccgacgccttcagccagcaccacctggagcccctggagtgccccttcgagagacagcactaccccgaggcctacgccagccccagccacaccaagggcgagcaggaggtgaacaccctggccatgcccatggccaccccccccaccccccccaccgccagacccggcgccagccccacccccgcctgctag

SEQ ID NO: 177282 - DNA, 864 bp, Artificial Sequence
  derived and/or modified sequence
atgcctcacaactctattcgcagcggacatgggggactgaaccaactgggaggagcctttgtcaatgggagacccttgccagaggtggtgaggcagcgaatcgttgatctagcgcaccaaggggtaagaccatgtgacattagtcgtcagttgagagtgtcccacggttgtgttagcaaaatcctgggcagatactatgaaaccggctcgatccgaccaggcgtcatcggtggatctaagccgaaggtggccaccccaaaggtggtggagaaaatcggggattataaacggcagaatcctaccatgtttgcctgggagattagggatcggctccttgcagagggggtctgtgacaatgataccgtaccctcagtttctagcatcaacagaatcattaggacaaaggtgcagcaaccttttaatcttcccatggattcatgtgttgcaacaaagtcactgagtccaggccacaccctcatcccgagttctgccgtcaccccacctgagtcaccacaaagcgatagcttgggttctacatattctatcaatggactgttgggcatcgcccagcctggtagcgataaaagaaagatggatgacagtgatcaggactcttgtaggctgtccattgatagccaatcctcgagttctgggcccagaaagcatctgcgcacagatgccttcagtcaacatcatttggagccccttgaatgcccctttgagcggcagcactacccggaggcctatgcatctcccagccacactaaaggcgagcaagaagtgaacacgctggctatgcctatggctacgccgcccacccctcctacagccagaccgggcgcgtccccaaccccagcctgttag

SEQ ID NO: 177283 - DNA, 864 bp, Artificial Sequence
  derived and/or modified sequence
atgccccacaacagcatccgcagcggccacggcggcctgaaccagctgggcggggcctttgtgaatggccggcccctgcctgaggtggtgcggcagagaattgtggacctggcccaccagggcgtgcggccctgtgacatcagccggcagctgcgggtgagccacggctgtgtgtccaagatcctgggccgctactatgagaccggcagcatccggcctggggtcatcggcggcagcaagcccaaggtggccacccccaaggtggtggagaagatcggggactacaagaggcagaaccccaccatgtttgcctgggagatccgggaccggctgctggccgagggcgtgtgtgacaatgacacagtgcccagcgtgagcagcatcaaccgcatcatccgcaccaaggtgcagcagcccttcaacctgcccatggacagctgtgtggccaccaagagcctgagccctggccacaccctcatccccagcagcgctgtgaccccacctgagagcccccagagcgacagcctgggcagcacctacagcatcaatggcctgctgggcatcgcccagcccggcagtgacaagaggaagatggatgacagcgaccaggacagctgccgcctgagcattgacagccagagcagcagcagcggccccaggaagcacctgaggacagatgccttcagccagcaccacctggagcccctggagtgcccctttgagcggcagcactacccagaggcctatgccagccccagccacaccaagggggagcaggaggtgaacaccctggccatgcccatggccaccccacccaccccacccacagcccggcctggggccagccccaccccagcctgctag

SEQ ID NO: 177284 - DNA, 864 bp, Artificial Sequence
  derived and/or modified sequence
atgccccacaacagcatccggagcggccacggcggcctgaaccagttgggtggggcatttgtcaacgggcgacccctaccagaagtggtgcgccagcgcattgtggacctggcccatcagggagtccgaccttgtgatatatctaggcaacttagagtttcgcatgggtgtgtgagcaaaattttagggcggtattacgagaccggctcaatcaggccaggagtgatcggcggttctaagcccaaggtggctacccccaaggttgtggagaagatcggtgattacaagcggcagaaccccacaatgtttgcatgggaaatcagagacagactactggcagaaggagtctgcgacaacgacacagtgccctctgtgagcagcattaacaggattatccgcaccaaagtgcagcagccatttaacctaccaatggacagttgtgtcgcaaccaagtcgctgtccccaggacatacattgattccctcatctgccgtgactccccccgaaagcccacagagcgattcgctgggttccacttactccatcaatgggctgctcggcattgctcagccgggaagcgacaagcgcaaaatggacgattctgaccaagacagttgcaggctttctatcgacagccagtcttcctcaagcggaccaaggaagcatctgcggacggacgcttttagccagcaccacttggagcctttggaatgtccgttcgagcggcagcattacccggaggcctatgccagtccttcgcacaccaagggcgagcaggaggtgaataccctggcaatgcccatggccacaccccctactccccctaccgctagacccggtgctagccccacaccggcctgttag

SEQ ID NO: 177285 - DNA, 864 bp, Artificial Sequence
  derived and/or modified sequence
atgccacataacagcatccggtctggacacggaggattgaatcagctcggaggagcctttgtcaatggaagaccactccctgaggttgtcagacagaggatcgttgacttagcacatcaaggggtgcgaccttgcgatatctcccggcagctgagagtatcccacggatgtgtatccaagatcttggggagatactacgaaacagggtcaatcaggcctggagtcattgggggatccaagcctaaagtcgccacacccaaggtggtggagaaaattggagactacaaaagacagaaccccaccatgttcgcctgggagatacgcgaccgtcttttggccgagggcgtatgcgacaatgataccgtccctagcgtatccagcatcaacagaataattcgaactaaagtgcagcagccttttaatttgcctatggattcctgcgtagccaccaagtccttgtcccctggtcacactctgatcccatcctctgccgtcacgccaccagagtcaccccagagcgacagcctcggtagcacctactcaatcaatggcctgttgggcatcgcccaaccaggcagcgacaaacggaagatggacgacagtgatcaagacagttgccgcttatccatcgactctcagagctcctcctcaggtcctagaaagcatttgagaaccgacgccttttcccagcatcatttggagcccttggagtgccccttcgagcgccagcactatccggaagcctacgcctctcccagtcacaccaaaggagaacaggaggtcaacaccctagccatgcctatggccacgcctcctacaccccctacggccaggccaggcgcaagcccaactcccgcttgctag

SEQ ID NO: 177286 - protein, 63 aa, Artificial Sequence
  derived and/or modified sequence
MGPEALSSLLLLLLVASGDADMKGHFDPAKCRYALGMQDRTIPDSDISASSSWSDSTAARHSR

SEQ ID NO: 177287 - protein, 913 aa, Artificial Sequence
  derived and/or modified sequence
MGPEALSSLLLLLLVASGDADMKGHFDPAKCRYALGMQDRTIPDSDISASSSWSDSTAARHSRLESSDGDGAWCPAGSVFPKEEEYLQVDLQRLHLVALVGTQGRHAGGLGKEFSRSYRLRYSRDGRRWMGWKDRWGQEVISGNEDPEGVVLKDLGPPMVARLVRFYPRADRVMSVCLRVELYGCLWRDGLLSYTAPVGQTMYLSEAVYLNDSTYDGHTVGGLQYGGLGQLADGVVGLDDFRKSQELRVWPGYDYVGWSNHSFSSGYVEMEFEFDRLRAFQAMQVHCNNMHTLGARLPGGVECRFRRGPAMAWEGEPMRHNLGGNLGDPRARAVSVPLGGRVARFLQCRFLFAGPWLLFSEISFISDVVNNSSPALGGTFPPAPWWPPGPPPTNFSSLELEPRGQQPVAKAEGSPTAILIGCLVAIILLLLLIIALMLWRLHWRRLLSKAERRVLEEELTVHLSVPGDTILINNRPGPREPPPYQEPRPRGNPPHSAPCVPNGSALLLSNPAYRLLLATYARPPRGPGPPTPAWAKPTNTQAYSGDYMEPEKPGAPLLPPPPQNSVPHYAEADIVTLQGVTGGNTYAVPALPPGAVGDGPPRVDFPRSRLRFKEKLGEGQFGEVHLCEVDSPQDLVSLDFPLNVRKGHPLLVAVKILRPDATKNARNDFLKEVKIMSRLKDPNIIRLLGVCVQDDPLCMITDYMENGDLNQFLSAHQLEDKAAEGAPGDGQAAQGPTISYPMLLHVAAQIASGMRYLATLNFVHRDLATRNCLVGENFTIKIADFGMSRNLYAGDYYRVQGRAVLPIRWMAWECILMGKFTTASDVWAFGVTLWEVLMLCRAQPFGQLTDEQVIENAGEFFRDQGRQVYLSRPPACPQGLYELMLRCWSRESEQRPPFSQLHRFLAEDALNTV

SEQ ID NO: 177288 - protein, 122 aa, Artificial Sequence
  derived and/or modified sequence
MGPEALSSLLLLLLVASGDADMKGHFDPAKCRYALGMQDRTIPDSDISASSSWSDSTAARHSRLESSDGDGAWCPAGSVFPKEEEYLQVDLQRLHLVALVGTQGRHAGGLGKEFSRSYRLRY

SEQ ID NO: 177289 - protein, 160 aa, Artificial Sequence
  derived and/or modified sequence
MGPEALSSLLLLLLVASGDADMKGHFDPAKCRYALGMQDRTIPDSDISASSSWSDSTAARHSRLESSDGDGAWCPAGSVFPKEEEYLQVDLQRLHLVALVGTQGRHAGGLGKEFSRSYRLRYSRDGRRWMGWKDRWGQEVISGNEDPEGVVLKDLGPPMV

SEQ ID NO: 177290 - protein, 101 aa, Artificial Sequence
  derived and/or modified sequence
MGPEALSSLLLLLLVASGDADMKGHFDPAKCRYALGMQDRTIPDSDISASSSWSDSTAARHSRLESSDGDGAWCPAGSVFPKEEEYLQVDLQRLHLVALVG

SEQ ID NO: 177291 - protein, 115 aa, Artificial Sequence
  derived and/or modified sequence
MGPEALSSLLLLLLVASGDADMKGHFDPAKCRYALGMQDRTIPDSDISASSSWSDSTAARHSRLESSDGDGAWCPAGSVFPKEEEYLQVDLQRLHLVALVGTQGRHAGGLGKEFS

SEQ ID NO: 177292 - protein, 85 aa, Artificial Sequence
  derived and/or modified sequence
MGPEALSSLLLLLLVASGDADMKGHFDPAKCRYALGMQDRTIPDSDISASSSWSDSTAARHSRLESSDGDGAWCPAGSVFPKEEE

SEQ ID NO: 177293 - protein, 410 aa, Artificial Sequence
  derived and/or modified sequence
MVCFRLFPVPGSGLVLVCLVLGAVRSYALELNLTDSENATCLYAKWQMNFTVRYETTNKTYKTVTISDHGTVTYNGSICGDDQNGPKIAVQFGPGFSWIANFTKAASTYSIDSVSFSYNTGDNTTFPDAEDKGILTVDELLAIRIPLNDLFRCNSLSTLEKNDVVQHYWDVLVQAFVQNGTVSTNEFLCDKDKTSTVAPTIHTTVPSPTTTPTPKEKPEAGTYSVNNGNDTCLLATMGLQLNITQDKVASVININPNTTHSTGSCRSHTALLRLNSSTIKYLDFVFAVKNENRFYLKEVNISMYLVNGSVFSIANNNLSYWDAPLGSSYMCNKEQTVSVSGAFQINTFDLRVQPFNVTQGKYSTAQECSLDDDTILIPIIVGAGLSGLIIVIVIAYVIGRRKSYAGYQTL

SEQ ID NO: 177294 - protein, 363 aa, Artificial Sequence
  derived and/or modified sequence
MNFTVRYETTNKTYKTVTISDHGTVTYNGSICGDDQNGPKIAVQFGPGFSWIANFTKAASTYSIDSVSFSYNTGDNTTFPDAEDKGILTVDELLAIRIPLNDLFRCNSLSTLEKNDVVQHYWDVLVQAFVQNGTVSTNEFLCDKDKTSTVAPTIHTTVPSPTTTPTPKEKPEAGTYSVNNGNDTCLLATMGLQLNITQDKVASVININPNTTHSTGSCRSHTALLRLNSSTIKYLDFVFAVKNENRFYLKEVNISMYLVNGSVFSIANNNLSYWDAPLGSSYMCNKEQTVSVSGAFQINTFDLRVQPFNVTQGKYSTAQECSLDDDTILIPIIVGAGLSGLIIVIVIAYVIGRRKSYAGYQTL

SEQ ID NO: 177295 - DNA, 1233 bp, Artificial Sequence
  derived and/or modified sequence
atggtatgttttcgtctgtttccagtgcctgggtctggacttgtgttggtgtgtctggttctcggggccgtgcggagctacgccctggaacttaatctgaccgactctgagaacgccacttgcctatatgcaaaatggcagatgaactttactgtgcgttatgagaccacgaataaaacttacaaaacagtgaccatcagcgaccacggcactgtgacctacaatgggagcatctgcggagacgaccagaacgggccgaagatcgccgttcaattcggacccggatttagctggatcgccaattttactaaagccgcttcaacctactctattgacagtgtgtctttttcttacaatacgggcgacaatacgactttccccgacgctgaagataagggaattctgactgtcgacgaactgcttgctattcggatacctttaaatgacctttttagatgtaactcactgagtactttagaaaagaatgatgtggtgcagcattattgggatgtccttgtgcaggcatttgttcagaatggcaccgtaagtacaaacgagtttttatgtgataaagacaagacctctacagttgctcccaccatccacacaaccgtcccaagccccaccaccacaccaacccccaaagaaaagccagaagccggcacatactccgtcaacaatgggaacgacacctgccttctggccacaatgggtctccagctcaatatcactcaggacaaagtcgcttccgttataaatattaatcctaacaccacccattctactggcagctgtcgtagccatacggccttgcttcgactcaactcctcaacaatcaagtacctcgatttcgtgttcgcggtgaagaacgagaaccgcttctatctcaaagaagtgaacatctcaatgtacctggtgaacgggagcgtgttctccatcgccaataataatctttcctactgggatgctcctctcggaagttcctacatgtgcaacaaggagcaaacagtttccgtctctggagccttccaaattaacacttttgatttgagggtgcaaccattcaacgtgacccagggaaagtatagtaccgctcaggaatgtagcctcgacgacgacactatcctcatacccatcatcgtgggagccgggctgagcggtcttatcatcgttatcgtaatagcatacgtgattgggcgccggaagtcctatgctggataccagacattatag

SEQ ID NO: 177296 - DNA, 1092 bp, Artificial Sequence
  derived and/or modified sequence
atgaactttaccgttaggtatgaaaccactaataaaacgtacaaaaccgtaactatttccgatcacggaaccgtgacctacaacggttctatttgtggggacgaccagaacggccccaagatcgccgtacagttcggccccggcttttcgtggatcgccaacttcaccaaggcagccagcacgtacagtatagattcagttagtttctcgtacaataccggcgataacacaacctttccagatgctgaggataagggaattctaactgtggatgagttgctggcaattagaattcccctgaatgaccttttccgttgcaattctctgagtaccctggaaaagaacgatgttgtgcagcattactgggatgtgctagtccaggctttcgttcagaatggcaccgtgagtacaaacgaatttctttgcgacaaggacaagacctccacagtggcaccaactattcacacaacagtgccaagcccgacaaccacacccacaccaaaagagaaacccgaagccggcacttacagtgtcaacaacgggaacgacacctgtctactagcaactatgggcctgcagctgaacatcacacaagataaggttgcaagcgtgataaatattaatcccaatacaactcacagcaccggctcttgccggtctcacacagctctgctaaggctgaactccagtacaattaagtatctggacttcgtgttcgccgttaaaaatgaaaaccggttttacctcaaagaagtgaatataagtatgtatttggtgaacggatcagtgttcagtatagcgaataacaatctctcctactgggatgcaccgcttgggtcgagttatatgtgcaataaagagcagacggtgagtgtgtccggtgcttttcagatcaataccttcgatctgagagtgcagcctttcaatgtcacccagggtaaatatagcactgcccaagaatgcagcctggatgacgacactatactgattcctattatcgtaggagcaggattgagcggtctcatcattgtcatcgttattgcctacgtgatagggcggaggaagagttatgctggctaccagactctctag

SEQ ID NO: 177297 - DNA, 1233 bp, Artificial Sequence
  derived and/or modified sequence
atggtgtgcttccgcctcttccctgtgcccggcagcggcctggtgctggtgtgcctggtgctgggcgctgtgcgctcctatgccctggagctgaacctgacagacagtgaaaatgccacctgcctgtatgccaagtggcagatgaacttcaccgtgcgctatgagaccaccaacaagacctacaagacagtgaccatcagtgaccatggaacagtgacctacaacggcagcatctgtggagatgaccagaatggccccaagattgctgtgcagtttggacctggcttctcctggatcgccaacttcaccaaggccgccagcacctacagcattgattctgtgtccttctcctacaacacaggagacaacaccaccttcccagatgctgaggacaagggcatcctgactgtggatgagctgctggccatccgcatccccctgaatgacctcttccgctgcaacagcctgagcaccctggagaagaatgatgtggtgcagcactactgggatgtgctggtgcaggcctttgtgcagaatggaacagtgtccaccaatgagttcctgtgtgacaaggacaagaccagcacagtggcccccaccatccacaccaccgtgcccagccccaccaccacccccacccccaaggagaagccagaggccggcacctacagcgtgaacaatggaaatgacacctgcctgctggccaccatgggcctgcagctgaacatcacccaggacaaggtggccagcgtcatcaacatcaaccccaacaccacccacagcacaggcagctgccgcagccacacagccctgctgcggctgaacagcagcaccatcaagtacctggactttgtgtttgctgtgaagaatgaaaatcgcttctacctgaaggaggtgaacatctccatgtacctggtgaatggatctgtgttcagcatcgccaacaacaacctgagctactgggatgcccccctgggcagcagctacatgtgcaacaaggagcagacagtgtctgtgtctggggccttccagatcaacacctttgacctgcgggtgcagcccttcaacgtgacccagggcaagtacagcacagcccaggagtgcagcctggatgatgacaccatcctgatccccatcatcgtgggcgccggcctgagcggcctcatcatcgtcatcgtcatcgcctacgtgattggccgcaggaagagctatgccggctaccagaccctgtag

SEQ ID NO: 177298 - DNA, 1092 bp, Artificial Sequence
  derived and/or modified sequence
atgaacttcaccgtgcgctatgagaccaccaacaagacctacaagacagtgaccatcagtgaccacggcaccgtgacctacaacggcagcatctgtggagatgaccagaatggccccaagattgctgtgcagtttggacctggcttctcctggatcgccaacttcaccaaggccgccagcacctacagcattgacagcgtgtccttctcctacaacacaggagacaacaccaccttcccagatgctgaagataaaggcatcctgactgtggatgagctgctggccatccgcatccccctgaatgacctcttccgctgcaacagcctgagcaccctggagaagaatgatgtggtgcagcactactgggatgtgctggtgcaggcctttgtgcagaatggcaccgtgtccaccaatgagttcctgtgtgacaaggacaagaccagcacagtggcccccaccatccacaccaccgtgcccagccccaccaccacccccacccccaaggagaagccagaggccggcacctacagcgtgaacaatggaaatgacacctgcctgctggccaccatgggcctgcagctgaacatcacccaggacaaggtggccagcgtcatcaacatcaaccccaacaccacccacagcacaggcagctgccgcagccacacagccctgctgcggctgaacagcagcaccatcaagtacctggactttgtgtttgctgtgaagaatgaaaatcgcttctacctgaaggaggtgaacatctccatgtacctggtgaatggcagcgtcttcagcatcgccaacaacaacctgagctactgggatgcccccctgggcagcagctacatgtgcaacaaggagcagacagtgtctgtgtctggggccttccagatcaacacctttgacctgcgggtgcagcccttcaacgtgacccagggcaagtacagcacagcccaggagtgcagcctggatgatgacaccatcctgatccccatcatcgtgggcgccggcctgagcggcctcatcatcgtgattgtgattgcctacgtgattggaagaaggaagagctatgccggctaccagaccctgtag

SEQ ID NO: 177299 - DNA, 4030 bp, Artificial Sequence
  derived and/or modified sequence
ccgattcctggcttttgcaaggctgtggtcggtggtcatcagtgctcttgacccaggtccagcgagccttttccctggtgttgcagctgttgttgtaccgccgccgtcgccgccgtcgccgcctgctctgcggggtcatggtgtgcttccgcctcttcccggttccgggctcagggctcgttctggtctgcctagtcctgggagctgtgcggtcttatgcattggaacttaatttgacagattcagaaaatgccacttgcctttatgcaaaatggcagatgaatttcacagtacgctatgaaactacaaataaaacttataaaactgtaaccatttcagaccatggcactgtgacatataatggaagcatttgtggggatgatcagaatggtcccaaaatagcagtgcagttcggacctggcttttcctggattgcgaattttaccaaggcagcatctacttattcaattgacagcgtctcattttcctacaacactggtgataacacaacatttcctgatgctgaagataaaggaattcttactgttgatgaacttttggccatcagaattccattgaatgacctttttagatgcaatagtttatcaactttggaaaagaatgatgttgtccaacactactgggatgttcttgtacaagcttttgtccaaaatggcacagtgagcacaaatgagttcctgtgtgataaagacaaaacttcaacagtggcacccaccatacacaccactgtgccatctcctactacaacacctactccaaaggaaaaaccagaagctggaacctattcagttaataatggcaatgatacttgtctgctggctaccatggggctgcagctgaacatcactcaggataaggttgcttcagttattaacatcaaccccaatacaactcactccacaggcagctgccgttctcacactgctctacttagactcaatagcagcaccattaagtatctagactttgtctttgctgtgaaaaatgaaaaccgattttatctgaaggaagtgaacatcagcatgtatttggttaatggctccgttttcagcattgcaaataacaatctcagctactgggatgcccccctgggaagttcttatatgtgcaacaaagagcagactgtttcagtgtctggagcatttcagataaatacctttgatctaagggttcagcctttcaatgtgacacaaggaaagtattctacagcccaagagtgttcgctggatgatgacaccattctaatcccaattatagttggtgctggtctttcaggcttgattatcgttatagtgattgcttacgtaattggcagaagaaaaagttatgctggatatcagactctgtaacactaatcaatacgtgatctctgttacaaaagaaaaaagcaagtacaagttccaacatgcaatactggtcaacttaaggtatatttagttgcagtccagctctttagaatgggtggtatgggggatttcaaacttaaacaaaaaactatcaactacaaattagttgcctgactttggtttttccaaccaaggaatttaaaactgttatttttacagcaaaagatgtgcaaaatcactggattataagttctattttactgtcttgaattagtatttcagtgttttcattttagacattcagactaaaaatacaccgtttagaaaaaacaatttttgaaaaagagattttttttccctgcaggtagttgagttggaacaacatgttctaccgtggatttgtacttgctccttttgctctttttgtgtgtgtgtgtgtgtgtgtgtgtgtgtgtgtgtgtgtgatttttgtttgcaggttaacttagctactttggcattgctgcatatttgacctttgagagatataatagtagatttgaacaggggctggtattattatgttcttagcaataaatgcttttctaatgccttttgaatacatttgtatttatgtggctgtaatgacaaaagatacaaaagctttttaaaatttagagtaggtattaatcttattgtttaatcttttttttaaaaaaactggatatttcaatcttttaaattgcaatatataagactattccaactgggcatttcaatccattttttaggtgctttagagataattgcttgccagtgccaattgagggcattagtactttgtgctcataaattggcctctgtatgcagtactaaaattaatgcagatttctctttagccttccaacatttcttgttgatagtgatgtattttattattttctttttcttaagaaatgccagtgtgtcctagaacctagataacgaagtgcacttacacttataaaataacttgcatctaggctgggcgtggcggctcacgcctgtaatcccagcactttgggaggccgaagtgggtggatcacttgaggccaggagtttgagaccagcctggccaacatggtgaaaccccatctctatcagaaatacaaaaaattagctgggcgtggtggtgggcgcctgtaatcccagttactcgggaggctgaggcaggagaatcacttgaacccgggaggcagaggttgcggtgagccaagagcgcaccattgcactccagcctgggcgacaaaaacgaaactccatctcaaaacaaaacaaaacaaaacaaacaaacaaacaaaacttgcatctaaccaaaaagtcttggttttatcttaatccattaaaaagttgttctttgtttccagcttgcattgattgctacaacatcactaatttggctttcacatttaaatggttctgtgctaatcaaaactttcgttgttattattcattatggtagaatcatttttaattcacgtgctttgtgttcagttttgtggtctgagagatgtaccaattgtcaaattaccgtgtaccacctaatgtttataggagaaagcaaaatacatcagcttggtagttaacacatcaaatatttcttgctgcttctaggagaacttttttggtgtgtgttggaatggctgagcaaatattaaaattgttaatatgcagccatatatggaaggttcctgtggggttgttttttcgtgttttttttttttttgtggtgggattatgtgcctcccattcactagaaaatgagaaaattgtctgggttccaaaatattgacattgaatggatcaatacacacacacagacatatatatatatatgcacacatatataggcagttgcatgctagcatgggtatttttataacaatataactgagttatattggaattataaatattttccgtcacttaaatttgttctttgtttagcctgaaaacctttatggctcaagatcagattcctgactaacccctctcttagagctacagcgagctgcattaccagcttaaaacacttcttagggattaaatatagatgtaatttttcaaaatcgtttttaatttaaactgtgttttagtgtaaaattgttaaccttgtaagatggataatgtgtataagaatgtaggccttaactatttcacatgagtcaaaacaaagcagctttaaaaaaataattggaagcacaagtgcatggcactgactgaatgctgttaatatttctaaaagtttctacattcagattatatgcctgattcatagtaaaatacctctaataaacactgttttatagaaaacctgacttcagtgaatatttttgtattttacatgggccagtttatatactgctatttacactattatttcctatagctacatgttctttgtaccttttgtagttttatttgtattactagattcataccttgatggtaacgctctatctggttttgggtgtttttcatgttttagcatttgtataaagaaactggtccatgtaaatactttccatgttttttcttcaaatgtttaaaccactagttgatgtatggtatctttagatatttgcctgtctgtttgctcaaaattgcttctaaaacaataaagattcttttatttcttaaggcaa

SEQ ID NO: 177300 - DNA, 1625 bp, Artificial Sequence
  derived and/or modified sequence
aacactgggcggcggcggttggcccggggaggcaagcggtgacctagagaaggcctgaccgacggatggcggggaagaagggcccaggagagagctgtgcggtcttatgcattggaacttaatttgacagattcagaaaatgccacttgcctttatgcaaaatggcagatgaatttcacagtacgctatgaaactacaaataaaacttataaaactgtaaccatttcagaccatggcactgtgacatataatggaagcatttgtggggatgatcagaatggtcccaaaatagcagtgcagttcggacctggcttttcctggattgcgaattttaccaaggcagcatctacttattcaattgacagcgtctcattttcctacaacactggtgataacacaacatttcctgatgctgaagataaaggaattcttactgttgatgaacttttggccatcagaattccattgaatgacctttttagatgcaatagtttatcaactttggaaaagaatgatgttgtccaacactactgggatgttcttgtacaagcttttgtccaaaatggcacagtgagcacaaatgagttcctgtgtgataaagacaaaacttcaacagtggcacccaccatacacaccactgtgccatctcctactacaacacctactccaaaggaaaaaccagaagctggaacctattcagttaataatggcaatgatacttgtctgctggctaccatggggctgcagctgaacatcactcaggataaggttgcttcagttattaacatcaaccccaatacaactcactccacaggcagctgccgttctcacactgctctacttagactcaatagcagcaccattaagtatctagactttgtctttgctgtgaaaaatgaaaaccgattttatctgaaggaagtgaacatcagcatgtatttggttaatggctccgttttcagcattgcaaataacaatctcagctactgggatgcccccctgggaagttcttatatgtgcaacaaagagcagactgtttcagtgtctggagcatttcagataaatacctttgatctaagggttcagcctttcaatgtgacacaaggaaagtattctacagcccaagagtgttcgctggatgatgacaccattctaatcccaattatagttggtgctggtctttcaggcttgattatcgttatagtgattgcttacgtaattggcagaagaaaaagttatgctggatatcagactctgtaacactaatcaatacgtgatctctgttacaaaagaaaaaagcaagtacaagttccaacatgcaatactggtcaacttaaggtatatttagttgcagtccagctctttagaatgggtggtatgggggatttcaaacttaaacaaaaaactatcaactacaaattagttgcctgactttggtttttccaaccaaggaatttaaaactgttatttttacagcaaaagatgtgcaaaatcactggattataagttctattttactgtcttgaattagtatttcagtgttttcattttagacattcagactaaaaatacaccgtttagaaaaaacaatttttgaaaaagagattttttttccctgcaggtag

SEQ ID NO: 177301 - DNA, 1233 bp, Artificial Sequence
  derived and/or modified sequence
atggtgtgcttccggctgttccccgtgcccggcagcggcctggtgcttgtttgtctcgtgttgggagccgttcgcagctacgccctagaactgaacctgactgatagcgaaaatgctacctgcctctacgccaaatggcagatgaactttacagtaagatatgagacaactaacaagacatacaaaactgttaccatttccgaccacggaaccgtgacatataacggcagcatttgtggcgacgaccagaatggcccaaagatcgctgttcaattcggaccaggcttttcctggatagctaactttaccaaggcagcatcaacatattcaattgattcagtatcattctcatacaacaccggggataacacaacctttcccgacgcagaagacaaggggatcctgaccgtggacgagctactggccatccgcattcctctcaacgatctgttcaggtgcaattccctcagcaccctcgaaaagaacgacgtggtgcaacactattgggacgtcctcgtgcaggcctttgtgcaaaatggcacagtgtccacaaatgagtttctgtgtgataaagacaagaccagtacagtagcccccaccatccataccactgttcccagccccacaaccacacccactcccaaggagaaaccagaggcaggcacgtattccgtgaataacggcaatgatacctgcttactggcgacaatggggctccaacttaacattacgcaggataaagtggcttcagttattaacattaatccaaacaccacacattcaacagggtcctgccgctcgcataccgcactattaagactgaattcttccaccataaaatacctagatttcgtctttgccgtgaagaacgagaataggttctatctgaaggaggtaaatatcagtatgtatctggtgaatggttccgtcttcagcatcgccaataataatctgtcatactgggacgctcccctgggctcttcctacatgtgcaacaaggaacagacagtcagcgtgagcggcgctttccagattaatacctttgatctgcgggtacagcctttcaatgttacccagggaaaatacagtacagcccaagaatgttcccttgatgatgacacaatcctaattcccatcatagtcggcgccggtctatcaggtctgattatcgtgatcgttatcgcctacgttatcgggaggcgaaagtcttacgcgggctaccagacgctttag

SEQ ID NO: 177302 - DNA, 1092 bp, Artificial Sequence
  derived and/or modified sequence
atgaacttcaccgtgcggtacgagaccaccaacaagacctacaagacggtgacaattagcgaccacggcactgttacatacaatggaagcatttgcggagatgaccagaatggtccgaaaattgcagtacaatttggacccggcttttcctggatcgctaatttcactaaggcggcttcaacttattcaattgactccgtttctttcagctataataccggtgataacactacattccccgacgcagaagacaagggtattctgacagtcgacgagctgctggcaatccggatccccttaaacgatctttttcgatgtaacagtctcagcacactggagaaaaatgatgtggtgcaacattattgggacgtgttggtacaggcatttgtgcaaaatgggaccgtgagtacaaatgagtttctgtgcgacaaagataagacttcaaccgttgcccccacaattcatacaacagtcccatccccgaccacaacccctactccgaaggaaaagcctgaggccggaacttacagtgtgaataacggaaacgatacatgcctgcttgctacgatgggcttacagctcaacatcacacaggataaagtggcgagcgtgatcaatattaatcccaatacaacccactccaccggcagctgccgctcgcacactgcactcttacggctgaattccagcactataaagtacttggattttgtatttgcagttaaaaacgagaaccgcttctatttgaaggaggtgaatatttccatgtacctcgtaaatggatccgtgttctcaatcgcgaacaataatctctcctattgggacgctccgctgggatctagctatatgtgcaacaaggaacagacagtcagtgtatcgggagcttttcagatcaacacttttgacttgcgcgtccagcccttcaatgttactcaggggaagtattcaaccgcccaggagtgcagcctggacgatgatactatcttgattcctattatcgtaggagcaggtttgtccggactgatcatcgtcattgtcattgcctatgttattggcagaaggaagagctacgcagggtaccagacattatag

SEQ ID NO: 177303 - DNA, 1233 bp, Artificial Sequence
  derived and/or modified sequence
atggtctgctttaggctatttccagtgcccggtagtggcttagtcctcgtatgcctggtgctgggcgctgtccgaagctacgcactggagcttaacctgactgactccgaaaacgcgacctgcttgtatgcaaagtggcaaatgaattttaccgtcagatatgagaccaccaataaaacttacaagaccgtgacaatctccgatcatggcactgtgacttataacggctctatttgcggggatgaccagaatggcccaaagattgctgtgcagtttggcccaggcttctcgtggatcgccaatttcactaaagccgcatccacttattcaatcgactctgtgtcatttagctataacacaggcgataacaccactttcccggacgcggaggataaggggatcttgacagtcgacgaactgttagcaatcagaatcccgctgaatgacttgttcagatgcaactccttgtccacccttgagaagaacgacgtcgtgcagcactattgggacgtgcttgtgcaagcattcgtacaaaatggcactgtcagtaccaacgaatttttgtgcgacaaggacaaaacaagtaccgtagccccaactatccacacaactgtgccatccccgacaactactcctacgcccaaagagaaacctgaagctgggacctacagcgtgaacaatggcaacgacacttgtctgcttgccaccatggggctccaactcaatatcacacaggacaaggtggcttcagtgatcaatataaatccaaataccactcactctacaggctcttgccgcagtcacaccgcactgctccgactgaattccagtaccatcaagtacctcgattttgtctttgccgtcaagaatgaaaaccgcttttacttaaaggaggttaatatttctatgtaccttgtgaatggatctgtgttctctatcgctaataacaacctgtcctattgggatgcaccgcttggatcaagctacatgtgtaataaggagcagacagttagcgtgtcaggagcattccagatcaacacttttgatttaagggtgcagcctttcaatgtgacgcaaggcaagtactcaacagcacaagaatgtagcctcgatgatgataccatcctgattcctatcatcgttggagccggactgagcgggttgatcattgtgattgttatcgcctacgtgatcgggaggagaaagagttacgctggctaccagacactgtag

SEQ ID NO: 177304 - DNA, 1092 bp, Artificial Sequence
  derived and/or modified sequence
atgaacttcactgttagatacgagacgacaaataagacatacaaaacagtgactattagcgatcatggaacagtcacttacaatggcagcatctgcggcgacgaccagaacggacctaagatcgctgtgcagtttggtccgggtttcagttggatagctaattttaccaaagccgcttccacatattcaatcgactcagtgagcttctcatataataccggtgataacactaccttccccgatgccgaggacaagggtattctcacagtggatgaactcttagcgattcgcattcctctgaacgacctttttagatgcaattccctgagcacacttgaaaaaaacgacgtggtccaacattattgggatgtgcttgtgcaggctttcgtgcagaatggaacggtcagcacgaacgagttcctgtgtgataaagataagacctcaacagttgccccaacaattcacaccactgtgccctcaccaaccaccacccctactccgaaggagaaacccgaggccggaacctatagcgtcaataatggaaacgacacgtgtctcttagccaccatgggactacagctgaacataacccaagacaaggtcgccagcgtcatcaatattaatcctaataccacccactcaactggcagctgccgttcacacacagcacttctgaggctcaactcctctaccattaagtatctcgacttcgtctttgcagtgaaaaatgaaaatcgtttttacctgaaagaggtgaacatctccatgtacctggtgaacggctccgttttcagcatagcaaacaacaatttatcttactgggatgcccctcttggcagtagttatatgtgcaacaaagaacagactgtttccgtgagcggcgcttttcagattaatacctttgacctgcgggtgcagccttttaacgtgacgcaaggcaaatatagtaccgcacaggaatgtagtctggacgatgacacaattctgatcccaataatcgtcggcgcaggactgtcaggccttataatcgtgatcgtgatcgcatatgtgatcgggaggaggaaatcatatgccggttaccagaccctgtag

SEQ ID NO: 177305 - DNA, 1233 bp, Artificial Sequence
  derived and/or modified sequence
atggtgtgcttcagactgttccccgtgcccggcagcggcctggtgctggtgtgcctggtgctgggcgccgtgagaagctacgccctggagctgaacctgaccgacagcgagaacgccacctgcctgtacgccaagtggcagatgaacttcaccgtgagatacgagaccaccaacaagacctacaagaccgtgaccatcagcgaccacggcaccgtgacctacaacggcagcatctgcggcgacgaccagaacggccccaagatcgccgtgcagttcggccccggcttcagctggatcgccaacttcaccaaggccgccagcacctacagcatcgacagcgtgagcttcagctacaacaccggcgacaacaccaccttccccgacgccgaggacaagggcatcctgaccgtggacgagctgctggccatcagaatccccctgaacgacctgttcagatgcaacagcctgagcaccctggagaagaacgacgtggtgcagcactactgggacgtgctggtgcaggccttcgtgcagaacggcaccgtgagcaccaacgagttcctgtgcgacaaggacaagaccagcaccgtggcccccaccatccacaccaccgtgcccagccccaccaccacccccacccccaaggagaagcccgaggccggcacctacagcgtgaacaacggcaacgacacctgcctgctggccaccatgggcctgcagctgaacatcacccaggacaaggtggccagcgtgatcaacatcaaccccaacaccacccacagcaccggcagctgcagaagccacaccgccctgctgagactgaacagcagcaccatcaagtacctggacttcgtgttcgccgtgaagaacgagaacagattctacctgaaggaggtgaacatcagcatgtacctggtgaacggcagcgtgttcagcatcgccaacaacaacctgagctactgggacgcccccctgggcagcagctacatgtgcaacaaggagcagaccgtgagcgtgagcggcgccttccagatcaacaccttcgacctgagagtgcagcccttcaacgtgacccagggcaagtacagcaccgcccaggagtgcagcctggacgacgacaccatcctgatccccatcatcgtgggcgccggcctgagcggcctgatcatcgtgatcgtgatcgcctacgtgatcggcagaagaaagagctacgccggctaccagaccctgtag

SEQ ID NO: 177306 - DNA, 1092 bp, Artificial Sequence
  derived and/or modified sequence
atgaacttcaccgtgagatacgagaccaccaacaagacctacaagaccgtgaccatcagcgaccacggcaccgtgacctacaacggcagcatctgcggcgacgaccagaacggccccaagatcgccgtgcagttcggccccggcttcagctggatcgccaacttcaccaaggccgccagcacctacagcatcgacagcgtgagcttcagctacaacaccggcgacaacaccaccttccccgacgccgaggacaagggcatcctgaccgtggacgagctgctggccatcagaatccccctgaacgacctgttcagatgcaacagcctgagcaccctggagaagaacgacgtggtgcagcactactgggacgtgctggtgcaggccttcgtgcagaacggcaccgtgagcaccaacgagttcctgtgcgacaaggacaagaccagcaccgtggcccccaccatccacaccaccgtgcccagccccaccaccacccccacccccaaggagaagcccgaggccggcacctacagcgtgaacaacggcaacgacacctgcctgctggccaccatgggcctgcagctgaacatcacccaggacaaggtggccagcgtgatcaacatcaaccccaacaccacccacagcaccggcagctgcagaagccacaccgccctgctgagactgaacagcagcaccatcaagtacctggacttcgtgttcgccgtgaagaacgagaacagattctacctgaaggaggtgaacatcagcatgtacctggtgaacggcagcgtgttcagcatcgccaacaacaacctgagctactgggacgcccccctgggcagcagctacatgtgcaacaaggagcagaccgtgagcgtgagcggcgccttccagatcaacaccttcgacctgagagtgcagcccttcaacgtgacccagggcaagtacagcaccgcccaggagtgcagcctggacgacgacaccatcctgatccccatcatcgtgggcgccggcctgagcggcctgatcatcgtgatcgtgatcgcctacgtgatcggcagaagaaagagctacgccggctaccagaccctgtag

SEQ ID NO: 177307 - protein, 111 aa, Artificial Sequence
  derived and/or modified sequence
MKILVALAVFFLVSTQLFAEEIGANDDLNYWSDWYDSDQIKEELPEPFEHLLQRIARRPKPQQFFGLMGKRDADSSIEKQVALLKALYGHGQISHKMAYERSAMQNYERRR

SEQ ID NO: 177308 - DNA, 336 bp, Artificial Sequence
  derived and/or modified sequence
atgaagatcctggtggccctggccgtgttcttcctggtgagcacccagctgttcgccgaggagatcggcgccaacgacgacctgaactactggagcgactggtacgacagcgaccagatcaaggaggagctgcccgagcccttcgagcacctgctgcagagaatcgccagaagacccaagccccagcagttcttcggcctgatgggcaagagagacgccgacagcagcatcgagaagcaggtggccctgctgaaggccctgtacggccacggccagatcagccacaagatggcctacgagagaagcgccatgcagaactacgagagaagaagatag

SEQ ID NO: 177309 - DNA, 336 bp, Artificial Sequence
  derived and/or modified sequence
atgaagattcttgtggccctggccgtcttcttcttagtgtccactcaactcttcgccgaggaaattggggccaatgatgatcttaattactggagcgattggtatgatagtgaccagatcaaagaggaactgcccgagcccttcgaacacttactgcagagaatagctaggaggcccaagccgcagcaattttttggtctaatgggcaagcgggatgcagactcatcaattgaaaaacaggttgcccttctcaaagcactctacgggcacggacagatttcccacaaaatggcatatgaaagatcagccatgcagaattacgaaaggcggcgatag

SEQ ID NO: 177310 - DNA, 336 bp, Artificial Sequence
  derived and/or modified sequence
atgaagatcctggtggccctggccgtgttcttcctggtgtccacccagctgtttgctgaggagatcggggccaatgatgacctgaactactggagcgactggtatgacagcgaccagatcaaggaggagctgcctgagccctttgagcacctgctgcagagaattgcccggcggcccaagccccagcagttcttcggcctgatgggcaagagagatgctgacagcagcattgagaagcaggtggccctgctgaaggccctgtatggccacggccagatcagccacaagatggcctatgaaagaagtgccatgcagaactatgaaagaagaagatag

SEQ ID NO: 177311 - DNA, 336 bp, Artificial Sequence
  derived and/or modified sequence
atgaagatcctggtggccctggccgtgttcttcctggtgagcacccagttgttcgccgaggagatcggtgcgaacgacgacctgaactactggtcggattggtacgattcagatcagattaaagaagaattacctgagccctttgaacacctgttgcagaggattgcccgccggccaaaaccccagcagttcttcggcctgatgggtaaacgtgatgcagattcttcaattgagaaacaggtggctcttctgaaagctttgtacgggcacggccagatcagccataaaatggcctatgaacggtctgctatgcagaactacgagcggcggagatag

SEQ ID NO: 177312 - DNA, 336 bp, Artificial Sequence
  derived and/or modified sequence
atgaaaatcctggtggccctcgctgtatttttcttggtgtccacgcaattatttgcagaggagattggcgctaacgacgatctgaactattggagtgattggtacgattccgatcaaatcaaggaggagttgccggaaccttttgagcacctgctccagcggatcgcgagaagaccgaagcctcagcagttctttggcctcatggggaaacgcgacgcagactcttccatcgagaagcaggtggcactactgaaagccctatacgggcatggccagatttcccataaaatggcatacgagaggtccgccatgcagaattacgaacggagaaggtag

SEQ ID NO: 177313 - DNA, 975 bp, Artificial Sequence
  derived and/or modified sequence
aaagagcgcgctcggacctccttcccggcggcagctaccgagagtgcggagcgaccagcgtgcgctcggaggaaccagagaaactcagcaccccgcgggactgtccgtcgcaaaatccaacatgaaaatcctcgtggccttggcagtcttttttcttgtctccactcagctgtttgcagaagaaataggagccaatgatgatctgaattactggtccgactggtacgacagcgaccagatcaaggaggaactgccggagccctttgagcatcttctgcagagaatcgcccggagacccaagcctcagcagttctttggattaatgggcaaacgggatgctgattcctcaattgaaaaacaagtggccctgttaaaggctctttatggacatggccagatctctcacaaaatggcttatgaaaggagtgcaatgcagaattatgaaagaagacgttaataaactacctaacattatttattcagcttcatttgtgtcaatgggcaatgacaggtaaattaagacatgcactatgaggaataattatttatttaataacaattgtttggggttgaaaattcaaaaagtgtttatttttcatattgtgccaatatgtattgtaaacatgtgttttaattccaatatgatgactcccttaaaatagaaataagtggttatttctcaacaaagcacagtgttaaatgaaattgtaaaacctgtcaatgatacagtccctaaagaaaaaaaatcattgctttgaagcagttgtgtcagctactgcggaaaaggaaggaaactcctgacagtcttgtgcttttcctatttgttttcatggtgaaaatgtactgagattttggtattacactgtatttgtatctctgaagcatgtttcatgttttgtgactatatagagatgtttttaaaagtttcaatgtgattctaatgtcttcatttcattgtatgatgtgttgtgatag

SEQ ID NO: 177314 - protein, 114 aa, Artificial Sequence
  derived and/or modified sequence
MKILVALAVFFLVSTQLFAEEIGANDDLNYWSDWYDSDQIKEELPEPFEHLLQRIARRPKPQQFFGLMGKRDAGHGQISHKRHKTDSFVGLMGKRALNSVAYERSAMQNYERRR

SEQ ID NO: 177315 - DNA, 345 bp, Artificial Sequence
  derived and/or modified sequence
atgaagatcctggtggccctggccgtgttcttcctggtgagcacccagctgttcgccgaggagatcggcgccaacgacgacctgaactactggagcgactggtacgacagcgaccagatcaaggaggagctgcccgagcccttcgagcacctgctgcagagaatcgccagaagacccaagccccagcagttcttcggcctgatgggcaagagagacgccggccacggccagatcagccacaagagacacaagaccgacagcttcgtgggcctgatgggcaagagagccctgaacagcgtggcctacgagagaagcgccatgcagaactacgagagaagaagatag

SEQ ID NO: 177316 - DNA, 345 bp, Artificial Sequence
  derived and/or modified sequence
atgaagattcttgtcgccttggcagttttcttcttggtatctacgcagctctttgccgaggagattggtgctaatgacgatttaaactattggtccgattggtacgattccgaccagatcaaggaggaactgccagaaccatttgagcacttgctccaacggatcgctcggagaccaaaaccacagcagttcttcggactgatgggtaagcgcgatgccggacacgggcagatctctcacaaacgtcataagacagattctttcgtcggcctgatgggcaagagggcgctgaacagcgtggcttatgagaggtcagcgatgcagaactacgaaaggaggaggtag

SEQ ID NO: 177317 - DNA, 345 bp, Artificial Sequence
  derived and/or modified sequence
atgaagatcctggtggccctggccgtgttcttcctggtgtccacccagctgtttgctgaggagatcggggccaatgatgacctgaactactggagcgactggtatgacagcgaccagatcaaggaggagctgcctgagccctttgagcacctgctgcagagaattgcccggcggcccaagccccagcagttcttcggcctgatgggcaagagagatgctggccacggccagatcagccacaagaggcacaagacagacagctttgtgggcctgatgggcaagagggccctgaacagcgtggcctatgaaagaagtgccatgcagaactatgaaagaagaagatag

SEQ ID NO: 177318 - DNA, 345 bp, Artificial Sequence
  derived and/or modified sequence
atgaagatcctggtggccctggccgtgttcttcctggtgagcacccagttgtttgcggaagagatcggcgcaaatgacgacttaaattattggagcgactggtacgacagcgaccagatcaaagaggaactccccgagcccttcgagcatcttttacagcggatcgcacgccggccgaaaccgcagcaattttttggcttgatggggaagcgcgatgcaggccacggccagattagtcacaaacggcacaaaacggactcattcgtgggcttgatgggaaagcgcgctttaaatagtgtcgcctacgaacgaagcgccatgcagaactacgaacgccggcgctag

SEQ ID NO: 177319 - DNA, 345 bp, Artificial Sequence
  derived and/or modified sequence
atgaagattttggtggccttggcggtgtttttccttgtgagtacccagctctttgccgaagaaatcggagcaaacgacgatttgaactactggagcgactggtacgatagcgatcagattaaggaagagctgcccgagccttttgaacacctgctccagaggattgcccgtcgtcccaaaccccaacagttttttggcctcatgggaaaacgcgatgcaggacacggccagatcagccacaagaggcacaagaccgacagcttcgttggcctcatgggcaagagagctttaaacagcgtggcatacgaaaggagcgcgatgcaaaactatgaaagaagaaggtag

SEQ ID NO: 177320 - DNA, 1011 bp, Artificial Sequence
  derived and/or modified sequence
aaagagcgcgctcggacctccttcccggcggcagctaccgagagtgcggagcgaccagcgtgcgctcggaggaaccagagaaactcagcaccccgcgggactgtccgtcgcaaaatccaacatgaaaatcctcgtggccttggcagtcttttttcttgtctccactcagctgtttgcagaagaaataggagccaatgatgatctgaattactggtccgactggtacgacagcgaccagatcaaggaggaactgccggagccctttgagcatcttctgcagagaatcgcccggagacccaagcctcagcagttctttggattaatgggcaaacgggatgctggacatggccagatctctcacaaaagacataaaacagattcctttgttggactaatgggcaaaagagctttaaattctgtggcttatgaaaggagtgcaatgcagaattatgaaagaagacgttaataaactacctaacattatttattcagcttcatttgtgtcaatgggcaatgacaggtaaattaagacatgcactatgaggaataattatttatttaataacaattgtttggggttgaaaattcaaaaagtgtttatttttcatattgtgccaatatgtattgtaaacatgtgttttaattccaatatgatgactcccttaaaatagaaataagtggttatttctcaacaaagcacagtgttaaatgaaattgtaaaacctgtcaatgatacagtccctaaagaaaaaaaatcattgctttgaagcagttgtgtcagctactgcggaaaaggaaggaaactcctgacagtcttgtgcttttcctatttgttttcatggtgaaaatgtactgagattttggtattacactgtatttgtatctctgaagcatgtttcatgttttgtgactatatagagatgtttttaaaagtttcaatgtgattctaatgtcttcatttcattgtatgatgtgttgtgatagctaacattttaaataaaagaaaaaata

SEQ ID NO: 177321 - protein, 184 aa, Artificial Sequence
  derived and/or modified sequence
MDPAASSCMRSLQPPAPVWGCLRNPHSEGNGASGLPHYPPTPFSFHQKPDFLATATAAYPDFSASCLAATPHSLPQEEHIFTEQHPAFPQSPNWHFPVSDARRRPNSGPAGGSKEMGTSSLGLVDTTGGPGDDYGVLGSTANETEKKSSRRRKESSGQSVVPEPKDEVEACEGRSAHLPQWAGP

SEQ ID NO: 177322 - DNA, 555 bp, Artificial Sequence
  derived and/or modified sequence
atggatcccgcagcttcatcatgcatgaggagcctgcagcccccagcaccggtgtggggctgcctgcgaaacccgcatagcgaagggaatggtgcaagcggtttacctcactatccacctacccctttcagttttcatcagaaacccgatttcctggccactgccaccgcagcctaccccgatttcagcgcttcatgtcttgctgccactccacacagtcttccacaggaggaacacatcttcactgagcagcaccctgcattcccacagagccccaattggcacttccccgtgtcagatgcccggcgacggccaaactcaggacccgccggcggaagtaaagaaatgggaaccagttctctaggactggttgataccacgggtggcccaggtgatgactacggcgtccttggcagcactgccaacgagacagaaaagaagtcctcccgccggagaaaggagtctagcgggcagtccgtggtgcccgaacccaaggacgaggtggaggcttgcgaaggcaggtctgcacatctacctcagtgggcaggtccttag

SEQ ID NO: 177323 - DNA, 555 bp, Artificial Sequence
  derived and/or modified sequence
atggaccctgctgccagcagctgcatgaggagcctgcagcccccagcccctgtgtggggctgcctgaggaacccccacagcgagggcaatggagccagcggcctgccccactacccacccacccccttctccttccaccagaagccagacttcctggccacagccacagctgcctacccagacttcagcgccagctgcctggccgccaccccccacagcctgccccaggaggagcacatcttcacagagcagcacccagccttcccccagagccccaactggcacttccctgtgtctgatgccaggagaagacccaacagcggccctgctgggggcagcaaggagatgggcaccagcagcctgggcctggtggacaccactggaggccctggagatgattatggagtgctgggcagcacagccaatgaaacagagaagaagagcagcagaagaaggaaggagagcagcggccagagcgtggtgcctgagcccaaggatgaggtggaggcctgtgagggccgcagcgcccacctgccccagtgggccggcccctag

SEQ ID NO: 177324 - DNA, 2129 bp, Artificial Sequence
  derived and/or modified sequence
aaaggaccgaggcgtgcagcggacagcagatggatcccgcggccagcagctgcatgaggagcctccagcccccagcccctgtctggggctgccttcgaaacccccactcggaaggcaatggggcctcagggctaccccactacccgcccaccccgttctccttccaccagaaaccagacttcctggcgacagcgacggcagcgtaccctgacttctcagcctcctgcctggcagccaccccacacagcctgccccaggaggagcacatcttcactgagcagcaccccgctttcccacagtcccccaactggcacttccctgtctcagacgcccggcgcaggcccaactcaggcccggcagggggttccaaggaaatggggaccagcagcctgggcctggtggacaccacaggaggcccaggcgatgactacggggtgcttgggagcactgccaatgagacagagaagaaatcatccaggcggagaaaggagagttcaggtcaaagtgtggttccagaaccgaaggatgaagtggaagcgtgtgaagggaggtcagcccatctcccccaatgggcaggaccctgaggatggggactccacagcctctccaagttcagagtgagattctgcatggaggaaaaatgactaaggactgagccccctacccaactacccccaccccaatcccaccttcaccctcttccttccccagccagggcagcctctccacatctttccctgactcttggatatgaaactgcccagcattcctgggagtcttaggattttctaggaagttctgtccagcctcttagcagcctcttccctagggcctttgctcccacactctcatggaatcagacagagatcctaccgggccggatgaatctggaaacagcttcagagatactgcttctcagcgtctcttggctgccacccatgcctcctcctaccgctgttctcctaggtcagccaggcctcctcctggtctggacaccacctggcctggtgggagaggagctttggaaccagctggcgactcggaaagtaaatgcttcaaaaggaaggaaatgacagagacacacgcccttgcccaccttcctctgtaggctgcacatctgaggctttggggccccttagttgtcccgaaaccccaagaaaaatcagaatgaggagagtcaaggacagcaactcagctgctgcaagccagaaacacatccctgtctccaaatttgttggctaagtggagacacttctgagaactgactagagaagacagaaaaatagcccgatgtaggtttcggtgtccccatataggcccgtccacacaggcttgactgggtggacaagaatgaacccatgacagcacctgctgcttcaaaatcaaaatcaatttagggatacagcaggggctgttgggctgtgctccagagaaaaggagcagctactccttttaaatccacgatttctggattgaaaacctgtccagatgctgagttgttgggctgaacaactaggagctgaaaacaacgtagaggctggaaagtgtcccctgcattctggaggggaggggagataataaggagggctgctgggtgagggcctggagatgtggaaccctggagtggaaggttctccagtgacagtgtcctgtgactgcaaaaggggacaagaaaatccctcttcctccatgggatggatttaagctcttgctgtgtgttctacaaatgctgttattgtgggaggaaatgctaggtttttgtgtgtggactgcccagacctcagccaggtcttctggagatgacatttgaggactgatggccaaagagcatgggggactgaagccctggctgcctcagcgctctgtctcccaacaccagctggtgttgcagagggaggtcaacgtgagtttggatctcttgtacgcagatgtaatcattcacatgtaaaaataaccccacctccccaccccaaaaagggcaagagctgtggaaaatgattgccaaatgagatggctggttagagcatgattttttctaaagcatacttcatatattttcttaagattacatcaagctaattgtgcgagctcaattcactttgtaagaaaactctcggagaaataaaatc

SEQ ID NO: 177325 - DNA, 555 bp, Artificial Sequence
  derived and/or modified sequence
atggaccccgccgccagcagctgcatgcggagcctgcagccccccgcccctgtttgggggtgccttcggaaccctcactcagaaggcaacggggccagcggcctgccccactaccctcccactccatttagctttcaccagaaaccggactttcttgcaacggctactgcggcataccccgacttcagcgcctcatgcctggctgcaacccctcatagcctgccacaggaggaacatatctttactgagcagcatccggctttccctcagtctcccaactggcactttcctgtctctgacgccagacgacggcctaactccggacccgcaggcggaagcaaagagatgggcacaagttcgttggggcttgttgacaccacaggtgggccaggggatgattatggggtgctaggctcgacggccaacgaaactgagaaaaaaagctccagacgtaggaaagagtcctcaggtcaatccgttgtgcccgaaccaaaggacgaggtagaagcatgtgaaggcagatctgcgcacctccctcagtgggctggaccctag

SEQ ID NO: 177326 - DNA, 555 bp, Artificial Sequence
  derived and/or modified sequence
atggatccggcagcaagttcatgtatgaggagcctgcagccacctgctcccgtctggggatgcctccgcaacccgcactcagaaggtaacggcgcatccggcctccctcattacccacccactccttttagcttccatcaaaagccagattttttggccactgcgacggccgcttacccagacttttccgcgtcctgccttgccgcaactccccactcattgcctcaagaggagcacatttttactgagcaacacccagcttttcctcaaagccctaactggcacttccctgtgagcgatgcacgacgtaggcccaacagcggacccgcaggcggttcgaaagagatgggcacctcctctttgggcctagtggacaccacaggaggcccaggagatgactatggagtcctcggaagcactgctaatgaaactgaaaaaaagagcagccgcagaagaaaggagagttccggccagtctgttgtgcccgaacctaaggacgaggtcgaggcatgtgaggggagaagcgcccatctcccacaatgggccggaccatag

SEQ ID NO: 177327 - DNA, 555 bp, Artificial Sequence
  derived and/or modified sequence
atggaccccgccgccagcagctgcatgagaagcctgcagccccccgcccccgtgtggggctgcctgagaaacccccacagcgagggcaacggcgccagcggcctgccccactacccccccacccccttcagcttccaccagaagcccgacttcctggccaccgccaccgccgcctaccccgacttcagcgccagctgcctggccgccaccccccacagcctgccccaggaggagcacatcttcaccgagcagcaccccgccttcccccagagccccaactggcacttccccgtgagcgacgccagaagaagacccaacagcggccccgccggcggcagcaaggagatgggcaccagcagcctgggcctggtggacaccaccggcggccccggcgacgactacggcgtgctgggcagcaccgccaacgagaccgagaagaagagcagcagaagaagaaaggagagcagcggccagagcgtggtgcccgagcccaaggacgaggtggaggcctgcgagggcagaagcgcccacctgccccagtgggccggcccctag

SEQ ID NO: 177328 - protein, 1134 aa, Artificial Sequence
  derived and/or modified sequence
MPVFHTRTIESILEPVAQQISHLVIMHEEGEVDGKAIPDLTAPVAAVQAAVSNLVRVGKETVQTTEDQILKRDMPPAFIKVENACTKLVQAAQMLQSDPYSVPARDYLIDGSRGILSGTSDLLLTFDEAEVRKIIRVCKGILEYLTVAEVVETMEDLVTYTKNLGPGMTKMAKMIDERQQELTHQEHRVMLVNSMNTVKELLPVLISAMKIFVTTKNSKNQGIEEALKNRNFTVEKMSAEINEIIRVLQLTSWDEDAWASKDTEAMKRALASIDSKLNQAKGWLRDPSASPGDAGEQAIRQILDEAGKVGELCAGKERREILGTCKMLGQMTDQVADLRARGQGSSPVAMQKAQQVSQGLDVLTAKVENAARKLEAMTNSKQSIAKKIDAAQNWLADPNGGPEGEEQIRGALAEARKIAELCDDPKERDDILRSLGEISALTSKLADLRRQGKGDSPEARALAKQVATALQNLQTKTNRAVANSRPAKAAVHLEGKIEQAQRWIDNPTVDDRGVGQAAIRGLVAEGHRLANVMMGPYRQDLLAKCDRVDQLTAQLADLAARGEGESPQARALASQLQDSLKDLKARMQEAMTQEVSDVFSDTTTPIKLLAVAATAPPDAPNREEVFDERAANFENHSGKLGATAEKAAAVGTANKSTVEGIQASVKTARELTPQVVSAARILLRNPGNQAAYEHFETMKNQWIDNVEKMTGLVDEAIDTKSLLDASEEAIKKDLDKCKVAMANIQPQMLVAGATSIARRANRILLVAKREVENSEDPKFREAVKAASDELSKTISPMVMDAKAVAGNISDPGLQKSFLDSGYRILGAVAKVREAFQPQEPDFPPPPPDLEQLRLTDELAPPKPPLPEGEVPPPRPPPPEEKDEEFPEQKAGEVINQPMMMAARQLHDEARKWSSKPGIPAAEVGIGVVAEADAADAAGFPVPPDMEDDYEPELLLMPSNQPVNQPILAAAQSLHREATKWSSKGNDIIAAAKRMALLMAEMSRLVRGGSGTKRALIQCAKDIAKASDEVTRLAKEVAKQCTDKRIRTNLLQVCERIPTISTQLKILSTVKATMLGRTNISDEESEQATEMLVHNAQNLMQSVKETVREAEAASIKIRTDAGFTLRWVRKTPWYQ

SEQ ID NO: 177329 - protein, 927 aa, Artificial Sequence
  derived and/or modified sequence
MLQSDPYSVPARDYLIDGSRGILSGTSDLLLTFDEAEVRKIIRVCKGILEYLTVAEVVETMEDLVTYTKNLGPGMTKMAKMIDERQQELTHQEHRVMLVNSMNTVKELLPVLISAMKIFVTTKNSKNQGIEEALKNRNFTVEKMSAEINEIIRVLQLTSWDEDAWASKDTEAMKRALASIDSKLNQAKGWLRDPSASPGDAGEQAIRQILDEAGKVGELCAGKERREILGTCKMLGQMTDQVADLRARGQGSSPVAMQKAQQVSQGLDVLTAKVENAARKLEAMTNSKQSIAKKIDAAQNWLADPNGGPEGEEQIRGALAEARKIAELCDDPKERDDILRSLGEISALTSKLADLRRQGKGDSPEARALAKQVATALQNLQTKTNRAVANSRPAKAAVHLEGKIEQAQRWIDNPTVDDRGVGQAAIRGLVAEGHRLANVMMGPYRQDLLAKCDRVDQLTAQLADLAARGEGESPQARALASQLQDSLKDLKARMQEAMTQEVSDVFSDTTTPIKLLAVAATAPPDAPNREEVFDERAANFENHSGKLGATAEKAAAVGTANKSTVEGIQASVKTARELTPQVVSAARILLRNPGNQAAYEHFETMKNQWIDNVEKMTGLVDEAIDTKSLLDASEEAIKKDLDKCKVAMANIQPQMLVAGATSIARRANRILLVAKREVENSEDPKFREAVKAASDELSKTISPMVMDAKAVAGNISDPGLQKSFLDSGYRILGAVAKVREAFQPQEPDFPPPPPDLEQLRLTDELAPPKPPLPEGEVPPPRPPPPEEKDEEFPEQKAGEVINQPMMMAARQLHDEARKWSSKPGIPAAEVGIGVVAEADAADAAGFPVPPDMEDDYEPELLLMPSNQPVNQPILAAAQSLHREATKWSSKGNDIIAAAKRMALLMAEMSRLVRGGSVPRTSPRPQMR

SEQ ID NO: 177330 - DNA, 2784 bp, Artificial Sequence
  derived and/or modified sequence
atgctgcagagcgacccctacagcgtgcccgccagagactacctgatcgacggcagcagaggcatcctgagcggcaccagcgacctgctgctgaccttcgacgaggccgaggtgagaaagatcatcagagtgtgcaagggcatcctggagtacctgaccgtggccgaggtggtggagaccatggaggacctggtgacctacaccaagaacctgggccccggcatgaccaagatggccaagatgatcgacgagagacagcaggagctgacccaccaggagcacagagtgatgctggtgaacagcatgaacaccgtgaaggagctgctgcccgtgctgatcagcgccatgaagatcttcgtgaccaccaagaacagcaagaaccagggcatcgaggaggccctgaagaacagaaacttcaccgtggagaagatgagcgccgagatcaacgagatcatcagagtgctgcagctgaccagctgggacgaggacgcctgggccagcaaggacaccgaggccatgaagagagccctggccagcatcgacagcaagctgaaccaggccaagggctggctgagagaccccagcgccagccccggcgacgccggcgagcaggccatcagacagatcctggacgaggccggcaaggtgggcgagctgtgcgccggcaaggagagaagagagatcctgggcacctgcaagatgctgggccagatgaccgaccaggtggccgacctgagagccagaggccagggcagcagccccgtggccatgcagaaggcccagcaggtgagccagggcctggacgtgctgaccgccaaggtggagaacgccgccagaaagctggaggccatgaccaacagcaagcagagcatcgccaagaagatcgacgccgcccagaactggctggccgaccccaacggcggccccgagggcgaggagcagatcagaggcgccctggccgaggccagaaagatcgccgagctgtgcgacgaccccaaggagagagacgacatcctgagaagcctgggcgagatcagcgccctgaccagcaagctggccgacctgagaagacagggcaagggcgacagccccgaggccagagccctggccaagcaggtggccaccgccctgcagaacctgcagaccaagaccaacagagccgtggccaacagcagacccgccaaggccgccgtgcacctggagggcaagatcgagcaggcccagagatggatcgacaaccccaccgtggacgacagaggcgtgggccaggccgccatcagaggcctggtggccgagggccacagactggccaacgtgatgatgggcccctacagacaggacctgctggccaagtgcgacagagtggaccagctgaccgcccagctggccgacctggccgccagaggcgagggcgagagcccccaggccagagccctggccagccagctgcaggacagcctgaaggacctgaaggccagaatgcaggaggccatgacccaggaggtgagcgacgtgttcagcgacaccaccacccccatcaagctgctggccgtggccgccaccgccccccccgacgcccccaacagagaggaggtgttcgacgagagagccgccaacttcgagaaccacagcggcaagctgggcgccaccgccgagaaggccgccgccgtgggcaccgccaacaagagcaccgtggagggcatccaggccagcgtgaagaccgccagagagctgaccccccaggtggtgagcgccgccagaatcctgctgagaaaccccggcaaccaggccgcctacgagcacttcgagaccatgaagaaccagtggatcgacaacgtggagaagatgaccggcctggtggacgaggccatcgacaccaagagcctgctggacgccagcgaggaggccatcaagaaggacctggacaagtgcaaggtggccatggccaacatccagccccagatgctggtggccggcgccaccagcatcgccagaagagccaacagaatcctgctggtggccaagagagaggtggagaacagcgaggaccccaagttcagagaggccgtgaaggccgccagcgacgagctgagcaagaccatcagccccatggtgatggacgccaaggccgtggccggcaacatcagcgaccccggcctgcagaagagcttcctggacagcggctacagaatcctgggcgccgtggccaaggtgagagaggccttccagccccaggagcccgacttccccccccccccccccgacctggagcagctgagactgaccgacgagctggccccccccaagccccccctgcccgagggcgaggtgcccccccccagaccccccccccccgaggagaaggacgaggagttccccgagcagaaggccggcgaggtgatcaaccagcccatgatgatggccgccagacagctgcacgacgaggccagaaagtggagcagcaagcccggcatccccgccgccgaggtgggcatcggcgtggtggccgaggccgacgccgccgacgccgccggcttccccgtgccccccgacatggaggacgactacgagcccgagctgctgctgatgcccagcaaccagcccgtgaaccagcccatcctggccgccgcccagagcctgcacagagaggccaccaagtggagcagcaagggcaacgacatcatcgccgccgccaagagaatggccctgctgatggccgagatgagcagactggtgagaggcggcagcgtgcccagaaccagccccagaccccagatgagatag

SEQ ID NO: 177331 - DNA, 2784 bp, Artificial Sequence
  derived and/or modified sequence
atgttgcaatctgatccatacagtgtgcctgctagggattatttgatcgatggatcacgagggatcctgtctggaacctctgacctattgctgacattcgacgaggccgaggtgcgcaagataattagggtatgtaaggggatcctcgagtaccttaccgtcgccgaagtggtggaaactatggaggacctcgtgacgtatacaaaaaacctgggccctggaatgacgaaaatggcaaagatgatcgatgagcgtcagcaggagcttacccatcaggagcatcgcgtgatgctggtaaactccatgaataccgttaaggagctgttgccggttttaatttcagcgatgaagattttcgtgacgactaaaaactctaaaaaccagggtatcgaggaagctttgaaaaataggaattttaccgtggagaagatgtccgcagagatcaatgagatcattagagtcctccagcttacaagctgggatgaggacgcgtgggctagtaaggacacagaagcgatgaagagagctctcgcctccatcgattccaaactgaatcaagcaaaaggctggctacgggacccgtctgctagcccgggcgacgccggtgagcaggctatcaggcagatcctggatgaggcaggtaaagtgggagagttgtgtgctggtaaggaaagaagagaaattctcggaacctgtaagatgctcggccagatgaccgaccaagtcgcagacctgcgagctcgagggcagggatcctccccagtcgccatgcaaaaggctcagcaggtttcccaggggttagacgtgttaacagccaaggtcgaaaatgcagcacgaaagctggaggccatgactaactccaagcagtccatcgcaaagaagatcgatgccgctcagaattggctggccgaccccaacggtgggcctgaaggggaagagcagatcagaggtgcactcgcggaagctcggaaaatagctgagctgtgcgacgaccccaaagagagagatgatatcctccggtccctgggtgaaataagtgctctcacctccaaactcgccgacttgcgccgccagggaaaaggcgactctcctgaagcccgtgccttggcgaagcaggtggcaaccgccctgcaaaatcttcagacaaagacgaaccgcgcagtcgccaacagcaggcctgcgaaagctgccgtgcatctcgaagggaagattgaacaggctcagcgctggattgacaaccctaccgtggatgatagaggtgtcggccaggccgccattagagggttagttgccgaggggcatagactggcaaacgtcatgatgggcccatatcgtcaggatttactggccaaatgcgatcgcgtggaccagctgactgcgcagctggcagatctcgccgcccggggcgagggagaatcccctcaggcccgggccctggcaagtcagttgcaagacagcctgaaagaccttaaagcaaggatgcaagaggccatgactcaagaggttagcgatgtgttctccgacacaacaacaccgattaagctgctcgccgtcgcggccaccgcaccaccggatgcccccaaccgggaggaagtatttgacgaacgggccgctaactttgagaatcacagcggaaaacttggcgctactgctgaaaaagctgccgcggtgggtaccgccaacaagagcaccgtcgagggcattcaagctagcgtcaagaccgccagagagctcactccccaagttgtgagcgccgcacgcattctgttacgaaacccgggcaatcaggcggcatacgaacatttcgaaactatgaaaaatcagtggattgataatgtggagaagatgactggattggtggacgaagccattgacactaaatccctcttggacgcctctgaagaagccattaaaaaagatctggacaagtgtaaggttgcaatggcgaacatacagccccagatgctggtggcaggcgccacctcaatcgctaggagggccaacaggatactcctggtggcaaagcgggaggtcgagaatagcgaagaccctaaatttcgtgaggccgttaaggccgccagcgacgaattaagcaagacaatctccccaatggtcatggacgctaaggccgtggcgggcaatatttcggaccccgggttgcagaagagttttctggacagcggatatcgaatcctgggggcggttgccaaggtcagagaagctttccagccgcaggagcccgacttccctccacctccccccgacctcgagcaattacggttaacagatgaactggcaccccctaaaccaccccttcctgagggagaggttccacctccccgaccacccccacccgaggagaaggacgaggagtttccagaacaaaaggccggtgaagttattaaccagcctatgatgatggctgctcgccagctgcacgacgaggcacggaagtggagttcgaaacccgggatccccgctgctgaagtcggtatcggcgtcgtcgcagaggctgatgccgcggacgcagcagggtttcccgtgcctcccgacatggaagatgactacgaaccagaactcctgctgatgccatcaaatcaaccggtgaatcagccaattctggcagccgcacagtccttgcaccgagaagctacaaagtggtcaagcaaaggaaacgacataatcgccgctgctaagcggatggccttactgatggctgagatgtcccgtctcgtaaggggcggatcagtacccaggacttctcccagaccgcagatgaggtag

SEQ ID NO: 177332 - DNA, 2784 bp, Artificial Sequence
  derived and/or modified sequence
atgctgcagagcgacccctacagcgtgcctgcccgggactacctgattgatggcagccggggcatcctgagcggcaccagtgacctgctgctgacctttgatgaggccgaggtgaggaagatcatccgggtgtgcaagggcatcctggagtacctgactgtggccgaggtggtggagaccatggaggacctggtgacctacaccaagaacctgggccctggcatgaccaagatggccaagatgattgatgagcggcagcaggagctgacccaccaggagcaccgggtgatgctggtgaacagcatgaacacagtgaaggagctgctgcctgtgctgatcagcgccatgaagatctttgtgaccaccaagaacagcaagaaccagggcatcgaggaggccctgaagaacagaaacttcaccgtggagaagatgtctgctgagatcaatgagatcatccgggtgctgcagctgacctcctgggatgaagatgcctgggccagcaaggacacagaggccatgaagagggccctggccagcattgacagcaagctgaaccaggccaagggctggctgcgggaccccagcgccagccctggagatgctggggagcaggccatccggcagatcctggatgaagctgggaaggtgggggagctgtgtgccggcaaggagcggcgggagatcctgggcacctgcaagatgctgggccagatgacagaccaggtggccgacctgcgggcccggggccagggcagcagccctgtggccatgcagaaggcccagcaggtgtcccagggcctggatgtgctgacagccaaggtggagaatgctgccaggaagctggaggccatgaccaacagcaagcagagcatcgccaagaagattgatgctgcccagaactggctggccgaccccaacggcggccctgagggggaggagcagatccggggggccctggccgaggccaggaagattgctgagctgtgtgatgaccccaaggagagagatgacatcctgcggagcctgggggagatcagcgccctgaccagcaagctggccgacctgcggcggcagggcaagggggacagccctgaggcccgggccctggccaagcaggtggccacagccctgcagaacctgcagaccaagaccaacagagctgtggccaacagcaggcctgccaaggctgctgtgcacctggagggcaagattgagcaggcccagcgctggattgacaaccccaccgtggatgaccggggcgtgggccaggccgccatccggggcctggtggccgagggccaccggctggccaacgtgatgatgggcccctaccggcaggacctgctggccaagtgtgacagagtggaccagctgacagcccagctggccgacctggccgcccggggggagggggagagcccccaggcccgggccctggccagccagctgcaggacagcctgaaggacctgaaggccaggatgcaggaggccatgacccaggaggtgtctgatgtgttcagtgacaccaccacccccatcaagctgctggccgtggccgccacagcccccccagatgcccccaaccgggaggaggtgtttgatgaaagagctgccaactttgagaaccacagcggcaagctgggcgccacagctgagaaggctgctgctgtgggcacagccaacaagagcacagtggagggcatccaggcctctgtgaagacagcccgggagctgaccccccaggtggtgtctgctgcccgcatcctgctgagaaatcctggcaaccaggccgcctatgagcactttgagaccatgaagaaccagtggattgacaacgtggagaagatgacaggcctggtggatgaggccatcgacaccaagagcctgctggatgccagcgaggaggccatcaagaaggacctggacaagtgcaaggtggccatggccaacatccagccccagatgctggtggccggggccaccagcatcgcccggcgggccaaccgcatcctgctggtggccaagcgggaggtggagaacagcgaggaccccaagttccgggaggccgtgaaggccgccagtgatgagctgagcaagaccatcagccccatggtgatggatgccaaggctgtggccggcaacatcagtgaccccggcctgcagaagagcttcctggacagcggctaccgcatcctgggcgctgtggccaaggtgcgggaggccttccagccccaggagccagacttccccccacctcctccagacctggagcagctgcggctgacagatgagctggccccacccaagccacccctgcctgagggggaggtgcccccaccccggcccccacctcctgaggagaaggatgaggagttccctgagcagaaggccggggaggtgatcaaccagcccatgatgatggccgcccggcagctgcatgatgaggccaggaagtggagcagcaagccaggcatcccagctgctgaggtgggcatcggcgtggtggccgaggctgatgctgctgatgctgctggcttccctgtgcccccagacatggaggatgattatgagcctgagctgctgctgatgcccagcaaccagcctgtgaaccagcccatcctggccgccgcccagagcctgcaccgggaggccaccaagtggagcagcaaaggaaatgacatcatcgctgctgccaagaggatggccctgctgatggccgagatgagccggctggtgcggggcggctctgtgcccaggaccagcccccggccccagatgaggtag

SEQ ID NO: 177333 - DNA, 2784 bp, Artificial Sequence
  derived and/or modified sequence
atgctgcagagcgacccctacagcgtgcccgcccgggactacctgattgacggtagcagaggcattctgtccggtacctcggatctgcttctaacttttgacgaagccgaagttcgcaaaataattagagtatgcaagggtatcttagaatacctgacagtggcggaagtggtcgagacaatggaggaccttgtcacttataccaagaatttgggaccgggaatgacaaagatggcaaagatgatagacgaacgacagcaggaactgacccaccaagagcacagagtcatgctcgtgaactccatgaataccgtgaaggagctgttgccagtactgattagcgctatgaaaatcttcgtaaccactaagaattctaagaatcaaggcatcgaagaagccctgaagaatcgaaacttcacggtggaaaagatgtcagccgagatcaatgagatcatccgcgtgctgcagttgacatcatgggacgaggatgcgtgggcatccaaagatacagaagcaatgaaacgggcccttgcctctatagactccaagctaaaccaggctaaaggctggttgcgcgatccatcagccagccctggggacgccggggagcaggccatcagacagatactcgatgaagccggtaaagtgggggaactatgcgccggaaaggaacgcagagagattttagggacctgcaaaatgctggggcagatgacagatcaggtcgcggacctgcgcgcgcgcggccagggatcgagtccagtcgcaatgcaaaaggcgcagcaagtgtctcagggcttagatgttctaaccgccaaagtggagaacgcggccagaaaactggaagctatgaccaacagtaaacagtcaatagctaaaaagattgacgccgcccagaactggctagcagatcccaatggaggacctgaaggcgaggaacaaatcagaggggcattggccgaggcacgaaagatagcggaactgtgtgacgaccccaaagagcgcgatgatattctgagatcactgggcgaaatttctgcccttacaagcaagctcgctgatctccggcgccagggtaaaggagactcgcccgaggccagggctctcgcaaagcaggtggccacagctttgcaaaatctccagaccaaaacaaaccgggccgttgctaattctcggcccgcaaaggccgctgtacacttagaaggaaaaattgagcaggcccagcggtggatcgataacccgacagtggacgacagaggtgtgggtcaagccgccattcggggattggtagctgaaggccatcggctggccaatgttatgatgggcccctataggcaggacctgctagcaaaatgtgatagagtggaccagcttaccgcccagttagcagacctcgccgctagaggcgagggtgaaagccctcaggcccgtgctttggcaagccagctgcaggactccttaaaggatctgaaggcaagaatgcaggaggccatgacccaggaggtttccgatgttttttctgatacgacaacccctattaaactcctcgcggtagctgcaactgccccaccggacgcacctaatcgtgaagaggtgtttgacgaaagagctgcaaatttcgaaaaccattccggcaagctgggtgccaccgcggagaaggctgccgccgtgggtacggccaacaagtcaactgtcgaaggcattcaggcctccgtgaaaactgccagggaactgacaccacaggttgtgagcgcagctcggatcctgctgcggaaccccggaaatcaggccgcatatgagcacttcgagacaatgaagaaccaatggatcgacaatgtggagaaaatgaccggattggtagacgaggctattgatacaaagtcattattagacgcttcagaggaagcaatcaaaaaagacctggataaatgtaaagtggccatggccaacattcaaccacagatgctggtggccggcgcgaccagcatcgctcggagagctaacagaatccttcttgtggccaagagagaagtcgagaattccgaagaccctaaattccgcgaggctgtaaaggcagcaagcgatgagctgtcgaagaccatctccccaatggtgatggatgccaaggctgtcgccggaaacatcagcgaccccgggctgcagaagtcatttctcgatagtggatacagaattctcggagccgtggcaaaggttcgagaggccttccagccccaggaacccgactttccgccgcccccccctgatctcgaacagctgcgtctcaccgatgagttagccccccctaaaccccccctgccagaaggggaagtgccaccgccacgtccccccccacccgaagagaaggatgaagagttcccagaacaaaaggccggcgaagtgataaatcaacccatgatgatggcagcaagacagctccacgacgaggccagaaaatggtctagtaagcctggcattcctgcagctgaagtgggcataggagtagtagccgaagcggatgcagcagacgccgctggatttccagtgccgcccgatatggaagacgactatgagccggagcttctgctgatgccttcaaatcagcctgtcaaccagccaattctggcagctgcgcagagcttgcacagagaggcaactaaatggagcagtaagggaaacgacattatcgccgcagctaagcgcatggcactgctgatggcggaaatgtcaaggctggtgaggggcggaagcgtgccaagaacatcacctagaccccagatgagatag

SEQ ID NO: 177334 - DNA, 2784 bp, Artificial Sequence
  derived and/or modified sequence
atgctccaaagcgacccgtacagcgtgccggctagagactatctgatagacggcagccgcggaattctctcaggcacaagtgacttacttctgaccttcgatgaagctgaagttcgcaagataatcagggtgtgtaaggggatcttggagtacttaactgtggcagaggtggtcgagacgatggaagaccttgtaacgtacacaaagaacctaggacccggaatgactaagatggcgaagatgatcgatgagcggcagcaagaattaacccatcaggagcaccgcgtgatgcttgtgaatagtatgaacaccgttaaggaactgcttccagttctgatcagtgccatgaaaatcttcgtcaccacaaagaactctaaaaatcagggcattgaggaggccttgaaaaaccgaaattttactgtagaaaaaatgagcgctgagattaacgagatcattagagtactgcagcttacctcctgggacgaggatgcttgggcatcaaaagacactgaagccatgaaacgtgccctggcttccatcgatagtaaacttaaccaggccaagggctggttgagagatccatccgcctctcctggagacgctggggaacaggccatcagacagatcctggacgaggccggtaaagtaggcgaattgtgtgccggaaaagagaggcgcgaaatactgggcacatgcaaaatgctcggccagatgactgaccaagttgctgatcttagggcccgtggacagggcagcagtcctgtggccatgcagaaggctcagcaagtttctcagggtcttgacgtgcttacagccaaggtggagaatgctgccagaaagctggaggctatgacaaattccaagcagagcatagcaaagaaaattgatgcagcacaaaattggctggcagaccccaacggaggcccagagggtgaggaacagataagaggcgcactagctgaggcgagaaaaatcgcggaactgtgtgatgatcccaaggagcgggacgatattcttagatcactgggtgagatctcagctctcacttctaagcttgcagacttgaggcgccagggtaagggagattctcctgaggctcgcgcactggcaaaacaggttgcgaccgccctgcagaatctgcagaccaaaacaaaccgagcagttgccaacagtaggccagcgaaagcagctgtccatctcgaagggaaaattgaacaggcccaaagatggatcgacaaccccacggtggatgaccggggtgtcggacaagcggcaatcaggggcttggttgccgagggacatcggctggcaaatgtgatgatgggaccttatcggcaggacttactggccaaatgtgatcgggttgaccagttaactgcacagctcgcagacctggcagcgcgtggcgaaggagaatccccgcaggcacgggctctggccagtcagttgcaggactctctcaaagacctcaaagcccgtatgcaggaagcgatgacccaggaggtttccgatgtgttctcagatacaacaaccccaataaagctactggccgtcgctgccaccgcgccaccagacgcacctaaccgggaagaagtattcgatgaacgcgcagcaaactttgagaaccatagtggcaagcttggagccacggctgagaaagcagccgcagtcggcacagccaacaagagcacggtggagggcattcaggcttccgtgaaaacagctcgcgaactaacgccccaggtggtgtcagctgccagaatactgcttcggaacccaggaaaccaggctgcctacgaacacttcgaaaccatgaagaatcagtggattgacaacgtcgaaaaaatgacaggcctggtggatgaagctatagatacgaaaagtctactcgacgctagtgaagaggcgattaaaaaggatctggataaatgtaaggtggctatggctaacatccagccccagatgctggttgcaggcgctactagtatagccagacgagcaaacagaattctcctggttgctaaaagggaggtcgagaactccgaagacccgaaattccgagaggccgttaaagcggcaagtgacgaactgtctaaaactatctccccgatggttatggatgctaaggctgtggccggtaatatctccgacccaggtctgcagaaatccttcttggattcggggtataggatccttggggctgttgctaaggtccgagaagccttccaaccccaggaacccgattttccgcctcctccacccgacctcgaacagctcagactgacggatgaattagctccccctaagccaccgctcccggagggggaggtgccaccccctagaccaccgccaccagaggagaaagacgaggagtttcctgaacagaaggctggtgaggtgattaaccagcctatgatgatggcagcacgacagctgcatgacgaggcaaggaagtggagttcaaaacccggaatacccgcagcggaagtgggcattggtgtggtcgccgaagccgacgccgctgacgcggctgggtttcccgtaccacccgatatggaggacgattacgagcccgaattgcttctaatgcctagcaaccagcctgtgaaccaaccgatcctcgccgcagcccaatccctccaccgtgaagctaccaaatggtccagcaaagggaacgatatcattgccgcagcgaagcgtatggcccttctgatggccgagatgtcccgcctggtgcgcggaggctccgtcccaaggacctctcctcgtccccagatgagatag

SEQ ID NO: 177335 - DNA, 5482 bp, Artificial Sequence
  derived and/or modified sequence
gtagtcgctgcacagtctgtctcttcgccggttcccggccccgtggatcctacttctctgtcgcccgcggttcgccgccccgctcgccgccgcgatgccagtgtttcatacgcgcacgatcgagagcatcctggagccggtggcacagcagatctcccacctggtgataatgcacgaggagggcgaggtggacggcaaagccattcctgacctcaccgcgcccgtggccgccgtgcaggcggccgtcagcaacctcgtccgggttggaaaagagactgttcaaaccactgaggatcagattttgaagagagatatgccaccagcatttattaaggttgagaatgcttgcaccaagcttgtccaggcagctcagatgcttcagtcagacccttactcagtgcctgctcgagattatctaattgatgggtcaaggggcatcctctctggaacatcagacctgctccttaccttcgatgaggctgaggtccgtaaaattattagagtttgcaaaggaattttggaatatcttacagtggcagaggtggtggagactatggaagatttggtcacttacacaaagaatcttgggccaggaatgactaagatggccaagatgattgacgagagacagcaggagctcactcaccaggagcaccgagtgatgttggtgaactcgatgaacaccgtgaaagagttgctgccagttctcatttcagctatgaagatttttgtaacaactaaaaactcaaaaaaccaaggcatagaggaagctttaaaaaatcgcaattttactgtagaaaaaatgagtgctgaaattaatgagataattcgtgtgttacaactcacctcttgggatgaagatgcctgggccagcaaggacactgaagccatgaagagagcattggcctccatagactccaaactgaaccaggccaaaggttggctccgtgaccctagtgcctccccaggggatgctggtgagcaggccatcagacagatcttagatgaagctggaaaagttggtgaactctgtgcaggcaaagaacgcagggagattctgggaacttgcaaaatgctagggcagatgactgatcaagtggctgacctccgtgccagaggacaaggatcctcaccggtggccatgcagaaagctcagcaggtatctcagggtctggatgtgctcacagcaaaagtggaaaatgcagctcgcaagctggaagccatgaccaactcaaagcagagcattgcaaagaagatcgatgctgctcagaactggcttgcagatccaaatggtggaccggaaggagaagagcagattcgaggtgctttggctgaagctcggaaaatagcagaattatgtgatgatcctaaagaaagagatgacattctacgttcccttggggaaatatctgctctgacttctaaattagcagatctacgaagacaggggaaaggagattctccagaggctcgagccttggccaaacaggtggccacggccctgcagaacctgcagaccaaaaccaaccgggctgtggccaacagcagaccggccaaagcagctgtacaccttgagggcaagattgagcaagcacagcggtggattgataatcccacagtggatgaccgtggagtcggtcaggctgccatccgggggcttgtggccgaagggcatcgtctggctaatgttatgatggggccttatcggcaagatcttctcgccaagtgtgaccgagtggaccagctgacagcccagctggctgacctggctgccagaggggaaggggagagtcctcaggcacgagcacttgcatctcagctccaagactccttaaaggatctaaaagctcggatgcaggaggccatgactcaggaagtgtcagatgttttcagcgataccacaactcccatcaagctgttggcagtggcagccacggcgcctcctgatgcgcctaacagggaagaggtatttgatgagagggcagctaactttgaaaaccattcaggaaagcttggtgctacggccgagaaggcggctgcggttggtactgctaataaatcaacagtggaaggcattcaggcctcagtgaagacggcccgagaactcacaccccaggtggtctcggctgctcgtatcttacttaggaaccctggaaatcaagctgcttatgaacattttgagaccatgaagaaccagtggatcgataatgttgaaaaaatgacagggctggtggacgaagccattgataccaaatctctgttggatgcttcagaagaagcaattaaaaaagacctggacaagtgcaaggtagctatggccaacattcagcctcagatgctggttgctggggcaaccagtattgctcgtcgggccaaccggatcctgctggtggctaagagggaggtggagaattccgaggatcccaagttccgtgaggctgtgaaagctgcctctgatgaattgagcaaaaccatctccccgatggtgatggatgcaaaagctgtggctggaaacatttccgaccctggactgcaaaagagcttcctggactcaggatatcggatcctgggagctgtggccaaggtcagagaagccttccaacctcaggagcctgacttcccgccgcctccaccagaccttgaacaactccgactaacagatgagcttgctcctcccaaaccacctctgcctgaaggtgaggtccctccacctaggcctccaccaccagaggaaaaggatgaagagttccctgagcagaaggccggggaggtgattaaccagccaatgatgatggctgccagacagctccatgatgaagctcgcaaatggtccagcaagccgggcatcccagccgctgaggtgggtataggtgttgtagctgaggcagatgcggccgatgctgctggcttccctgtcccccctgacatggaagacgattacgaacctgagctgctgttaatgccatccaatcagccggtcaaccagcccattctggccgcggctcagtccttgcatcgggaagctaccaagtggtctagtaagggcaatgacatcattgcagcagccaagcgcatggctctgctgatggctgagatgtctcggctggtaagagggggcagtggtaccaagcgggcactcattcagtgtgccaaggacatcgccaaggcctcagatgaggtgactcggttggccaaggaggttgccaagcagtgcacagataaacggattagaaccaacctcttacaggtatgtgagcgaatcccaaccataagcacccagctcaaaatcctgtccacagtgaaggccaccatgctgggccggaccaacatcagtgatgaggagtctgagcaggccacagagatgctggttcacaatgcccagaacctcatgcagtctgtgaaggagactgtgcgggaagctgaagctgcttcaatcaaaattcgaacagatgctggatttacactgcgctgggttagaaagactccctggtaccagtaggcacctggctgagcctggctggcacagaaacctctactaaaaagaaggaaaatgatctgagtcccaggagctgcccagagttgctgggagctgaaaaatcacatcctggcctggcacatcagaaaggaatgggggcctcttcaaattagaagacatttatactcttttttcatggacactttgaaatgtgtttctgtataaagcctgtattctcaaacacagttacacttgtgcaccctctatcccaataggcagactgggtttctagcccatggacttcacataagctcagaatccaagtgaacactagccagacactctgctctgcccttgttccctaggggacacttccctctgtttctctttccttggctcccattcactcttccagaatcccaagacccagggcccaggcaaatcagttactaagaagaaaattgctgtgcctcccaaaattgttttgagctttccatgttgctgccaaccataccttccttccctgggctgtgctacctgggtccttttcagaagtgagctttgctgctacaggggaaggtggcctctgtggagccccagcatatgggggcctggattcatttcctgcccttcctcagtttaatccttctagtttcccacaatataaaactgtacttcactgtcaggaagaaatcacagaatcatatgattctgcttttaccatgcccctgagcaatgtctgtgctagggaaacttcccgtcccatatcctgcctcagcccgccaaggtagccatcccatgaacacactgtgtcctggtgctctctgccactggaagggcagagtagccagggtgtggccctgccatcttcccagcagggccactcccggcactccatgcttagtcactgcctgcagaggtctgtgctgaggccttatcattcattcttagctcttaattgttcattttgagctgaaatgctgcattttaattttaaccaaaacatgtctcctatcctggtttttgtagccttcctccacatcctttctaaacaagattttaaagacatgtaggtgtttgttcatctgtaactctaaaagatcctttttaaattcagtcctaagaaagaggagtgcttgtcccctaagagtgtttaatggcaaggcagccctgtctgaaggacacttcctgcctaagggagagtggtatttgcagactagaattctagtgctgctgaagatgaatcaatgggaaatactactcctgtaattcctacctccctgcaaccaactacaaccaagctctctgcatctactcccaagtatggggttcaagagagtaatgggtttcatatttcttatcaccacagtaagttcctactaggcaaaatgagagggcagtgtttcctttttggtacttattactgctaagtatttcccagcacatgaaaccttattttttcccaaagccagaaccagatgagtaaaggagtaagaaccttgcctgaacatccttccttcccacccatcgctgtgtgttagttcccaacatcgaatgtgtacaacttaagttggtcctttacactcaggctttcactatttcctttataatgaggatgattattttcaaggccctcagcatatttgtatagttgcttgcctgatataaatgcaatattaatgcctttaaagtatgaatctatgccaaagatcacttgttgttttactaaagaaagattacttagaggaaataagaaaaatcatgtttgctctcccggttcttccagtggtttgagacactggtttacactttatgccggatgtgcttttctccaatatcagtgctcgagacacagtgaagcaaattaaaaaaaaaaaaaaaaaaaatccctgaatgatgattagagacatcaccgctaaaaaactacatttataagctaggatttgttatatgcaaatattttctgcctcttcttttgttctgtttaaaacaataaaatgcatttgt

SEQ ID NO: 177336 - DNA, 3144 bp, Artificial Sequence
  derived and/or modified sequence
agtctgtctcttcgccggttcccggccccgtggatcctacttctctgtcgcccgcggttcgccgccccgctcgccgccgcgatgccagtgtttcatacgcgcacgatcgagagcatcctggagccggtggcacagcagatctcccacctggtgataatgcacgaggagggcgaggtggacggcaaagccattcctgacctcaccgcgcccgtggccgccgtgcaggcggccgtcagcaacctcgtccgggttggaaaagagactgttcaaaccactgaggatcagattttgaagagagatatgccaccagcatttattaaggttgagaatgcttgcaccaagcttgtccaggcagctcagatgcttcagtcagacccttactcagtgcctgctcgagattatctaattgatgggtcaaggggcatcctctctggaacatcagacctgctccttaccttcgatgaggctgaggtccgtaaaattattagagtttgcaaaggaattttggaatatcttacagtggcagaggtggtggagactatggaagatttggtcacttacacaaagaatcttgggccaggaatgactaagatggccaagatgattgacgagagacagcaggagctcactcaccaggagcaccgagtgatgttggtgaactcgatgaacaccgtgaaagagttgctgccagttctcatttcagctatgaagatttttgtaacaactaaaaactcaaaaaaccaaggcatagaggaagctttaaaaaatcgcaattttactgtagaaaaaatgagtgctgaaattaatgagataattcgtgtgttacaactcacctcttgggatgaagatgcctgggccagcaaggacactgaagccatgaagagagcattggcctccatagactccaaactgaaccaggccaaaggttggctccgtgaccctagtgcctccccaggggatgctggtgagcaggccatcagacagatcttagatgaagctggaaaagttggtgaactctgtgcaggcaaagaacgcagggagattctgggaacttgcaaaatgctagggcagatgactgatcaagtggctgacctccgtgccagaggacaaggatcctcaccggtggccatgcagaaagctcagcaggtatctcagggtctggatgtgctcacagcaaaagtggaaaatgcagctcgcaagctggaagccatgaccaactcaaagcagagcattgcaaagaagatcgatgctgctcagaactggcttgcagatccaaatggtggaccggaaggagaagagcagattcgaggtgctttggctgaagctcggaaaatagcagaattatgtgatgatcctaaagaaagagatgacattctacgttcccttggggaaatatctgctctgacttctaaattagcagatctacgaagacaggggaaaggagattctccagaggctcgagccttggccaaacaggtggccacggccctgcagaacctgcagaccaaaaccaaccgggctgtggccaacagcagaccggccaaagcagctgtacaccttgagggcaagattgagcaagcacagcggtggattgataatcccacagtggatgaccgtggagtcggtcaggctgccatccgggggcttgtggccgaagggcatcgtctggctaatgttatgatggggccttatcggcaagatcttctcgccaagtgtgaccgagtggaccagctgacagcccagctggctgacctggctgccagaggggaaggggagagtcctcaggcacgagcacttgcatctcagctccaagactccttaaaggatctaaaagctcggatgcaggaggccatgactcaggaagtgtcagatgttttcagcgataccacaactcccatcaagctgttggcagtggcagccacggcgcctcctgatgcgcctaacagggaagaggtatttgatgagagggcagctaactttgaaaaccattcaggaaagcttggtgctacggccgagaaggcggctgcggttggtactgctaataaatcaacagtggaaggcattcaggcctcagtgaagacggcccgagaactcacaccccaggtggtctcggctgctcgtatcttacttaggaaccctggaaatcaagctgcttatgaacattttgagaccatgaagaaccagtggatcgataatgttgaaaaaatgacagggctggtggacgaagccattgataccaaatctctgttggatgcttcagaagaagcaattaaaaaagacctggacaagtgcaaggtagctatggccaacattcagcctcagatgctggttgctggggcaaccagtattgctcgtcgggccaaccggatcctgctggtggctaagagggaggtggagaattccgaggatcccaagttccgtgaggctgtgaaagctgcctctgatgaattgagcaaaaccatctccccgatggtgatggatgcaaaagctgtggctggaaacatttccgaccctggactgcaaaagagcttcctggactcaggatatcggatcctgggagctgtggccaaggtcagagaagccttccaacctcaggagcctgacttcccgccgcctccaccagaccttgaacaactccgactaacagatgagcttgctcctcccaaaccacctctgcctgaaggtgaggtccctccacctaggcctccaccaccagaggaaaaggatgaagagttccctgagcagaaggccggggaggtgattaaccagccaatgatgatggctgccagacagctccatgatgaagctcgcaaatggtccagcaagccgggcatcccagccgctgaggtgggtataggtgttgtagctgaggcagatgcggccgatgctgctggcttccctgtcccccctgacatggaagacgattacgaacctgagctgctgttaatgccatccaatcagccggtcaaccagcccattctggccgcggctcagtccttgcatcgggaagctaccaagtggtctagtaagggcaatgacatcattgcagcagccaagcgcatggctctgctgatggctgagatgtctcggctggtaagagggggcagtgtgccaaggacatcgccaaggcctcagatgaggtga

SEQ ID NO: 177337 - DNA, 3405 bp, Artificial Sequence
  derived and/or modified sequence
atgcccgtgttccacaccagaaccatcgagagcatcctggagcccgtggcccagcagatcagccacctggtgatcatgcacgaggagggcgaggtggacggcaaggccatccccgacctgaccgcccccgtggccgccgtgcaggccgccgtgagcaacctggtgagagtgggcaaggagaccgtgcagaccaccgaggaccagatcctgaagagagacatgccccccgccttcatcaaggtggagaacgcctgcaccaagctggtgcaggccgcccagatgctgcagagcgacccctacagcgtgcccgccagagactacctgatcgacggcagcagaggcatcctgagcggcaccagcgacctgctgctgaccttcgacgaggccgaggtgagaaagatcatcagagtgtgcaagggcatcctggagtacctgaccgtggccgaggtggtggagaccatggaggacctggtgacctacaccaagaacctgggccccggcatgaccaagatggccaagatgatcgacgagagacagcaggagctgacccaccaggagcacagagtgatgctggtgaacagcatgaacaccgtgaaggagctgctgcccgtgctgatcagcgccatgaagatcttcgtgaccaccaagaacagcaagaaccagggcatcgaggaggccctgaagaacagaaacttcaccgtggagaagatgagcgccgagatcaacgagatcatcagagtgctgcagctgaccagctgggacgaggacgcctgggccagcaaggacaccgaggccatgaagagagccctggccagcatcgacagcaagctgaaccaggccaagggctggctgagagaccccagcgccagccccggcgacgccggcgagcaggccatcagacagatcctggacgaggccggcaaggtgggcgagctgtgcgccggcaaggagagaagagagatcctgggcacctgcaagatgctgggccagatgaccgaccaggtggccgacctgagagccagaggccagggcagcagccccgtggccatgcagaaggcccagcaggtgagccagggcctggacgtgctgaccgccaaggtggagaacgccgccagaaagctggaggccatgaccaacagcaagcagagcatcgccaagaagatcgacgccgcccagaactggctggccgaccccaacggcggccccgagggcgaggagcagatcagaggcgccctggccgaggccagaaagatcgccgagctgtgcgacgaccccaaggagagagacgacatcctgagaagcctgggcgagatcagcgccctgaccagcaagctggccgacctgagaagacagggcaagggcgacagccccgaggccagagccctggccaagcaggtggccaccgccctgcagaacctgcagaccaagaccaacagagccgtggccaacagcagacccgccaaggccgccgtgcacctggagggcaagatcgagcaggcccagagatggatcgacaaccccaccgtggacgacagaggcgtgggccaggccgccatcagaggcctggtggccgagggccacagactggccaacgtgatgatgggcccctacagacaggacctgctggccaagtgcgacagagtggaccagctgaccgcccagctggccgacctggccgccagaggcgagggcgagagcccccaggccagagccctggccagccagctgcaggacagcctgaaggacctgaaggccagaatgcaggaggccatgacccaggaggtgagcgacgtgttcagcgacaccaccacccccatcaagctgctggccgtggccgccaccgccccccccgacgcccccaacagagaggaggtgttcgacgagagagccgccaacttcgagaaccacagcggcaagctgggcgccaccgccgagaaggccgccgccgtgggcaccgccaacaagagcaccgtggagggcatccaggccagcgtgaagaccgccagagagctgaccccccaggtggtgagcgccgccagaatcctgctgagaaaccccggcaaccaggccgcctacgagcacttcgagaccatgaagaaccagtggatcgacaacgtggagaagatgaccggcctggtggacgaggccatcgacaccaagagcctgctggacgccagcgaggaggccatcaagaaggacctggacaagtgcaaggtggccatggccaacatccagccccagatgctggtggccggcgccaccagcatcgccagaagagccaacagaatcctgctggtggccaagagagaggtggagaacagcgaggaccccaagttcagagaggccgtgaaggccgccagcgacgagctgagcaagaccatcagccccatggtgatggacgccaaggccgtggccggcaacatcagcgaccccggcctgcagaagagcttcctggacagcggctacagaatcctgggcgccgtggccaaggtgagagaggccttccagccccaggagcccgacttccccccccccccccccgacctggagcagctgagactgaccgacgagctggccccccccaagccccccctgcccgagggcgaggtgcccccccccagaccccccccccccgaggagaaggacgaggagttccccgagcagaaggccggcgaggtgatcaaccagcccatgatgatggccgccagacagctgcacgacgaggccagaaagtggagcagcaagcccggcatccccgccgccgaggtgggcatcggcgtggtggccgaggccgacgccgccgacgccgccggcttccccgtgccccccgacatggaggacgactacgagcccgagctgctgctgatgcccagcaaccagcccgtgaaccagcccatcctggccgccgcccagagcctgcacagagaggccaccaagtggagcagcaagggcaacgacatcatcgccgccgccaagagaatggccctgctgatggccgagatgagcagactggtgagaggcggcagcggcaccaagagagccctgatccagtgcgccaaggacatcgccaaggccagcgacgaggtgaccagactggccaaggaggtggccaagcagtgcaccgacaagagaatcagaaccaacctgctgcaggtgtgcgagagaatccccaccatcagcacccagctgaagatcctgagcaccgtgaaggccaccatgctgggcagaaccaacatcagcgacgaggagagcgagcaggccaccgagatgctggtgcacaacgcccagaacctgatgcagagcgtgaaggagaccgtgagagaggccgaggccgccagcatcaagatcagaaccgacgccggcttcaccctgagatgggtgagaaagaccccctggtaccagtag

SEQ ID NO: 177338 - DNA, 3405 bp, Artificial Sequence
  derived and/or modified sequence
atgccagtgtttcacacacggaccatcgaatccatcctggaacccgtggcacagcagattagccacctcgtcatcatgcatgaggaaggagaggttgacggaaaggccatccctgatctgactgcgcctgtggccgccgtgcaggccgcggtctctaatctcgttcgggttggcaaggaaaccgtgcagacaactgaggaccaaattctaaaacgggatatgccccctgctttcatcaaagtcgagaatgcctgtacaaagctggtgcaggccgctcagatgttgcagagcgacccgtactccgtgccggcaagggactatcttatcgacggctcccgcgggatcctgagcggcacctctgacctgctcctcactttcgacgaggccgaggtcaggaagattatcagagtgtgcaaaggaattttggaatacctcacagtggctgaagtggtggaaaccatggaggatctggtgacctacaccaaaaatctagggcccggcatgacaaagatggctaaaatgatcgacgagcgacagcaggagcttactcatcaggagcacagggtgatgctcgtcaatagcatgaacaccgtgaaagagctgttgcccgtcctgatttccgctatgaaaatttttgtgactaccaaaaactctaaaaatcagggcattgaagaagcactgaagaatcgaaattttaccgttgaaaagatgagcgcggaaatcaatgagataatcagggttctccaattgacaagctgggatgaagacgcatgggctagtaaagatacggaagccatgaagcgcgctcttgcctctattgatagtaaattaaatcaagctaagggttggctgagggacccatccgcgtcgccaggcgacgcaggggagcaggccatccgtcagattctggatgaagcgggaaaggttggggagctatgcgctggcaaggagcgccgcgagatcctgggcacttgcaagatgctgggtcaaatgaccgatcaagttgccgatttacgagccaggggccagggctcctctcccgtggccatgcagaaggcccaacaagtgtcacaagggctggacgttctcactgctaaggtcgaaaatgccgcccggaagttggaagccatgaccaatagtaagcaatcaattgctaagaaaattgacgcggcccaaaattggttagcggacccaaacgggggccccgaaggggaagaacagatcaggggagccttagctgaagcacgcaagatcgccgagctttgcgacgaccccaaagaacgggatgacatcttacgctcacttggagagatctccgcgctcacaagcaagctggccgatctgagaaggcagggtaaaggagattcccccgaggcccgagcattagcgaagcaggtcgcgactgccctccaaaacttgcagacaaagactaatagggccgtggcaaattccagaccagcgaaggccgcagtgcacctggaggggaaaatcgagcaagcacagaggtggatcgacaatcccacggtggatgaccgtggggtgggccaggcagccatccgcggtctggtagcagaaggtcaccggttagcaaatgtgatgatggggccataccgtcaggatctgttggctaagtgcgatagagtggaccaactgacagcacaacttgccgacctcgccgcccgtggagagggggagtccccacaggcccgcgctctggcaagccagctgcaggacagtctgaaagacctcaaggcccggatgcaagaggcgatgacacaagaagtaagcgatgtatttagtgatactaccacgccaatcaaactactcgcagtggcagcaacagcgccgcctgatgcccccaatcgggaagaagtctttgatgaacgggcggcaaactttgagaaccacagcggaaagctcggtgctaccgcagaaaaggccgctgctgtgggtaccgccaataagtcaactgtcgaagggatacaagcatcagtcaaaacagcccgagaattgaccccacaagtggtgtccgctgctcggattctgctcagaaaccctggtaaccaggcggcctacgagcatttcgaaactatgaagaaccaatggatcgataatgtggagaaaatgaccgggttggtggacgaagctatcgacacaaagagcttgctagacgcttctgaagaagcaatcaaaaaggatctggataaatgcaaagtcgctatggctaacattcagcctcaaatgctggtagctggggcgacttctatcgcaaggcgcgccaaccgcatcctacttgtcgccaaaagagaagtagaaaacagtgaagaccctaagtttcgcgaggctgtcaaagccgccagcgacgagctgtcgaaaaccatctcacctatggtgatggatgccaaagctgttgcgggaaacattagtgatcctggactccagaagtcttttctggattcgggataccgcatcctcggggctgtggcgaaggttcgcgaagcgtttcaacctcaggaacctgatttcccacccccaccgccggatctagagcagttgcgacttaccgacgagctggccccccctaaacctccccttcctgaaggggaagtgcctccaccaagaccgccgcctcccgaagagaaggacgaggagttcccagagcagaaagcaggtgaggttatcaatcagcccatgatgatggctgccagacagctacacgatgaagcacggaagtggagctcaaaacccggcatcccagcagcggaggtgggcattggagtagtggcggaggcagatgcggctgacgccgcaggatttcccgttcccccagacatggaagatgactacgagcctgagctgctgctcatgccatcaaatcagcccgtcaaccagccaatcctggccgctgcacagagccttcatcgggaggctacgaaatggtccagcaagggtaatgatataattgccgccgccaagcgcatggccttactgatggcagagatgtcacgactggtgagaggggggagcggcactaaacgagctttaatacagtgtgctaaggatattgctaaggcgtcggatgaagtgacaaggctcgccaaggaagtagccaagcagtgcaccgataagcgaatccgcacaaacctcctgcaggtgtgcgagcgaatcccaacaatatcaacgcagctgaaaattttgtctacagtgaaggcaacgatgttaggcaggacaaatatctccgacgaagagtctgaacaggcaacagaaatgctggttcacaatgcccagaatcttatgcagagtgtgaaagaaactgtcagggaggccgaggctgcctcgatcaagattcggaccgacgctggctttacgctccggtgggtccggaaaactccttggtatcagtag

SEQ ID NO: 177339 - DNA, 3405 bp, Artificial Sequence
  derived and/or modified sequence
atgcctgtgttccacaccaggaccatcgagagcatcctggagcctgtggcccagcagatcagccacctggtgatcatgcatgaggagggggaggtggatggcaaggccatcccagacctgacagcccctgtggccgctgtgcaggccgctgtgagcaacctggtgcgggtgggcaaggagaccgtgcagaccacagaggaccagatcctgaagagggacatgcccccagccttcatcaaggtggagaatgcctgcaccaagctggtgcaggccgcccagatgctgcagagcgacccctacagcgtgcctgcccgggactacctgattgatggcagccggggcatcctgagcggcaccagtgacctgctgctgacctttgatgaagctgaggtgaggaagatcatccgggtgtgcaagggcatcctggagtacctgactgtggccgaggtggtggagaccatggaggacctggtgacctacaccaagaacctgggccctggcatgaccaagatggccaagatgattgatgagcggcagcaggagctgacccaccaggagcaccgggtgatgctggtgaacagcatgaacacagtgaaggagctgctgcctgtgctgatcagcgccatgaagatctttgtgaccaccaagaacagcaagaaccagggcatcgaggaggccctgaagaacagaaacttcaccgtggagaagatgtctgctgagatcaatgagatcatccgggtgctgcagctgacctcctgggatgaagatgcctgggccagcaaggacacagaggccatgaagagggccctggccagcattgacagcaagctgaaccaggccaagggctggctgcgggaccccagcgccagccctggagatgctggggagcaggccatccggcagatcctggatgaggccggcaaggtgggggagctgtgtgccggcaaggagcggcgggagatcctgggcacctgcaagatgctgggccagatgacagaccaggtggccgacctgcgggcccggggccagggcagcagccctgtggccatgcagaaggcccagcaggtgtcccagggcctggatgtgctgacagccaaggtggagaatgctgccaggaagctggaggccatgaccaacagcaagcagagcatcgccaagaagattgatgctgcccagaactggctggccgaccccaatggaggccctgagggggaggagcagatccggggggccctggccgaggccaggaagattgctgagctgtgtgatgaccccaaggagagagatgacatcctgcggagcctgggggagatcagcgccctgaccagcaagctggccgacctgcggcggcagggcaaaggagacagccctgaggcccgggccctggccaagcaggtggccacagccctgcagaacctgcagaccaagaccaacagagctgtggccaacagcaggcctgccaaggctgctgtgcacctggagggcaagattgagcaggcccagcgctggattgacaaccccaccgtggatgacagaggagtgggccaggccgccatccggggcctggtggccgagggccaccggctggccaacgtgatgatgggcccctaccggcaggacctgctggccaagtgtgacagagtggaccagctgacagcccagctggccgacctggccgcccggggggagggggagagcccccaggcccgggccctggccagccagctgcaggacagcctgaaggacctgaaggccaggatgcaggaggccatgacccaggaggtgtctgatgtgttcagtgacaccaccacccccatcaagctgctggccgtggccgccacagcccccccagatgcccccaaccgggaggaggtgtttgatgagcgggccgccaactttgagaaccacagcggcaagctgggcgccacagctgagaaggctgctgctgtgggcacagccaacaagagcacagtggagggcatccaggcctctgtgaagacagcccgggagctgaccccccaggtggtgtctgctgcccgcatcctgctgaggaaccctggcaaccaggccgcctatgagcactttgagaccatgaagaaccagtggattgacaacgtggagaagatgacaggcctggtggatgaggccatcgacaccaagagcctgctggatgccagcgaggaggccatcaagaaggacctggacaagtgcaaggtggccatggccaacatccagccccagatgctggtggccggggccaccagcatcgcccggcgggccaaccgcatcctgctggtggccaagcgggaggtggagaacagcgaggaccccaagttccgggaggccgtgaaggccgccagtgatgagctgagcaagaccatcagccccatggtgatggatgccaaggctgtggccggcaacatcagtgaccccggcctgcagaagagcttcctggacagcggctaccgcatcctgggcgctgtggccaaggtgcgggaggccttccagccccaggagccagacttccccccacctcctccagacctggagcagctgcggctgacagatgagctggccccacccaagccacccctgcctgagggggaggtgcccccacccaggcctcctcctcctgaggagaaggatgaggagttccctgagcagaaggccggggaggtgatcaaccagcccatgatgatggccgcccggcagctgcatgatgaggccaggaagtggagcagcaagccaggcatcccagctgctgaggtgggcattggagtggtggccgaggctgatgctgctgatgctgctggcttccctgtgcccccagacatggaggatgattatgagcctgagctgctgctgatgcccagcaaccagcctgtgaaccagcccatcctggccgccgcccagagcctgcaccgggaggccaccaagtggagcagcaaaggaaatgacatcatcgccgccgccaagaggatggccctgctgatggccgagatgagccggctggtgcggggcggcagcggcaccaagagggccctgatccagtgtgccaaggacatcgccaaggccagtgatgaggtgacccggctggccaaggaggtggccaagcagtgcacagacaagaggatccgcaccaacctgctgcaggtgtgtgagcgcatccccaccatcagcacccagctgaagatcctgagcacagtgaaggccaccatgctgggccgcaccaacatcagtgatgaggagagcgagcaggccacagagatgctggtgcacaatgcccagaacctgatgcagagcgtgaaggagaccgtgcgggaggccgaggccgccagcatcaagatcagaacagatgctggcttcaccctgcgctgggtgaggaagaccccctggtaccagtag

SEQ ID NO: 177340 - DNA, 3405 bp, Artificial Sequence
  derived and/or modified sequence
atgcccgtgttccacacccggaccatcgagagcatcctggagcccgtggcccagcagatctcacatctggtgattatgcatgaggaaggagaggtagatggcaaagccatacccgatttgactgcccctgtggccgccgtgcaggcagccgtttctaacctggtccgtgtgggtaaggagacggtgcaaacaacagaagatcagatccttaagcgcgacatgccgcccgcattcattaaggttgagaatgcatgcaccaagttggtgcaggccgcccagatgctgcagagcgatccttacagcgtgcccgccagggattatctcatagacggcagccgcggcatactgagcggcacttcagacctattgttgacttttgatgaggctgaagttaggaagattatccgagtgtgcaagggaattctggaatacctgacagtggccgaggtcgtcgagaccatggaggacctggtgacctatactaagaacctggggcctggcatgacaaagatggctaagatgattgatgagcgccagcaggagctgactcatcaggagcacagagtcatgctggtgaacagcatgaataccgtgaaagaactgttaccggtgttaattagcgccatgaagatctttgtgaccaccaagaatagtaagaatcagggcatcgaagaggccctgaagaacagaaacttcacggttgagaaaatgtctgctgagatcaacgaaatcatcagagttctgcagctgaccagctgggatgaggacgcctgggcttctaaagatacagaggccatgaagcgtgctctggcctctatcgacagcaagctgaaccaggcaaagggctggttacgcgatccaagcgcctctccgggagacgcaggagagcaggcaatccgtcagatattggacgaagccggaaaggtcggcgaactgtgcgcaggaaaggagcgaagggaaatcttgggcacttgcaagatgctgggccagatgacagatcaggtagccgatcttcgggctcggggacagggcagttcacctgtcgcaatgcagaaggctcagcaggtgagccagggacttgacgttctcacagctaaggtggagaacgccgcccggaaacttgaagcgatgaccaatagtaaacagagcatcgcgaaaaagatcgatgcagctcagaactggctcgctgatcccaacggagggccagagggagaggagcagattagaggggctttggccgaggcgagaaagatcgccgagctttgcgacgatcccaaggagagggacgacatcttgcgtagcctaggggagatcagcgccctgacaagtaagttagccgacctgcgtagacaggggaaaggcgactcacctgaggctcgcgctctcgcaaagcaagtggcgacggccctccagaatctgcaaaccaagaccaatagggcagtagccaacagccggcccgctaaagccgctgtgcacctggagggcaagattgaacaggctcaacggtggattgacaaccccacagtggatgatcgtggcgtgggacaagcagccattaggggactggtagcagagggccaccgcctcgcaaatgttatgatggggccttatcgacaagatttgttggcaaagtgcgatagggttgaccaattgaccgcccaactcgccgatctagccgcgagaggagaaggcgagagtccacaggcgcgggctttagctagccagcttcaggactctcttaaagatctcaaggcaagaatgcaggaggcaatgactcaggaagtgtcggatgtgtttagcgacaccaccacacctatcaaactcctggctgttgccgctaccgcgccaccagatgccccaaaccgggaagaggtgtttgatgaaagggcagccaatttcgaaaatcacagtggcaagttaggggccaccgcggagaaggccgcagcggtgggcacagcgaataagtctactgtcgaaggcattcaggcctccgtcaagaccgctcgggaactgacaccgcaggtagtgtctgcggcccggatcctcttgcgcaatcccggcaatcaggccgcgtatgaacactttgagaccatgaaaaatcaatggatagataatgtggagaagatgacaggtctggtggacgaggccatcgacacgaaatccttactggacgcctccgaagaagctatcaagaaagacctagacaaatgtaaggtggccatggctaacattcaaccgcagatgctggtggccggggccactagcattgcacgacgcgccaatcggatcttactggtggccaagagggaggtggaaaattcagaggaccctaaatttagggaggccgtcaaggcagctagcgacgagctgtctaagaccatttcacccatggtgatggacgcaaaagccgttgcaggaaacatttctgacccgggcttgcagaaaagctttctagactccggctatagaatattaggcgcagttgcgaaggtaagggaggcttttcaaccgcaagaacctgattttcctccccctcctccagatctggagcagttgagactgacagacgagttggcgccccccaagccgccgttacccgagggcgaagtccccccccccaggccccccccacccgaagagaaggatgaggagtttccggaacagaaggcaggggaagtgataaaccagcctatgatgatggcggcaagacagcttcatgatgaggcacgcaagtggtcttcgaaaccaggtattccagccgctgaagtcggcatcggagtagtggccgaagctgacgccgcagacgccgcaggattcccagtgcctcccgacatggaagatgattatgaacctgagctcttgctaatgcctagtaatcagcccgtcaatcagccaattctggccgcggctcagagcctacaccgtgaagctaccaagtggagtagcaaggggaatgacatcattgcggccgccaagagaatggccctgttaatggccgaaatgtctaggctggtgcggggtgggtccggcacgaagcgggcgctgatccagtgcgccaaggacatcgctaaagcctctgacgaggtaactcggctggctaaggaggtcgcgaaacagtgtaccgataaacgcatcagaacaaacctgctccaggtttgcgaaagaataccaaccatttcgacacaattaaaaattctctctacggtgaaggctactatgctcggacgcaccaatataagtgacgaagagagcgagcaagctaccgaaatgttggtgcataacgcacagaacctgatgcaatccgtaaaggagacggtccgggaggccgaagccgcaagcatcaagatacgaaccgacgctgggttcactctgaggtgggtgcggaagaccccttggtaccagtag

SEQ ID NO: 177341 - DNA, 3405 bp, Artificial Sequence
  derived and/or modified sequence
atgcccgtttttcacaccagaacaatcgagtctatactggaaccagtagctcagcagattagccatctcgtgatcatgcacgaagaaggcgaagtggacggcaaggccatccctgacctgaccgcaccggttgctgcagtgcaggccgctgtgagcaacctcgtgcgagtcggcaaggagaccgtgcaaacaacagaagaccaaattcttaaacgcgacatgcccccagccttcattaaggtggagaacgcatgcactaaactggttcaagctgctcaaatgctgcaatctgatccatacagcgtgcccgcacgggactacctcattgacgggtctagaggcatattgagcgggacgtccgatctgctcttaacattcgacgaagcagaggtgagaaagataataagagtttgcaagggaatcctggagtaccttacggttgccgaggtggtggaaaccatggaagacctagtcacatacacaaaaaatttagggcctggaatgacaaaaatggccaaaatgatcgacgagagacagcaggaattgacacaccaggagcatcgagtaatgttggtgaactcgatgaacactgttaaggaattgctccccgtgctgatttctgccatgaagatctttgtgaccaccaaaaactccaagaatcaaggtatcgaagaggctctcaagaatcggaatttcacagttgagaagatgagtgcggaaatcaacgaaatcatccgtgtcctgcagttaactagttgggatgaggacgcatgggcaagtaaggacactgaagcaatgaaaagagcgttggcttcaattgatagtaaacttaaccaggcaaaaggctggcttagggatccgagtgcatctccaggcgacgcaggcgaacaggctatcaggcaaatactggacgaagctggcaaggtcggggagctctgtgcagggaaggagcgcagagaaattcttggcacttgtaaaatgctgggtcaaatgaccgatcaggtggctgacttacgcgcaagaggacagggcagctcccccgttgccatgcagaaggctcagcaagtgagccaagggctggatgttttaaccgccaaggtagagaacgccgctaggaagctagaagctatgacgaacagcaagcagagcatcgctaaaaaaatcgatgccgctcagaattggcttgcggacccgaacggaggaccagagggagaagaacagatcagaggagctctggccgaggcacgaaagattgctgaactgtgcgacgaccccaaagagcgggacgatatattgcggtcactaggggaaatttcagctcttacttctaaattagcggacctgcgcaggcaaggaaaaggggattcaccagaagctagagccctagctaaacaggttgccactgcactacagaacctccagaccaagaccaacagggccgtagctaactccagacccgcaaaggccgctgtgcacttggaaggcaaaatcgagcaggcccaacggtggatagacaatccgaccgtggacgaccgcggagtgggccaggccgcaatacggggactggtggcagaaggccacaggctagcaaacgtgatgatgggtccctatcgacaagatctcctggcaaagtgcgaccgcgttgatcagcttaccgcacaacttgctgatttggccgctaggggggagggtgaaagcccacaagctagagcgttagcctcccagttgcaagattccctcaaagatcttaaagccagaatgcaggaggccatgactcaggaggtgtccgatgtgttctccgacaccaccacccctataaaactgctcgccgtagcggctacagcccctcctgacgcccctaaccgggaggaggtgttcgatgagcgggctgcaaacttcgaaaatcacagtggcaaactgggcgcaacggctgagaaagccgcagccgtcggcacagctaataagtctacggttgagggcatacaggcaagtgtcaagaccgccagagagctcactccacaggtagtttccgctgcacgcatcttactgaggaatccgggtaatcaggctgcctacgaacatttcgagaccatgaagaaccagtggatagataatgtagaaaaaatgactggcctggtcgatgaagcgatcgacaccaaaagtctgctagacgcttccgaggaggccatcaaaaaggatctggataagtgcaaggtcgctatggcaaatatacagccccagatgctggttgcaggggctacatctatcgccagaagagctaacagaatcctcctggttgccaaacgcgaggtcgagaactcagaggatccaaagttccgtgaagctgtcaaggccgcatctgacgagttgtccaagaccatcagcccaatggttatggacgccaaggccgttgccggaaatatctctgaccctggactccagaagagcttcctggactccggttacagaattctgggagccgtggcaaaggtacgtgaggcgttccagcctcaagagcccgacttcccccctccgccacctgatctcgaacagctgcgccttaccgacgaacttgcacctccgaaacccccattgcccgagggagaggttcccccacctcgaccacccccacccgaggaaaaagatgaagagttccctgagcagaaagctggggaagtaattaatcagcccatgatgatggctgcaagacagctgcatgatgaggctcgcaagtggagcagcaagcctgggattccagccgctgaggttggaattggagttgtagcagaggctgacgccgcagacgccgcaggatttccagtccctccggacatggaagatgactatgagccggagctgctgttgatgccctctaatcaaccggtgaatcaacctattctcgctgcggctcaatcactgcatcgggaggctaccaaatggtcttctaagggtaacgatatcattgccgcagctaagcggatggcactgctaatggccgaaatgagccgattggtgcgcggtggcagtggaaccaaacgcgcactcattcagtgtgccaaggacattgcaaaagccagtgatgaggtgacccgcttagccaaggaagtggcgaagcaatgcaccgataagagaattcgcactaatctactgcaagtctgcgaacgaatacctacaattagcacacagcttaaaattctgagcacagttaaagcaactatgctggggaggacaaacatctcagacgaagagtccgagcaggctaccgaaatgctagtgcataatgcccagaacctgatgcagtccgttaaagaaactgtgagagaagccgaagcagcgtctatcaaaattcggacagacgctggcttcacactgcgctgggtcagaaaaaccccatggtaccagtag

SEQ ID NO: 177342 - protein, 690 aa, Artificial Sequence
  derived and/or modified sequence
MAEAEGESLESWLNKATNPSNRQEDWEYIIGFCDQINKELEGPQIAVRLLAHKIQSPQEWEALQALTYLGDRVSEKVKTKVIELLYSWTMALPEEAKIKDAYHMLKRQGIVQSDPPIPVDRTLIPSPPPRPKNPVFDDEEKSKLLAKLLKSKNPDDLQEANKLIKSMVKEDEARIQKVTKRLHTLEEVNNNVRLLSEMLLHYSQEDSSDGDRELMKELFDQCENKRRTLFKLASETEDNDNSLGDILQASDNLSRVINSYKTIIEGQVINGEVATLTLPDSEGNSQCSNQGTLIDLAELDTTNSLSSVLAPAPTPPSSGIPILPPPPQASGPPRSRSSSQAEATLGPSSTSNALSWLDEELLCLGLADPAPNVPPKESAGNSQWHLLQREQSDLDFFSPRPGTAACGASDAPLLQPSAPSSSSSQAPLPPPFPAPVVPASVPAPSAGSSLFSTGVAPALAPKVEPAVPGHHGLALGNSALHHLDALDQLLEEAKVTSGLVKPTTSPLIPTTTPARPLLPFSTGPGSPLFQPLSFQSQGSPPKGPELSLASIHVPLESIKPSSALPVTAYDKNGFRILFHFAKECPPGRPDVLVVVVSMLNTAPLPVKSIVLQAAVPKSMKVKLQPPSGTELSPFSPIQPPAAITQVMLLANPLKEKVRLRYKLTFALGEQLSTEVGEVDQFPPVEQWGNL

SEQ ID NO: 177343 - DNA, 2073 bp, Artificial Sequence
  derived and/or modified sequence
atggcggaagccgaaggcgaaagtttagaatcttggttgaacaaagcgaccaacccgagcaaccgccaggaggactgggagtacatcatcggcttctgtgaccagatcaataaagaattggagggcccacagatagctgtccgactgctcgcacacaagatccagtcaccgcaggagtgggaggctctccaggccttgacatacctcggagatcgggtctccgagaaggtcaagaccaaggtgattgagttgctgtattcctggacaatggcccttccagaagaggctaagataaaggatgcttaccacatgctcaagaggcagggcattgtacagagcgaccccccaattccggtcgatcgtaccctgatcccatcccctcccccacggcctaaaaaccctgtgtttgatgacgaggagaaaagtaagctccttgccaagttattaaaatcaaaaaacccagacgatctgcaagaggccaacaaacttataaaatctatggtaaaggaggacgaggctaggattcagaaggtcaccaagcgactgcatacactggaagaggtgaataacaatgtgagactgctctctgagatgctcctccactactcccaggaggatagctctgacggagaccgagaactgatgaaggaactgtttgaccagtgcgaaaacaaacggcgaaccctttttaagctcgccagcgaaaccgaagacaacgataattccttgggcgacatcctgcaagcgagcgataatctgagcagggttatcaattcttataagactatcatagaaggccaagtcatcaatggcgaagttgccacattgactcttccagattctgaggggaacagtcaatgttccaatcaggggaccctaatagacctcgccgagctcgatacgactaactccctgtcatccgtgctggcacctgcccctacacctccatcctcgggaatccccatcttgccaccacctccccaggctagcgggcctccacggagccgctcctccagtcaggctgaagccactctgggcccttcttctactagtaacgctctgtcttggcttgatgaggagcttctgtgcttgggactagccgatcctgcacccaacgtgcctccaaaagagtcggctggaaattcgcagtggcacttattacagagggaacagagcgacctggacttctttagcccacggcccggcactgctgcgtgtggagcctctgacgcccccctactacagccctctgctcccagctcgagctccagccaggcccccctgcccccaccattccctgcccccgtggtgcctgcctcagtccccgcgccttctgccgggagttccctgtttagcaccggcgtagctcctgccctggcacctaaggtggagcccgcagttcccggacaccatgggctggcgctggggaatagtgcactccaccacctagacgccctggatcagctgctagaagaggcgaaggtgactagcggactcgtgaaacccactaccagtcctctgatcccaaccaccaccccagcacgacccctgctgccattcagcaccggccctggaagccctctgttccaaccactgtccttccagtctcaaggctctccgcccaaagggccggagttgtccctagcgtcaattcatgtgcccctcgaatccatcaaacccagcagcgcccttcccgtgacagcctacgataagaatggcttcaggattcttttccactttgctaaagaatgtcctccgggccgccctgatgtgctcgtggtcgtggtatctatgttaaacacagcccccttaccggtcaagagcatcgtgctgcaggcggccgtaccaaagtccatgaaggtgaaacttcagcctcccagtggtaccgagttgagcccgttttcaccaatccagcctcccgctgcgataacacaggtgatgctcctggcaaacccactgaaggagaaggtgagactgaggtataaactcacatttgcattaggtgaacaattatctactgaggtaggagaggtggatcagttccctccggtggagcaatggggtaacctctag

SEQ ID NO: 177344 - DNA, 2251 bp, Artificial Sequence
  derived and/or modified sequence
aacaattcaggcccttgtcccaagtaggaggacattccccaagcaggcgggtaaagtctcctcctggtcaagtgctaacgataaagccaccaatccttccaaccgccaggaggactgggaatacataattggcttctgtgatcagatcaacaaggagctggaagggccacagatcgccgtccgactgctggcccacaagatccagtccccacaggaatgggaggcgctccaggccctgacgtacctgggggacagggtgtctgagaaagtgaagaccaaggttattgagctgctgtacagctggaccatggccctgccagaagaagcaaagatcaaagacgcctaccacatgctgaagagacagggcatagtgcagtctgacccaccaattcctgtggataggacgctgatcccctctccaccacctcgtcccaaaaaccctgtttttgatgatgaggagaagtccaagcttttagccaagctgctgaaaagcaaaaacccagatgacctgcaggaggccaacaagctcatcaagtccatggtgaaggaagacgaggcacggatccagaaggtgaccaagcgtctgcacacgttagaggaagttaacaacaacgtgagactgctcagtgagatgctgcttcattacagccaggaggactcttcggacggggacagagagctgatgaaggagctgtttgatcagtgtgagaacaagaggcggactttatttaaactcgccagtgagactgaggacaatgataacagtttgggggacatcctgcaagccagtgacaacctctcccgggtcatcaactcttacaaaacaattattgaagggcaggtcatcaatggcgaggtggctaccttaaccctgcctgactcggaaggaaacagtcagtgcagtaaccaaggcacgctcatcgaccttgcggagctggacacgaccaacagtttgtcctccgtgttggccccagcacctactccaccctcctcaggcatcccaatcctccctccaccaccccaggcctcaggacctccacggagccgctcctctagccaggccgaggccaccctggggcccagcagcacaagcaacgccctctcctggctggacgaggagctactctgcttgggcctcgccgacccagcccctaatgttcctcccaaagagtcagctgggaacagccagtggcacctgctccagagggaacagtccgacctggacttcttcagccccaggccggggaccgctgcctgtggcgcctccgatgctcctctgctccagccctcagccccctcctcaagcagctcccaagctccactgccgcctcccttcccagctcctgtggtcccagccagtgttcctgcccccagtgcgggctcctccttgttttctactggagtggccccagccttggccccaaaagttgagcccgcagtccctgggcaccatggcttggcgttgggcaacagcgcgctgcaccacctggatgccctcgatcagcttctagaagaggccaaagtgacctcgggcttggtgaaacccactacctcccctctcatccccaccaccaccccagccaggcccctcctgcccttctccacggggcccggcagcccgctcttccagccactgagtttccagtcccagggcagccccccgaaggggcctgagctctccctggccagcatccacgtgcccctggaatcgatcaagcctagcagtgcccttcctgtgacagcctacgataaaaacggcttccgcatcctcttccactttgccaaggagtgtcccccaggacgacctgacgtgctggtggtggtggtgtccatgctgaacacggctcccttacctgtcaagagcatcgtgctgcaggctgcagtgcccaagtcaatgaaagtgaagttgcagccaccttctgggacagaactctctccatttagccccatccagccacctgcagccatcacccaggtcatgttgctggccaatccactgaagaagcaggtactcagctttctgggaaaagcgtgcctccagccgtggggacaggccatcctactgactacctcttgcttggcatgaaataaactgctatcctccccttggaatctaccgccactctacatcctactgctttggcctccctctcctctcaccagatggcatgtggtgtggcacctgtggctggacacaggaggcctcaggatcacaaatgttacactagacatatgtcctaatgtgctgccc

SEQ ID NO: 177345 - DNA, 3777 bp, Artificial Sequence
  derived and/or modified sequence
ctcgcgagttttgaagccgcggggccgggcggctgcaatatggcggaggcggaaggggaaagcctggagtcctggctcaataaagccaccaatccttccaaccgccaggaggactgggaatacataattggcttctgtgatcagatcaacaaggagctggaagggccacagatcgccgtccgactgctggcccacaagatccagtccccacaggaatgggaggcgctccaggccctgacgtacctgggggacagggtgtctgagaaagtgaagaccaaggttattgagctgctgtacagctggaccatggccctgccagaagaagcaaagatcaaagacgcctaccacatgctgaagagacagggcatagtgcagtctgacccaccaattcctgtggataggacgctgatcccctctccaccacctcgtcccaaaaaccctgtttttgatgatgaggagaagtccaagcttttagccaagctgctgaaaagcaaaaacccagatgacctgcaggaggccaacaagctcatcaagtccatggtgaaggaagacgaggcacggatccagaaggtgaccaagcgtctgcacacgttagaggaagttaacaacaacgtgagactgctcagtgagatgctgcttcattacagccaggaggactcttcggacggggacagagagctgatgaaggagctgtttgatcagtgtgagaacaagaggcggactttatttaaactcgccagtgagactgaggacaatgataacagtttgggggacatcctgcaagccagtgacaacctctcccgggtcatcaactcttacaaaacaattattgaagggcaggtcatcaatggcgaggtggctaccttaaccctgcctgactcggaaggaaacagtcagtgcagtaaccaaggcacgctcatcgaccttgcggagctggacacgaccaacagtttgtcctccgtgttggccccagcacctactccaccctcctcaggcatcccaatcctccctccaccaccccaggcctcaggacctccacggagccgctcctctagccaggccgaggccaccctggggcccagcagcacaagcaacgccctctcctggctggacgaggagctactctgcttgggcctcgccgacccagcccctaatgttcctcccaaagagtcagctgggaacagccagtggcacctgctccagagggaacagtccgacctggacttcttcagccccaggccggggaccgctgcctgtggcgcctccgatgctcctctgctccagccctcagccccctcctcaagcagctcccaagctccactgccgcctcccttcccagctcctgtggtcccagccagtgttcctgcccccagtgcgggctcctccttgttttctactggagtggccccagccttggccccaaaagttgagcccgcagtccctgggcaccatggcttggcgttgggcaacagcgcgctgcaccacctggatgccctcgatcagcttctagaagaggccaaagtgacctcgggcttggtgaaacccactacctcccctctcatccccaccaccaccccagccaggcccctcctgcccttctccacggggcccggcagcccgctcttccagccactgagtttccagtcccagggcagccccccgaaggggcctgagctctccctggccagcatccacgtgcccctggaatcgatcaagcctagcagtgcccttcctgtgacagcctacgataaaaacggcttccgcatcctcttccactttgccaaggagtgtcccccaggacgacctgacgtgctggtggtggtggtgtccatgctgaacacggctcccttacctgtcaagagcatcgtgctgcaggctgcagtgcccaagtcaatgaaagtgaagttgcagccaccttctgggacagaactctctccatttagccccatccagccacctgcagccatcacccaggtcatgttgctggccaatccactgaaggagaaggtgcggcttcggtataagctgaccttcgccctgggggagcagctgagcacagaggtgggcgaggtggaccagttccctcctgtggaacagtgggggaacctatgaccccagaggacgctgtgatctccaccttgaagccaggcaggctgccctgagacgaggagggctctggtcccgtcactctccatgccctgacaacagtgcttgtagctttgatgtggaacaggggccctgggcatttctgctgagaaccaaactgctgctgtgataacctctcctttggcccctaaaaggacctgtttttatctacctgtgtgacttgaagtggccatatgctgtcaggggtgcggagtggcccctgacttcactgctgtcccgggaacatggacccccaggcttggcgtaggtgtttgcttccttctactggcattcactgaagccactggggtgggggtctctaaagagagactgtcatgggtcattccccacaagagccacatcctcacacctgacagatgcacggcccaaggggctgcagccctgttgcaattccatgcttcccccgccaaccagctcctgctgccatccccagggaggtggcccaggaaggtgcctggcccagaataaggaactggcatactgcaaagtccccagccctgcctctggtggacagcatcgtcctggaatggccacggagtgatgagttgtgtgcttgtccctggcagtggcaggctgtgtcctatggacatcttggcaggacatggaatttggcctcatgacaggcccaactagggataggaaggaaaatgaagagagccagtatttccccttctccagaagcaggtactcagctttctgggaaaagcgtgcctccagccgtggggacaggccatcctactgactacctcttgcttggcatgaaataaactgctatcctccccttggaatctaccgccactctacatcctactgctttggcctccctctcctctcaccagatggcatgtggtgtggcacctgtggctggacacaggaggcctcaggatcacaaatgttacactagacatatgtcctaatgtgctgcccagaaacctcaactgttccccagctactgaggggcactgtcagcgagatgttgggtctggaggtgatgagatcgggccacacttgagctgagtcaccagaccctattgcttcaacagtgcttggcccccgccagcttgtcccagccactctagctgctggatgtgatcctgggacatgtactccaagcctccgtcacaaaaaaaaaatcaccagctgccatagacacgggggaagcttgcggagcccaggtgaacaagctcagcaatcggacatctctggggaaaggaaggtggcacagaccatgttccctggttcctccctgccccttgccaggcttccttattccttactatgggaagaggtcatatcccttccctgcccctcgctgtctttagcaagcaggtttcactgcttcattagaagaggacaagtcaaaagtgaatcatttttcactacttaaggaataaatccaagagctttccagagactggctgctgcagccctgggaatgtctgtggaattactatgtggaaatggaactttgtgttatgctctagacattacagttatttgagtgttactcgttactgttgaggtcagtgcttcgtggcaaatggctgtactggatatcccagctctgctgcccttgttttgctgcatgttaaataaaaccattttcactgt

SEQ ID NO: 177346 - DNA, 2073 bp, Artificial Sequence
  derived and/or modified sequence
atggccgaggccgagggggagagcctggagagctggctgaacaaggccaccaaccccagcaaccggcaggaggactgggagtacatcatcggcttctgtgaccagatcaacaaggagctggagggcccccagattgctgtgcggctgctggcccacaagatccagagcccccaggagtgggaggccctgcaggccctgacctacctgggggacagagtgtctgagaaggtgaagaccaaggtgattgagctgctgtacagctggaccatggccctgcctgaggaggccaagatcaaggatgcctaccacatgctgaagaggcagggcatcgtgcagagcgacccccccatccctgtggacaggaccctcatccccagccccccaccccggcccaagaaccctgtgtttgatgatgaggagaagagcaagctgctggccaagctgctgaagagcaagaacccagatgacctgcaggaggccaacaagctgatcaagtccatggtgaaggaggatgaggcccgcatccagaaggtgaccaagaggctgcacaccctggaggaggtgaacaacaacgtgcggctgctgtctgagatgctgctgcactacagccaggaggacagcagtgatggagaccgggagctgatgaaggagctgtttgaccagtgtgagaacaagaggaggaccctcttcaagctggccagcgagacagaagataatgacaacagcctgggggacatcctgcaggccagtgacaacctgagcagggtcatcaacagctacaagaccatcatcgagggccaggtgatcaacggggaggtggccaccctgaccctgcctgattctgagggcaacagccagtgcagcaaccagggcaccctgattgacctggccgagctggacaccaccaacagcctgagctctgtgctggccccagcccccaccccacccagcagcggcatccccatcctgcccccaccaccccaggccagcggcccccccaggagccgcagcagcagccaggccgaggccaccctgggccccagcagcaccagcaatgccctgtcctggctggatgaggagctgctgtgcctgggcctggccgaccctgcccccaacgtgccccccaaggagagcgctggcaacagccagtggcacctgctgcagcgggagcagagcgacctggacttcttcagccccaggcctggaacagctgcctgtggggccagtgatgcccccctgctgcagcccagcgcccccagcagcagcagcagccaggcccccctgcccccacccttccctgcccctgtggtgcctgcctctgtgcctgcccccagcgctggcagcagcctcttcagcactggagtggccccagccctggcccccaaggtggagcctgctgtgcccggccaccacggcctggccctgggcaacagcgccctgcaccacctggatgccctggaccagctgctggaggaggccaaggtgaccagcggcctggtgaagcccaccaccagccccctcatccccaccaccaccccagcccggcccctgctgcccttcagcacaggccctggcagccccctcttccagcccctgtccttccagagccagggcagcccccccaagggccctgagctgagcctggccagcatccacgtgcccctggagagcatcaagcccagcagcgccctgcctgtgacagcctatgacaagaatggcttccgcatcctcttccactttgccaaggaatgtcctcctggccgcccagatgtgctggtggtggtggtgtccatgctgaacacagcccccctgcctgtgaagagcatcgtgctgcaggccgctgtgcccaagtccatgaaggtgaagctgcagcccccatctggaacagagctgagccccttcagccccatccagcccccagctgccatcacccaggtgatgctgctggccaaccccctgaaggagaaggtgcggctgcgctacaagctgacctttgccctgggggagcagctgagcacagaggtgggggaggtggaccagttcccccctgtggagcagtggggcaacctgtag

SEQ ID NO: 177347 - DNA, 2073 bp, Artificial Sequence
  derived and/or modified sequence
atggccgaggccgagggcgagagcctggagagctggctgaacaaggctacaaacccttcaaatcgccaagaggattgggagtacattattggcttctgtgatcagattaacaaagagctagagggtcctcaaatcgcagtgcggctgctagctcataaaattcagagccctcaagagtgggaggctcttcaagccttgacctacctaggggatagggtgtccgagaaagtcaagacaaaggttatcgagctgttgtactcttggaccatggcactcccagaagaagctaagatcaaggacgcgtatcacatgttgaagcggcaaggaatcgtgcagtctgacccgcccattcctgtggatcgaaccctgatcccctccccgcccccccggccgaaaaaccccgtattcgacgacgaggagaaatccaaactgctggctaaactgttgaagtccaaaaatccagacgatctgcaagaggcaaataagctgattaagtctatggtcaaggaggatgaggcgagaatccagaaggtgacaaagcgacttcataccctggaggaagtcaataataatgttagactcctctcggagatgctcctgcattattctcaagaggactcttcagacggtgaccgcgaactgatgaaagagctgttcgatcaatgcgagaataagcgcagaactctttttaagttggcaagcgagactgaagacaacgataattcgctgggggacattctgcaggctagtgataatctcagtagggtgataaactcatacaaaacaatcattgagggacaggtaatcaacggagaggttgccaccttgacactgcccgacagcgagggaaactctcagtgctccaatcaaggaacattaatcgatctcgcagaattagacaccacaaactccctcagttccgtactggccccggctccaactcctccaagcagcggcatcccaatactgccccctcccccacaggcttcagggccgccgagatctcgctctagctctcaagcagaggccaccctgggcccgtcttccacgtctaatgccctctcctggctggatgaggaactcctttgcctgggacttgcagaccctgcacctaatgtgccacccaaggagagcgcaggcaatagccagtggcatctactacagagggaacagagtgacttggattttttttccccccgccctggcacggctgcctgcggggcatccgatgctcctctgctgcagcccagcgcgccttccagctctagctcacaggccccgcttcctcctcctttccccgcccctgtggtacctgcgtctgtgccggccccaagtgctggtagtagcttgttcagtaccggagtggcacccgccttagctcccaaggtggaacctgcagtgcccggccaccacggtctggcacttggaaacagcgctctacaccacctcgatgctttggatcagctgcttgaagaagcaaaggttaccagcggcctagttaaacccaccactagcccgctcatcccaacaaccaccccagccagacccctgcttcccttctccaccggaccgggttctccactgttccagccactcagtttccagtcccagggaagccctcctaagggtccagagttaagtctcgccagcatccatgtcccgctcgagagcatcaagcctagctcggccctgcccgtcacggcatacgataaaaatggatttcggatactctttcatttcgctaaggagtgcccacccggcagacccgatgtgctggttgttgtggtgagcatgctgaacactgcacctctcccagtaaagagcatcgttctgcaggctgctgtaccgaagagtatgaaggtgaaactgcagcctccatccggcacggagctctccccattttctcctatccagcctcctgcagctatcacacaggttatgttgctggccaaccccctcaaggagaaggttagactgagatacaagctgacctttgccctgggcgagcagctgtccacagaagtcggggaggtcgatcagttcccacctgtcgagcagtggggaaacctctag

SEQ ID NO: 177348 - DNA, 2073 bp, Artificial Sequence
  derived and/or modified sequence
atggcagaggctgaaggcgagtctctggagtcatggttgaacaaggctactaatccttcaaaccggcaagaagactgggagtacatcattgggttctgtgaccagataaacaaggagttagagggccctcagatcgccgtcagactactggcccacaagatccagagtccccaagagtgggaagctttgcaggccctgacgtatctgggcgaccgggtcagtgagaaggtgaagaccaaagtaatcgagctgctgtactcttggactatggctcttccagaagaagccaagatcaaagacgcctatcatatgctaaaacggcaggggatcgtgcagagcgaccccccaattccagttgacaggaccctgatccctagcccacctccacgcccaaagaaccctgtgttcgatgatgaagaaaaatcgaagctactggcaaaactgctgaaatcaaaaaatccggatgacctgcaagaggcgaataaactcataaagtctatggtcaaagaagacgaggctaggatacagaaagtaaccaagcgcctccacacactcgaagaggttaacaataacgttagactcctttcagagatgctcctgcattactcacaggaagactcaagtgatggggatagagagctcatgaaagaactcttcgaccagtgcgaaaacaaaagaagaactttatttaaactggcctctgagacagaggacaacgataacagcttgggggatatactccaggctagcgataacctctcacgcgtcatcaattcatataagaccatcatagaaggtcaagtaatcaatggagaagtggccaccctaactctgccagacagcgagggaaattcacaatgtagcaatcaaggcacattgattgaccttgccgagctggataccacaaactcacttagtagcgtgctggcaccagcacctacgcctccctcttccggtatcccaatcctcccacctcctccacaagctagtggtcctccacgcagcagatcgagcagccaagctgaagccacactgggaccctcgtctacctcaaacgcattgagttggctggacgaagaactgctctgtctgggcctcgcggacccagcgccaaatgtcccgccaaaggaatccgctggaaattcccagtggcatttgcttcagagagaacaatcagacctcgattttttcagtcctcgccctggcactgctgcctgtggcgctagtgacgcccctctgctgcagccaagcgcccctagctctagttctagccaagcccctttgccccctccttttccagccccagtggttccagcgagcgtgcctgcaccttctgccggaagcagcctgttttcaaccggagtggctcctgcccttgctccaaaggtggaacccgcagtgccagggcaccatgggctagcccttggtaattctgcgctccaccatcttgacgccctagatcagctgttggaggaagctaaggtaacttctgggctagttaagcccactacctcccccctgatacctacaactactcccgcacgccctctgctgccattttctactggccctgggtctccactgtttcaacctttatctttccagagccagggttctccgccaaagggcccagagctttcactggctagcatccacgtacctctcgaatcgatcaagccaagctctgcacttccggttaccgcatacgacaaaaatggcttccgaatactctttcactttgccaaagagtgtcctcccggacgccctgacgtcctggtcgtggtggtgtccatgttgaacacagctcctctgccagttaaatccatcgtcctgcaggcagccgtgcccaagtccatgaaggtcaaattgcagcccccatcgggcaccgagctcagtcctttctcgccgatccagccaccggcagccatcactcaggtcatgctcctggcaaatcctttaaaggaaaaagtcagactgcgctacaaattaacctttgcccttggcgaacaactctctaccgaggtgggcgaggtggatcagtttcccccagtggagcagtgggggaatctgtag

SEQ ID NO: 177349 - DNA, 2073 bp, Artificial Sequence
  derived and/or modified sequence
atggccgaggccgagggcgagagcctggagagctggctgaacaaggccaccaaccccagcaacagacaggaggactgggagtacatcatcggcttctgcgaccagatcaacaaggagctggagggcccccagatcgccgtgagactgctggcccacaagatccagagcccccaggagtgggaggccctgcaggccctgacctacctgggcgacagagtgagcgagaaggtgaagaccaaggtgatcgagctgctgtacagctggaccatggccctgcccgaggaggccaagatcaaggacgcctaccacatgctgaagagacagggcatcgtgcagagcgacccccccatccccgtggacagaaccctgatccccagccccccccccagacccaagaaccccgtgttcgacgacgaggagaagagcaagctgctggccaagctgctgaagagcaagaaccccgacgacctgcaggaggccaacaagctgatcaagagcatggtgaaggaggacgaggccagaatccagaaggtgaccaagagactgcacaccctggaggaggtgaacaacaacgtgagactgctgagcgagatgctgctgcactacagccaggaggacagcagcgacggcgacagagagctgatgaaggagctgttcgaccagtgcgagaacaagagaagaaccctgttcaagctggccagcgagaccgaggacaacgacaacagcctgggcgacatcctgcaggccagcgacaacctgagcagagtgatcaacagctacaagaccatcatcgagggccaggtgatcaacggcgaggtggccaccctgaccctgcccgacagcgagggcaacagccagtgcagcaaccagggcaccctgatcgacctggccgagctggacaccaccaacagcctgagcagcgtgctggcccccgcccccaccccccccagcagcggcatccccatcctgcccccccccccccaggccagcggcccccccagaagcagaagcagcagccaggccgaggccaccctgggccccagcagcaccagcaacgccctgagctggctggacgaggagctgctgtgcctgggcctggccgaccccgcccccaacgtgccccccaaggagagcgccggcaacagccagtggcacctgctgcagagagagcagagcgacctggacttcttcagccccagacccggcaccgccgcctgcggcgccagcgacgcccccctgctgcagcccagcgcccccagcagcagcagcagccaggcccccctgcccccccccttccccgcccccgtggtgcccgccagcgtgcccgcccccagcgccggcagcagcctgttcagcaccggcgtggcccccgccctggcccccaaggtggagcccgccgtgcccggccaccacggcctggccctgggcaacagcgccctgcaccacctggacgccctggaccagctgctggaggaggccaaggtgaccagcggcctggtgaagcccaccaccagccccctgatccccaccaccacccccgccagacccctgctgcccttcagcaccggccccggcagccccctgttccagcccctgagcttccagagccagggcagcccccccaagggccccgagctgagcctggccagcatccacgtgcccctggagagcatcaagcccagcagcgccctgcccgtgaccgcctacgacaagaacggcttcagaatcctgttccacttcgccaaggagtgcccccccggcagacccgacgtgctggtggtggtggtgagcatgctgaacaccgcccccctgcccgtgaagagcatcgtgctgcaggccgccgtgcccaagagcatgaaggtgaagctgcagccccccagcggcaccgagctgagccccttcagccccatccagccccccgccgccatcacccaggtgatgctgctggccaaccccctgaaggagaaggtgagactgagatacaagctgaccttcgccctgggcgagcagctgagcaccgaggtgggcgaggtggaccagttcccccccgtggagcagtggggcaacctgtag

SEQ ID NO: 177350 - protein, 716 aa, Artificial Sequence
  derived and/or modified sequence
MQSTANYLWHTDDLLGQGATASVYKARNKKSGELVAVKVFNTTSYLRPREVQVREFEVLRKLNHQNIVKLFAVEETGGSRQKVLVMEYCSSGSLLSVLESPENAFGLPEDEFLVVLRCVVAGMNHLRENGIVHRDIKPGNIMRLVGEEGQSIYKLTDFGAARELDDDEKFVSVYGTEEYLHPDMYERAVLRKPQQKAFGVTVDLWSIGVTLYHAATGSLPFIPFGGPRRNKEIMYRITTEKPAGAIAGAQRRENGPLEWSYTLPITCQLSLGLQSQLVPILANILEVEQAKCWGFDQFFAETSDILQRVVVHVFSLSQAVLHHIYIHAHNTIAIFQEAVHKQTSVAPRHQEYLFEGHLCVLEPSVSAQHIAHTTASSPLTLFSTAIPKGLAFRDPALDVPKFVPKVDLQADYNTAKGVLGAGYQALRLARALLDGQELMFRGLHWVMEVLQATCRRTLEVARTSLLYLSSSLGTERFSSVAGTPEIQELKAAAELRSRLRTLAEVLSRCSQNITETQESLSSLNRELVKSRDQVHEDRSIQQIQCCLDKMNFIYKQFKKSRMRPGLGYNEEQIHKLDKVNFSHLAKRLLQVFQEECVQKYQASLVTHGKRMRVVHETRNHLRLVGCSVAACNTEAQGVQESLSKLLEELSHQLLQDRAKGAQASPPPIAPYPSPTRKDLLLHMQELCEGMKLLASDLLDNNRIIERLNRVPAPPDV

SEQ ID NO: 177351 - protein, 631 aa, Artificial Sequence
  derived and/or modified sequence
MEYCSSGSLLSVLESPENAFGLPEDEFLVVLRCVVAGMNHLRENGIVHRDIKPGNIMRLVGEEGQSIYKLTDFGAARELDDDEKFVSVYGTEEYLHPDMYERAVLRKPQQKAFGVTVDLWSIGVTLYHAATGSLPFIPFGGPRRNKEIMYRITTEKPAGAIAGAQRRENGPLEWSYTLPITCQLSLGLQSQLVPILANILEVEQAKCWGFDQFFAETSDILQRVVVHVFSLSQAVLHHIYIHAHNTIAIFQEAVHKQTSVAPRHQEYLFEGHLCVLEPSVSAQHIAHTTASSPLTLFSTAIPKGLAFRDPALDVPKFVPKVDLQADYNTAKGVLGAGYQALRLARALLDGQELMFRGLHWVMEVLQATCRRTLEVARTSLLYLSSSLGTERFSSVAGTPEIQELKAAAELRSRLRTLAEVLSRCSQNITETQESLSSLNRELVKSRDQVHEDRSIQQIQCCLDKMNFIYKQFKKSRMRPGLGYNEEQIHKLDKVNFSHLAKRLLQVFQEECVQKYQASLVTHGKRMRVVHETRNHLRLVGCSVAACNTEAQGVQESLSKLLEELSHQLLQDRAKGAQASPPPIAPYPSPTRKDLLLHMQELCEGMKLLASDLLDNNRIIERLNRVPAPPDV

SEQ ID NO: 177352 - DNA, 2151 bp, Artificial Sequence
  derived and/or modified sequence
atgcagtctactgcaaactatctatggcatactgacgacctgctaggccaaggcgctacagccagcgtgtataaagccaggaataagaaaagcggggagctggtcgccgtcaaggtgttcaacaccacctcttacctgaggcccagagaggtgcaagtgcgcgaattcgaggtcttgagaaaattgaaccaccagaacatcgttaagctgttcgccgttgaagaaaccggcggctcacgccagaaagtgttagtgatggagtattgcagcagcggttctctcctgtccgtgctggaaagtcctgaaaatgccttcgggttgccagaagacgaattcctggtggtccttagatgcgtagtagctggcatgaaccaccttcgcgagaatggcatcgtgcaccgggacattaaaccggggaatatcatgcgcctcgtgggagaggaggggcagtcaatttataaactgactgacttcggtgcggcccgcgagctggatgacgacgagaagttcgtgtcagtgtatggtaccgaggagtacctccacccagatatgtatgagagggccgttctcagaaaaccacagcaaaaggcctttggagtcacagtcgacctttggtcaattggagtgactttatatcatgcagctactggcagcctgcctttcattcccttcgggggcccgaggcgcaataaggagattatgtataggattactacggagaagcctgcaggggccatcgccggcgcgcagaggcgagagaatggtcctttggaatggagttacacgctccccattacctgccagctgtcgcttggcctgcagtcccagctggtgcctatcctcgcaaatattctggaagttgagcaggcaaaatgctggggcttcgaccaattttttgcagaaacaagtgatatcttgcagagagttgtagtccacgttttctctctgtctcaagcagtcttgcaccacatttatatccatgcacacaatactatcgcaatatttcaggaggccgtgcacaaacagacatcagtcgcacctcggcatcaggagtatctgttcgaaggacacctgtgcgtgttagagccttcagtgtccgcacagcatatcgcccacactaccgcgtcctcacccctgacactgtttagcacggcaattccaaaggggctggcctttcgggacccagccctggacgtaccgaagtttgttcctaaagtcgacttacaggcagactataacactgccaaaggagtgctgggcgcaggataccaggcattacggctggctagggctctcttagacggccaggagctaatgtttagaggcctgcattgggtgatggaggtgcttcaggcaacctgcagacggacgttggaggtagccaggacttccctcctttacctgagctcttctctgggcaccgagaggttctccagcgtggcgggtaccccagagatccaggagctgaaagctgctgccgagctgcgctctcgcctgcgcaccctagctgaagttctgagccgctgcagtcaaaatattaccgagacacaggagtcactatctagcttgaatcgcgagctggtaaagtccagggaccaagtacatgaagataggtctattcagcagatccagtgctgtctcgacaagatgaactttatctacaagcagtttaaaaaatcccggatgcggccgggactgggttacaacgaggagcagattcacaaactggataaggtaaactttagccacctcgctaagagactattgcaggtgtttcaagaggaatgtgtgcaaaaataccaggcatctctggtcacgcacggcaagagaatgagagtagtccacgagacgcgcaaccaccttcggttagtgggatgttcagtcgccgcttgcaacactgaggcccagggcgtgcaagaatctttaagtaaactgctcgaagaactgtctcaccagcttctgcaggatagagctaaaggggcgcaggccagcccgccaccgattgccccatatccgtcccccactcgtaaagatctgcttttacacatgcaggaactgtgcgagggaatgaagcttttggcctccgatctgctggataacaacagaattatagagagactgaacagggttcccgcccccccggacgtgtag

SEQ ID NO: 177353 - DNA, 3269 bp, Artificial Sequence
  derived and/or modified sequence
agtgcgagagagctgagagccaggactcagtgctgagcttggtgtcccaccgccacaaggaggcagggaagaaacccactagtcccagctcctggggtggcacagacattgcaactggccctgcctgtgggtcctaggggcccttggctaccaggaggctaagaacactgctcatgaatgacagtgagccctgaaagctctgggggtgtcacccagtcccacaagcctgcatcccctgcagtggagatgggctcagctcctggacgtgccacagacagaaagcataacatacactcgccaggaagagcctttgcctgactcagggcagctcagagtgtggggcagaaggtgaccagccagctcagggcaggagatgcagagcacagccaattacctgtggcacacagatgacctgctggggcagggggccactgccagtgtgtacaaggcccgcaacaagaaatccggagagctggttgctgtgaaggtcttcaacactaccagctacctgcggccccgcgaggtgcaagtgagggagtttgaggtcctgcggaagctgaaccaccagaacattgtcaagctctttgcggtggaggagacgggcggaagccggcagaaggtactggtgatggagtactgctccagtgggagcctgctgagtgtgctggagagccctgagaatgcctttgggctgcctgaggatgagttcctggtggtgctgcgctgtgtggtggccggcatgaaccacctgcgggagaacggcattgtgcatcgcgacatcaagccggggaacatcatgcgcctcgtaggggaggaggggcagagcatctacaagctgacagacttcggcgctgcccgggagctggatgatgatgagaagttcgtctcggtctatgggactgaggagtacctgcatcccgacatgtatgagcgggcggtgcttcgaaagccccagcaaaaagcgttcggggtgactgtggatctctggagcattggagtgaccttgtaccatgcagccactggcagcctgcccttcatcccctttggtgggccacggcggaacaaggagatcatgtaccggatcaccacggagaagccggctggggccattgcaggtgcccagaggcgggagaacgggcccctggagtggagctacaccctccccatcacctgccagctgtcactggggctgcagagccagctggtgcccatcctggccaacatcctggaggtggagcaggccaagtgctggggcttcgaccagttctttgcggagaccagtgacatcctgcagcgagttgtcgtccatgtcttctccctgtcccaggcagtcctgcaccacatctatatccatgcccacaacacgatagccattttccaggaggccgtgcacaagcagaccagtgtggccccccgacaccaggagtacctctttgagggtcacctctgtgtcctcgagcccagcgtctcagcacagcacatcgcccacacgacggcaagcagccccctgaccctcttcagcacagccatccctaaggggctggccttcagggaccctgctctggacgtccccaagttcgtccccaaagtggacctgcaggcggattacaacactgccaagggcgtgttgggcgccggctaccaggccctgcggctggcacgggccctgctggatgggcaggagctaatgtttcgggggctgcactgggtcatggaggtgctccaggccacatgcagacggactctggaagtggcaaggacatccctcctctacctcagcagcagcctgggaactgagaggttcagcagcgtggctggaacgcctgagatccaggaactgaaggcggctgcagaactgaggtccaggctgcggactctagcggaggtcctctccagatgctcccaaaatatcacggagacccaggagagcctgagcagcctgaaccgggagctggtgaagagccgggatcaggtacatgaggacagaagcatccagcagattcagtgctgtttggacaagatgaacttcatctacaaacagttcaagaagtctaggatgaggccagggcttggctacaacgaggagcagattcacaagctggataaggtgaatttcagtcatttagccaaaagactcctgcaggtgttccaggaggagtgcgtgcagaagtatcaagcgtccttagtcacacacggcaagaggatgagggtggtgcacgagaccaggaaccacctgcgcctggttggctgttctgtggctgcctgtaacacagaagcccagggggtccaggagagtctcagcaagctcctggaagagctatctcaccagctccttcaggaccgagcaaagggggctcaggcctcgccgcctcccatagctccttaccccagccctacacgaaaggacctgcttctccacatgcaagagctctgcgaggggatgaagctgctggcatctgacctcctggacaacaaccgcatcatcgaacggctaaatagagtcccagcacctcctgatgtctgagctccatggggcacatgaggcatcctgaagcattagaatgattccaacactgctcttctgcaccatgagaccaacccagggcaagatcccatcccatcacatcagcctacctccctcctggctgctggccaggatgtcgccagcattaccttccactgcctttctccctgggaagcagcacagctgagactgggcaccaggccacctctgttgggacccacaggaaagagtgtggcagcaactgcctggctgacctttctatcttctctaggctcaggtactgctcctccatgcccatggctgggccgtggggagaagaagctctcatacgccttcccactccctctggtttataggacttcactccctagccaacaggagaggaggcctcctggggtttccccagggcagtaggtcaaacgacctcatcacagtcttccttcctcttcaagcgtttcatgttgaacacagctctctccgctcccttgtgatttctgagggtcaccactgccagcctcaggcaacatagagagcctcctgttctttctatgcttggtctgactgagcctaaagttgagaaaatgggtggccaaggccagtgccagtgtcttggggcccctttggctctccctcactctctgaggctccagctggtcctgggacatgcagccaggactgtgagtctgggcaggtccaaggcctgcaccttcaagaagtggaataaatgtggcctttgcttctgttt

SEQ ID NO: 177354 - DNA, 2487 bp, Artificial Sequence
  derived and/or modified sequence
caccgccacaaggaggcagggaagaaacccactagtcccagctcctggggtggcacagacattgcaactggccctgcctgtgggtcctaggggcccttggctaccaggaggctaagaacactgctcatgaatgacagtgagccctgaaagctctgggggtgtcacccagtcccacaagcctgcatcccctgcagtggagatgggctcagctcctggacgtgccacagacagaaagcataacatacactcgccaggaagagcctttgcctgactcagggcagctcagagtgtgggaaatccggagagctggttgctgtgaaggtcttcaacactaccagctacctgcggccccgcgaggtgcaagtgagggagtttgaggtcctgcggaagctgaaccaccagaacattgtcaagctctttgcggtggaggagacgggcggaagccggcagaaggtactggtgatggagtactgctccagtgggagcctgctgagtgtgctggagagccctgagaatgcctttgggctgcctgaggatgagttcctggtggtgctgcgctgtgtggtggccggcatgaaccacctgcgggagaacggcattgtgcatcgcgacatcaagccggggaacatcatgcgcctcgtaggggaggaggggcagagcatctacaagctgacagacttcggcgctgcccgggagctggatgatgatgagaagttcgtctcggtctatgggactgaggagtacctgcatcccgacatgtatgagcgggcggtgcttcgaaagccccagcaaaaagcgttcggggtgactgtggatctctggagcattggagtgaccttgtaccatgcagccactggcagcctgcccttcatcccctttggtgggccacggcggaacaaggagatcatgtaccggatcaccacggagaagccggctggggccattgcaggtgcccagaggcgggagaacgggcccctggagtggagctacaccctccccatcacctgccagctgtcactggggctgcagagccagctggtgcccatcctggccaacatcctggaggtggagcaggccaagtgctggggcttcgaccagttctttgcggagaccagtgacatcctgcagcgagttgtcgtccatgtcttctccctgtcccaggcagtcctgcaccacatctatatccatgcccacaacacgatagccattttccaggaggccgtgcacaagcagaccagtgtggccccccgacaccaggagtacctctttgagggtcacctctgtgtcctcgagcccagcgtctcagcacagcacatcgcccacacgacggcaagcagccccctgaccctcttcagcacagccatccctaaggggctggccttcagggaccctgctctggacgtccccaagttcgtccccaaagtggacctgcaggcggattacaacactgccaagggcgtgttgggcgccggctaccaggccctgcggctggcacgggccctgctggatgggcaggagctaatgtttcgggggctgcactgggtcatggaggtgctccaggccacatgcagacggactctggaagtggcaaggacatccctcctctacctcagcagcagcctgggaactgagaggttcagcagcgtggctggaacgcctgagatccaggaactgaaggcggctgcagaactgaggtccaggctgcggactctagcggaggtcctctccagatgctcccaaaatatcacggagacccaggagagcctgagcagcctgaaccgggagctggtgaagagccgggatcaggtacatgaggacagaagcatccagcagattcagtgctgtttggacaagatgaacttcatctacaaacagttcaagaagtctaggatgaggccagggcttggctacaacgaggagcagattcacaagctggataaggtgaatttcagtcatttagccaaaagactcctgcaggtgttccaggaggagtgcgtgcagaagtatcaagcgtccttagtcacacacggcaagaggatgagggtggtgcacgagaccaggaaccacctgcgcctggttggctgttctgtggctgcctgtaacacagaagcccagggggtccaggagagtctcagcaagctcctggaagagctatctcaccagctccttcaggaccgagcaaagggggctcaggcctcgccgcctcccatagctccttaccccagccctacacgaaaggacctgcttctccacatgcaagagctctgcgaggggatgaagctgctggcatctgacctcctggacaacaaccgcatcatcgaacggctaaatagagtcccagcacctcctgatgtctgagctccatggggcacatgaggcatcctgaagcattagaatgattccaacactgctcttctgcaccatgagaccaacccagggcaagatcccatcccatcacatcagcctacctccctcctggctgctggc

SEQ ID NO: 177355 - DNA, 2151 bp, Artificial Sequence
  derived and/or modified sequence
atgcagagcacagccaactacctgtggcacacagatgacctgctgggccagggcgccacagcctctgtgtacaaggccaggaacaagaagtctggagagctggtggccgtgaaggtgttcaacaccaccagctacctgcggccccgggaggtgcaggtgcgggagtttgaggtgctgaggaagctgaaccaccagaacatcgtgaagctgtttgctgtggaggagaccggcggcagccggcagaaggtgctggtgatggagtactgcagcagcggcagcctgctgtctgtgctggagagcccagaaaatgccttcggcctgcctgaagatgagttcctggtggtgctgcgctgtgtggtggccggcatgaaccacctgcgggagaatggaattgtgcaccgggacatcaagccaggcaacatcatgaggctggtgggggaggagggccagagcatctacaagctgacagactttggagctgcccgggagctggatgatgatgagaagtttgtgtctgtgtatggaacagaggagtacctgcacccagacatgtatgaaagagctgtgctgaggaagccccagcagaaggccttcggcgtgacagtggacctgtggagcattggagtgaccctgtaccacgccgccaccggcagcctgcccttcatcccctttggaggccccaggaggaacaaggagatcatgtaccgcatcaccacagagaagccagctggggccatcgccggggcccagaggagagaaaatggccccctggagtggagctacaccctgcccatcacctgccagctgagcctgggcctgcagagccagctggtgcccatcctggccaacatcctggaggtggagcaggccaagtgctggggctttgaccagttctttgctgagaccagtgacatcctgcagagggtggtggtgcacgtgttcagcctgagccaggccgtgctgcaccacatctacatccacgcccacaacaccatcgccatcttccaggaggccgtgcacaagcagacctctgtggcccccaggcaccaggagtacctgtttgagggccacctgtgtgtgctggagcccagcgtgtctgcccagcacatcgcccacaccacagccagcagccccctgaccctcttcagcacagccatccccaagggcctggccttccgggaccctgccctggatgtgcccaagtttgtgcccaaggtggacctgcaggccgactacaacacagccaagggcgtgctgggcgccggctaccaggccctgcggctggcccgggccctgctggatggccaggagctgatgttccggggcctgcactgggtgatggaggtgctgcaggccacctgcaggaggaccctggaggtggcccggaccagcctgctgtacctgagcagcagcctgggcacagagcgcttcagctctgtggccggcaccccagagatccaggagctgaaggctgctgctgagctgcggagccggctgcggaccctggccgaggtgctgagccgctgcagccagaacatcacagagacccaggagagcctgagcagcctgaaccgggagctggtgaagagccgggaccaggtgcatgaggacaggagcatccagcagatccagtgctgcctggacaagatgaacttcatctacaagcagttcaagaagagcaggatgaggcctggcctgggctacaatgaggagcagatccacaagctggacaaggtgaacttcagccacctggccaagaggctgctgcaggtgttccaggaggagtgtgtgcagaagtaccaggccagcctggtgacccacggcaagaggatgagggtggtgcatgagaccaggaaccacctgcggctggtgggctgcagcgtggccgcctgcaacacagaggcccagggcgtgcaggagagcctgagcaagctgctggaggagctgagccaccagctgctgcaggaccgggccaagggggcccaggccagccccccacccatcgccccctaccccagccccaccaggaaggacctgctgctgcacatgcaggagctgtgtgagggcatgaagctgctggccagtgacctgctggacaacaaccgcatcatcgagcggctgaacagagtgcctgcccccccagatgtgtag

SEQ ID NO: 177356 - DNA, 2151 bp, Artificial Sequence
  derived and/or modified sequence
atgcagagcaccgccaactacctgtggcacaccgacgacctgctggggcagggtgccactgcttctgtgtataaagcccgcaataagaagtccggcgaacttgtggcagtaaaggtcttcaacacgacttcttacctaaggccgcgcgaggtgcaggtccgagagttcgaggtgctgcgtaagctgaaccaccaaaatatagttaagttgttcgcagtggaagagacaggggggagccgccagaaagtgctggtcatggagtattgcagtagtgggtctctcctgagtgtcctggagagcccagaaaatgcattcggcttacctgaggacgagttcctggttgtgttaagatgtgtagttgctggcatgaaccacttgcgtgaaaatggaattgttcatagggacattaagcccggaaacatcatgagacttgtgggtgaggagggccaaagcatttataaattaaccgacttcggggcagcgcgcgaactggatgatgatgagaagttcgtttcagtctacggaaccgaagagtatctgcatcctgacatgtacgagcgtgcagtgctgcggaagccccaacaaaaagcttttggagtaactgtggatctatggagtattggtgtcactttgtaccatgcggcaaccggtagtctccctttcatcccattcgggggaccgcgccgaaacaaggaaataatgtatcgaatcactactgagaaacccgccggtgcgatagctggcgcacaaagacgagagaacggtcctttagagtggtcttatacactccccatcacctgccagcttagcctcggtttacagtctcagctcgttcctattttagcgaacatcctggaggtggaacaggcaaagtgctggggctttgaccaatttttcgctgaaacatctgatattctgcagagggtggtggttcatgtgttcagcttgagccaggcagtgctacatcacatttacattcacgctcacaacaccattgcaatttttcaggaagcagtacacaaacagacgtctgtggctccccggcaccaggagtacctcttcgagggtcatttgtgtgtcttggagccgagtgtatctgcacagcacatcgcccataccactgcgagttcaccgttaacccttttctcgacagccattccgaagggacttgcgtttcgggaccccgccctggatgttccaaagtttgtgcccaaggtcgaccttcaggcagattataacaccgcgaagggagtgttgggggcaggctatcaggccctgaggctggcccgggcgctgttagacggtcaggaactgatgttcaggggactgcattgggtgatggaggtgctccaggccacctgccgccgcactctagaagttgcacgaacttctctcctatatctgagttcatccctcggcactgagaggttcagcagcgtggccgggacaccagagatccaggaactgaaggcagccgcggagctaagaagcaggctgagaacacttgcagaggttttatcccgctgctctcagaacataacagaaacccaagaatcattatcatcactgaatcgtgagctcgttaaatcacgcgatcaggttcacgaggatcgctccatccagcagatccaatgctgccttgataaaatgaacttcatatacaagcagttcaagaaatcgcgcatgcgcccggggctggggtataacgaagaacagattcacaaactggacaaggtgaatttctcgcacttggccaaacgactgctgcaggttttccaggaggaatgcgttcagaaataccaagctagccttgttactcacggtaaacgcatgagagtggtgcacgaaaccaggaaccacttgagacttgtgggatgtagcgtcgcagcttgtaatactgaggcacagggagttcaggaaagcctctctaaactgcttgaggagctctcacaccagctgctacaggaccgagcaaagggcgcacaagctagcccgcctcctatagcaccatatccatcccccacccgtaaagacttgttgctgcacatgcaggaactgtgcgaggggatgaagcttctggcgagtgacctgctagataacaaccgtatcatcgaacgcttgaatagagtgcctgcaccacccgatgtctag

SEQ ID NO: 177357 - DNA, 2151 bp, Artificial Sequence
  derived and/or modified sequence
atgcagtcaactgccaattacctctggcataccgatgacttgcttggacagggggcaaccgcgagcgtatacaaggcacgtaataagaagtctggcgagctggtggctgtcaaggtgttcaacaccacgagttacctacgaccacgtgaagtacaagtcagggagttcgaggtcctccggaaactgaaccaccagaacatcgtgaaattatttgccgtggaagaaacaggcggatccagacagaaggtgctggtgatggaatactgcagctctgggagccttctgtccgtgctcgagagcccagagaatgcatttggacttcccgaggacgagtttctggtggtattaaggtgcgttgtcgctgggatgaaccatctgagggaaaacggtatcgtccacagagacatcaaacccggaaatatcatgcggttggtcggggaggagggtcaatcgatatataaattaacagactttggagctgccagagagctcgatgatgacgagaaattcgtgtcagtgtatggcacggaggagtatttacatccagacatgtacgaaagagcagtgttgcggaagccccaacaaaaggccttcggggttaccgttgacctgtggagtattggggtgacgttatatcatgctgccactggcagcctcccttttattcctttcggcggtcctcggaggaacaaggaaatcatgtaccgcattaccaccgagaaaccagctggggcaatcgcaggggctcagcgtcgggagaatgggccactcgagtggtcctacactctgccaattacatgtcaattaagcctgggactccaatctcagctagttcctatacttgccaatatcctggaagtggaacaggccaagtgttggggttttgatcagttttttgctgagacctcggacatcctacaacgggtggtggtgcacgttttttcccttagtcaggcagtcctgcatcatatctatatccatgcacataacacgattgccatttttcaggaggcagttcacaaacagacctctgtggctcctcggcaccaagaatacctgttcgaggggcacctgtgcgttctcgagccgtctgtctccgctcaacatattgcccacactacagctagctcaccactcacattgttttcaactgccattccaaaggggttggcatttcgagacccagcgctggatgttcctaaattcgtgcccaaggtagacctacaggcagattacaatacggcgaagggagtcctgggggcaggctaccaggctctgcgattggctagagccctgctggacggacaggagctgatgttcagaggtctgcattgggttatggaggtgctgcaggcaacctgcaggcgcactctggaggtggcccgtacaagcttgttgtatctgagcagttcccttggaaccgagagattctcatcagtggccggaacgccggagattcaggaacttaaagctgcggctgagttaaggagtcggttgcgaacactggccgaggttctgtccaggtgtagccagaacatcacagagacccaggagtccctgtcttcccttaaccgggaattggtgaaaagcagagaccaggtgcatgaggacaggtctatccagcagattcagtgctgtttggacaaaatgaacttcatctacaaacagtttaaaaaaagccgaatgcggccaggtctgggctacaacgaagagcagattcacaagctggacaaggtgaatttcagccaccttgcgaagagactgctgcaagtgttccaggaagaatgcgttcagaaatatcaggccagcctcgttacccacgggaaacgaatgcgcgtcgtgcacgaaaccaggaaccacctaagactggtaggctgctcagttgctgcctgcaacacagaagcccaaggcgttcaggagtccctatctaagctgctggaagaactgtcacatcagcttcttcaagatcgcgcaaagggtgcacaagcctcccctccacccatcgcaccatacccctctcctactaggaaagacctcttattacatatgcaggaactgtgtgagggaatgaagctgctggcctctgacctactcgataataacaggatcatcgaacgactgaatcgggtaccagcccctccagacgtctag

SEQ ID NO: 177358 - DNA, 2151 bp, Artificial Sequence
  derived and/or modified sequence
atgcagagcaccgccaactacctgtggcacaccgacgacctgctgggccagggcgccaccgccagcgtgtacaaggccagaaacaagaagagcggcgagctggtggccgtgaaggtgttcaacaccaccagctacctgagacccagagaggtgcaggtgagagagttcgaggtgctgagaaagctgaaccaccagaacatcgtgaagctgttcgccgtggaggagaccggcggcagcagacagaaggtgctggtgatggagtactgcagcagcggcagcctgctgagcgtgctggagagccccgagaacgccttcggcctgcccgaggacgagttcctggtggtgctgagatgcgtggtggccggcatgaaccacctgagagagaacggcatcgtgcacagagacatcaagcccggcaacatcatgagactggtgggcgaggagggccagagcatctacaagctgaccgacttcggcgccgccagagagctggacgacgacgagaagttcgtgagcgtgtacggcaccgaggagtacctgcaccccgacatgtacgagagagccgtgctgagaaagccccagcagaaggccttcggcgtgaccgtggacctgtggagcatcggcgtgaccctgtaccacgccgccaccggcagcctgcccttcatccccttcggcggccccagaagaaacaaggagatcatgtacagaatcaccaccgagaagcccgccggcgccatcgccggcgcccagagaagagagaacggccccctggagtggagctacaccctgcccatcacctgccagctgagcctgggcctgcagagccagctggtgcccatcctggccaacatcctggaggtggagcaggccaagtgctggggcttcgaccagttcttcgccgagaccagcgacatcctgcagagagtggtggtgcacgtgttcagcctgagccaggccgtgctgcaccacatctacatccacgcccacaacaccatcgccatcttccaggaggccgtgcacaagcagaccagcgtggcccccagacaccaggagtacctgttcgagggccacctgtgcgtgctggagcccagcgtgagcgcccagcacatcgcccacaccaccgccagcagccccctgaccctgttcagcaccgccatccccaagggcctggccttcagagaccccgccctggacgtgcccaagttcgtgcccaaggtggacctgcaggccgactacaacaccgccaagggcgtgctgggcgccggctaccaggccctgagactggccagagccctgctggacggccaggagctgatgttcagaggcctgcactgggtgatggaggtgctgcaggccacctgcagaagaaccctggaggtggccagaaccagcctgctgtacctgagcagcagcctgggcaccgagagattcagcagcgtggccggcacccccgagatccaggagctgaaggccgccgccgagctgagaagcagactgagaaccctggccgaggtgctgagcagatgcagccagaacatcaccgagacccaggagagcctgagcagcctgaacagagagctggtgaagagcagagaccaggtgcacgaggacagaagcatccagcagatccagtgctgcctggacaagatgaacttcatctacaagcagttcaagaagagcagaatgagacccggcctgggctacaacgaggagcagatccacaagctggacaaggtgaacttcagccacctggccaagagactgctgcaggtgttccaggaggagtgcgtgcagaagtaccaggccagcctggtgacccacggcaagagaatgagagtggtgcacgagaccagaaaccacctgagactggtgggctgcagcgtggccgcctgcaacaccgaggcccagggcgtgcaggagagcctgagcaagctgctggaggagctgagccaccagctgctgcaggacagagccaagggcgcccaggccagccccccccccatcgccccctaccccagccccaccagaaaggacctgctgctgcacatgcaggagctgtgcgagggcatgaagctgctggccagcgacctgctggacaacaacagaatcatcgagagactgaacagagtgcccgccccccccgacgtgtag

SEQ ID NO: 177359 - protein, 1227 aa, Artificial Sequence
  derived and/or modified sequence
MGDTSEDASIHRLEGTDLDCQVGGLICKSKSAASEQHVFKAPAPRPSLLGLDLLASLKRREREEKDDGEDKKKSKVSSYKDWEESKDDQKDAEEEGGDQAGQNIRKDRHYRSARVETPSHPGGVSEEFWERSRQRERERREHGVYASSKEEKDWKKEKSRDRDYDRKRDRDERDRSRHSSRSERDGGSERSSRRNEPESPRHRPKDAATPSRSTWEEEDSGYGSSRRSQWESPSPTPSYRDSERSHRLSTRDRDRSVRGKYSDDTPLPTPSYKYNEWADDRRHLGSTPRLSRGRGRREEGEEGISFDTEEERQQWEDDQRQADRDWYMMDEGYDEFHNPLAYSSEDYVRRREQHLHKQKQKRISAQRRQINEDNERWETNRMLTSGVVHRLEVDEDFEEDNAAKVHLMVHNLVPPFLDGRIVFTKQPEPVIPVKDATSDLAIIARKGSQTVRKHREQKERKKAQHKHWELAGTKLGDIMGVKKEEEPDKAVTEDGKVDYRTEQKFADHMKRKSEASSEFAKKKSILEQRQYLPIFAVQQELLTIIRDNSIVIVVGETGSGKTTQLTQYLHEDGYTDYGMIGCTQPRRVAAMSVAKRVSEEMGGNLGEEVGYAIRFEDCTSENTLIKYMTDGILLRESLREADLDHYSAIIMDEAHERSLNTDVLFGLLREVVARRSDLKLIVTSATMDAEKFAAFFGNVPIFHIPGRTFPVDILFSKTPQEDYVEAAVKQSLQVHLSGAPGDILIFMPGQEDIEVTSDQIVEHLEELENAPALAVLPIYSQLPSDLQAKIFQKAPDGVRKCIVATNIAETSLTVDGIMFVIDSGYCKLKVFNPRIGMDALQIYPISQANANQRSGRAGRTGPGQCFRLYTQSAYKNELLTTTVPEIQRTNLANVVLLLKSLGVQDLLQFHFMDPPPEDNMLNSMYQLWILGALDNTGGLTSTGRLMVEFPLDPALSKMLIVSCDMGCSSEILLIVSMLSVPAIFYRPKGREEESDQIREKFAVPESDHLTYLNVYLQWKNNNYSTIWCNDHFIHAKAMRKVREVRAQLKDIMVQQRMSLASCGTDWDIVRKCICAAYFHQAAKLKGIGEYVNIRTGMPCHLHPTSSLFGMGYTPDYIVYHELVMTTKEYMQCVTAVDGEWLAELGPMFYSVKQAGKSRQENRRRAKEEASAMEEEMALAEEQLRARRQEQEKRSPLGSVRSTKIYTPGRKEQGEPMTPRRTPARFGL

SEQ ID NO: 177360 - protein, 539 aa, Artificial Sequence
  derived and/or modified sequence
MGDTSEDASIHRLEGTDLDCQVGGLICKSKSAASEQHVFKAPAPRPSLLGLDLLASLKRREREEKDDGEDKKKSKVSSYKDWEESKDDQKDAEEEGGDQAKIFQKAPDGVRKCIVATNIAETSLTVDGIMFVIDSGYCKLKVFNPRIGMDALQIYPISQANANQRSGRAGRTGPGQCFRLYTQSAYKNELLTTTVPEIQRTNLANVVLLLKSLGVQDLLQFHFMDPPPEDNMLNSMYQLWILGALDNTGGLTSTGRLMVEFPLDPALSKMLIVSCDMGCSSEILLIVSMLSVPAIFYRPKGREEESDQIREKFAVPESDHLTYLNVYLQWKNNNYSTIWCNDHFIHAKAMRKVREVRAQLKDIMVQQRMSLASCGTDWDIVRKCICAAYFHQAAKLKGIGEYVNIRTGMPCHLHPTSSLFGMGYTPDYIVYHELVMTTKEYMQCVTAVDGEWLAELGPMFYSVKQAGKSRQENRRRAKEEASAMEEEMALAEEQLRARRQEQEKRSPLGSVRSTKIYTPGRKEQGEPMTPRRTPARFGL

SEQ ID NO: 177361 - DNA, 3684 bp, Artificial Sequence
  derived and/or modified sequence
atgggagatacatccgaggacgcatccatccaccgcctggaaggcactgatttagattgccaggtcggcggacttatctgcaagtccaaatctgcagccagtgagcagcatgtcttcaaagctcctgctcccagaccgagcttgctaggtctggatcttctcgcctcgttgaaacggcgcgaaagagaggagaaggatgacggtgaggataagaaaaagtcaaaagtctcctcctacaaagactgggaagaaagtaaggacgaccagaaggacgcagaggaagaaggaggagaccaagctgggcagaatatccgcaaggaccggcactataggtccgctcgggtcgaaacccctagccacccaggcggggtaagtgaggagttttgggaacgctctaggcagcgcgagcgcgagcgccgcgagcatggcgtctacgcaagctcaaaggaggaaaaagattggaaaaaagagaagtcgagggacagagattacgatagaaagcgcgacagggacgagcgcgacaggtcaagacactcttcccgcagcgaaagagatggggggagcgaacgatccagtaggagaaatgaacccgagtcgcctcgacacaggcccaaggatgccgccacgccctcgcgcagcacctgggaagaagaggactccgggtatggatcatcacgaaggtcccagtgggaaagcccctcccccactccttcctacagagattccgaaaggtcccatagactgagcacaagagatagggatcgatccgttcgcgggaaatacagcgacgatacacctcttcctacacccagctacaagtataacgaatgggctgatgatcgccgtcatttgggcagcactcctaggttgagcagaggtaggggacgtagagaggaaggagaggaggggattagttttgacactgaagaggagagacagcagtgggaagacgatcagcgtcaggctgaccgagattggtatatgatggatgagggttacgacgaattccacaaccccttggcttattctagtgaggattacgttcgccggagagaacagcacctccacaaacagaaacagaagcgcatatccgctcagcgcaggcagatcaacgaagataatgagcgatgggaaactaataggatgctgacttccggtgtggtgcatcggttggaggtcgacgaagacttcgaggaggataacgccgccaaagttcacttaatggtccacaacttggttcccccatttctggacggccggattgttttcactaagcagccagaacccgtaataccagtgaaagacgccacctccgatttggcaatcatagcgcgtaagggcagtcagactgtgaggaaacatcgcgaacaaaaagagcgcaagaaggctcagcacaaacactgggaactcgctggcaccaaactaggcgatatcatgggggtgaagaaggaagaagaaccggacaaagccgtgacggaggatgggaaggtagattaccgaacagagcagaagtttgctgaccatatgaagcggaagtcggaggcttcctctgaatttgcaaagaaaaagagcatcctggagcagagacagtacttacccatattcgctgtacagcaggagctcctcacgattatccgggataactcaatagtaatcgttgtgggggagacaggatctggcaagaccacccagcttactcagtacttgcatgaggatggttataccgactatgggatgatagggtgcacgcagccacgcagggtggccgcaatgagcgtcgcaaaacgagtgtcagaagagatgggtggtaaccttggcgaggaagtgggatatgcaattagattcgaagattgcacgtcagaaaataccttgattaaatacatgaccgacggcatcctactcagagagtcccttagggaggcggacctcgatcactattcggccatcatcatggatgaagctcatgaaagaagcctgaatacagatgttctgttcggcttgctaagagaggtcgtcgcacgccgctcagatctgaagttgatcgtgacctcagctaccatggacgcagagaaattcgcagctttcttcggcaatgttccaatttttcatattcctggccggactttccccgtcgatatcctgtttagtaaaacacctcaggaggattatgtcgaagccgctgtgaaacaatcgcttcaggttcatctttccggagcaccgggcgatatactcatttttatgccaggccaggaggacattgaagtgacgtctgaccaaatagtagagcacctggaggaactggagaatgcccccgctttggccgtgctgcccatttacagccagctgccatcagatcttcaagccaaaatctttcagaaagcccctgatggagtgcgaaaatgtatagtggctacaaacatcgcggagacatcacttacggtcgacggtattatgttcgtcatcgactccgggtattgcaagcttaaagttttcaaccctaggatcggaatggatgccctgcagatctaccccatttctcaggcaaacgccaaccagcggtccggaagggcaggtcgaacaggtcctggacagtgttttcggctgtacacacagagcgcatacaaaaatgagttgctgaccaccactgtgcctgaaattcagcgcacaaacctggcgaacgtagtgttactgttgaaatctctgggagtccaggacttattgcagtttcatttcatggaccctcctccggaagacaatatgctgaattcgatgtaccagctgtggattcttggggccctggacaatacgggcggtttgactagtaccggtaggttaatggttgaattcccactggaccctgctctatccaaaatgcttatcgtctcctgtgatatgggctgctcatccgaaattctgttgatcgtatccatgctgagcgtgccagccatattctacagacccaagggacgcgaggaggagtctgatcaaatccgggagaagttcgctgttcctgagagcgatcaccttacatacctcaacgtgtacctgcagtggaaaaataacaattactccactatttggtgcaacgatcactttatccatgccaaagcaatgcggaaagtgcgtgaagtcagagctcagctaaaagacattatggtacagcagagaatgagtctggcctcttgcggcactgactgggacattgtccgaaagtgtatctgtgcggcctactttcaccaggcagcaaagcttaagggcataggggagtatgtgaatattagaacaggtatgccttgtcatcttcatcctacgtcctcgttgtttggaatggggtatacacctgattacattgtttaccacgagttggtgatgactacaaaggagtacatgcagtgcgttacagccgtcgacggcgagtggctcgcagaactgggccccatgttttactcagtgaagcaggcaggcaagagcagacaagaaaaccggcggcgcgccaaggaagaggcgagcgccatggaagaagaaatggctcttgccgaagagcagcttcgcgcacggcggcaggaacaggaaaagcgctctcccctgggatcagtgcgctcaacgaaaatttacactccaggtcgcaaggagcagggcgaaccaatgactccaagacggacacctgccaggttcggcctgtag

SEQ ID NO: 177362 - DNA, 3684 bp, Artificial Sequence
  derived and/or modified sequence
atgggagacaccagtgaagatgccagcatccaccggctggagggcacagacctggactgccaggtgggcggcctcatctgcaagagcaagtctgctgccagcgagcagcacgtgttcaaggccccagccccccggcccagcctgctgggcctggacctgctggccagcctgaagagaagagagcgggaggagaaggatgatggagaggacaagaagaagagcaaggtgagcagctacaaggactgggaggagagcaaggatgaccagaaggatgctgaggaggagggcggggaccaggccggccagaacatcaggaaggacagacactaccgcagcgcccgggtggagacccccagccaccctggaggagtgtctgaggagttctgggagaggagccggcagcgggagcgggagcggcgggagcacggcgtgtatgccagcagcaaggaggagaaggactggaagaaggagaagagccgggaccgggactatgacaggaagagggacagagatgagcgggacaggagccgccacagcagccgctcagaaagagatggcggcagcgagaggagcagcagaagaaatgaacctgagagccccaggcaccggcccaaggatgctgccacccccagccgcagcacctgggaggaggaggacagcggctacggcagcagccgccgcagccagtgggagagccccagccccacccccagctacagagacagcgagaggagccaccggctgagcacccgggaccgggacagatctgtgcggggcaagtacagtgatgacacccccctgcccacccccagctacaagtacaatgagtgggcagatgacagaagacacctgggcagcaccccccggctgagccggggccggggccggcgggaggagggggaggagggcatcagctttgacacagaggaggagcggcagcagtgggaggatgaccagaggcaggccgaccgggactggtacatgatggatgagggctatgatgagttccacaaccccctggcctacagcagtgaagattatgtgagaagaagagagcagcacctgcacaagcagaagcagaagaggatcagcgcccagaggcggcagatcaatgaagataatgaacgctgggagaccaacaggatgctgaccagcggcgtggtgcaccggctggaggtggatgaagattttgaagaagataatgctgccaaggtgcacctgatggtgcacaacctggtgccccccttcctggatggaagaattgtgttcaccaagcagcctgagcctgtgattcctgtgaaggatgccaccagtgacctggccatcatcgccaggaagggcagccagacagtgaggaagcaccgggagcagaaggagaggaagaaggcccagcacaagcactgggagctggccggcaccaagctgggggacatcatgggcgtgaagaaggaggaggagccagacaaggctgtgacagaagatggcaaggtggactacagaacagagcagaagtttgctgaccacatgaagaggaagtctgaggccagcagcgagtttgccaagaagaagagcatcctggagcagaggcagtacctgcccatctttgctgtgcagcaggagctgctgaccatcatccgggacaacagcatcgtcatcgtggtgggggagactggaagtggcaagaccacccagctgacccagtacctgcatgaagatggctacacagattatggcatgattggctgcacccagccccggcgggtggccgccatgtctgtggccaagagggtgtctgaggagatgggcggcaacctgggggaggaggtgggctacgccatccgctttgaggactgcaccagcgagaacaccctcatcaagtacatgacagatggcatcctgctgcgggagagcctgcgggaggccgacctggaccactacagcgccatcatcatggatgaggcccacgagaggagcctgaacacagatgtgctgtttggcctgctgcgggaggtggtggcccggcggagtgacctgaagctgattgtgaccagcgccaccatggatgctgagaagtttgctgccttctttggaaatgtgcccatcttccacatccctggccgcaccttccctgtggacatcctcttcagcaagaccccccaggaggactatgtggaggccgctgtgaagcagagcctgcaggtgcacctgagcggggcccctggggacatcctgatcttcatgcctggccaggaggacatcgaggtgaccagtgaccagatcgtggagcacctggaggagctggagaatgccccagccctggccgtgctgcccatctacagccagctgcccagcgacctgcaggccaagatcttccagaaggccccagatggagtgaggaagtgcatcgtggccaccaacattgctgagaccagcctgactgtggatggcatcatgtttgtgattgattctggctactgcaagctgaaggtgttcaaccccagaattggcatggatgccctgcagatctaccccatcagccaggccaatgccaaccagaggagcggccgggccggccgcacaggccctggccagtgcttccggctgtacacccagagcgcctacaagaatgagctgctgaccaccaccgtgcctgagatccagaggaccaacctggccaacgtggtgctgctgctgaagagcctgggcgtgcaggacctgctgcagttccacttcatggaccccccacctgaggacaacatgctgaacagcatgtaccagctgtggatcctgggcgccctggacaacacaggaggcctgaccagcacaggccgcctgatggtggagttccccctggaccctgccctgagcaagatgctgattgtgtcctgtgacatgggctgcagcagcgagatcctgctgattgtgtccatgctgtctgtgcctgccatcttctaccggcccaagggccgggaggaggagagtgaccagatccgggagaagtttgctgtgcctgagagtgaccacctgacctacctgaatgtgtacctgcagtggaagaacaacaactacagcaccatctggtgcaatgaccacttcatccacgccaaggccatgaggaaggtgcgggaggtgcgggcccagctgaaggacatcatggtgcagcagaggatgagcctggccagctgtggcacagactgggacatcgtgaggaagtgcatctgtgccgcctacttccaccaggccgccaagctgaagggcattggagaatatgtgaacatcagaacaggcatgccctgccacctgcaccccaccagcagcctgtttggcatgggctacaccccagactacatcgtgtaccacgagctggtgatgaccaccaaggagtacatgcagtgtgtgacagctgtggatggagagtggctggccgagctgggccccatgttctacagcgtgaagcaggccggcaagagccggcaggagaacagaagaagagccaaggaggaggccagcgccatggaggaggagatggccctggccgaggagcagctgcgggcccggcggcaggagcaggagaagaggagccccctgggctctgtgcgcagcaccaagatctacaccccaggcaggaaggagcagggcgagcccatgacccccaggaggaccccagccaggtttggcctgtag

SEQ ID NO: 177363 - DNA, 3684 bp, Artificial Sequence
  derived and/or modified sequence
atgggcgacaccagcgaggacgccagcatccaccggctggagggcaccgatttggactgccaggttggtgggctgatctgtaaatcaaagagcgccgcatctgaacaacatgtgtttaaagccccggcccccaggccttcgctgctgggactggatcttttggctagcttaaaacgccgagagcgcgaggaaaaggatgacggagaggacaagaaaaagtctaaagtcagcagctataaggattgggaggaaagcaaagatgatcaaaaagacgccgaggaagaggggggcgaccaggctggccaaaacatacgcaaagatcggcattacagaagcgccagggtggagacgccaagtcaccccggaggcgtctccgaagaattttgggaacgctcccgtcagcgcgaacgagagcggcgcgaacacggcgtctatgcttcaagtaaggaagagaaagactggaagaaggagaagtccagggaccgagattatgatcgcaagcgggatagagatgaacgcgaccgatccagacatagcagcaggtccgagcgagatggtggaagtgagcggagctccagacgcaacgaaccggaaagcccccggcaccgtcctaaggatgccgctaccccctctcgatctacgtgggaggaggaggattccggctacggatcctctcgcagatcgcagtgggagagtccatctcccacccccagctatagggatagtgaacgcagccatcgtctgtccaccagggatcgggatagatccgtgcgcgggaaatacagcgatgatacaccactgccaaccccttcctataagtacaatgagtgggccgatgatagacgtcatttaggctctacccccagacttagtcgcggccgtggacgtcgggaagagggagaggaaggcattagcttcgacacagaggaagagcgacagcagtgggaagatgaccaacgacaggccgatcgtgattggtacatgatggatgaggggtacgacgagttccacaatcccctggcgtatagttctgaggactacgttaggcgtcgggaacaacatctgcacaagcagaaacagaagaggatatcagcgcagagaagacaaatcaatgaggacaatgagcgctgggagaccaacagaatgctgacgtcgggagtggttcatcgtctggaagtggacgaagacttcgaggaggacaatgctgcgaaagtgcatttgatggtccacaacctggtccccccttttttagacgggcgcattgtgtttaccaaacagcccgagcccgtgattcccgttaaggacgctacctcagaccttgcaataatagcgcgcaaggggtcccagaccgtgcgcaagcaccgggagcagaaagaacgcaaaaaagctcagcataagcactgggagcttgcaggcactaaactgggggacataatgggagtgaagaaagaggaggagcctgataaggctgtgacggaagacgggaaggtagattaccgcactgagcagaaattcgccgaccatatgaaacgcaagtccgaggcttctagcgaattcgccaaaaaaaagagcatcttggaacagcggcagtacctgcccatttttgcagtacagcaggagttactgaccataataagggacaacagtatagttatcgttgtgggtgaaaccggcagcggcaaaacgacacagttgacacaatatctccacgaagacggctacactgattacggtatgatcggctgtactcagcctaggcgggtggctgctatgagcgtagccaagcgcgtttcagaagaaatggggggtaatctcggggaggaggttggctatgccattaggttcgaggattgcaccagtgagaacaccctgattaagtatatgacagatggaatcctgctaagagaaagccttcgggaagccgatctggaccactactcagctattattatggacgaagcgcacgagcggtcccttaatactgatgtgctgtttggacttctgagagaagttgtcgcaagacgcagcgaccttaagcttatcgtgaccagtgcaactatggatgcggaaaagtttgccgccttctttggtaatgtgcccatctttcacattccaggccggacttttcccgtggatatactgttttcgaagacaccgcaggaagattatgtggaggctgccgtaaagcagtcccttcaggtgcatctctctggagcgccaggcgatattctcatttttatgcccggacaggaggacatagaggtgacttctgaccagatcgtggagcatctcgaagaacttgaaaatgcccctgctctcgctgtgctccccatctattcccagctgccatcagacctgcaggctaaaatctttcaaaaagcccctgacggtgtgcgcaaatgcattgtggccaccaacatagccgagacaagtttaacggttgacggaataatgttcgtcatagattccggttactgcaaactgaaggtgttcaatcccaggatcggcatggatgctcttcagatttatcccatatcccaggctaacgccaaccaacggagcggacgagccgggcgcacaggccctggacagtgtttcaggctctatacacagtccgcgtataaaaacgaactgctgacaacaacagtccctgagatccagcgcaccaatctcgcaaatgtggtcctattactgaagagcctcggggtgcaagatctgctccagttccatttcatggatccccccccagaggataacatgttaaatagtatgtaccagctctggatattgggggcactcgacaatactggcgggcttacctctaccgggcgcttgatggtagagtttccgctggaccctgccttatcgaaaatgctcatcgtatcttgcgacatgggctgttcctcagaaatcttgctgatcgtttctatgctttcggtgccagctattttttatagaccaaaagggagagaagaggaaagtgatcaaatacgtgagaaatttgcagtgcctgagagtgatcatctaacctacttgaatgtttacctgcagtggaagaacaacaattatagcacaatatggtgcaacgatcattttatccacgctaaggccatgcgaaaggtccgagaggtcagagcccagctgaaggacatcatggtgcagcagcgtatgtctctggccagttgtggtaccgactgggacattgtgaggaagtgcatctgtgctgcttattttcatcaagcagctaagctgaaggggatcggcgagtatgtgaatatccgaacaggaatgccttgtcacttacatccaacctcaagcctgtttggcatggggtacacacccgattatattgtgtatcacgaattggttatgactacaaaagaatacatgcagtgcgtcacagccgtagacggcgagtggctggccgagcttggccctatgttctacagcgtgaaacaggcggggaaaagccggcaggagaatcggaggagagccaaggaagaggccagcgccatggaggaagaaatggccctagcggaggagcaattgagagcccggaggcaggagcaggagaaacgctctccactcggctcagtacgaagtaccaagatttacacgcccgggcggaaagaacagggcgagccaatgaccccaaggagaaccccagcaaggtttgggctctag

SEQ ID NO: 177364 - DNA, 3684 bp, Artificial Sequence
  derived and/or modified sequence
atgggggataccagtgaagacgcctcgattcaccgcctggaagggacagacctcgactgccaggtcggtggactaatctgtaagagtaagtcggcagcatcagagcaacacgtgttcaaggcacccgcacctcgcccatccctgctcggccttgacctgctggcctctcttaagagacgtgagagggaggaaaaggacgatggagaagataagaagaagtctaaggtctccagctacaaagattgggaggagagcaaggacgatcagaaggacgctgaggaagagggcggagaccaggccggacagaatataaggaaagatcgtcactatcgctctgcacgggtcgagacgccctctcaccctggcggagtttcagaggaattctgggagaggtcccggcagagggagagagaacggagggagcacggtgtgtacgcaagctccaaggaggaaaaagactggaagaaggagaagtctagagatcgcgattatgatagaaagcgtgacagggacgagcgtgatcggagtagacattcgagcaggagcgaacgcgacggcggaagcgagcgctcatcccgaagaaacgaacctgagtctccacgacataggcccaaagatgctgctaccccgagcagatcaacttgggaggaagaggattcgggttatggtagtagccggagatctcagtgggaaagcccgagtccaaccccaagttatagggattcagagagaagtcatagattgagcacacgcgatcgagatagatcggtaagggggaagtatagcgatgacaccccgctacccaccccatcttataagtacaacgaatgggcggacgaccggcgacatttgggctcaacgcctcgcctctcgcgaggacggggtcggagggaagagggggaggaaggcatctcgtttgacaccgaagaagaacgacagcagtgggaagatgaccagaggcaggccgaccgcgactggtatatgatggatgaggggtatgacgagtttcacaacccattggcgtattcgtcggaggattacgtccggaggcgggaacagcacctgcacaagcagaagcagaaaagaatctctgcacagaggcggcaaattaacgaggataatgagaggtgggaaaccaatagaatgctcaccagtggtgtggttcatcgtcttgaggtcgacgaggattttgaggaagataacgcagccaaagtgcacctcatggtgcacaacctggtgcctccattccttgatggccgtatcgttttcaccaagcaaccagagcccgtcattcccgtgaaggatgccaccagcgatttggccatcatagcccgtaagggcagtcagaccgtaagaaagcacagagagcagaaagagcgcaagaaagcccagcataagcattgggagctggctggcaccaagctgggtgatatcatgggagtgaaaaaagaggaagaaccggataaagccgtcaccgaggatggaaaggtcgactatcgaactgaacaaaaatttgccgaccacatgaagaggaagagcgaagccagctctgagtttgccaaaaagaaaagcatactggagcagaggcaatatctcccaatctttgctgtgcagcaggaattgctgactatcatccgcgacaactccatcgtgatcgtcgtaggagaaacaggttccggcaaaactacccagctgacccagtatttacatgaagacggatacaccgattacgggatgattgggtgtactcagccacgtagagttgcagccatgtcagtggccaagcgcgtgtccgaagagatgggcggaaacctgggggaagaagtgggctatgcaattcggtttgaagattgtacctccgagaataccctgatcaaatacatgactgatggcattctgctccgtgaatcgctccgggaggcggacctggaccattattcagcaattattatggatgaggcacatgagaggagcctgaacaccgacgtcctgttcggactgctaagggaagttgtggctagaaggagcgacctgaaactaatcgtaacaagcgctactatggacgctgagaagtttgccgctttctttggaaacgtgccgattttccacatccccggtaggacattccccgtggacattctgttctccaagacgccacaggaagattatgtggaggccgcagttaagcaaagtcttcaggttcacctctctggcgctcccggagacatcttaatttttatgccaggacaagaggatatcgaggttactagcgatcaaatcgtggagcacttggaggaactggaaaatgcccctgcactggctgttttgccaatctatagtcaactgcccagtgacctgcaagccaagattttccaaaaagctcctgacggggtcaggaagtgcatcgtcgcaacgaatattgccgagacaagcctgactgtggacggcattatgtttgtcatcgactcaggttactgtaaactcaaagtttttaaccctaggatcgggatggatgcactgcagatttatcctattagtcaggcaaacgccaaccagcgcagcggacgagctggcagaacgggccctggccaatgtttccggctgtatacccagagcgcctacaagaacgaattactgacaaccacagtccctgaaatccagcgtaccaacttagctaatgtggtgctcctgttgaagtctcttggtgtgcaggatcttctgcagttccactttatggatccccctccagaagacaacatgcttaattccatgtaccagctctggatactcggggcactggacaataccggtggactcacctccacgggtaggctcatggttgaattccctctcgaccctgctttgtccaaaatgctgattgtcagttgcgatatgggatgtagtagcgaaattctcctgattgtgtccatgctctctgtgccggcaattttctacaggcccaagggtcgcgaggaggagtctgaccaaattagagaaaaattcgccgtgccggagtccgaccacctgacttacctcaatgtgtacctgcaatggaaaaacaacaattactccacaatttggtgcaatgaccattttatccatgctaaagccatgagaaaggtgagggaggtgcgagcacagttgaaggacattatggtccagcagaggatgtcattagcaagctgcggcacagattgggacatcgtccgcaaatgtatttgcgcagcctatttccaccaggctgcaaaacttaagggcataggggaatatgtgaacattaggaccggcatgccctgccatctccatcctacaagctccttatttggcatgggatatactccagattatatcgtttatcatgaactggtgatgacgaccaaagaatacatgcagtgtgtgaccgccgttgatggggaatggctcgcagaactcgggcctatgttctatagtgtcaaacaagcagggaagtcccgccaggagaacagacggagagcaaaggaggaggcaagcgccatggaagaagaaatggcccttgccgaggagcagctccgggcacgccgacaggagcaggagaaacgatccccattaggcagcgtgcggtccactaagatctataccccaggccgtaaggaacagggcgaaccgatgacccccaggcgcacgcctgctagattcggcctctag

SEQ ID NO: 177365 - DNA, 3684 bp, Artificial Sequence
  derived and/or modified sequence
atgggcgacaccagcgaggacgccagcatccacagactggagggcaccgacctggactgccaggtgggcggcctgatctgcaagagcaagagcgccgccagcgagcagcacgtgttcaaggcccccgcccccagacccagcctgctgggcctggacctgctggccagcctgaagagaagagagagagaggagaaggacgacggcgaggacaagaagaagagcaaggtgagcagctacaaggactgggaggagagcaaggacgaccagaaggacgccgaggaggagggcggcgaccaggccggccagaacatcagaaaggacagacactacagaagcgccagagtggagacccccagccaccccggcggcgtgagcgaggagttctgggagagaagcagacagagagagagagagagaagagagcacggcgtgtacgccagcagcaaggaggagaaggactggaagaaggagaagagcagagacagagactacgacagaaagagagacagagacgagagagacagaagcagacacagcagcagaagcgagagagacggcggcagcgagagaagcagcagaagaaacgagcccgagagccccagacacagacccaaggacgccgccacccccagcagaagcacctgggaggaggaggacagcggctacggcagcagcagaagaagccagtgggagagccccagccccacccccagctacagagacagcgagagaagccacagactgagcaccagagacagagacagaagcgtgagaggcaagtacagcgacgacacccccctgcccacccccagctacaagtacaacgagtgggccgacgacagaagacacctgggcagcacccccagactgagcagaggcagaggcagaagagaggagggcgaggagggcatcagcttcgacaccgaggaggagagacagcagtgggaggacgaccagagacaggccgacagagactggtacatgatggacgagggctacgacgagttccacaaccccctggcctacagcagcgaggactacgtgagaagaagagagcagcacctgcacaagcagaagcagaagagaatcagcgcccagagaagacagatcaacgaggacaacgagagatgggagaccaacagaatgctgaccagcggcgtggtgcacagactggaggtggacgaggacttcgaggaggacaacgccgccaaggtgcacctgatggtgcacaacctggtgccccccttcctggacggcagaatcgtgttcaccaagcagcccgagcccgtgatccccgtgaaggacgccaccagcgacctggccatcatcgccagaaagggcagccagaccgtgagaaagcacagagagcagaaggagagaaagaaggcccagcacaagcactgggagctggccggcaccaagctgggcgacatcatgggcgtgaagaaggaggaggagcccgacaaggccgtgaccgaggacggcaaggtggactacagaaccgagcagaagttcgccgaccacatgaagagaaagagcgaggccagcagcgagttcgccaagaagaagagcatcctggagcagagacagtacctgcccatcttcgccgtgcagcaggagctgctgaccatcatcagagacaacagcatcgtgatcgtggtgggcgagaccggcagcggcaagaccacccagctgacccagtacctgcacgaggacggctacaccgactacggcatgatcggctgcacccagcccagaagagtggccgccatgagcgtggccaagagagtgagcgaggagatgggcggcaacctgggcgaggaggtgggctacgccatcagattcgaggactgcaccagcgagaacaccctgatcaagtacatgaccgacggcatcctgctgagagagagcctgagagaggccgacctggaccactacagcgccatcatcatggacgaggcccacgagagaagcctgaacaccgacgtgctgttcggcctgctgagagaggtggtggccagaagaagcgacctgaagctgatcgtgaccagcgccaccatggacgccgagaagttcgccgccttcttcggcaacgtgcccatcttccacatccccggcagaaccttccccgtggacatcctgttcagcaagaccccccaggaggactacgtggaggccgccgtgaagcagagcctgcaggtgcacctgagcggcgcccccggcgacatcctgatcttcatgcccggccaggaggacatcgaggtgaccagcgaccagatcgtggagcacctggaggagctggagaacgcccccgccctggccgtgctgcccatctacagccagctgcccagcgacctgcaggccaagatcttccagaaggcccccgacggcgtgagaaagtgcatcgtggccaccaacatcgccgagaccagcctgaccgtggacggcatcatgttcgtgatcgacagcggctactgcaagctgaaggtgttcaaccccagaatcggcatggacgccctgcagatctaccccatcagccaggccaacgccaaccagagaagcggcagagccggcagaaccggccccggccagtgcttcagactgtacacccagagcgcctacaagaacgagctgctgaccaccaccgtgcccgagatccagagaaccaacctggccaacgtggtgctgctgctgaagagcctgggcgtgcaggacctgctgcagttccacttcatggaccccccccccgaggacaacatgctgaacagcatgtaccagctgtggatcctgggcgccctggacaacaccggcggcctgaccagcaccggcagactgatggtggagttccccctggaccccgccctgagcaagatgctgatcgtgagctgcgacatgggctgcagcagcgagatcctgctgatcgtgagcatgctgagcgtgcccgccatcttctacagacccaagggcagagaggaggagagcgaccagatcagagagaagttcgccgtgcccgagagcgaccacctgacctacctgaacgtgtacctgcagtggaagaacaacaactacagcaccatctggtgcaacgaccacttcatccacgccaaggccatgagaaaggtgagagaggtgagagcccagctgaaggacatcatggtgcagcagagaatgagcctggccagctgcggcaccgactgggacatcgtgagaaagtgcatctgcgccgcctacttccaccaggccgccaagctgaagggcatcggcgagtacgtgaacatcagaaccggcatgccctgccacctgcaccccaccagcagcctgttcggcatgggctacacccccgactacatcgtgtaccacgagctggtgatgaccaccaaggagtacatgcagtgcgtgaccgccgtggacggcgagtggctggccgagctgggccccatgttctacagcgtgaagcaggccggcaagagcagacaggagaacagaagaagagccaaggaggaggccagcgccatggaggaggagatggccctggccgaggagcagctgagagccagaagacaggagcaggagaagagaagccccctgggcagcgtgagaagcaccaagatctacacccccggcagaaaggagcagggcgagcccatgacccccagaagaacccccgccagattcggcctgtag

SEQ ID NO: 177366 - DNA, 4454 bp, Artificial Sequence
  derived and/or modified sequence
cttttcctgcccccagactagaggcgggatgtagtctcttaggctaagagtgattggtcacaaggagactcggaagtgtctgatcagagccccagaggaggccttgagagcctgttggcgtaccgttccacacttggatccaggaatcgggcgtgttccaggctgctctctatggtagctttgggcggatagagggggcgcgcaaagtattaagggacaataatggccgctttcaaggtgtggattttggctccttgagcctgtctgagcgaggggtggcagcgccggcgccccagaatccgggacagaagggtcccaagagtcgcgcttggtgagagaaatcccagatcctgtgatgggggacaccagtgaggatgcctcgatccatcgattggaaggcactgatctggactgtcaggttggtggtcttatttgcaagtccaaaagtgcggccagcgagcagcatgtcttcaaggctcctgctccccgcccttcattactcggactggacttgctggcttccctgaaacggagagagcgagaggagaaggacgatggggaggacaagaagaagtccaaagtctcctcctacaaggactgggaagagagcaaggatgaccagaaggatgctgaggaagagggcggtgaccaggctggccaaaatatccggaaagacagacattatcggtctgctcgggtagagactccatcccatccgggtggtgtgagcgaagagttttgggaacgcagtcggcagagagagcgggagcggcgggaacatggtgtctatgcctcgtccaaagaagaaaaggattggaagaaggagaaatcgcgggatcgagactatgaccgcaagagggacagagatgagcgggatagaagtaggcacagcagcagatcagagcgagatggagggtcagagcgtagcagcagaagaaatgaacccgagagcccacgacatcgacctaaagatgcagccaccccttcaaggtctacctgggaggaagaggacagtggctatggctcctcaaggcgctcacagtgggaatcgccctccccgacgccttcctatcgggattctgagcggagccatcggctgtccactcgagatcgagacaggtctgtgaggggcaagtactcggatgacacgcctctgccaactccctcctacaaatataacgagtgggccgatgacagaagacacttggggtccaccccgcgtctgtccaggggccgaggaagacgtgaggagggcgaagaaggaatttcatttgacacggaggaggagcggcagcagtgggaagatgaccagaggcaagccgatcgggattggtacatgatggacgagggctatgacgagttccacaacccgctggcctactcctccgaggactacgtgaggaggcgggagcagcacctgcataaacagaagcagaagcgcatttcagctcagcggagacagatcaatgaggataacgagcgctgggagacaaaccgcatgctcaccagtggggtggtccatcggctggaggtggatgaggactttgaagaggacaacgcggccaaggtgcatctgatggtgcacaatctggtgcctccctttctggatgggcgcattgtcttcaccaagcagccggagccggtgattccagtgaaggatgctacttctgacctggccatcattgctcggaaaggcagccagacagtgcggaagcacagggagcagaaggagcgcaagaaggctcagcacaaacactgggaactggcggggaccaaactgggagatataatgggcgtcaagaaggaggaagagccagataaagctgtgacggaggatgggaaggtggactacaggacagagcagaagtttgcagatcacatgaagagaaagagcgaagccagcagtgaatttgcaaagaagaagtccatcctggagcagaggcagtacctgcccatctttgcagtgcagcaggagctgctcactattatcagagacaacagcatcgtgatcgtggttggggagacggggagtggtaagaccactcagctgacgcagtacctgcatgaagatggttacacggactatgggatgattgggtgtacccagccccggcgtgtagctgccatgtcagtggccaagagagtcagtgaagagatggggggaaaccttggcgaggaggtgggctatgccatccgctttgaagactgcacttcagagaacaccttgatcaaatacatgactgacgggatcctgctccgagagtccctccgggaagccgacctggatcactacagtgccatcatcatggacgaggcccacgagcgctccctcaacactgacgtgctctttgggctgctccgggaggtagtggctcggcgctcagacctgaagctcatcgtcacatcagccacgatggatgcggagaagtttgctgccttttttgggaatgtccccatcttccacatccctggccgtaccttccctgttgacatcctcttcagcaagaccccacaggaggattacgtggaggctgcagtgaagcagtccttgcaggtgcacctgtcgggggcccctggagacatccttatcttcatgcctggccaagaggacattgaggtgacctcagaccagattgtggagcatctggaggaactggagaacgcgcctgccctggctgtgctgcccatctactctcagctgccttctgacctccaggccaaaatcttccagaaggctccagatggcgttcggaagtgcatcgttgccaccaatattgccgagacgtctctcactgttgacggcatcatgtttgttatcgattctggttattgcaaattaaaggtcttcaaccccaggattggcatggatgctctgcagatctatcccattagccaggccaatgccaaccagcggtcagggcgagccggcaggacgggcccaggtcagtgtttcaggctctacacccagagcgcctacaagaatgagctcctgaccaccacagtgcccgagatccagaggactaacctggccaacgtggtgctgctgctcaagtccctcggggtgcaggacctgctgcagttccacttcatggacccgcccccggaggacaacatgctcaactctatgtatcagctctggatcctcggggccctggacaacacaggtggtctgacctctaccgggcggctgatggtggagttcccgctggaccctgccctgtccaagatgctcatcgtgtcctgtgacatgggctgcagctccgagatcctgctcatcgtttccatgctctcggtcccagccatcttctacaggcccaagggtcgagaggaggagagtgatcaaatccgggagaagttcgctgttcctgagagcgatcatttgacctacctgaatgtttacctgcagtggaagaacaataattactccaccatctggtgtaacgatcatttcatccatgctaaggccatgcggaaggtccgggaggtgcgagctcaactcaaggacatcatggtgcagcagcggatgagcctggcctcgtgtggcactgactgggacatcgtcaggaagtgcatctgtgctgcctatttccaccaagcagccaagctcaagggaatcggggagtacgtgaacatccgcacagggatgccctgccacttgcaccccaccagctccctttttggaatgggctacaccccagattacatagtgtatcacgagttggtcatgaccaccaaggagtatatgcagtgtgtgaccgctgtggacggggagtggctggcggagctgggccccatgttctatagcgtgaaacaggcgggcaagtcacggcaggagaaccgtcgtcgggccaaagaggaagcctctgccatggaggaggagatggcgctggccgaggagcagctgcgagcccggcggcaggagcaggagaagcgcagccccctgggcagtgtcaggtctacgaagatctacactccaggccggaaagagcaaggggagcccatgacccctcgccgcacgccagcccgctttggtctgtgagctgaggctgtccccagagaggatggcagcaggtattgggtcctcagccttctggcgggagccctgaggctgcggacaaagccctttcatctgaggactttcatctgtgcatatcacggccccccagggcagttcctgctggaccagactctctggcagaggaggtggagttcttccatgcaggagcacggcatggcgggagcggggctgcagagtatccgaggtgctgccggggcagcgggaggtggctggacccatcgcatctaaaactggcccaggacacttggtgtatgcgtgacttggctgtggctgtcttttttaatccttgtgtaaagcagcaaaaaagacctaaagggaattgtaatttggttataattcaggatttggaaataaatttattatttgtaaaacatga

SEQ ID NO: 177367 - protein, 627 aa, Artificial Sequence
  derived and/or modified sequence
MEEADRILIHSLRQAGTAVPPDVQTLRAFTTELVVEAVVRCLRVINPAVGSGLSPLLPLAMSARFRLAMSLAQACMDLGYPLELGYQNFLYPSEPDLRDLLLFLAERLPTDASEDADQPAGDSAILLRAIGSQIRDQLALPWVPPHLRTPKLQHLQGSALQKPFHASRLVVPELSSRGEPREFQASPLLLPVPTQVPQPVGRVASLLEHHALQLCQQTGRDRPGDEDWVHRTSRLPPQEDTRAQRQRLQKQLTEHLRQSWGLLGAPIQARDLGELLQAWGAGAKTGAPKGSRFTHSEKFTFHLEPQAQATQVSDVPATSRRPEQVTWAAQEQELESLREQLEGVNRSIEEVEADMKTLGVSFVQAESECRHSKLSTAEREQALRLKSRAVELLPDGTANLAKLQLVVENSAQRVIHLAGQWEKHRVPLLAEYRHLRKLQDCRELESSRRLAEIQELHQSVRAAAEEARRKEEVYKQLMSELETLPRDVSRLAYTQRILEIVGNIRKQKEEITKILSDTKELQKEINSLSGKLDRTFAVTDELVFKDAKKDDAVRKAYKYLAALHENCSQLIQTIEDTGTIMREVRDLEEQIETELGKKTLSNLEKIREDYRALRQENAGLLGRVREA

SEQ ID NO: 177368 - protein, 580 aa, Artificial Sequence
  derived and/or modified sequence
MEEADRILIHSLRQAGTAVPPDVQTLRAFTTELVVEAVVRCLRVINPAVGSGLSPLLPLAMSARFRLAMSLAQACMDLGYPLELGYQNFLYPSEPDLRDLLLFLAERLPTDASEDADQPAGDSAILLRAIGSQIRDQLALPWVPPHLRTPKLQHLQGSALQKPFHASRLVVPELSSRGEPREFQASPLLLPVPTQVPQPVGRVASLLEHHALQLCQQTGRDRPGDEDWVHRTSRLPPQEDTRAQRQRLQKQLTEHLRQSWGLLGAPIQARDLGELLQAWGAGAKTGAPKGSRFTHSEKFTFHLEPQAQATQVSDVPATSRRPEQVTWAAQEQELESLREQLEGVNRSIEEVEADMKTLGVSFVQAESECRHSKLSTAEREQALRLKSRAVELLPDGTANLAKLQLVVENSAQRVIHLAGQWEKHRVPLLAEYRHLRKLQDCRELESSRRLAEIQELHQSVRAAAEEARRKEEVYKQLMSELETLPRDVSRLAYTQRILEIVGNIRKQKEEITKILSDTKELQKEINSLSGKLDRTFAVTDELVFKDAKKDDAVRKAYKYLAALHFIGDGTVGWGPWIPNK

SEQ ID NO: 177369 - DNA, 1884 bp, Artificial Sequence
  derived and/or modified sequence
atggaggaggccgatcgtatattaatccattccttgaggcaggcaggcacagctgtgcctccggacgttcaaaccctgagggcctttacgactgagctagtggtcgaggccgttgtgagatgtctgcgagtaatcaatccagccgtgggaagcggactcagcccactgttaccgctggcgatgtcagcaaggttcagactcgccatgtcactcgcacaggcttgtatggacctgggctatcctcttgaactcgggtatcaaaacttcttgtatccttccgaacccgacctccgagatctgctgcttttcctcgccgagagactgcctacagatgcctcagaggacgccgatcagcctgctggggattccgcaattcttctgcgagcaattggaagtcaaatccgcgaccaactggccctgccctgggtcccacctcatctgcggacacctaaactgcagcacctgcaaggttcagctctccagaagcccttccacgcctcccgcctcgtggtccctgagctttcctctcgcggagaaccacgcgaatttcaggcctcccctctgttactgccagtaccgacccaggtgcctcagcctgtagggcgtgtggctagtctgcttgaacaccacgcacttcagctatgccagcagacgggccgggatcgccctggagatgaggactgggtgcaccggaccagtcgcctcccgccacaagaggacaccagagcccagagacagaggcttcagaaacagttaaccgagcatctgagacagtcatggggactgttgggcgccccaattcaggcacgcgatctcggtgaattgttgcaggcctggggggcaggcgccaagactggggctcccaagggaagccgcttcacacacagcgaaaagtttacatttcaccttgagcctcaggcccaggcaactcaggttagtgatgtgccggcaacatcaagacggcccgaacaggtgacgtgggcagcccaggaacaagagctcgaaagccttagggagcagctggagggtgtaaaccgctcaattgaggaagtggaggccgacatgaagacactcggtgtatcgtttgtgcaggctgagtctgagtgcaggcactccaagctaagtacggctgagcgtgaacaggcccttcggcttaagtctagagcagtggaattgctgccggacgggactgccaacctggcaaagctccagctggtggtggagaacagcgcccaaagagttatacacctcgcaggacagtgggagaagcatagggtgcccttactagctgagtaccggcaccttcggaagcttcaggattgtagggagctcgagtctagtcggcgtctggcagaaatacaggagctgcaccagtccgtccgggccgccgcagaggaggcgaggaggaaagaggaggtgtacaagcaactgatgtcagagctggagacattaccacgcgatgttagtcgccttgcatacacccagaggatcctcgagatcgtgggcaatatcaggaaacagaaagaggaaataacgaagatcttgagtgataccaaagaactccagaaagagatcaactctctgagcggcaagttagaccgaacatttgctgtcacagatgagctggtgtttaaggatgcaaaaaaagacgatgcagttcggaaagcctacaaatacctcgccgctctgcacgagaattgcagtcagctcattcagacaattgaggacacaggcactattatgcgggaggtgcgcgatctggaggagcagatcgagaccgaattgggaaagaagacactgtctaatctggaaaaaatccgtgaggactacagggcccttcgccaggaaaacgcaggcctgctgggccgcgtcagggaggcctag

SEQ ID NO: 177370 - DNA, 1743 bp, Artificial Sequence
  derived and/or modified sequence
atggaagaggcggacagaattctcattcacagcctgcggcaggctggcactgcagttcctcccgatgtccagactctgagagctttcactaccgagctggtggtagaagctgtcgtacggtgcttgagggtgatcaaccctgcggttggatccgggctatctccattgctgcccctggccatgtctgctagatttagacttgctatgagtctcgcccaggcatgtatggacctcggataccctctagaactgggttatcagaatttcctctacccctctgaacccgatcttagagatctcctgctttttctggctgaacggctcccaacagacgcttctgaagacgccgaccagccggccggcgattccgccatcttactcagggctatcgggagtcaaatcagggatcagttggcgctgccatgggtgcctccgcatctgcgcacacctaagctccaacatcttcaggggtccgccctgcagaagccatttcacgccagtcggcttgtcgttcccgaactgtcctcccgcggcgagcctcgcgaattccaggccagccccctgctcctcccagtgcccacccaggtcccacagccagtggggagggttgcatcgctgctcgagcatcacgcactgcagttgtgccagcagaccggacgagatcgtccgggcgacgaagactgggtccacagaacgtcccggttgccccctcaggaggatacaagagcacaaaggcagcggttgcagaaacagttaactgagcaccttaggcagagttggggtctactgggtgcccctatccaagcccgagacctgggcgagcttctacaagcatggggggccggtgccaaaaccggcgcccccaagggtagtcgttttactcactcggagaaattcacctttcatctggagccacaagctcaggcaactcaggttagcgacgtcccggctacatctcggcggcccgagcaggtgacctgggctgcacaggaacaagaattagaaagtctccgggagcagctggagggcgtgaatagatccatcgaagaagtggaagccgacatgaagacactgggagtgtcatttgtccaggctgaatctgagtgccgacattccaagctaagcacagctgagagggaacaggctctgcgactaaagtctagagccgttgagctgttaccagatggaacggccaatctggccaaactgcagctagtggttgagaactcggcccagcgagtcatccatctggccggacagtgggagaaacacagagtcccgttactggccgagtaccggcacctacgcaagctgcaggactgccgcgagcttgagtccagcaggagactggctgagattcaggagcttcatcagtccgtccgcgccgccgccgaagaagcccggagaaaagaggaggtgtataagcaattaatgagcgagctagaaacacttcctcgagatgtctccaggctagcatatactcaacgcattctggaaatagtcggtaatatccgaaagcagaaagaagagatcactaagattctcagcgacactaaagaacttcaaaaggagattaacagtctctctggcaagcttgatagaaccttcgcggtgaccgatgagttggtcttcaaggacgccaagaaggatgacgccgtgcgcaaggcctacaaatacctcgcggccctccattttatcggagatggcaccgttgggtggggtccctggatccctaataagtag

SEQ ID NO: 177371 - DNA, 1884 bp, Artificial Sequence
  derived and/or modified sequence
atggaggaggccgaccgcatcctgatccacagcctgcggcaggccggcacagctgtgcccccagatgtgcagaccctgcgggccttcaccacagagctggtggtggaggccgtggtgcgctgcctgcgggtcatcaacccagctgtgggcagcggcctgagccccctgctgcccctggccatgtctgcccgcttccggctggccatgagcctggcccaggcctgcatggacctgggctaccccctggagctgggctaccagaacttcctgtaccccagcgagccagacctgcgggacctgctgctcttcctggccgagcggctgcccacagatgcctctgaagatgctgaccagcctgctggggacagcgccatcctgctgcgggccatcggcagccagatccgggaccagctggccctgccctgggtgcccccccacctgcggacccccaagctgcagcacctgcagggcagcgccctgcagaagcccttccacgccagccggctggtggtgcctgagctgagcagcagaggagagccccgggagttccaggccagccccctgctgctgcctgtgcccacccaggtgccccagcctgtgggccgggtggccagcctgctggagcaccacgccctgcagctgtgccagcagacaggccgggacaggcctggagatgaggactgggtgcacaggaccagccggctgcccccccaggaggacacccgggcccagaggcagaggctgcagaagcagctgacagagcacctgcggcagagctggggcctgctgggcgcccccatccaggcccgggacctgggggagctgctgcaggcctggggcgctggggccaagacaggagcccccaagggcagccgcttcacccacagcgagaagttcaccttccacctggagccccaggcccaggccacccaggtgtctgatgtgcctgccaccagccggcggcctgagcaggtgacctgggccgcccaggagcaggagctggagagcctgcgggagcagctggagggcgtgaacagaagcattgaggaggtggaggccgacatgaagaccctgggcgtgtcctttgtgcaggccgagagcgagtgccgccacagcaagctgagcacagctgagcgggagcaggccctgcggctgaagagcagagctgtggagctgctgcctgatggaacagccaacctggccaagctgcagctggtggtggagaacagcgcccagagggtcatccacctggccggccagtgggagaagcaccgggtgcccctgctggccgagtaccgccacctgaggaagctgcaggactgccgggagctggagagcagccggcggctggccgagatccaggagctgcaccagagcgtgcgggctgctgctgaggaggcccggaggaaggaggaggtgtacaagcagctgatgtctgagctggagaccctgcccagagatgtgtcccggctggcctacacccagaggatcctggagatcgtgggcaacatcaggaagcagaaggaggagatcaccaagatcctgagtgacaccaaggagctgcagaaggagatcaacagcctgagcggcaagctggacaggacctttgctgtgacagatgagctggtgttcaaggatgccaagaaggatgatgctgtgaggaaggcctacaagtacctggccgccctgcacgagaactgcagccagctgatccagaccatcgaggacaccggcaccatcatgagggaggtgcgggacctggaggagcagattgaaacagagctgggcaagaagaccctgagcaacctggagaagatccgggaggactaccgggccctgcggcaggagaatgccggcctgctgggccgggtgcgggaggcctag

SEQ ID NO: 177372 - DNA, 1743 bp, Artificial Sequence
  derived and/or modified sequence
atggaggaggccgaccgcatcctgatccacagcctgcggcaggccggcacagctgtgcccccagatgtgcagaccctgcgggccttcaccacagagctggtggtggaggccgtggtgcgctgcctgcgggtcatcaacccagctgtgggcagcggcctgagccccctgctgcccctggccatgtctgcccgcttccggctggccatgagcctggcccaggcctgcatggacctgggctaccccctggagctgggctaccagaacttcctgtaccccagcgagccagacctgcgggacctgctgctcttcctggccgagcggctgcccacagatgcctctgaagatgctgaccagcctgctggggacagcgccatcctgctgcgggccatcggcagccagatccgggaccagctggccctgccctgggtgcccccccacctgcggacccccaagctgcagcacctgcagggcagcgccctgcagaagcccttccacgccagccggctggtggtgcctgagctgagcagcagaggagagccccgggagttccaggccagccccctgctgctgcctgtgcccacccaggtgccccagcctgtgggccgggtggccagcctgctggagcaccacgccctgcagctgtgccagcagacaggccgggacaggcctggagatgaggactgggtgcacaggaccagccggctgcccccccaggaggacacccgggcccagaggcagaggctgcagaagcagctgacagagcacctgcggcagagctggggcctgctgggcgcccccatccaggcccgggacctgggggagctgctgcaggcctggggcgctggggccaagacaggagcccccaagggcagccgcttcacccacagcgagaagttcaccttccacctggagccccaggcccaggccacccaggtgtctgatgtgcctgccaccagccggcggcctgagcaggtgacctgggccgcccaggagcaggagctggagagcctgcgggagcagctggagggcgtgaacagaagcattgaggaggtggaggccgacatgaagaccctgggcgtgtcctttgtgcaggccgagagcgagtgccgccacagcaagctgagcacagctgagcgggagcaggccctgcggctgaagagcagagctgtggagctgctgcctgatggaacagccaacctggccaagctgcagctggtggtggagaacagcgcccagagggtcatccacctggccggccagtgggagaagcaccgggtgcccctgctggccgagtaccgccacctgaggaagctgcaggactgccgggagctggagagcagccggcggctggccgagatccaggagctgcaccagagcgtgcgggctgctgctgaggaggcccggaggaaggaggaggtgtacaagcagctgatgtctgagctggagaccctgcccagagatgtgtcccggctggcctacacccagaggatcctggagatcgtgggcaacatcaggaagcagaaggaggagatcaccaagatcctgagtgacaccaaggagctgcagaaggagatcaacagcctgagcggcaagctggacaggacctttgctgtgacagatgagctggtgttcaaggatgccaagaaggatgatgctgtgaggaaggcctacaagtacctggccgccctgcacttcatcggagatggcaccgtgggctggggcccctggatccccaacaagtag

SEQ ID NO: 177373 - DNA, 1884 bp, Artificial Sequence
  derived and/or modified sequence
atggaggaggccgaccggatcctgatccacagcctgcggcaggccggcaccgcagttcctcccgatgtccagacccttcgggccttcacaaccgagctggtagtcgaggcagtggtaagatgccttagggttatcaacccagccgtcggctccggactgagtccactgctgcccctcgccatgtcagctagattccgcctagcgatgtccctggcccaagcgtgtatggatttggggtatcccctcgagctgggctatcaaaattttctgtatccctccgaaccggatttgcgcgacctgctacttttcctggccgaacgactgccaacagatgccagtgaggacgccgatcagcctgccggggatagcgcaatccttcttcgtgctattggctctcaaatcagagatcagctggctctcccctgggtgccaccgcacctacggacccccaaactccagcatctacagggtagcgcgttacaaaaaccttttcacgccagccgcctcgtggtgcctgagctgtctagtagaggtgaacccagggaatttcaggccagcccactgctgctccctgtgccaacacaggtaccacagcccgtcgggcgggtggcttcccttttggaacatcacgctctacaactctgccaacagaccgggcgagatcggcccggcgatgaagattgggtgcatcgcacctcacgcttgccgccccaggaagacacccgggcacaacggcaacggctgcagaagcagttaaccgagcacttacgccaaagttgggggctgttgggcgctcccatacaagctcgtgacctcggggagctactgcaggcctggggggctggcgcgaagacgggtgctcccaagggtagtcgcttcacccactccgaaaagttcacatttcacctagagcctcaggcacaggccacacaagtgagcgatgtgccagcaacctctcgccggcccgagcaggtcacctgggcagcacaagagcaggaattggagtcgcttcgcgaacagttagagggtgtcaatcgatccatcgaagaggtcgaggccgatatgaaaacgctgggcgtgagctttgtacaggctgagtccgaatgccggcactctaaactttcaacagccgaacgcgaacaagcacttcgactgaaaagccgagccgttgaacttcttccagacggaacagctaatctggccaagttgcaattggtggtggagaacagtgcccaacgggtgatccatctggcagggcagtgggagaagcaccgggtccctctgttggcggaatacagacaccttcgcaagttgcaggattgtagggaattggaatcatcacgccgtctggctgagatccaggagcttcaccagtcagtgagggctgcggctgaagaggcaaggcggaaggaagaggtctacaaacagttgatgtccgagttagaaaccctccccagggatgtgtcgcgtctcgcttacacccagcggattctggaaattgtgggtaatattcgaaagcagaaagaagagataaccaaaatcctgtctgataccaaagagctgcagaaggaaattaattcactgagtggaaagctggatcgtaccttcgcagtgactgacgaactcgtgtttaaggacgctaaaaaggatgacgctgttagaaaggcttacaaatatctggctgcccttcatgagaattgttcacagctgatccagactatcgaagacactggtacgatcatgcgggaagttagggatctggaagagcaaatcgaaactgaactggggaagaagactctgtctaacttggagaaaatccgcgaggattaccgagcactgaggcaggagaacgccggcctcctgggacgcgtgagagaggcttag

SEQ ID NO: 177374 - DNA, 1743 bp, Artificial Sequence
  derived and/or modified sequence
atggaggaggccgaccggatcctgatccacagcctgcggcaggccgggacagctgtgcctccggacgtacagacactgcgcgcctttacaaccgaactggtggtggaggcagtcgtcagatgcttgagggtcatcaaccccgcggtcggcagtggtctgagccccttgctgccgctggcgatgtcagccagatttagactggcaatgtctctggctcaggcatgtatggatcttggctaccccctggaactgggctaccagaattttctatacccatcagagcccgatctgcgagacctgctgctgttcctggccgagaggctgcctacagacgcatctgaagatgcagaccagccagcgggcgacagtgcaatcctgctgagagccattgggtcccagatccgagaccagcttgcccttccctgggttccgccgcacctccgcactcccaaacttcaacatctgcagggaagtgccctgcagaagccatttcatgcctctcgactggttgtccccgagctttcctcacgcggcgagccacgggaatttcaggccagccccctcctgttgcccgtgccgacccaggtccctcagcccgtgggtagagtggccagtctgctcgaacaccatgccctgcagctttgtcagcagactggtcgtgatcggccgggcgacgaagactgggtccaccggacctcgcggctacctccccaggaagataccagggcacagcgccagagactgcagaaacagctgacggagcacctgcggcagtcctggggattgttgggagcaccaatacaggcaagggatcttggcgagcttctccaagcttggggcgccggcgccaaaactggcgccccaaagggaagcaggttcacccactccgaaaagtttacgtttcaccttgagcctcaggctcaggccacacaggtctccgatgtgcctgcaacgagtagaagacctgaacaagtcacgtgggcagcccaggagcaggagctggagagcctgcgggagcaactcgaaggcgtgaaccgttccatcgaggaggtcgaggccgatatgaagactctcggggtcagcttcgtccaagctgagtcagagtgccgccatagcaagctgagtactgctgaacgggaacaggccctgcgtctcaaatcccgcgccgttgaattactccccgatgggacggccaacttggccaaactgcaattggttgtggaaaacagcgctcagcgcgttatccacctggccgggcagtgggagaagcaccgcgtgccactgctcgccgaatacaggcatctgcgaaaactgcaggactgccgggagctcgagtcctcccgacgcttggctgagatacaggagctccaccaaagtgtcagggcggccgccgaagaggctcgccgcaaggaggaggtctacaagcaacttatgagcgaattggaaacactgcctcgcgatgtgagccgcctggcctacacacagcgcatcctggagattgtcggcaatatcaggaagcagaaggaagaaataaccaaaatcctttctgacacaaaggaactacaaaaggagataaatagcctgtctggaaagctcgaccgaaccttcgcggtaacagacgaactcgtgtttaaggacgccaaaaaagatgacgccgtacgtaaagcatataaatacctggctgcactgcacttcatcggagacggaacagtgggatgggggccatggatacccaataagtag

SEQ ID NO: 177375 - DNA, 1884 bp, Artificial Sequence
  derived and/or modified sequence
atggaggaggcagataggattctaatccactctctgagacaagcgggaactgccgtcccccctgatgtgcagacattgcgcgcattcaccacagagctggtcgtggaggcagtagtaagatgtctgagagtgatcaaccccgcagttggaagcggactctcacctttactccctctagctatgagtgctagattccggctggcaatgtctcttgcgcaagcctgcatggacctgggataccccctggaactcggctaccaaaatttcctgtatccgtcagagccggatctgcgggacctgctcctgttcttggcggaaagactgcctaccgacgcctcggaagatgctgaccagcccgcaggcgattctgcaatcctgttgagagcaatcgggtcccagattagagaccagctggctctcccctgggtgcccccacatctgagaacccccaagctccagcatcttcaagggtcagccttgcagaagccatttcacgcctctagacttgtggtcccagaactgtcaagccggggagagcctcgcgaattccaggcctctcccttgttactgcctgtgcccactcaggtgccccagcccgttggacgggtggccagtctactagaacaccacgctcttcagctgtgtcagcaaacgggcagggacaggccgggagatgaagactgggtgcatcgaacctctaggctgccgcctcaagaagacacccgtgcccagcgccaaaggctgcaaaaacagctgaccgaacacctgaggcagtcatggggcctgctcggcgctcccattcaggccagggacctcggcgaactgctgcaagcctggggagcaggcgctaagacaggcgcacctaaaggctctcgttttactcactccgaaaagtttactttccacttagagcctcaggcccaggcaacccaggtatctgacgtgccagccacctcccggaggcctgaacaggtgacctgggcagcacaagagcaagaacttgaatccctccgcgaacagcttgaaggcgtaaatcgcagtatcgaggaagttgaagctgacatgaaaactcttggggttagcttcgtgcaagctgaaagcgagtgccgccacagcaaattatcaactgcagagagggaacaagcactgcgactcaagtcccgggcagtcgaactgctacctgacgggacggccaacctggctaaactgcagctcgtggtggagaacagtgcccagcgcgtgatacacctggctggacagtgggagaagcaccgtgttcccctgctagcagaatacagacacctgcggaaactccaggattgtcgggagctcgaatcctcgaggaggctggccgaaattcaggagctccaccagtccgtgagagctgctgccgaggaagccaggagaaaagaggaggtatacaagcagctaatgtctgagctcgagacacttccaagagacgtgtctcgactagcctatacccagcgcatcttagagatcgtcggtaacatacggaagcagaaggaagaaattaccaagattctctctgacacaaaggagttgcaaaaagagattaattctctgagcggcaaactggacaggaccttcgctgttaccgatgagttagtctttaaagacgccaagaaagatgatgcagttcgcaaagcatataaatatctggctgctctccacgagaactgttcacagctcatccaaaccattgaagacacagggaccataatgagggaagtaagagatctggaagaacaaatagagacagagctgggaaagaagaccctcagcaatctagagaagatccgcgaggactaccgcgcactccgccaggagaatgcagggttgctcggacgagtgagggaagcgtag

SEQ ID NO: 177376 - DNA, 1743 bp, Artificial Sequence
  derived and/or modified sequence
atggaagaggccgacaggattctgatccactccctgaggcaggcgggaacagctgtgccacccgatgttcagaccctgcgagcctttacgacggagctcgtcgtggaagccgtggttcgttgtctgagggtgataaatccggctgtaggtagcggactgagcccattgttgccattggccatgagcgccaggttccgcctcgcgatgtccctagcacaagcctgcatggatctggggtatccactggagctcggttaccagaatttcctctatccatctgaacctgacctccgcgatctgttgctcttcctggctgagaggctaccaactgatgctagcgaagacgccgaccagccagccggtgattccgccatcctactccgcgctataggtagccagatccgggaccaactagctctgccatgggtgccccctcacctccgcacgcctaagttgcagcacctgcagggctccgcgctgcagaagccttttcatgcctcccggctcgttgttcccgagctctcatccagaggagagcctagggaatttcaggcctcccccttgttactgccagtaccgacacaggtaccccagcccgtggggcgtgtggccagtttacttgaacaccacgcactccagttgtgtcaacagacaggaagagatcgcccaggggacgaagactgggtccatcgtacgtcccggttgccgccacaggaggacacaagggcgcaacgccagcggttacaaaagcagcttaccgagcatctgaggcaaagttggggcctattgggtgcgcctatccaagctcgcgacctgggagaactgcttcaggcctggggcgcaggcgcaaagactggcgctccaaagggctcccgctttacccactcggaaaaatttacctttcatctcgaacctcaggcccaggccacccaggtctctgatgtccccgcaacctctaggagacccgagcaggtgacttgggcagcccaagagcaagagttggagtcactgcgggagcaactggaaggagtaaatcgctcgatcgaggaggtggaagcagatatgaaaacattaggggtgtcatttgttcaagcggaaagtgaatgtcgccactccaagctgtcgacagcggaacgcgaacaggctttacggctcaaatcccgtgctgtcgaattactgcccgatgggactgcgaatctcgccaagctgcagttggttgttgagaatagcgctcagcgggttatccacctggccggacagtgggagaaacatcgggtaccactgctcgccgagtatcgccacctgcgcaaactgcaggattgtcgggaattggagagcagtagacgcctggcagaaattcaggagctacatcaatcagttagagccgctgctgaggaggccaggcgcaaagaggaagtgtataagcagcttatgtccgaattggaaacccttcccagggacgtgtctaggcttgcatacacccagcgaatcctcgaaattgtcggcaacatcaggaagcagaaagaggagattaccaaaatcctcagtgacacgaaagagctccagaaggagattaacagcttaagcggcaagttggatagaactttcgccgtgacagatgaactggtttttaaggacgctaaaaaagacgatgcagtgcggaaggcgtacaaatatttagctgccttgcatttcatcggcgatggcacagtgggatggggtccctggattccaaacaagtag

SEQ ID NO: 177377 - DNA, 2319 bp, Artificial Sequence
  derived and/or modified sequence
ctcacatccggcatgcgccgtgctcgctcacagaactacactttccaactctccccacacgacccgtgacactctgtggaccgcgagcacggagcagggtttctacagctgctccccactttctcggacccggtcctggacccagcccccgactccgacacggctccaccatggaggaggcggaccgaatcctcatccattcgctgcgccaggccggcacggcagttcctccagatgtgcagaccttgcgcgccttcaccactgagctggttgtagaggctgtggtccgctgcctgcgtgtgatcaaccctgcggtgggctctggcctcagccctctgctgcctcttgccatgtctgcccggttccgcctggccatgagcctggctcaggcctgcatggacctgggctatcccttggagcttggctatcagaacttcctctaccccagtgagcctgacctccgagacctgcttctcttcttggctgagcgtctgcccaccgatgcctctgaggatgcagaccagcctgcaggtgactcagctattctcctccgggccattgggagccaaattcgggaccagctggcactgccttgggtcccgccccaccttcgcactcccaagctgcagcacctccagggctcggccctccagaagcctttccatgccagcaggctggtcgtgccagaattgagttccagaggtgagccacgggagttccaggcgagtcccctgctgcttccagtccctacccaggtgcctcagcctgttggaagggtggcctcgctcctcgaacaccatgccctgcagctctgccagcagacgggccgggaccggccaggggatgaggactgggtccaccggacatcccgcctcccaccccaggaggacacacgggctcagcggcagcggctgcagaagcaactgactgagcatctgcgccaaagctggggcctgcttggggcccccatacaagcccgggacctgggagaactgctgcaggcctggggtgctggggccaagactggtgctcctaagggctcccgcttcacgcactcagagaagttcaccttccatctggagccccaggcccaggccactcaggtgtcagatgtgccagccacctcccggcggcctgaacaggtcacgtgggcagctcaggaacaggagctcgagtcccttcgggagcagctggaaggagtgaaccgcagcattgaggaggttgaggccgacatgaagaccctgggcgtcagctttgtgcaggcagagtctgagtgccggcacagcaagctcagtacagcagagcgtgagcaggccctgcgcctgaagagccgcgcggtggagctgctgcccgatgggactgccaaccttgccaagctgcagcttgtggtggagaatagtgcccagcgggtcatccacttggcgggtcagtgggagaagcaccgggtcccactcctcgctgagtaccgccacctccgaaagctgcaggattgcagagagctggaatcttctcgacggctggcagagatccaagaactgcaccagagtgtccgggcggctgctgaagaggcccgcaggaaggaggaggtctataagcagctgatgtcagagctggagactctgcccagagatgtgtcccggctggcctacacccagcgcatcctggagatcgtgggcaacatccggaagcagaaggaagagatcaccaagatcttgtctgatacgaaggagcttcagaaggaaatcaactccctatctgggaagctggaccggacgtttgcggtgactgatgagcttgtgttcaaggatgccaagaaggacgatgctgttcggaaggcctataagtatctagctgctctgcacgagaactgcagccagctcatccagaccatcgaggacacaggcaccatcatgcgggaggttcgagacctcgaggagcagatcgagacagagctgggcaagaagaccctcagcaacctggagaagatccgggaggactaccgagccctccgccaggagaacgctggcctcctaggccgggtccgggaggcctgaggagccgccggcagaggtctctccccagcctcaggcagggatttggggtgctggaggcagtggccaagcacatgccctagctacttcctccgctgtccagttcctcctgctgcggccttggacccagacccctgcccactgaccgcaacccttatatggggtgatagtccagcatgtggggagctcggctgcagtttattggggacggtactgtgggttgggggccttggatcccaaataaatgagtagttcctctgcagtctaa

SEQ ID NO: 177378 - DNA, 1921 bp, Artificial Sequence
  derived and/or modified sequence
atccggcatgcgccgtgctcgctcacagaactacactttccaactctccccacacgacccgtgacactctgtggaccgcgagcacggagcagggtttctacagctgctccccactttctcggacccggtcctggacccagcccccgactccgacacggctccaccatggaggaggcggaccgaatcctcatccattcgctgcgccaggccggcacggcagttcctccagatgtgcagaccttgcgcgccttcaccactgagctggttgtagaggctgtggtccgctgcctgcgtgtgatcaaccctgcggtgggctctggcctcagccctctgctgcctcttgccatgtctgcccggttccgcctggccatgagcctggctcaggcctgcatggacctgggctatcccttggagcttggctatcagaacttcctctaccccagtgagcctgacctccgagacctgcttctcttcttggctgagcgtctgcccaccgatgcctctgaggatgcagaccagcctgcaggtgactcagctattctcctccgggccattgggagccaaattcgggaccagctggcactgccttgggtcccgccccaccttcgcactcccaagctgcagcacctccagggctcggccctccagaagcctttccatgccagcaggctggtcgtgccagaattgagttccagaggtgagccacgggagttccaggcgagtcccctgctgcttccagtccctacccaggtgcctcagcctgttggaagggtggcctcgctcctcgaacaccatgccctgcagctctgccagcagacgggccgggaccggccaggggatgaggactgggtccaccggacatcccgcctcccaccccaggaggacacacgggctcagcggcagcggctgcagaagcaactgactgagcatctgcgccaaagctggggcctgcttggggcccccatacaagcccgggacctgggagaactgctgcaggcctggggtgctggggccaagactggtgctcctaagggctcccgcttcacgcactcagagaagttcaccttccatctggagccccaggcccaggccactcaggtgtcagatgtgccagccacctcccggcggcctgaacaggtcacgtgggcagctcaggaacaggagctcgagtcccttcgggagcagctggaaggagtgaaccgcagcattgaggaggttgaggccgacatgaagaccctgggcgtcagctttgtgcaggcagagtctgagtgccggcacagcaagctcagtacagcagagcgtgagcaggccctgcgcctgaagagccgcgcggtggagctgctgcccgatgggactgccaaccttgccaagctgcagcttgtggtggagaatagtgcccagcgggtcatccacttggcgggtcagtgggagaagcaccgggtcccactcctcgctgagtaccgccacctccgaaagctgcaggattgcagagagctggaatcttctcgacggctggcagagatccaagaactgcaccagagtgtccgggcggctgctgaagaggcccgcaggaaggaggaggtctataagcagctgatgtcagagctggagactctgcccagagatgtgtcccggctggcctacacccagcgcatcctggagatcgtgggcaacatccggaagcagaaggaagagatcaccaagatcttgtctgatacgaaggagcttcagaaggaaatcaactccctatctgggaagctggaccggacgtttgcggtgactgatgagcttgtgttcaaggatgccaagaaggacgatgctgttcggaaggcctataagtatctagctgctctgcactttattggggacggtactgtgggttgggggccttggatcccaaataaatgagtagttcctctgc

SEQ ID NO: 177379 - DNA, 1884 bp, Artificial Sequence
  derived and/or modified sequence
atggaggaggccgacagaatcctgatccacagcctgagacaggccggcaccgccgtgccccccgacgtgcagaccctgagagccttcaccaccgagctggtggtggaggccgtggtgagatgcctgagagtgatcaaccccgccgtgggcagcggcctgagccccctgctgcccctggccatgagcgccagattcagactggccatgagcctggcccaggcctgcatggacctgggctaccccctggagctgggctaccagaacttcctgtaccccagcgagcccgacctgagagacctgctgctgttcctggccgagagactgcccaccgacgccagcgaggacgccgaccagcccgccggcgacagcgccatcctgctgagagccatcggcagccagatcagagaccagctggccctgccctgggtgcccccccacctgagaacccccaagctgcagcacctgcagggcagcgccctgcagaagcccttccacgccagcagactggtggtgcccgagctgagcagcagaggcgagcccagagagttccaggccagccccctgctgctgcccgtgcccacccaggtgccccagcccgtgggcagagtggccagcctgctggagcaccacgccctgcagctgtgccagcagaccggcagagacagacccggcgacgaggactgggtgcacagaaccagcagactgcccccccaggaggacaccagagcccagagacagagactgcagaagcagctgaccgagcacctgagacagagctggggcctgctgggcgcccccatccaggccagagacctgggcgagctgctgcaggcctggggcgccggcgccaagaccggcgcccccaagggcagcagattcacccacagcgagaagttcaccttccacctggagccccaggcccaggccacccaggtgagcgacgtgcccgccaccagcagaagacccgagcaggtgacctgggccgcccaggagcaggagctggagagcctgagagagcagctggagggcgtgaacagaagcatcgaggaggtggaggccgacatgaagaccctgggcgtgagcttcgtgcaggccgagagcgagtgcagacacagcaagctgagcaccgccgagagagagcaggccctgagactgaagagcagagccgtggagctgctgcccgacggcaccgccaacctggccaagctgcagctggtggtggagaacagcgcccagagagtgatccacctggccggccagtgggagaagcacagagtgcccctgctggccgagtacagacacctgagaaagctgcaggactgcagagagctggagagcagcagaagactggccgagatccaggagctgcaccagagcgtgagagccgccgccgaggaggccagaagaaaggaggaggtgtacaagcagctgatgagcgagctggagaccctgcccagagacgtgagcagactggcctacacccagagaatcctggagatcgtgggcaacatcagaaagcagaaggaggagatcaccaagatcctgagcgacaccaaggagctgcagaaggagatcaacagcctgagcggcaagctggacagaaccttcgccgtgaccgacgagctggtgttcaaggacgccaagaaggacgacgccgtgagaaaggcctacaagtacctggccgccctgcacgagaactgcagccagctgatccagaccatcgaggacaccggcaccatcatgagagaggtgagagacctggaggagcagatcgagaccgagctgggcaagaagaccctgagcaacctggagaagatcagagaggactacagagccctgagacaggagaacgccggcctgctgggcagagtgagagaggcctag

SEQ ID NO: 177380 - DNA, 1743 bp, Artificial Sequence
  derived and/or modified sequence
atggaggaggccgacagaatcctgatccacagcctgagacaggccggcaccgccgtgccccccgacgtgcagaccctgagagccttcaccaccgagctggtggtggaggccgtggtgagatgcctgagagtgatcaaccccgccgtgggcagcggcctgagccccctgctgcccctggccatgagcgccagattcagactggccatgagcctggcccaggcctgcatggacctgggctaccccctggagctgggctaccagaacttcctgtaccccagcgagcccgacctgagagacctgctgctgttcctggccgagagactgcccaccgacgccagcgaggacgccgaccagcccgccggcgacagcgccatcctgctgagagccatcggcagccagatcagagaccagctggccctgccctgggtgcccccccacctgagaacccccaagctgcagcacctgcagggcagcgccctgcagaagcccttccacgccagcagactggtggtgcccgagctgagcagcagaggcgagcccagagagttccaggccagccccctgctgctgcccgtgcccacccaggtgccccagcccgtgggcagagtggccagcctgctggagcaccacgccctgcagctgtgccagcagaccggcagagacagacccggcgacgaggactgggtgcacagaaccagcagactgcccccccaggaggacaccagagcccagagacagagactgcagaagcagctgaccgagcacctgagacagagctggggcctgctgggcgcccccatccaggccagagacctgggcgagctgctgcaggcctggggcgccggcgccaagaccggcgcccccaagggcagcagattcacccacagcgagaagttcaccttccacctggagccccaggcccaggccacccaggtgagcgacgtgcccgccaccagcagaagacccgagcaggtgacctgggccgcccaggagcaggagctggagagcctgagagagcagctggagggcgtgaacagaagcatcgaggaggtggaggccgacatgaagaccctgggcgtgagcttcgtgcaggccgagagcgagtgcagacacagcaagctgagcaccgccgagagagagcaggccctgagactgaagagcagagccgtggagctgctgcccgacggcaccgccaacctggccaagctgcagctggtggtggagaacagcgcccagagagtgatccacctggccggccagtgggagaagcacagagtgcccctgctggccgagtacagacacctgagaaagctgcaggactgcagagagctggagagcagcagaagactggccgagatccaggagctgcaccagagcgtgagagccgccgccgaggaggccagaagaaaggaggaggtgtacaagcagctgatgagcgagctggagaccctgcccagagacgtgagcagactggcctacacccagagaatcctggagatcgtgggcaacatcagaaagcagaaggaggagatcaccaagatcctgagcgacaccaaggagctgcagaaggagatcaacagcctgagcggcaagctggacagaaccttcgccgtgaccgacgagctggtgttcaaggacgccaagaaggacgacgccgtgagaaaggcctacaagtacctggccgccctgcacttcatcggcgacggcaccgtgggctggggcccctggatccccaacaagtag

SEQ ID NO: 177381 - protein, 431 aa, Artificial Sequence
  derived and/or modified sequence
MPNPRPGKPSAPSLALGPSPGASPSWRAAPKASDLLGARGPGGTFQGRDLRGGAHASSSSLNPMPPSQLQLPTLPLVMVAPSGARLGPLPHLQALLQDRPHFMHQLSTVDAHARTPVLQVHPLESPAMISLTPPTTATGVFSLKARPGLPPGINVASLEWVSREPALLCTFPNPSAPRKDSTLSAVPQSSYPLLANGVCKWPGCEKVFEEPEDFLKHCQADHLLDEKGRAQCLLQREMVQSLEQQLVLEKEKLSAMQAHLAGKMALTKASSVASSDKGSCCIVAAGSQGPVVPAWSGPREAPDSLFAVRRHLWGSHGNSTFPEFLHNMDYFKFHNMRPPFTYATLIRWAILEAPEKQRTLNEIYHWFTRMFAFFRNHPATWKNAIRHNLSLHKCFVRVESEKGAVWTVDELEFRKKRSQRPSRCSNPTPGP

SEQ ID NO: 177382 - protein, 404 aa, Artificial Sequence
  derived and/or modified sequence
MPNPRPGKPSAPSLALGPSPGASPSWRAAPKASDLLGARGPGGTFQGRDLRGGAHASSSSLNPMPPSQLQLPTLPLVMVAPSGARLGPLPHLQALLQDRPHFMHQLSTVDAHARTPVLQVHPLESPAMISLTPPTTATGVFSLKARPGLPPGINVASLEWVSREPALLCTFPNPSAPRKDSTLSAVPQSSYPLLANGVCKWPGCEKVFEEPEDFLKHCQADHLLDEKGRAQCLLQREMVQSLEQQASSDKGSCCIVAAGSQGPVVPAWSGPREAPDSLFAVRRHLWGSHGNSTFPEFLHNMDYFKFHNMRPPFTYATLIRWAILEAPEKQRTLNEIYHWFTRMFAFFRNHPATWKNAIRHNLSLHKCFVRVESEKGAVWTVDELEFRKKRSQRPSRCSNPTPGP

SEQ ID NO: 177383 - DNA, 1215 bp, Artificial Sequence
  derived and/or modified sequence
atgcccaaccccaggcctggcaagccctcggccccttccttggcccttggcccatccccaggagcctcgcccagctggagggctgcacccaaagcctcagacctgctgggggcccggggcccagggggaaccttccagggccgagatcttcgaggcggggcccatgcctcctcttcttccttgaaccccatgccaccatcgcagctgcagctgcccacactgcccctagtcatggtggcaccctccggggcacggctgggccccttgccccacttacaggcactcctccaggacaggccacatttcatgcaccagctctcaacggtggatgcccacgcccggacccctgtgctgcaggtgcaccccctggagagcccagccatgatcagcctcacaccacccaccaccgccactggggtcttctccctcaaggcccggcctggcctcccacctgggatcaacgtggccagcctggaatgggtgtccagggagccggcactgctctgcaccttcccaaatcccagtgcacccaggaaggacagcaccctttcggctgtgccccagagctcctacccactgctggcaaatggtgtctgcaagtggcccggatgtgagaaggtcttcgaagagccagaggacttcctcaagcactgccaggcggaccatcttctggatgagaagggcagggcacaatgtctcctccagagagagatggtacagtctctggagcagcaggcatcatccgacaagggctcctgctgcatcgtagctgctggcagccaaggccctgtcgtcccagcctggtctggcccccgggaggcccctgacagcctgtttgctgtccggaggcacctgtggggtagccatggaaacagcacattcccagagttcctccacaacatggactacttcaagttccacaacatgcgaccccctttcacctacgccacgctcatccgctgggccatcctggaggctccagagaagcagcggacactcaatgagatctaccactggttcacacgcatgtttgccttcttcagaaaccatcctgccacctggaagaacgccatccgccacaacctgagtctgcacaagtgctttgtgcgggtggagagcgagaagggggctgtgtggaccgtggatgagctggagttccgcaagaaacggagccagaggcccagcaggtgttccaaccctacacctggcccctga

SEQ ID NO: 177384 - DNA, 1296 bp, Artificial Sequence
  derived and/or modified sequence
atgcctaatccccgccctggcaaaccaagcgcgccgtcactggcgctgggcccctcaccaggggcaagccctagttggagggcagcgccaaaggcttctgacctgctaggggccagaggccctggcggaacatttcaggggcgggaccttagaggcggtgcccacgcatccagctcctctctgaatccaatgccacctagccagctgcaactacctacgttgcccctggtgatggtcgctcccagcggtgcccgacttgggccattgccacacctacaggctctcttgcaggacagaccccattttatgcaccagctaagcacagtcgacgctcacgctcgtactcccgtcctgcaagtacatccattggagtcgcccgccatgattagtcttacacctcccactacggccacaggggtattctccctgaaggctcggccggggctcccgcctgggatcaatgtggcttctctggagtgggttagccgagagccagctttgttatgcaccttccctaatccatccgctcctcgcaaagacagcactctgtctgccgtgccgcagtcttcatatcccctactcgcaaatggcgtttgtaagtggcctggctgcgaaaaggtgtttgaagaaccagaggattttctcaaacactgccaggcagaccatctgcttgatgagaagggccgcgcacaatgcctgcttcagcgggagatggtccagagcctagagcagcagctcgtgctcgaaaaagagaaattgtctgctatgcaagctcacctcgccggaaaaatggctcttacaaaagctagttctgtcgcctccagcgacaagggcagctgctgtatcgtggccgctggcagtcagggccctgttgtgcccgcctggagcggcccccgggaggctcctgattctctgttcgcagtgaggcggcacctgtggggcagccacggtaatagtacctttccagaatttctgcataatatggactacttcaaatttcataacatgcggccaccattcacctacgcaacattgattcgatgggcaattttagaagctcccgaaaaacagagaactctgaacgagatctaccactggtttacccgaatgttcgcatttttccgcaatcaccctgctacctggaaaaatgccataagacacaatctgagcctgcacaaatgtttcgtgcgagtggagtctgaaaagggtgccgtttggaccgtcgatgaactggagtttaggaagaagaggtctcagagacctagccgatgttcgaatcctaccccgggtccctag

SEQ ID NO: 177385 - DNA, 1215 bp, Artificial Sequence
  derived and/or modified sequence
atgccaaaccctagaccagggaagccttccgcaccctctctggccctgggaccatcacctggggccagtccaagctggagggctgcccctaaggccagcgacctgctgggagctcgaggacccgggggcacatttcagggtagagatttgaggggtggcgcgcatgcatcaagtagctcgcttaacccaatgccgccatctcagctgcagctccccactctcccactcgtaatggtcgcgccctccggggctagactcggccctttgcctcatcttcaagcattgctccaagatagacctcactttatgcaccagctgtctactgttgacgcccatgctcgaacaccagtgttacaagttcatcccctggagagtccggctatgattagcctgacaccaccgaccaccgcaacaggcgtattctctctgaaagcacgtccaggcctgccgcctgggattaatgtggccagtctcgagtgggtctcccgcgaaccagcactgctctgcacatttcctaaccccagcgccccaaggaaagactctaccctgagcgccgtaccgcaatcgtcttatcctctcctagccaacggggtctgcaagtggcccggatgcgagaaggtgttcgaagagccggaggatttcctcaagcattgtcaggctgatcacctgctggacgaaaaaggtagggcacaatgcctattgcagcgagaaatggtgcagtctctggaacagcaggcctcttcagacaagggatcatgctgcatcgtggctgctgggtcacaggggcccgtcgtacccgcttggagcggtcctagagaggcccctgatagtctgttcgccgtacggcgccacttgtgggggtctcacggtaattcaacatttccagagtttttacacaatatggattatttcaagttccacaacatgaggcctccatttacctatgctactctgattagatgggccatcctcgaagcgccagaaaagcagcggaccctcaacgagatttaccactggttcacccgaatgttcgctttttttaggaatcatcctgccacttggaagaatgccattcgtcataacctgtcgctccataaatgttttgtccgtgtcgaatccgagaaaggggccgtctggactgtcgatgaactggaattccggaaaaaaagaagtcaaagaccaagtcggtgtagtaaccctacacctgggccatag

SEQ ID NO: 177386 - DNA, 1296 bp, Artificial Sequence
  derived and/or modified sequence
atgcccaaccccaggcctgggaagcccagcgcccccagcctggccctgggccccagccctggggccagccccagctggagggctgcccccaaggccagtgacctgctgggcgcccggggccctgggggcaccttccagggccgggacctgcggggcggggcccacgccagcagcagcagcctgaaccccatgccacccagccagctgcagctgcccaccctgcccctggtgatggtggcccccagcggggcccggctgggccccctgccccacctgcaggccctgctgcaggaccggccccacttcatgcaccagctgagcacagtggatgcccacgcccggacccctgtgctgcaggtgcaccccctggagagccctgccatgatcagcctgaccccacccaccacagccaccggggtcttcagcctgaaggcccggcccggcctgcccccaggcatcaacgtggccagcctggagtgggtgtcccgggagcccgccctgctgtgcaccttccccaaccccagcgcccccaggaaggacagcaccctgtctgctgtgccccagagcagctaccccctgctggccaacggggtgtgcaagtggccaggctgtgagaaggtgtttgaggagcctgaggacttcctgaagcactgccaggccgaccacctgctggatgagaagggccgggcccagtgcctgctgcagcgggagatggtgcagagcctggagcagcagctggtgctggagaaggagaagctgagcgccatgcaggcccacctggccggcaagatggccctgaccaaggccagctctgtggccagcagtgacaagggcagctgctgcatcgtggccgccggcagccagggccctgtggtgcctgcctggagcggcccccgggaggccccagacagcctgtttgctgtgagaagacacctgtggggcagccacggcaacagcaccttccctgagttcctgcacaacatggactacttcaagttccacaacatgaggcctcccttcacctacgccaccctcatccgctgggccatcctggaggcccctgagaagcagaggaccctgaatgagatctaccactggttcaccaggatgtttgccttcttcaggaaccacccagccacctggaagaatgccatccgccacaacctgagcctgcacaagtgctttgtgcgggtggagagcgagaagggagctgtgtggacagtggatgagctggagttcaggaagaagaggagccagaggcccagccgctgcagcaaccccaccccaggcccctag

SEQ ID NO: 177387 - DNA, 1215 bp, Artificial Sequence
  derived and/or modified sequence
atgcccaaccccaggcctgggaagcccagcgcccccagcctggccctgggccccagccctggggccagccccagctggagggctgcccccaaggccagtgacctgctgggcgcccggggccctgggggcaccttccagggccgggacctgcggggcggggcccacgccagcagcagcagcctgaaccccatgccacccagccagctgcagctgcccaccctgcccctggtgatggtggcccccagcggggcccggctgggccccctgccccacctgcaggccctgctgcaggaccggccccacttcatgcaccagctgagcacagtggatgcccacgcccggacccctgtgctgcaggtgcaccccctggagagccctgccatgatcagcctgaccccacccaccacagccaccggggtcttcagcctgaaggcccggcccggcctgcccccaggcatcaacgtggccagcctggagtgggtgtcccgggagcccgccctgctgtgcaccttccccaaccccagcgcccccaggaaggacagcaccctgtctgctgtgccccagagcagctaccccctgctggccaacggggtgtgcaagtggccaggctgtgagaaggtgtttgaggagcctgaggacttcctgaagcactgccaggccgaccacctgctggatgagaagggccgggcccagtgcctgctgcagcgggagatggtgcagagcctggagcagcaggccagcagtgacaagggcagctgctgcatcgtggccgccggcagccagggccctgtggtgcctgcctggagcggcccccgggaggccccagacagcctgtttgctgtgcggcggcacctgtggggcagccacggcaacagcaccttccctgagttcctgcacaacatggactacttcaagttccacaacatgaggcctcccttcacctacgccaccctcatccgctgggccatcctggaggcccctgagaagcagaggaccctgaatgagatctaccactggttcaccaggatgtttgccttcttcaggaaccacccagccacctggaagaatgccatccgccacaacctgagcctgcacaagtgctttgtgcgggtggagagcgagaagggagctgtgtggacagtggatgagctggagttcaggaagaagaggagccagaggcccagccgctgcagcaaccccaccccaggcccctag

SEQ ID NO: 177388 - DNA, 1296 bp, Artificial Sequence
  derived and/or modified sequence
atgcccaacccccggcccggcaagcccagcgcccccagcctggccctcggcccatccccaggcgcgtccccaagctggagagcggctcccaaggcatccgatctgctgggtgcgcgtggccccggcggcacctttcaggggagggacttgcggggaggggctcacgcatcttcttcctccttaaatcccatgccccctagccaactgcagcttcctacccttcctctagtgatggtagctccctccggagccaggcttggtcccctccctcatctgcaggcccttctccaagaccggcctcacttcatgcaccaactgagcaccgtggacgcgcatgcgcgtactccagtgctccaggtacaccctttggaaagccccgccatgatttccctgacccctcccactaccgcaaccggtgtgttctccctgaaggctcgtccagggcttccacccggcattaacgttgcgtcgctcgagtgggtatcgcgcgaaccggccctgttatgcacctttccgaacccaagcgccccccggaaggactcgaccttgtctgctgtgcctcagtcctcttacccgctgctggccaacggagtatgcaagtggcccggatgtgagaaagttttcgaggagccagaagacttcctgaagcattgccaggcagaccatttgctggacgaaaagggacgggcccagtgcttgttgcaaagagaaatggtgcaatccctagagcagcagttagtgctcgagaaagagaagttgtccgccatgcaggcccacttggccggaaaaatggcattaacaaaggctagtagtgtggcaagttctgataaggggagctgttgcatagtagccgcggggagtcaggggccagtagtccctgcctggtctggcccacgagaagccccagacagtctgttcgcagtcagacgacacttgtgggggtctcacggcaactcaacctttccagagtttctacacaacatggattactttaagtttcataacatgaggccgccctttacgtatgccacactcattcgttgggcgatcctcgaggccccagagaaacagaggacactaaacgaaatctaccactggtttacacggatgtttgcgttctttcggaatcaccccgctacttggaagaatgccattcggcacaacttaagccttcacaagtgcttcgtccgggtggaatccgagaagggtgctgtgtggacagtagatgaactagaatttcgaaaaaaaagaagccaacgcccttctcgctgttccaaccccactcctggtccttag

SEQ ID NO: 177389 - DNA, 1215 bp, Artificial Sequence
  derived and/or modified sequence
atgcccaacccccggcccggcaagcccagcgcccccagcctggccctggggcctagccctggggctagcccgtcctggagggccgcacccaaggccagtgatctgcttggcgcgagagggcccgggggtacattccagggaagagacctcagggggggagctcacgcttcttcttctagtctcaatccaatgcctccctcccagctgcagcttcccaccctgccattagtaatggtggcaccatcaggagcccgattggggccactgcctcatctgcaagcgcttctgcaggatcgacctcatttcatgcatcagctgagcacagttgatgcacacgcaagaacgcctgtgctgcaagtgcatcccctcgagagccctgctatgattagcttgacacccccaaccaccgccactggagtgttttcactgaaggctcggcccggcctgccacccggaataaacgttgcatctctggagtgggtctcgagagagcctgcattgctttgtactttccctaacccctcagcccctagaaaggactctaccctgagtgcagttcctcaatcatcttatccccttcttgcaaacggcgtctgtaagtggcccgggtgtgagaaagttttcgaagagcctgaagactttctaaagcattgccaggccgaccatcttctagacgagaaaggcagagcccaatgcctgctccagagagagatggtacagagccttgaacagcaggcaagtagcgacaaagggtcatgttgtattgttgcagctggctctcaggggcctgtggtgcctgcttggtctggcccgcgcgaggcccctgattcactgttcgccgttcgacgacacctgtgggggagccatgggaatagcacattccctgagttcctgcacaacatggattattttaagttccacaatatgagacctccctttacctacgccactttgatccggtgggcaattcttgaggctcctgagaaacagcggactctgaacgaaatctatcactggtttactcgcatgttcgccttctttcgaaaccatccagcgacttggaaaaacgcaatcaggcataacctctctctccataagtgctttgtgcgggttgaatctgagaagggagccgtgtggactgttgacgagctcgaattccggaagaaacggagccagcgcccgtcccgttgctcaaaccccactcctggcccatag

SEQ ID NO: 177390 - DNA, 1296 bp, Artificial Sequence
  derived and/or modified sequence
atgccaaaccccagacctggtaagcctagcgccccatccctggccctcgggccttctccaggcgctagtccttcatggagagccgctccaaaagcctcagacctcctgggcgcacggggacctggaggcacgttccagggccgagacctccgcggaggcgcacatgccagcagctcctctttgaatccgatgccaccgtctcagctgcaactcccaaccctgcctctcgtcatggtcgctccaagtggggcaaggctcggtcccctgccacatctgcaggcgctacttcaggacaggccgcatttcatgcatcaactcagcaccgtggacgcccatgcaagaacaccagtgttacaggtgcaccctctggaaagcccagccatgatttctctgactccacccactactgcgaccggcgttttctccctgaaggccagacctggactccccccagggattaatgtagcctctctagagtgggtgagccgagaaccagctctgttgtgtaccttccccaacccttctgccccaagaaaggacagcacattgtccgctgtcccacagtcaagctatcctttgctagccaacggagtgtgtaagtggccgggatgcgagaaggtcttcgaggagccagaggacttcctaaaacactgtcaggccgatcatttactcgacgagaagggcagagcacagtgcctgctacaaagggaaatggtccagtcactcgagcagcaactcgttctggaaaaagaaaaactttctgctatgcaggctcaccttgctgggaagatggctcttacgaaggcctcttccgttgcatcctctgacaaaggttcctgttgtatcgtggctgctggttctcaaggaccagtagtgcccgcttggagcgggcctcgggaggcaccagattctctgttcgccgtgcgaagacatttgtggggctcgcacggtaacagcacatttcctgagttcttgcataatatggactattttaagttccataacatgcgacctccgttcacatacgccactctcatccggtgggccatcctggaggccccagagaaacagaggacactgaacgaaatatatcactggttcacacgcatgttcgctttttttaggaaccacccggctacatggaagaacgcgattcggcacaatctttccctacacaagtgcttcgtgagggtggaatccgaaaagggggcagtatggactgtggacgagttagaattcaggaagaaacgatcacagaggccgagcaggtgttccaatcccacgcccggtccttag

SEQ ID NO: 177391 - DNA, 1215 bp, Artificial Sequence
  derived and/or modified sequence
atgcctaatccccgtccaggcaagccttcagcaccttccctagccttagggccatctcccggagcaagtccttcatggcgagccgctccaaaagcgtccgatctgctcggcgcacgtgggcctggaggaactttccagggaagagatttacgaggcggtgcccacgcaagtagcagctccctgaacccaatgccacctagtcagctgcaactgcctaccttgcccctggtgatggttgccccttccggtgccaggctcggccctctcccacacttacaggctctgctgcaggacagacctcatttcatgcaccaactgagtaccgtggacgcacatgcaagaacccctgtcctgcaggtgcaccctttggaatctccagccatgatcagcttgactcctcccaccactgccacaggtgtcttctctttgaaagctcggcctggtcttccccctggcatcaacgtggctagtttagagtgggtgagccgcgagcctgccctcctgtgcacattccctaacccatccgctccacgaaaggattcaaccctgagcgcagtgccccagtctagctacccgcttctggccaatggagtctgcaagtggccaggctgtgagaaggtgtttgaggagccggaggacttcctgaaacattgccaggccgaccacctgctcgatgagaaggggagggcccagtgccttctgcagcgagagatggtccagtctctggaacagcaagcttctagcgataaggggagctgctgcatcgtcgcagctggatcgcaggggcctgtcgtgccagcctggtcaggcccaagagaagcccctgattccctctttgccgttagacgccatctctggggtagccacgggaactctactttccccgaatttttacacaatatggattatttcaagtttcacaatatgcggccacctttcacgtacgctactctgataagatgggccatacttgaagcaccagaaaagcaacggactttgaacgagatttaccattggtttactcgtatgttcgcgttctttagaaatcaccctgcaacctggaagaacgcaattcggcacaatctgtccttgcataagtgttttgtccgggtcgaatccgagaaaggggcagtctggaccgttgacgagctggagttcaggaaaaagcgatcccaacgcccaagccggtgctcgaaccccactcctggcccttag

SEQ ID NO: 177392 - DNA, 1296 bp, Artificial Sequence
  derived and/or modified sequence
atgcccaaccccagacccggcaagcccagcgcccccagcctggccctgggccccagccccggcgccagccccagctggagagccgcccccaaggccagcgacctgctgggcgccagaggccccggcggcaccttccagggcagagacctgagaggcggcgcccacgccagcagcagcagcctgaaccccatgccccccagccagctgcagctgcccaccctgcccctggtgatggtggcccccagcggcgccagactgggccccctgccccacctgcaggccctgctgcaggacagaccccacttcatgcaccagctgagcaccgtggacgcccacgccagaacccccgtgctgcaggtgcaccccctggagagccccgccatgatcagcctgaccccccccaccaccgccaccggcgtgttcagcctgaaggccagacccggcctgccccccggcatcaacgtggccagcctggagtgggtgagcagagagcccgccctgctgtgcaccttccccaaccccagcgcccccagaaaggacagcaccctgagcgccgtgccccagagcagctaccccctgctggccaacggcgtgtgcaagtggcccggctgcgagaaggtgttcgaggagcccgaggacttcctgaagcactgccaggccgaccacctgctggacgagaagggcagagcccagtgcctgctgcagagagagatggtgcagagcctggagcagcagctggtgctggagaaggagaagctgagcgccatgcaggcccacctggccggcaagatggccctgaccaaggccagcagcgtggccagcagcgacaagggcagctgctgcatcgtggccgccggcagccagggccccgtggtgcccgcctggagcggccccagagaggcccccgacagcctgttcgccgtgagaagacacctgtggggcagccacggcaacagcaccttccccgagttcctgcacaacatggactacttcaagttccacaacatgagaccccccttcacctacgccaccctgatcagatgggccatcctggaggcccccgagaagcagagaaccctgaacgagatctaccactggttcaccagaatgttcgccttcttcagaaaccaccccgccacctggaagaacgccatcagacacaacctgagcctgcacaagtgcttcgtgagagtggagagcgagaagggcgccgtgtggaccgtggacgagctggagttcagaaagaagagaagccagagacccagcagatgcagcaaccccacccccggcccctag

SEQ ID NO: 177393 - DNA, 1215 bp, Artificial Sequence
  derived and/or modified sequence
atgcccaaccccagacccggcaagcccagcgcccccagcctggccctgggccccagccccggcgccagccccagctggagagccgcccccaaggccagcgacctgctgggcgccagaggccccggcggcaccttccagggcagagacctgagaggcggcgcccacgccagcagcagcagcctgaaccccatgccccccagccagctgcagctgcccaccctgcccctggtgatggtggcccccagcggcgccagactgggccccctgccccacctgcaggccctgctgcaggacagaccccacttcatgcaccagctgagcaccgtggacgcccacgccagaacccccgtgctgcaggtgcaccccctggagagccccgccatgatcagcctgaccccccccaccaccgccaccggcgtgttcagcctgaaggccagacccggcctgccccccggcatcaacgtggccagcctggagtgggtgagcagagagcccgccctgctgtgcaccttccccaaccccagcgcccccagaaaggacagcaccctgagcgccgtgccccagagcagctaccccctgctggccaacggcgtgtgcaagtggcccggctgcgagaaggtgttcgaggagcccgaggacttcctgaagcactgccaggccgaccacctgctggacgagaagggcagagcccagtgcctgctgcagagagagatggtgcagagcctggagcagcaggccagcagcgacaagggcagctgctgcatcgtggccgccggcagccagggccccgtggtgcccgcctggagcggccccagagaggcccccgacagcctgttcgccgtgagaagacacctgtggggcagccacggcaacagcaccttccccgagttcctgcacaacatggactacttcaagttccacaacatgagaccccccttcacctacgccaccctgatcagatgggccatcctggaggcccccgagaagcagagaaccctgaacgagatctaccactggttcaccagaatgttcgccttcttcagaaaccaccccgccacctggaagaacgccatcagacacaacctgagcctgcacaagtgcttcgtgagagtggagagcgagaagggcgccgtgtggaccgtggacgagctggagttcagaaagaagagaagccagagacccagcagatgcagcaaccccacccccggcccctag

SEQ ID NO: 177394 - protein, 1339 aa, Artificial Sequence
  derived and/or modified sequence
MAAAGARLSPGPGSGLRGRPRLCFHPGPPPLLPLLLLFLLLLPPPPLLAGATAAASREPDSPCRLKTVTVSTLPALRESDIGWSGARAGAGAGTGAGAAAAAASPGSPGSAGTAAESRLLLFVRNELPGRIAVQDDLDNTELPFFTLEMSGTAADISLVHWRQQWLENGTLYFHVSMSSSGQLAQATAPTLQEPSEIVEEQMHILHISVMGGLIALLLLLLVFTVALYAQRRWQKRRRIPQKSASTEATHEIHYIPSVLLGPQARESFRSSRLQTHNSVIGVPIRETPILDDYDCEEDEEPPRRANHVSREDEFGSQVTHTLDSLGHPGEEKVDFEKKAAAEATQETVESLMQKFKESFRANTPIEIGQLQPPLRSTSAGKRKRRSKSRGGISFGRAKGTSGSEADDETQLTFYTEQYRSRRRSKGLLKSPVNKTALTLIAVSSCILAMVCGSQMSCPLTVKVTLHVPEHFIADGSSFVVSEGSYLDISDWLNPAKLSLYYQINATSPWVRDLCGQRTTDACEQLCDPETGECSCHEGYAPDPVHRHLCVRSDWGQSEGPWPYTTLERGYDLVTGEQAPEKILRSTFSLGQGLWLPVSKSFVVPPVELSINPLASCKTDVLVTEDPADVREEAMLSTYFETINDLLSSFGPVRDCSRNNGGCTRNFKCVSDRQVDSSGCVCPEELKPMKDGSGCYDHSKGIDCSDGFNGGCEQLCLQQTLPLPYDATSSTIFMFCGCVEEYKLAPDGKSCLMLSDVCEGPKCLKPDSKFNDTLFGEMLHGYNNRTQHVNQGQVFQMTFRENNFIKDFPQLADGLLVIPLPVEEQCRGVLSEPLPDLQLLTGDIRYDEAMGYPMVQQWRVRSNLYRVKLSTITLAAGFTNVLKILTKESSREELLSFIQHYGSHYIAEALYGSELTCIIHFPSKKVQQQLWLQYQKETTELGSKKELKSMPFITYLSGLLTAQMLSDDQLISGVEIRCEEKGRCPSTCHLCRRPGKEQLSPTPVLLEINRVVPLYTLIQDNGTKEAFKSALMSSYWCSGKGDVIDDWCRCDLSAFDANGLPNCSPLLQPVLRLSPTVEPSSTVVSLEWVDVQPAIGTKVSDYILQHKKVDEYTDTDLYTGEFLSFADDLLSGLGTSCVAAGRSHGEVPEVSIYSVIFKCLEPDGLYKFTLYAVDTRGRHSELSTVTLRTACPLVDDNKAEEIADKIYNLYNGYTSGKEQQMAYNTLMEVSASMLFRVQHHYNSHYEKFGDFVWRSEDELGPRKAHLILRRLERVSSHCSSLLRSAYIQSRVETVPYLFCRSEEVRPAGMVWYSILKDTKITCEEKMVSMARNTYGESKGR

SEQ ID NO: 177395 - protein, 1288 aa, Artificial Sequence
  derived and/or modified sequence
MAAAGARLSPGPGSGLRGRPRLCFHPGPPPLLPLLLLFLLLLPPPPLLAGATAAASREPDSPCRLKTVTVSTLPALRESDIGWSGARAGAGAGTGAGAAAAAASPGSPGSAGTAAESRLLLFVRNELPGRIAVQDDLDNTELPFFTLEMSGTAADISLVHWRQQWLENGTLYFHVSMSSSGQLAQATAPTLQEPSEIVEEQMHILHISVMGGLIALLLLLLVFTVALYAQRRWQKRRRIPQKSASTEATHEIHYIPSVLLGPQARESFRSSRLQTHNSVIGVPIRETPILDDYDCEEDEEPPRRANHVSREDEFGSQVTHTLDSLGHPGEEKVDFEKKGGISFGRAKGTSGSEADDETQLTFYTEQYRSRRRSKGLLKSPVNKTALTLIAVSSCILAMVCGSQMSCPLTVKVTLHVPEHFIADGSSFVVSEGSYLDISDWLNPAKLSLYYQINATSPWVRDLCGQRTTDACEQLCDPETGECSCHEGYAPDPVHRHLCVRSDWGQSEGPWPYTTLERGYDLVTGEQAPEKILRSTFSLGQGLWLPVSKSFVVPPVELSINPLASCKTDVLVTEDPADVREEAMLSTYFETINDLLSSFGPVRDCSRNNGGCTRNFKCVSDRQVDSSGCVCPEELKPMKDGSGCYDHSKGIDCSDGFNGGCEQLCLQQTLPLPYDATSSTIFMFCGCVEEYKLAPDGKSCLMLSDVCEGPKCLKPDSKFNDTLFGEMLHGYNNRTQHVNQGQVFQMTFRENNFIKDFPQLADGLLVIPLPVEEQCRGVLSEPLPDLQLLTGDIRYDEAMGYPMVQQWRVRSNLYRVKLSTITLAAGFTNVLKILTKESSREELLSFIQHYGSHYIAEALYGSELTCIIHFPSKKVQQQLWLQYQKETTELGSKKELKSMPFITYLSGLLTAQMLSDDQLISGVEIRCEEKGRCPSTCHLCRRPGKEQLSPTPVLLEINRVVPLYTLIQDNGTKEAFKSALMSSYWCSGKGDVIDDWCRCDLSAFDANGLPNCSPLLQPVLRLSPTVEPSSTVVSLEWVDVQPAIGTKVSDYILQHKKVDEYTDTDLYTGEFLSFADDLLSGLGTSCVAAGRSHGEVPEVSIYSVIFKCLEPDGLYKFTLYAVDTRGRHSELSTVTLRTACPLVDDNKAEEIADKIYNLYNGYTSGKEQQMAYNTLMEVSASMLFRVQHHYNSHYEKFGDFVWRSEDELGPRKAHLILRRLERVSSHCSSLLRSAYIQSRVETVPYLFCRSEEVRPAGMVWYSILKDTKITCEEKMVSMARNTYGESKGR

SEQ ID NO: 177396 - protein, 1335 aa, Artificial Sequence
  derived and/or modified sequence
MAAAGARLSPGPGSGLRGRPRLCFHPGPPPLLPLLLLFLLLLPPPPLLAGATAAASREPDSPCRLKTVTVSTLPALRESDIGWSGARAGAGAGTGAGAAAAAASPGSPGSAGTAAESRLLLFVRNELPGRIAVQDDLDNTELPFFTLEMSGTAADISLVHWRQQWLENGTLYFHVSMSSSGQLAQATAPTLQEPSEIVEEQMHILHISVMGGLIALLLLLLVFTVALYAQRRWQKRRRIPQKSASTEATHEIHYIPSVLLGPQARESFRSSRLQTHNSVIGVPIRETPILDDYDCEEDEEPPRRANHVSREDEFGSQVTHTLDSLGHPGEEKVDFEKKAAAEATQETVESLMQKFKESFRANTPIEIGQLQPPLRSTSAGKRKRRSKSRGGISFGRAKGTSGSEADDETQLTFYTEQYRSRRRSKGLLKSPVNKTALTLIAVSSCILAMVCGSQMSCPLTVKVTLHVPEHFIADGSSFVVSEGSYLDISDWLNPAKLSLYYQINATSPWVRDLCGQRTTDACEQLCDPETGECSCHEGYAPDPVHRHLCVRSDWGQSEGPWPYTTLERGYDLVTGEQAPEKILSLGQGLWLPVSKSFVVPPVELSINPLASCKTDVLVTEDPADVREEAMLSTYFETINDLLSSFGPVRDCSRNNGGCTRNFKCVSDRQVDSSGCVCPEELKPMKDGSGCYDHSKGIDCSDGFNGGCEQLCLQQTLPLPYDATSSTIFMFCGCVEEYKLAPDGKSCLMLSDVCEGPKCLKPDSKFNDTLFGEMLHGYNNRTQHVNQGQVFQMTFRENNFIKDFPQLADGLLVIPLPVEEQCRGVLSEPLPDLQLLTGDIRYDEAMGYPMVQQWRVRSNLYRVKLSTITLAAGFTNVLKILTKESSREELLSFIQHYGSHYIAEALYGSELTCIIHFPSKKVQQQLWLQYQKETTELGSKKELKSMPFITYLSGLLTAQMLSDDQLISGVEIRCEEKGRCPSTCHLCRRPGKEQLSPTPVLLEINRVVPLYTLIQDNGTKEAFKSALMSSYWCSGKGDVIDDWCRCDLSAFDANGLPNCSPLLQPVLRLSPTVEPSSTVVSLEWVDVQPAIGTKVSDYILQHKKVDEYTDTDLYTGEFLSFADDLLSGLGTSCVAAGRSHGEVPEVSIYSVIFKCLEPDGLYKFTLYAVDTRGRHSELSTVTLRTACPLVDDNKAEEIADKIYNLYNGYTSGKEQQMAYNTLMEVSASMLFRVQHHYNSHYEKFGDFVWRSEDELGPRKAHLILRRLERVSSHCSSLLRSAYIQSRVETVPYLFCRSEEVRPAGMVWYSILKDTKITCEEKMVSMARNTYGESKGR

SEQ ID NO: 177397 - DNA, 4020 bp, Artificial Sequence
  derived and/or modified sequence
atggccgctgcaggggcccggctgagccccgggccaggctcaggcctgagagggcgaccaagactttgttttcacccggggcccccccctctcttaccgctcctcctgctcttcctgctgctgctgcccccccccccacttttggcaggtgccacagctgccgcaagccgggaacccgacagcccttgtcggctcaaaactgtcacagtgtccaccctccctgctttgagggaatccgacatcggatggtccggagcccgggccggcgccggcgcaggtaccggagctggtgccgcagcggcagccgcctcaccgggtagccccgggtccgccggaaccgctgcagaatcgcgccttctgctgttcgtgaggaacgagttgccaggaaggatcgctgtgcaagacgatctggataacaccgagctcccctttttcactctggaaatgtcaggcactgctgctgatatctcactggtgcattggagacagcagtggttagaaaacgggaccctgtactttcacgtatccatgtcttctagcggacagcttgcccaggcaacagcgccaacactgcaggaaccttcagagatcgtggaggagcagatgcatatcctgcatattagtgtgatgggaggtctgattgctctgctactgctactgctggtgttcaccgtcgctctgtacgcacagagaagatggcagaagcgtagaaggattccacagaaatctgcttcaacggaggcaactcacgagatccattatatcccaagtgtgctgctggggcctcaggccagggagtcgttccgctcatcccgtcttcaaacgcacaatagcgtgataggcgtgcctataagagaaacaccgatcttggacgactacgactgtgaagaggatgaggagccaccgaggagggccaaccacgtttcacgggaggatgaattcggtagccaagtgacccatacgcttgactctctcggacaccccggtgaggaaaaagtcgattttgagaagaaagctgcggccgaggccacacaggaaaccgtggaatctcttatgcagaagttcaaggaatcatttcgcgcaaatacaccaattgagatagggcagctccaacctccactgaggtctacatccgcaggaaagaggaaacggaggtcaaagtcccgaggtggaatctctttcggacgagcgaaaggtacttccggcagtgaggcagacgacgaaactcagctgacattttatacagaacagtatcggtcacgacgtagatcaaaaggactactgaagtccccggtgaataaaactgccctcaccctcattgctgtaagctcctgtatcctggcaatggtatgcgggtctcagatgtcttgtcctctgactgtcaaggtgacattgcacgttccagagcattttattgcagatgggtcatcttttgtggttagtgaaggctcctacctggatatctccgactggcttaacccagccaagctatctttgtattaccagataaacgccacatctccttgggtaagggatctctgtggacagcggactactgacgcttgcgagcagttgtgcgacccggagacgggagaatgctcttgccacgaaggctacgcacccgatccggtgcatcgccacctttgtgtgagatcagattgggggcagtccgaaggtccctggccatatacaactcttgagagaggctacgatctcgtgacaggcgaacaggccccagaaaagatcctgcgctcgactttcagcctgggtcagggactgtggctgcccgtctctaaatctttcgtcgtaccacccgtggagctgtctatcaaccccctggcctcctgcaaaacagacgtcttggtaaccgaagatcccgccgacgtcagagaggaggcaatgctgagtacttacttcgaaactatcaatgaccttctgtcatcgttcggcccggtcagggactgctcccgcaacaatggagggtgcacacgcaatttcaaatgcgtgtcagaccgacaggtcgacagcagcggttgtgtctgtcctgaagagctgaagccaatgaaagatggctccggttgctacgatcactcaaagggcatcgattgctccgatggcttcaatgggggctgtgagcaattgtgtcttcagcagacgctgcctcttccttacgacgctacatccagcaccatttttatgttctgcggctgcgttgaagagtacaaactggccccagatgggaagtcttgtctgatgctgagcgacgtgtgtgaaggccccaagtgtctgaaaccagattctaagtttaacgatacattattcggcgagatgctgcatggctacaataatcgcacgcaacatgtaaaccaaggccaggtttttcagatgacttttcgggaaaacaactttatcaaggattttccccaactggccgacggtctgctggttattccactccccgtagaggaacaatgccgcggcgtgttgtccgagccattacccgatctgcagttgctgaccggtgatatacgttatgatgaggccatgggctacccgatggtacagcagtggcgcgtgcgcagtaatctttatagggtaaagttaagcacaattactctggctgccggcttcactaacgtattaaaaatactcacaaaggaaagttccagggaggaattgctctctttcattcagcactatggttcccattacatcgccgaagcgctatacgggagcgaactcacatgcatcattcacttccctagcaagaaggtacagcagcaactgtggttgcagtaccagaaggagaccaccgagctcggaagtaaaaaggaactcaagtcaatgcccttcatcacataccttagcggtttgctcaccgcccaaatgctttcagatgaccaattaatttccggagtggagatccgatgtgaggagaaaggcagatgcccctccacttgccatctgtgcaggaggcccgggaaggaacagctttcgccgactccagttctgctcgaaataaatcgagtcgtacccctctatacgcttattcaggacaatggtacaaaagaggcctttaagagtgctcttatgtccagttattggtgtagtggaaagggcgacgtgattgacgactggtgccgatgcgacctcagcgccttcgatgccaacggcctccccaactgctcacccctcttgcagccagtgctacgtctttctccaaccgtcgagccaagttctactgtggtgagcctggaatgggtcgatgttcagcctgcaatcggtaccaaggtcagtgattatatactccagcataaaaaggtggatgagtacactgacaccgacttgtatacaggcgaatttttgagcttcgccgatgacctgctgtctgggctcggcacatcttgcgttgcggccggccgttcccacggggaagtcccggaagtgagcatttacagtgtgatttttaaatgtctcgagccggacgggctctataagttcaccctatatgcagttgacacaagggggaggcatagcgagctctccacggtgaccctgcgcaccgcctgccccctggtagacgataataaggcagaggaaatagccgataagatctataatttgtacaatggctatacgagtggcaaagagcagcaaatggcttacaatacactgatggaggtgtccgcctcgatgctgtttcgtgttcagcaccattacaatagccactacgagaaattcggggactttgtgtggagatccgaagacgagctgggtcccaggaaagctcaccttattctgagaagactggaacgagtgtccagtcactgttcaagtttactcagatccgcttacattcaatctcgcgtcgaaaccgtcccataccttttttgcagatccgaagaggtgagacccgcaggaatggtctggtattctattctcaaggataccaaaataacttgtgaagagaaaatggtctcaatggccaggaatacgtatggggagagcaagggacgatag

SEQ ID NO: 177398 - DNA, 3867 bp, Artificial Sequence
  derived and/or modified sequence
atggcagccgcgggcgcacggcttagcccagggccagggtccggcctgaggggccgaccccgcctctgcttccaccccggtccaccaccccttctccccctacttttgctgttcttattgctgctgcctcctcccccactgcttgccggagcaactgctgccgcatcacgggagccagacagcccctgccgtttaaaaacagtgactgtaagcactctgcctgccctgagagagtctgacatcggctggagtggcgctcgggcaggtgctggtgcaggaaccggggccggagccgcggccgctgcagcctctcccgggtcccctggatctgccggcacagccgcagaaagccgtctgctgctcttcgtgcgcaatgagctgccaggacggattgctgtgcaagatgacctggacaacaccgaactaccattctttaccctggagatgtccgggacagccgctgacatttcacttgtgcactggcggcagcaatggctagagaatggtacattgtacttccacgtttctatgtctagtagcggtcagctggcccaggccacagctcccaccctgcaggagccctccgagatcgtcgaggagcagatgcatattttgcacatctccgtcatgggtggactcatagcactgctgttactgttgttagtcttcacggtcgctctctacgcccaaagacggtggcaaaagagacggcggattccccagaaaagtgcctctacagaagcgacacatgagattcactacatcccctcagtcctgttaggaccacaggctagagaaagctttaggtctagcaggctgcaaacccacaattcagttataggggtgccgattcgcgaaacccccattctggatgactacgattgcgaggaggacgaggagccccctcgaagagctaatcatgtttccagggaggatgagttcgggagccaggtcacacatacactggactccttaggtcaccctggggaagagaaggtggatttcgagaagaaggggggcatcagcttcgggcgggcgaaaggtaccagcgggagcgaagcagacgacgagacacagctcacattttatacagagcagtacaggagtcgaagacgaagtaagggtctactgaaatctcccgtgaataagacggcactgacactgattgccgtctctagctgcatcctcgcgatggtgtgtggttctcagatgtcctgtccccttaccgtgaaagtgacccttcatgttcctgagcattttatcgctgacggcagctccttcgtcgtgagtgagggctcctacctggatatttctgactggctgaatcctgcaaagctgtcgttgtactaccagatcaacgctaccagtccttgggttagagacctgtgcggacagcggactacagatgcgtgtgaacaattgtgtgaccctgagacaggtgaatgttcctgccacgagggctacgctccagatcctgtgcatagacacctatgtgtgcggtcggactggggacagtcagaaggcccgtggccttacactacgctcgagcgtgggtacgatctggtgaccggagagcaggcacccgagaagattctgcggagcacatttagccttggccagggtctgtggctgccggtctccaagtctttcgttgttccacccgtcgaactgagcatcaaccccctggcttcttgtaaaacagacgtcttagtgactgaggacccagccgacgtgcgggaggaagctatgctgtcgacatatttcgagacaattaacgatctcctaagctccttcgggcccgttagggattgcagccgcaacaacgggggctgcacccggaactttaagtgcgtcagcgacaggcaggtagactcatctgggtgtgtatgtccggaggaattgaagccgatgaaggatggttctggctgttacgatcactccaagggtattgactgtagtgatggtttcaacggagggtgcgagcagctgtgccttcagcagacactgcctctgccatacgacgccacttcatcaacaattttcatgttctgtgggtgcgtcgaggaatataaacttgctcccgatgggaagtcatgtttaatgttgtccgacgtgtgtgaaggaccgaagtgtctgaaacccgattccaagtttaatgacaccctatttggcgaaatgctgcatggctacaataaccgcacccagcatgtgaatcagggtcaggtatttcagatgacctttagggagaataatttcatcaaggattttccacagcttgcggacggtctgttggtaatccctctccccgtcgaagagcaatgccgcggagtcctcagtgaacctctgcctgacctgcagctgctcactggtgacattcgctatgatgaagctatggggtacccaatggtgcaacagtggagggtgaggtctaacctatatagagtcaaactaagtaccatcactctggctgcaggatttactaatgtactgaaaatcctgacaaaagaaagctcccgagaagagctgctcagttttattcaacactatgggagccactacattgcggaagctttatatgggtctgagctgacatgcatcatccacttcccgagcaagaaggtgcagcagcaactgtggctgcaataccagaaagagacaactgagctcgggagcaagaaagagttaaaaagcatgccattcattacttatttgagcggattactgacggctcagatgctgtcagacgaccagctgatctccggggtcgagattaggtgtgaggaaaaaggcagatgtccgagcacctgtcatctgtgccgacggccggggaaggagcaactgagtccaactcccgtcctgttagagatcaatagagtagttcctctatatacactgatccaggacaacgggaccaaggaagccttcaagtctgctctgatgagcagctactggtgctctggtaagggggatgtgattgatgattggtgtaggtgcgatttgtctgcgttcgatgccaatggcctcccaaactgcagcccactgctgcaacccgttctaaggctcagtcccacagtggaaccctcatcaacggtagtgtcactggagtgggttgatgtgcagccagccatcggcacgaaggtatcagactacattctgcaacataaaaaggtggacgagtacactgacactgatctatacaccggtgagtttctctccttcgctgacgatctactgtccggcctcgggacaagttgcgtggccgctggaagaagccatggtgaggtgccagaagtcagtatttactcagtcattttcaagtgtctagaacccgatggcctctataagtttacactgtacgctgtcgacacaagagggcgacattctgaactctctactgtgaccctacgaactgcttgtccgctggttgatgataacaaagccgaggagatcgccgataaaatatacaatctctataacggttatactagcggcaaagagcaacagatggcctataatacactgatggaagtgtccgcatccatgctctttagagtgcagcatcattacaacagccactacgagaagtttggcgacttcgtgtggagaagtgaggatgaactgggtcctcgcaaagctcacctaatcttgcggagacttgagagagtgtcaagtcactgttctagtctcctgagatctgcatatatccagagcagggtggagactgtcccctacttattctgccgatccgaggaagtccgcccagctggcatggtgtggtactcgatcctcaaagataccaagatcacctgtgaggagaagatggtttctatggctcgcaatacctatggtgaatctaaggggaggtag

SEQ ID NO: 177399 - DNA, 4008 bp, Artificial Sequence
  derived and/or modified sequence
atggcagcagctggcgcaagattgtcccctgggccagggagtggactaagagggaggccgagactctgttttcacccaggtccgccccctctactccctcttctattacttttccttctcctgttgccgccaccacccctactggctggcgctacagccgcggccagccgggagccggacagcccctgcaggctcaagactgttacagtctctactctgccagccctaagggagagtgacatcgggtggagtggcgctcgggctggagccggggccggaacgggcgcaggagctgctgcggccgctgcctctcctggctctcctggcagcgccggcactgcagcagaaagtcggctgctgcttttcgtccggaacgagctgccaggcaggatcgcagtgcaggatgatctggacaatacagagctcccattctttacgctggaaatgtccggtaccgctgcggatatttctctggtccactggcgccaacagtggctggaaaatgggacactgtacttccatgtgagcatgtcctcaagcggccaactcgctcaggcaaccgcacccaccttacaggagccttccgagattgtggaggagcaaatgcacattttgcatatctcggtgatggggggtctgatcgctttgctactccttctcttggtctttaccgtggcattatacgcccaacgtcgctggcaaaagagacgcagaataccacagaagagcgcatctaccgaagctacccacgagatccattatattccctccgtgttacttggaccacaggccagagagagttttcggtcatctcgcctccagactcacaactccgtcataggggtcccaattagggagacccctatcttggatgactatgattgcgaggaggatgaggagcctccaaggcgtgcaaatcatgtatcccgcgaggacgaatttggatcgcaagtgacacacactttggactcccttggtcatcctggagaggaaaaggtggactttgaaaagaaagccgccgcagaggccactcaggagacagtagagtcactgatgcagaaatttaaagaatcgttccgagccaatacccctatcgaaatcggacagcttcagcctccgctacgttctaccagcgcgggcaagaggaaaagaagatctaaatccagaggaggaatctcttttggaagagcaaaagggacgtcaggtagcgaagctgatgacgaaacccagcttacattttataccgaacagtatcgatcacggagacgaagtaaagggctcttgaaaagcccagtaaacaaaacagcccttacgctcatcgctgtttcttcctgcatactcgcaatggtgtgtggatcacagatgtcatgcccacttactgtgaaagtgaccttgcatgttccagagcattttatcgccgacggatcgagtttcgttgtctccgagggcagctatctggatattagcgattggctgaatccagccaagttgagcctgtattaccagatcaacgctacatcaccctgggtgcgagacttatgtggccaacggactaccgatgcttgcgaacagctgtgcgaccccgagacgggagaatgcagttgccacgaaggttacgcacccgatcccgtccaccgccacctctgtgttcgatcagactggggccagagcgaggggccctggccctacactaccctggaacgaggatatgatttggtaactggcgagcaggctccagaaaagatcctgtctcttgggcaaggtctgtggctccccgtgtccaaatccttcgtggttccacctgtggagctgtcaattaatcctctcgcttcgtgtaagaccgatgttctggtgaccgaggatccggctgatgtacgagaggaagcgatgctctcaacttattttgaaaccatcaacgatcttttatctagctttgggccagttcgcgactgttcacgaaacaatgggggctgtaccagaaacttcaagtgtgtttccgatcggcaggtggactctagcggttgcgtatgtcccgaggagctcaagccaatgaaggacggatctggctgttatgatcattcaaaggggatagactgcagcgacggatttaacggaggctgcgaacagctgtgcttgcaacagaccctgcccctaccatacgacgctacttctagcacgatatttatgttttgcggctgcgtggaagagtataaactagcgcccgacgggaagtcttgccttatgctaagcgacgtgtgtgaggggccaaagtgcttaaagcctgactctaaattcaatgataccctcttcggcgagatgctgcacggctacaataacaggactcagcacgttaatcagggccaggtcttccaaatgacctttagagagaataacttcatcaaagacttcccccaactcgccgacggcctgctggtcatcccgcttccggtcgaagaacagtgcaggggcgtgctgagtgagcctttgcctgacctccaattgctgaccggggacataaggtacgacgaggcaatggggtacccaatggtacaacagtggcgtgtgaggtccaacttgtaccgcgtcaaactgagtacaatcacacttgccgcaggcttcaccaacgtcctgaaaattctgacaaaggagtcctcccgggaagagctactgtcattcatccagcactacggctctcactacatagcagaagctctttacggctcagagttgacatgcattattcatttccctagcaagaaagtccagcaacagctgtggttacaataccagaaggaaaccaccgaacttgggtctaagaaagagttgaagagcatgccctttataacatatttgagcggcctgttgactgctcagatgttatcagacgaccagctcatctccggggtcgaaatccggtgcgaggagaaagggcggtgcccatccacctgccatctttgccggcgacctggcaaggaacagctgtcgccaaccccagttcttctcgagattaatcgggttgtacctctgtacaccctgattcaggacaacggtactaaagaggcctttaaaagcgcattaatgtcttcctactggtgctccggcaaaggcgacgtgatcgatgactggtgcaggtgcgatttgtctgcctttgatgcgaatgggctgcccaactgttcacctctcttacagcccgtgctgcggctcagtccaaccgtggaaccttcttctaccgtggtatcacttgagtgggtggatgtacagccggccattgggaccaaagtgagcgattatattttacaacacaagaaggttgacgagtacacagataccgatctttacacgggtgaatttttatcctttgccgacgacctcctgagcggcctagggacctcttgtgttgccgccggcagaagccatggcgaggtgccggaggtcagtatttattctgtgatcttcaagtgcttggagcccgatggactctacaaatttacattatacgccgttgatacacggggaagacatagtgaactgtcgaccgtcactctgcgcacagcctgtcctcttgtggacgataacaaggcagaagaaatcgcagataagatctataacctgtacaatgggtataccagcggaaaggagcaacagatggcttacaacacactgatggaggtttcggctagcatgctgtttcgagttcagcatcattacaactcacactacgaaaagtttggagatttcgtgtggcgctcagaggacgagctgggccctcgcaaagcccatttaatcctacgacggctggagcgcgtttcctctcattgctcatccttgctgaggtctgcttatattcaaagtcgggtggaaacggtgccttatttattttgtaggtccgaagaggtgaggcctgcgggcatggtctggtattcgattctgaaggacaccaagatcacatgtgaggagaagatggtgagtatggctcggaacacatatggtgagtccaaaggtaggtag

SEQ ID NO: 177400 - DNA, 4020 bp, Artificial Sequence
  derived and/or modified sequence
atggctgctgctggggcccggctgagccctggccctggcagcggcctgcggggccggccccggctgtgcttccaccctggccccccacccctgctgcccctgctgctgctcttcctgctgctgctgcccccaccacccctgctggccggggccacagctgctgccagccgggagccagacagcccctgccgcctgaagacagtgacagtgtccaccctgcctgccctgcgggagagtgacatcggctggagcggggcccgggccggggccggggccggcaccggggccggggctgctgctgctgctgccagccctggcagccctggcagcgctggaacagctgctgagagccggctgctgctgtttgtgagaaatgagctgcccggcagaattgctgtgcaggatgacctggacaacacagagctgcccttcttcaccctggagatgagcggcacagctgctgacatcagcctggtgcactggaggcagcagtggctggagaatggcaccctgtacttccacgtgtccatgagcagcagcggccagctggcccaggccacagcccccaccctgcaggagcccagcgagatcgtggaggagcagatgcacatcctgcacatctctgtgatgggcggcctcatcgccctgctgctgctgctgctggtgttcaccgtggccctgtatgcccagaggcgctggcagaagagaagacgcatcccccagaagagcgccagcacagaggccacccatgagatccactacatccccagcgtgctgctgggcccccaggcccgggagagcttccgcagcagccggctgcagacccacaacagcgtcatcggcgtgcccatccgggagacccccatcctggatgattatgactgtgaagaagatgaggagcccccaagaagagccaaccacgtgtccagagaagatgaatttggcagccaggtgacccacaccctggacagcctgggccaccctggagaggagaaggtggactttgagaagaaggctgctgctgaggccacccaggagaccgtggagagcctgatgcagaagttcaaggagagcttccgggccaacacccccattgaaattggccagctgcagccccccctgcggagcaccagcgctgggaagaggaagaggaggagcaagagccggggcggcatcagctttggccgggccaagggcaccagcggcagcgaggctgatgatgagacccagctgaccttctacacagagcagtaccgcagcagaagaagaagcaagggcctgctgaagagccctgtgaacaagacagccctgaccctgattgctgtgagcagctgcatcctggccatggtgtgtggcagccagatgagctgccccctgactgtgaaggtgaccctgcacgtgcctgagcacttcatcgcagatggcagcagctttgtggtgtctgagggcagctacctggacatcagtgactggctgaacccagccaagctgagcctgtactaccagatcaatgccaccagcccctgggtgcgggacctgtgtggccagaggaccacagatgcctgtgagcagctgtgtgaccctgagaccggggagtgcagctgccacgagggctacgccccagaccctgtgcaccgccacctgtgtgtgcggagtgactggggccagagcgagggcccctggccctacaccaccctggagcggggctatgacctggtgactggagagcaggcccctgagaagatcctgcggagcaccttcagcctgggccagggcctgtggctgcctgtgtccaagagctttgtggtgccccctgtggagctgagcatcaaccccctggccagctgcaagacagatgtgctggtgacagaggaccctgcagatgtgcgggaggaggccatgctgagcacctactttgagaccatcaatgacctgctgagcagctttggacctgtgcgggactgcagcagaaataatggaggctgcaccaggaacttcaagtgtgtgtctgaccggcaggtggacagcagcggctgtgtgtgcccagaggagctgaagcccatgaaggatggcagcggctgctatgaccacagcaaaggaattgactgcagtgatggcttcaacggcggctgtgagcagctgtgcctgcagcagaccctgcccctgccctatgatgccaccagcagcaccatcttcatgttctgtggctgtgtggaggagtacaagctggccccagatggcaagagctgcctgatgctgagtgatgtgtgtgagggccccaagtgcctgaagccagacagcaagttcaatgacaccctgtttggagagatgctgcacggctacaacaacagaacccagcacgtgaaccagggccaggtgttccagatgaccttccgggagaacaacttcatcaaggacttcccccagctggctgatggcctgctggtgatccccctgcctgtggaggagcagtgccggggcgtgctgtctgagcccctgcctgacctgcagctgctgaccggggacatccgctatgatgaggccatgggctaccccatggtgcagcagtggagggtgcgcagcaacctgtacagagtgaagctgagcaccatcaccctggccgccggcttcaccaacgtgctgaagatcctgaccaaggagagcagccgggaggagctgctgtccttcatccagcactacggcagccactacatcgccgaggccctgtatggcagcgagctgacctgcatcatccacttccccagcaagaaggtgcagcagcagctgtggctgcagtaccagaaggagaccacagagctgggcagcaagaaggagctgaagtccatgcccttcatcacctacctgagcggcctgctgacagcccagatgctgagtgatgaccagctgatctctggagtggagatccgctgtgaggagaagggccgctgccccagcacctgccacctgtgcagaagacctgggaaggagcagctgagccccacccctgtgctgctggagatcaacagagtggtgcccctgtacaccctcatccaggacaatggcaccaaggaggccttcaagagcgccctgatgagcagctactggtgcagcgggaaaggagatgtgattgatgactggtgccgctgtgacctgagcgcctttgatgccaacggcctgcccaactgcagccccctgctgcagcctgtgctgcggctgagccccaccgtggagcccagcagcacagtggtgtccctggagtgggtggatgtgcagcctgccatcggcaccaaggtgtctgactacatcctgcagcacaagaaggtggatgagtacacagacacagacctgtacaccggggagttcctgagctttgctgatgacctgctgagcggcctgggcaccagctgtgtggccgccggccgcagccatggagaggtgcctgaggtgtccatctacagcgtcatcttcaagtgcctggagccagatggcctgtacaagttcaccctgtatgctgtggacacccggggccgccacagcgagctgagcacagtgaccctgaggacagcctgccccctggtggatgacaacaaggccgaggagattgctgacaagatctacaacctgtacaacggctacaccagcggcaaggagcagcagatggcctacaacaccctgatggaggtgtctgcctccatgctgttccgggtgcagcaccactacaacagccactatgagaagtttggagactttgtgtggaggagtgaagatgagctgggccccaggaaggcccacctgatcctgcggcggctggagcgggtgagcagccactgcagcagcctgctgcggagcgcctacatccagagccgggtggagaccgtgccctacctgttctgccgctctgaggaggtgcggcctgctggcatggtgtggtacagcatcctgaaggacaccaagatcacctgtgaggagaagatggtgtccatggccaggaacacctatggagagagcaaaggaagatag

SEQ ID NO: 177401 - DNA, 3867 bp, Artificial Sequence
  derived and/or modified sequence
atggctgctgctggggcccggctgagccctggccctggcagcggcctgcggggccggccccggctgtgcttccaccctggccccccacccctgctgcccctgctgctgctcttcctgctgctgctgcccccaccacccctgctggccggggccacagctgctgccagccgggagccagacagcccctgccgcctgaagacagtgacagtgtccaccctgcctgccctgcgggagagtgacatcggctggagcggggcccgggccggggccggggccggcaccggggccggggctgctgctgctgctgccagccctggcagccctggcagcgctggaacagctgctgagagccggctgctgctgtttgtgagaaatgagctgcccggcagaattgctgtgcaggatgacctggacaacacagagctgcccttcttcaccctggagatgagcggcacagctgctgacatcagcctggtgcactggaggcagcagtggctggagaatggcaccctgtacttccacgtgtccatgagcagcagcggccagctggcccaggccacagcccccaccctgcaggagcccagcgagatcgtggaggagcagatgcacatcctgcacatctctgtgatgggcggcctcatcgccctgctgctgctgctgctggtgttcaccgtggccctgtatgcccagaggcgctggcagaagagaagacgcatcccccagaagagcgccagcacagaggccacccatgagatccactacatccccagcgtgctgctgggcccccaggcccgggagagcttccgcagcagccggctgcagacccacaacagcgtcatcggcgtgcccatccgggagacccccatcctggatgattatgactgtgaagaagatgaggagcccccaagaagagccaaccacgtgtccagagaagatgaatttggcagccaggtgacccacaccctggacagcctgggccaccctggagaggagaaggtggactttgagaagaagggcggcatcagctttggccgggccaagggcaccagcggcagcgaggctgatgatgagacccagctgaccttctacacagagcagtaccgcagcagaagaagaagcaagggcctgctgaagagccctgtgaacaagacagccctgaccctgattgctgtgagcagctgcatcctggccatggtgtgtggcagccagatgagctgccccctgactgtgaaggtgaccctgcacgtgcctgagcacttcatcgcagatggcagcagctttgtggtgtctgagggcagctacctggacatcagtgactggctgaacccagccaagctgagcctgtactaccagatcaatgccaccagcccctgggtgcgggacctgtgtggccagaggaccacagatgcctgtgagcagctgtgtgaccctgagactggagaatgtagctgccacgagggctacgccccagaccctgtgcaccgccacctgtgtgtgcggagtgactggggccagagcgagggcccctggccctacaccaccctggagcggggctatgacctggtgactggagagcaggcccctgagaagatcctgcggagcaccttcagcctgggccagggcctgtggctgcctgtgtccaagagctttgtggtgccccctgtggagctgagcatcaaccccctggccagctgcaagacagatgtgctggtgacagaagatcctgcagatgtgcgggaggaggccatgctgagcacctactttgagaccatcaatgacctgctgagcagctttggacctgtgcgggactgcagcaggaacaacggcggctgcaccaggaacttcaagtgtgtgtctgaccggcaggtggacagcagcggctgtgtgtgcccagaggagctgaagcccatgaaggatggcagcggctgctatgaccacagcaagggcatcgactgcagtgatggcttcaatggaggctgtgagcagctgtgcctgcagcagaccctgcccctgccctatgatgccaccagcagcaccatcttcatgttctgtggctgtgtggaggagtacaagctggccccagatggcaagagctgcctgatgctgagtgatgtgtgtgagggccccaagtgcctgaagccagacagcaagttcaatgacaccctgtttggagagatgctgcacggctacaacaacagaacccagcacgtgaaccagggccaggtgttccagatgaccttccgggagaacaacttcatcaaggacttcccccagctggctgatggcctgctggtgatccccctgcctgtggaggagcagtgccggggcgtgctgtctgagcccctgcctgacctgcagctgctgactggagacatccgctatgatgaggccatgggctaccccatggtgcagcagtggagggtgcgcagcaacctgtacagagtgaagctgagcaccatcaccctggccgccggcttcaccaacgtgctgaagatcctgaccaaggagagcagccgggaggagctgctgtccttcatccagcactacggcagccactacatcgccgaggccctgtatggcagcgagctgacctgcatcatccacttccccagcaagaaggtgcagcagcagctgtggctgcagtaccagaaggagaccacagagctgggcagcaagaaggagctgaagtccatgcccttcatcacctacctgagcggcctgctgacagcccagatgctgagtgatgaccagctgatcagcggcgtggagatccgctgtgaggagaagggccgctgccccagcacctgccacctgtgccggcggcctgggaaggagcagctgagccccacccctgtgctgctggagatcaacagagtggtgcccctgtacaccctcatccaggacaatggcaccaaggaggccttcaagagcgccctgatgagcagctactggtgcagcgggaaaggagatgtgattgatgactggtgccgctgtgacctgagcgcctttgatgccaacggcctgcccaactgcagccccctgctgcagcctgtgctgcggctgagccccaccgtggagcccagcagcacagtggtgtccctggagtgggtggatgtgcagcctgccatcggcaccaaggtgtctgactacatcctgcagcacaagaaggtggatgagtacacagacacagacctgtacacaggagagttcctgagctttgctgatgacctgctgagcggcctgggcaccagctgtgtggccgccggccgcagccacggggaggtgcctgaggtgtccatctacagcgtcatcttcaagtgcctggagccagatggcctgtacaagttcaccctgtatgctgtggacacccggggccgccacagcgagctgagcacagtgaccctgaggacagcctgccccctggtggatgacaacaaggccgaggagattgctgacaagatctacaacctgtacaacggctacaccagcggcaaggagcagcagatggcctacaacaccctgatggaggtgtctgcctccatgctgttccgggtgcagcaccactacaacagccactatgagaagtttggagactttgtgtggaggagtgaagatgagctgggccccaggaaggcccacctgatcctgcggcggctggagcgggtgagcagccactgcagcagcctgctgcggagcgcctacatccagagccgggtggagaccgtgccctacctgttctgccgctctgaggaggtgcggcctgctggcatggtgtggtacagcatcctgaaggacaccaagatcacctgtgaggagaagatggtgtccatggccaggaacacctacggggagagcaagggccgctag

SEQ ID NO: 177402 - DNA, 4008 bp, Artificial Sequence
  derived and/or modified sequence
atggctgctgctggggcccggctgagccctggccctggcagcggcctgcggggccggccccggctgtgcttccaccctggccccccacccctgctgcccctgctgctgctcttcctgctgctgctgcccccaccacccctgctggccggggccacagctgctgccagccgggagccagacagcccctgccgcctgaagacagtgacagtgtccaccctgcctgccctgcgggagagtgacatcggctggagcggggcccgggccggggccggggccggcaccggggccggggctgctgctgctgctgccagccctggcagccctggcagcgctggaacagctgctgagagccggctgctgctgtttgtgagaaatgagctgcccggcagaattgctgtgcaggatgacctggacaacacagagctgcccttcttcaccctggagatgagcggcacagctgctgacatcagcctggtgcactggaggcagcagtggctggagaatggcaccctgtacttccacgtgtccatgagcagcagcggccagctggcccaggccacagcccccaccctgcaggagcccagcgagatcgtggaggagcagatgcacatcctgcacatctctgtgatgggcggcctcatcgccctgctgctgctgctgctggtgttcaccgtggccctgtatgcccagaggcgctggcagaagagaagacgcatcccccagaagagcgccagcacagaggccacccatgagatccactacatccccagcgtgctgctgggcccccaggcccgggagagcttccgcagcagccggctgcagacccacaacagcgtcatcggcgtgcccatccgggagacccccatcctggatgattatgactgtgaagaagatgaggagcccccaagaagagccaaccacgtgtccagagaagatgaatttggcagccaggtgacccacaccctggacagcctgggccaccctggagaggagaaggtggactttgagaagaaggctgctgctgaggccacccaggagaccgtggagagcctgatgcagaagttcaaggagagcttccgggccaacacccccattgaaattggccagctgcagccccccctgcggagcaccagcgctgggaagaggaagaggaggagcaagagccggggcggcatcagctttggccgggccaagggcaccagcggcagcgaggctgatgatgagacccagctgaccttctacacagagcagtaccgcagcagaagaagaagcaagggcctgctgaagagccctgtgaacaagacagccctgaccctgattgctgtgagcagctgcatcctggccatggtgtgtggcagccagatgagctgccccctgactgtgaaggtgaccctgcacgtgcctgagcacttcatcgcagatggcagcagctttgtggtgtctgagggcagctacctggacatcagtgactggctgaacccagccaagctgagcctgtactaccagatcaatgccaccagcccctgggtgcgggacctgtgtggccagaggaccacagatgcctgtgagcagctgtgtgaccctgagaccggggagtgcagctgccacgagggctacgccccagaccctgtgcaccgccacctgtgtgtgcggagtgactggggccagagcgagggcccctggccctacaccaccctggagcggggctatgacctggtgactggagagcaggcccctgagaagatcctgagcctgggccagggcctgtggctgcctgtgtccaagagctttgtggtgccccctgtggagctgagcatcaaccccctggccagctgcaagacagatgtgctggtgacagaggaccctgcagatgtgcgggaggaggccatgctgagcacctactttgagaccatcaatgacctgctgagcagctttggacctgtgcgggactgcagcagaaataatggaggctgcaccaggaacttcaagtgtgtgtctgaccggcaggtggacagcagcggctgtgtgtgcccagaggagctgaagcccatgaaggatggcagcggctgctatgaccacagcaaaggaattgactgcagtgatggcttcaacggcggctgtgagcagctgtgcctgcagcagaccctgcccctgccctatgatgccaccagcagcaccatcttcatgttctgtggctgtgtggaggagtacaagctggccccagatggcaagagctgcctgatgctgagtgatgtgtgtgagggccccaagtgcctgaagccagacagcaagttcaatgacaccctgtttggagagatgctgcacggctacaacaacagaacccagcacgtgaaccagggccaggtgttccagatgaccttccgggagaacaacttcatcaaggacttcccccagctggctgatggcctgctggtgatccccctgcctgtggaggagcagtgccggggcgtgctgtctgagcccctgcctgacctgcagctgctgaccggggacatccgctatgatgaggccatgggctaccccatggtgcagcagtggagggtgcgcagcaacctgtacagagtgaagctgagcaccatcaccctggccgccggcttcaccaacgtgctgaagatcctgaccaaggagagcagccgggaggagctgctgtccttcatccagcactacggcagccactacatcgccgaggccctgtatggcagcgagctgacctgcatcatccacttccccagcaagaaggtgcagcagcagctgtggctgcagtaccagaaggagaccacagagctgggcagcaagaaggagctgaagtccatgcccttcatcacctacctgagcggcctgctgacagcccagatgctgagtgatgaccagctgatctctggagtggagatccgctgtgaggagaagggccgctgccccagcacctgccacctgtgcagaagacctgggaaggagcagctgagccccacccctgtgctgctggagatcaacagagtggtgcccctgtacaccctcatccaggacaatggcaccaaggaggccttcaagagcgccctgatgagcagctactggtgcagcgggaaaggagatgtgattgatgactggtgccgctgtgacctgagcgcctttgatgccaacggcctgcccaactgcagccccctgctgcagcctgtgctgcggctgagccccaccgtggagcccagcagcacagtggtgtccctggagtgggtggatgtgcagcctgccatcggcaccaaggtgtctgactacatcctgcagcacaagaaggtggatgagtacacagacacagacctgtacaccggggagttcctgagctttgctgatgacctgctgagcggcctgggcaccagctgtgtggccgccggccgcagccatggagaggtgcctgaggtgtccatctacagcgtcatcttcaagtgcctggagccagatggcctgtacaagttcaccctgtatgctgtggacacccggggccgccacagcgagctgagcacagtgaccctgaggacagcctgccccctggtggatgacaacaaggccgaggagattgctgacaagatctacaacctgtacaacggctacaccagcggcaaggagcagcagatggcctacaacaccctgatggaggtgtctgcctccatgctgttccgggtgcagcaccactacaacagccactatgagaagtttggagactttgtgtggaggagtgaagatgagctgggccccaggaaggcccacctgatcctgcggcggctggagcgggtgagcagccactgcagcagcctgctgcggagcgcctacatccagagccgggtggagaccgtgccctacctgttctgccgctctgaggaggtgcggcctgctggcatggtgtggtacagcatcctgaaggacaccaagatcacctgtgaggagaagatggtgtccatggccaggaacacctatggagagagcaaaggaagatag

SEQ ID NO: 177403 - DNA, 4020 bp, Artificial Sequence
  derived and/or modified sequence
atggccgccgccggcgcccggctgagccccggccccggcagcggcctgcggggaagaccacgcttgtgtttccaccctggaccaccaccattgcttcctttgcttctgttgtttttactactgctgccgcctcccccgctgctggccggtgctactgcggcggcatcaagggaacctgacagcccttgcagactgaaaaccgtcacggtgtctactctccctgcactgagagagtccgatatcggttggtcgggagcacgtgcaggggcaggcgcgggtacaggagccggggccgcggcagccgctgcatcccccggaagtcctggcagcgctgggacagccgctgagtcgcgattgctgctgttcgtacgcaatgaattacctggtcgaatagccgtacaggatgatctcgacaataccgaactgcctttctttaccttggaaatgagcgggaccgctgcagatatttcactcgttcattggcggcaacaatggctcgaaaatggaacactgtattttcacgttagcatgagcagctcgggccagctagctcaggctactgctcctacattacaggaaccctccgaaatcgtagaagaacagatgcatatcttacacatcagtgttatggggggtctgatcgcactgttacttttgttgcttgtgtttactgtcgctctatacgcccagaggcgctggcaaaaaaggcgccggattcctcagaagtctgcttctaccgaagctacccacgaaattcactatatcccctcagtactgctcggaccccaagctagagaaagctttcggagctccaggcttcaaacccacaattccgtgatcggcgtgccaattcgggagaccccgatcctggacgattatgactgtgaggaagacgaggaacccccacgtcgggcgaaccacgtgtcaagagaggatgaattcggctcccaggttacgcatactctggattccctgggccaccccggggaggagaaagtggatttcgaaaagaaggcagccgcagaggcaactcaagagaccgtggaaagcctgatgcagaaatttaaagaatcctttcgagcgaacacacctatcgaaattggtcagctgcaaccacctctaaggtcaacttccgccggtaagagaaaaaggcgctcgaagagtcggggcggcatttccttcggacgcgctaaaggaacctcaggcagcgaagcggacgacgaaacccagctgactttctatactgagcaatacaggtccaggcgccgctcaaaggggctgctgaagtccccagtcaataaaacagccctgactctgatcgcagtcagtagttgtattttggctatggtgtgcggcagtcagatgagctgtcccctcacagtcaaggttacccttcatgtgccggaacatttcattgccgacggatcatcttttgtggtatccgagggatcctacttggacatatccgattggctcaatccagccaagctgtccctgtactaccagataaacgccacatcaccttgggttcgagatctctgcgggcagagaaccacggacgcttgtgagcagctgtgtgacccagaaaccggggagtgttcatgccatgaggggtacgcgccagacccagtccatagacatctgtgtgtgcgatcagactgggggcaaagcgaagggccttggccttataccacgttggaacgcgggtacgatctcgttacaggagaacaggcaccagaaaagatcctccgctctaccttctccctcggtcagggactgtggctcccagtgagtaagtcattcgtggtgccccccgttgagttgtcaattaaccctctcgcctcctgcaaaactgatgtactcgttactgaagatcccgccgatgttcgggaagaagctatgctatcaacctattttgagacaataaatgaccttctgagtagttttggccccgtgagggactgttctcggaataacggcggctgtactcggaacttcaaatgcgtgtccgaccggcaggtggatagcagtgggtgcgtgtgccccgaggagctaaaaccaatgaaagatggatccggctgttacgatcacagtaaggggatcgactgctctgatggtttcaacggcgggtgtgaacaactgtgcttgcagcagacacttccgctgccttacgacgcaacttcctccaccatattcatgttctgtgggtgcgtagaggagtataagttagcacccgatggtaagagctgtctgatgctcagcgatgtgtgtgaaggccccaagtgcctcaaaccagacagcaagttcaacgataccttattcggcgagatgctgcatggctacaacaatcgtacacagcatgtcaaccagggccaggtgttccagatgactttcagagaaaataattttataaaagattttccacagctggccgacggcctacttgtcatccccctgcctgtcgaagagcaatgcaggggcgtgctctcagagcccctgcccgacctccagctgttaaccggagatatccgctatgatgaagcaatggggtatcccatggtccaacaatggcgagttcggagtaacctgtacagggtaaagctgtctacaatcaccctggctgcagggtttacaaatgtgcttaaaatcctgacgaaagaaagctctcgcgaggaactcctgtcctttatccagcactacgggagccactatatcgctgaggccctgtatgggagcgagttgacatgtattattcatttcccgagtaagaaagtgcaacagcagttgtggctccagtatcagaaggaaaccaccgaattgggcagtaagaaagagctcaaatctatgcctttcatcacatatttaagcgggctcctaactgcccagatgctgagcgatgaccagcttatctccggcgtggaaattagatgcgaggagaaaggaagatgtccctctacctgtcacctctgcagacggccaggaaaggagcagctctcccccaccccggtgctgctggagataaaccgtgtggtgcccttatatacactgattcaggataacggtaccaaagaagcctttaagtctgccctcatgtcttcatattggtgcagtggcaagggtgacgttattgatgactggtgccggtgcgacctgagcgcgtttgatgctaatggactgcctaactgcagtccactcctgcagcccgtgctgcggctgtcccctacagttgagccctcatccacagtagtttcattggagtgggtggacgtacagcctgcaattggtacaaaggtctccgattacatcctgcaacataaaaaggtggacgagtacactgacacagacctgtatacaggggaattcctgtcatttgcggacgacctcttgtcaggactcggtacttcctgtgtggccgcaggcaggagccatggtgaggtgcccgaagtctccatctattccgtgattttcaaatgtctggaacctgatggactttacaaatttactctgtacgccgtggataccagagggcgccactcagaacttagtactgtaacgctccggactgcttgccccttagtcgacgacaacaaggctgaggaaatcgccgacaagatctacaacctgtacaatggatacacgtcagggaaagagcaacagatggcttacaacaccctgatggaggtaagtgcttccatgctcttccgagtccaacaccactacaattcacactacgaaaagttcggtgattttgtctggcgttcagaggacgaactgggacctaggaaagctcacctcattctgcgtcgactggaacgagtgagctctcactgcagtagtctacttaggtccgcttatatacagagccgggttgaaactgtcccatatttgttctgtagatccgaggaagtgaggcccgcggggatggtgtggtactccattctcaaagacactaaaatcacatgtgaggagaagatggtgtccatggcacggaacacatatggagagtcaaaaggaaggtag

SEQ ID NO: 177404 - DNA, 3867 bp, Artificial Sequence
  derived and/or modified sequence
atggccgccgccggcgcccggctgagccccggccccggcagcggcctcaggggtcgtcccagactttgcttccaccctggccctcctccactgcttcctctgctgctgctatttctcctcttgttgccccccccacccctgctcgcaggcgccaccgccgctgcctcacgtgagcccgactcaccctgccggttaaagacggtcacagtgtcgacactgcctgctctgcgtgagtccgacattggatggagcggcgcacgcgcgggcgccggggcgggcacaggcgccggagccgctgctgctgccgctagtcctggcagcccaggttccgccggaactgctgcagagagccgtctgctcttgttcgtaaggaatgaactgccaggccgcattgctgtgcaggatgatcttgacaatactgaactgccctttttcactttggaaatgtctggcaccgctgccgacattagcttggtccactggagacagcagtggctggagaatggaaccctttattttcacgtttctatgtcgagcagtggccagctggctcaggccaccgcacccactctgcaggagccgagtgagatcgtggaagagcagatgcatatactgcatatcagcgtgatgggagggctgatcgctttgcttttgctgctgctcgtattcacagtagccttatacgcacagcgaaggtggcagaaaagacggcggattccacagaaatcggctagtacggaagccactcacgaaatccactatattccatccgtgcttttgggtcctcaagctagggagagctttaggtctagtcgcttacaaacccacaattccgtgatcggggtgcccattagagagactccaattttggacgactatgattgcgaggaggacgaggagcctcctaggcgggccaaccacgtctccagggaagatgaatttgggagtcaagtaacacatacactggactcactcggacaccccggcgaagagaaagtagacttcgaaaaaaagggcggtatatcattcggacgcgcaaaagggacttcaggcagcgaggcagacgatgaaacccaactgaccttttacacagagcagtatagatctcgcaggaggagtaaaggactcctcaagtccccagtgaacaaaactgctttgacacttatcgctgttagttcatgtatccttgctatggtctgtggctcccagatgagttgcccgctaactgtgaaggtgaccctgcatgttccagagcacttcattgcagatggaagctcttttgtggtatccgaaggaagctacctggatataagtgattggctaaaccctgccaagctgagcctgtactaccagatcaatgccacaagcccttgggtcagggacctctgtggtcagaggactaccgatgcttgcgagcaactctgcgatccagagacaggggagtgttcgtgccatgaaggctacgctccagatccggtgcataggcacctctgcgtgaggagcgactggggacagtcggaaggcccgtggccctacactacgctcgaaagaggatatgacctggttacaggggaacaagccccagagaagattctgagatccacattttccttggggcagggcctctggctcccagtgtctaagtctttcgtcgttccaccggtggaactgtcaattaatccactggccagttgcaaaaccgatgtcctcgtgacagaagatccagctgacgtcagagaggaagcaatgctcagtacatactttgagaccatcaatgatctactgtcctcctttggtcctgtgagggattgcagtcggaacaatggcggctgcaccaggaacttcaagtgcgtttccgatcgacaggttgactcctccgggtgcgtgtgtcctgaagaattaaagcctatgaaagatggtagcggctgctacgatcacagtaaaggcatcgactgttctgacggatttaatgggggctgcgaacagctgtgtctccagcagactttgccccttccctacgatgccacaagctctacaatctttatgttctgcggatgcgtggaagaatacaagttggcccccgatgggaaaagttgcctgatgctgagtgatgtctgcgagggccccaaatgcttgaaacccgacagcaagtttaacgacaccctttttggtgaaatgttgcacggttacaataatagaacccaacacgtaaaccagggccaggtgttccagatgacatttagggagaacaatttcataaaggattttccccagctggccgacggcctcctggtcattcccctgcccgtcgaggaacagtgccgcggggtgctaagcgagcccctgcccgacctgcagctcctcaccggtgacatccggtacgatgaggccatgggctaccccatggtgcagcaatggcgtgttaggtctaatctgtatcgtgtcaaattgtccactataaccctggcggctggattcactaacgtactcaagatcctaactaaagagagttctcgagaggagttactcagttttatccaacactacggctcccactacatagcagaggctctgtatggatccgagctcacgtgcattatccatttccctagcaaaaaagtgcaacagcaactgtggctccagtatcagaaagaaacaaccgaattgggctcaaaaaaagagctcaagagcatgcctttcatcacatatctaagcggcctcctaactgcacagatgttgagtgatgaccagctaatatccggcgtagaaattagatgcgaggagaaaggcagatgtccctcaacgtgccatttatgcaggagacccgggaaagaacagctttcccctacccccgtgctgctagaaatcaatagagtggtgcctctttatacactgatccaagataatggaacaaaggaggcctttaaaagtgcactgatgtcgagctactggtgctccggaaagggcgacgtgatagatgactggtgtcgttgcgacctttccgctttcgatgcaaacgggctccctaactgcagccctttactccaacccgtgttacgcctctcccccactgtggagcctagtagtacggtagtgagtttagagtgggtggacgtgcaacctgccatcggcactaaggtctccgactatatcctgcagcacaagaaagtggacgaatacaccgacacggatttatacaccggcgagtttctgtcttttgccgacgatctgctgtcggggcttgggacgtcgtgtgtcgctgctggacgttctcacggagaggtccccgaggtctccatttatagtgtcatttttaagtgtttggagcccgacggactgtataagttcacactctatgccgttgacacaagagggcgccacagcgaactgtctacggtgactctccgaaccgcttgtccactcgttgacgacaataaggccgaggagattgcggacaaaatttataacctgtacaatggctacactagcggaaaggaacagcaaatggcctacaacaccttgatggaggtgagcgcctctatgttatttcgcgtgcagcatcattataacagccactacgagaagtttggagattttgtttggagatcagaagacgagctcgggccccgaaaggctcatttgatcctgcggcggctggaaagagtttcttcccattgtagtagtttactgaggtcagcgtacattcagtcgcgcgttgagactgtcccatacctgttctgcaggagtgaagaggtgagacccgcaggcatggtgtggtatagtatcctgaaggatactaagatcacatgtgaggagaagatggtctccatggctagaaatacctatggagaatcgaaaggcagatag

SEQ ID NO: 177405 - DNA, 4008 bp, Artificial Sequence
  derived and/or modified sequence
atggccgccgccggcgcccggctgagccccggccccggcagcggcctccgaggacggccgcgtctctgctttcaccccggacctcccccactgctgcctctgctccttctattcctgctcctgcttccccctccccctctgctcgctggagcgaccgccgccgccagtcgcgagccagacagcccctgcaggcttaagacggttacagtgagcaccctaccagccctgagggaaagtgatatcggatggtccggggctcgggctggggcaggagcagggaccggagccggggccgccgcggccgccgcgtcacccggctccccagggtctgctggaacagcagcagagtctcgtctgttgctgtttgtgcggaacgaactgcccggtcgaatagccgtacaagatgacctcgataacacggaattgcctttctttacactggaaatgtccggaacagccgcggatatttctctggttcactggagacagcagtggctggagaacggaacactttattttcacgtctcaatgagctcctccggccagctcgctcaagcgaccgctcctaccctgcaggagccgagtgaaatcgttgaggaacagatgcacatcctccacatctcggtgatgggaggcctcattgcgctgctgctgctactcctcgtgttcaccgtcgccttgtacgcgcagcgtcgctggcaaaaacgtaggagaattccacagaagtctgcttccaccgaggctacccatgaaatccactacattccttcggtcctgctgggcccccaggcgcgtgagtcctttagaagttcgcggttacagacccacaactcggttatcggggtgcccattagggaaactcccatcctcgacgattacgactgcgaggaggacgaagagcctccacgtcgagccaatcacgtatcccgagaagatgaatttggcagtcaagtgacgcacaccctggattctcttggacatcccggagaggaaaaggtagattttgagaaaaaggctgctgccgaggctacacaagaaactgtggaatccctgatgcagaaatttaaagaaagcttcagggccaacactcctatagaaattggccagttacagcctccacttagatccacgagtgctggtaaacgtaagcgacggtccaaatcccgcggcgggatttcatttggtagggccaagggtacttcaggtagcgaagccgatgacgagactcagcttacattttacacagaacagtaccgttcgagacgacgcagcaagggactgctcaaaagcccggttaataagactgccttaacactaatagcggttagttcttgtatcttggcgatggtttgtgggagtcaaatgtcatgccctttaacagtaaaggtgactttacacgtgcccgagcatttcatcgccgatggaagtagcttcgttgtatctgaaggttcctacctggatatctctgattggctgaatcccgcaaagctgagtttatactaccaaattaatgctacttcaccttgggtgcgagacctgtgtgggcagcgtacgaccgacgcctgcgagcagttgtgcgacccggaaaccggcgagtgttcttgccatgagggttatgcccccgatcccgtgcatcgccacctgtgcgtgcgttcagactgggggcagagtgagggtccgtggccttacacaacgctggagaggggatacgacctagtcactggggagcaggcccccgagaagatcctttcactcgggcaggggctctggcttccggtgtcgaagtcttttgtggtgcccccggtggaactaagtataaacccgctcgcaagctgtaaaacagacgtgctcgtcactgaagatccggcagacgtcagggaggaggccatgctgtccacatatttcgagaccataaacgatctcctgtccagctttggtccagtgagagactgttctcggaacaatggaggctgtacacggaattttaagtgtgtttcggacagacaggttgacagctcaggttgcgtatgccccgaggaattaaaaccaatgaaagacggcagcgggtgttatgaccacagcaaaggtatcgattgtagtgacggcttcaacggcggatgtgagcagctctgcctacagcagacactcccactcccatatgatgccacttcttcaactattttcatgttttgcggctgcgtagaagagtacaagttagcacctgatggcaagtcatgcctgatgttaagcgacgtctgtgaggggcctaagtgcctgaaacccgactctaaatttaatgacaccctctttggcgagatgttacatgggtataataaccgcacccagcacgtgaaccagggtcaagtgtttcaaatgacctttcgggagaataacttcattaaagacttccctcagctcgcagatggactcctggttattccactgccagtggaggaacagtgtagaggagtgctgagtgagccgctgcccgatctgcagttattaactggcgacataaggtatgacgaagccatggggtaccccatggtacagcagtggagagtgcgcagtaacttgtaccgtgtgaaactctcaaccattactctagccgccggttttacaaatgtgctgaaaatcctaaccaaggaatccagcagggaagaactgctgtcgtttatccaacattatggctcacactatatcgcggaggcgctctacgggagtgagctgacttgtatcattcactttcctagcaagaaggtccagcagcagctgtggctgcaatatcaaaaggagacaactgaactcggttctaaaaaggagttgaagtctatgccattcatcacatatctgagcgggttacttacagcccagatgctgtcggatgatcagcttatctcaggagttgaaatccgctgtgaagaaaagggacgctgtccttctacttgccatctctgcagaaggcctggaaaggagcagctgagccctactccagtgctgctggagataaatagggtggttccgctctacacacttatccaggacaacggcactaaggaagctttcaagagtgcattaatgtcctcttactggtgctctggcaagggcgacgtgatagacgattggtgtcggtgcgacctgagcgcatttgacgccaacggactcccaaactgctctccgctcctgcagcccgtccttcggttaagccctacagtggaaccctcctcaaccgtagtgtcgctagaatgggttgacgtgcaaccagccatcgggactaaggtaagcgactacatcctccagcacaagaaggttgacgagtacacagataccgacctgtatacaggcgaattcctgagcttcgcagacgacctcttgagcggcttgggtacaagttgtgtagcagccggtagatctcacggagaggtaccggaagtgagcatttacagcgttatctttaaatgtctggagcctgacgggctatacaagttcacattgtatgctgtcgacacacggggcaggcactcagaacttagtactgttaccctccggacagcctgccctttagtggacgacaataaagcagaagagattgccgacaaaatctacaacctttataacggttatacctctgggaaggagcagcagatggcgtataacacactgatggaggtgtccgccagcatgctctttagagtgcagcaccattataattctcactacgaaaagttcggtgattttgtgtggcggtctgaggacgagctggggcccagaaaagcgcacctcattctgcgcagactggagagagtatccagccattgctcctccctattaaggtctgcatacatccaaagtagggtggaaaccgtgccctaccttttctgtcggtcagaggaagttcgcccagcaggcatggtttggtacagcatcctgaaggacactaaaataacatgtgaagagaaaatggtttccatggctcggaatacctacggcgaaagtaaggggagatag

SEQ ID NO: 177406 - DNA, 4020 bp, Artificial Sequence
  derived and/or modified sequence
atggcagcggctggggcacgcctgagccctggcccaggtagcggtctgcgaggacgtcctagactgtgcttccaccctggacccccacctctgctacccctcctgctgctgttcctgttgttactgccacccccacctctgctggctggcgcaacagcagcagcatcaagagagccagacagtccttgtcggctgaagacggtgaccgtgagcactcttcccgcactcagggagagtgatatcggttggtccggagcacgggctggcgctggcgctggcacgggagctggagcagctgccgcagctgcgagtccagggtctcctggaagcgccggtacagcagcggaatcccggctactcctctttgtgcggaacgagctgccgggaaggattgctgttcaggatgacctggacaataccgaacttcctttctttactttggagatgtcggggacggcggcagatataagcctggtgcactggagacagcagtggctagaaaatgggactctgtactttcacgttagcatgtcaagcagtgggcagctggcacaggcaaccgcccctactcttcaggaaccctcagaaatcgtcgaggagcagatgcacattctgcacatctcagttatgggcggtttgatagcactattactgttactgctggtgtttactgtggccttatacgctcaacgcaggtggcagaaaagacggagaatcccccaaaagtctgcttccacggaggccacccacgagatacattatataccttccgtgctcttgggacctcaggcgagggaatctttcaggagcagccgtctgcaaacccacaacagtgtcattggtgtgcctatccgggagactccaattctggacgattacgactgtgaggaagatgaggaaccacctagaagagcaaatcatgtgagtagggaggacgagtttgggagccaggtcacgcacacactcgacagcctaggccaccctggcgaggaaaaggtggatttcgaaaagaaggcagcggctgaagcaacccaggagaccgtggagagcctgatgcagaagttcaaagaatccttcagagcaaacacccccatcgagattggccaattgcagcccccacttcggagtacctctgctggaaaaagaaagagaaggtcaaagtccaggggtggcataagctttgggagggcgaagggcacatctggaagtgaggctgatgacgaaacacagctcacattctatactgagcaataccgatcccggaggagaagtaagggactgctgaagtcccccgtgaacaagacagctctgactctcattgccgtttccagttgtatcctggccatggtttgtgggagtcaaatgtcctgtccacttactgttaaggtgactctgcacgtgccagagcacttcattgcagacgggtcctcatttgttgtgtcagaggggagttacttagacatttccgattggcttaaccccgcaaaattgtctttatattatcagatcaatgctacatccccctgggtccgcgatttgtgtggccagcggactaccgatgcctgtgaacagctgtgcgaccctgagaccggcgagtgttcttgccacgaaggttacgcccctgaccccgtgcataggcatctatgcgtacgaagcgattggggacagagcgaaggaccctggccctatacgaccttggagagaggatacgatctagtgaccggtgaacaggcgccagagaaaattctgagatccacattctctctgggtcagggactgtggttgccagtctctaagtctttcgtagtacccccagtggaacttagtatcaaccctctcgctagctgcaaaacagatgtcctggtgactgaggaccccgctgatgtgagagaagaagcaatgctgtcaacctacttcgagacgatcaatgatttactcagttcattcggtcccgtgagagactgcagcagaaacaatggtgggtgcaccaggaattttaagtgcgtgtctgaccgccaggttgactcttccgggtgcgtgtgtcccgaggagctcaagccaatgaaggacggttctggatgttatgatcatagcaaaggaatcgactgttctgatggcttcaatggcggatgcgaacaactctgtttgcaacagacactacccctcccgtatgatgctacatcctctactattttcatgttctgcgggtgtgtcgaggagtacaaactggcacccgatggaaagtcttgtttaatgctaagcgatgtttgcgagggacctaagtgcttgaaacctgacagcaaattcaatgacacactttttggggaaatgcttcacggatacaataaccggacacagcatgtgaatcaaggccaagtgtttcaaatgacctttagggagaataacttcattaaagacttccctcagctcgcagatggactcctggtcattcctttacccgtggaagagcagtgtagaggagtgcttagtgaaccactcccggatctccagctcctgaccggtgacattcggtacgacgaagctatggggtatcccatggtgcagcaatggagggtgcgctccaacctttacagagtcaagttgtccacaattacactcgccgctgggtttactaatgtgttgaagatcctcactaaggagtctagccgcgaggagctgttgagttttattcagcactacggctcgcactacattgccgaggctttgtacggctctgaactgacctgtatcatccacttcccatctaagaaagtccagcagcaactatggctgcaataccaaaaagaaactactgagttaggctctaagaaagagctgaaaagcatgccctttatcacatacctgtctggactcctgactgctcagatgctgtccgatgaccagttgatttctggcgtcgaaataagatgtgaggagaagggtaggtgcccatctacctgtcacctctgtcgacggccaggcaaggagcagcttagtcccaccccggtacttctcgagattaatcgggtggttccactgtatactctgattcaggacaacggcaccaaggaggctttcaagtccgctttgatgtcttcctactggtgttctgggaaaggcgacgttattgatgattggtgccgatgtgatttgagcgccttcgatgctaatggtctgcctaactgttctcctctcctacaaccggtgctacggctttctccaacagttgaaccatcaagtacagttgtcagtcttgagtgggtggatgtgcagcctgccatcggtacaaaggtctctgattatatccttcagcacaagaaagttgatgagtataccgatactgacctttatactggcgaatttctgagcttcgctgacgatctgctgtcaggactggggacatcttgcgtggcagccggtaggtcgcatggagaggtgcctgaagtgtcaatatactccgtcatatttaagtgccttgaaccggacggcttgtacaaattcacactttacgcagtggatacccgtggtcgccactcagaactcagcactgtgactctgcgcactgcatgtcccctggtggacgacaataaagctgaggaaatcgcagataagatttacaacctgtataatggatatacctcagggaaggagcagcaaatggcctataacactcttatggaggtcagcgctagcatgctattcagagtgcagcaccactacaacagtcactacgagaagttcggcgatttcgtgtggcgctctgaggatgagctggggcctcgcaaggcccacctcattcttaggcgtctcgagagggtgagttcacattgctcttccttactgagaagcgcctatatacagtcaagagtggaaaccgtaccctacctcttttgcagaagtgaggaagtgcgccctgcaggaatggtgtggtatagtatcctgaaggatacaaaaatcacctgcgaagagaagatggtgtccatggccaggaacacgtacggggaaagtaagggccgttag

SEQ ID NO: 177407 - DNA, 3867 bp, Artificial Sequence
  derived and/or modified sequence
atggctgccgctggagcacggctgtcccccggaccgggttcgggattgagaggcaggcctaggctctgttttcatccaggtcctccgcctctactccctctacttttgttattcctactattgctcccacccccacctctgcttgccggagcgaccgcagccgcttccagggaaccagactcaccctgcaggttgaaaaccgtcacggtgtccaccctgcctgctttaagggaatccgatataggctggtcaggggcacgagctggggctggggctgggacaggcgcaggggctgccgctgctgccgcatcacctgggagccctggttcagccggtaccgctgcggaaagccggctgctactgtttgtgcggaatgagctaccaggacgaattgctgttcaggacgacttagataacacggagctgccatttttcacactggagatgagcggcacagcagccgacatctccctcgttcattggcgacagcagtggcttgagaacggtaccctctatttccacgtgtcaatgtcttcgtcaggtcaactagcgcaagctactgcccctacattacaggagccctcagagatagtcgaagagcagatgcacatactccatatcagcgtcatgggcggactcattgcactgttgcttctgctgttggttttcacggtcgccctgtacgcgcagagacgctggcaaaaaagacggcgaattccacagaagtctgccagtacagaggccacccatgagatccactacatccccagcgtattgctggggcctcaggccagggagagtttccgatcatctaggctgcagactcacaacagcgtgattggggttccaattcgagagacgccaatcttagatgattatgattgtgaggaggacgaagaacctcctagacgtgcaaatcacgtgtcgcgggaagacgaatttgggtcccaggtcactcacaccctcgacagcttgggacaccccggagaggagaaggtagattttgagaagaaaggcggaatttcatttggccgtgctaaaggtacatcgggaagcgaggctgacgacgagacccagctgaccttttacacagaacaatatagaagccgccgacgctccaaaggcctgttaaaatctccagtcaataagaccgctcttaccctgatcgctgtatcgtcctgcatccttgcaatggtatgcggctcacaaatgagttgtcccctgactgtgaaggtgactctccacgttcctgaacactttatcgccgatggctcctccttcgtcgtaagcgagggctcatatctggacatatcagattggttgaacccagccaagctgagcttgtactaccaaataaacgccacctccccctgggtgagagatttgtgcgggcagaggacaacagacgcctgcgagcagctctgcgaccctgaaacgggagaatgctcttgtcacgaaggatatgcacctgaccccgtgcaccggcacctgtgtgtgcgttctgactggggccagtccgagggtccctggccatatacaaccctggagcgtggatacgaccttgtgaccggagaacaagctccagagaaaatcctgcgcagcacgttctccctgggacaagggctgtggttgccggtatccaaaagttttgtggtaccacctgttgaactatcgataaatccactggcatcttgcaaaacggatgtgttagtgactgaagatcctgccgatgtaagagaggaagcaatgctaagtacctactttgaaacaataaatgacttattgtctagctttggaccagtccgagattgtagccggaataatgggggttgtactcggaacttcaagtgtgtttctgaccgccaagtagactcaagcggttgcgtctgccccgaggaattgaaacccatgaaggacgggtccggctgttatgatcattccaaagggattgattgctccgatggtttcaatgggggatgcgagcagctgtgtttgcagcagacactgccgcttccatacgacgctacttcatcgactattttcatgttctgtgggtgtgtggaggagtataagttggcccctgacgggaagagctgcctaatgctgagcgatgtgtgcgaagggcctaaatgcctaaaacccgacagtaagttcaacgataccctgttcggcgaaatgctccacggctataacaaccggacccaacatgtcaaccagggccaggtgtttcagatgacatttagagagaataactttattaaggacttccctcaactagctgatgggctgctcgtgattcccctccctgtggaagagcagtgtagaggcgtgttgtccgagccgctacctgacctccagctgttgactggggacatccgttacgatgaagcaatggggtatccaatggtgcagcaatggcgtgtgcgttccaatttataccgggtaaagctgagtaccattaccttggccgctgggttcaccaacgtcctgaaaatcctgacgaaagagtcaagtagagaggagctattatcatttatacaacattatggctctcactacattgccgaggctctttacggctctgaacttacctgtattattcactttccttcaaagaaggtccaacaacaactgtggctccaataccagaaggaaaccacagaattgggcagtaagaaagaattaaaatcaatgccttttataacctacctctctggactcctcactgctcaaatgctctctgacgaccagctgatcagcggcgtggagattcgctgtgaagaaaaagggagatgcccctcaacctgccacctctgtcgcagaccgggtaaagagcagctttcccccactcccgtcctcttggagatcaatcgcgtagtgccactttataccctcatccaagataacggaacaaaggaggccttcaaatccgccctcatgtcttcatattggtgctctgggaaaggtgacgtcatcgatgattggtgcaggtgcgacctctctgcgtttgatgccaacggtctgccaaactgcagtccacttttgcaaccagtgctgcgcctgtccccaactgtcgagccaagcagcaccgtggtgtcccttgaatgggttgacgtgcaacccgcaatcggtaccaaggtgtctgattatattctacagcataagaaggtcgatgagtacactgacacagacctctacaccggagagttcctttctttcgcagatgaccttctcagtggactaggcaccagttgcgtggccgctggaagaagtcacggggaagtccccgaggtctctatctattccgtgattttcaaatgcttagagccggacggcctgtataaatttactctgtatgccgtggataccagaggtcgccacagcgagctaagcactgtaacactgaggaccgcctgtccactcgtggacgacaacaaggccgaagagattgcagacaaaatttataatctctacaatggctataccagtggcaaggaacagcagatggcctataatacactcatggaagtctctgcgtccatgctcttcagagtccagcaccattataattctcattacgaaaaatttggagattttgtgtggaggtctgaggacgaactgggtccacgaaaggcacacttaatcctcagacgcctcgaaagagtctcatcccactgctcttccctcctcagatcagcttacatacagtctcgggtggaaacagttccatacctcttttgccggagcgaagaggttaggccagccggaatggtctggtactccattctgaaggacactaaaatcacatgtgaagaaaaaatggttagtatggcaagaaatacatatggtgagtcaaagggacggtag

SEQ ID NO: 177408 - DNA, 4008 bp, Artificial Sequence
  derived and/or modified sequence
atggccgcagccggtgccagactgtcaccaggaccaggatctggtttacgaggaaggcctcgcctctgtttccaccccggacccccaccgctactgcctcttttgctactcttcctgcttcttttaccccctcctcccttgctggccggtgccactgcagctgcctcacgtgagccagacagcccctgccggctgaagactgtgaccgtgagcaccctccctgcattacgtgaaagtgacattggctggtccggcgctcgggctggtgccggagctgggacaggggcaggagcagcagcagcagctgcttctcccggatcacctggcagcgccggaacagcggctgagtcccgcctgctgctgttcgttcgtaacgagctgcctggcagaattgcagtccaggatgaccttgataatacagagctccccttttttacacttgagatgagtggcacggccgcagatattagtctcgtgcattggcgacaacagtggctggagaacggcaccctgtacttccacgttagtatgtcgtccagtgggcaacttgcccaggccactgcgccaaccctccaggaaccaagcgagatcgttgaggagcagatgcatattctgcacatctctgtcatgggaggtttgattgcattgctgctcctcctgcttgtgtttaccgtcgccctgtatgcccagcgacggtggcagaaaaggcggagaatcccccagaaaagtgcatccactgaagcgacccacgaaatacactacatccccagcgttttgttgggaccccaagcaagagaaagttttaggtcgagcaggctacagacccacaatagtgtgatcggagtgcccattagggaaactcctattctcgatgattacgactgcgaggaagacgaggagccgccacgcagagccaaccacgtgtctcgggaagatgagttcgggagccaagtgacccacaccttggattcactgggacaccctggcgaagaaaaagtcgatttcgaaaaaaaggcagcagctgaagcaacacaagagacggtggaatctctgatgcaaaagttcaaggaatcattccgggctaatacaccaatcgagattggacagctccagccgcctcttaggagcacatctgctgggaaacggaagcgccgtagtaaaagtcgcggtgggatctcattcgggagagctaaagggacctccgggtctgaggctgacgacgaaacccaactcacgttttacacagaacaataccgttccagaagaaggtccaagggactgctcaagagccccgtaaataagactgctctcacacttattgctgtaagctcttgtatcttggctatggtgtgtggcagccaaatgtcatgccccctgaccgtcaaagtcactctgcatgtccctgagcacttcatcgccgatggaagcagctttgtcgtgtcggagggaagctatctggatatcagtgactggctcaatccggcaaagttatcactctactatcagataaacgccacgagcccttgggtccgcgatctgtgtggtcagcgaaccactgacgcttgtgaacagctttgcgacccagagacaggtgagtgcagctgtcacgaaggttatgcacctgacccagtccatcgccatctctgcgtgcggtccgactgggggcagagcgaaggtccatggccatataccaccctcgagaggggttacgatttggtgacaggtgagcaagcccctgagaagatcctgtcattaggccagggcctctggttgcctgtgtcaaagagcttcgttgtgccccctgtagagctgtctatcaaccctttagcatcatgtaagactgacgtcctggtaactgaagacccagccgatgttagggaagaggcgatgttgtccacttatttcgagaccatcaatgacctcctctcaagctttggacccgtgcgcgactgcagtcgaaacaacgggggatgcactcgaaacttcaagtgcgtttccgatagacaagtggatagctcgggctgtgtatgcccagaggagctcaagcccatgaaagacgggtctggctgctatgaccattctaaagggatagactgcagtgatgggtttaacggaggctgtgagcaactgtgcctccagcagactctccctctgccctatgatgcaacgagtagcacaattttcatgttttgcggctgcgtggaagagtacaaactagctcctgatggaaaatcctgtctgatgctgagtgatgtctgcgagggacccaagtgcctgaagccagacagtaaatttaatgacacgcttttcggcgaaatgctccacggctataataatcgtactcagcacgtcaatcagggccaagtgttccagatgacctttcgggaaaacaacttcatcaaggactttcctcaacttgcggatggtctgctggtcattcccctaccggtagaagagcagtgtcgtggtgtactgagtgagccccttcccgacttacaactattaactggcgacatccgttatgatgaagcaatgggttatccaatggttcagcaatggagggtcagatctaatctatatagggtgaaattgagcaccatcactctggctgctggcttcacaaatgtcctgaagatcttgacaaaggagtctagccgtgaagaattgttgtcttttattcaacactatggaagccactatatcgcagaagccctctatgggtctgaactcacttgcattatccacttccccagtaaaaaagtgcagcagcagctatggctccagtaccagaaggaaaccactgagctggggagcaagaaagagttaaagtcaatgccttttatcacatacttaagcggtctgctcacggctcagatgctttccgatgaccaactgatctcaggagtggaaatcagatgtgaggagaaaggaagatgtcccagcacgtgccatctgtgtagacgacccggtaaggaacaactttcccctacccctgtcctactggaaatcaaccgcgtggtacccctctacacacttatccaagataatggaacaaaggaggctttcaaatctgctctaatgtcctcctattggtgtagcggcaaaggagatgttattgatgattggtgccgatgcgacctgagtgcattcgacgctaacggcctacccaattgtagtccgctcctacagcctgttttgcgtctcagccctacggtagaaccgtcttcaactgtcgtttccttggagtgggtggacgtccagccggctattggcaccaaagtgtcagattatattctgcagcacaaaaaggttgatgaatacactgacaccgacctgtacactggcgaatttctgtcattcgctgacgatctgctgtccggccttggtactagttgcgtggctgccggaaggtcacatggtgaggtccccgaggtcagcatttactctgtgatttttaaatgcctggagcccgacggcctctataagttcactctgtacgccgtcgatacccgaggacggcactccgaactgtctaccgtaacactgcgcaccgcctgtccccttgtggatgacaataaggccgaggaaatagccgacaagatctacaacttgtacaatgggtatacatcagggaaagagcagcaaatggcatataatacgctgatggaggttagtgcctccatgctgttcagggtgcagcaccattacaactctcattatgaaaaatttggcgattttgtgtggaggtccgaggacgagcttggccctaggaaagctcatctcatccttcgaaggttggagcgggtttcctcccattgttcgtcactgttgcgcagcgcctatatccagtcccgggtcgaaacagttccctatcttttttgccgcagtgaggaggtgagacccgctgggatggtttggtactccatcctgaaagacacaaaaatcacatgtgaggagaagatggtgagtatggctcggaacacctacggcgaatctaagggtaggtag

SEQ ID NO: 177409 - DNA, 4747 bp, Artificial Sequence
  derived and/or modified sequence
ggttcgcttcggcgtccgccgtctccgcagctgcctcctcttcctccttcgccaccgccgccaccgccgccgccgcccgcagcaccgcagcccctcccgccatggccgccgccggcgcccggctcagccccggccccggctcggggctccgggggcggccgaggctctgcttccacccggggccgccgccactgctgccgctgctgctgctgttcctgctcctgctgccgccgccgccgctgctggccggcgccaccgccgctgcctcgcgggagcccgacagcccgtgccggctgaagaccgtcacggtgtccacactgcccgccctgcgggagagcgacatcggctggagcggcgcccgcgccggggccggggctgggaccggggccggagccgccgccgccgccgcgtccccgggctctcctggctctgccggcaccgccgccgagtcgcgcctcctgctctttgtgcgtaacgagctgccggggcgcatcgcggtgcaggacgacctggacaacaccgagctgcccttcttcaccctggagatgtctggcacagcagcggacatctcgctggtgcactggagacagcagtggctggagaatggcaccttgtacttccacgtctccatgagcagctccgggcagctggcccaagccaccgcccccactctccaggagccctcggagattgttgaggagcagatgcacatcctccacatttctgtgatgggtggcctcatcgcgctgctgctgctgctgctggtgttcaccgtggcgctgtacgcccagcgacgttggcagaagcgtcgccgcatcccccagaagagcgcaagcacagaagccactcatgagatccactacatcccatctgtgctgctgggtccccaggcgcgggagagcttccgttcatcccggctgcaaacccacaattccgtcattggcgtgcccatccgggagactcccatcctggatgactatgactgtgaggaggatgaggagccacctaggcgggccaaccatgtctcccgcgaggacgagtttggcagccaggtgacccacactctggacagtctgggacatccaggggaagagaaggtggactttgagaagaaagcagcagctgaggcgactcaggagacagtggagtccctgatgcagaagttcaaggagagtttccgcgctaacacgcccatcgagatcggtcagctgcaaccacccctgcgcagcacatcggcagggaagaggaagcggaggagcaagtctcgaggaggaatcagctttgggagagccaaggggacgtcgggctcagaggcagacgatgaaactcagctgacattctacacggagcagtaccgcagtcgccgccgcagcaaaggtttgctgaaaagcccagtgaacaagacagccctgacactgattgctgtgagttcctgcatcctggccatggtgtgtggcagccagatgtcttgtccactcactgtgaaggtgactctgcatgtgcccgagcacttcatagcagatggaagcagcttcgtggtgagtgaagggagctacctggacatctccgactggttaaacccggccaagctttccctgtattaccagatcaatgccacctccccatgggtgagggacctctgtggacaaaggacgacagatgcctgtgagcagctctgcgacccagaaaccggagagtgcagctgtcatgaaggctatgcccctgaccctgttcacagacacctgtgtgtgcgcagtgactggggacagagtgaaggaccttggccctacacgacacttgagaggggctatgatctggtgacaggggagcaagcccctgaaaagattctcaggtctactttcagcttgggccaaggcctctggcttcctgtcagcaaaagctttgtggttccgcctgtggagctgtccatcaaccccctggccagctgcaagaccgatgtgctcgtcacggaagaccctgcagatgtcagggaagaagcgatgctgtccacatactttgaaaccatcaatgacctgctgtcttccttcgggccagttcgtgactgctctcggaacaatgggggctgcactcgcaacttcaagtgtgtgtctgaccggcaggtggattcctcgggatgtgtgtgccctgaggagctgaaacccatgaaggatggctctggctgctacgaccactccaaaggcattgactgctctgatggctttaatggcggctgtgagcagctgtgcctgcagcagacgctgcccctgccctacgatgccacttcgagcaccatcttcatgttctgcggttgcgtggaggagtacaaactggctcctgatggaaaatcctgcttaatgctctcagatgtctgcgagggccccaagtgcctcaaacctgactccaaattcaatgataccctctttggagagatgctacatggttacaacaaccggacccagcatgtgaaccaaggccaagtcttccagatgacctttagggagaacaacttcatcaaggactttccccagctggccgatgggctgttggtgatcccgctgccggtggaggagcagtgccggggggtcctctccgagccccttccagacctccaactgctcactggagatatcaggtatgatgaggccatgggttaccccatggtgcagcagtggcgggtccggagcaacctctaccgtgtgaagctcagcaccatcaccctcgcagcaggcttcactaatgttctcaagatcctgaccaaggagagcagtcgggaggagctgctgtccttcatccagcactatggctcccactacatcgcagaggccctctatggctcagagctcacctgcatcatccactttcccagcaagaaggtccagcagcagctgtggctccagtatcagaaagagaccacagagctgggcagcaagaaggagctcaagtccatgcccttcatcacctacctctcaggtttgctgacagcccagatgctgtcagatgaccagctcatttcaggtgtggagattcgctgtgaggagaaggggcgctgtccatctacctgtcacctttgccgccggccaggcaaggagcagctgagccccacaccagtgctgctggaaatcaaccgtgtggtgccactttataccctcatccaagacaatggcacaaaggaggccttcaagagtgcactgatgagttcctactggtgctcagggaaaggggatgtgatcgatgactggtgcaggtgtgacctcagcgcctttgatgccaatgggctccccaactgcagcccccttctgcagccggtgctgcggctgtccccaacagtggagccctccagtactgtggtctccttggagtgggtggatgttcagccagctattgggaccaaggtctccgactatattctgcagcataagaaagtggatgaatacacagacactgacctgtacacaggagaattcctgagttttgctgatgacttactctctggcctgggcacatcttgtgtagcagctggtcgaagccatggagaggtccctgaagtcagtatctactcagtcatcttcaagtgtctggagcccgacggtctctacaagttcactctgtatgctgtggatacacgagggaggcactcagagctaagcacggtgaccctgaggacggcctgtccactggtagatgacaacaaggcagaagaaatagctgacaagatctacaatctgtacaatgggtacacaagtggaaaggagcagcagatggcctacaacacactgatggaggtctcagcctcgatgctgttccgagtccagcaccactacaactctcactatgaaaagtttggcgacttcgtctggagaagtgaggatgagctggggcccaggaaggcccacctgattctacggcgactggagagggtgagtagccactgctccagcctcctgcggagtgcctacatccagagccgcgtggaaacagtgccctatcttttctgccgcagcgaggaggtccggcctgcaggcatggtgtggtatagcatcctcaaggacaccaaaatcacgtgtgaggagaagatggtgtcaatggcccgaaacacgtacggggagtccaagggccggtgagggagggtattgccctccgtgagcacagagactctccatgggagggggagcagtattctcctggatcctggggcctgggtgggctgggggacagctgaggatgggcctagcagatgaagcttgccagcaaggccaaagcaaacggtttctcctgtggatagtggacagagacctttgtaaccaatggaattattcatttttctctatcttttattttttcaaagatattatttgactctatcaaaagtctctcctttttaaaccttttcttatggatggctgtcaatcccgaggcagaagttttcaggtggagaccaagcggcctttgctcttcttccttcttcctgccacactctgctttcttcctgccatggacccctggaggagacctatggagggacagttttgacctgacccctagaggagacagttttgacctcttcagcaccaggaaggaagctctgaggatggttgcagtgaggaagcatgggtctttaaggacttctctctcttttttgctggacattattgagtttgtgggaccctgcctcttcctgctacctgtgggtctgcccagagtccctgcaggcctgtccatgcattaaaaattcctattgtctctcttt

SEQ ID NO: 177410 - DNA, 4622 bp, Artificial Sequence
  derived and/or modified sequence
ggctctctccgctccttagctcgggcgtcctggttcgcttcggcgtccgccgtctccgcagctgcctcctcttcctccttcgccaccgccgccaccgccgccgccgcccgcagcaccgcagcccctcccgccatggccgccgccggcgcccggctcagccccggccccggctcggggctccgggggcggccgaggctctgcttccacccggggccgccgccactgctgccgctgctgctgctgttcctgctcctgctgccgccgccgccgctgctggccggcgccaccgccgctgcctcgcgggagcccgacagcccgtgccggctgaagaccgtcacggtgtccacactgcccgccctgcgggagagcgacatcggctggagcggcgcccgcgccggggccggggctgggaccggggccggagccgccgccgccgccgcgtccccgggctctcctggctctgccggcaccgccgccgagtcgcgcctcctgctctttgtgcgtaacgagctgccggggcgcatcgcggtgcaggacgacctggacaacaccgagctgcccttcttcaccctggagatgtctggcacagcagcggacatctcgctggtgcactggagacagcagtggctggagaatggcaccttgtacttccacgtctccatgagcagctccgggcagctggcccaagccaccgcccccactctccaggagccctcggagattgttgaggagcagatgcacatcctccacatttctgtgatgggtggcctcatcgcgctgctgctgctgctgctggtgttcaccgtggcgctgtacgcccagcgacgttggcagaagcgtcgccgcatcccccagaagagcgcaagcacagaagccactcatgagatccactacatcccatctgtgctgctgggtccccaggcgcgggagagcttccgttcatcccggctgcaaacccacaattccgtcattggcgtgcccatccgggagactcccatcctggatgactatgactgtgaggaggatgaggagccacctaggcgggccaaccatgtctcccgcgaggacgagtttggcagccaggtgacccacactctggacagtctgggacatccaggggaagagaaggtggactttgagaagaaaggaggaatcagctttgggagagccaaggggacgtcgggctcagaggcagacgatgaaactcagctgacattctacacggagcagtaccgcagtcgccgccgcagcaaaggtttgctgaaaagcccagtgaacaagacagccctgacactgattgctgtgagttcctgcatcctggccatggtgtgtggcagccagatgtcttgtccactcactgtgaaggtgactctgcatgtgcccgagcacttcatagcagatggaagcagcttcgtggtgagtgaagggagctacctggacatctccgactggttaaacccggccaagctttccctgtattaccagatcaatgccacctccccatgggtgagggacctctgtggacaaaggacgacagatgcctgtgagcagctctgcgacccagaaaccggagagtgcagctgtcatgaaggctatgcccctgaccctgttcacagacacctgtgtgtgcgcagtgactggggacagagtgaaggaccttggccctacacgacacttgagaggggctatgatctggtgacaggggagcaagcccctgaaaagattctcaggtctactttcagcttgggccaaggcctctggcttcctgtcagcaaaagctttgtggttccgcctgtggagctgtccatcaaccccctggccagctgcaagaccgatgtgctcgtcacggaagaccctgcagatgtcagggaagaagcgatgctgtccacatactttgaaaccatcaatgacctgctgtcttccttcgggccagttcgtgactgctctcggaacaatgggggctgcactcgcaacttcaagtgtgtgtctgaccggcaggtggattcctcgggatgtgtgtgccctgaggagctgaaacccatgaaggatggctctggctgctacgaccactccaaaggcattgactgctctgatggctttaatggcggctgtgagcagctgtgcctgcagcagacgctgcccctgccctacgatgccacttcgagcaccatcttcatgttctgcggttgcgtggaggagtacaaactggctcctgatggaaaatcctgcttaatgctctcagatgtctgcgagggccccaagtgcctcaaacctgactccaaattcaatgataccctctttggagagatgctacatggttacaacaaccggacccagcatgtgaaccaaggccaagtcttccagatgacctttagggagaacaacttcatcaaggactttccccagctggccgatgggctgttggtgatcccgctgccggtggaggagcagtgccggggggtcctctccgagccccttccagacctccaactgctcactggagatatcaggtatgatgaggccatgggttaccccatggtgcagcagtggcgggtccggagcaacctctaccgtgtgaagctcagcaccatcaccctcgcagcaggcttcactaatgttctcaagatcctgaccaaggagagcagtcgggaggagctgctgtccttcatccagcactatggctcccactacatcgcagaggccctctatggctcagagctcacctgcatcatccactttcccagcaagaaggtccagcagcagctgtggctccagtatcagaaagagaccacagagctgggcagcaagaaggagctcaagtccatgcccttcatcacctacctctcaggtttgctgacagcccagatgctgtcagatgaccagctcatttcaggtgtggagattcgctgtgaggagaaggggcgctgtccatctacctgtcacctttgccgccggccaggcaaggagcagctgagccccacaccagtgctgctggaaatcaaccgtgtggtgccactttataccctcatccaagacaatggcacaaaggaggccttcaagagtgcactgatgagttcctactggtgctcagggaaaggggatgtgatcgatgactggtgcaggtgtgacctcagcgcctttgatgccaatgggctccccaactgcagcccccttctgcagccggtgctgcggctgtccccaacagtggagccctccagtactgtggtctccttggagtgggtggatgttcagccagctattgggaccaaggtctccgactatattctgcagcataagaaagtggatgaatacacagacactgacctgtacacaggagaattcctgagttttgctgatgacttactctctggcctgggcacatcttgtgtagcagctggtcgaagccatggagaggtccctgaagtcagtatctactcagtcatcttcaagtgtctggagcccgacggtctctacaagttcactctgtatgctgtggatacacgagggaggcactcagagctaagcacggtgaccctgaggacggcctgtccactggtagatgacaacaaggcagaagaaatagctgacaagatctacaatctgtacaatgggtacacaagtggaaaggagcagcagatggcctacaacacactgatggaggtctcagcctcgatgctgttccgagtccagcaccactacaactctcactatgaaaagtttggcgacttcgtctggagaagtgaggatgagctggggcccaggaaggcccacctgattctacggcgactggagagggtgagtagccactgctccagcctcctgcggagtgcctacatccagagccgcgtggaaacagtgccctatcttttctgccgcagcgaggaggtccggcctgcaggcatggtgtggtatagcatcctcaaggacaccaaaatcacgtgtgaggagaagatggtgtcaatggcccgaaacacgtacggggagtccaagggccggtgagggagggtattgccctccgtgagcacagagactctccatgggagggggagcagtattctcctggatcctggggcctgggtgggctgggggacagctgaggatgggcctagcagatgaagcttgccagcaaggccaaagcaaacggtttctcctgtggatagtggacagagacctttgtaaccaatggaattattcatttttctctatcttttattttttcaaagatattatttgactctatcaaaagtctctcctttttaaaccttttcttatggatggctgtcaatcccgaggcagaagttttcaggtggagaccaagcggcctttgctcttcttccttcttcctgccacactctgctttcttcctgccatggacccctggaggagacctatggagggacagttttgacctgacccctagaggagacagttttgacctcttcagcaccaggaaggaagctctgaggatggttgcagtgaggaagcatgggtctttaaggacttctctctcttttttgctggacattattgagtttgtgggaccctgcctcttcctgctacctgtgggtctgcccagagtccctgcaggcctgtccatgcattaaaaattcctattgtctctc

SEQ ID NO: 177411 - DNA, 3980 bp, Artificial Sequence
  derived and/or modified sequence
ggttcgcttcggcgtccgccgtctccgcagctgcctcctcttcctccttcgccaccgccgccaccgccgccgccgcccgcagcaccgcagcccctcccgccatggccgccgccggcgcccggctcagccccggccccggctcggggctccgggggcggccgaggctctgcttccacccggggccgccgccactgctgccgctgctgctgctgttcctgctcctgctgccgccgccgccgctgctggccggcgccaccgccgctgcctcgcgggagcccgacagcccgtgccggctgaagaccgtcacggtgtccacactgcccgccctgcgggagagcgacatcggctggagcggcgcccgcgccggggccggggctgggaccggggccggagccgccgccgccgccgcgtccccgggctctcctggctctgccggcaccgccgccgagtcgcgcctcctgctctttgtgcgtaacgagctgccggggcgcatcgcggtgcaggacgacctggacaacaccgagctgcccttcttcaccctggagatgtctggcacagcagcggacatctcgctggtgcactggagacagcagtggctggagaatggcaccttgtacttccacgtctccatgagcagctccgggcagctggcccaagccaccgcccccactctccaggagccctcggagattgttgaggagcagatgcacatcctccacatttctgtgatgggtggcctcatcgcgctgctgctgctgctgctggtgttcaccgtggcgctgtacgcccagcgacgttggcagaagcgtcgccgcatcccccagaagagcgcaagcacagaagccactcatgagatccactacatcccatctgtgctgctgggtccccaggcgcgggagagcttccgttcatcccggctgcaaacccacaattccgtcattggcgtgcccatccgggagactcccatcctggatgactatgactgtgaggaggatgaggagccacctaggcgggccaaccatgtctcccgcgaggacgagtttggcagccaggtgacccacactctggacagtctgggacatccaggggaagagaaggtggactttgagaagaaaggaggaatcagctttgggagagccaaggggacgtcgggctcagaggcagacgatgaaactcagctgacattctacacggagcagtaccgcagtcgccgccgcagcaaaggtttgctgaaaagcccagtgaacaagacagccctgacactgattgctgtgagttcctgcatcctggccatggtgtgtggcagccagatgtcttgtccactcactgtgaaggtgactctgcatgtgcccgagcacttcatagcagatggaagcagcttcgtggtgagtgaagggagctacctggacatctccgactggttaaacccggccaagctttccctgtattaccagatcaatgccacctccccatgggtgagggacctctgtggacaaaggacgacagatgcctgtgagcagctctgcgacccagaaaccggagagtgcagctgtcatgaaggctatgcccctgaccctgttcacagacacctgtgtgtgcgcagtgactggggacagagtgaaggaccttggccctacacgacacttgagaggggctatgatctggtgacaggggagcaagcccctgaaaagattctcaggtctactttcagcttgggccaaggcctctggcttcctgtcagcaaaagctttgtggttccgcctgtggagctgtccatcaaccccctggccagctgcaagaccgatgtgctcgtcacggaagaccctgcagatgtcagggaagaagcgatgctgtccacatactttgaaaccatcaatgacctgctgtcttccttcgggccagttcgtgactgctctcggaacaatgggggctgcactcgcaacttcaagtgtgtgtctgaccggcaggtggattcctcgggatgtgtgtgccctgaggagctgaaacccatgaaggatggctctggctgctacgaccactccaaaggcattgactgctctgatggctttaatggcggctgtgagcagctgtgcctgcagcagacgctgcccctgccctacgatgccacttcgagcaccatcttcatgttctgcggttgcgtggaggagtacaaactggctcctgatggaaaatcctgcttaatgctctcagatgtctgcgagggccccaagtgcctcaaacctgactccaaattcaatgataccctctttggagagatgctacatggttacaacaaccggacccagcatgtgaaccaaggccaagtcttccagatgacctttagggagaacaacttcatcaaggactttccccagctggccgatgggctgttggtgatcccgctgccggtggaggagcagtgccggggggtcctctccgagccccttccagacctccaactgctcactggagatatcaggtatgatgaggccatgggttaccccatggtgcagcagtggcgggtccggagcaacctctaccgtgtgaagctcagcaccatcaccctcgcagcaggcttcactaatgttctcaagatcctgaccaaggagagcagtcgggaggagctgctgtccttcatccagcactatggctcccactacatcgcagaggccctctatggctcagagctcacctgcatcatccactttcccagcaagaaggtccagcagcagctgtggctccagtatcagaaagagaccacagagctgggcagcaagaaggagctcaagtccatgcccttcatcacctacctctcaggtttgctgacagcccagatgctgtcagatgaccagctcatttcaggtgtggagattcgctgtgaggagaaggggcgctgtccatctacctgtcacctttgccgccggccaggcaaggagcagctgagccccacaccagtgctgctggaaatcaaccgtgtggtgccactttataccctcatccaagacaatggcacaaaggaggccttcaagagtgcactgatgagttcctactggtgctcagggaaaggggatgtgatcgatgactggtgcaggtgtgacctcagcgcctttgatgccaatgggctccccaactgcagcccccttctgcagccggtgctgcggctgtccccaacagtggagccctccagtactgtggtctccttggagtgggtggatgttcagccagctattgggaccaaggtctccgactatattctgcagcataagaaagtggatgaatacacagacactgacctgtacacaggagaattcctgagttttgctgatgacttactctctggcctgggcacatcttgtgtagcagctggtcgaagccatggagaggtccctgaagtcagtatctactcagtcatcttcaagtgtctggagcccgacggtctctacaagttcactctgtatgctgtggatacacgagggaggcactcagagctaagcacggtgaccctgaggacggcctgtccactggtagatgacaacaaggcagaagaaatagctgacaagatctacaatctgtacaatgggtacacaagtggaaaggagcagcagatggcctacaacacactgatggaggtctcagcctcgatgctgttccgagtccagcaccactacaactctcactatgaaaagtttggcgacttcgtctggagaagtgaggatgagctggggcccaggaaggcccacctgattctacggcgactggagagggtgagtagccactgctccagcctcctgcggagtgcctacatccagagccgcgtggaaacagtgccctatcttttctgccgcagcgaggaggtccggcctgcaggcatggtgtggtatagcatcctcaaggacaccaaaatcacgtgtgaggagaagatggtgtcaatggcccgaaacacatattatttgactctatcaaaagtctctcctttttaa

SEQ ID NO: 177412 - DNA, 4634 bp, Artificial Sequence
  derived and/or modified sequence
atggccgccgccggcgcccggctcagccccggccccggctcggggctccgggggcggccgaggctctgcttccacccggggccgccgccactgctgccgctgctgctgctgttcctgctcctgctgccgccgccgccgctgctggccggcgccaccgccgctgcctcgcgggagcccgacagcccgtgccggctgaagaccgtcacggtgtccacactgcccgccctgcgggagagcgacatcggctggagcggcgcccgcgccggggccggggctgggaccggggccggagccgccgccgccgccgcgtccccgggctctcctggctctgccggcaccgccgccgagtcgcgcctcctgctctttgtgcgtaacgagctgccggggcgcatcgcggtgcaggacgacctggacaacaccgagctgcccttcttcaccctggagatgtctggcacagcagcggacatctcgctggtgcactggagacagcagtggctggagaatggcaccttgtacttccacgtctccatgagcagctccgggcagctggcccaagccaccgcccccactctccaggagccctcggagattgttgaggagcagatgcacatcctccacatttctgtgatgggtggcctcatcgcgctgctgctgctgctgctggtgttcaccgtggcgctgtacgcccagcgacgttggcagaagcgtcgccgcatcccccagaagagcgcaagcacagaagccactcatgagatccactacatcccatctgtgctgctgggtccccaggcgcgggagagcttccgttcatcccggctgcaaacccacaattccgtcattggcgtgcccatccgggagactcccatcctggatgactatgactgtgaggaggatgaggagccacctaggcgggccaaccatgtctcccgcgaggacgagtttggcagccaggtgacccacactctggacagtctgggacatccaggggaagagaaggtggactttgagaagaaagcagcagctgaggcgactcaggagacagtggagtccctgatgcagaagttcaaggagagtttccgcgctaacacgcccatcgagatcggtcagctgcaaccacccctgcgcagcacatcggcagggaagaggaagcggaggagcaagtctcgaggaggaatcagctttgggagagccaaggggacgtcgggctcagaggcagacgatgaaactcagctgacattctacacggagcagtaccgcagtcgccgccgcagcaaaggtttgctgaaaagcccagtgaacaagacagccctgacactgattgctgtgagttcctgcatcctggccatggtgtgtggcagccagatgtcttgtccactcactgtgaaggtgactctgcatgtgcccgagcacttcatagcagatggaagcagcttcgtggtgagtgaagggagctacctggacatctccgactggttaaacccggccaagctttccctgtattaccagatcaatgccacctccccatgggtgagggacctctgtggacaaaggacgacagatgcctgtgagcagctctgcgacccagaaaccggagagtgcagctgtcatgaaggctatgcccctgaccctgttcacagacacctgtgtgtgcgcagtgactggggacagagtgaaggaccttggccctacacgacacttgagaggggctatgatctggtgacaggggagcaagcccctgaaaagattctcagcttgggccaaggcctctggcttcctgtcagcaaaagctttgtggttccgcctgtggagctgtccatcaaccccctggccagctgcaagaccgatgtgctcgtcacggaagaccctgcagatgtcagggaagaagcgatgctgtccacatactttgaaaccatcaatgacctgctgtcttccttcgggccagttcgtgactgctctcggaacaatgggggctgcactcgcaacttcaagtgtgtgtctgaccggcaggtggattcctcgggatgtgtgtgccctgaggagctgaaacccatgaaggatggctctggctgctacgaccactccaaaggcattgactgctctgatggctttaatggcggctgtgagcagctgtgcctgcagcagacgctgcccctgccctacgatgccacttcgagcaccatcttcatgttctgcggttgcgtggaggagtacaaactggctcctgatggaaaatcctgcttaatgctctcagatgtctgcgagggccccaagtgcctcaaacctgactccaaattcaatgataccctctttggagagatgctacatggttacaacaaccggacccagcatgtgaaccaaggccaagtcttccagatgacctttagggagaacaacttcatcaaggactttccccagctggccgatgggctgttggtgatcccgctgccggtggaggagcagtgccggggggtcctctccgagccccttccagacctccaactgctcactggagatatcaggtatgatgaggccatgggttaccccatggtgcagcagtggcgggtccggagcaacctctaccgtgtgaagctcagcaccatcaccctcgcagcaggcttcactaatgttctcaagatcctgaccaaggagagcagtcgggaggagctgctgtccttcatccagcactatggctcccactacatcgcagaggccctctatggctcagagctcacctgcatcatccactttcccagcaagaaggtccagcagcagctgtggctccagtatcagaaagagaccacagagctgggcagcaagaaggagctcaagtccatgcccttcatcacctacctctcaggtttgctgacagcccagatgctgtcagatgaccagctcatttcaggtgtggagattcgctgtgaggagaaggggcgctgtccatctacctgtcacctttgccgccggccaggcaaggagcagctgagccccacaccagtgctgctggaaatcaaccgtgtggtgccactttataccctcatccaagacaatggcacaaaggaggccttcaagagtgcactgatgagttcctactggtgctcagggaaaggggatgtgatcgatgactggtgcaggtgtgacctcagcgcctttgatgccaatgggctccccaactgcagcccccttctgcagccggtgctgcggctgtccccaacagtggagccctccagtactgtggtctccttggagtgggtggatgttcagccagctattgggaccaaggtctccgactatattctgcagcataagaaagtggatgaatacacagacactgacctgtacacaggagaattcctgagttttgctgatgacttactctctggcctgggcacatcttgtgtagcagctggtcgaagccatggagaggtccctgaagtcagtatctactcagtcatcttcaagtgtctggagcccgacggtctctacaagttcactctgtatgctgtggatacacgagggaggcactcagagctaagcacggtgaccctgaggacggcctgtccactggtagatgacaacaaggcagaagaaatagctgacaagatctacaatctgtacaatgggtacacaagtggaaaggagcagcagatggcctacaacacactgatggaggtctcagcctcgatgctgttccgagtccagcaccactacaactctcactatgaaaagtttggcgacttcgtctggagaagtgaggatgagctggggcccaggaaggcccacctgattctacggcgactggagagggtgagtagccactgctccagcctcctgcggagtgcctacatccagagccgcgtggaaacagtgccctatcttttctgccgcagcgaggaggtccggcctgcaggcatggtgtggtatagcatcctcaaggacaccaaaatcacgtgtgaggagaagatggtgtcaatggcccgaaacacgtacggggagtccaagggccggtgagggagggtattgccctccgtgagcacagagactctccatgggagggggagcagtattctcctggatcctggggcctgggtgggctgggggacagctgaggatgggcctagcagatgaagcttgccagcaaggccaaagcaaacggtttctcctgtggatagtggacagagacctttgtaaccaatggaattattcatttttctctatcttttattttttcaaagatattatttgactctatcaaaagtctctcctttttaaaccttttcttatggatggctgtcaatcccgaggcagaagttttcaggtggagaccaagcggcctttgctcttcttccttcttcctgccacactctgctttcttcctgccatggacccctggaggagacctatggagggacagttttgacctgacccctagaggagacagttttgacctcttcagcaccaggaaggaagctctgaggatggttgcagtgaggaagcatgggtctttaaggacttctctctcttttttgctggacattattgagtttgtgggaccctgcctcttcctgctacctgtgggtctgcccagagtccctgcaggcctgtccatgcattaaaaattcctattgtctctcttt

SEQ ID NO: 177413 - DNA, 4020 bp, Artificial Sequence
  derived and/or modified sequence
atggccgccgccggcgccagactgagccccggccccggcagcggcctgagaggcagacccagactgtgcttccaccccggccccccccccctgctgcccctgctgctgctgttcctgctgctgctgccccccccccccctgctggccggcgccaccgccgccgccagcagagagcccgacagcccctgcagactgaagaccgtgaccgtgagcaccctgcccgccctgagagagagcgacatcggctggagcggcgccagagccggcgccggcgccggcaccggcgccggcgccgccgccgccgccgccagccccggcagccccggcagcgccggcaccgccgccgagagcagactgctgctgttcgtgagaaacgagctgcccggcagaatcgccgtgcaggacgacctggacaacaccgagctgcccttcttcaccctggagatgagcggcaccgccgccgacatcagcctggtgcactggagacagcagtggctggagaacggcaccctgtacttccacgtgagcatgagcagcagcggccagctggcccaggccaccgcccccaccctgcaggagcccagcgagatcgtggaggagcagatgcacatcctgcacatcagcgtgatgggcggcctgatcgccctgctgctgctgctgctggtgttcaccgtggccctgtacgcccagagaagatggcagaagagaagaagaatcccccagaagagcgccagcaccgaggccacccacgagatccactacatccccagcgtgctgctgggcccccaggccagagagagcttcagaagcagcagactgcagacccacaacagcgtgatcggcgtgcccatcagagagacccccatcctggacgactacgactgcgaggaggacgaggagccccccagaagagccaaccacgtgagcagagaggacgagttcggcagccaggtgacccacaccctggacagcctgggccaccccggcgaggagaaggtggacttcgagaagaaggccgccgccgaggccacccaggagaccgtggagagcctgatgcagaagttcaaggagagcttcagagccaacacccccatcgagatcggccagctgcagccccccctgagaagcaccagcgccggcaagagaaagagaagaagcaagagcagaggcggcatcagcttcggcagagccaagggcaccagcggcagcgaggccgacgacgagacccagctgaccttctacaccgagcagtacagaagcagaagaagaagcaagggcctgctgaagagccccgtgaacaagaccgccctgaccctgatcgccgtgagcagctgcatcctggccatggtgtgcggcagccagatgagctgccccctgaccgtgaaggtgaccctgcacgtgcccgagcacttcatcgccgacggcagcagcttcgtggtgagcgagggcagctacctggacatcagcgactggctgaaccccgccaagctgagcctgtactaccagatcaacgccaccagcccctgggtgagagacctgtgcggccagagaaccaccgacgcctgcgagcagctgtgcgaccccgagaccggcgagtgcagctgccacgagggctacgcccccgaccccgtgcacagacacctgtgcgtgagaagcgactggggccagagcgagggcccctggccctacaccaccctggagagaggctacgacctggtgaccggcgagcaggcccccgagaagatcctgagaagcaccttcagcctgggccagggcctgtggctgcccgtgagcaagagcttcgtggtgccccccgtggagctgagcatcaaccccctggccagctgcaagaccgacgtgctggtgaccgaggaccccgccgacgtgagagaggaggccatgctgagcacctacttcgagaccatcaacgacctgctgagcagcttcggccccgtgagagactgcagcagaaacaacggcggctgcaccagaaacttcaagtgcgtgagcgacagacaggtggacagcagcggctgcgtgtgccccgaggagctgaagcccatgaaggacggcagcggctgctacgaccacagcaagggcatcgactgcagcgacggcttcaacggcggctgcgagcagctgtgcctgcagcagaccctgcccctgccctacgacgccaccagcagcaccatcttcatgttctgcggctgcgtggaggagtacaagctggcccccgacggcaagagctgcctgatgctgagcgacgtgtgcgagggccccaagtgcctgaagcccgacagcaagttcaacgacaccctgttcggcgagatgctgcacggctacaacaacagaacccagcacgtgaaccagggccaggtgttccagatgaccttcagagagaacaacttcatcaaggacttcccccagctggccgacggcctgctggtgatccccctgcccgtggaggagcagtgcagaggcgtgctgagcgagcccctgcccgacctgcagctgctgaccggcgacatcagatacgacgaggccatgggctaccccatggtgcagcagtggagagtgagaagcaacctgtacagagtgaagctgagcaccatcaccctggccgccggcttcaccaacgtgctgaagatcctgaccaaggagagcagcagagaggagctgctgagcttcatccagcactacggcagccactacatcgccgaggccctgtacggcagcgagctgacctgcatcatccacttccccagcaagaaggtgcagcagcagctgtggctgcagtaccagaaggagaccaccgagctgggcagcaagaaggagctgaagagcatgcccttcatcacctacctgagcggcctgctgaccgcccagatgctgagcgacgaccagctgatcagcggcgtggagatcagatgcgaggagaagggcagatgccccagcacctgccacctgtgcagaagacccggcaaggagcagctgagccccacccccgtgctgctggagatcaacagagtggtgcccctgtacaccctgatccaggacaacggcaccaaggaggccttcaagagcgccctgatgagcagctactggtgcagcggcaagggcgacgtgatcgacgactggtgcagatgcgacctgagcgccttcgacgccaacggcctgcccaactgcagccccctgctgcagcccgtgctgagactgagccccaccgtggagcccagcagcaccgtggtgagcctggagtgggtggacgtgcagcccgccatcggcaccaaggtgagcgactacatcctgcagcacaagaaggtggacgagtacaccgacaccgacctgtacaccggcgagttcctgagcttcgccgacgacctgctgagcggcctgggcaccagctgcgtggccgccggcagaagccacggcgaggtgcccgaggtgagcatctacagcgtgatcttcaagtgcctggagcccgacggcctgtacaagttcaccctgtacgccgtggacaccagaggcagacacagcgagctgagcaccgtgaccctgagaaccgcctgccccctggtggacgacaacaaggccgaggagatcgccgacaagatctacaacctgtacaacggctacaccagcggcaaggagcagcagatggcctacaacaccctgatggaggtgagcgccagcatgctgttcagagtgcagcaccactacaacagccactacgagaagttcggcgacttcgtgtggagaagcgaggacgagctgggccccagaaaggcccacctgatcctgagaagactggagagagtgagcagccactgcagcagcctgctgagaagcgcctacatccagagcagagtggagaccgtgccctacctgttctgcagaagcgaggaggtgagacccgccggcatggtgtggtacagcatcctgaaggacaccaagatcacctgcgaggagaagatggtgagcatggccagaaacacctacggcgagagcaagggcagatag

SEQ ID NO: 177414 - DNA, 3867 bp, Artificial Sequence
  derived and/or modified sequence
atggccgccgccggcgccagactgagccccggccccggcagcggcctgagaggcagacccagactgtgcttccaccccggccccccccccctgctgcccctgctgctgctgttcctgctgctgctgccccccccccccctgctggccggcgccaccgccgccgccagcagagagcccgacagcccctgcagactgaagaccgtgaccgtgagcaccctgcccgccctgagagagagcgacatcggctggagcggcgccagagccggcgccggcgccggcaccggcgccggcgccgccgccgccgccgccagccccggcagccccggcagcgccggcaccgccgccgagagcagactgctgctgttcgtgagaaacgagctgcccggcagaatcgccgtgcaggacgacctggacaacaccgagctgcccttcttcaccctggagatgagcggcaccgccgccgacatcagcctggtgcactggagacagcagtggctggagaacggcaccctgtacttccacgtgagcatgagcagcagcggccagctggcccaggccaccgcccccaccctgcaggagcccagcgagatcgtggaggagcagatgcacatcctgcacatcagcgtgatgggcggcctgatcgccctgctgctgctgctgctggtgttcaccgtggccctgtacgcccagagaagatggcagaagagaagaagaatcccccagaagagcgccagcaccgaggccacccacgagatccactacatccccagcgtgctgctgggcccccaggccagagagagcttcagaagcagcagactgcagacccacaacagcgtgatcggcgtgcccatcagagagacccccatcctggacgactacgactgcgaggaggacgaggagccccccagaagagccaaccacgtgagcagagaggacgagttcggcagccaggtgacccacaccctggacagcctgggccaccccggcgaggagaaggtggacttcgagaagaagggcggcatcagcttcggcagagccaagggcaccagcggcagcgaggccgacgacgagacccagctgaccttctacaccgagcagtacagaagcagaagaagaagcaagggcctgctgaagagccccgtgaacaagaccgccctgaccctgatcgccgtgagcagctgcatcctggccatggtgtgcggcagccagatgagctgccccctgaccgtgaaggtgaccctgcacgtgcccgagcacttcatcgccgacggcagcagcttcgtggtgagcgagggcagctacctggacatcagcgactggctgaaccccgccaagctgagcctgtactaccagatcaacgccaccagcccctgggtgagagacctgtgcggccagagaaccaccgacgcctgcgagcagctgtgcgaccccgagaccggcgagtgcagctgccacgagggctacgcccccgaccccgtgcacagacacctgtgcgtgagaagcgactggggccagagcgagggcccctggccctacaccaccctggagagaggctacgacctggtgaccggcgagcaggcccccgagaagatcctgagaagcaccttcagcctgggccagggcctgtggctgcccgtgagcaagagcttcgtggtgccccccgtggagctgagcatcaaccccctggccagctgcaagaccgacgtgctggtgaccgaggaccccgccgacgtgagagaggaggccatgctgagcacctacttcgagaccatcaacgacctgctgagcagcttcggccccgtgagagactgcagcagaaacaacggcggctgcaccagaaacttcaagtgcgtgagcgacagacaggtggacagcagcggctgcgtgtgccccgaggagctgaagcccatgaaggacggcagcggctgctacgaccacagcaagggcatcgactgcagcgacggcttcaacggcggctgcgagcagctgtgcctgcagcagaccctgcccctgccctacgacgccaccagcagcaccatcttcatgttctgcggctgcgtggaggagtacaagctggcccccgacggcaagagctgcctgatgctgagcgacgtgtgcgagggccccaagtgcctgaagcccgacagcaagttcaacgacaccctgttcggcgagatgctgcacggctacaacaacagaacccagcacgtgaaccagggccaggtgttccagatgaccttcagagagaacaacttcatcaaggacttcccccagctggccgacggcctgctggtgatccccctgcccgtggaggagcagtgcagaggcgtgctgagcgagcccctgcccgacctgcagctgctgaccggcgacatcagatacgacgaggccatgggctaccccatggtgcagcagtggagagtgagaagcaacctgtacagagtgaagctgagcaccatcaccctggccgccggcttcaccaacgtgctgaagatcctgaccaaggagagcagcagagaggagctgctgagcttcatccagcactacggcagccactacatcgccgaggccctgtacggcagcgagctgacctgcatcatccacttccccagcaagaaggtgcagcagcagctgtggctgcagtaccagaaggagaccaccgagctgggcagcaagaaggagctgaagagcatgcccttcatcacctacctgagcggcctgctgaccgcccagatgctgagcgacgaccagctgatcagcggcgtggagatcagatgcgaggagaagggcagatgccccagcacctgccacctgtgcagaagacccggcaaggagcagctgagccccacccccgtgctgctggagatcaacagagtggtgcccctgtacaccctgatccaggacaacggcaccaaggaggccttcaagagcgccctgatgagcagctactggtgcagcggcaagggcgacgtgatcgacgactggtgcagatgcgacctgagcgccttcgacgccaacggcctgcccaactgcagccccctgctgcagcccgtgctgagactgagccccaccgtggagcccagcagcaccgtggtgagcctggagtgggtggacgtgcagcccgccatcggcaccaaggtgagcgactacatcctgcagcacaagaaggtggacgagtacaccgacaccgacctgtacaccggcgagttcctgagcttcgccgacgacctgctgagcggcctgggcaccagctgcgtggccgccggcagaagccacggcgaggtgcccgaggtgagcatctacagcgtgatcttcaagtgcctggagcccgacggcctgtacaagttcaccctgtacgccgtggacaccagaggcagacacagcgagctgagcaccgtgaccctgagaaccgcctgccccctggtggacgacaacaaggccgaggagatcgccgacaagatctacaacctgtacaacggctacaccagcggcaaggagcagcagatggcctacaacaccctgatggaggtgagcgccagcatgctgttcagagtgcagcaccactacaacagccactacgagaagttcggcgacttcgtgtggagaagcgaggacgagctgggccccagaaaggcccacctgatcctgagaagactggagagagtgagcagccactgcagcagcctgctgagaagcgcctacatccagagcagagtggagaccgtgccctacctgttctgcagaagcgaggaggtgagacccgccggcatggtgtggtacagcatcctgaaggacaccaagatcacctgcgaggagaagatggtgagcatggccagaaacacctacggcgagagcaagggcagatag

SEQ ID NO: 177415 - DNA, 4008 bp, Artificial Sequence
  derived and/or modified sequence
atggccgccgccggcgccagactgagccccggccccggcagcggcctgagaggcagacccagactgtgcttccaccccggccccccccccctgctgcccctgctgctgctgttcctgctgctgctgccccccccccccctgctggccggcgccaccgccgccgccagcagagagcccgacagcccctgcagactgaagaccgtgaccgtgagcaccctgcccgccctgagagagagcgacatcggctggagcggcgccagagccggcgccggcgccggcaccggcgccggcgccgccgccgccgccgccagccccggcagccccggcagcgccggcaccgccgccgagagcagactgctgctgttcgtgagaaacgagctgcccggcagaatcgccgtgcaggacgacctggacaacaccgagctgcccttcttcaccctggagatgagcggcaccgccgccgacatcagcctggtgcactggagacagcagtggctggagaacggcaccctgtacttccacgtgagcatgagcagcagcggccagctggcccaggccaccgcccccaccctgcaggagcccagcgagatcgtggaggagcagatgcacatcctgcacatcagcgtgatgggcggcctgatcgccctgctgctgctgctgctggtgttcaccgtggccctgtacgcccagagaagatggcagaagagaagaagaatcccccagaagagcgccagcaccgaggccacccacgagatccactacatccccagcgtgctgctgggcccccaggccagagagagcttcagaagcagcagactgcagacccacaacagcgtgatcggcgtgcccatcagagagacccccatcctggacgactacgactgcgaggaggacgaggagccccccagaagagccaaccacgtgagcagagaggacgagttcggcagccaggtgacccacaccctggacagcctgggccaccccggcgaggagaaggtggacttcgagaagaaggccgccgccgaggccacccaggagaccgtggagagcctgatgcagaagttcaaggagagcttcagagccaacacccccatcgagatcggccagctgcagccccccctgagaagcaccagcgccggcaagagaaagagaagaagcaagagcagaggcggcatcagcttcggcagagccaagggcaccagcggcagcgaggccgacgacgagacccagctgaccttctacaccgagcagtacagaagcagaagaagaagcaagggcctgctgaagagccccgtgaacaagaccgccctgaccctgatcgccgtgagcagctgcatcctggccatggtgtgcggcagccagatgagctgccccctgaccgtgaaggtgaccctgcacgtgcccgagcacttcatcgccgacggcagcagcttcgtggtgagcgagggcagctacctggacatcagcgactggctgaaccccgccaagctgagcctgtactaccagatcaacgccaccagcccctgggtgagagacctgtgcggccagagaaccaccgacgcctgcgagcagctgtgcgaccccgagaccggcgagtgcagctgccacgagggctacgcccccgaccccgtgcacagacacctgtgcgtgagaagcgactggggccagagcgagggcccctggccctacaccaccctggagagaggctacgacctggtgaccggcgagcaggcccccgagaagatcctgagcctgggccagggcctgtggctgcccgtgagcaagagcttcgtggtgccccccgtggagctgagcatcaaccccctggccagctgcaagaccgacgtgctggtgaccgaggaccccgccgacgtgagagaggaggccatgctgagcacctacttcgagaccatcaacgacctgctgagcagcttcggccccgtgagagactgcagcagaaacaacggcggctgcaccagaaacttcaagtgcgtgagcgacagacaggtggacagcagcggctgcgtgtgccccgaggagctgaagcccatgaaggacggcagcggctgctacgaccacagcaagggcatcgactgcagcgacggcttcaacggcggctgcgagcagctgtgcctgcagcagaccctgcccctgccctacgacgccaccagcagcaccatcttcatgttctgcggctgcgtggaggagtacaagctggcccccgacggcaagagctgcctgatgctgagcgacgtgtgcgagggccccaagtgcctgaagcccgacagcaagttcaacgacaccctgttcggcgagatgctgcacggctacaacaacagaacccagcacgtgaaccagggccaggtgttccagatgaccttcagagagaacaacttcatcaaggacttcccccagctggccgacggcctgctggtgatccccctgcccgtggaggagcagtgcagaggcgtgctgagcgagcccctgcccgacctgcagctgctgaccggcgacatcagatacgacgaggccatgggctaccccatggtgcagcagtggagagtgagaagcaacctgtacagagtgaagctgagcaccatcaccctggccgccggcttcaccaacgtgctgaagatcctgaccaaggagagcagcagagaggagctgctgagcttcatccagcactacggcagccactacatcgccgaggccctgtacggcagcgagctgacctgcatcatccacttccccagcaagaaggtgcagcagcagctgtggctgcagtaccagaaggagaccaccgagctgggcagcaagaaggagctgaagagcatgcccttcatcacctacctgagcggcctgctgaccgcccagatgctgagcgacgaccagctgatcagcggcgtggagatcagatgcgaggagaagggcagatgccccagcacctgccacctgtgcagaagacccggcaaggagcagctgagccccacccccgtgctgctggagatcaacagagtggtgcccctgtacaccctgatccaggacaacggcaccaaggaggccttcaagagcgccctgatgagcagctactggtgcagcggcaagggcgacgtgatcgacgactggtgcagatgcgacctgagcgccttcgacgccaacggcctgcccaactgcagccccctgctgcagcccgtgctgagactgagccccaccgtggagcccagcagcaccgtggtgagcctggagtgggtggacgtgcagcccgccatcggcaccaaggtgagcgactacatcctgcagcacaagaaggtggacgagtacaccgacaccgacctgtacaccggcgagttcctgagcttcgccgacgacctgctgagcggcctgggcaccagctgcgtggccgccggcagaagccacggcgaggtgcccgaggtgagcatctacagcgtgatcttcaagtgcctggagcccgacggcctgtacaagttcaccctgtacgccgtggacaccagaggcagacacagcgagctgagcaccgtgaccctgagaaccgcctgccccctggtggacgacaacaaggccgaggagatcgccgacaagatctacaacctgtacaacggctacaccagcggcaaggagcagcagatggcctacaacaccctgatggaggtgagcgccagcatgctgttcagagtgcagcaccactacaacagccactacgagaagttcggcgacttcgtgtggagaagcgaggacgagctgggccccagaaaggcccacctgatcctgagaagactggagagagtgagcagccactgcagcagcctgctgagaagcgcctacatccagagcagagtggagaccgtgccctacctgttctgcagaagcgaggaggtgagacccgccggcatggtgtggtacagcatcctgaaggacaccaagatcacctgcgaggagaagatggtgagcatggccagaaacacctacggcgagagcaagggcagatag

SEQ ID NO: 177416 - protein, 298 aa, Artificial Sequence
  derived and/or modified sequence
MTLNTEQEAKTPLHRRASTPLPLSPRGHQPGRLSTVPSTQSQHPRLGQSASLNPPTQKPSPAPDDWSSESSDSEGSWEALYRVVLLGDPGVGKTSLASLFAGKQERDLHEQLGEDVYERTLTVDGEDTTLVVVDTWEAEKLDKSWSQESCLQGGSAYVIVYSIADRGSFESASELRIQLRRTHQADHVPIILVGNKADLARCREVSVEEGRACAVVFDCKFIETSATLQHNVAELFEGVVRQLRLRRRDSAAKEPPAPRRPASLAQRARRFLARLTARSARRRALKARSKSCHNLAVL

SEQ ID NO: 177417 - DNA, 897 bp, Artificial Sequence
  derived and/or modified sequence
atgaccctgaacaccgagcaggaggccaagacccccctgcacagaagagccagcacccccctgcccctgagccccagaggccaccagcccggcagactgagcaccgtgcccagcacccagagccagcaccccagactgggccagagcgccagcctgaacccccccacccagaagcccagccccgcccccgacgactggagcagcgagagcagcgacagcgagggcagctgggaggccctgtacagagtggtgctgctgggcgaccccggcgtgggcaagaccagcctggccagcctgttcgccggcaagcaggagagagacctgcacgagcagctgggcgaggacgtgtacgagagaaccctgaccgtggacggcgaggacaccaccctggtggtggtggacacctgggaggccgagaagctggacaagagctggagccaggagagctgcctgcagggcggcagcgcctacgtgatcgtgtacagcatcgccgacagaggcagcttcgagagcgccagcgagctgagaatccagctgagaagaacccaccaggccgaccacgtgcccatcatcctggtgggcaacaaggccgacctggccagatgcagagaggtgagcgtggaggagggcagagcctgcgccgtggtgttcgactgcaagttcatcgagaccagcgccaccctgcagcacaacgtggccgagctgttcgagggcgtggtgagacagctgagactgagaagaagagacagcgccgccaaggagccccccgcccccagaagacccgccagcctggcccagagagccagaagattcctggccagactgaccgccagaagcgccagaagaagagccctgaaggccagaagcaagagctgccacaacctggccgtgctgtag

SEQ ID NO: 177418 - DNA, 897 bp, Artificial Sequence
  derived and/or modified sequence
atgacactcaatacggaacaggaggccaagacgccactccataggagagcatccacgccgctcccgctgtcgccacgcgggcaccagccaggacggctgagtaccgtgccgagcacccagtctcagcaccccagactgggacaaagcgcttccctaaatccacccacccagaaaccttctcccgcacctgacgactggagttccgagtcctcagactctgaggggtcctgggaagcgctttatcgcgtggtgttgctgggagaccctggagtgggcaagacctccctggctagcctttttgcagggaaacaggagcgcgatctacacgagcagttaggcgaagatgtctatgaaagaacgttgactgttgatggcgaggacaccactttagtcgttgtggacacatgggaggccgagaaactggacaaaagctggagccaagagtcttgtctgcagggcgggtcagcctatgtcattgtttactcaattgccgatagaggctccttcgaaagtgcatccgagctgaggattcagctaagacgtactcatcaggccgatcatgtgccgatcattctcgtgggtaacaaggcggacttggctcgctgtcgggaggtgtcagtggaggagggcagagcctgcgccgtcgtgtttgactgcaaattcatagaaacctcagctacgcttcaacacaatgttgccgaattgttcgagggggtggtgcgccagctgcgtctcagaaggcgcgacagcgcggccaaagagccacctgcccctaggaggccagcctccctagctcagcgcgcgaggagattcctagcccggctgactgcccgaagcgcacggcggcgcgctctcaaggccaggagtaaatcttgccataacctagcagttctatag

SEQ ID NO: 177419 - DNA, 897 bp, Artificial Sequence
  derived and/or modified sequence
atgaccctgaacacagagcaggaggccaagacccccctgcacagaagagccagcacccccctgcccctgagcccccggggccaccagcccggccgcctgagcacagtgcccagcacccagagccagcacccccggctgggccagagcgccagcctgaacccccccacccagaagcccagccctgccccagatgactggagcagcgagagcagtgacagcgagggctcctgggaggccctgtacagagtggtgctgctgggggaccccggggtgggcaagaccagcctggccagcctgtttgctgggaagcaggagcgggacctgcacgagcagctgggggaggatgtgtatgaaagaaccctgactgtggatggagaggacaccaccctggtggtggtggacacctgggaggccgagaagctggacaagtcctggagccaggagagctgcctgcagggcggcagcgcctacgtgattgtgtacagcattgctgaccggggcagctttgaaagtgccagcgagctgcgcatccagctgcggaggacccaccaggccgaccacgtgcccatcatcctggtgggcaacaaggctgacctggcccgctgccgggaggtgtctgtggaggagggccgggcctgtgctgtggtgtttgactgcaagttcatcgagaccagcgccaccctgcagcacaacgtggccgagctgtttgagggcgtggtgcggcagctgcggctgcggcggcgggacagcgctgccaaggagcccccagcccccaggaggcctgccagcctggcccagagggcccggcgcttcctggcccggctgacagcccggagcgcccggcggcgggccctgaaggcccggagcaagagctgccacaacctggccgtgctgtag

SEQ ID NO: 177420 - DNA, 897 bp, Artificial Sequence
  derived and/or modified sequence
atgaccctgaacaccgagcaggaggccaagacccccctgcaccggcgagcctccacccccttgcccctctcacccagagggcatcagcctggcaggctgtctacggttccctccacccagtcccagcaccctcgactcggccagtccgcctctctaaatcctcccacccaaaagccttcaccagcgcccgatgactggtcgagcgaatcttcagactcagagggctcatgggaggccctgtatcgggtggtactccttggagatcctggcgtaggaaaaaccagtctggcctcgctcttcgccggaaagcaggaacgcgatcttcacgagcagctgggggaggacgtctacgagaggaccctgacggtagacggggaggatacaaccctggtggttgttgatacatgggaagctgagaagctggataaatcctggagccaggagagctgtctgcagggcggcagtgcgtatgtaatcgtctacagcattgcagatcgaggcagtttcgagtctgcttcagaactgcgcatccaactgagaagaacacaccaggctgaccacgtgcctatcattctggtcggcaacaaagcggacctcgccagatgccgggaggtgagcgttgaggaggggcgcgcctgcgccgttgttttcgattgcaaattcattgagacatcagcgacactgcagcacaatgttgcagaactctttgagggtgttgtccgccaactgcgactccgaaggagagactctgcggccaaggagccaccagccccccgccggccggcttcactggcgcagagagcccgccgcttcttagctaggctgacagcacgcagtgccaggcgacgtgcactgaaagcaagatccaaatcttgtcacaatctggcagtcctgtag

SEQ ID NO: 177421 - DNA, 897 bp, Artificial Sequence
  derived and/or modified sequence
atgactcttaataccgagcaggaggctaagacgccactccacagaagagccagtactcccttacccctgtcaccaaggggccatcagcccggtaggttgtccacagtcccatctacccaatcacagcaccccagactcggtcaaagcgcgagcctgaacccccctactcagaaaccctcccctgctcccgacgactggagttcagagtcaagtgatagtgaaggctcctgggaggccctatacagggtggtgctgctcggagatccaggggttggcaaaacgagcctggcctcactgttcgctggaaagcaggaacgtgacctacacgagcaattgggagaagacgtgtacgaaaggacccttactgtggacggggaggatacaacgctggtcgtcgtagatacatgggaggcggaaaaactggacaaatcctggtcccaagagtcctgtctccagggaggctctgcatatgtgatcgtgtacagtattgcagatcggggttcctttgagtccgctagtgaactccgcattcaactgagacggactcatcaagccgaccatgtccccataatcctggtcgggaacaaggcagacctggcacgctgtcgcgaggtgagtgttgaggagggacgggcttgtgctgtcgtcttcgattgcaagttcatcgaaacttccgccactctgcaacataacgtcgctgagctgtttgagggtgtcgtgcgtcagctgcgcctaagaagaagagattccgcagccaaagaaccacccgcacctcgcagaccagcttcactggcccagcgggcaagaagattcctggctagactcactgcgaggtccgccaggaggcgcgctttgaaagcccgatctaaaagctgccataacctggccgtcctttag

SEQ ID NO: 177422 - DNA, 1665 bp, Artificial Sequence
  derived and/or modified sequence
ctgaggcgggtggtacagcctggagcatccagccgctggagctgcgagggaccctggacccctcccacgccgaggtttatgcagagcctgaggccagaaaacctagggactttctgccccaagaagctgaggcacctcctactcccatctgaacaagagggggatctggaagaagccatacagcagctcatcaggacactatagaaagaagcagctcaaagcaattggctgacagccaattcccccttctttcagaaggaaagaaggaagaagcaaacccccccctaccaaagatgacactcaacaccgagcaggaagcaaagacccctctgcaccggcgagccagcaccccactgcccctgtccccacggggccaccagcctggccgcctgagcacagtgccttccactcaatcccagcatccccggctgggccaatcagcctccctcaaccctcccacccagaaaccttcacctgccccagatgattggtcttctgaatccagcgactctgaaggctcctgggaggctctctaccgtgtggtgctacttggagatcctggagtggggaagaccagcttggccagcctctttgcagggaagcaagagagggacctccatgaacagctgggagaagatgtatatgagaggaccctcacggtggatggagaagacaccacactggtggtcgtggacacctgggaggccgagaaactggataaaagctggagccaggagtcatgcctgcaggggggcagtgcctatgtcatcgtatactccatcgcagaccgaggcagctttgagagtgcctctgagctccgcatccagctgcggcgcacacatcaggcagaccatgtgcccatcatcctcgtgggcaacaaggcagacttggcccgctgccgagaagtctctgtggaagagggccgcgcctgcgctgtggtgttcgactgtaaattcatcgagacatccgccacgctgcagcacaatgtggccgagctcttcgagggcgtggtgcgccaactgcgcttgcgccgccgggacagtgcggccaaggaacccccagcaccccgacggccggccagcctagcccagcgcgctcgtcgcttcctggcacgcctgacagcccgcagcgcacgccgccgggcactcaaggcccgctccaagtcctgccacaatctggccgtgctctgaagccccccgcccttctgagagttggcgggtcactgaggtgcattctgggctccagggacgccactgcggggcaaaggcgccgttacctggagtctgcatcatgggtcttgcttgcctgctgccctgatggcctgagcatcccccagatccaagcctgggggatcccgggaaagcgatggacagacagacgatggggccgaagccccaagctgggcacaaagtagttttttacgtggtgggtgtctttttgtaaaaaaatcttccttgtccctgggctctggccaaccctcagaaaccctcacaataaaccagaccagaaggatgtcccatctgaatgcccagacctctccatctcggctcttccaggcgtctccacctactgccctcccatctacacttgactgtagactggtctggcctgctggcctgggcgtcagggcgcatcaataaagtacttggaccagttttgtgctca

SEQ ID NO: 177423 - protein, 2136 aa, Artificial Sequence
  derived and/or modified sequence
MADVTARSLQYEYKANSNLVLQADRSLIDRTRRDEPTGEVLSLVGKLEGTRMGDKAQRTKPQMQEERRAKRRKRDEDRHDINKMKGYTLLSEGIDEMVGIIYKPKTKETRETYEVLLSFIQAALGDQPRDILCGAADEVLAVLKNEKLRDKERRKEIDLLLGQTDDTRYHVLVNLGKKITDYGGDKEIQNMDDNIDETYGVNVQFESDEEEGDEDVYGEVREEASDDDMEGDEAVVRCTLSANLVASGELMSSKKKDLHPRDIDAFWLQRQLSRFYDDAIVSQKKADEVLEILKTASDDRECENQLVLLLGFNTFDFIKVLRQHRMMILYCTLLASAQSEAEKERIMGKMEADPELSKFLYQLHETEKEDLIREERSRRERVRQSRMDTDLETMDLDQGGEALAPRQVLDLEDLVFTQGSHFMANKRCQLPDGSFRRQRKGYEEVHVPALKPKPFGSEEQLLPVEKLPKYAQAGFEGFKTLNRIQSKLYRAALETDENLLLCAPTGAGKTNVALMCMLREIGKHINMDGTINVDDFKIIYIAPMRSLVQEMVGSFGKRLATYGITVAELTGDHQLCKEEISATQIIVCTPEKWDIITRKGGERTYTQLVRLIILDEIHLLHDDRGPVLEALVARAIRNIEMTQEDVRLIGLSATLPNYEDVATFLRVDPAKGLFYFDNSFRPVPLEQTYVGITEKKAIKRFQIMNEIVYEKIMEHAGKNQVLVFVHSRKETGKTARAIRDMCLEKDTLGLFLREGSASTEVLRTEAEQCKNLELKDLLPYGFAIHHAGMTRVDRTLVEDLFADKHIQVLVSTATLAWGVNLPAHTVIIKGTQVYSPEKGRWTELGALDILQMLGRAGRPQYDTKGEGILITSHGELQYYLSLLNQQLPIESQMVSKLPDMLNAEIVLGNVQNAKDAVNWLGYAYLYIRMLRSPTLYGISHDDLKGDPLLDQRRLDLVHTAALMLDKNNLVKYDKKTGNFQVTELGRIASHYYITNDTVQTYNQLLKPTLSEIELFRVFSLSSEFKNITVREEEKLELQKLLERVPIPVKESIEEPSAKINVLLQAFISQLKLEGFALMADMVYVTQSAGRLMRAIFEIVLNRGWAQLTDKTLNLCKMIDKRMWQSMCPLRQFRKLPEEVVKKIEKKNFPFERLYDLNHNEIGELIRMPKMGKTIHKYVHLFPKLELSVHLQPITRSTLKVELTITPDFQWDEKVHGSSEAFWILVEDVDSEVILHHEYFLLKAKYAQDEHLITFFVPVFEPLPPQYFIRVVSDRWLSCETQLPVSFRHLILPEKYPPPTELLDLQPLPVSALRNSAFESLYQDKFPFFNPIQTQVFNTVYNSDDNVFVGAPTGSGKTICAEFAILRMLLQSSEGRCVYITPMEALAEQVYMDWYEKFQDRLNKKVVLLTGETSTDLKLLGKGNIIISTPEKWDILSRRWKQRKNVQNINLFVVDEVHLIGGENGPVLEVICSRMRYISSQIERPIRIVALSSSLSNAKDVAHWLGCSATSTFNFHPNVRPVPLELHIQGFNISHTQTRLLSMAKPVYHAITKHSPKKPVIVFVPSRKQTRLTAIDILTTCAADIQRQRFLHCTEKDLIPYLEKLSDSTLKETLLNGVGYLHEGLSPMERRLVEQLFSSGAIQVVVASRSLCWGMNVAAHLVIIMDTQYYNGKIHAYVDYPIYDVLQMVGHANRPLQDDEGRCVIMCQGSKKDFFKKFLYEPLPVESHLDHCMHDHFNAEIVTKTIENKQDAVDYLTWTFLYRRMTQNPNYYNLQGISHRHLSDHLSELVEQTLSDLEQSKCISIEDEMDVAPLNLGMIAAYYYINYTTIELFSMSLNAKTKVRGLIEIISNAAEYENIPIRHHEDNLLRQLAQKVPHKLNNPKFNDPHVKTNLLLQAHLSRMQLSAELQSDTEEILSKAIRLIQACVDVLSSNGWLSPALAAMELAQMVTQAMWSKDSYLKQLPHFTSEHIKRCTDKGVESVFDIMEMEDEERNALLQLTDSQIADVARFCNRYPNIELSYEVVDKDSIRSGGPVVVLVQLEREEEVTGPVIAPLFPQKREEGWWVVIGDAKSNSLISIKRLTLQQKAKVKLDFVAPATGAHNYTLYFMSDAYMGCDQEYKFSVDVKEAETDSDSD

SEQ ID NO: 177424 - protein, 625 aa, Artificial Sequence
  derived and/or modified sequence
MADVTARSLQYEYKANSNLVLQADRSLIDRTRRDEPTGEVLSLVGKLEGTRMGDKAQRTKPQMQEERRAKRRKRDEDRHDINKMKGYTLLSEGIDEMVGIIYKPKTKETRETYEVLLSFIQAALGDQPRDILCGAADEVLAVLKNEKLRDKERRKEIDLLLGQTDDTRYHVLVNLGKKITDYGGDKEIQNMDDNIDETYGVNVQFESDEEEGDEDVYGEVREEASDDDMEGDEAVVRCTLSANLVASGELMSSKKKDLHPRDIDAFWLQRQLSRFYDDAIVSQKKADEVLEILKTASDDRECENQLVLLLGFNTFDFIKVLRQHRMMILYCTLLASAQSEAEKERIMGKMEADPELSKFLYQLHETEKEDLIREERSRRERVRQSRMDTDLETMDLDQGGEALAPRQVLDLEDLVFTQGSHFMANKRCQLPDGSFRRQRKGYEEVHVPALKPKPFGSEEQLLPVEKLPKYAQAGFEGFKTLNRIQSKLYRAALETDENLLLCAPTGAGKTNVALMCMLREIGKHINMDGTINVDDFKIIYIAPMRSLVQEMVGSFGKRDAKSNSLISIKRLTLQQKAKVKLDFVAPATGAHNYTLYFMSDAYMGCDQEYKFSVDVKEAETDSDSD

SEQ ID NO: 177425 - protein, 595 aa, Artificial Sequence
  derived and/or modified sequence
MRYISSQIERPIRIVALSSSLSNAKDVAHWLGCSATSTFNFHPNVRPVPLELHIQGFNISHTQTRLLSMAKPVYHAITKHSPKKPVIVFVPSRKQTRLTAIDILTTCAADIQRQRFLHCTEKDLIPYLEKLSDSTLKETLLNGVGYLHEGLSPMERRLVEQLFSSGAIQVVVASRSLCWGMNVAAHLVIIMDTQYYNGKIHAYVDYPIYDVLQMVGHANRPLQDDEGRCVIMCQGSKKDFFKKFLYEPLPVESHLDHCMHDHFNAEIVTKTIENKQDAVDYLTWTFLYRRMTQNPNYYNLQGISHRHLSDHLSELVEQTLSDLEQSKCISIEDEMDVAPLNLGMIAAYYYINYTTIELFSMSLNAKTKVRGLIEIISNAAEYENIPIRHHEDNLLRQLAQKVPHKLNNPKFNDPHVKTNLLLQAHLSRMQLSAELQSDTEEILSKAIRLIQACVDVLSSNGWLSPALAAMELAQMVTQAMWSKDSYLKQLPHFTSEHIKRCTDKGVESVFDIMEMEDEERNALLQLTDSQIADVARFCNRYPNIELSYEVVDKDSIRSGGPVVVLVQLEREEEVTGPVIAPLFPQFRAGRSGSRL

SEQ ID NO: 177426 - protein, 595 aa, Artificial Sequence
  derived and/or modified sequence
MAKPVYHAITKHSPKKPVIVFVPSRKQTRLTAIDILTTCAADIQRQRFLHCTEKDLIPYLEKLSDSTLKETLLNGVGYLHEGLSPMERRLVEQLFSSGAIQVVVASRSLCWGMNVAAHLVIIMDTQYYNGKIHAYVDYPIYDVLQMVGHANRPLQDDEGRCVIMCQGSKKDFFKKFLYEPLPVESHLDHCMHDHFNAEIVTKTIENKQDAVDYLTWTFLYRRMTQNPNYYNLQGISHRHLSDHLSELVEQTLSDLEQSKCISIEDEMDVAPLNLGMIAAYYYINYTTIELFSMSLNAKTKVRGLIEIISNAAEYENIPIRHHEDNLLRQLAQKVPHKLNNPKFNDPHVKTNLLLQAHLSRMQLSAELQSDTEEILSKAIRLIQACVDVLSSNGWLSPALAAMELAQMVTQAMWSKDSYLKQLPHFTSEHIKRCTDKGVESVFDIMEMEDEERNALLQLTDSQIADVARFCNRYPNIELSYEVVDKDSIRSGGPVVVLVQLEREEEVTGPVIAPLFPQKREEGWWVVIGDAKSNSLISIKRLTLQQKAKVKLDFVAPATGAHNYTLYFMSDAYMGCDQEYKFSVDVKEAETDSDSD

SEQ ID NO: 177427 - protein, 774 aa, Artificial Sequence
  derived and/or modified sequence
MMILYCTLLASAQSEAEKERIMGKMEADPELSKFLYQLHETEKEDLIREERSRRERVRQSRMDTDLETMDLDQGGEALAPRQVLDLEDLVFTQGSHFMANKRCQLPDGSFRRQRKGYEEVHVPALKPKPFGSEEQLLPVEKLPKYAQAGFEGFKTLNRIQSKLYRAALETDENLLLCAPTGAGKTNVALMCMLREIGKHINMDGTINVDDFKIIYIAPMRSLVQEMVGSFGKRLATYGITVAELTGDHQLCKEEISATQIIVCTPEKWDIITRKGGERTYTQLVRLIILDEIHLLHDDRGPVLEALVARAIRNIEMTQEDVRLIGLSATLPNYEDVATFLRVDPAKGLFYFDNSFRPVPLEQTYVGITEKKAIKRFQIMNEIVYEKIMEHAGKNQVLVFVHSRKETGKTARAIRDMCLEKDTLGLFLREGSASTEVLRTEAEQCKNLELKDLLPYGFAIHHAGMTRVDRTLVEDLFADKHIQVLVSTATLAWGVNLPAHTVIIKGTQVYSPEKGRWTELGALDILQMLGRAGRPQYDTKGEGILITSHGELQYYLSLLNQQLPIESQMVSKLPDMLNAEIVLGNVQNAKDAVNWLGYAYLYIRMLRSPTLYGISHDDLKGDPLLDQRRLDLVHTAALMLDKNNLVKYDKKTGNFQVTELGRIASHYYITNDTVQTYNQLLKPTLSEIELFRVFSLSSEFKNITVREEEKLELQKLLERVPIPVKESIEEPSAKINVLLQAFISQLKLEGFALMADMVYVTQSAGRLMRAILKLS

SEQ ID NO: 177428 - protein, 719 aa, Artificial Sequence
  derived and/or modified sequence
MLLQSSEGRCVYITPMEALAEQVYMDWYEKFQDRLNKKVVLLTGENGPVLEVICSRMRYISSQIERPIRIVALSSSLSNAKDVAHWLGCSATSTFNFHPNVRPVPLELHIQGFNISHTQTRLLSMAKPVYHAITKHSPKKPVIVFVPSRKQTRLTAIDILTTCAADIQRQRFLHCTEKDLIPYLEKLSDSTLKETLLNGVGYLHEGLSPMERRLVEQLFSSGAIQVVVASRSLCWGMNVAAHLVIIMDTQYYNGKIHAYVDYPIYDVLQMVGHANRPLQDDEGRCVIMCQGSKKDFFKKFLYEPLPVESHLDHCMHDHFNAEIVTKTIENKQDAVDYLTWTFLYRRMTQNPNYYNLQGISHRHLSDHLSELVEQTLSDLEQSKCISIEDEMDVAPLNLGMIAAYYYINYTTIELFSMSLNAKTKVRGLIEIISNAAEYENIPIRHHEDNLLRQLAQKVPHKLNNPKFNDPHVKTNLLLQAHLSRMQLSAELQSDTEEILSKAIRLIQACVDVLSSNGWLSPALAAMELAQMVTQAMWSKDSYLKQLPHFTSEHIKRCTDKGVESVFDIMEMEDEERNALLQLTDSQIADVARFCNRYPNIELSYEVVDKDSIRSGGPVVVLVQLEREEEVTGPVIAPLFPQKREEGWWVVIGDAKSNSLISIKRLTLQQKAKVKLDFVAPATGAHNYTLYFMSDAYMGCDQEYKFSVDVKEAETDSDSD

SEQ ID NO: 177429 - DNA, 6411 bp, Artificial Sequence
  derived and/or modified sequence
atggctgacgttactgcgagatcacttcagtacgagtacaaagcaaatagtaatttagtactgcaagcagataggtccttgatcgatcgtacgcgtagagatgaaccgacaggcgaagtgctgtcactggttggcaaactggagggaacgcggatgggagacaaggcacagcggacgaagccccagatgcaggaagagcgcagggctaaacggagaaagagagacgaggatcgacatgatataaataagatgaaagggtacacattactctctgaggggattgacgaaatggttggaatcatctacaagcctaagactaaggaaacccgagagacatacgaagttttgcttagcttcatccaggctgcactgggtgatcagccgcgggacattctgtgcggcgcagcggacgaagttctagcagtactcaaaaacgagaaactgagggacaaggagcggaggaaagaaatcgacctacttctggggcagaccgacgatactcgctaccatgtgcttgtgaatctgggtaaaaaaattactgactacggtggggacaaggagatccagaatatggatgacaatatcgacgagacctacggcgtcaatgttcagttcgagagtgatgaagaggagggagacgaagatgtgtacggcgaggtgcgtgaggaagcttcagatgatgacatggagggcgacgaggcggtggtacgctgtactctgagcgcaaaccttgtcgcttccggcgagcttatgtcaagcaagaaaaaggacctccacccgagggacatcgatgctttttggctgcagagacagctcagccgattctacgatgatgccatagtttcccagaagaaagccgacgaagtcctggaaattctgaagactgcttcggacgatcgagagtgtgagaaccagctagttctgcttctcgggttcaacacttttgactttataaaggtcctgcgtcaacaccggatgatgattttgtactgtaccctgctggcctcagctcaaagtgaagctgagaaagagaggattatgggaaagatggaggccgatccagagctgagtaaattcctgtatcagctccatgaaaccgagaaggaagatttaatcagagaagaacggtcgcgaagagagagagttcggcagtcacgcatggacaccgacttggagaccatggatttggaccagggaggcgaagccctcgctcctcggcaagtgctggatctggaagatctagtcttcacccaagggagccacttcatggccaataagaggtgtcaattacctgatggatcttttcgtcgtcagcggaaaggatatgaggaggtgcacgtacctgccctcaaaccaaagccctttggatctgaggagcagctgctgcctgtagagaagcttcccaagtacgcccaggcgggattcgaagggtttaaaacgctgaatcggattcaaagcaagctctacagggcagctctggaaacggatgagaatcttctcctctgcgctcccaccggagccggaaagactaatgtcgcccttatgtgtatgctcagggagatcggtaaacatatcaacatggatggaacaattaacgtcgacgatttcaaaatcatttacatagcacccatgcgctccctggtgcaggagatggtgggatcttttgggaagcgcctcgccacctatgggattaccgtggccgagctgacaggcgaccatcaactgtgcaaagaggagatttcggctactcagatcattgtgtgtactccagagaagtgggacatcatcacacgaaaaggaggagagagaacctatacccagctggtccggcttattattctcgacgaaattcatcttttgcacgacgaccgaggccctgtgcttgaggccctggttgccagggccattagaaatatagagatgactcaggaagacgtgagacttattggactctcagccaccctgccaaactatgaggacgtggccacgttcttacgcgtggacccggccaaagggttgttctacttcgacaactcgttcagacccgttccgctggaacagacctacgtgggcatcacagagaaaaaggcaatcaagaggttccagattatgaacgagattgtctacgagaagataatggagcacgctggtaagaaccaggtgctggtgtttgtgcatagtcgtaaggagacaggaaagaccgccagggcaatcagagacatgtgtctggagaaggacactcttgggctgttcctgagggaaggttctgcgtccactgaagttctgaggaccgaggccgaacagtgtaagaacttagagctcaaggacctgctgccgtacggattcgcgatccaccatgcgggcatgaccagagttgatcgaactctcgtggaagacctgtttgctgacaaacacattcaggttttggtgtctaccgcaacactcgcatggggcgtcaatctcccagcccacacagttatcattaagggcactcaggtgtattcacccgaaaaggggcgctggaccgaactgggcgccctggacatcctacagatgcttggtcgggccggacgtccacagtatgacacaaaaggcgagggcatccttatcacgtctcatggtgagctacagtactacctgtctttgctgaatcagcagctacccatagagagccaaatggtttccaaactccctgacatgttgaacgccgaaatagtcctcggcaacgtccaaaacgctaaagacgcagtgaactggctgggctacgcttacttatatatcagaatgttgcgcagccctaccctgtacggaatctcccacgatgacctaaagggtgatcccctgctggatcagagaaggctggacctcgtgcacaccgcggcactgatgctggacaagaacaatctcgtaaagtatgacaaaaagaccggcaacttccaagttactgaacttggcagaattgcctcccattactatatcaccaacgataccgtgcaaacatataaccagctactgaaacctactcttagcgagattgaactgtttcgagtgttctctttgtcgtcagagttcaaaaatattacagtccgggaggaagaaaagctggaactccaaaaactgcttgaaagagtccctatacccgtcaaggagtcaattgaggagccaagtgccaaaatcaacgtgctactccaagcatttatctcacaattgaagttggaaggtttcgccctgatggccgatatggtctatgtgactcagagcgccgggcgactgatgcgcgccatatttgaaatcgtactgaatagaggatgggctcagctcactgacaaaactcttaacttgtgcaaaatgatcgataagagaatgtggcagtcaatgtgtccgctgcgccagttcagaaaactgccagaagaggtagtgaagaagatcgagaaaaagaattttccttttgaacggctctacgatttgaaccataatgaaattggggagctcattcggatgcccaagatggggaagaccattcataagtatgtccatctcttccccaaactcgaactctctgtgcacctgcagcctataacccgttccactctgaaggtggagcttaccatcactcccgacttccagtgggatgaaaaagtgcacgggtcaagcgaagcgttttggatcctggttgaggatgtggacagcgaggtgattctgcaccacgagtattttctgctgaaagccaagtacgcccaagatgagcatctgatcactttttttgtgcccgtgtttgaacccctccccccccagtacttcatccgcgtggtatcggatcggtggttgtcctgtgagacacagttgcccgtctcattcaggcatctgatacttcctgaaaagtatccccctcccaccgagcttctcgatttacagcctctccccgtaagcgcgctgcgtaattcagctttcgagtccctttaccaggacaaattccccttcttcaatcctattcaaacccaggtgttcaacacagtgtataattccgacgataacgtgttcgtaggtgcaccaacagggtccggcaaaacaatttgcgcagagtttgctattctgaggatgctgttgcagagcagcgagggaaggtgtgtctatattacccccatggaagctttggccgagcaggtatatatggactggtacgagaagtttcaagaccgacttaataagaaggtggtccttcttacaggagagacttccactgacctgaagctgcttggcaaaggtaacattatcatcagtaccccagagaagtgggacatactcagccgcagatggaaacagcgcaagaatgtgcagaacattaatttgttcgtcgttgacgaagtccacctgattggcggagagaacgggccagtgctggaggtgatttgcagcaggatgaggtatatctcatcccagattgagcgacctattcgcatcgtagccctgtcaagttcactttccaatgccaaggacgtggcacactggttggggtgcagcgcaacttccacatttaactttcatccgaatgtcagacccgtcccccttgagctgcacatccagggattcaacatctcccacacccaaactaggctcttaagtatggctaaaccagtgtatcacgcgatcactaagcattcacctaaaaaacccgtaattgtgttcgtgccttcacgcaaacagacccgcttgaccgctattgatatactgacaacatgtgctgccgacattcagcgacaacgctttcttcattgcactgagaaggatcttattccctatctggaaaaactatccgacagcaccttgaaggagactttactgaacggggtcggataccttcacgagggcctatcccccatggagagacgccttgtagagcaattgttcagcagcggagctattcaggtcgtcgtggcgagccgaagcttatgttgggggatgaacgttgcagcccatcttgtgatcattatggatacacaatattataatggcaaaatccatgcctacgtggactatccgatctacgacgttctgcaaatggttgggcacgctaataggccactgcaagacgacgaaggacgatgtgtgataatgtgtcaggggtccaaaaaggatttcttcaaaaaattcctgtacgaacccttgcctgtggaaagtcatttggatcattgtatgcacgaccattttaatgctgagattgtaactaaaactattgagaacaagcaggatgccgtggattatctcacttggaccttcttgtatcgccgaatgacgcaaaaccccaactactacaatctgcagggcataagccaccgccacctgagcgaccatttgtcagagctggtggagcagactctgtctgacctcgaacaatcaaaatgtatttccatcgaagacgaaatggacgtcgcacccttgaatctgggcatgattgccgcatactactacataaattacacaactatcgagctgttctctatgtccctgaacgccaaaaccaaggtgaggggcctgattgaaataatcagcaacgctgctgagtatgagaacatcccaatccgccatcacgaggacaatttgctgcgccagttggctcagaaggtgccgcataaacttaacaacccaaaattcaacgatccccatgttaagactaatctgcttctacaagcccacctctctagaatgcaactctctgccgaactgcagtcagacaccgaggagattctgtccaaagctattcgcctcatccaggcttgcgtcgatgtcctgtcctcaaatggatggctgtccccagctctggccgctatggaactcgcgcagatggtgacgcaggctatgtggtcaaaggattcctacctgaaacagttgccccattttacaagtgagcacataaaaaggtgtaccgacaaaggcgttgaatcagtatttgatatcatggagatggaggacgaggagaggaatgctctgctacaattgacagatagtcagatagccgacgtggctcgattctgtaatcggtacccaaacatcgagttgtcatacgaggtggtggacaaggactccattcgctccggagggcccgtggtagtcttggtacagctcgagagagaggaggaggtgaccggacccgtaatcgctcccttgttcccacagaagagagaggaaggatggtgggttgtcattggtgacgctaagtctaacagcctcatctcaattaaacgcctcactctccagcagaaagccaaggtgaagttagattttgtagcacctgccaccggggctcataattatactctttattttatgagcgatgcttatatgggatgtgaccaggaatacaagttctcagtagacgtaaaggaagccgagaccgactcagattctgactag

SEQ ID NO: 177430 - DNA, 1878 bp, Artificial Sequence
  derived and/or modified sequence
atggcagatgtgactgctaggtcactgcagtacgaatacaaggcaaactcaaacctggtgctgcaagccgacaggtcactgatagataggactaggagggacgaaccgaccggcgaggtgctttctctggtagggaagttggaagggaccaggatgggtgataaggctcaaaggacgaagccgcagatgcaagaggaaagaagagccaaaaggaggaaacgagacgaggaccgccatgatatcaacaagatgaaaggctatacgctgctctccgaggggattgacgagatggtgggcatcatctataaaccgaagacaaaagaaacacgtgaaacctacgaggtgttgctgtcatttattcaagcagcactaggggatcagcctagagatatcctctgtggtgccgctgacgaagtgctcgctgtgcttaaaaatgaaaagctgcgggacaaggagaggcgaaaagagattgaccttctcctgggacagactgatgacacaagataccacgtgctggtgaacctgggaaaaaagataactgattatggtggagataaggaaatacagaatatggatgacaatatagatgagacctacggcgtgaacgtacagtttgaatcagatgaggaggagggagatgaggatgtgtatggtgaagtgagagaggaggccagcgacgacgacatggagggcgacgaagctgtagtgcggtgtacactgagtgctaatttggttgccagcggggagttgatgtcctctaagaagaaagatctacacccacgcgacatagatgccttctggctccaaagacagctctctaggttttatgacgacgcaatcgtgagtcagaaaaaggccgacgaagtcctggagatcctcaagactgcgagcgacgaccgcgaatgcgagaaccagctagtgttattactcgggttcaatacattcgattttatcaaagttctgaggcagcatcgtatgatgatcctatactgtacattactagcgagtgcccaatctgaggccgaaaaagagaggattatgggtaagatggaagccgatcctgaactgtccaagttcctctatcaacttcacgagacagaaaaagaagacctgatacgggaggaaaggtctcggagggaaagagtacgccagtccaggatggatactgacttagagacaatggacctggaccagggcggagaggccctggcgcctcgtcaggtccttgaccttgaggacctagtgttcacccaaggctctcactttatggctaacaagagatgtcagctgcctgacggctcgtttagacgacaacgcaagggctacgaggaggtccacgtgccagccttgaaacccaagccctttggcagtgaggaacagttgctccccgttgagaaactgcccaaatacgctcaagctggcttcgagggtttcaaaacacttaatagaattcaatccaaactgtaccgggccgccctggagacggacgagaacctactgctttgtgctccgactggagcaggcaagactaatgtcgcactgatgtgcatgctgagggagatcggtaagcacattaatatggacgggactataaacgtcgatgatttcaagatcatctacattgcccccatgcggtctctcgtacaagaaatggttgggagttttggaaaaagggacgcgaaatcaaacagcctgatttccattaaacgcctcaccctgcagcagaaagcaaaggtgaagttggactttgtggctcctgctaccggtgcacacaattatacactttactttatgtccgacgcttatatgggctgcgatcaggaatataaatttagcgtcgacgttaaagaggctgagacagactcggattccgattag

SEQ ID NO: 177431 - DNA, 1788 bp, Artificial Sequence
  derived and/or modified sequence
atgcgttatatctcttcacagattgagagaccaatcagaattgttgctctctccagttcactgtctaacgctaaggatgtagcacattggcttggatgttcggctacctcaacttttaacttccatccaaatgttcgacctgtacctctggagttgcacatccagggctttaatatttctcacacccagactaggctgttgtcaatggctaagccggtgtatcacgcaattaccaaacatagtcctaagaagcccgtaatcgtgttcgttccctcgaggaaacagacaaggctaacggccatagatatcctgaccacttgtgccgcagatattcagcgccaaaggtttctgcactgtactgagaaagaccttattccttacttagagaaactgagcgactcgaccttaaaggaaacactgcttaatggagtcggatacctgcatgagggactcagtcccatggagaggcggctcgtagagcaactgttttccagtggggctatccaggtggttgtcgcatcccggtccctctgttggggaatgaacgtagccgcccacctcgtgatcatcatggacacgcagtactataacggtaagatacacgcttacgtggactatcccatatacgacgtcttgcaaatggtgggccatgctaatcggcccctgcaggacgacgaagggcgctgcgtcattatgtgtcagggatctaagaaggattttttcaaaaagttcctctatgagcccctcccagtagaatcccatctcgaccactgcatgcatgaccatttcaacgcagagattgtgactaagaccatcgaaaacaagcaagacgccgtcgattacctgacttggacgttcctttataggagaatgacccagaatccaaattattacaatcttcaggggatttcacaccgacatctttccgaccacctgagcgaattagtggagcagacattatcagatctggaacagagcaagtgcatcagtatcgaggatgaaatggacgttgcaccccttaatctcgggatgatcgctgcttattactatatcaactacactactatagagttgttcagcatgtccctaaacgcaaagacgaaggtgagaggactgatcgaaatcatcagtaacgctgctgaatatgaaaacatcccgataagacatcacgaagacaatttactgaggcagctggctcagaaagtgccgcacaagctcaacaaccccaaatttaacgatcctcacgtgaaaacgaacttgttactgcaggcccacctgtcccgaatgcaactgtctgccgaactgcagtctgacacagaagaaattttgtccaaagccattcgcctgattcaggcttgcgttgacgtactgtcctccaatggctggctgagtccagcactggccgcgatggagctggctcagatggtgacccaggcaatgtggtccaaagacagctaccttaaacagctgccgcactttacgtcagaacacatcaagcgctgtaccgacaaaggcgtggagagtgtcttcgatatcatggagatggaggacgaagaacgcaacgccctcctacagctaactgatagccagattgccgacgtcgctcggttctgtaacaggtatccaaatatcgagctttcctatgaggtggtggataaagactctattcgttctggagggccagtcgtagtccttgttcagcttgaacgagaagaggaagtcaccggccccgtgattgcccctttattcccacagttcagggctggccgctcagggtcaaggctgtag

SEQ ID NO: 177432 - DNA, 1788 bp, Artificial Sequence
  derived and/or modified sequence
atggcaaagcccgtgtaccacgccattacaaagcactcgcctaaaaaaccggtgatcgtgttcgttccatccagaaagcagacacgactcacagctatcgatatcttgaccacatgcgcggccgacatacaacggcaacggtttctgcactgcacagagaaggacctcatcccttatctggagaaattgtcagatagcacattgaaggagaccctcctcaatggcgtcggatacctgcatgagggcctgtcaccgatggagagacgacttgttgaacaactgttttctagtggcgcgattcaagtcgttgttgcatcaagatcgctgtgttggggaatgaacgtggccgcacacctggttattattatggatacacagtattacaacggcaagatccacgcctatgtggactaccccatatacgacgtcctgcagatggtgggccatgcgaaccggccattgcaggacgatgaaggacggtgtgtgatcatgtgtcagggttctaagaaggatttttttaaaaaatttctgtatgaacctctccctgtggagagccacctggatcattgtatgcacgaccacttcaatgctgagatcgtgaccaagaccatcgagaataaacaggatgcggtcgactatttaacatggacttttctgtacaggcgcatgacacagaacccaaactattataacctgcagggaatctcgcataggcacttgagtgatcatctctccgagctggttgagcagaccctgagtgatctggaacaatcaaagtgtatctctatcgaagatgagatggacgtggctccgctcaatctgggtatgatcgctgcctattactatatcaattacactacaatcgaactcttcagcatgtctttgaatgccaagactaaggtgaggggtctcatagaaattatctcaaacgccgctgaatatgagaacataccgatccgccatcacgaagacaatcttttgcggcagcttgcacagaaagtgccgcataaactgaataatccaaaatttaatgacccccatgttaagacaaatcttctcctacaagctcatctctcacggatgcagctgagcgcagaacttcaaagtgacacagaagagattctttccaaggcaatccgcctgattcaagcttgcgtggacgttctttcttcaaatgggtggctctcgcccgcactggcagccatggagctggctcagatggttacgcaggccatgtggtcaaaggacagttacctgaaacagttgccccactttacaagcgagcacatcaagcggtgtacagataaaggagtggagtctgtattcgacattatggaaatggaagacgaggagcggaatgcactcctacagctgacagatagtcaaatagcagatgtggcccgtttttgcaaccgttaccccaacatcgaattgagctatgaagtggtcgataaggacagcatcaggtctggagggcctgtagtggtgctagtccagttggaacgcgaggaagaagtgaccgggccagttatcgctcctctgtttccacagaaacgcgaggagggctggtgggtcgtcatcggagacgccaagagtaacagcctcatctccatcaaacggttgacattacaacaaaaagctaaggtgaagcttgatttcgtagcccccgcaactggcgctcacaattatacgctgtacttcatgagcgacgcctacatgggctgcgaccaggagtataagttcagcgttgatgtcaaagaagctgagacagacagcgactctgactag

SEQ ID NO: 177433 - DNA, 2325 bp, Artificial Sequence
  derived and/or modified sequence
atgatgatactgtattgcactctgttggctagcgcgcagtcggaagcggaaaaggaaagaattatgggaaaaatggaggccgaccccgagttgtcaaagttcctctatcagctacacgagacagaaaaggaggacctgatcagagaggaacggagtaggcgggaacgggtgcgccagagccgcatggatactgacttggagacaatggacctggaccagggaggcgaagccctggcgcctcgccaggtgctcgatctggaagatctggtatttacccaaggctctcatttcatggctaacaagcgctgtcaactgccagatgggagttttcggaggcagagaaagggctacgaggaagtccacgtacccgctcttaaacctaagccattcggcagcgaggaacagctcttgcctgtagaaaagcttccgaagtacgcccaggcgggattcgaaggctttaagacactgaaccggatccagtcgaaactttacagagcggccctggaaaccgacgagaatctgctgttatgtgccccaacaggggctgggaagaccaatgtcgccctgatgtgcatgctgagagaaattggaaaacatataaacatggacgggacaataaatgtagacgactttaaaattatttacattgcccccatgcggagcctggtacaggagatggtggggtcctttggcaagagactggcgacatacggaataaccgtggccgaacttactggcgaccaccagctgtgcaaagaagagatttccgctacccagataatcgtgtgtacaccagagaagtgggatatcattacaagaaagggtggagaacgcacgtacacccaactcgttcgcttaatcattctcgacgaaatccacctgctccatgatgaccgggggcccgtgttggaggccttagtggctagggccataagaaacattgaaatgacccaggaagatgttaggcttattggcctttccgccacccttcctaattatgaggacgtggccacgttccttagggttgatccggcgaaaggcctgttttattttgacaacagttttaggccggtgcctctcgaacagacatatgtggggatcacggagaagaaagcaatcaaaagatttcagatcatgaacgagatcgtgtatgagaaaattatggaacacgcgggcaagaaccaggtgctcgtttttgtccactcaagaaaagaaaccggaaagacagcgagagcgatccgcgacatgtgtctcgagaaggacaccctgggactgtttttgagggagggtagcgccagcaccgaagtgcttcgcaccgaggccgagcagtgtaaaaacctcgaactgaaggacctactgccatacggcttcgctattcaccatgcagggatgacccgggtggataggactctggtggaagatttgtttgcagataagcacatccaggtgctcgtaagtaccgcaaccctggcatggggcgtcaaccttccagcacacaccgtcatcattaagggaacacaggtgtactcacctgagaaaggcaggtggacggaactgggcgcactcgacatactccaaatgttgggacgtgccggacgtcctcagtatgacactaagggagagggaatactcattacctcccacggcgaattgcagtattacctgagccttctcaatcagcaattgcccatcgaaagccagatggtctctaaattgccggacatgctgaacgccgagattgtcctgggcaatgtgcaaaacgccaaggacgccgtgaattggctgggctacgcctacttatacatcagaatgttgcggagtcccacactctacgggatatcccacgacgacctgaaaggcgaccccctgctcgaccaacgccggttggacctcgtacacactgccgccctgatgttagacaaaaataacttagtcaagtacgacaagaaaacgggcaatttccaggtcacagagttgggacgcatcgcgagtcactactacataacgaacgacacagtgcaaacatacaatcaactcttgaagccaacactgtccgagatcgaattatttcgggtgtttagtctgagcagtgagtttaagaatatcaccgttcgggaggaggagaagctcgaactgcagaagctgctggaacgggtacctattccagtgaaggaatccattgaggagcccagtgccaagattaatgtgctgttacaggcatttatctcccagctgaagctcgagggctttgctctgatggccgacatggtctatgtcacacagtcggctggacggcttatgagagccatattaaagctaagctag

SEQ ID NO: 177434 - DNA, 2160 bp, Artificial Sequence
  derived and/or modified sequence
atgctgctccagagcagtgagggtagatgcgtatatattacaccaatggaggctttggccgagcaggtgtacatggattggtatgaaaaattccaggacaggctcaataagaaggtcgtgcttttgacaggcgagaacggtccagtgctcgaggtgatctgtagcaggatgaggtacattagttcgcagatcgagaggccaatccgaatcgtggccctgtcatcctcattgtctaatgccaaggatgttgctcattggctgggctgctccgcgacatctacttttaactttcatccaaatgtgcggcccgtgccattggagctgcatatacagggatttaacataagccatacccagactaggctgctcagcatggccaagccagtctaccatgcaatcaccaagcactctcccaaaaagcccgttatcgtcttcgtgccctctaggaaacagacacgacttactgcaatcgacattctgaccacctgtgccgccgatatccaaagacagagattccttcactgcactgagaaggacctgatcccgtaccttgagaagctgtcagacagcacgttgaaggaaacacttctcaacggagtcggctatcttcacgagggtctcagccccatggagcggcgcttagtcgaacagttgttctccagcggtgccatccaggtggtcgtagccagtagaagcttgtgttggggaatgaatgttgccgcccacctagtgattattatggatacccaatactataacggcaagattcacgcctatgttgattacccaatatatgacgtactccaaatggttggacatgctaaccggccactgcaggatgatgaaggccgttgtgttatcatgtgccaaggatcaaagaaggatttcttcaagaaatttctctacgagccattaccggtggaaagccatttggatcattgtatgcacgaccatttcaatgctgaaattgtcaccaaaaccattgagaacaaacaggatgcagtggactacctgacctggacatttctgtatagaagaatgacccagaaccctaattattacaacttacagggcatcagccacagacatcttagtgatcatttgagcgagttagtggagcagacactgagtgatttagagcagagcaagtgtatttcaatcgaagatgagatggacgttgctcctctcaacttaggaatgattgccgcctactattacatcaattataccacaattgagttattcagcatgtcgctgaacgcaaaaacgaaagttcggggcctgatcgagattatttccaatgccgccgagtacgagaatataccaatccgtcaccatgaggacaacctgctgcgacagctcgctcagaaggtgccacacaaactcaacaatcctaaattcaatgacccccacgtgaagactaatctgttgctacaggctcatctgtctagaatgcaactgtccgccgagctgcaaagcgacaccgaggagatcctcagcaaggccattcgcctgattcaggcgtgcgttgacgttctctcttccaacgggtggttgagtcccgccctggccgcaatggagctggctcagatggtcacacaagccatgtggtcaaaggactcctatttaaagcaattgccgcactttacaagcgaacacattaaacggtgcacagataagggtgtcgagtctgtcttcgatataatggaaatggaggacgaggaaaggaacgctttactgcagctaactgacagccagatcgccgacgtggcccgcttttgcaacaggtaccccaacatcgaactgagctatgaagtagtggataaagatagcatcaggtccggaggccccgttgtagtcttagtgcagctcgagagggaagaggaagtgacaggacccgtgatcgccccacttttcccacaaaaacgtgaggagggctggtgggtagtgattggggatgcgaagtctaacagcctaatcagcatcaaacgcctgacgctccagcaaaaagccaaagtgaagttggacttcgtcgctcccgcgaccggagctcataactatactctctattttatgtctgacgcttacatgggttgtgaccaggaatataaatttagtgtcgatgtgaaggaagccgaaactgactccgatagcgactag

SEQ ID NO: 177435 - DNA, 6411 bp, Artificial Sequence
  derived and/or modified sequence
atggctgatgtgacagcccggagcctgcagtatgagtacaaggccaacagcaacctggtgctgcaggccgacaggagcctgattgacaggaccaggagagatgagcccactggagaggtgctgagcctggtgggcaagctggagggcaccaggatgggagacaaggcccagaggaccaagccccagatgcaggaggagcggcgggccaagaggaggaagagagatgaggacagacatgacatcaacaagatgaagggctacaccctgctgtctgagggcattgatgagatggtgggcatcatctacaagcccaagaccaaggagacccgggagacctatgaggtgctgctgtccttcatccaggccgccctgggggaccagccccgggacatcctgtgtggggctgctgatgaggtgctggccgtgctgaagaatgagaagctgcgggacaaggagaggaggaaggagattgacctgctgctgggccagacagatgacacccgctaccacgtgctggtgaacctgggcaagaagatcacagattatggaggagacaaggagatccagaacatggatgacaacattgatgagacctatggagtgaatgtgcagtttgaaagtgatgaggaggagggagatgaagatgtgtatggagaggtgcgggaggaggccagtgatgatgacatggagggagatgaggccgtggtgcgctgcaccctgagcgccaacctggtggccagcggggagctgatgagcagcaagaagaaggacctgcacccccgggacattgatgccttctggctgcagaggcagctgagccgcttctatgatgatgccatcgtgtcccagaagaaggcagatgaggtgctggagatcctgaagacagccagtgatgacagagaatgtgagaaccagctggtgctgctgctgggcttcaacacctttgacttcatcaaggtgctgcggcagcacaggatgatgatcctgtactgcaccctgctggccagcgcccagagcgaggccgagaaggagcgcatcatgggcaagatggaggccgaccctgagctgagcaagttcctgtaccagctgcacgagacagagaaggaggacctgatccgggaggagaggagccggcgggagcgggtgcggcagagcaggatggacacagacctggagaccatggacctggaccagggcggggaggccctggccccccggcaggtgctggacctggaggacctggtgttcacccagggcagccacttcatggccaacaagcgctgccagctgcctgatggcagcttccggcggcagaggaagggctatgaggaggtgcacgtgcctgccctgaagcccaagccctttggaagtgaggagcagctgctgcctgtggagaagctgcccaagtatgcccaggccggctttgagggcttcaagaccctgaaccgcatccagagcaagctgtacagagctgccctggagacagatgagaacctgctgctgtgtgcccccactggagctgggaagaccaacgtggccctgatgtgcatgctgcgggagatcggcaagcacatcaacatggatggcaccatcaacgtggatgacttcaagatcatctacatcgcccccatgaggagcctggtgcaggagatggtgggcagctttgggaagaggctggccacctacggcatcaccgtggccgagctgaccggggaccaccagctgtgcaaggaggagatcagcgccacccagatcatcgtgtgcaccccagagaagtgggacatcatcaccaggaaaggaggagagaggacctacacccagctggtgcggctcatcatcctggatgagatccacctgctgcatgatgaccggggccctgtgctggaggccctggtggcccgggccatcagaaatattgagatgacccaggaggatgtgcggctgattggcctgagcgccaccctgcccaactatgaagatgtggccaccttcctgcgggtggaccctgccaagggcctcttctactttgacaacagcttccggcctgtgcccctggagcagacctacgtgggcatcacagagaagaaggccatcaagcgcttccagatcatgaatgaaattgtgtatgagaagatcatggagcacgccggcaagaaccaggtgctggtgtttgtgcacagcaggaaggagaccgggaagacagcccgggccatccgggacatgtgcctggagaaggacaccctgggcctcttcctgcgggagggcagcgccagcacagaggtgctgaggacagaggccgagcagtgcaagaacctggagctgaaggacctgctgccctacggctttgccatccaccacgccggcatgaccagggtggacaggaccctggtggaggacctgtttgctgacaagcacatccaggtgctggtgtccacagccaccctggcctggggcgtgaacctgcctgcccacacagtcatcatcaagggcacccaggtgtacagccctgagaagggccgctggacagagctgggcgccctggacatcctgcagatgctgggccgggccggccggccccagtatgacaccaagggggagggcatcctgatcaccagccatggagagctgcagtactacctgagcctgctgaaccagcagctgcccatcgagagccagatggtgtccaagctgcctgacatgctgaatgctgagatcgtgctgggcaatgtgcagaatgccaaggatgctgtgaactggctgggctacgcctacctgtacatccgcatgctgcggagccccaccctgtatggcatcagccatgatgacctgaagggggaccccctgctggaccagaggcggctggacctggtgcacacagctgccctgatgctggacaagaacaacctggtgaagtatgacaagaagacaggcaacttccaggtgacagagctgggcagaattgccagccactactacatcaccaatgacacagtgcagacctacaaccagctgctgaagcccaccctgtctgaaattgagctgttccgggtcttcagcctgagcagcgagttcaagaacatcaccgtgcgggaggaggagaagctggagctgcagaagctgctggagcgggtgcccatccctgtgaaggagagcattgaggagcccagcgccaagatcaacgtgctgctgcaggccttcatcagccagctgaagctggagggctttgccctgatggctgacatggtgtatgtgacccagagcgctggccgcctgatgagggccatctttgagatcgtgctgaacagaggctgggcccagctgacagacaagaccctgaacctgtgcaagatgattgacaagaggatgtggcagagcatgtgccccctgcggcagttcaggaagctgcctgaggaggtggtgaagaagattgagaagaagaacttcccctttgagcggctgtatgacctgaaccacaatgaaattggagagctgatccgcatgcccaagatgggcaagaccatccacaagtatgtgcacctgttccccaagctggagctgtctgtgcacctgcagcccatcaccaggagcaccctgaaggtggagctgaccatcaccccagacttccagtgggatgagaaggtgcacggcagcagcgaggccttctggatcctggtggaggatgtggacagcgaggtgatcctgcaccacgagtacttcctgctgaaggccaagtatgcccaggatgagcacctgatcaccttctttgtgcctgtgtttgagcccctgcccccccagtacttcatccgggtggtgtctgaccgctggctgagctgtgagacccagctgcctgtgtccttccgccacctgatcctgcctgagaagtaccccccacccacagagctgctggacctgcagcccctgcctgtgtctgccctgagaaattctgcctttgagagcctgtaccaggacaagttccccttcttcaaccccatccagacccaggtgttcaacacagtgtacaacagtgatgacaacgtgtttgtgggcgcccccaccggcagcggcaagaccatctgtgccgagtttgccatcctgaggatgctgctgcagagcagcgagggccgctgtgtgtacatcacccccatggaggccctggccgagcaggtgtacatggactggtatgagaagttccaggaccggctgaacaagaaggtggtgctgctgactggagagaccagcacagacctgaagctgctgggcaaaggaaacatcatcatcagcaccccagagaagtgggacatcctgagccgccgctggaagcagaggaagaatgtgcagaacatcaacctgtttgtggtggatgaggtgcacctgattggaggagaaaatggacctgtgctggaggtgatctgcagcaggatgagatacatcagcagccagatcgagcggcccatcagaattgtggccctgagcagcagcctgagcaatgccaaggatgtggcccactggctgggctgcagcgccaccagcaccttcaacttccaccccaacgtgcggcctgtgcccctggagctgcacatccagggcttcaacatcagccacacccagacccggctgctgtccatggccaagcctgtgtaccacgccatcaccaagcacagccccaagaagcctgtgattgtgtttgtgcccagcaggaagcagacccggctgacagccatcgacatcctgaccacctgtgccgctgacatccagaggcagcgcttcctgcactgcacagagaaggacctgatcccctacctggagaagctgagtgacagcaccctgaaggagaccctgctgaatggagtgggctacctgcacgagggcctgagccccatggagcggcggctggtggagcagctgttcagcagcggggccatccaggtggtggtggccagccgcagcctgtgctggggcatgaatgtggccgcccacctggtgatcatcatggacacccagtactacaacgggaagatccacgcctacgtggactaccccatctatgatgtgctgcagatggtgggccacgccaaccggcccctgcaggatgatgagggccgctgcgtcatcatgtgccagggcagcaagaaggacttcttcaagaagttcctgtatgagcccctgcctgtggagagccacctggaccactgcatgcatgaccacttcaatgctgagatcgtgaccaagaccatcgagaacaagcaggatgctgtggactacctgacctggaccttcctgtacagaaggatgacccagaaccccaactactacaacctgcagggcatcagccaccgccacctgagtgaccacctgtctgagctggtggagcagaccctgagtgacctggagcagagcaagtgcatcagcattgaagatgagatggatgtggcccccctgaacctgggcatgattgctgcctactactacatcaactacaccaccatcgagctgttctccatgagcctgaatgccaagaccaaggtgcggggcctcatcgagatcatcagcaatgctgctgaatatgagaacatccccatccgccaccacgaggacaacctgctgcggcagctggcccagaaggtgccccacaagctgaacaaccccaagttcaatgacccccacgtgaagaccaacctgctgctgcaggcccacctgagcaggatgcagctgtctgctgagctgcagagcgacacagaggagatcctgagcaaggccatccgcctcatccaggcctgtgtggatgtgctgagcagcaatggctggctgagccctgccctggccgccatggagctggcccagatggtgacccaggccatgtggagcaaggacagctacctgaagcagctgccccacttcaccagcgagcacatcaagcgctgcacagacaagggcgtggagagcgtgtttgacatcatggagatggaggatgaggagagaaatgccctgctgcagctgacagacagccagattgctgatgtggcccgcttctgcaaccgctaccccaacatcgagctgtcctatgaggtggtggacaaggacagcatccgcagcggcggccctgtggtggtgctggtgcagctggagcgggaggaggaggtgacaggccctgtgattgcccccctcttcccccagaagcgggaggagggctggtgggtggtgattggagatgccaagagcaacagcctcatcagcatcaagaggctgaccctgcagcagaaggccaaggtgaagctggactttgtggccccagccactggagcccacaactacaccctgtacttcatgtctgatgcctacatgggctgtgaccaggagtacaagttctctgtggatgtgaaggaggccgagacagacagcgacagcgactag

SEQ ID NO: 177436 - DNA, 1878 bp, Artificial Sequence
  derived and/or modified sequence
atggctgatgtgacagcccggagcctgcagtatgagtacaaggccaacagcaacctggtgctgcaggccgacaggagcctgattgacaggaccaggagagatgagcccactggagaggtgctgagcctggtgggcaagctggagggcaccaggatgggagacaaggcccagaggaccaagccccagatgcaggaggagcggcgggccaagaggaggaagagagatgaggacagacatgacatcaacaagatgaagggctacaccctgctgtctgagggcattgatgagatggtgggcatcatctacaagcccaagaccaaggagacccgggagacctatgaggtgctgctgtccttcatccaggccgccctgggggaccagccccgggacatcctgtgtggggctgctgatgaggtgctggccgtgctgaagaatgagaagctgcgggacaaggagaggaggaaggagattgacctgctgctgggccagacagatgacacccgctaccacgtgctggtgaacctgggcaagaagatcacagattatggaggagacaaggagatccagaacatggatgacaacattgatgagacctatggagtgaatgtgcagtttgaaagtgatgaggaggagggagatgaagatgtgtatggagaggtgcgggaggaggccagtgatgatgacatggagggagatgaggccgtggtgcgctgcaccctgagcgccaacctggtggccagcggggagctgatgagcagcaagaagaaggacctgcacccccgggacattgatgccttctggctgcagaggcagctgagccgcttctatgatgatgccatcgtgtcccagaagaaggcagatgaggtgctggagatcctgaagacagccagtgatgacagagaatgtgagaaccagctggtgctgctgctgggcttcaacacctttgacttcatcaaggtgctgcggcagcacaggatgatgatcctgtactgcaccctgctggccagcgcccagagcgaggccgagaaggagcgcatcatgggcaagatggaggccgaccctgagctgagcaagttcctgtaccagctgcacgagacagagaaggaggacctgatccgggaggagaggagccggcgggagcgggtgcggcagagcaggatggacacagacctggagaccatggacctggaccagggcggggaggccctggccccccggcaggtgctggacctggaggacctggtgttcacccagggcagccacttcatggccaacaagcgctgccagctgcctgatggcagcttccggcggcagaggaagggctatgaggaggtgcacgtgcctgccctgaagcccaagccctttggaagtgaggagcagctgctgcctgtggagaagctgcccaagtatgcccaggccggctttgagggcttcaagaccctgaaccgcatccagagcaagctgtacagagctgccctggagacagatgagaacctgctgctgtgtgcccccactggagctgggaagaccaacgtggccctgatgtgcatgctgcgggagatcggcaagcacatcaacatggatggcaccatcaacgtggatgacttcaagatcatctacatcgcccccatgaggagcctggtgcaggagatggtgggcagctttgggaagagagatgccaagagcaacagcctcatcagcatcaagaggctgaccctgcagcagaaggccaaggtgaagctggactttgtggccccagccaccggggcccacaactacaccctgtacttcatgtctgatgcctacatgggctgtgaccaggagtacaagttctctgtggatgtgaaggaggccgagacagacagcgacagcgactag

SEQ ID NO: 177437 - DNA, 1788 bp, Artificial Sequence
  derived and/or modified sequence
atgagatacatcagcagccagatcgagcggcccatccgcatcgtggccctgagcagcagcctgagcaatgccaaggatgtggcccactggctgggctgcagcgccaccagcaccttcaacttccaccccaacgtgcggcctgtgcccctggagctgcacatccagggcttcaacatcagccacacccagacccggctgctgtccatggccaagcctgtgtaccacgccatcaccaagcacagccccaagaagcctgtgattgtgtttgtgcccagcaggaagcagacccggctgacagccatcgacatcctgaccacctgtgccgctgacatccagaggcagcgcttcctgcactgcacagagaaggacctgatcccctacctggagaagctgagtgacagcaccctgaaggagaccctgctgaatggagtgggctacctgcacgagggcctgagccccatggagcggcggctggtggagcagctgttcagcagcggggccatccaggtggtggtggccagccgcagcctgtgctggggcatgaatgtggccgcccacctggtgatcatcatggacacccagtactacaacgggaagatccacgcctacgtggactaccccatctatgatgtgctgcagatggtgggccacgccaaccggcccctgcaggatgatgagggccgctgtgtgatcatgtgccagggcagcaagaaggacttcttcaagaagttcctgtatgagcccctgcctgtggagagccacctggaccactgcatgcatgaccacttcaatgctgagatcgtgaccaagaccatcgagaacaagcaggatgctgtggactacctgacctggaccttcctgtacagaaggatgacccagaaccccaactactacaacctgcagggcatcagccaccgccacctgagtgaccacctgtctgagctggtggagcagaccctgagtgacctggagcagagcaagtgcatcagcattgaagatgagatggatgtggcccccctgaacctgggcatgattgctgcctactactacatcaactacaccaccatcgagctgttctccatgagcctgaatgccaagaccaaggtgcggggcctgattgagatcatcagcaatgctgctgaatatgagaacatccccatccgccaccacgaggacaacctgctgcggcagctggcccagaaggtgccccacaagctgaacaaccccaagttcaatgacccccacgtgaagaccaacctgctgctgcaggcccacctgagcaggatgcagctgtctgctgagctgcagagcgacacagaggagatcctgagcaaggccatccgcctcatccaggcctgtgtggatgtgctgagcagcaatggctggctgagccctgccctggccgccatggagctggcccagatggtgacccaggccatgtggagcaaggacagctacctgaagcagctgccccacttcaccagcgagcacatcaagcgctgcacagacaagggcgtggagagcgtgtttgacatcatggagatggaggatgaggagagaaatgccctgctgcagctgacagacagccagattgctgatgtggcccgcttctgcaaccgctaccccaacatcgagctgtcctatgaggtggtggacaaggacagcatccgcagcggcggccctgtggtggtgctggtgcagctggagcgggaggaggaggtgactggacctgtgattgcccccctcttcccccagttccgggccggccgcagcggcagccggctgtag

SEQ ID NO: 177438 - DNA, 1788 bp, Artificial Sequence
  derived and/or modified sequence
atggccaagcctgtgtaccacgccatcaccaagcacagccccaagaagcctgtgattgtgtttgtgcccagcaggaagcagacccggctgacagccatcgacatcctgaccacctgtgccgctgacatccagaggcagcgcttcctgcactgcacagagaaggacctgatcccctacctggagaagctgagtgacagcaccctgaaggagaccctgctgaatggagtgggctacctgcacgagggcctgagccccatggagcggcggctggtggagcagctgttcagcagcggggccatccaggtggtggtggccagccgcagcctgtgctggggcatgaatgtggccgcccacctggtgatcatcatggacacccagtactacaacgggaagatccacgcctacgtggactaccccatctatgatgtgctgcagatggtgggccacgccaaccggcccctgcaggatgatgagggccgctgtgtgatcatgtgccagggcagcaagaaggacttcttcaagaagttcctgtatgagcccctgcctgtggagagccacctggaccactgcatgcatgaccacttcaatgctgagatcgtgaccaagaccatcgagaacaagcaggatgctgtggactacctgacctggaccttcctgtacagaaggatgacccagaaccccaactactacaacctgcagggcatcagccaccgccacctgagtgaccacctgtctgagctggtggagcagaccctgagtgacctggagcagagcaagtgcatcagcattgaagatgagatggatgtggcccccctgaacctgggcatgattgctgcctactactacatcaactacaccaccatcgagctgttctccatgagcctgaatgccaagaccaaggtgcggggcctgattgagatcatcagcaatgctgctgaatatgagaacatccccatccgccaccacgaggacaacctgctgcggcagctggcccagaaggtgccccacaagctgaacaaccccaagttcaatgacccccacgtgaagaccaacctgctgctgcaggcccacctgagcaggatgcagctgtctgctgagctgcagagcgacacagaggagatcctgagcaaggccatccgcctcatccaggcctgtgtggatgtgctgagcagcaatggctggctgagccctgccctggccgccatggagctggcccagatggtgacccaggccatgtggagcaaggacagctacctgaagcagctgccccacttcaccagcgagcacatcaagcgctgcacagacaagggcgtggagagcgtgtttgacatcatggagatggaggatgaggagagaaatgccctgctgcagctgacagacagccagattgctgatgtggcccgcttctgcaaccgctaccccaacatcgagctgtcctatgaggtggtggacaaggacagcatccgcagcggcggccctgtggtggtgctggtgcagctggagcgggaggaggaggtgactggacctgtgattgcccccctcttcccccagaagcgggaggagggctggtgggtggtgattggagatgccaagagcaacagcctcatcagcatcaagaggctgaccctgcagcagaaggccaaggtgaagctggactttgtggccccagccaccggggcccacaactacaccctgtacttcatgtctgatgcctacatgggctgtgaccaggagtacaagttctctgtggatgtgaaggaggccgagacagacagcgacagcgactag

SEQ ID NO: 177439 - DNA, 2325 bp, Artificial Sequence
  derived and/or modified sequence
atgatgatcctgtactgcaccctgctggccagcgcccagagcgaggccgagaaggagcgcatcatgggcaagatggaggccgaccctgagctgagcaagttcctgtaccagctgcatgaaacagagaaggaggacctgatccgggaggagaggagcagaagagagcgggtgcggcagagcaggatggacacagacctggagaccatggacctggaccagggcggggaggccctggccccccggcaggtgctggacctggaggacctggtgttcacccagggcagccacttcatggccaacaagcgctgccagctgcctgatggcagcttccggcggcagaggaagggctatgaggaggtgcacgtgcctgccctgaagcccaagcccttcggcagcgaggagcagctgctgcctgtggagaagctgcccaagtatgcccaggccggctttgagggcttcaagaccctgaaccgcatccagagcaagctgtaccgggccgccctggagacagatgagaacctgctgctgtgtgcccccaccggggccggcaagaccaacgtggccctgatgtgcatgctgcgggagatcggcaagcacatcaacatggatggcaccatcaacgtggatgacttcaagatcatctacatcgcccccatgaggagcctggtgcaggagatggtgggcagctttgggaagaggctggccacctacggcatcaccgtggccgagctgactggagaccaccagctgtgcaaggaggagatcagcgccacccagatcatcgtgtgcaccccagagaagtgggacatcatcaccaggaagggcggggagaggacctacacccagctggtgcggctcatcatcctggatgagatccacctgctgcatgatgaccggggccctgtgctggaggccctggtggcccgggccatccggaacatcgagatgacccaggaggatgtgcggctcatcggcctgagcgccaccctgcccaactatgaagatgtggccaccttcctgcgggtggaccctgccaagggcctcttctactttgacaacagcttccggcctgtgcccctggagcagacctacgtgggcatcacagagaagaaggccatcaagcgcttccagatcatgaatgagatcgtgtatgagaagatcatggagcacgccggcaagaaccaggtgctggtgtttgtgcacagcaggaaggagaccgggaagacagcccgggccatccgggacatgtgcctggagaaggacaccctgggcctcttcctgcgggagggcagcgccagcacagaggtgctgaggacagaagctgagcagtgcaagaacctggagctgaaggacctgctgccctacggctttgccatccaccacgccggcatgaccagggtggacaggaccctggtggaggacctgtttgctgacaagcacatccaggtgctggtgtccacagccaccctggcctggggcgtgaacctgcctgcccacacagtcatcatcaagggcacccaggtgtacagccctgagaagggccgctggacagagctgggcgccctggacatcctgcagatgctgggccgggccggccggccccagtatgacaccaagggggagggcatcctgatcaccagccacggggagctgcagtactacctgagcctgctgaaccagcagctgcccatcgagagccagatggtgtccaagctgcctgacatgctgaatgctgagatcgtgctgggcaatgtgcagaatgccaaggatgctgtgaactggctgggctacgcctacctgtacatccgcatgctgcggagccccaccctgtatggcatcagccatgatgacctgaagggggaccccctgctggaccagaggcggctggacctggtgcacacagctgccctgatgctggacaagaacaacctggtgaagtatgacaagaagacaggcaacttccaggtgacagagctgggccgcatcgccagccactactacatcaccaatgacacagtgcagacctacaaccagctgctgaagcccaccctgtctgaaattgagctgttccgggtcttcagcctgagcagcgagttcaagaacatcaccgtgcgggaggaggagaagctggagctgcagaagctgctggagcgggtgcccatccctgtgaaggagagcattgaggagcccagcgccaagatcaacgtgctgctgcaggccttcatcagccagctgaagctggagggctttgccctgatggctgacatggtgtatgtgacccagagcgctggccgcctgatgagggccatcctgaagctgtcctag

SEQ ID NO: 177440 - DNA, 2160 bp, Artificial Sequence
  derived and/or modified sequence
atgctgctgcagagcagcgagggccgctgtgtgtacatcacccccatggaggccctggccgagcaggtgtacatggactggtatgagaagttccaggaccggctgaacaagaaggtggtgctgctgactggagaaaatggacctgtgctggaggtgatctgcagcaggatgagatacatcagcagccagatcgagcggcccatccgcatcgtggccctgagcagcagcctgagcaatgccaaggatgtggcccactggctgggctgcagcgccaccagcaccttcaacttccaccccaacgtgcggcctgtgcccctggagctgcacatccagggcttcaacatcagccacacccagacccggctgctgtccatggccaagcctgtgtaccacgccatcaccaagcacagccccaagaagcctgtgattgtgtttgtgcccagcaggaagcagacccggctgacagccatcgacatcctgaccacctgtgccgctgacatccagaggcagcgcttcctgcactgcacagagaaggacctgatcccctacctggagaagctgagtgacagcaccctgaaggagaccctgctgaatggagtgggctacctgcacgagggcctgagccccatggagcggcggctggtggagcagctgttcagcagcggggccatccaggtggtggtggccagccgcagcctgtgctggggcatgaatgtggccgcccacctggtgatcatcatggacacccagtactacaacgggaagatccacgcctacgtggactaccccatctatgatgtgctgcagatggtgggccacgccaaccggcccctgcaggatgatgagggccgctgtgtgatcatgtgccagggcagcaagaaggacttcttcaagaagttcctgtatgagcccctgcctgtggagagccacctggaccactgcatgcatgaccacttcaatgctgagatcgtgaccaagaccatcgagaacaagcaggatgctgtggactacctgacctggaccttcctgtacagaaggatgacccagaaccccaactactacaacctgcagggcatcagccaccgccacctgagtgaccacctgtctgagctggtggagcagaccctgagtgacctggagcagagcaagtgcatcagcattgaagatgagatggatgtggcccccctgaacctgggcatgattgctgcctactactacatcaactacaccaccatcgagctgttctccatgagcctgaatgccaagaccaaggtgcggggcctgattgagatcatcagcaatgctgctgaatatgagaacatccccatccgccaccacgaggacaacctgctgcggcagctggcccagaaggtgccccacaagctgaacaaccccaagttcaatgacccccacgtgaagaccaacctgctgctgcaggcccacctgagcaggatgcagctgtctgctgagctgcagagcgacacagaggagatcctgagcaaggccatccgcctcatccaggcctgtgtggatgtgctgagcagcaatggctggctgagccctgccctggccgccatggagctggcccagatggtgacccaggccatgtggagcaaggacagctacctgaagcagctgccccacttcaccagcgagcacatcaagcgctgcacagacaagggcgtggagagcgtgtttgacatcatggagatggaggatgaggagagaaatgccctgctgcagctgacagacagccagattgctgatgtggcccgcttctgcaaccgctaccccaacatcgagctgtcctatgaggtggtggacaaggacagcatccgcagcggcggccctgtggtggtgctggtgcagctggagcgggaggaggaggtgactggacctgtgattgcccccctcttcccccagaagcgggaggagggctggtgggtggtgattggagatgccaagagcaacagcctcatcagcatcaagaggctgaccctgcagcagaaggccaaggtgaagctggactttgtggccccagccaccggggcccacaactacaccctgtacttcatgtctgatgcctacatgggctgtgaccaggagtacaagttctctgtggatgtgaaggaggccgagacagacagcgacagcgactag

SEQ ID NO: 177441 - DNA, 6411 bp, Artificial Sequence
  derived and/or modified sequence
atggccgacgtgaccgcccggagcctgcagtacgagtacaaggccaactctaatctcgtcttgcaggccgaccgctccttgatagatagaactaggcgcgatgaacctaccggagaagttctcagtctggtgggtaagctggaggggacccggatgggggacaaagcacagcggaccaaaccccagatgcaggaagagcggagggcaaaacggaggaaacgagacgaggacaggcacgatatcaacaagatgaaagggtataccctactctctgaaggcattgacgagatggtcggtatcatttacaagcctaaaacgaaggaaaccagggagacttatgaggtgctgctgtctttcatacaggctgcgctcggcgaccaaccccgggacattctgtgcggggccgccgatgaagtgctggctgtcctgaagaacgagaagctacgggataaggagcggagaaaagagattgatttgctattaggccagacggacgacacccgctatcacgtcctcgtcaatctgggtaaaaagatcacggattacgggggcgacaaggagattcaaaatatggatgataacattgatgaaacatatggggtgaacgtgcagtttgagagcgatgaggaagagggtgatgaagacgtctatggggaggtgcgggaggaagccagcgatgacgatatggagggtgatgaggccgtggtgagatgtacactgtccgctaaccttgttgcttctggcgaactaatgtccagtaagaaaaaggaccttcacccccgggatattgacgccttctggctccaacgccagttaagtaggttctacgatgacgctattgtgagccagaagaaagctgacgaagttttagagatcctcaaaaccgcgagcgacgatcgagaatgcgagaaccagctggtcctcttattaggcttcaataccttcgatttcatcaaggttctgcgccagcatcgtatgatgatactctactgcactctcttggcctctgcccagtctgaagccgagaaggaacgaataatggggaaaatggaggccgatcctgagttgtcaaagttcctttaccaacttcacgaaacagagaaggaggacctgatccgggaagaaaggtcacggagggagagggtcaggcaaagtcgtatggatacagatctcgagacaatggaccttgaccagggtggagaagctttggctccccgccaggtactcgatctcgaagatcttgtcttcacacagggatcacacttcatggcaaataaaagatgccaactgccagatgggtcattcaggcgtcagagaaagggatacgaagaggtgcacgtccctgcattgaagccgaagcccttcggctccgaagaacagttgctgccagttgagaagttacctaaatatgcacaagctggattcgaaggattcaagacactgaatcggatccagagcaaactctatagggccgcattggaaactgatgagaacctgcttctgtgcgctcccaccggcgctggaaagaccaatgtggcacttatgtgcatgctcagggagatcggtaagcacattaacatggacggcacaattaacgttgatgactttaagattatatacatcgcacccatgcgttcgttggttcaggagatggtcggctccttcgggaagcgactcgccacgtacgggatcaccgtggcggaattgacaggtgatcaccagttgtgtaaagaagagatatcagctacgcagatcattgtgtgcacacccgaaaagtgggatatcatcacccgaaagggaggagaaagaacatatacccagctcgtgaggttaatcatactggatgagattcaccttttgcacgatgaccgcggccccgtgttggaggccctggtggcccgtgctatccgcaatatcgaaatgacgcaagaagacgtccgactgattgggctcagtgcgactctgccgaactacgaagacgtcgctacttttttgagggtggacccggcaaagggtttgttctacttcgataattccttcagacccgtgcccctggaacagacctatgtgggaatcaccgagaagaaagccatcaagcgctttcaaattatgaatgagatcgtgtatgaaaaaatcatggaacacgcagggaaaaatcaggtactggtcttcgtacacagtcgtaaagagaccgggaagactgctcgagctataagagacatgtgtctcgagaaggacacactcggactcttcctgagggaggggtcagcttcaactgaagtgctgaggactgaggcagaacagtgtaagaatttggaactgaaagacctcctgccgtacgggttcgctattcatcacgctggtatgactagggtggataggactctggttgaagacctgtttgcggacaagcacatccaggtcctcgtttctacagcaactctggcctggggcgtcaacttgccagcccacacagtgatcataaaggggacacaggtgtactccccggaaaagggacggtggaccgagctcggcgcgcttgatatactgcagatgttgggcagagcaggtcgcccacaatacgacaccaagggtgaaggcatacttattacaagccatggcgagctgcagtattacctgtctctgctcaaccaacaactcccaattgagtcccaaatggtctccaaactaccagatatgctgaatgccgagatcgtcctggggaacgttcagaacgcgaaggacgccgtgaattggctgggctacgcgtatctatatatcagaatgctgcgctctccgactctgtatggcattagccacgacgatctgaagggagatcccctcctcgatcagcgacggttagatctagtgcacaccgccgctctgatgctggacaaaaacaacttggtgaagtatgacaaaaaaacaggaaatttccaagtgacagaactgggccgtattgcttcgcactattacataaccaacgatacagtgcagacgtataaccagcttcttaagcccacattgtctgagatagagcttttcagagttttctccttgtcttcggaattcaaaaacattaccgtgcgagaggaggaaaaactggagcttcagaagttattagagcgtgtaccaatcccagtgaaagagtcaatcgaagagccttcagcaaagattaatgttcttcttcaggctttcataagccaactgaaactggagggattcgctctcatggcagatatggtgtatgtcacccaatccgctgggcgccttatgcgggcgatatttgagatagtcctgaatcgagggtgggcgcagctgaccgataagactttaaacctgtgcaaaatgattgacaagcgcatgtggcagtcaatgtgcccactcagacagttccggaagctccccgaggaggttgtcaaaaagatcgaaaagaaaaacttcccattcgagagactgtacgatctcaaccacaatgaaatcggagaacttattcggatgcctaaaatgggcaagaccattcacaagtatgtacatcttttcccgaaactcgaactttcagtccatcttcaacccatcacgcgttccaccctcaaggtggagctgacgattactccagactttcaatgggacgagaaggtgcatgggagttcagaggcattctggatcctcgttgaggatgtggattcagaagttattctgcatcacgaatattttctcctgaaggctaagtacgcacaagatgaacatttaattacattcttcgttcctgtttttgagccactccctcctcagtattttatacgggtggtgtcagacagatggctttcttgtgagacacagcttcctgtgagctttaggcacctcattttgccagaaaagtatccgccaccaacagaactgttagaccttcaacctttacccgtgtctgctctgcggaatagtgcttttgagtcactgtaccaggacaagtttccttttttcaatcccatccagacacaggtatttaataccgtatacaacagcgacgacaatgttttcgtgggcgccccaacgggctcaggtaaaaccatctgtgccgaatttgccattctgaggatgttgctgcagtcatctgagggccgctgcgtctacatcaccccaatggaggccttagctgagcaggtttatatggattggtacgaaaaattccaggataggttaaataaaaaagtggtgctgctaaccggtgaaacctccaccgaccttaagctccttggaaaaggaaacataataatttccacacccgaaaagtgggacatcctatcgaggcggtggaaacaacgcaagaacgtgcagaacatcaaccttttcgttgtggatgaggtgcacctcatagggggagagaatggaccggtgctggaggtgatttgctcaagaatgcgatacatctcttctcagatagagagacccatacgcattgtggcgttgagctcttcactgagcaatgccaaagacgtggcacattggcttgggtgtagtgctacatctaccttcaatttccacccaaatgtgcgacccgtgcctctggaactgcacatacaaggatttaacatctcacatacgcagactagacttctgtccatggcgaagcccgtttatcacgccatcaccaagcattctcctaagaagccagtgatcgtgttcgtgccctccaggaagcagactagactgacagccatcgatattcttacaacttgcgcagctgatattcagcgccagcgcttcctgcactgtacagagaaggatcttatcccatatctggagaaactcagtgattcaactttgaaggagacactgctgaacggtgtcggttacctgcatgagggactgtctcccatggagaggaggctggtggagcaactcttttccagcggagcgatacaggtagtagttgctagtaggagtctgtgttggggaatgaatgtggctgcccatctagtcatcattatggacacccaatactataacgggaagatacatgcctatgtcgattacccgatctatgacgttctccaaatggtggggcacgcaaacaggcctcttcaggacgacgagggacgttgcgttattatgtgtcagggatccaaaaaagactttttcaagaaatttctgtatgaaccactgccagtggaatctcacctagatcactgtatgcacgatcactttaacgccgagattgtaactaagacaatcgaaaacaagcaggatgccgtggattacctgacctggaccttcctgtaccgaaggatgacccaaaatcctaattactataatctgcaagggattagtcaccggcacctgagcgatcatctctcagagctggtggagcaaaccctcagtgatttagagcagtctaaatgtatcagtattgaagatgagatggatgtcgcgcctctaaacttgggcatgattgccgcctattattatatcaactatacgaccattgagttattttcgatgagcctgaacgccaaaacaaaagtgcggggcctgattgagattattagtaatgcagcggagtatgagaatatccccattagacatcacgaggataacttgctcagacaacttgcccagaaggtcccacacaaacttaacaaccccaagttcaatgatcctcacgtcaaaaccaacctcctgttgcaggcccatctaagtcgaatgcagctgagcgctgagttacagtccgataccgaagagatcctatctaaggccattcgccttattcaggcatgcgtcgatgtactgtcctctaatggatggttaagccctgccttagccgccatggagctggcccagatggtcactcaagctatgtggtctaaggacagttatctgaaacagctcccacacttcaccagtgaacatattaaacggtgtaccgacaagggcgtggaaagcgtttttgacatcatggagatggaagatgaagagaggaatgcactgctgcagctgaccgattctcagatcgctgatgtggctcgcttttgtaatagatatcctaacattgagttgagctacgaagttgtggacaaggacagcataaggagcggcggtcctgtcgtggtcctcgtccagctcgagcgcgaggaagaggttaccggcccggttatcgccccactcttcccacaaaagagagaggagggctggtgggtggtgatcggagatgcaaaatctaactccctgatcagtatcaagaggctgacactgcagcaaaaggcaaaagtcaagcttgacttcgtcgctcccgccacgggggcacataattacacactctacttcatgtcagacgcatacatgggctgtgatcaggagtacaagttttccgtcgatgtcaaagaagcagagactgactctgatagtgattag

SEQ ID NO: 177442 - DNA, 1878 bp, Artificial Sequence
  derived and/or modified sequence
atggccgacgtgaccgcccggagcctgcagtacgagtacaaggccaacagtaacctcgtgttgcaggcggaccgcagcttaattgacagaactcgtcgcgacgaacccaccggcgaggtactgagtcttgtaggtaagctggaaggaacacggatgggcgataaagcgcagcgcaccaaaccccagatgcaggaggaaagacgggccaagcgacggaagcgcgacgaggatcggcacgatataaacaaaatgaaaggctacacccttctgagcgagggaattgacgagatggtgggaatcatatacaagcctaaaactaaggagacccgcgagacttatgaggtcctgttgagcttcatacaggccgcgctcggagaccagccacgcgatatattgtgcggcgccgctgacgaggtgctagctgttctcaagaatgaaaaattgagggataaggaacggcgcaaggagattgacctgctcctgggtcaaacagatgatactcgctatcacgtgctggtcaatttgggcaagaagattactgattacggcggggataaagagatccaaaatatggatgacaatattgacgaaacatacggggtgaacgtccagttcgaatcagacgaggaggaaggggacgaggatgtgtacggagaagtgagggaagaggcatctgacgacgacatggagggtgatgaagcagtggttaggtgtaccctgtccgctaatctggtagccagtggtgagctgatgtccagtaaaaagaaggacctgcacccgagggatatcgacgcattctggcttcagagacagctttcacggttctatgacgacgccatcgtaagccagaagaaagccgatgaagtgctggagatcctgaagactgctagcgacgaccgcgagtgcgagaatcaacttgtgcttctcctgggtttcaatacattcgatttcatcaaggtcctgcgtcagcatcggatgatgatactgtactgtaccctgctggcaagtgcgcagtcggaagccgagaaagaacgaatcatgggaaagatggaggctgatccagaactgagcaagtttctctatcagctacacgagacggaaaaggaagacttgataagagaagagcgctctcgcagggaacgtgtgcggcagtcgcggatggacaccgatttagagacaatggatttggaccaggggggcgaggctttggcgcctagacaggtcctcgatctggaggacctagttttcacgcaggggagccatttcatggcaaacaagagatgtcagctgccagacggaagcttccgcaggcagcggaagggctatgaggaggtgcacgtgcccgctttgaaacctaagccctttggatccgaagaacagctcctgcctgtcgagaagttaccaaagtacgcccaggccggatttgaagggtttaagacactcaatagaatccagtccaaactgtaccgtgcagccctcgaaactgatgaaaatctcttactttgcgctcccaccggggctggcaagaccaatgttgctctcatgtgtatgttgcgcgagatcggaaaacacatcaacatggacggcacaattaacgtcgacgattttaagataatatacattgcacctatgcgcagccttgtacaggaaatggtgggcagctttgggaagcgcgacgctaaaagcaacagtctgatctccatcaaacggctgacccttcagcaaaaggctaaagtgaaacttgattttgttgcgccagccaccggagctcataattatactctgtactttatgagcgatgcctacatgggttgtgatcaagagtataagttctccgtggacgttaaggaagctgagactgactcagacagcgattag

SEQ ID NO: 177443 - DNA, 1788 bp, Artificial Sequence
  derived and/or modified sequence
atgcggtacatcagcagccagatcgagcggcccatccggatcgtggcattgtcctcaagtctctccaacgcgaaggacgtggcccactggctgggatgctctgctacttctacctttaacttccaccccaacgtgaggcccgtacccctggaactgcacatacagggatttaacatctcacatacccaaactaggctcctcagcatggctaagcccgtataccacgccatcactaaacacagtcctaagaagcctgttattgtgtttgtaccctcaaggaaacagacgagattgacagcaatcgatattttgaccacatgtgccgccgacatccagcgacagcgcttcctgcattgtactgaaaaagatcttatcccatatctggagaaactttccgattctacactcaaagagacactactaaacggagtgggctatctgcacgaggggctgagcccaatggaacggcggctggtcgaacaactgttcagctcaggcgccattcaggtcgtagtggcctctagatccctctgctggggcatgaacgtggccgctcacttggtgatcattatggacacacagtactataacggaaagatccacgcctatgtcgattaccccatctatgacgtactgcagatggtcggccacgcgaacaggcccctgcaggacgacgaagggagatgtgttattatgtgccagggcagcaagaaggacttctttaaaaaattcctgtatgagcctttgcctgttgagtcccaccttgatcactgtatgcatgaccacttcaatgccgaaatagtgacaaaaaccatcgagaacaaacaagacgctgtcgactacttaacctggacgttcttatacaggcgcatgacccagaatcccaactactataaccttcaggggatcagccatcggcacctatctgaccacctttcagagttggtcgaacaaaccctgtcagatctcgagcagtctaaatgtatctcaatcgaggatgagatggacgtggcaccacttaacctgggcatgatcgctgcgtattactacataaactacacaaccatcgagctgttctccatgtcacttaatgctaaaaccaaggtgagaggtctcatcgaaataattagcaacgctgcagaatacgaaaatatccctatccgccatcacgaggacaatctgctgcggcagcttgcacaaaaggtgccccataaactcaataatcccaagtttaatgatccacacgttaagactaatctgctgctccaggcccatttatctcgtatgcagctaagtgcggaactgcagagtgacactgaagagattctgtctaaagcgatccggctaatccaggcctgcgtagatgttctaagctcaaacgggtggctcagcccagctttagccgctatggagctcgcgcagatggtgactcaagctatgtggagtaaagactcctacctcaagcagctgccccatttcacgagtgaacacattaaacggtgcaccgacaagggcgtggagagtgttttcgacattatggagatggaagatgaagaacgtaatgctcttctgcaactcacagatagccagattgctgacgttgctcggttctgtaatagatatcctaatatcgagttgtcttatgaggttgttgacaaggattcaatccggagcgggggtccagtcgttgtgttggtacagcttgagcgggaggaggaagtcacgggtcccgtgattgcccctctgttccctcagttccgcgcaggccggtccggaagtcgcctgtag

SEQ ID NO: 177444 - DNA, 1788 bp, Artificial Sequence
  derived and/or modified sequence
atggccaagcccgtgtaccacgccatcaccaagcacagccccaagaagcctgtgatcgtttttgttccaagcaggaagcagacacgtctgaccgccattgatatactcaccacttgtgcagcagatatccaaaggcaaagattcctccactgtacagaaaaggacctgatcccttacttggaaaaactgtccgacagcacactcaaggagaccctgctcaacggggtgggatatcttcatgaggggttgagccctatggaacgtagactggtggagcagttgtttagttctggggcaatacaggtggtagtggctagtcggagcctgtgctgggggatgaatgtcgctgctcacctggtgatcattatggatacacagtattacaatggtaagattcatgcttatgttgactacccaatatatgatgtcctgcagatggtgggtcacgcaaaccggcctctgcaggatgacgagggtcggtgtgtgatcatgtgccagggctccaagaaggacttttttaagaaattcctgtacgaaccattgccagtagagagccacttggaccactgcatgcatgaccacttcaacgcagagattgtaaccaagactatagaaaacaagcaggatgccgtcgactacttgacctggactttcttatatcgacgcatgacccaaaatcctaactactacaacctccaaggaataagtcaccggcacctgtccgaccaccttagcgaactcgttgaacagactttatctgacttggagcagagtaagtgtatcagcatcgaggatgagatggacgtggctccactgaatctcggcatgatcgcagcttattactacattaattacaccacaattgaattgtttagcatgtccctgaatgccaaaactaaagtgaggggcctcattgagatcatttccaacgccgcggaatatgagaatatccctatccgccaccacgaagataatcttttaaggcagcttgctcaaaaggttccacataagctgaataatccaaagtttaatgaccctcacgttaagaccaacctgctcctgcaggcacatctcagccgtatgcaactgagtgcggaacttcagagcgatactgaggagatcctgagcaaggcgataagactcattcaggcatgcgtggatgtcttgagttccaacgggtggttgagcccagccctggccgcaatggagctggcccagatggtcacgcaagccatgtggtctaaggacagttatctcaaacagttgccacactttacgtcagaacatatcaaacgatgcaccgataagggcgtggaatcagtttttgatataatggaaatggaggacgaggaaagaaatgcattgctacagctgactgactcacagattgctgatgtcgctaggttttgtaatcggtatccaaacatcgagctgtcatacgaggttgtcgataaggacagtattcggagcgggggacctgtggtggtgctggtgcagctagagcgagaggaggaggtgacaggcccagtgattgcacctctcttcccccagaaaagggaagagggatggtgggtggttatcggagatgctaaaagtaattcactcatctctattaaacgcctgactcttcaacagaaggcgaaggtgaagcttgatttcgtggctcctgctaccggagctcataattacactctgtattttatgtcagacgcctatatgggctgcgaccaggagtataaattttctgtggatgttaaggaagccgagacagattccgattccgactag

SEQ ID NO: 177445 - DNA, 2325 bp, Artificial Sequence
  derived and/or modified sequence
atgatgatcctgtactgcaccctgctggccagcgcccagagcgaggcagagaaagagcgcataatggggaaaatggaagcggaccccgaactgagtaaatttctataccagctgcacgaaactgaaaaagaagatctgatcagagaagaaaggtctcgccgcgagcgtgttcgtcaatctcgaatggacacagacctcgagacaatggacttggatcagggtggcgaggcactcgcgccaagacaagttctggacctggaagacctcgtgtttacgcaaggttctcacttcatggccaataagcggtgccagcttcctgatggctcgttcaggcggcagaggaaggggtatgaggaagtgcacgttccagccctgaagccaaagccttttggatctgaggaacagctcttacccgtcgaaaaactgccaaagtatgcgcaggccgggtttgagggctttaaaaccctgaataggatccaaagtaaactgtaccgagccgctttggagacagacgaaaatctgctactgtgcgctccaacaggagcaggtaaaaccaatgtggcactgatgtgcatgctacgcgaaattggaaaacacatcaacatggatggaaccatcaatgtcgatgatttcaagataatatatattgcaccgatgagatccctggtacaggaaatggtcggttcattcggcaagagactggcaacctatggcattaccgttgccgaactcactggcgatcaccagctgtgcaaagaagaaattagcgcaacccagataatcgtgtgtacccctgaaaagtgggacatcatcactcggaaaggcggggaacgtacatacacgcagcttgtgagattgataattctggacgaaatacacttactacacgacgaccgagggccagtactcgaagctctcgtcgcccgagccatcaggaacatcgaaatgacccaggaggacgtgagactgattggattgtctgctactctccccaattatgaggacgtggcaacatttctacgggtggaccctgcgaaggggctgttttatttcgacaactcatttagacccgtgccattggaacagacatacgtgggcattaccgagaagaaggccattaagcgtttccagataatgaacgaaattgtgtacgagaagattatggaacacgcaggcaaaaaccaggtgctcgtgtttgtgcacagcaggaaggagaccggtaaaacggccagggccatcagagacatgtgtctggagaaagatactctgggcctgttccttcgcgagggctcagcctctactgaggtcttacggactgaggctgaacagtgtaagaacctggagctcaaggacttgcttccatacggattcgcaattcaccacgctggcatgactagggttgatcgtacattagtcgaagatctgtttgccgataaacacatccaggtgctggtttcgactgctacattagcatggggagtgaacctccctgcccataccgtgattattaagggcacccaggtgtatagccctgagaagggccgctggacagagctcggagcacttgatattctgcagatgttgggaagagctggaagaccacagtatgacacgaaaggggagggaatcctgatcaccagccacggcgagttacagtactatctgagcttactcaaccaacaactcccgattgaatcacagatggtgtccaagttgcctgacatgctgaatgcggagatagtactaggtaacgtacagaatgctaaagatgcggttaattggctcgggtatgcatacctgtatatacgcatgctgcggtcaccaacactgtatggcatcagccacgatgacctcaaaggcgaccctctgctggatcaacggagactcgacttagtgcacacagcagccctgatgttggataagaacaacctggttaagtacgacaagaaaacaggcaactttcaagtgacagagttagggaggatagcctcacactactatattacaaatgataccgtccaaacgtataaccagctgcttaaacctaccctgagcgagattgagctatttcgggtgttctcactgtctagcgaatttaaaaacatcacagttcgcgaagaggaaaaacttgagttgcaaaagctgcttgaacgggtgccaattcctgtcaaggaatccattgaagaaccgtcagcaaagattaatgtcctcttgcaggccttcatctcacaactgaaactggagggttttgcgctgatggccgacatggtttatgttacgcaaagtgccggacgacttatgagagcgatcctgaaactgtcttag

SEQ ID NO: 177446 - DNA, 2160 bp, Artificial Sequence
  derived and/or modified sequence
atgctgctgcagagcagcgagggccggtgcgtgtacatcacccccatggaggcacttgccgagcaggtgtacatggattggtacgaaaaatttcaagatcgcctgaataagaaagtcgtacttctcacaggcgagaacggaccagtgctggaggtcatttgttccaggatgcggtatatttccagtcagattgagcgccctatacgcattgtggctttgtccagcagcctgtcaaacgctaaagacgttgcgcattggttgggctgctccgcaactagtacatttaatttccaccccaacgtacggcctgtacccctcgagctccacattcaggggtttaatatctctcatacacagactaggctgctctcaatggcgaagcctgtctatcacgctataacaaaacactctccgaaaaagcccgttatcgtgttcgtgccctctagaaaacaaacgcgcctgaccgcgatcgatatcttaacaacatgcgcagcagacatccagaggcagcgatttctccattgcactgagaaggatttaatcccatatctcgagaaattgtctgacagcaccctgaaagagactctccttaacggtgtaggctatcttcatgagggtttgagcccaatggagcgccgtctggtggagcaactgttctcgtccggagccattcaggtggtcgtggcttctaggagcctttgttggggtatgaatgttgcagctcacctagttataattatggatacacagtactacaatggcaagatccacgcctatgtggattatcctatatacgatgtcctgcagatggtcgggcacgccaaccgccccctgcaggacgatgaagggcggtgtgtgatcatgtgccagggttctaaaaaagacttttttaaaaagtttctctatgaacctctgccagtggaatctcatttagaccattgtatgcatgaccatttcaatgccgagatcgtgacgaaaaccattgagaataaacaggacgcggttgactacttaacatggacattcctgtatcggagaatgacgcagaatcctaactactacaacctccagggaatttctcacaggcatctctccgaccacttgtctgagctcgtcgagcaaacacttagcgacctcgaacagtccaagtgtatttccattgaggatgaaatggacgtcgcaccactcaacctaggcatgattgcagcctattattacataaactacaccaccattgaactgttcagtatgtccttgaacgcaaaaacaaaggtgcgaggcctcatcgagattatatccaacgccgccgagtacgaaaacatacctattcggcaccacgaggacaacttgctccgtcagctggctcagaaagtgccccataagttgaataatcctaaattcaacgatccccatgtgaagacgaatctcctgctacaggctcatctgagtcggatgcaactttcagcagagttacagtctgataccgaagagattctgagtaaggcaatacgcctgattcaggcttgtgtggacgttctgtcgagtaatggttggttaagcccggcactggccgccatggaactggcccagatggtgactcaggcaatgtggtcgaaggactcataccttaagcagcttccacatttcactagtgaacacatcaagcgctgcactgataaaggagtcgagagcgtgttcgatatcatggagatggaggacgaagagagaaacgccctcttacagttaacggactctcagatagccgatgtggcccggttttgtaaccgctatcccaatattgagctgtcctacgaagtcgtggataaggacagcatccggagtggcggacccgtggtggtgttagttcagctggaacgagaagaggaagtcaccggacccgtaatagcccctctgttcccccaaaagagagaagaaggttggtgggtggtaatcggtgatgcaaagagtaactctttaattagtattaaaaggctgactctgcagcagaaggctaaggtgaaactggatttcgtggctccagccacaggggcccacaattatacactctacttcatgtcagacgcttatatggggtgcgatcaggagtataagtttagtgtggacgtgaaggaggccgaaacagactccgactcagattag

SEQ ID NO: 177447 - DNA, 6410 bp, Artificial Sequence
  derived and/or modified sequence
atggccgacgtaacagcccgtagcctccagtacgaatacaaggcaaattctaacttagttttgcaggcagataggagtctgattgacagaacacgcagggacgaacccacgggagaagtgttgtcccttgtgggaaagctcgagggcactcgtatgggagacaaggctcagcgcactaaacctcagatgcaagaggaacgaagagccaaaaggaggaagagagatgaggataggcatgatattaataagatgaaaggttacaccctgctatcagaagggattgatgagatggttggcatcatatacaagcccaagaccaaagaaacacgggagacttatgaggtactcctgtcttttatccaggccgctcttggggaccagccacgagacatcctctgtggtgcagcggatgaggtgctagcagtgctgaaaaacgaaaagctgagggacaaagagcggaggaaggaaatcgacctgctgctgggtcagactgacgacacacgataccacgtcctggtgaacttaggcaagaaaatcaccgactatggcggtgataaagagatccagaatatggatgacaacatcgacgagacctacggcgtgaatgtgcaatttgagtctgatgaagaggagggcgatgaggatgtctacggcgaagtgcgggaagaagcctctgatgatgatatggaaggggatgaggccgtggtccgctgtaccctcagcgccaacttagtcgcttccggggaactcatgtcctcaaaaaaaaaagacttacatccaagagacattgacgccttttggctgcagagacaactctcacggttctatgatgacgctatcgtttctcagaaaaaagccgacgaggtgctcgagattctcaagaccgcgtccgacgaccgggaatgcgagaaccagctagtgctgctgctgggtttcaacacattcgactttatcaaggtgcttagacagcatagaatgatgatcctgtattgtacactgcttgcttctgcgcagtcagaggctgagaaggaaagaataatggggaagatggaggctgacccggagctgtccaagttcttgtaccagctgcacgagacggagaaggaagacctgataagagaagaaaggtctaggcgcgagcgtgtgagacagagcaggatggatacagatcttgaaacaatggacctagaccaaggcggagaggcattagctcctcggcaagtactggatcttgaagacctggtctttactcagggttcccactttatggctaacaaacgttgtcagctgcctgatggcagcttcagacgtcagcggaagggctacgaggaagtacatgtgcctgcgctgaagcctaagccattcgggtcagaagagcagctgttgcctgttgaaaaacttccaaaatatgcacaggccggatttgaggggttcaagaccctcaatcgtattcagtcgaaactttatagagctgctttagagaccgatgagaatttactgctgtgtgcgccaacaggtgccggaaagacaaatgtggccctgatgtgcatgttgagggagatcggcaagcatatcaacatggacgggacaataaatgttgacgatttcaagatcatctatatagcccctatgcgcagcctcgtgcaggagatggtgggctcatttggtaagcgacttgccacttatggtatcaccgtggctgagcttaccggcgaccatcagctctgtaaagaagagattagtgccactcagattatagtgtgcactcctgagaagtgggacataattactcgcaaaggcggagagaggacttacacccaacttgtgcgactcatcatccttgatgagatacacctgctgcacgatgacagagggcctgtgctagaggcgctggttgccagggccatccgaaacattgaaatgacccaggaagacgtcagactgattggactgtccgcgacactgcccaattacgaggatgtcgccaccttcctgcgggttgacccagctaagggattattctactttgacaactccttccggcctgtccccctggagcagacctatgttggcatcactgaaaagaaggctatcaaacggttccagataatgaatgaaatcgtgtacgagaaaatcatggagcatgccggaaagaatcaggtcctggtgtttgtgcattctcggaaggagactggcaagactgccagagcaatcagagacatgtgcctggagaaagacactcttggattattccttcgcgaaggaagcgccagtactgaggtactgagaaccgaagcagaacagtgtaagaatctggaacttaaggacctcctgccatatggttttgccatacatcacgccggaatgactcgagtggatcgcacactcgtggaggacctgtttgccgacaaacatattcaagtgcttgtgagtaccgctacgttagcttggggggtgaatttgcccgctcacacagtgattatcaagggaactcaggtgtactctccagaaaagggccgttggacggagctcggcgcactcgacattctgcagatgttggggcgtgcaggtcgccctcagtatgacacgaaaggggagggaattcttattacctctcatggagaactgcagtattatctgagcttgctgaaccagcaactgcctatagagagccagatggtctccaaattgcccgacatgttaaacgctgagatcgtcctgggtaatgtgcagaacgccaaggacgcagtgaactggctgggatatgcctacctgtacatccgaatgcttcgcagtccaacgctgtatggaatcagtcatgatgatctgaagggagatcccctgctcgaccaacggaggctggacctggtgcacaccgccgcactaatgctggacaaaaacaatttggtaaaatacgacaaaaagactggcaacttccaggtgaccgagctcgggcgaattgcctcccactactacatcaccaacgatacagtgcagacctacaatcagctcttgaagcccacgctaagcgagatcgaactgttccgagtctttagcctgtcttctgaattcaagaacatcacggtgagggaagaggaaaagcttgaactgcagaagctcctggagagggtgccaatacccgttaaggaatcaattgaggagcccagcgctaaaatcaatgttctgctgcaggccttcatatcccagctgaagcttgaggggtttgcgctaatggccgacatggtgtatgtcacccagagcgcaggccgactgatgcgagccatcttcgaaattgttctgaatcgcggatgggcccagcttaccgacaagaccctgaacctgtgtaagatgattgataagcggatgtggcaaagtatgtgccccctgaggcaatttcgaaagctgcccgaggaggtggtcaaaaagattgagaagaaaaactttccgtttgagcgcctctacgacttaaaccacaacgagattggagagctgattagaatgcccaaaatgggcaagacgatccataaatacgtccatctttttccaaagttggaactgagcgtccatttgcagcctatcacacggtccaccttgaaggtggaacttactatcacacctgactttcaatgggatgagaaggtgcacggctccagcgaagccttctggatcctagtggaggatgtggatagtgaggtcattctgcatcatgaatacttcttgttaaaagctaaatacgcccaggatgaacatctgattactttcttcgtgcccgtgttcgagcccctaccaccacagtactttatcagggtggtgtctgacagatggttgtcctgcgagacgcagctcccagtttcatttaggcacctgatcctgccggagaaatacccaccaccaaccgaactgctggaccttcagccacttcctgtgtccgctctgagaaattcagccttcgaatccctataccaggataaattccccttttttaacccaatacagacgcaggtctttaacacagtgtacaattctgacgataacgtgttcgtgggggctccaacaggttcggggaaaacgatatgcgctgagttcgccatacttcggatgcttctgcagtcatcagaaggcagatgtgtgtacatcactcctatggaggccctcgctgagcaggtgtacatggactggtacgagaagtttcaggataggctaaacaagaaagtcgtactcttaacaggcgagaccagcactgacctcaagttactggggaaggggaatatcatcatctcgacccccgagaagtgggatattctgagtcgacggtggaaacaaagaaagaatgttcagaacatcaacctgttcgtggtcgacgaagtccacctgattgggggagagaatggtcctgtactcgaagtgatctgctcccggatgcggtacatctcttcacagatcgagaggcctataagaatcgtagccctttccagtagcctgtctaacgccaaggatgtcgcacactggttagggtgcagcgcgactagtacatttaacttccacccgaatgtgcgtcccgtacctctggagttgcatattcagggattcaacattagccacacccagactcgcctgctgtccatggccaagcctgtgtaccatgctatcactaaacatagtcctaagaaacccgtcattgtttttgttcccagccgcaaacagacacggctaacagcgatcgacattctgaccacctgtgcagctgacatacagagacaacgctttcttcactgtactgagaaggacctcattccctatctggaaaaactgagtgattccactctaaaagagactctcctgaatggcgtcggatacctccacgagggcctgagtccaatggaaagacggcttgttgaacagctttttagctctggcgctatccaggtggttgtggcaagcaggtccctgtgttggggcatgaatgtcgccgctcatctggtcataattatggacacccagtattataatggcaagattcacgcctacgttgattaccctatttatgacgtcctgcagatggtaggacacgctaatcggccactgcaagatgatgaggggcgatgcgttataatgtgtcagggatctaagaaagacttttttaagaaatttctttatgagcccctacccgttgagtcccacctagaccattgtatgcacgatcattttaatgcagagatcgtgaccaagactatcgaaaataaacaagatgcagtagactatctgacgtggaccttcctttaccgtagaatgacccagaaccctaattactacaatcttcagggcatcagccatcggcacctctcagatcatctctccgagctggtggaacagaccttatccgacttagagcagagtaaatgtattagcatagaagatgagatggatgtggcccctctcaatctcggaatgatcgcagcctactactacatcaactacactacaattgagctattctccatgtccctcaacgccaagactaaggtgaggggtctcatcgagatcataagtaatgcagccgagtacgaaaatattccaattcgacaccatgaggataatctgctccgccaactggcccagaaagtgccccataagctaaataacccgaaatttaatgatccccatgttaaaactaacctcctgttgcaagctcacctcagccggatgcagctatccgcagaactccagtcagatactgaagagatcctgtccaaagctataagactgatccaggcatgtgtcgacgtcctctcctctaacgggtggctaagccctgccctggccgctatggagcttgctcagatggtcacccaggctatgtggtctaaggattcttatctaaagcagctcccacacttcacttcagaacatattaaaagatgtacagacaaaggagtagaaagtgtctttgatatcatggaaatggaggatgaagaacgcaacgcactccttcagctcactgactcacagatcgccgacgtagccaggttctgcaaccggtaccccaacatcgagttatcctacgaagtggtcgacaaagactctataagatctggcggaccagttgtagttctagtgcagctagagagagaagaagaagtgaccggacccgttatcgccccactgttccctcaaaagagggaagaggggtggtgggtagtgattggagatgcaaagtctaactcgctgatcagcatcaagcgtctgaccctgcagcaaaaggccaaagtcaaactcgattttgtggcccctgccacaggggctcataactatacattatactttatgtctgatgcatacatgggctgcgatcaggaatacaagttctcggtcgatgttaaagaggccgaaacagactccgactctgacta

SEQ ID NO: 177448 - DNA, 1878 bp, Artificial Sequence
  derived and/or modified sequence
atggctgacgttaccgcaaggtccctccagtacgagtataaagccaacagtaacctggttttacaggctgatagatctctgatcgacagaacgcggcgagacgagcctaccggcgaggtgttatcccttgttggcaagctcgagggcacacgaatgggggataaagcacagcgtaccaagcctcagatgcaagaggagcgaagagccaagcggaggaaacgagatgaagatagacacgacatcaataagatgaagggttacactctcttatccgaggggatcgatgagatggtcggcatcatctacaagcctaaaaccaaggagactcgggaaacttacgaagtgctgctgtcttttattcaggccgctctaggagaccaacctcgggacatcctgtgtggcgctgccgatgaagtccttgctgttttgaaaaatgaaaagttacgtgacaaggagaggcgtaaagagattgacctgcttctggggcagactgacgacacacgttaccatgttctcgtgaacctcggaaagaaaattaccgattacggaggggacaaggaaattcaaaacatggatgacaatattgatgaaacgtatggagtcaatgtgcagttcgagagcgacgaggaagagggagacgaggacgtgtatggcgaagtgcgggaggaggctagtgacgacgatatggaaggcgacgaagctgttgttcgctgtacactgtcggcaaatcttgtcgctagcggggagctcatgtcaagcaaaaagaaggacctgcacccacgcgacatcgatgcattttggttgcagcgccagctgtcacgattctacgacgatgccatcgtgagtcaaaagaaggctgatgaagtgctcgagattctgaagactgcctccgacgaccgggaatgtgagaatcagcttgtgctgctgctcggtttcaacacatttgattttataaaagttctccgtcaacatcgcatgatgatactgtattgtactctgcttgcctccgcccagtctgaagccgagaaagaacggattatggggaagatggaggcagacccagaattgagcaaatttctttaccagctgcacgagactgagaaagaagatctcattcgggaggagcggtctcggagggaacgcgtacgccagtccaggatggatacagatctggagacaatggacctggatcagggcggtgaagccttggcccctcgacaggtgctggatcttgaggatctcgtgttcacccagggtagtcacttcatggccaataagcgctgtcagttgcctgatggctcatttcggagacaaaggaagggttacgaggaagtgcatgtaccagccttaaagcctaaaccctttggatctgaggagcagctgctcccagtcgagaaactgccaaagtatgcccaagcaggattcgaagggttcaaaacactcaatcgaatacaatccaaactctatcgcgcagccttggaaactgacgagaaccttctcttgtgcgctcccaccggtgccggaaagacaaatgtcgcccttatgtgtatgttgcgtgagattggcaaacacattaacatggacggtaccatcaatgtggacgacttcaagattatctacattgcacctatgcggagtcttgtgcaggagatggtgggctccttcggaaaacgagatgcaaagagtaacagcttaattagcattaaaaggcttacgttacagcagaaggctaaagttaaactggacttcgtcgcacctgctaccggcgcacacaattacacgctctattttatgtcagatgcgtatatgggctgcgaccaagaatacaagtttagtgtggatgtgaaggaggcagagaccgactctgactccgactag

SEQ ID NO: 177449 - DNA, 1788 bp, Artificial Sequence
  derived and/or modified sequence
atgaggtacatttcctcgcaaattgaaagacccattcggatcgtggcactttctagcagcctatcgaatgcgaaggatgtggcccattggttaggctgttccgcaaccagcacattcaacttccaccctaatgttagaccggtgcccctcgaactgcacatccaggggtttaatatatcccatactcagactagactgctatcgatggctaagcccgtttatcacgccattactaagcatagcccaaaaaaacccgttatcgtgtttgtgccttcgaggaaacagacaagattgactgctattgatattctgactacctgcgcagctgatattcagagacagaggtttctgcactgtacagagaaagatctgattccctacctcgagaagctgagtgatagcactctcaaagagacactactcaatggggtgggctacctccatgaggggcttagccccatggaacggaggctcgtcgagcaactcttttcaagcggcgcaatccaggtggtcgtagctagtaggtctctgtgctggggaatgaatgttgctgcccacttggttatcattatggatacccagtattataacggaaaaatacatgcatacgtcgattatcctatctacgatgttctgcagatggttggccatgccaatagaccacttcaggacgatgaggggaggtgtgtgattatgtgtcaaggctcaaagaaggatttctttaagaagtttctatacgagccgctcccagtcgaatcccacctggatcattgtatgcacgaccactttaatgccgagattgtgacaaaaactatcgagaacaagcaggacgccgtggattatcttacatggactttcctgtatcgtcgcatgacccagaacccgaactactacaacctgcagggaatttcccatcgccatctctccgaccacctctctgaactcgtggagcagacccttagtgacctggaacagagtaaatgtatcagcatagaggatgagatggacgttgcacctctgaacctcggtatgatcgccgcatattattatatcaactacacaaccatagagcttttttcaatgtcactgaacgcgaagactaaagttcggggacttattgagatcatttctaatgctgccgaatacgagaacatcccaatccgacaccacgaagacaatctgttgagacagttggctcaaaaagtgcctcataaactgaacaatcccaaattcaacgacccccacgtgaagacaaatctattgctccaagcccacttgtcgaggatgcagctctccgccgaactgcagtcggatacggaagagatcctgtccaaggccatccgcctgattcaggcctgcgttgacgtgctgagttctaatggctggctatcgcctgcccttgcggcaatggagctggctcaaatggtcactcaggccatgtggagtaaagatagttacttgaagcagttaccgcacttcactagtgaacacatcaaacggtgcacggacaagggcgttgagtccgttttcgatatcatggagatggaggacgaggagaggaacgcccttctgcaacttaccgatagtcagattgccgatgtggcaaggttttgcaataggtatcccaatatcgagcttagttacgaggttgtggataaggactcaatacgcagcggcggacctgtggtcgttctggtgcagttggagcgcgaggaagaagtaactgggccagtgatcgcaccattattcccgcagtttagggcaggtagaagcgggagccggctgtag

SEQ ID NO: 177450 - DNA, 1788 bp, Artificial Sequence
  derived and/or modified sequence
atggccaaaccagtctatcatgctattacaaaacatagtcccaaaaagccagttatcgtgtttgtacccagccggaagcagacccgcctgaccgccattgatatcttgaccacctgtgccgcagatatccagagacagcggtttctgcactgcaccgagaaggatcttatcccttatcttgaaaaattgtctgattcaacactgaaggaaacgctcctcaacggagttgggtacctacacgaaggactgtcccctatggagcggaggttagttgagcagctgtttagctctggagccatccaggtggttgtggcctcccgtagcctctgttgggggatgaatgtagccgctcatctcgtcatcattatggacacccagtactacaatgggaagattcatgcttatgtggattatcccatatacgacgtgctgcaaatggtgggtcacgccaatcggccacttcaggacgatgaaggcaggtgtgtcatcatgtgtcagggctctaagaaggattttttcaagaagttcctgtacgaacctctgcccgtggaaagccatctggatcattgcatgcatgaccacttcaacgcagagatagtcactaagaccatcgagaacaagcaagatgcagtggactacttaacctggactttcctctacaggcgcatgactcagaatcccaattactacaacctgcagggaattagccataggcatctctcggaccacctgagcgagctggttgaacagaccttgagtgatttggaacagagcaagtgtatcagtattgaagatgagatggatgtggctcccctgaatctcggtatgatcgccgcatactattatatcaattatacaaccatcgaactgttttcgatgagcctgaacgcaaagactaaggtaaggggactcatcgaaattatctccaatgctgccgagtacgaaaatattcccattcgccaccatgaggataaccttctgagacagctggctcagaaggttccccataaactcaacaaccctaagtttaatgatccccacgtcaaaacaaacctgctgctgcaggcacatctgagcaggatgcaactgagcgcggaactgcagtctgatacggaggagattctgagtaaggctattcggctcattcaggcttgcgttgatgtgctgtcatctaatggatggctgtctccagccctggccgctatggaattggcccaaatggtaacacaggctatgtggtctaaagactcttatcttaaacagcttccgcatttcacttctgagcacattaaaaggtgcaccgataagggcgtggagtctgtgttcgatatcatggagatggaagacgaggagcggaacgcccttcttcaacttacagattcccagatcgccgacgtggcacggttttgcaataggtaccctaacattgagctttcctatgaagtggtggacaaggatagtatccgtagcgggggacccgtagtggtgctcgtccagctggagcgggaggaggaggtgacaggccctgtgattgcgccactgttcccacagaagcgggaggagggctggtgggtggtgatcggagatgcaaagtcaaacagtctcatctccatcaagaggctcaccctgcagcagaaggcgaaggttaagttggatttcgtcgccccagccacaggtgcccataactataccctgtatttcatgtccgatgcttatatggggtgcgatcaggagtacaaattttctgtagacgtcaaggaggctgagaccgatagcgatagcgactag

SEQ ID NO: 177451 - DNA, 2325 bp, Artificial Sequence
  derived and/or modified sequence
atgatgatattatattgcaccctcctggccagcgctcagagcgaggcagaaaaggagcgcattatggggaagatggaagctgacccagagctgagcaagtttctgtaccagcttcacgagaccgagaaggaggacctgatccgggaggagcggtcaaggcgagagagagtgcggcagagcagaatggacaccgatcttgaaacgatggacctggatcagggaggggaggctttggccccacggcaagtactggacctggaagatctggtctttacacagggatctcatttcatggcaaataagcgctgccagcttcccgatggctcctttagacgccaacggaaaggatacgaggaagtgcacgtccctgccctcaagcccaagcccttcggtagtgaggaacaactgttgcctgtggagaagttgcctaagtacgcccaggctggctttgaagggttcaagactttaaacaggatccaatcaaagttgtacagggcggctctggagactgatgaaaaccttcttctttgcgcccctaccggagcaggtaagaccaatgtggcgctgatgtgtatgctgcgggagatcggcaagcatatcaatatggacggcactatcaacgttgatgacttcaagattatttacatagcgccaatgcgctctctggtccaggagatggtgggcagcttcgggaagcgactggccacttacggcattaccgtcgccgagttgactggcgatcaccagctctgcaaggaggaaatcagcgctacccagataattgtctgcacgccagagaagtgggatatcatcacccggaaggggggtgagagaacgtatacgcagctggtgcgcttaattatcctggatgagatccatctcctgcacgacgaccggggacctgttctcgaagccttagtggctagagctattaggaatatcgagatgacacaggaggacgtccgactgatcggactgagtgctaccctcccaaactacgaagatgtcgccacatttctgagggtcgacccggctaagggacttttttactttgacaacagtttcaggccagtcccactagaacagacatacgtagggatcacagagaagaaagctattaaacgctttcaaattatgaacgagatcgtgtacgagaaaataatggaacatgccggtaaaaatcaagtgctggtcttcgttcactcacgaaaagagactggcaaaactgccagagctataagggacatgtgcctggaaaaagataccttaggcttattcctccgcgaggggtcagcatccacagaggtcctcaggactgaagctgagcaatgtaagaacctcgaattgaaggatctgctgccttatgggtttgccattcaccacgctggaatgacccgagtggatagaacattggttgaggatctctttgccgacaagcacatccaggtcctggtaagcacggctaccctagcttggggagtgaacctgcctgcccataccgtgatcattaagggaacacaagtctactcacccgagaaggggaggtggaccgagctgggagccctggacatcctccaaatgctcgggagggccggaagaccccagtacgacactaagggcgagggcatcttgatcacttcccatggcgagcttcagtattacctgtcacttctgaatcagcagctccccattgaaagccagatggtctctaagctgccagatatgctgaatgctgagattgttctggggaacgtgcagaacgccaaagatgcagtcaactggctaggctacgcctacctttatatacggatgctgagatccccaacactgtatggaattagccatgatgacctgaagggggatcctctgcttgatcaacgccgtttagacctcgtgcacactgccgctcttatgctcgacaagaacaatctggtgaaatatgataagaagacaggaaactttcaagtcaccgagttaggaaggattgcatctcactactacataactaacgacactgtgcagacctataatcagctgcttaaaccaactctgtcagagatcgaactgttccgcgtgttttccctatcgagtgaattcaaaaacatcaccgtgagggaggaggagaagctagagttgcaaaagttgctcgaaagagtccctattcctgtgaaggagtcaattgaggaaccatctgccaagatcaatgtgttgctgcaggcgttcatctctcagctcaaactggaaggattcgccttgatggcagacatggtttatgtgacacaatccgctggacgcctgatgagagcaatcctgaagctgtcttag

SEQ ID NO: 177452 - DNA, 2160 bp, Artificial Sequence
  derived and/or modified sequence
atgctgcttcaaagcagcgagggaagatgtgtttatattacccccatggaagcactggctgagcaggtgtacatggactggtacgaaaagttccaggatcggctcaataaaaaagtggttctcctgaccggggaaaatggccctgtgttggaggtgatttgcagcagaatgcgctacattagctcacagatagaaagacctatccgaatcgtggcactcagctcaagtctgtctaatgctaaggatgtggcccactggctgggatgttccgccacttctactttcaatttccaccccaacgtgaggccggtgcctttagagctgcatattcagggatttaatattagtcatacacagactaggctcctttctatggccaagcctgtctatcacgcaatcacgaagcactcccctaagaagccggtgatagttttcgtcccatctagaaaacagactcgcctgaccgctattgatatcctgactacatgcgccgctgacatccagcgccaacgattcttacattgcaccgagaaggatctcattccctatctcgaaaagctttccgattctactctgaaagaaactctcctgaatggcgtagggtacctgcacgagggactgtcccctatggaacgaaggctggtcgagcagctgttcagctccggagctatccaggtcgttgtggcaagcaggtcactgtgctggggtatgaatgtcgctgcccacctcgtgataatcatggacacgcagtactataatgggaaaatccacgcctacgtggactacccaatttacgacgttctgcaaatggtgggccatgccaataggcctttgcaggacgacgagggcagatgcgtgatcatgtgccaaggaagcaaaaaggatttcttcaaaaagtttttatacgagcctctgcctgtggagtctcacctcgatcactgcatgcatgatcattttaatgccgagatcgttacaaagaccatcgagaataaacaagacgccgtagattacctgacatggacttttctgtatcggagaatgactcagaaccccaattactacaatctccagggaatctctcatagacacctgtccgaccacttgtcagagctggttgaacagacgttgagtgacctggagcagagcaagtgcattagtatagaagatgaaatggacgtcgcccctcttaacctcggcatgatcgctgcctactactacatcaattatacaactatcgaactgttcagcatgtcattgaacgccaagacgaaagtcagagggttaattgagataatcagcaacgcggcagagtacgaaaatatcccgattaggcatcacgaagacaacctcctgagacaactggcccaaaaagtaccccataagctgaataacccaaaattcaatgacccgcacgtaaagactaaccttttgttacaggcccatctttcgcggatgcaactctcagcggagctgcagagcgacacagaggagatactgtctaaggccatccgcctcatccaggcctgcgtcgatgtattatcaagcaacggttggctgagtccagcccttgccgctatggagttggcacagatggtcacacaggcaatgtggagtaaagactcgtacctcaaacagcttccacactttactagcgaacatatcaaacggtgcactgataaaggggtggagagcgtgtttgacatcatggagatggaggatgaggagagaaatgcactgctgcagctcaccgatagccaaattgcagacgtcgcacgcttctgcaaccgctaccccaatatcgaattgagttacgaagttgtggacaaagatagtatcagatcaggcggtccggtcgtggttctcgtccagttggagcgagaagaagaggtgaccgggcctgtgattgcacctctgttccctcagaaaagagaggaaggttggtgggtcgtgataggcgacgcgaaaagtaacagcctcatctccatcaagcggcttaccctgcagcaaaaagcaaaagtaaagctagacttcgtcgcacctgctactggggcacataattatactttatattttatgtcagacgcctatatgggctgcgaccaggagtataaattttctgtagatgttaaagaagcagagacagacagtgattcagactag

SEQ ID NO: 177453 - DNA, 7165 bp, Artificial Sequence
  derived and/or modified sequence
cgggagcagagatctgcggccgtttgcagcttgcggtagggaggcgtggtggtctgaagcctccgagcagccgcggccatggcggatgtaaccgcccgtagtctgcaatacgagtacaaggcgaactcgaatcttgtgctccaagctgaccgttctctcattgaccggacccgccgggatgaacccacaggagaggtgctgtcccttgttgggaagctggagggcacccgtatgggagacaaggctcaacggaccaaaccgcagatgcaggaggaaagaagagccaagcgaagaaagcgtgatgaggaccggcatgacatcaacaagatgaagggttatactctgctgtcggagggcattgatgagatggtgggcatcatctacaagcccaaaactaaagagactcgggagacctatgaggtgctactcagcttcatccaggctgctcttggggaccagccacgtgatatcctttgtggggcagctgatgaagttctagctgttctaaagaatgaaaagctgcgggacaaggaaaggcgaaaggagattgacctgctgctgggtcaaacagatgataccagataccatgtgctagtgaacctgggcaaaaagatcacagactatggtggagataaggaaatccaaaatatggatgacaacattgatgagacatacggtgtgaatgtgcagtttgagtctgatgaggaggaaggtgatgaagacgtatacggggaggttcgagaagaggcatctgatgatgacatggaaggggacgaggctgtcgtgcgctgcaccctctcggctaatctcgtagcctcaggtgaactgatgagttccaagaagaaggatttgcaccctcgggatattgatgcattttggctgcagcggcagctcagtcgtttctatgatgatgccatcgtgtcgcagaagaaggcagatgaagtattggagattttgaagacggccagtgatgatcgggaatgtgaaaatcagctggttctgctgcttggtttcaacacctttgatttcattaaagtgttgcggcagcacaggatgatgattttatactgtaccttgctggccagtgcacaaagtgaagctgaaaaggaaaggattatgggaaagatggaagctgacccagagctatccaagttcctctaccagcttcatgaaaccgagaaggaggatctgatccgagaggaaaggtcccggagagagcgagtgcgtcagtctcgaatggacacagatctggaaaccatggatctcgaccagggtggagaggcactggctccacggcaggttctggacttggaggacctggtttttacccaagggagccactttatggccaataaacgctgtcagcttcctgatggatccttccgtcgccagcgtaagggctatgaagaggtgcatgtgcctgctctgaagcccaagccctttggctcagaagaacaactgcttccagtggaaaagctgccaaagtatgcccaggctgggtttgagggcttcaaaacactgaatcggatccagagtaagctctaccgtgctgcccttgagacggatgagaatctgctgctgtgtgctcctactggtgctgggaagaccaacgtggccctgatgtgcatgctccgagagattgggaaacacataaacatggacggcaccatcaatgtggatgacttcaagattatctacattgcccccatgcgctccttggtgcaggagatggtgggcagctttggaaagcgcctggccacttatggcatcactgttgctgaactgactggggaccaccagctgtgcaaagaagagatcagtgccactcagatcatcgtctgcacccccgagaagtgggacatcatcacccgcaagggtggtgagcgcacctacacccagctggtgcggctcatcattctggatgagattcatcttctccacgatgacagaggtcctgtcttagaagctttagtggccagggccatccgaaacattgagatgacccaagaggatgtccgactcattggtctcagtgccaccctacccaactatgaagatgtagccacctttctacgtgttgaccctgccaagggtctcttttactttgacaacagcttccgtccagtgcctctggaacagacatatgtgggtatcacagagaaaaaagctatcaagcgtttccagatcatgaatgaaatcgtctatgaaaaaatcatggaacatgctggaaaaaatcaggtgctggtgtttgtccactcccggaaggagactggaaagacagccagggccatccgggacatgtgcctagaaaaggacactctgggtctgtttctgagggagggctcagcctccacagaagtcctgcgaacagaagctgagcagtgcaagaacctagagctgaaggatcttctgccttatggctttgctattcatcacgcaggcatgaccagggttgaccgaacactcgtggaggatctttttgctgataaacatattcaggttttagtttccacagcaactctagcttggggtgtgaatctccctgcacatacagtcatcatcaaaggcacccaggtgtacagtccagagaaggggcgttggacagaactgggagcactggacattctgcagatgctgggacgtgccggaagaccccagtatgacaccaagggtgaaggcatactcatcacatctcatggggagctacagtactacctgtccctcctcaatcaacaacttcctattgaaagccagatggtttcaaagcttcctgacatgctcaatgcagaaatcgtgctaggaaatgtccagaatgccaaggatgcggtgaactggctgggctatgcctacctctatatccgaatgctgcgatccccaaccctctatggcatctctcatgatgacctcaagggagatcccctgctggaccagcgccgactagatctggttcatacagctgccctgatgctggacaagaacaatctggtcaagtacgacaagaagacgggcaacttccaggtgacagaactgggccgtatagccagccactactacatcaccaatgatacagtgcagacttacaaccagctgctgaagcccaccctgagtgagattgagcttttcagggtcttctcattgtcctctgagttcaagaacatcacagtgagagaggaggagaagctggagctgcagaagttgctggagagggtgcctatccctgtaaaggagagcattgaggaacccagtgctaagatcaacgttcttctgcaagccttcatctcacagctgaaattggagggctttgcactgatggctgacatggtgtatgtcacacagtcggctggccggttgatgcgagcgatatttgaaattgtcctgaaccgaggttgggcacagcttacagacaagaccctgaacctctgcaagatgatcgacaaacgcatgtggcagtccatgtgtcctctgcgccagttccggaaactccctgaggaagtagtgaagaagattgagaagaagaatttcccctttgagcgtctgtacgacctgaatcataatgagattggggagcttatccgcatgccaaagatggggaagaccatccacaaatatgtccatctgtttcccaagttggagttgtcagtgcacctgcagcctatcacacgctccaccctgaaggtggagctgaccatcacgccagacttccagtgggatgaaaaggtgcatggttcatccgaggctttttggattctggtggaggatgtggacagcgaggtgattctgcaccatgagtattttctcctcaaggccaagtacgcccaggacgagcacctcattacattcttcgtgcctgtctttgaaccgctgccccctcagtacttcatccgagtggtgtctgaccgctggctctcttgtgagacccagctgcctgtctccttccggcacctgatcttgccggagaagtacccccctccaaccgaacttttggacctgcagcccttgcccgtgtctgctctgagaaacagtgcctttgagagtctttaccaagataaatttcctttcttcaatcccatccagacccaggtgtttaacactgtatacaacagtgacgacaacgtgtttgtgggggcccccacgggcagcgggaagactatttgtgcagagtttgccatcctgcgaatgctgctgcagagctcggaggggcgctgtgtgtacatcacccccatggaggccctggcagagcaggtatacatggactggtacgagaagttccaggacaggctcaacaagaaggtggtactcctgacaggcgagaccagcacagacctgaagctgctgggcaaagggaacattatcatcagcacccctgagaagtgggacatactttcccggcgatggaagcagcgcaagaacgtgcagaacatcaacctcttcgtggtggatgaggtccaccttatcgggggcgagaatgggcctgtcttagaagtgatctgctcccgaatgcgctacatctcctcccagattgagcggcccattcgcattgtggcactcagctcttcgctctccaatgccaaggatgtggcccactggctgggctgcagtgccacctccaccttcaacttccatcccaatgtgcgtcccgtccccttggagctgcacatccagggcttcaacatcagccatacacaaacccgcctgctctccatggccaagcctgtgtaccatgctatcaccaagcactcgcccaagaagcctgtcattgtctttgtgccgtctcgcaagcagacccgcctcactgccattgacatcctcaccacctgtgcagcagacatccaacggcagaggttcttgcactgcaccgagaaggatctgattccgtacctggagaagctaagtgacagcacgctcaaggaaacgctgctaaatggggtgggctacctgcatgaggggctcagccccatggagcgacgcctggtggagcagctcttcagctcaggggctatccaggtggtggtggcttctcggagtctctgctggggcatgaacgtggctgcccacctggtaatcatcatggatacccagtactacaatggcaagatccacgcctatgtggattaccccatctatgacgtgcttcagatggtgggccacgccaaccgccctttgcaggacgatgaggggcgctgtgtcatcatgtgtcagggctccaagaaggatttcttcaagaagttcttatatgagccattgccagtagaatctcacctggaccactgtatgcatgaccacttcaatgctgagatcgtcaccaagaccattgagaacaagcaggatgctgtggactacctcacctggacctttctgtaccgccgcatgacacagaaccccaattactacaacctgcagggcatctcccatcgtcacttgtcggaccacttgtcagagctggtggagcagaccctgagtgacctggagcagtccaagtgcatcagcatcgaggacgagatggacgtggcgcctctgaacctaggcatgatcgccgcctactattacatcaactacaccaccattgagctcttcagcatgtccctcaatgccaagaccaaggtgcgagggcttatcgagatcatctccaatgcagcagagtatgagaacattcccatccggcaccatgaagacaatctcctgaggcagttggctcagaaggtcccccacaagctgaataaccctaagttcaatgatccgcacgtcaagaccaacctgctcctgcaggctcacttgtctcgcatgcagctgagtgctgagttgcagtcagatacggaggaaatccttagtaaggcaatccggctcatccaggcctgcgtggatgtcctttccagcaatgggtggctcagccctgctctggcagctatggaactggcccagatggtcacccaagccatgtggtccaaggactcatacctgaagcagctgccacacttcacctctgagcatatcaaacgttgcacagacaagggagtggagagtgttttcgacatcatggagatggaggatgaagaacggaacgcgttgcttcagctgactgacagccagattgcagatgtggctcgcttttgtaaccgctaccctaatatcgaactatcttatgaggtggtagataaggacagcatccgcagtggcgggccagttgtggtgctggtgcagctggagcgagaggaggaagtcacaggccctgtcattgcgcctctcttcccgcagaaacgtgaagagggctggtgggtggtgattggagatgccaagtccaatagcctcatctccatcaagaggctgaccttgcagcagaaggccaaggtgaagttggactttgtggccccagccactggtgcccacaactacactctgtacttcatgagtgacgcttacatgggatgtgaccaggagtacaaattcagcgtggatgtgaaagaagctgagacagacagtgattcagattgagtcctgaggcatttacttttgggtaaaggagagttgagcctgaattaggaatgtgtacattgtaggaatcctggttgtggggaccaggtctgtgggcctcaggtctggccagccagggctggtgctgtccccgcctacctccacttcctttcccttgctcactctggatccagtgacagcaggtgtcatgggtcaagcataaatcatatatagcattttcaggcatgttcctggtagttcttttgagtctgacattctaataaaataatttgtagaaaccatttgtctttgtagtgattccaaattaaaagttttctttctccaacctgagggcacggccaaaaagatctggttattttttagccaggaacgtgcttgttaatgagtatgtctggaggacagacctgctcattaggtgtgctgtcccctgtagcctcgtgagtcagcccagaggagggtacatgcgactgtggcctggcctcagtggtacccacacatcagcactaccacaagaaccaacactgagcctcggaagctagatcacaggttaggggtttctctagatgggggttctgaaatttgcagtgtctgctcctgggaggcagcaccagaaagggcactgaaatgtactagctggatgtgacccagtcttaataaacaggttttctaatccaga

SEQ ID NO: 177454 - DNA, 2673 bp, Artificial Sequence
  derived and/or modified sequence
cttttccttccccagtgcgtctttcctgcgtcgttccggcgcggcgggagcagagatctgcggccgtttgcagcttgcggtagggaggcgtggtggtctgaagcctccgagcagccgcggccatggcggatgtaaccgcccgtagtctgcaatacgagtacaaggcgaactcgaatcttgtgctccaagctgaccgttctctcattgaccggacccgccgggatgaacccacaggagaggtgctgtcccttgttgggaagctggagggcacccgtatgggagacaaggctcaacggaccaaaccgcagatgcaggaggaaagaagagccaagcgaagaaagcgtgatgaggaccggcatgacatcaacaagatgaagggttatactctgctgtcggagggcattgatgagatggtgggcatcatctacaagcccaaaactaaagagactcgggagacctatgaggtgctactcagcttcatccaggctgctcttggggaccagccacgtgatatcctttgtggggcagctgatgaagttctagctgttctaaagaatgaaaagctgcgggacaaggaaaggcgaaaggagattgacctgctgctgggtcaaacagatgataccagataccatgtgctagtgaacctgggcaaaaagatcacagactatggtggagataaggaaatccaaaatatggatgacaacattgatgagacatacggtgtgaatgtgcagtttgagtctgatgaggaggaaggtgatgaagacgtatacggggaggttcgagaagaggcatctgatgatgacatggaaggggacgaggctgtcgtgcgctgcaccctctcggctaatctcgtagcctcaggtgaactgatgagttccaagaagaaggatttgcaccctcgggatattgatgcattttggctgcagcggcagctcagtcgtttctatgatgatgccatcgtgtcgcagaagaaggcagatgaagtattggagattttgaagacggccagtgatgatcgggaatgtgaaaatcagctggttctgctgcttggtttcaacacctttgatttcattaaagtgttgcggcagcacaggatgatgattttatactgtaccttgctggccagtgcacaaagtgaagctgaaaaggaaaggattatgggaaagatggaagctgacccagagctatccaagttcctctaccagcttcatgaaaccgagaaggaggatctgatccgagaggaaaggtcccggagagagcgagtgcgtcagtctcgaatggacacagatctggaaaccatggatctcgaccagggtggagaggcactggctccacggcaggttctggacttggaggacctggtttttacccaagggagccactttatggccaataaacgctgtcagcttcctgatggatccttccgtcgccagcgtaagggctatgaagaggtgcatgtgcctgctctgaagcccaagccctttggctcagaagaacaactgcttccagtggaaaagctgccaaagtatgcccaggctgggtttgagggcttcaaaacactgaatcggatccagagtaagctctaccgtgctgcccttgagacggatgagaatctgctgctgtgtgctcctactggtgctgggaagaccaacgtggccctgatgtgcatgctccgagagattgggaaacacataaacatggacggcaccatcaatgtggatgacttcaagattatctacattgcccccatgcgctccttggtgcaggagatggtgggcagctttggaaagcgtgatgccaagtccaatagcctcatctccatcaagaggctgaccttgcagcagaaggccaaggtgaagttggactttgtggccccagccactggtgcccacaactacactctgtacttcatgagtgacgcttacatgggatgtgaccaggagtacaaattcagcgtggatgtgaaagaagctgagacagacagtgattcagattgagtcctgaggcatttacttttgggtaaaggagagttgagcctgaattaggaatgtgtacattgtaggaatcctggttgtggggaccaggtctgtgggcctcaggtctggccagccagggctggtgctgtccccgcctacctccacttcctttcccttgctcactctggatccagtgacagcaggtgtcatgggtcaagcataaatcatatatagcattttcaggcatgttcctggtagttcttttgagtctgacattctaataaaataatttgtagaaaccatttgtctttgtagtgattccaaattaaaagttttctttctccaacctgagggcacggccaaaaagatctggttattttttagccaggaacgtgcttgttaatgagtatgtctggaggacagacctgctcattaggtgtgctgtcccctgtagcctcgtgagtcagcccagaggagggtacatgcgactgtggcctggcctcagtggtacccacacatcagcactaccacaagaaccaacactgagcctcggaagctagatcacaggttaggggtttctctagatgggggttctgaaatttgcagtgtctgctcctgggaggcagcaccagaaagggcactgaaatgtactagctggatgtgacccagtcttaataaacaggttttctaatcc

SEQ ID NO: 177455 - DNA, 2637 bp, Artificial Sequence
  derived and/or modified sequence
ttgatacttacactgcttctttctgttggtttccagtgtttaacactgtatacaacagtgacgacaacgtgtttgtgggggcccccacgggcagcgggaagactatttgtgcagagtttgccatcctgcgaatgctgctgcagagctcggaggggcgctgtgtgtacatcacccccatggaggccctggcagagcaggcgagaccagcacagacctgaagctgctgggcaaagggaacattatcatcagcacccctgagaagtgggacatactttcccggcgatggaagcagcgcaagaacgtgcagaacatcaacctcttcgtggtggatgaggtccaccttatcgggggcgagaatgggcctgtcttagaagtgatctgctcccgaatgcgctacatctcctcccagattgagcggcccattcgcattgtggcactcagctcttcgctctccaatgccaaggatgtggcccactggctgggctgcagtgccacctccaccttcaacttccatcccaatgtgcgtcccgtccccttggagctgcacatccagggcttcaacatcagccatacacaaacccgcctgctctccatggccaagcctgtgtaccatgctatcaccaagcactcgcccaagaagcctgtcattgtctttgtgccgtctcgcaagcagacccgcctcactgccattgacatcctcaccacctgtgcagcagacatccaacggcagaggttcttgcactgcaccgagaaggatctgattccgtacctggagaagctaagtgacagcacgctcaaggaaacgctgctaaatggggtgggctacctgcatgaggggctcagccccatggagcgacgcctggtggagcagctcttcagctcaggggctatccaggtggtggtggcttctcggagtctctgctggggcatgaacgtggctgcccacctggtaatcatcatggatacccagtactacaatggcaagatccacgcctatgtggattaccccatctatgacgtgcttcagatggtgggccacgccaaccgccctttgcaggacgatgaggggcgctgtgtcatcatgtgtcagggctccaagaaggatttcttcaagaagttcttatatgagccattgccagtagaatctcacctggaccactgtatgcatgaccacttcaatgctgagatcgtcaccaagaccattgagaacaagcaggatgctgtggactacctcacctggacctttctgtaccgccgcatgacacagaaccccaattactacaacctgcagggcatctcccatcgtcacttgtcggaccacttgtcagagctggtggagcagaccctgagtgacctggagcagtccaagtgcatcagcatcgaggacgagatggacgtggcgcctctgaacctaggcatgatcgccgcctactattacatcaactacaccaccattgagctcttcagcatgtccctcaatgccaagaccaaggtgcgagggcttatcgagatcatctccaatgcagcagagtatgagaacattcccatccggcaccatgaagacaatctcctgaggcagttggctcagaaggtcccccacaagctgaataaccctaagttcaatgatccgcacgtcaagaccaacctgctcctgcaggctcacttgtctcgcatgcagctgagtgctgagttgcagtcagatacggaggaaatccttagtaaggcaatccggctcatccaggcctgcgtggatgtcctttccagcaatgggtggctcagccctgctctggcagctatggaactggcccagatggtcacccaagccatgtggtccaaggactcatacctgaagcagctgccacacttcacctctgagcatatcaaacgttgcacagacaagggagtggagagtgttttcgacatcatggagatggaggatgaagaacggaacgcgttgcttcagctgactgacagccagattgcagatgtggctcgcttttgtaaccgctaccctaatatcgaactatcttatgaggtggtagataaggacagcatccgcagtggcgggccagttgtggtgctggtgcagctggagcgagaggaggaagtcacaggccctgtcattgcgcctctcttcccgcagtttagggccgggcgcagtggctcacgcctgtaatcccagcactttgggaggccaaggcgggcggatcacgaggtcaggagttcgagaccagcctggccaacatagtgaaaccccgtctctactaaaaatacaaaaattagctgtgcgtggtggtgggcacctgtagtcccagctactcaggaggttgagtcaggagaatggtgtgaacccaggaggcggaggctgcagcgagccgagattgccccactgcacaccagcccagaaacgtgaagagggctggtgggtggtgattggagatgccaagtccaatagcctcatctccatcaagaggctgaccttgcagcagaaggccaaggtgaagttggactttgtggccccagccactggtgcccacaactacactctgtacttcatgagtgacgcttacatgggatgtgaccaggagtacaaattcagcgtggatgtgaaagaagctgagacagacagtgattcag

SEQ ID NO: 177456 - DNA, 2541 bp, Artificial Sequence
  derived and/or modified sequence
gtttgcagcttgcggtagggaggcgtggtggtctgaagcctccgagcagccgcggccatggcggatgtaaccgcccgtagtctgcaatacgagtacaaggcgaactcgaatcttgtgctccaagctgaccgttctctcattgaccggacccgccgggatgaacccacaggagaggtgctgtcccttgttgggaagctggagggcacccgtatgggagacaaggctcaacggaccaaaccgcagatgcaggaggaaagaagagccatacacaaacccgcctgctctccatggccaagcctgtgtaccatgctatcaccaagcactcgcccaagaagcctgtcattgtctttgtgccgtctcgcaagcagacccgcctcactgccattgacatcctcaccacctgtgcagcagacatccaacggcagaggttcttgcactgcaccgagaaggatctgattccgtacctggagaagctaagtgacagcacgctcaaggaaacgctgctaaatggggtgggctacctgcatgaggggctcagccccatggagcgacgcctggtggagcagctcttcagctcaggggctatccaggtggtggtggcttctcggagtctctgctggggcatgaacgtggctgcccacctggtaatcatcatggatacccagtactacaatggcaagatccacgcctatgtggattaccccatctatgacgtgcttcagatggtgggccacgccaaccgccctttgcaggacgatgaggggcgctgtgtcatcatgtgtcagggctccaagaaggatttcttcaagaagttcttatatgagccattgccagtagaatctcacctggaccactgtatgcatgaccacttcaatgctgagatcgtcaccaagaccattgagaacaagcaggatgctgtggactacctcacctggacctttctgtaccgccgcatgacacagaaccccaattactacaacctgcagggcatctcccatcgtcacttgtcggaccacttgtcagagctggtggagcagaccctgagtgacctggagcagtccaagtgcatcagcatcgaggacgagatggacgtggcgcctctgaacctaggcatgatcgccgcctactattacatcaactacaccaccattgagctcttcagcatgtccctcaatgccaagaccaaggtgcgagggcttatcgagatcatctccaatgcagcagagtatgagaacattcccatccggcaccatgaagacaatctcctgaggcagttggctcagaaggtcccccacaagctgaataaccctaagttcaatgatccgcacgtcaagaccaacctgctcctgcaggctcacttgtctcgcatgcagctgagtgctgagttgcagtcagatacggaggaaatccttagtaaggcaatccggctcatccaggcctgcgtggatgtcctttccagcaatgggtggctcagccctgctctggcagctatggaactggcccagatggtcacccaagccatgtggtccaaggactcatacctgaagcagctgccacacttcacctctgagcatatcaaacgttgcacagacaagggagtggagagtgttttcgacatcatggagatggaggatgaagaacggaacgcgttgcttcagctgactgacagccagattgcagatgtggctcgcttttgtaaccgctaccctaatatcgaactatcttatgaggtggtagataaggacagcatccgcagtggcgggccagttgtggtgctggtgcagctggagcgagaggaggaagtcacaggccctgtcattgcgcctctcttcccgcagaaacgtgaagagggctggtgggtggtgattggagatgccaagtccaatagcctcatctccatcaagaggctgaccttgcagcagaaggccaaggtgaagttggactttgtggccccagccactggtgcccacaactacactctgtacttcatgagtgacgcttacatgggatgtgaccaggagtacaaattcagcgtggatgtgaaagaagctgagacagacagtgattcagattgagtcctgaggcatttacttttgggtaaaggagagttgagcctgaattaggaatgtgtacattgtaggaatcctggttgtggggaccaggtctgtgggcctcaggtctggccagccagggctggtgctgtccccgcctacctccacttcctttcccttgctcactctggatccagtgacagcaggtgtcatgggtcaagcataaatcatatatagcattttcaggcatgttcctggtagttcttttgagtctgacattctaataaaataatttgtagaaaccatttgtctttgtagtgattccaaattaaaagttttctttctccaacctgagggcacggccaaaaagatctggttattttttagccaggaacgtgcttgttaatgagtatgtctggaggacagacctgctcattaggtgtgctgtcccctgtagcctcgtgagtcagcccagaggagggtacatgcg

SEQ ID NO: 177457 - DNA, 5834 bp, Artificial Sequence
  derived and/or modified sequence
cagatgaagtattggagattttgaagacggccagtgatgatcgggaatgtgaaaatcagctggttctgctgcttggtttcaacacctttgatttcattaaagtgttgcggcagcacaggatgatgattttatactgtaccttgctggccagtgcacaaagtgaagctgaaaaggaaaggattatgggaaagatggaagctgacccagagctatccaagttcctctaccagcttcatgaaaccgagaaggaggatctgatccgagaggaaaggtcccggagagagcgagtgcgtcagtctcgaatggacacagatctggaaaccatggatctcgaccagggtggagaggcactggctccacggcaggttctggacttggaggacctggtttttacccaagggagccactttatggccaataaacgctgtcagcttcctgatggatccttccgtcgccagcgtaagggctatgaagaggtgcatgtgcctgctctgaagcccaagccctttggctcagaagaacaactgcttccagtggaaaagctgccaaagtatgcccaggctgggtttgagggcttcaaaacactgaatcggatccagagtaagctctaccgtgctgcccttgagacggatgagaatctgctgctgtgtgctcctactggtgctgggaagaccaacgtggccctgatgtgcatgctccgagagattgggaaacacataaacatggacggcaccatcaatgtggatgacttcaagattatctacattgcccccatgcgctccttggtgcaggagatggtgggcagctttggaaagcgcctggccacttatggcatcactgttgctgaactgactggggaccaccagctgtgcaaagaagagatcagtgccactcagatcatcgtctgcacccccgagaagtgggacatcatcacccgcaagggtggtgagcgcacctacacccagctggtgcggctcatcattctggatgagattcatcttctccacgatgacagaggtcctgtcttagaagctttagtggccagggccatccgaaacattgagatgacccaagaggatgtccgactcattggtctcagtgccaccctacccaactatgaagatgtagccacctttctacgtgttgaccctgccaagggtctcttttactttgacaacagcttccgtccagtgcctctggaacagacatatgtgggtatcacagagaaaaaagctatcaagcgtttccagatcatgaatgaaatcgtctatgaaaaaatcatggaacatgctggaaaaaatcaggtgctggtgtttgtccactcccggaaggagactggaaagacagccagggccatccgggacatgtgcctagaaaaggacactctgggtctgtttctgagggagggctcagcctccacagaagtcctgcgaacagaagctgagcagtgcaagaacctagagctgaaggatcttctgccttatggctttgctattcatcacgcaggcatgaccagggttgaccgaacactcgtggaggatctttttgctgataaacatattcaggttttagtttccacagcaactctagcttggggtgtgaatctccctgcacatacagtcatcatcaaaggcacccaggtgtacagtccagagaaggggcgttggacagaactgggagcactggacattctgcagatgctgggacgtgccggaagaccccagtatgacaccaagggtgaaggcatactcatcacatctcatggggagctacagtactacctgtccctcctcaatcaacaacttcctattgaaagccagatggtttcaaagcttcctgacatgctcaatgcagaaatcgtgctaggaaatgtccagaatgccaaggatgcggtgaactggctgggctatgcctacctctatatccgaatgctgcgatccccaaccctctatggcatctctcatgatgacctcaagggagatcccctgctggaccagcgccgactagatctggttcatacagctgccctgatgctggacaagaacaatctggtcaagtacgacaagaagacgggcaacttccaggtgacagaactgggccgtatagccagccactactacatcaccaatgatacagtgcagacttacaaccagctgctgaagcccaccctgagtgagattgagcttttcagggtcttctcattgtcctctgagttcaagaacatcacagtgagagaggaggagaagctggagctgcagaagttgctggagagggtgcctatccctgtaaaggagagcattgaggaacccagtgctaagatcaacgttcttctgcaagccttcatctcacagctgaaattggagggctttgcactgatggctgacatggtgtatgtcacacagtcggctggccggttgatgcgagcgatattgaaattgtcctgaaccgaggttgggcacagcttacagacaagaccctgaacctctgcaagatgatcgacaaacgcatgtggcagtccatgtgtcctctgcgccagttccggaaactccctgaggaagtagtgaagaagattgagaagaagaatttcccctttgagcgtctgtacgacctgaatcataatgagattggggagcttatccgcatgccaaagatggggaagaccatccacaaatatgtccatctgtttcccaagttggagttgtcagtgcacctgcagcctatcacacgctccaccctgaaggtggagctgaccatcacgccagacttccagtgggatgaaaaggtgcatggttcatccgaggctttttggattctggtggaggatgtggacagcgaggtgattctgcaccatgagtattttctcctcaaggccaagtacgcccaggacgagcacctcattacattcttcgtgcctgtctttgaaccgctgccccctcagtacttcatccgagtggtgtctgaccgctggctctcttgtgagacccagctgcctgtctccttccggcacctgatcttgccggagaagtacccccctccaaccgaacttttggacctgcagcccttgcccgtgtctgctctgagaaacagtgcctttgagagtctttaccaagataaatttcctttcttcaatcccatccagacccaggtgtttaacactgtatacaacagtgacgacaacgtgtttgtgggggcccccacgggcagcgggaagactatttgtgcagagtttgccatcctgcgaatgctgctgcagagctcggaggggcgctgtgtgtacatcacccccatggaggccctggcagagcaggtatacatggactggtacgagaagttccaggacaggctcaacaagaaggtggtactcctgacaggcgagaccagcacagacctgaagctgctgggcaaagggaacattatcatcagcacccctgagaagtgggacatactttcccggcgatggaagcagcgcaagaacgtgcagaacatcaacctcttcgtggtggatgaggtccaccttatcgggggcgagaatgggcctgtcttagaagtgatctgctcccgaatgcgctacatctcctcccagattgagcggcccattcgcattgtggcactcagctcttcgctctccaatgccaaggatgtggcccactggctgggctgcagtgccacctccaccttcaacttccatcccaatgtgcgtcccgtccccttggagctgcacatccagggcttcaacatcagccatacacaaacccgcctgctctccatggccaagcctgtgtaccatgctatcaccaagcactcgcccaagaagcctgtcattgtctttgtgccgtctcgcaagcagacccgcctcactgccattgacatcctcaccacctgtgcagcagacatccaacggcagaggttcttgcactgcaccgagaaggatctgattccgtacctggagaagctaagtgacagcacgctcaaggaaacgctgctaaatggggtgggctacctgcatgaggggctcagccccatggagcgacgcctggtggagcagctcttcagctcaggggctatccaggtggtggtggcttctcggagtctctgctggggcatgaacgtggctgcccacctggtaatcatcatggatacccagtactacaatggcaagatccacgcctatgtggattaccccatctatgacgtgcttcagatggtgggccacgccaaccgccctttgcaggacgatgaggggcgctgtgtcatcatgtgtcagggctccaagaaggatttcttcaagaagttcttatatgagccattgccagtagaatctcacctggaccactgtatgcatgaccacttcaatgctgagatcgtcaccaagaccattgagaacaagcaggatgctgtggactacctcacctggacctttctgtaccgccgcatgacacagaaccccaattactacaacctgcagggcatctcccatcgtcacttgtcggaccacttgtcagagctggtggagcagaccctgagtgacctggagcagtccaagtgcatcagcatcgaggacgagatggacgtggcgcctctgaacctaggcatgatcgccgcctactattacatcaactacaccaccattgagctcttcagcatgtccctcaatgccaagaccaaggtgcgagggcttatcgagatcatctccaatgcagcagagtatgagaacattcccatccggcaccatgaagacaatctcctgaggcagttggctcagaaggtcccccacaagctgaataaccctaagttcaatgatccgcacgtcaagaccaacctgctcctgcaggctcacttgtctcgcatgcagctgagtgctgagttgcagtcagatacggaggaaatccttagtaaggcaatccggctcatccaggcctgcgtggatgtcctttccagcaatgggtggctcagccctgctctggcagctatggaactggcccagatggtcacccaagccatgtggtccaaggactcatacctgaagcagctgccacacttcacctctgagcatatcaaacgttgcacagacaagggagtggagagtgttttcgacatcatggagatggaggatgaagaacggaacgcgttgcttcagctgactgacagccagattgcagatgtggctcgcttttgtaaccgctaccctaatatcgaactatcttatgaggtggtagataaggacagcatccgcagtggcgggccagttgtggtgctggtgcagctggagcgagaggaggaagtcacaggccctgtcattgcgcctctcttcccgcagaaacgtgaagagggctggtgggtggtgattggagatgccaagtccaatagcctcatctccatcaagaggctgaccttgcagcagaaggccaaggtgaagttggactttgtggccccagccactggtgcccacaactacactctgtacttcatgagtgacgcttacatgggatgtgaccaggagtacaaattcagcgtggatgtgaaagaagctgagacagacagtgattcagattgagtcctgaggcatttacttttgggtaaaggagagttgagcctgaattaggaatgtgtacattgtaggaatcctggttgtggggaccaggtctgtgggcctcaggtctggccagccagggctggtgctgtccccgcctacctccacttcctttcccttgctcactctggatccagtgacagcaggtgtcatgggtcaagcataaatcatatatagcattttcaggcatgttcctggtagttcttttgagtctgacattctaataaaataatttgtagaaacc

SEQ ID NO: 177458 - DNA, 2447 bp, Artificial Sequence
  derived and/or modified sequence
agtgacgacaacgtgtttgtgggggcccccacgggcagcgggaagactatttgtgcagagtttgccatcctgcgaatgctgctgcagagctcggaggggcgctgtgtgtacatcacccccatggaggccctggcagagcaggtatacatggactggtacgagaagttccaggacaggctcaacaagaaggtggtactcctgacaggcgagaatgggcctgtcttagaagtgatctgctcccgaatgcgctacatctcctcccagattgagcggcccattcgcattgtggcactcagctcttcgctctccaatgccaaggatgtggcccactggctgggctgcagtgccacctccaccttcaacttccatcccaatgtgcgtcccgtccccttggagctgcacatccagggcttcaacatcagccatacacaaacccgcctgctctccatggccaagcctgtgtaccatgctatcaccaagcactcgcccaagaagcctgtcattgtctttgtgccgtctcgcaagcagacccgcctcactgccattgacatcctcaccacctgtgcagcagacatccaacggcagaggttcttgcactgcaccgagaaggatctgattccgtacctggagaagctaagtgacagcacgctcaaggaaacgctgctaaatggggtgggctacctgcatgaggggctcagccccatggagcgacgcctggtggagcagctcttcagctcaggggctatccaggtggtggtggcttctcggagtctctgctggggcatgaacgtggctgcccacctggtaatcatcatggatacccagtactacaatggcaagatccacgcctatgtggattaccccatctatgacgtgcttcagatggtgggccacgccaaccgccctttgcaggacgatgaggggcgctgtgtcatcatgtgtcagggctccaagaaggatttcttcaagaagttcttatatgagccattgccagtagaatctcacctggaccactgtatgcatgaccacttcaatgctgagatcgtcaccaagaccattgagaacaagcaggatgctgtggactacctcacctggacctttctgtaccgccgcatgacacagaaccccaattactacaacctgcagggcatctcccatcgtcacttgtcggaccacttgtcagagctggtggagcagaccctgagtgacctggagcagtccaagtgcatcagcatcgaggacgagatggacgtggcgcctctgaacctaggcatgatcgccgcctactattacatcaactacaccaccattgagctcttcagcatgtccctcaatgccaagaccaaggtgcgagggcttatcgagatcatctccaatgcagcagagtatgagaacattcccatccggcaccatgaagacaatctcctgaggcagttggctcagaaggtcccccacaagctgaataaccctaagttcaatgatccgcacgtcaagaccaacctgctcctgcaggctcacttgtctcgcatgcagctgagtgctgagttgcagtcagatacggaggaaatccttagtaaggcaatccggctcatccaggcctgcgtggatgtcctttccagcaatgggtggctcagccctgctctggcagctatggaactggcccagatggtcacccaagccatgtggtccaaggactcatacctgaagcagctgccacacttcacctctgagcatatcaaacgttgcacagacaagggagtggagagtgttttcgacatcatggagatggaggatgaagaacggaacgcgttgcttcagctgactgacagccagattgcagatgtggctcgcttttgtaaccgctaccctaatatcgaactatcttatgaggtggtagataaggacagcatccgcagtggcgggccagttgtggtgctggtgcagctggagcgagaggaggaagtcacaggccctgtcattgcgcctctcttcccgcagaaacgtgaagagggctggtgggtggtgattggagatgccaagtccaatagcctcatctccatcaagaggctgaccttgcagcagaaggccaaggtgaagttggactttgtggccccagccactggtgcccacaactacactctgtacttcatgagtgacgcttacatgggatgtgaccaggagtacaaattcagcgtggatgtgaaagaagctgagacagacagtgattcagattgagtcctgaggcatttacttttgggtaaaggagagttgagcctgaattaggaatgtgtacattgtaggaatcctggttgtggggaccaggtctgtgggcctcaggtctggccagccagggctggtgctgtccccgcctacctccacttcctttcccttgctcactctggatccagtgacagcaggtgtcatgggtcaagcataaatcatatata

SEQ ID NO: 177459 - DNA, 6411 bp, Artificial Sequence
  derived and/or modified sequence
atggccgacgtgaccgccagaagcctgcagtacgagtacaaggccaacagcaacctggtgctgcaggccgacagaagcctgatcgacagaaccagaagagacgagcccaccggcgaggtgctgagcctggtgggcaagctggagggcaccagaatgggcgacaaggcccagagaaccaagccccagatgcaggaggagagaagagccaagagaagaaagagagacgaggacagacacgacatcaacaagatgaagggctacaccctgctgagcgagggcatcgacgagatggtgggcatcatctacaagcccaagaccaaggagaccagagagacctacgaggtgctgctgagcttcatccaggccgccctgggcgaccagcccagagacatcctgtgcggcgccgccgacgaggtgctggccgtgctgaagaacgagaagctgagagacaaggagagaagaaaggagatcgacctgctgctgggccagaccgacgacaccagataccacgtgctggtgaacctgggcaagaagatcaccgactacggcggcgacaaggagatccagaacatggacgacaacatcgacgagacctacggcgtgaacgtgcagttcgagagcgacgaggaggagggcgacgaggacgtgtacggcgaggtgagagaggaggccagcgacgacgacatggagggcgacgaggccgtggtgagatgcaccctgagcgccaacctggtggccagcggcgagctgatgagcagcaagaagaaggacctgcaccccagagacatcgacgccttctggctgcagagacagctgagcagattctacgacgacgccatcgtgagccagaagaaggccgacgaggtgctggagatcctgaagaccgccagcgacgacagagagtgcgagaaccagctggtgctgctgctgggcttcaacaccttcgacttcatcaaggtgctgagacagcacagaatgatgatcctgtactgcaccctgctggccagcgcccagagcgaggccgagaaggagagaatcatgggcaagatggaggccgaccccgagctgagcaagttcctgtaccagctgcacgagaccgagaaggaggacctgatcagagaggagagaagcagaagagagagagtgagacagagcagaatggacaccgacctggagaccatggacctggaccagggcggcgaggccctggcccccagacaggtgctggacctggaggacctggtgttcacccagggcagccacttcatggccaacaagagatgccagctgcccgacggcagcttcagaagacagagaaagggctacgaggaggtgcacgtgcccgccctgaagcccaagcccttcggcagcgaggagcagctgctgcccgtggagaagctgcccaagtacgcccaggccggcttcgagggcttcaagaccctgaacagaatccagagcaagctgtacagagccgccctggagaccgacgagaacctgctgctgtgcgcccccaccggcgccggcaagaccaacgtggccctgatgtgcatgctgagagagatcggcaagcacatcaacatggacggcaccatcaacgtggacgacttcaagatcatctacatcgcccccatgagaagcctggtgcaggagatggtgggcagcttcggcaagagactggccacctacggcatcaccgtggccgagctgaccggcgaccaccagctgtgcaaggaggagatcagcgccacccagatcatcgtgtgcacccccgagaagtgggacatcatcaccagaaagggcggcgagagaacctacacccagctggtgagactgatcatcctggacgagatccacctgctgcacgacgacagaggccccgtgctggaggccctggtggccagagccatcagaaacatcgagatgacccaggaggacgtgagactgatcggcctgagcgccaccctgcccaactacgaggacgtggccaccttcctgagagtggaccccgccaagggcctgttctacttcgacaacagcttcagacccgtgcccctggagcagacctacgtgggcatcaccgagaagaaggccatcaagagattccagatcatgaacgagatcgtgtacgagaagatcatggagcacgccggcaagaaccaggtgctggtgttcgtgcacagcagaaaggagaccggcaagaccgccagagccatcagagacatgtgcctggagaaggacaccctgggcctgttcctgagagagggcagcgccagcaccgaggtgctgagaaccgaggccgagcagtgcaagaacctggagctgaaggacctgctgccctacggcttcgccatccaccacgccggcatgaccagagtggacagaaccctggtggaggacctgttcgccgacaagcacatccaggtgctggtgagcaccgccaccctggcctggggcgtgaacctgcccgcccacaccgtgatcatcaagggcacccaggtgtacagccccgagaagggcagatggaccgagctgggcgccctggacatcctgcagatgctgggcagagccggcagaccccagtacgacaccaagggcgagggcatcctgatcaccagccacggcgagctgcagtactacctgagcctgctgaaccagcagctgcccatcgagagccagatggtgagcaagctgcccgacatgctgaacgccgagatcgtgctgggcaacgtgcagaacgccaaggacgccgtgaactggctgggctacgcctacctgtacatcagaatgctgagaagccccaccctgtacggcatcagccacgacgacctgaagggcgaccccctgctggaccagagaagactggacctggtgcacaccgccgccctgatgctggacaagaacaacctggtgaagtacgacaagaagaccggcaacttccaggtgaccgagctgggcagaatcgccagccactactacatcaccaacgacaccgtgcagacctacaaccagctgctgaagcccaccctgagcgagatcgagctgttcagagtgttcagcctgagcagcgagttcaagaacatcaccgtgagagaggaggagaagctggagctgcagaagctgctggagagagtgcccatccccgtgaaggagagcatcgaggagcccagcgccaagatcaacgtgctgctgcaggccttcatcagccagctgaagctggagggcttcgccctgatggccgacatggtgtacgtgacccagagcgccggcagactgatgagagccatcttcgagatcgtgctgaacagaggctgggcccagctgaccgacaagaccctgaacctgtgcaagatgatcgacaagagaatgtggcagagcatgtgccccctgagacagttcagaaagctgcccgaggaggtggtgaagaagatcgagaagaagaacttccccttcgagagactgtacgacctgaaccacaacgagatcggcgagctgatcagaatgcccaagatgggcaagaccatccacaagtacgtgcacctgttccccaagctggagctgagcgtgcacctgcagcccatcaccagaagcaccctgaaggtggagctgaccatcacccccgacttccagtgggacgagaaggtgcacggcagcagcgaggccttctggatcctggtggaggacgtggacagcgaggtgatcctgcaccacgagtacttcctgctgaaggccaagtacgcccaggacgagcacctgatcaccttcttcgtgcccgtgttcgagcccctgcccccccagtacttcatcagagtggtgagcgacagatggctgagctgcgagacccagctgcccgtgagcttcagacacctgatcctgcccgagaagtaccccccccccaccgagctgctggacctgcagcccctgcccgtgagcgccctgagaaacagcgccttcgagagcctgtaccaggacaagttccccttcttcaaccccatccagacccaggtgttcaacaccgtgtacaacagcgacgacaacgtgttcgtgggcgcccccaccggcagcggcaagaccatctgcgccgagttcgccatcctgagaatgctgctgcagagcagcgagggcagatgcgtgtacatcacccccatggaggccctggccgagcaggtgtacatggactggtacgagaagttccaggacagactgaacaagaaggtggtgctgctgaccggcgagaccagcaccgacctgaagctgctgggcaagggcaacatcatcatcagcacccccgagaagtgggacatcctgagcagaagatggaagcagagaaagaacgtgcagaacatcaacctgttcgtggtggacgaggtgcacctgatcggcggcgagaacggccccgtgctggaggtgatctgcagcagaatgagatacatcagcagccagatcgagagacccatcagaatcgtggccctgagcagcagcctgagcaacgccaaggacgtggcccactggctgggctgcagcgccaccagcaccttcaacttccaccccaacgtgagacccgtgcccctggagctgcacatccagggcttcaacatcagccacacccagaccagactgctgagcatggccaagcccgtgtaccacgccatcaccaagcacagccccaagaagcccgtgatcgtgttcgtgcccagcagaaagcagaccagactgaccgccatcgacatcctgaccacctgcgccgccgacatccagagacagagattcctgcactgcaccgagaaggacctgatcccctacctggagaagctgagcgacagcaccctgaaggagaccctgctgaacggcgtgggctacctgcacgagggcctgagccccatggagagaagactggtggagcagctgttcagcagcggcgccatccaggtggtggtggccagcagaagcctgtgctggggcatgaacgtggccgcccacctggtgatcatcatggacacccagtactacaacggcaagatccacgcctacgtggactaccccatctacgacgtgctgcagatggtgggccacgccaacagacccctgcaggacgacgagggcagatgcgtgatcatgtgccagggcagcaagaaggacttcttcaagaagttcctgtacgagcccctgcccgtggagagccacctggaccactgcatgcacgaccacttcaacgccgagatcgtgaccaagaccatcgagaacaagcaggacgccgtggactacctgacctggaccttcctgtacagaagaatgacccagaaccccaactactacaacctgcagggcatcagccacagacacctgagcgaccacctgagcgagctggtggagcagaccctgagcgacctggagcagagcaagtgcatcagcatcgaggacgagatggacgtggcccccctgaacctgggcatgatcgccgcctactactacatcaactacaccaccatcgagctgttcagcatgagcctgaacgccaagaccaaggtgagaggcctgatcgagatcatcagcaacgccgccgagtacgagaacatccccatcagacaccacgaggacaacctgctgagacagctggcccagaaggtgccccacaagctgaacaaccccaagttcaacgacccccacgtgaagaccaacctgctgctgcaggcccacctgagcagaatgcagctgagcgccgagctgcagagcgacaccgaggagatcctgagcaaggccatcagactgatccaggcctgcgtggacgtgctgagcagcaacggctggctgagccccgccctggccgccatggagctggcccagatggtgacccaggccatgtggagcaaggacagctacctgaagcagctgccccacttcaccagcgagcacatcaagagatgcaccgacaagggcgtggagagcgtgttcgacatcatggagatggaggacgaggagagaaacgccctgctgcagctgaccgacagccagatcgccgacgtggccagattctgcaacagataccccaacatcgagctgagctacgaggtggtggacaaggacagcatcagaagcggcggccccgtggtggtgctggtgcagctggagagagaggaggaggtgaccggccccgtgatcgcccccctgttcccccagaagagagaggagggctggtgggtggtgatcggcgacgccaagagcaacagcctgatcagcatcaagagactgaccctgcagcagaaggccaaggtgaagctggacttcgtggcccccgccaccggcgcccacaactacaccctgtacttcatgagcgacgcctacatgggctgcgaccaggagtacaagttcagcgtggacgtgaaggaggccgagaccgacagcgacagcgactag

SEQ ID NO: 177460 - DNA, 1878 bp, Artificial Sequence
  derived and/or modified sequence
atggccgacgtgaccgccagaagcctgcagtacgagtacaaggccaacagcaacctggtgctgcaggccgacagaagcctgatcgacagaaccagaagagacgagcccaccggcgaggtgctgagcctggtgggcaagctggagggcaccagaatgggcgacaaggcccagagaaccaagccccagatgcaggaggagagaagagccaagagaagaaagagagacgaggacagacacgacatcaacaagatgaagggctacaccctgctgagcgagggcatcgacgagatggtgggcatcatctacaagcccaagaccaaggagaccagagagacctacgaggtgctgctgagcttcatccaggccgccctgggcgaccagcccagagacatcctgtgcggcgccgccgacgaggtgctggccgtgctgaagaacgagaagctgagagacaaggagagaagaaaggagatcgacctgctgctgggccagaccgacgacaccagataccacgtgctggtgaacctgggcaagaagatcaccgactacggcggcgacaaggagatccagaacatggacgacaacatcgacgagacctacggcgtgaacgtgcagttcgagagcgacgaggaggagggcgacgaggacgtgtacggcgaggtgagagaggaggccagcgacgacgacatggagggcgacgaggccgtggtgagatgcaccctgagcgccaacctggtggccagcggcgagctgatgagcagcaagaagaaggacctgcaccccagagacatcgacgccttctggctgcagagacagctgagcagattctacgacgacgccatcgtgagccagaagaaggccgacgaggtgctggagatcctgaagaccgccagcgacgacagagagtgcgagaaccagctggtgctgctgctgggcttcaacaccttcgacttcatcaaggtgctgagacagcacagaatgatgatcctgtactgcaccctgctggccagcgcccagagcgaggccgagaaggagagaatcatgggcaagatggaggccgaccccgagctgagcaagttcctgtaccagctgcacgagaccgagaaggaggacctgatcagagaggagagaagcagaagagagagagtgagacagagcagaatggacaccgacctggagaccatggacctggaccagggcggcgaggccctggcccccagacaggtgctggacctggaggacctggtgttcacccagggcagccacttcatggccaacaagagatgccagctgcccgacggcagcttcagaagacagagaaagggctacgaggaggtgcacgtgcccgccctgaagcccaagcccttcggcagcgaggagcagctgctgcccgtggagaagctgcccaagtacgcccaggccggcttcgagggcttcaagaccctgaacagaatccagagcaagctgtacagagccgccctggagaccgacgagaacctgctgctgtgcgcccccaccggcgccggcaagaccaacgtggccctgatgtgcatgctgagagagatcggcaagcacatcaacatggacggcaccatcaacgtggacgacttcaagatcatctacatcgcccccatgagaagcctggtgcaggagatggtgggcagcttcggcaagagagacgccaagagcaacagcctgatcagcatcaagagactgaccctgcagcagaaggccaaggtgaagctggacttcgtggcccccgccaccggcgcccacaactacaccctgtacttcatgagcgacgcctacatgggctgcgaccaggagtacaagttcagcgtggacgtgaaggaggccgagaccgacagcgacagcgactag

SEQ ID NO: 177461 - DNA, 1788 bp, Artificial Sequence
  derived and/or modified sequence
atgagatacatcagcagccagatcgagagacccatcagaatcgtggccctgagcagcagcctgagcaacgccaaggacgtggcccactggctgggctgcagcgccaccagcaccttcaacttccaccccaacgtgagacccgtgcccctggagctgcacatccagggcttcaacatcagccacacccagaccagactgctgagcatggccaagcccgtgtaccacgccatcaccaagcacagccccaagaagcccgtgatcgtgttcgtgcccagcagaaagcagaccagactgaccgccatcgacatcctgaccacctgcgccgccgacatccagagacagagattcctgcactgcaccgagaaggacctgatcccctacctggagaagctgagcgacagcaccctgaaggagaccctgctgaacggcgtgggctacctgcacgagggcctgagccccatggagagaagactggtggagcagctgttcagcagcggcgccatccaggtggtggtggccagcagaagcctgtgctggggcatgaacgtggccgcccacctggtgatcatcatggacacccagtactacaacggcaagatccacgcctacgtggactaccccatctacgacgtgctgcagatggtgggccacgccaacagacccctgcaggacgacgagggcagatgcgtgatcatgtgccagggcagcaagaaggacttcttcaagaagttcctgtacgagcccctgcccgtggagagccacctggaccactgcatgcacgaccacttcaacgccgagatcgtgaccaagaccatcgagaacaagcaggacgccgtggactacctgacctggaccttcctgtacagaagaatgacccagaaccccaactactacaacctgcagggcatcagccacagacacctgagcgaccacctgagcgagctggtggagcagaccctgagcgacctggagcagagcaagtgcatcagcatcgaggacgagatggacgtggcccccctgaacctgggcatgatcgccgcctactactacatcaactacaccaccatcgagctgttcagcatgagcctgaacgccaagaccaaggtgagaggcctgatcgagatcatcagcaacgccgccgagtacgagaacatccccatcagacaccacgaggacaacctgctgagacagctggcccagaaggtgccccacaagctgaacaaccccaagttcaacgacccccacgtgaagaccaacctgctgctgcaggcccacctgagcagaatgcagctgagcgccgagctgcagagcgacaccgaggagatcctgagcaaggccatcagactgatccaggcctgcgtggacgtgctgagcagcaacggctggctgagccccgccctggccgccatggagctggcccagatggtgacccaggccatgtggagcaaggacagctacctgaagcagctgccccacttcaccagcgagcacatcaagagatgcaccgacaagggcgtggagagcgtgttcgacatcatggagatggaggacgaggagagaaacgccctgctgcagctgaccgacagccagatcgccgacgtggccagattctgcaacagataccccaacatcgagctgagctacgaggtggtggacaaggacagcatcagaagcggcggccccgtggtggtgctggtgcagctggagagagaggaggaggtgaccggccccgtgatcgcccccctgttcccccagttcagagccggcagaagcggcagcagactgtag

SEQ ID NO: 177462 - DNA, 1788 bp, Artificial Sequence
  derived and/or modified sequence
atggccaagcccgtgtaccacgccatcaccaagcacagccccaagaagcccgtgatcgtgttcgtgcccagcagaaagcagaccagactgaccgccatcgacatcctgaccacctgcgccgccgacatccagagacagagattcctgcactgcaccgagaaggacctgatcccctacctggagaagctgagcgacagcaccctgaaggagaccctgctgaacggcgtgggctacctgcacgagggcctgagccccatggagagaagactggtggagcagctgttcagcagcggcgccatccaggtggtggtggccagcagaagcctgtgctggggcatgaacgtggccgcccacctggtgatcatcatggacacccagtactacaacggcaagatccacgcctacgtggactaccccatctacgacgtgctgcagatggtgggccacgccaacagacccctgcaggacgacgagggcagatgcgtgatcatgtgccagggcagcaagaaggacttcttcaagaagttcctgtacgagcccctgcccgtggagagccacctggaccactgcatgcacgaccacttcaacgccgagatcgtgaccaagaccatcgagaacaagcaggacgccgtggactacctgacctggaccttcctgtacagaagaatgacccagaaccccaactactacaacctgcagggcatcagccacagacacctgagcgaccacctgagcgagctggtggagcagaccctgagcgacctggagcagagcaagtgcatcagcatcgaggacgagatggacgtggcccccctgaacctgggcatgatcgccgcctactactacatcaactacaccaccatcgagctgttcagcatgagcctgaacgccaagaccaaggtgagaggcctgatcgagatcatcagcaacgccgccgagtacgagaacatccccatcagacaccacgaggacaacctgctgagacagctggcccagaaggtgccccacaagctgaacaaccccaagttcaacgacccccacgtgaagaccaacctgctgctgcaggcccacctgagcagaatgcagctgagcgccgagctgcagagcgacaccgaggagatcctgagcaaggccatcagactgatccaggcctgcgtggacgtgctgagcagcaacggctggctgagccccgccctggccgccatggagctggcccagatggtgacccaggccatgtggagcaaggacagctacctgaagcagctgccccacttcaccagcgagcacatcaagagatgcaccgacaagggcgtggagagcgtgttcgacatcatggagatggaggacgaggagagaaacgccctgctgcagctgaccgacagccagatcgccgacgtggccagattctgcaacagataccccaacatcgagctgagctacgaggtggtggacaaggacagcatcagaagcggcggccccgtggtggtgctggtgcagctggagagagaggaggaggtgaccggccccgtgatcgcccccctgttcccccagaagagagaggagggctggtgggtggtgatcggcgacgccaagagcaacagcctgatcagcatcaagagactgaccctgcagcagaaggccaaggtgaagctggacttcgtggcccccgccaccggcgcccacaactacaccctgtacttcatgagcgacgcctacatgggctgcgaccaggagtacaagttcagcgtggacgtgaaggaggccgagaccgacagcgacagcgactag

SEQ ID NO: 177463 - DNA, 2325 bp, Artificial Sequence
  derived and/or modified sequence
atgatgatcctgtactgcaccctgctggccagcgcccagagcgaggccgagaaggagagaatcatgggcaagatggaggccgaccccgagctgagcaagttcctgtaccagctgcacgagaccgagaaggaggacctgatcagagaggagagaagcagaagagagagagtgagacagagcagaatggacaccgacctggagaccatggacctggaccagggcggcgaggccctggcccccagacaggtgctggacctggaggacctggtgttcacccagggcagccacttcatggccaacaagagatgccagctgcccgacggcagcttcagaagacagagaaagggctacgaggaggtgcacgtgcccgccctgaagcccaagcccttcggcagcgaggagcagctgctgcccgtggagaagctgcccaagtacgcccaggccggcttcgagggcttcaagaccctgaacagaatccagagcaagctgtacagagccgccctggagaccgacgagaacctgctgctgtgcgcccccaccggcgccggcaagaccaacgtggccctgatgtgcatgctgagagagatcggcaagcacatcaacatggacggcaccatcaacgtggacgacttcaagatcatctacatcgcccccatgagaagcctggtgcaggagatggtgggcagcttcggcaagagactggccacctacggcatcaccgtggccgagctgaccggcgaccaccagctgtgcaaggaggagatcagcgccacccagatcatcgtgtgcacccccgagaagtgggacatcatcaccagaaagggcggcgagagaacctacacccagctggtgagactgatcatcctggacgagatccacctgctgcacgacgacagaggccccgtgctggaggccctggtggccagagccatcagaaacatcgagatgacccaggaggacgtgagactgatcggcctgagcgccaccctgcccaactacgaggacgtggccaccttcctgagagtggaccccgccaagggcctgttctacttcgacaacagcttcagacccgtgcccctggagcagacctacgtgggcatcaccgagaagaaggccatcaagagattccagatcatgaacgagatcgtgtacgagaagatcatggagcacgccggcaagaaccaggtgctggtgttcgtgcacagcagaaaggagaccggcaagaccgccagagccatcagagacatgtgcctggagaaggacaccctgggcctgttcctgagagagggcagcgccagcaccgaggtgctgagaaccgaggccgagcagtgcaagaacctggagctgaaggacctgctgccctacggcttcgccatccaccacgccggcatgaccagagtggacagaaccctggtggaggacctgttcgccgacaagcacatccaggtgctggtgagcaccgccaccctggcctggggcgtgaacctgcccgcccacaccgtgatcatcaagggcacccaggtgtacagccccgagaagggcagatggaccgagctgggcgccctggacatcctgcagatgctgggcagagccggcagaccccagtacgacaccaagggcgagggcatcctgatcaccagccacggcgagctgcagtactacctgagcctgctgaaccagcagctgcccatcgagagccagatggtgagcaagctgcccgacatgctgaacgccgagatcgtgctgggcaacgtgcagaacgccaaggacgccgtgaactggctgggctacgcctacctgtacatcagaatgctgagaagccccaccctgtacggcatcagccacgacgacctgaagggcgaccccctgctggaccagagaagactggacctggtgcacaccgccgccctgatgctggacaagaacaacctggtgaagtacgacaagaagaccggcaacttccaggtgaccgagctgggcagaatcgccagccactactacatcaccaacgacaccgtgcagacctacaaccagctgctgaagcccaccctgagcgagatcgagctgttcagagtgttcagcctgagcagcgagttcaagaacatcaccgtgagagaggaggagaagctggagctgcagaagctgctggagagagtgcccatccccgtgaaggagagcatcgaggagcccagcgccaagatcaacgtgctgctgcaggccttcatcagccagctgaagctggagggcttcgccctgatggccgacatggtgtacgtgacccagagcgccggcagactgatgagagccatcctgaagctgagctag

SEQ ID NO: 177464 - DNA, 2160 bp, Artificial Sequence
  derived and/or modified sequence
atgctgctgcagagcagcgagggcagatgcgtgtacatcacccccatggaggccctggccgagcaggtgtacatggactggtacgagaagttccaggacagactgaacaagaaggtggtgctgctgaccggcgagaacggccccgtgctggaggtgatctgcagcagaatgagatacatcagcagccagatcgagagacccatcagaatcgtggccctgagcagcagcctgagcaacgccaaggacgtggcccactggctgggctgcagcgccaccagcaccttcaacttccaccccaacgtgagacccgtgcccctggagctgcacatccagggcttcaacatcagccacacccagaccagactgctgagcatggccaagcccgtgtaccacgccatcaccaagcacagccccaagaagcccgtgatcgtgttcgtgcccagcagaaagcagaccagactgaccgccatcgacatcctgaccacctgcgccgccgacatccagagacagagattcctgcactgcaccgagaaggacctgatcccctacctggagaagctgagcgacagcaccctgaaggagaccctgctgaacggcgtgggctacctgcacgagggcctgagccccatggagagaagactggtggagcagctgttcagcagcggcgccatccaggtggtggtggccagcagaagcctgtgctggggcatgaacgtggccgcccacctggtgatcatcatggacacccagtactacaacggcaagatccacgcctacgtggactaccccatctacgacgtgctgcagatggtgggccacgccaacagacccctgcaggacgacgagggcagatgcgtgatcatgtgccagggcagcaagaaggacttcttcaagaagttcctgtacgagcccctgcccgtggagagccacctggaccactgcatgcacgaccacttcaacgccgagatcgtgaccaagaccatcgagaacaagcaggacgccgtggactacctgacctggaccttcctgtacagaagaatgacccagaaccccaactactacaacctgcagggcatcagccacagacacctgagcgaccacctgagcgagctggtggagcagaccctgagcgacctggagcagagcaagtgcatcagcatcgaggacgagatggacgtggcccccctgaacctgggcatgatcgccgcctactactacatcaactacaccaccatcgagctgttcagcatgagcctgaacgccaagaccaaggtgagaggcctgatcgagatcatcagcaacgccgccgagtacgagaacatccccatcagacaccacgaggacaacctgctgagacagctggcccagaaggtgccccacaagctgaacaaccccaagttcaacgacccccacgtgaagaccaacctgctgctgcaggcccacctgagcagaatgcagctgagcgccgagctgcagagcgacaccgaggagatcctgagcaaggccatcagactgatccaggcctgcgtggacgtgctgagcagcaacggctggctgagccccgccctggccgccatggagctggcccagatggtgacccaggccatgtggagcaaggacagctacctgaagcagctgccccacttcaccagcgagcacatcaagagatgcaccgacaagggcgtggagagcgtgttcgacatcatggagatggaggacgaggagagaaacgccctgctgcagctgaccgacagccagatcgccgacgtggccagattctgcaacagataccccaacatcgagctgagctacgaggtggtggacaaggacagcatcagaagcggcggccccgtggtggtgctggtgcagctggagagagaggaggaggtgaccggccccgtgatcgcccccctgttcccccagaagagagaggagggctggtgggtggtgatcggcgacgccaagagcaacagcctgatcagcatcaagagactgaccctgcagcagaaggccaaggtgaagctggacttcgtggcccccgccaccggcgcccacaactacaccctgtacttcatgagcgacgcctacatgggctgcgaccaggagtacaagttcagcgtggacgtgaaggaggccgagaccgacagcgacagcgactag

SEQ ID NO: 177465 - protein, 95 aa, Artificial Sequence
  derived and/or modified sequence
MLGARVAAHLDALGPLVPYVPPPLLPSMFYVGLFFVNVLILYYAFLMEYIVLNVGLVFLPEDMDQALVDLGVLSDPGSGLYDADSELDVFDAYLE

SEQ ID NO: 177466 - DNA, 288 bp, Artificial Sequence
  derived and/or modified sequence
atgctgggcgccagagtggccgcccacctggacgccctgggccccctggtgccctacgtgcccccccccctgctgcccagcatgttctacgtgggcctgttcttcgtgaacgtgctgatcctgtactacgccttcctgatggagtacatcgtgctgaacgtgggcctggtgttcctgcccgaggacatggaccaggccctggtggacctgggcgtgctgagcgaccccggcagcggcctgtacgacgccgacagcgagctggacgtgttcgacgcctacctggagtag

SEQ ID NO: 177467 - DNA, 288 bp, Artificial Sequence
  derived and/or modified sequence
atgctcggcgctcgcgtggcagcccacctggatgccttgggcccactggtgccatatgtgcctccacctctcttgccttctatgttttatgtgggtctcttctttgtgaacgtcctgatcctttactatgccttcctcatggagtatattgtcctcaacgtgggcttggtatttttgcctgaagatatggaccaggcactggtcgacctgggggtgctttcggatcccgggtctggcctctatgatgcagacagtgagctggacgtttttgatgcttaccttgagtag

SEQ ID NO: 177468 - DNA, 288 bp, Artificial Sequence
  derived and/or modified sequence
atgctgggcgcccgggtggccgcccacctggatgccctgggccccctggtgccctacgtgcccccacccctgctgcccagcatgttctacgtgggcctcttctttgtgaatgtgctgatcctgtactatgccttcctgatggagtacatcgtgctgaatgtgggcctggtgttcctgcctgaggacatggaccaggccctggtggacctgggcgtgctgagtgaccccggcagcggcctgtatgatgctgacagcgagctggatgtgtttgatgcctacctggagtag

SEQ ID NO: 177469 - DNA, 288 bp, Artificial Sequence
  derived and/or modified sequence
atgctgggcgcccgggtggccgcccacctggacgccctgggccccctcgttccttacgtccccccccctttactaccctccatgttttacgtaggcctgtttttcgtcaacgtactgattctttattatgcctttctgatggagtacatagtgctgaatgtcgggcttgtgtttctacccgaagatatggaccaggcactggtcgacctgggggtactgtcggacccaggaagtggactgtacgacgctgacagcgaactggatgtgttcgacgcatatctggagtag

SEQ ID NO: 177470 - DNA, 288 bp, Artificial Sequence
  derived and/or modified sequence
atgctgggcgctcgggtggcggcacatcttgatgctcttggacccctagtcccatacgtcccacctccacttctgccctccatgttttacgtcggcctattttttgtgaatgttctcatcctatattatgctttcctcatggaatatatcgttctcaacgtcgggctcgttttcctaccagaggatatggatcaagcactcgtggacttaggtgtgcttagcgaccccggaagtggcctctacgacgcagactcagaacttgatgtgttcgatgcctatctggaatag

SEQ ID NO: 177471 - DNA, 895 bp, Artificial Sequence
  derived and/or modified sequence
agagaggaacctggagggaccctgtccctgacaccttctgggttgttagctccagatcaaaagaactcctgatttggaaaaagcttcttgaaaagaagaggggaggtgcagtttatcattctgaatccaaagccaaggaatataaacatgtatgcaaacgagcttgtcagagagtatcaacgcaatgtgtatcatctatgcttttcagttttgaacataaagcagtggctctgagcgcgactcggagggcgacgccgcggccgcagccatgggtgctgggcctgcaggggcgcgggggggagggcgacgctaggacctgcggggccgggcgggagagagggctgccgggaccggccctagacactgagccgcggtgggatccccgccggctctgcgaggccctgcgagcgccagggaggcgcctcgagggagccgggcagccgccggccacttcaggggggcccgccacttcagggcggtcgaaagagccttgggggcacatctcggggtgcggtgacccgcccggcgcatttcgggggtcggggcgcatttgccaggggacatctggagcccggccctgcttctgtcgggctccagggtacccctggatggctgcgctgtgccctcgccggcggcccgggcgccacagcggctgagttcgccgggatcgccgggccgccgccgcccttgccaccggctgcatgctcggcgcccgggtcgcggcccacctggacgcactgggccccctggtcccctacgtgccgccgccgctgctgccctctatgttctacgtgggcctgttcttcgtcaatgtgctgatcctgtactacgccttcctcatggagtacatcgtcctcaacgtgggcctcgtcttcctgttcgaggacatggacca

SEQ ID NO: 177472 - protein, 587 aa, Artificial Sequence
  derived and/or modified sequence
MATAAYEQLKLHITPEKFYVEACDDGADDVLTIDRVSTEVTLAVKKDVPPSAVTRPIFGILGTIHLVAGNYLIVITKKIKVGEFFSHVVWKATDFDVLSYKKTMLHLTDIQLQDNKTFLAMLNHVLNVDGFYFSTTYDLTHTLQRLSNTSPEFQEMSLLERADQRFVWNGHLLRELSAQPEVHRFALPVLHGFITMHSCSINGKYFDWILISRRSCFRAGVRYYVRGIDSEGHAANFVETEQIVHYNGSKASFVQTRGSIPVFWSQRPNLKYKPLPQISKVANHMDGFQRHFDSQVIIYGKQVIINLINQKGSEKPLEQTFATMVSSLGSGMMRYIAFDFHKECKNMRWDRLSILLDQVAEMQDELSYFLVDSAGQVVANQEGVFRSNCMDCLDRTNVIQSLLARRSLQAQLQRLGVLHVGQKLEEQDEFEKIYKNAWADNANACAKQYAGTGALKTDFTRTGKRTHLGLIMDGWNSMIRYYKNNFSDGFRQDSIDLFLGNYSVDELESHSPLSVPRDWKFLALPIIMVVAFSMCIICLLMAGDTWTETLAYVLFWGVASIGTFFIILYNGKDFVDAPRLVQKEKID

SEQ ID NO: 177473 - DNA, 1764 bp, Artificial Sequence
  derived and/or modified sequence
atggccacagctgcatacgaacaactcaaattacatatcacaccagaaaagttctacgtagaagcctgcgacgatggtgcggatgacgtgctgactatcgacagggtgagcaccgaggtgaccctggcagtcaagaaggacgtgcctccttctgccgtgacgcgacctatattcggaatcctgggcactatacatctcgtggccggaaactacttgatcgttataactaagaagatcaaggttggagagttcttcagtcacgtggtttggaaggccaccgattttgacgtgctgtcatacaagaaaacaatgctacacctcacggacattcagcttcaggacaacaagacttttctcgctatgctgaatcacgtgctgaatgtggatgggttctacttctctaccacatacgacttaacccacaccttgcagagattatcaaacaccagtcctgaattccaggagatgagtctgcttgaaagagccgatcagagatttgtttggaacggccacctgttgcgggagctgtctgctcaacccgaagtgcaccggtttgcactccctgtactgcacggatttatcactatgcactcctgttctatcaatggcaaatacttcgattggattctaatatctcgcagatcatgtttcagggcgggcgtgagatactacgtgcgtggcatagactccgaaggtcacgcggctaactttgtagagaccgagcagattgttcactacaacgggtccaaggcctcctttgtccagacaaggggttccattcctgtgttttggtcacagcgccctaacctcaagtacaaacccctgccccagatctccaaggtggctaatcacatggacggcttccaaaggcactttgacagccaggttatcatctacgggaaacaagttatcattaatctgataaatcaaaagggttccgagaagcctttagagcagacgttcgctacgatggtctctagcctaggatccggtatgatgagatacattgcgtttgattttcataaagaatgtaagaatatgcggtgggaccgcctgtccatcctgttggatcaagttgccgagatgcaggacgagctttcctacttccttgtggactcagcagggcaggtggtcgcaaaccaggagggcgtttttaggtcgaactgcatggattgtctcgatcggaccaatgtgattcagtctctgctcgcaaggaggagtctacaggcccagctgcagagactgggcgtgctccacgttggtcagaaactagaagagcaggatgagttcgaaaagatctacaagaatgcttgggccgacaatgccaacgcgtgcgccaaacagtacgctggcaccggggccctcaaaacggatttcactaggacaggcaaaagaacccatctgggcttgattatggacggctggaactccatgattcgctattacaagaataattttagtgacggtttccggcaggattccattgatctgtttttaggtaattacagtgtggacgaactggagtcccattctcccctctcagtaccacgcgattggaagttccttgccctgccaattatcatggtcgttgccttcagcatgtgcattatctgtctgctgatggccggcgacacatggaccgaaacattagcatacgtcttattctggggagtagcctcaatcggaacattcttcatcattctctataatggtaaagacttcgtggacgcgccccgactcgtccagaaggaaaaaatcgattag

SEQ ID NO: 177474 - DNA, 1764 bp, Artificial Sequence
  derived and/or modified sequence
atggccacagctgcctatgagcagctgaagctgcacatcaccccagagaagttctacgtggaggcctgtgatgatggagcagatgatgtgctgaccatcgacagagtgtccacagaggtgaccctggccgtgaagaaggatgtgcccccatctgctgtgacccggcccatcttcggcatcctgggcaccatccacctggtggccggcaactacctgattgtcatcaccaagaagatcaaggtgggggagttcttcagccacgtggtgtggaaggccacagactttgatgtgctgagctacaagaagaccatgctgcacctgacagacatccagctgcaggacaacaagaccttcctggccatgctgaaccacgtgctgaatgtggatggcttctacttcagcaccacctatgacctgacccacaccctgcagaggctgagcaacaccagccctgagttccaggagatgagcctgctggagagagctgaccagagatttgtgtggaatggccacctgctgcgggagctgagcgcccagcctgaggtgcacagatttgccctgcctgtgctgcacggcttcatcaccatgcacagctgcagcatcaacgggaagtactttgactggatcctgatcagcagaagaagctgcttccgggccggcgtgcgctactacgtgcggggcatcgacagcgagggccacgccgccaactttgtggagacagagcagatcgtgcactacaacggcagcaaggccagctttgtgcagacccggggcagcatccctgtgttctggagccagaggcccaacctgaagtacaagcccctgccccagatcagcaaggtggccaaccacatggatggcttccagaggcactttgacagccaggtgatcatctacggcaagcaggtgatcatcaacctgatcaaccagaagggcagcgagaagcccctggagcagacctttgccaccatggtgagcagcctgggcagcggcatgatgagatacatcgcctttgacttccacaaggagtgcaagaacatgcgctgggaccggctgagcatcctgctggaccaggtggccgagatgcaggatgagctgagctacttcctggtggacagcgctggccaggtggtggccaaccaggagggcgtcttccgcagcaactgcatggactgcctggacaggaccaacgtcatccagagcctgctggcccggcgcagcctgcaggcccagctgcagaggctgggcgtgctgcacgtgggccagaagctggaggagcaggatgaatttgagaagatctacaagaatgcctgggccgacaatgccaatgcctgtgccaagcagtatgccggcaccggggccctgaagacagacttcaccaggacaggcaagaggacccacctgggcctcatcatggatggctggaacagcatgatccgctactacaagaacaacttcagtgatggcttccggcaggacagcattgacctcttcctgggcaactacagcgtggatgagctggagagccacagccccctgtctgtgccccgggactggaagttcctggccctgcccatcatcatggtggtggccttctccatgtgcatcatctgcctgctgatggccggggacacctggacagagaccctggcctacgtgctcttctggggcgtggccagcatcggcaccttcttcatcatcctgtacaacgggaaggactttgtggatgccccccggctggtgcagaaggagaagattgattag

SEQ ID NO: 177475 - DNA, 1764 bp, Artificial Sequence
  derived and/or modified sequence
atggccaccgccgcctacgagcagctgaagctgcacatcacccccgagaaattctacgtggaggcctgtgatgacggagctgatgatgtattgaccatcgaccgggtgtcgactgaggtcacactcgcggtgaagaaggacgtgccgccaagtgccgtgaccagaccaatctttgggattctgggaactatccacctagtcgcggggaactacctaatcgtcattacaaagaaaattaaagtcggggaatttttcagccacgtggtgtggaaggctactgattttgacgtactttcatacaaaaagactatgctccatcttaccgatattcagctccaggataataagactttcctagcgatgctgaatcacgttcttaatgtggatggcttttatttctctacaacttatgacctcactcataccctccagcgactcagtaacactagtcccgaattccaggagatgtccttacttgaacgagctgatcagcgattcgtgtggaacgggcatctcctcagagaactgtctgctcaaccagaagtgcaccgctttgccctgccagttctgcacggattcatcaccatgcattcctgctccattaacgggaaatacttcgactggatcctgatcagtcggcgctcttgcttccgcgcgggggtccgttactatgttcgcggcattgattctgaggggcacgccgccaactttgtcgagactgaacaaatcgtgcattacaacggatccaaagcctcgttcgttcagactcggggatccattcccgtgttttggagtcagaggccgaatctaaaatacaaacctttgccccagatatcaaaggttgcaaatcatatggatggatttcagcggcattttgatagccaggtcatcatctacggcaagcaggtgattattaaccttatcaatcagaaaggctcggagaagcctctggaacagaccttcgcaaccatggtatcctctctcgggtccggaatgatgcggtacatcgcgtttgatttccataaagagtgcaaaaacatgcgctgggatagactatcaatcctgttggaccaggtggcggagatgcaagacgaactctcgtactttcttgtcgatagtgccgggcaggtcgtcgccaatcaggagggcgtgttcagatctaattgtatggactgtttggacagaacaaacgtgattcagagtttgctcgcaaggagaagcctgcaagcccagctccagcggttgggcgttctgcacgtcgggcagaagctggaagaacaggatgaatttgagaagatctataaaaatgcttgggccgacaatgctaacgcatgtgctaagcagtacgcgggcactggggctctcaagacagatttcacaagaacgggcaaaagaacccaccttgggctgatcatggatggatggaacagcatgatcagatattataaaaataactttagcgacggatttcgacaagattctattgatctctttctcggtaattactccgttgacgagctcgagagtcattcacctctgagcgtaccgcgcgattggaaatttctcgcgttacctataattatggtggtcgcattttctatgtgtattatctgccttctcatggctggcgatacatggacagagacattggcctatgtcctcttctggggcgtggccagcatcggcactttcttcatcatcctttacaatggaaaagattttgtcgacgccccacggctcgttcagaaagagaagatcgattag

SEQ ID NO: 177476 - DNA, 1764 bp, Artificial Sequence
  derived and/or modified sequence
atggccacagccgcttacgagcagctaaagctccatattactcctgagaaattctacgtcgaagcgtgtgatgacggcgctgatgatgtgctgacaatcgatcgcgtctccaccgaagtcaccctggctgtgaagaaggacgttcctccctccgccgttacccgccctattttcggtattctgggaactatccacctggtggcgggtaattacctaatcgttatcacaaaaaagatcaaagtgggggagtttttctctcacgtcgtctggaaagccaccgatttcgacgttcttagttataaaaagacaatgttgcatcttactgatatacagcttcaagacaataagacatttctggcaatgcttaatcatgtgctgaacgtggacggcttctatttctccaccacgtacgatcttacccatactctgcaaagactgagcaatacatccccggagttccaggaaatgagtctgttagaacgagcagaccagaggtttgtctggaacgggcacttactacgcgaactctctgcacagcccgaagtgcatcgattcgcactgccggtcctgcacgggtttatcactatgcacagttgtagcattaatggaaaatattttgactggattcttatttccagaaggagctgctttagggcaggagttaggtattatgttagagggattgattccgagggacacgccgctaatttcgtagaaacagagcagatagttcattataatggctccaaagcctcatttgtgcagacacgcggaagcatacccgtgttctggtctcagagacctaacctaaagtataagccccttccacagatcagcaaggtggccaatcatatggacggatttcagagacattttgatagtcaggtgattatctatggaaagcaggtcattatcaacttgatcaatcagaagggtagcgaaaagcccctggagcagacatttgccaccatggtaagcagtctgggctccggaatgatgcgctatatcgcattcgacttccacaaagaatgtaagaatatgaggtgggatcgtctatctatcctgttggatcaggtagctgaaatgcaggacgaattatcatacttcctagtggactcggccggacaggtagttgcaaatcaggaaggcgtgttcagatctaattgtatggattgtctggaccgtaccaacgtgatacaatctcttctggcccgtagaagcctgcaggcacaactgcagcgactcggcgttttgcatgtggggcaaaaacttgaagagcaggacgaatttgaaaaaatctataagaatgcatgggccgataacgcaaacgcctgcgcaaagcagtacgctggcacaggcgcactaaagacagatttcacacgcactggcaaaagaacacatctggggctgataatggatggatggaattccatgattcgatactacaagaataatttctctgatggttttcgccaggactcgatcgacttattcttgggaaattatagcgtggatgagctcgagtcccactctccgctgagcgttcccagggactggaagtttctcgctttgccgatcatcatggtggtcgctttctctatgtgtattatttgtctattaatggctggagacacatggaccgagacacttgcctacgtccttttttggggagtggcctccattgggactttctttatcatactatacaacggtaaggattttgtggatgctcctaggctggtgcagaaggagaaaatcgactag

SEQ ID NO: 177477 - DNA, 3708 bp, Artificial Sequence
  derived and/or modified sequence
ggcatctctcgcgtgctcttgcttgcgcactaatttgtcctccaccgcctcccgttcaggccggctctcctgcggggcggggaaaggggtgggaagaggctgggagctgcggccgctgtgccagggtgaccggtagagttgtagccgaggtggcggcgcggggcggggcgggcggagagagaaggaaggaggtggttgtgcaggatggcgacggcggcctacgagcagctgaagctgcatatcacacctgaaaaattttatgtggaagcttgtgatgatggagcagatgacgtacttaccattgaccgtgtgtccacagaggttacccttgcagtcaagaaagatgttcctccttcagctgtcacaagaccaatatttggtatactgggcacaatccatctggtggcaggtaattatcttatagtcattaccaaaaagataaaagtaggtgaatttttcagtcatgtagtctggaaagcaacagattttgatgtcctttcttataagaagacaatgttgcacttaactgatattcagttacaagataataaaaccttcctagcgatgctaaaccatgtcttgaatgtggatggattttacttttcaacaacatatgatttgacccatactttgcagcggctatccaacactagtcctgaattccaagaaatgagtctcttggaaagggcagatcagcggtttgtatggaatggtcatcttctaagagaactttctgcacagccagaggttcatcggtttgcccttccagtgttacatggctttattaccatgcattcatgttctattaatggaaaatactttgattggattctcatctcgaggaggagctgtttcagagctggtgtgcgctattatgtaagaggaattgattcggaaggccatgcagctaactttgtagaaacagaacaaattgtgcactacaatgggagcaaagcttcgtttgtacagactcgaggatcaatacctgttttctggtcccaaagaccaaacctcaagtacaaaccactgccacagatcagcaaagtagcaaatcacatggacggtttccaaaggcattttgattcccaagtaattatttatggaaaacaagttataatcaatctgattaaccagaagggctcggagaagccacttgagcagacatttgcaacaatggtgtcttccttgggaagtggaatgatgagatacattgcctttgacttccataaggaatgtaaaaatatgagatgggatcgactaagtattttattggatcaggtagcagaaatgcaagatgaattaagttattttctagtggactctgctggccaggtggtggcaaaccaggaaggcgtgttccgaagcaattgcatggattgtctagatagaaccaatgtgatccagagtttgttagctcgtcgttcacttcaggcccaacttcagagactaggagttttgcatgtgggacaaaagcttgaagaacaagatgaatttgagaagatttacaaaaatgcctgggctgacaacgcaaatgcttgtgccaagcaatatgcgggaactggtgccttgaagactgactttaccagaactggaaagagaactcatttgggacttataatggatggctggaactcaatgatacgatattataagaacaacttttccgatggatttagacaagattccatagacttatttcttggaaactattcagtggatgaattagaatctcatagtcctttaagtgttccaagggactggaaattcctggctttgcctattatcatggttgttgccttttcaatgtgcattatctgtttgcttatggctggtgacacttggacagaaacactggcctatgtgctcttctggggagttgcaagcattggaacattttttatcattctttacaatggcaaagattttgtcgatgctcccagactggtccagaaagaaaagatagactgaatttgtatttgtggaaagcggcttggcttggaagattccattgtgcagaactggagtctttactgacccgctttccacatcagcccaaggtctttttaatgcctttatccaaaagcacatcttgtgctccatgcaggatgatgacagaattgatctgatgttactgccttgatggtctctttactattgggacagttagatttataatttgaagctattctgtaattaaaatataacctgaattcagcttgcagaatggaagctgaatctgttcattgtattctattgattgtcaatttaattagctgttgcagaataagtaatatattttaaaaacctagctcctttcattatttaaaacagcaaaattatttttgtagctcagtttcattattgtcattgtagaagcggtcactattagcaggcatacttttccacacatctttggacttttcttaaaagttcagtaataagctaactgtgtttataaaatgtaagtctcttacagacatcaagtagtttgatgagacagtctgtgacttcatgataggaaagaggaggatgaggtctggggttctttaaagtctctggtgggctgcctcatgactttaatcagcttgaactgccagtgcaccagcagtttaggtgtgatgagagaattcagatatactttatctttttaaaaaagtgtaaataaaatcaaagaatgtaaagtctatctcttacgctagaggtccaaagctgcctctgttttaaagattatcccaatgtggaagatgcccatgactggtcagctacttcctcctatacattttggtttctttgagggtcactcattgagacacgcaggcctctgagagggtcttgttctagatttcatattgcacttggagggtaacagctgctttttcacgcatggtactcttgatgtttttcactctgtcaaggattttgttggctatcaatgaatgtgtctaaaacttagtgcttccaggtagttatagtactccaaatcaaggaccaacttaaacgttaatttttgtgcaaaaacaaacctgaaaaatatgcttcggaaactgtgcatagttctaattgtaagtcagattgtatattcaaattgtaattaagagatttaaatattagaacggtatgtaaggtagtataattaccactattttaaataattcagttaaacactgctgcaatatttcagtgttgtgcttgaaaatatgtacagtttttttccaatattaataccttatgttgtccttaaatatttctaaaagcgcctttatttcagcattacctttttttcatcactatcttttataaaacattaatataagtcgttacttttagaaactaaaggaaataatagctggaaaaccctctgtagtttaaaatcagtcattaaactcacaatagggtaagtaaatatagccacctgttaacatgtaaataagcataatttgttccaaagatggaatattgaaacttagttcatgtctgctgtaaaatattatttaaatgctgctgggcatttcacttaaagaacttaatgtcaacagctacaacaaagaccaaatctgaactgctaatgtggctgctttgtagggaatggactaatatcagtgtgttagatcttaaggtatcagtatttcagaatcctgcgacgattttatttctaaattcatgtactgtatgtccataagtgaaaataaaatgtcatattcttttcta

SEQ ID NO: 177478 - DNA, 1764 bp, Artificial Sequence
  derived and/or modified sequence
atggccaccgccgcctacgagcagctgaagctgcacatcacccccgagaagttctacgtggaggcctgcgacgacggcgccgacgacgtgctgaccatcgacagagtgagcaccgaggtgaccctggccgtgaagaaggacgtgccccccagcgccgtgaccagacccatcttcggcatcctgggcaccatccacctggtggccggcaactacctgatcgtgatcaccaagaagatcaaggtgggcgagttcttcagccacgtggtgtggaaggccaccgacttcgacgtgctgagctacaagaagaccatgctgcacctgaccgacatccagctgcaggacaacaagaccttcctggccatgctgaaccacgtgctgaacgtggacggcttctacttcagcaccacctacgacctgacccacaccctgcagagactgagcaacaccagccccgagttccaggagatgagcctgctggagagagccgaccagagattcgtgtggaacggccacctgctgagagagctgagcgcccagcccgaggtgcacagattcgccctgcccgtgctgcacggcttcatcaccatgcacagctgcagcatcaacggcaagtacttcgactggatcctgatcagcagaagaagctgcttcagagccggcgtgagatactacgtgagaggcatcgacagcgagggccacgccgccaacttcgtggagaccgagcagatcgtgcactacaacggcagcaaggccagcttcgtgcagaccagaggcagcatccccgtgttctggagccagagacccaacctgaagtacaagcccctgccccagatcagcaaggtggccaaccacatggacggcttccagagacacttcgacagccaggtgatcatctacggcaagcaggtgatcatcaacctgatcaaccagaagggcagcgagaagcccctggagcagaccttcgccaccatggtgagcagcctgggcagcggcatgatgagatacatcgccttcgacttccacaaggagtgcaagaacatgagatgggacagactgagcatcctgctggaccaggtggccgagatgcaggacgagctgagctacttcctggtggacagcgccggccaggtggtggccaaccaggagggcgtgttcagaagcaactgcatggactgcctggacagaaccaacgtgatccagagcctgctggccagaagaagcctgcaggcccagctgcagagactgggcgtgctgcacgtgggccagaagctggaggagcaggacgagttcgagaagatctacaagaacgcctgggccgacaacgccaacgcctgcgccaagcagtacgccggcaccggcgccctgaagaccgacttcaccagaaccggcaagagaacccacctgggcctgatcatggacggctggaacagcatgatcagatactacaagaacaacttcagcgacggcttcagacaggacagcatcgacctgttcctgggcaactacagcgtggacgagctggagagccacagccccctgagcgtgcccagagactggaagttcctggccctgcccatcatcatggtggtggccttcagcatgtgcatcatctgcctgctgatggccggcgacacctggaccgagaccctggcctacgtgctgttctggggcgtggccagcatcggcaccttcttcatcatcctgtacaacggcaaggacttcgtggacgcccccagactggtgcagaaggagaagatcgactag

SEQ ID NO: 177479 - protein, 150 aa, Artificial Sequence
  derived and/or modified sequence
MLRPKALTQVLSQANTGGVQSTLLLNNEGSLLAYSGYGDTDARVTAAIASNIWAAYDRNGNQAFNEDNLKFILMDCMEGRVAITRVANLLLCMYAKETVGFGMLKAKAVCGTDLCSPSAGPGFGAVPGGAPHPSGGILTALVEAGVRKEK

SEQ ID NO: 177480 - protein, 125 aa, Artificial Sequence
  derived and/or modified sequence
MLRPKALTQVLSQANTGGVQSTLLLNNEGSLLAYSGYGDTDARVTAAIASNIWAAYDRNGNQAFNEDNLKFILMDCMEGRVAITRVANLLLCMYAKETVGFGMLKAKAQALVQYLEEPLTQVAAS

SEQ ID NO: 177481 - DNA, 453 bp, Artificial Sequence
  derived and/or modified sequence
atgctgagacccaaggccctgacccaggtgctgagccaggccaacaccggcggcgtgcagagcaccctgctgctgaacaacgagggcagcctgctggcctacagcggctacggcgacaccgacgccagagtgaccgccgccatcgccagcaacatctgggccgcctacgacagaaacggcaaccaggccttcaacgaggacaacctgaagttcatcctgatggactgcatggagggcagagtggccatcaccagagtggccaacctgctgctgtgcatgtacgccaaggagaccgtgggcttcggcatgctgaaggccaaggccgtgtgcggcaccgacctgtgcagccccagcgccggccccggcttcggcgccgtgcccggcggcgccccccaccccagcggcggcatcctgaccgccctggtggaggccggcgtgagaaaggagaagtag

SEQ ID NO: 177482 - DNA, 378 bp, Artificial Sequence
  derived and/or modified sequence
atgctgagacccaaggccctgacccaggtgctgagccaggccaacaccggcggcgtgcagagcaccctgctgctgaacaacgagggcagcctgctggcctacagcggctacggcgacaccgacgccagagtgaccgccgccatcgccagcaacatctgggccgcctacgacagaaacggcaaccaggccttcaacgaggacaacctgaagttcatcctgatggactgcatggagggcagagtggccatcaccagagtggccaacctgctgctgtgcatgtacgccaaggagaccgtgggcttcggcatgctgaaggccaaggcccaggccctggtgcagtacctggaggagcccctgacccaggtggccgccagctag

SEQ ID NO: 177483 - DNA, 453 bp, Artificial Sequence
  derived and/or modified sequence
atgcttcggcctaaagcactcacccaggtcctctcccaggctaatacagggggggtccagagcaccctgctcttaaataacgaagggtctttactcgcatactccggctacggtgacactgatgccagagtaaccgccgctatagctagcaacatatgggcggcatatgatcgaaatggcaaccaagcgttcaatgaagacaatcttaaatttatcctgatggattgcatggaaggcagagtagcaattacgcgtgttgctaacctgcttctttgcatgtatgcaaaggagacagtggggtttgggatgttgaaggctaaggcagtgtgtggaacagacctatgttccccaagcgcaggacctggtttcggagctgttcccgggggggcaccccacccatccggcgggatcttgaccgccctagtcgaggcaggcgtgcgaaaggagaaatag

SEQ ID NO: 177484 - DNA, 378 bp, Artificial Sequence
  derived and/or modified sequence
atgctcagaccgaaagctctgacacaggtgctgtctcaggccaatacaggtggagtgcaaagcacgcttctgcttaacaatgagggatctttgctggcatactcggggtacggtgataccgacgcccgtgtgaccgctgccattgctagcaacatttgggcagcctatgacagaaacggtaaccaggccttcaacgaggataacttaaagttcatcctaatggattgcatggaaggacgcgtagctatcacccgcgtagcaaatctgctgctgtgcatgtacgctaaagaaactgtgggattcggtatgttgaaagcaaaggcccaagctctggtgcagtatctggaagaaccactgacccaagtagcagcctcctag

SEQ ID NO: 177485 - DNA, 587 bp, Artificial Sequence
  derived and/or modified sequence
gagatctgggtgcaaaagcccagggttaggaaccgtaggcatgctgcgccccaaggctttgacccaggtgctaagccaagccaacactggaggcgtccagagcaccctgctgctgaataacgagggatcactgctggcctactctggttacggggacactgacgcccgggtcaccgctgccatagccagtaacatctgggccgcctacgaccggaacgggaaccaagcgtttaatgaagacaatctcaaattcatcctcatggactgcatggagggccgtgtagccatcacccgagtggccaaccttctgctgtgtatgtatgccaaggagaccgtgggctttggaatgctcaaggccaaggctgtgtgcgggactgatctctgttctccctctgcaggcccaggctttggtgcagtacctggaggagcccctcacccaagtggcggcatcttaacggcattggtggaagctggggtcagaaaagagaaatgaccatttggaggggcggggcctcctagaagaaccttcttagacaatggggggaggatgggactttgttttttccaagaataaacttcaactcctg

SEQ ID NO: 177486 - DNA, 655 bp, Artificial Sequence
  derived and/or modified sequence
caatagccaggcgaagaaactacaactcccagggcgtcccggagcaggccaacgggactacgggaagcagcgggcagcggcccgcgggaggcacctcggagatctgggtgcaaaagcccagggttaggaaccgtaggcatgctgcgccccaaggctttgacccaggtgctaagccaagccaacactggaggcgtccagagcaccctgctgctgaataacgagggatcactgctggcctactctggttacggggacactgacgcccgggtcaccgctgccatagccagtaacatctgggccgcctacgaccggaacgggaaccaagcgtttaatgaagacaatctcaaattcatcctcatggactgcatggagggccgtgtagccatcacccgagtggccaaccttctgctgtgtatgtatgccaaggagaccgtgggctttggaatgctcaaggccaaggcccaggctttggtgcagtacctggaggagcccctcacccaagtggcggcatcttaacggcattggtggaagctggggtcagaaaagagaaatgaccatttggaggggcggggcctcctagaagaaccttcttagacaatggggggaggatgggactttgttttttccaagaataaacttcaactcctgtcatgtg

SEQ ID NO: 177487 - DNA, 453 bp, Artificial Sequence
  derived and/or modified sequence
atgctgcggcccaaggccctgacccaggtgctgagccaggccaacacaggaggagtgcagagcaccctgctgctgaacaatgaaggcagcctgctggcctacagcggctatggagacacagatgcccgggtgacagctgccatcgccagcaacatctgggccgcctatgacagaaatggaaaccaggccttcaatgaagacaacctgaagttcatcctgatggactgcatggagggccgggtggccatcaccagggtggccaacctgctgctgtgcatgtatgccaaggagaccgtgggcttcggcatgctgaaggccaaggctgtgtgtggcacagacctgtgcagccccagcgctggccctggctttggagctgtgcctggaggagccccccaccccagcggcggcatcctgacagccctggtggaggccggcgtgaggaaggagaagtag

SEQ ID NO: 177488 - DNA, 378 bp, Artificial Sequence
  derived and/or modified sequence
atgctgcggcccaaggccctgacccaggtgctgagccaggccaacacaggaggagtgcagagcaccctgctgctgaacaatgaaggcagcctgctggcctacagcggctatggagacacagatgcccgggtgacagctgccatcgccagcaacatctgggccgcctatgacagaaatggaaaccaggccttcaatgaagacaacctgaagttcatcctgatggactgcatggagggccgggtggccatcaccagggtggccaacctgctgctgtgcatgtatgccaaggagaccgtgggcttcggcatgctgaaggccaaggcccaggccctggtgcagtacctggaggagcccctgacccaggtggccgccagctag

SEQ ID NO: 177489 - DNA, 453 bp, Artificial Sequence
  derived and/or modified sequence
atgctgcggcccaaggccctgacccaggtgctgagccaggccaacacaggcggtgtgcaatctacattgttgctcaataatgagggctcgcttttggcctattctggatacggagatacagacgccagagtgaccgccgccatcgcctccaacatctgggcagcttatgatcgaaacggaaatcaggccttcaacgaggataacctcaaattcatcctaatggattgtatggagggaagagtagcaatcactcgtgtggcgaacctgctcttgtgcatgtacgccaaagagaccgtggggttcggaatgttgaaggctaaagccgtatgcgggacagacctgtgcagtccatcagctggcccagggtttggagccgtgcctggaggagcacctcacccaagcggcggcatcctaaccgcactggtagaggccggtgtcagaaaagagaagtag

SEQ ID NO: 177490 - DNA, 378 bp, Artificial Sequence
  derived and/or modified sequence
atgctgcggcccaaggccctgacccaggtgctgagccaggccaacactggtggcgtccagagcaccttattgttgaataatgagggttctcttctcgcttacagtggctacggcgacacggacgcgcgcgtcacggcagctatcgcgtctaacatttgggcagcttatgatagaaacgggaatcaagcttttaatgaagacaatctcaagttcatcctcatggactgcatggaaggacgcgtcgccatcacacgggtggcaaacctgctgctctgcatgtacgccaaggaaaccgttggtttcggcatgctcaaagctaaagctcaggccctcgtacagtatctagaggagcctttgacacaggtcgccgccagctag

SEQ ID NO: 177491 - DNA, 453 bp, Artificial Sequence
  derived and/or modified sequence
atgctccggccaaaagctttaacccaggtgctctcgcaggctaacacgggcggagtgcagagcaccctcctgttgaacaatgaggggtccctactggcttactccggctacggagacacggatgccagagttaccgcggctatcgcgtctaacatctgggcggcttacgacagaaacggtaaccaggcttttaacgaggataaccttaagtttatcctcatggattgtatggaaggtagagtcgctattaccagagtcgcaaacttgctgctttgcatgtatgcgaaagagaccgtggggttcggtatgctgaaggcaaaggccgtgtgtggcacggacctgtgcagccctagcgcgggtcccggattcggcgctgtgccaggaggcgcaccccatcccagcgggggaatcctcacagccctcgtggaggccggtgtgcgtaaagaaaaatag

SEQ ID NO: 177492 - DNA, 378 bp, Artificial Sequence
  derived and/or modified sequence
atgctccgtcctaaggctttgactcaggtgctcagccaggcgaatacaggaggcgttcaaagcactctcctccttaacaatgaaggttccctgcttgcctatagcggttacggggacaccgacgcccgagtaacagcagctattgcgagcaatatttgggcagcctacgacagaaatgggaaccaggctttcaatgaggataatttgaaattcatactgatggactgtatggagggtcgggtggccatcacgcgcgtcgcaaacctcctgctatgcatgtatgcgaaggagaccgtgggctttgggatgttaaaggccaaggcgcaggctctcgtgcagtatcttgaagagccactaacgcaggtagccgctagctag

SEQ ID NO: 177493 - protein, 187 aa, Artificial Sequence
  derived and/or modified sequence
MAALCRTRAVAAESHFLRVFLFFRPFRGVGTESGSESGSSNAKEPKTRAGGFASALERHSELLQKVEPLQKGSPKNVESFASMLRHSPLTQMGPAKDKLVIGRIFHIVENDLYIDFGGKFHCVCRRPEVDGEKYQKGTRVRLRLLDLELTSRFLGATTDTTVLEANAVLLGIQESKDSRSKEEHHEK

SEQ ID NO: 177494 - DNA, 564 bp, Artificial Sequence
  derived and/or modified sequence
atggccgccctctgccgtactagggccgtcgctgctgaatcacactttctgagagtgtttctgtttttcaggccttttaggggggtgggcacggagtccggatccgaaagtggctcttcaaatgcgaaggagcccaagacccgcgcaggcggattcgcatcagccctggaaaggcacagtgagctgctgcagaaggtcgagccactccaaaaggggtccccaaaaaacgtcgagtcttttgcctccatgctgcggcattcccctttgactcagatgggccctgcaaaagataaactagtcattggaagaatcttccatatcgtggagaacgatttgtacattgatttcggcggcaaattccactgcgtctgtcgccggcccgaagtggacggtgagaagtaccagaaagggaccagggtaaggctgcgcctgttagatttagagctgacgtcccgcttcctgggagcaaccacagataccacagttctagaggccaatgctgttctgctgggcatccaggagagcaaggatagtcggagcaaagaggagcaccacgagaaatag

SEQ ID NO: 177495 - DNA, 564 bp, Artificial Sequence
  derived and/or modified sequence
atggccgccctgtgcaggaccagggctgtggccgctgagagccacttcctgcgggtcttcctgttcttccggcccttccggggcgtgggcacagaaagtggcagcgagagcggcagcagcaatgccaaggagcccaagaccagggctgggggctttgccagcgccctggagcggcacagcgagctgctgcagaaggtggagcccctgcagaagggcagccccaagaatgtggagagctttgcctccatgctgcggcacagccccctgacccagatgggccctgccaaggacaagctggtgattggccgcatcttccacatcgtggagaatgacctgtacatcgactttggaggcaagttccactgtgtgtgcagaagacctgaggtggatggagagaagtaccagaagggcaccagggtgcggctgcggctgctggacctggagctgaccagccgcttcctgggcgccaccacagacaccaccgtgctggaggccaatgctgtgctgctgggcatccaggagagcaaggacagccgcagcaaggaggagcaccacgagaagtag

SEQ ID NO: 177496 - DNA, 850 bp, Artificial Sequence
  derived and/or modified sequence
caaaggtcagaggtaaagaagtcatggcggcgctgtgtcggacccgtgctgtggctgccgagagccattttctgcgagtgtttctcttcttcaggccctttcggggtgtaggcactgagagtggatccgaaagtggtagttccaatgccaaggagcctaagacgcgcgcaggcggtttcgcgagcgcgttggagcggcactcggagcttctacagaaggtggagcccctacagaagggttctccaaaaaatgtggaatcctttgcatctatgctgagacattctcctcttacacagatgggacctgcaaaggataaactggtcattggacggatctttcatattgtggagaatgatctgtacatagattttggtggaaagtttcattgtgtatgtagaagaccagaagtggatggagagaaataccagaaaggaaccagggtccggttgcggctattagatcttgaacttacgtctaggttcctgggagcaacaacagatacaactgtactagaggctaatgcagttctcttgggaatccaggagagtaaagactcaagatcgaaagaagaacatcatgaaaaataaatgaactttgcttagtggattgactcctttgctgaagtcagttattcatcaagaatgcaattagactaattgtgaataaatgattgaatgaagatataataaataaaagctataattatagataactcttattagaattttctttagcaatattcccaccccccaccccttgttttgctcttaatgtttttttcctttggtggggatagtatacactgtactaagaaattgtcattcaataaatacgttttgagtgctgtcta

SEQ ID NO: 177497 - DNA, 564 bp, Artificial Sequence
  derived and/or modified sequence
atggccgccctgtgccggacccgggccgtggccgccgagagccacttcctccgagtcttcctattcttcagaccttttcggggtgtcgggactgagagcggtagcgagtctgggtcatcgaatgcaaaggaacctaagacccgtgctggcgggttcgcaagcgcattggagcgtcactcagagttgctgcagaaagtggagcctctccaaaaaggtagtcctaaaaacgtggaatctttcgcgagcatgctgaggcattcccctctgactcagatggggcctgccaaggataaactggtgatcggtcggatattccatattgtagaaaatgatctttatatcgactttggtgggaaattccattgcgtatgccgtaggccggaggtggacggtgaaaaataccaaaaaggtaccagagtgaggttgagactgctggacctggagttgacgtctaggttcctcggcgccactacagataccaccgtcctagaggctaatgctgtgctgttggggattcaggagtctaaggatagcagaagtaaggaagaacaccacgagaaatag

SEQ ID NO: 177498 - DNA, 564 bp, Artificial Sequence
  derived and/or modified sequence
atggccgcactgtgtagaacccgggcagttgctgccgaatcccatttcctgcgcgttttcctatttttccggccattccgcggagtgggaacagagtcaggcagtgaatccggtagcagtaatgccaaagaacccaaaacaagagcgggaggctttgcaagcgccctggagagacacagcgagttactgcagaaggtcgagccactgcaaaagggttcacccaagaatgtggaatcattcgcgagtatgctccgccactctcccctcacgcagatgggtcccgcaaaagacaaactcgtaattggacgaatattccacatcgtggagaatgatctctacatcgacttcgggggaaaatttcactgcgtgtgccgcagacccgaagttgacggagagaaatatcaaaaagggactagagtgcgcctcagacttttggatcttgaactaaccagtcggtttctcggcgctacaactgacacaaccgtgctggaggccaatgctgtgctgttaggtatccaggaatcaaaggactcgcgctctaaagaggagcaccacgaaaagtag

SEQ ID NO: 177499 - DNA, 564 bp, Artificial Sequence
  derived and/or modified sequence
atggccgccctgtgcagaaccagagccgtggccgccgagagccacttcctgagagtgttcctgttcttcagacccttcagaggcgtgggcaccgagagcggcagcgagagcggcagcagcaacgccaaggagcccaagaccagagccggcggcttcgccagcgccctggagagacacagcgagctgctgcagaaggtggagcccctgcagaagggcagccccaagaacgtggagagcttcgccagcatgctgagacacagccccctgacccagatgggccccgccaaggacaagctggtgatcggcagaatcttccacatcgtggagaacgacctgtacatcgacttcggcggcaagttccactgcgtgtgcagaagacccgaggtggacggcgagaagtaccagaagggcaccagagtgagactgagactgctggacctggagctgaccagcagattcctgggcgccaccaccgacaccaccgtgctggaggccaacgccgtgctgctgggcatccaggagagcaaggacagcagaagcaaggaggagcaccacgagaagtag

SEQ ID NO: 177500 - protein, 270 aa, Artificial Sequence
  derived and/or modified sequence
MTQNTVIVNGVAMASRPSQPTHVNVHIHQESALTQLLKAGGSLKKFLFHPGDTVPSTARIGYEQLALGVTQILLGVVSCVLGVCLSLGPWTVLSASGCAFWAGSVVIAAGAGAIVHEKHPGKLAGYISSLLTLAGFATAMAAVVLCVNSFIWQTEPFLYIDTVCDRSDPVFPTTGYRWMRRSQENQWQKEECRAYMQMLRKLFTAIRALFLAVCVLKVIVSLVSLGVGLRNLCGQSSQPLNEEGSEKRLLGENSVPPSPSREQTSTAIVL

SEQ ID NO: 177501 - DNA, 813 bp, Artificial Sequence
  derived and/or modified sequence
atgacccagaacaccgtgatcgtgaacggcgtggccatggccagcagacccagccagcccacccacgtgaacgtgcacatccaccaggagagcgccctgacccagctgctgaaggccggcggcagcctgaagaagttcctgttccaccccggcgacaccgtgcccagcaccgccagaatcggctacgagcagctggccctgggcgtgacccagatcctgctgggcgtggtgagctgcgtgctgggcgtgtgcctgagcctgggcccctggaccgtgctgagcgccagcggctgcgccttctgggccggcagcgtggtgatcgccgccggcgccggcgccatcgtgcacgagaagcaccccggcaagctggccggctacatcagcagcctgctgaccctggccggcttcgccaccgccatggccgccgtggtgctgtgcgtgaacagcttcatctggcagaccgagcccttcctgtacatcgacaccgtgtgcgacagaagcgaccccgtgttccccaccaccggctacagatggatgagaagaagccaggagaaccagtggcagaaggaggagtgcagagcctacatgcagatgctgagaaagctgttcaccgccatcagagccctgttcctggccgtgtgcgtgctgaaggtgatcgtgagcctggtgagcctgggcgtgggcctgagaaacctgtgcggccagagcagccagcccctgaacgaggagggcagcgagaagagactgctgggcgagaacagcgtgccccccagccccagcagagagcagaccagcaccgccatcgtgctgtag

SEQ ID NO: 177502 - DNA, 813 bp, Artificial Sequence
  derived and/or modified sequence
atgacacagaataccgttattgtgaatggagtggctatggcttcccggccgtctcagcccacgcacgtgaacgttcacatccatcaagaatctgcactaactcagctgcttaaggcaggcggctccctcaaaaagttcctgtttcaccctggagataccgtcccttccacagccaggattgggtacgagcagcttgctcttggagtgactcagatccttctcggcgtggtttcttgcgtgttgggcgtgtgtctttcactggggccatggactgttctttctgcttccggttgcgccttttgggcgggtagtgtggtgattgcggctggcgctggggctatagtgcacgaaaagcatccggggaaactggccggctatatcagttcgctgctaacgctggcaggctttgcgaccgccatggccgctgtcgtgctgtgtgtgaactccttcatctggcagactgagccatttctctacatagacaccgtctgcgatcgctctgatcctgtcttccccaccactgggtataggtggatgaggagatcacaggagaaccaatggcagaaggaagagtgcagggcatacatgcaaatgttgcggaagctcttcaccgccatcagggctctcttcctagccgtatgtgttctgaaagttatcgtctcgctggtgagcctgggtgtggggctcagaaacctttgcggtcaaagcagtcagcccctaaacgaagagggcagtgaaaagagacttctgggcgagaattccgtgccaccaagcccatctcgcgaacagacatccactgcaattgtgctgtag

SEQ ID NO: 177503 - DNA, 813 bp, Artificial Sequence
  derived and/or modified sequence
atgacgcagaatacggtaattgttaacggcgtggcaatggctagcaggccaagccagcctacccacgtgaacgtccatatccaccaggaaagcgccctgacccaacttctgaaggccggtggcagtcttaaaaagtttctgtttcacccgggggacaccgtaccgtctacggctcgcattggctatgaacagttggcacttggagtgacccagatcctgctgggcgtggtgagttgcgtgcttggggtgtgcctatcactaggaccctggactgttctttctgcctccgggtgcgctttttgggcaggcagcgtcgtcattgcagcaggcgccggcgctattgtgcatgagaaacacccagggaagctcgctggatatataagctccttgttgactcttgctggatttgccaccgctatggcagccgtggtgctctgcgtaaatagtttcatatggcagacagagccatttctgtatattgacacagtttgcgaccgaagcgaccccgtgttccccacaacaggttataggtggatgagaagatctcaggagaatcagtggcagaaagaagaatgtcgggcttatatgcaaatgctgcggaaattattcacggcaatccgggcccttttcctagctgtctgtgtgctgaaggttatcgtgtctctggtgtcattgggcgttggccttcggaatctctgcggacaaagttcacagcccctgaatgaagagggctctgaaaagcgccttctcggcgaaaactcggtccctccgtcaccctctcgtgaacagaccagcaccgccatagtgctctag

SEQ ID NO: 177504 - DNA, 813 bp, Artificial Sequence
  derived and/or modified sequence
atgacacaaaatactgtaatcgtgaacggggtggctatggctagtagaccgtcccagcccacccacgtaaacgtgcacatccatcaagagtccgccctcacacagctgctgaaagcaggagggagcctgaaaaaattcttgttccacccaggggacactgttccgtctactgcaaggattgggtacgagcagttggccctgggcgtgacccaaattcttctcggcgtggtcagctgcgtgctgggggtctgccttagcctcgggccctggaccgtgctgagtgcaagtggctgtgcattttgggcaggctctgttgtcatcgccgctggcgcaggcgcaattgtgcacgagaagcacccaggtaagcttgccgggtacatttctagcttactgactttggctgggttcgcaactgcaatggccgccgtagtgttgtgcgttaactcatttatttggcagaccgaaccattcctctatattgatacagtttgtgacagatccgaccctgtttttcccacaactggttaccgctggatgcggagatcgcaggagaatcaatggcagaaagaggaatgtcgggcttatatgcagatgttgagaaaacttttcacagctatcagagctctgtttcttgccgtttgcgtgctgaaggtgatcgtgtccttggtatcacttggagtcggcttacgcaatctctgtggacagagtagtcagccgctcaatgaagagggctcagaaaagcgcctccttggagaaaactccgtgccgccatccccaagtagggagcagaccagtacggccattgttctctag

SEQ ID NO: 177505 - DNA, 813 bp, Artificial Sequence
  derived and/or modified sequence
atgacacaaaacactgttatcgtcaatggcgtagctatggcctcaagaccctcccagcccacgcacgttaacgtgcatatccatcaggagtccgccctcacacagctgctcaaggctgggggctccctgaagaagtttctgtttcatcctggtgacacagtccccagtaccgcgaggattggctacgagcaactagccttgggtgtgacacagattttactcggagtcgtttcttgtgtgctcggcgtctgtctgtccctgggcccatggactgtgctgtccgccagcgggtgcgctttttgggcgggatctgttgtgatcgcagctggcgcaggtgccatcgtgcatgaaaagcatccgggaaagttggcaggctacattagctctctcctcacccttgcggggtttgctaccgccatggcggctgtagtcctctgcgttaactcatttatctggcaaacagagccgtttctgtacatcgatacagtttgcgaccgttcagatccggtcttccctaccaccggctacaggtggatgcggcgcagccaggagaatcagtggcagaaagaagaatgccgggcctatatgcaaatgctgcggaagttatttaccgcaatacgagcattattcctggctgtgtgcgttttaaaagtcattgttagtctggtatcgttgggtgtgggcctcagaaacctctgtgggcagagcagtcaacctctcaacgaagaaggttctgagaaacggctcttgggggaaaatagtgtgccaccctccccttccagggaacaaactagcacggctatcgtgctgtag

SEQ ID NO: 177506 - DNA, 813 bp, Artificial Sequence
  derived and/or modified sequence
atgacacaaaataccgtcattgttaatggcgtcgctatggctagcaggccaagccagcccacgcatgtgaatgtccacattcaccaagaatctgctctcactcagttgctgaaggccggcggcagtcttaaaaaattcctgttccacccaggggacaccgtgccttctaccgcaaggatcgggtatgaacagctggcattgggggtgactcagatcctactcggcgtggtcagctgcgttcttggggtatgtctgtctcttgggccttggaccgtactctctgcgtcagggtgtgcattctgggccggatccgtcgtgatcgccgctggggcgggcgccattgtccacgagaaacacccaggcaagctggccggttacatcagctcactgctgacactcgcaggctttgccaccgcaatggctgcagtggttctctgcgtgaatagctttatatggcagactgagcctttcctgtacatagacactgtctgcgaccgcagtgaccccgtctttcctacaactgggtaccggtggatgagacggtctcaggaaaaccagtggcagaaagaggaatgtcgggcatacatgcagatgctgcgtaaactcttcaccgcaattcgcgcactgtttttagcggtgtgtgtgctgaaggtgattgtttcactcgtgtccctgggtgtaggtctgagaaacctttgcggccagtcaagccagcctctcaacgaagaggggtcagagaagcggctgctaggcgagaactcagtccccccttctccatcgagggagcaaacctcaactgcgatagtcctgtag

SEQ ID NO: 177507 - DNA, 813 bp, Artificial Sequence
  derived and/or modified sequence
atgacacaaaacactgtgatcgtgaatggcgttgcaatggctagcaggccgtcccaaccaacacatgtcaacgttcatatccatcaggagtccgctcttacccagctgttgaaagcgggagggtcactcaaaaaattcctgtttcatcctggggacacagtcccaagcacggctaggatcgggtatgagcagctagctctcggagttacacagattctgctgggtgtcgtgtcatgcgttttgggagtctgtctctccttagggccctggaccgtgctttcagccagtggatgcgcgttctgggcaggctcggtggttatcgccgcaggtgctggcgcaattgtgcacgaaaagcatccgggaaagctggcaggctacatcagcagcctcctcactctggctgggttcgctactgccatggcagcagttgtcctgtgtgtgaacagctttatctggcagacagagcccttcctgtatatcgatactgtctgcgatcgatccgacccagtttttccaacgactggctatcggtggatgagacgcagtcaggagaatcaatggcaaaaggaagagtgccgagcctatatgcagatgttaaggaagctgttcacagccatccgggccctgtttttagcggtgtgtgtgcttaaagtcattgttagcctggtgtccctgggggtggggttgaggaacctgtgtggacaaagttcccagccactcaacgaagaaggcagtgagaaacggctgctgggagaaaatagcgtaccaccgtctccgagcagggagcagacctccaccgccattgtgctgtag

SEQ ID NO: 177508 - DNA, 813 bp, Artificial Sequence
  derived and/or modified sequence
atgacccagaacacagtgattgtgaatggagtggccatggccagccggcccagccagcccacccacgtgaatgtgcacatccaccaggagagcgccctgacccagctgctgaaggccggcggcagcctgaagaagttcctgttccaccctggggacacagtgcccagcacagcccgcatcggctatgagcagctggccctgggcgtgacccagatcctgctgggcgtggtgtcctgtgtgctgggcgtgtgcctgagcctgggcccctggacagtgctgagcgccagcggctgtgccttctgggccggctctgtggtgattgctgctggagctggggccatcgtgcatgagaagcaccctgggaagctggccggctacatcagcagcctgctgaccctggccggctttgccacagccatggctgctgtggtgctgtgtgtgaacagcttcatctggcagacagagcccttcctgtacatcgacacagtgtgtgacagaagtgaccctgtgttccccaccaccggctaccgctggatgaggaggagccaggagaaccagtggcagaaggaggagtgccgggcctacatgcagatgctgaggaagctgttcaccgccatccgggccctcttcctggccgtgtgtgtgctgaaggtgattgtgtccctggtgtccctgggcgtgggcctgaggaacctgtgtggccagagcagccagcccctgaatgaggagggcagcgagaagaggctgctgggggagaacagcgtgccccccagccccagccgggagcagaccagcacagccatcgtgctgtag

SEQ ID NO: 177509 - DNA, 813 bp, Artificial Sequence
  derived and/or modified sequence
atgacccagaacaccgtgatcgtgaacggcgtggccatggccagcaggccatcacagcctacccacgtgaacgtgcatatccaccaggaatccgccctgacccagcttctgaaggctggcggatcgctgaagaagttcttgtttcatcctggcgatactgtgccatcaacggccagaataggttacgagcagctcgcgctcggagtcacacagattctgcttggcgtggtcagttgtgttctgggtgtctgcctatcactggggccctggacagtgctgagcgccagcggttgcgcgttttgggcaggatcagtagttatcgctgcaggagcgggtgcaattgttcacgagaagcatcctggaaaactcgccggctacatcagttctcttctgactctggctggatttgccaccgccatggctgcggtggtgctctgcgtcaattcctttatctggcaaacggagccatttctctacatcgatactgtttgcgacaggagcgaccccgtgttccccacgacggggtatcgatggatgcgtcgctcacaagagaatcagtggcagaaagaagaatgccgcgcatatatgcagatgctacggaagctgtttacagcgattagggccctgttccttgccgtgtgcgtcctcaaagttatcgtgagtttggtatctttaggggtgggcctgcgcaatctgtgcggacaatcttctcagcccctgaatgaagagggaagtgagaaacgcctgctgggggagaatagtgtcccaccctccccaagtcgggaacaaacgtccaccgcgatagttctctag

SEQ ID NO: 177510 - DNA, 813 bp, Artificial Sequence
  derived and/or modified sequence
atgacccagaacaccgtgatcgtgaacggcgtggccatggccagccgcccttcccagcctactcacgtgaatgtgcacattcaccaggagtccgccttaacccagttacttaaagccgggggatctctaaaaaagttcctgttccatcctggggacaccgtccctagcaccgcccgaattggatatgaacagcttgccctaggtgtgacccagattttactgggggtggtcagctgtgtgcttggggtctgcttgtccttagggccgtggaccgtcctgtccgcctccggttgcgctttttgggcagggagcgtggttatcgccgcgggcgccggagctatagttcatgagaaacaccccggcaagctcgccgggtatataagctctttgctcacattagccggcttcgctacggccatggctgccgtggtactgtgtgtcaactcctttatatggcagaccgaacctttcttgtatattgacaccgtgtgcgataggtccgaccccgtgttccccacaacagggtatagatggatgcggagaagccaagaaaaccagtggcagaaagaagagtgcagggcctacatgcagatgttaagaaagctgtttacggcgattagagccctgttccttgccgtgtgtgtgctcaaggtaatagtcagcttggtgtctctgggcgtggggctgaggaatctgtgtggacagagcagccagcctctgaacgaggaggggagcgaaaagcgattactgggggaaaattccgttcctccttctccctcacgggagcagacatcaacagcgattgtgctttag

SEQ ID NO: 177511 - DNA, 813 bp, Artificial Sequence
  derived and/or modified sequence
atgacccagaacaccgtgatcgtgaacggcgtggccatggccagccggcccagtcagccaacccatgtaaacgtgcacatccaccaggagtctgcacttacacagctgctgaaggctggagggagcctaaagaaattcctgtttcaccctggggacacagtcccgagcaccgcacggattggctatgagcaactcgctctcggagtgacacaaattctactgggcgtcgtgagttgtgttttaggcgtttgcttgagcctgggcccgtggacggtcctctcagcctcaggctgcgccttttgggctgggtccgtagtgattgctgctggtgctggcgcaattgtccacgagaaacatcctggcaaactggccgggtacattagcagcctgctcactctcgctggattcgcgactgctatggctgcggtggtgctgtgtgtgaactccttcatttggcagactgaaccattcctctatatcgatacagtgtgcgacaggtccgatcccgttttccccacaacagggtacagatggatgaggaggagtcaggaaaaccaatggcagaaggaggagtgcagagcctatatgcagatgctcaggaaactctttacagccatccgcgctcttttcctggctgtgtgcgtgctcaaagtgattgtatctctcgtgtctctgggtgtcggactgcgaaacctctgtggccagtcttcccagcccttgaatgaagagggcagcgagaaacggctgctgggcgagaattccgtgccgccctctcctagcagagaacagacttcaacggcaattgtgctgtag

SEQ ID NO: 177512 - DNA, 813 bp, Artificial Sequence
  derived and/or modified sequence
atgacccagaacaccgtgatcgtgaacggcgtggccatggccagccggccatctcagcctacccacgtcaacgttcacatccatcaggaatcggctcttacgcagcttcttaaggctggggggagtctcaaaaagttcctgttccatccaggggatacggtgccttctaccgctcggatcggctatgagcagttggccttgggcgtgacccagatcttattgggcgttgtttcatgtgtgctgggggtctgcctaagcctgggcccatggaccgtgctgtctgcctctggttgcgcattctgggccggatcagtcgtgatagcggctggcgctggagccatcgtgcacgaaaagcacccaggcaagctggccggctatatttcctcacttctaactctggcgggatttgccaccgccatggccgctgtcgtactgtgtgtcaactcatttatctggcagaccgagccatttctttacatcgataccgtttgcgataggtctgacccagtctttccgacaaccggataccgatggatgcgtcgtagccaggaaaatcagtggcaaaaagaagagtgccgagcctatatgcagatgctccggaaactatttaccgctattcgagccctgtttctggcagtgtgcgtgcttaaagtgatcgtgtcactggtaagcctgggggtgggactcaggaacctgtgtggacagtcttcacagcctcttaacgaagagggctccgagaagagactgttaggagagaatagtgtacccccgagcccttcgcgggagcagacatccactgcaatagttctctag

SEQ ID NO: 177513 - DNA, 813 bp, Artificial Sequence
  derived and/or modified sequence
atgacccagaacaccgtgatcgtgaacggcgtggccatggccagccggccatctcaacccacacacgtcaacgtccacatacaccaagaaagcgccttaacacagctgcttaaggccggcggatccttgaagaagttcctttttcacccaggtgacaccgtaccttctacggcgagaataggttacgagcagttagcccttggcgtcactcaaattctcttgggcgttgtatcttgtgtgcttggcgtctgccttagtcttggaccttggacggttctaagcgcaagcggatgtgccttttgggcggggtctgtggtgattgccgccggagccggggcaatcgtgcatgaaaaacatccaggcaaactggccggatacatcagcagcctactgactctagctggcttcgcaaccgcaatggccgccgtggttttgtgcgtgaactcatttatatggcagaccgagccatttctgtacatcgacacagtctgtgatcgctccgaccccgtgtttcctaccactggatacaggtggatgcgtcggtctcaagagaaccagtggcagaaggaagaatgtcgcgcctacatgcaaatgctgcgcaagcttttcaccgcaataagagccctgttcttggccgtgtgtgtcctgaaggtcatagtgtcactcgtgtcgcttggtgtcggcctccgtaatctttgtggccagagcagccaaccgctgaacgaggagggctccgagaagaggctgctgggcgagaactcggtccccccttctccctcccgcgagcaaaccagtacagccatcgtgctttag

SEQ ID NO: 177514 - DNA, 813 bp, Artificial Sequence
  derived and/or modified sequence
atgacccagaacaccgtgatcgtgaacggcgtggccatggccagcaggccaagtcagccaacacatgtgaacgtccacattcaccaagagagtgcgctaacccagttgttaaaggccggggggtcccttaaaaaattcctattccaccccggcgacaccgtgccaagcacagcccgtatcgggtatgaacagctggcactaggcgtgacccaaattcttctgggggtggtatcctgtgttctgggagtctgccttagtctgggcccctggactgtcctgagtgcatctggatgcgccttttgggcaggaagtgttgttatcgctgcaggagccggtgctatcgttcatgagaagcacccgggtaaactcgctggatatatcagctcgttattaaccctcgcaggcttcgcgaccgccatggcagccgtggtcctgtgtgtcaattcttttatctggcagactgaacccttcctgtacatcgatacagtttgtgaccgaagcgaccccgtgttccccacaacagggtatagatggatgcgtcgctctcaagaaaatcaatggcaaaaagaggagtgtagggcctacatgcaaatgctaagaaaactgttcactgctataagagcactctttttggcagtgtgcgtgttaaaggtgatcgtgagcctggtctccctcggggtcggcttgagaaacctatgcgggcagtcttcccagcctcttaatgaggagggttctgagaagaggctgctgggggagaactctgtccccccctctccttccagagagcaaacctcgaccgccatcgtgctttag

SEQ ID NO: 177515 - DNA, 813 bp, Artificial Sequence
  derived and/or modified sequence
atgacacagaataccgtgatcgtgaatggggtggcaatggccagccgtccttctcagccgactcatgtgaatgtacatatccaccaggaatctgccctgactcaactcctcaaggccggagggagcctcaagaagtttctgttccacccgggagataccgttccttctaccgcccgtatcggctatgagcagctcgcgctgggagtgacgcagatcctgctgggtgtggtgagttgcgtactgggtgtgtgtctgagtttagggccttggaccgtcctcagtgcctcaggatgtgccttttgggcgggatccgtcgtaatcgcggctggtgctggggctattgtgcacgagaaacatccaggcaaacttgcaggttatatctcgagcttgctgacacttgcaggattcgcaacagctatggctgcagttgtgctgtgcgtcaattcttttatttggcagaccgagccctttttgtatattgacaccgtttgcgaccggtccgacccagtgttccccactactgggtacagatggatgaggcgcagccaagagaaccagtggcaaaaagaggagtgtcgggcatatatgcagatgttgcgaaaactatttactgcgattcgggctctgttcctggctgtgtgcgtgttgaaggttatcgtcagtctggtgtccctcggcgttggtctacgcaatttgtgtgggcagtcgtcccagcctctcaacgaggaagggtctgaaaaaaggctgctgggagagaacagtgtgccccctagccctagccgggagcagacgtctaccgccatagtgttgtag

SEQ ID NO: 177516 - DNA, 813 bp, Artificial Sequence
  derived and/or modified sequence
atgacccagaacacagtcatcgtaaatggggttgccatggcctccaggccatcacaacccacacacgtgaatgtgcacatccaccaagaatctgcgctgacccagctgctgaaagcgggaggttctttgaaaaaattcctatttcatcctggagataccgtgccttccacggcccgaatcggctatgagcagctcgccctgggtgtcacccagatcttgctcggtgtggtctcctgcgtgctgggagtttgcctgtccctgggaccctggactgtcctctctgcgagcggatgcgctttctgggccggatctgtcgtcattgccgctggcgctggagcaattgtacacgagaaacacccgggaaaactggctggctatatctcctctttactgaccctggctgggttcgcaaccgccatggccgcagttgtactatgcgtgaactcctttatatggcagacagagcctttcttgtacattgatactgtctgtgacagaagcgacccagtgtttccaaccacaggatatcggtggatgcggagaagccaggagaatcagtggcaaaaggaagagtgccgggcttacatgcagatgctccgaaaactgttcaccgccatccgagcactgttccttgccgtgtgcgttctaaaggtgattgttagcctcgtctctctgggcgtcgggttgcggaacctttgcggtcagtcttcacagcctcttaatgaggaaggatctgaaaaacgtttgctaggcgagaactctgtgcctccctccccctcccgtgagcagacatcaaccgcgatcgttctgtag

SEQ ID NO: 177517 - DNA, 813 bp, Artificial Sequence
  derived and/or modified sequence
atgacccagaataccgtcattgtcaacggggtggcaatggcctcaagaccatcacagccaactcacgtgaatgtacatattcaccaggagtccgctttgacccagcttttgaaggccggagggtctttaaaaaagttcttgtttcaccccggagatactgtcccttctaccgcgagaataggctacgagcaactggctctgggggtgacgcagattcttctgggggttgtcagctgtgtgcttggggtttgcctgtcccttggcccatggactgttctgagcgccagcggttgtgctttttgggctgggtccgtagtgattgcagctggtgccggagctattgtccatgaaaagcatccaggtaagctcgcaggatacattagtagcctcctgacattagcgggttttgccactgccatggcggcagtggttttgtgcgtgaattcctttatctggcaaactgaacccttcctctacattgatacggtgtgcgacagaagtgacccagtgtttcccaccaccgggtatcgctggatgcgacgttcccaggagaatcagtggcaaaaggaggaatgccgggcatacatgcagatgttacgcaaattgtttaccgccatccgagctttattcctggctgtgtgtgttctcaaagttattgtcagcttggtctctctgggggtaggactgaggaatctgtgcggccagagttcccagccactcaatgaggagggaagcgagaaacgcctcttaggagaaaattctgtgccgccatcccctagccgcgaacagacatcaacagctattgtcttatag

SEQ ID NO: 177518 - DNA, 813 bp, Artificial Sequence
  derived and/or modified sequence
atgacgcagaatacagtgatcgtgaatggagtggcaatggcctctagaccatctcagcctactcatgttaacgtgcatattcaccaggaatccgccttgacccagcttcttaaggctggcggtagccttaaaaaatttttattccatcctggggacaccgtcccatctactgcaagaataggctacgagcagctggccttgggagtgactcaaatactcctgggcgtggtcagctgtgtcctgggagtatgcctctcgttggggccttggaccgtgctatctgcttccggctgtgcgttttgggcgggttccgtggtgatcgccgcaggggctggcgctatcgtccacgagaaacaccccggtaagctcgcaggttatatcagcagtctgctgacactcgccggttttgcgaccgcgatggcagcggtggtactttgcgtcaattccttcatttggcagaccgaacctttcttatacatagacacagtgtgtgataggtccgacccagtgtttccgacgacaggatatagatggatgcgacgatcccaagagaaccaatggcaaaaagaagagtgtcgggcttacatgcagatgctccgtaagcttttcactgcgatacgggctctgtttctggcggtttgcgtgctgaaggtgattgtctccttggtgagtctaggcgttggactgcgaaatctgtgcggacagtcatcacagcctttgaacgaggagggaagcgagaagcgcttactcggggagaactccgtcccccctagcccgtcccgcgagcagacttctacagctattgttttgtag

SEQ ID NO: 177519 - DNA, 813 bp, Artificial Sequence
  derived and/or modified sequence
atgactcaaaacacggtcattgttaacggggttgctatggcgagccgtccctcgcagccaacccacgtcaacgttcacatacaccaagaaagcgccctgacacagctactgaaggccggaggtagcttaaagaaattcctcttccacccgggtgatacagtaccaagtaccgcaaggattggatacgagcagctcgccctcggcgtgacccagatcctcctaggggttgtgtcttgcgttttgggggtatgcctgtcactcggaccttggacagtgctgtctgcaagtggatgcgccttctgggccggttctgtcgtcatcgccgctggtgcgggtgccatcgtccacgagaagcatcctggaaagttagctggatacatatcatcattgctcactctggccggattcgccaccgctatggccgctgtggtgttatgcgtgaactcgtttatttggcaaacagaaccgtttttgtatatcgataccgtgtgcgacaggagtgatccagtgttcccaacaactggttaccggtggatgaggagatcacaggaaaaccagtggcagaaggaagagtgtagagcatatatgcagatgttaagaaagctgtttactgctatcagggcactgttcctggccgtatgcgtgctgaaggttattgtgtcactcgtcagtctgggagtgggtttacgcaacttgtgtgggcaatcgagccaaccacttaacgaagaaggaagcgagaagcgactccttggggaaaactctgtgccaccctctcccagtcgcgaacagaccagcacggccatcgtgctgtag

SEQ ID NO: 177520 - DNA, 813 bp, Artificial Sequence
  derived and/or modified sequence
atgacacagaataccgtaatcgtgaatggcgtcgctatggcttccaggccttcacaaccaacccacgtgaatgtgcacatccatcaggaatctgcccttactcaacttctcaaggcaggtggaagtttaaaaaagttcctgttccatcctggtgacacggtacctagtaccgcaagaattggctatgaacaactcgcgctgggggtgactcagatcttgctcggagtcgttagttgtgtgctgggagtgtgtctctctctcgggccttggactgtgctgtcagcttcaggctgcgcattctgggccggaagcgtggtcatcgccgctggcgctggtgccattgtgcatgaaaagcatcctggcaaactggccggatatatttcaagtcttcttacgttggccggatttgcaacagctatggcagccgttgtgctgtgtgtgaattcgttcatatggcagacagaacctttcttgtatattgatactgtatgcgacagaagcgatcctgtcttccctacaacgggctaccgctggatgagacgatcccaagaaaatcagtggcagaaagaggaatgtcgcgcttacatgcagatgctgcgcaagctgttcacggcaatccgggctttgttcttggccgtgtgcgtattaaaagtgatcgtttctctggtttcactgggggtgggccttcgcaatctgtgcggacagtccagtcagcccctgaacgaagagggcagcgaaaaaaggcttctgggcgaaaatagcgtccctccgagcccttcccgggagcagacatcaaccgctatcgtcctttag

SEQ ID NO: 177521 - DNA, 1129 bp, Artificial Sequence
  derived and/or modified sequence
gtcgctcccctgctcggggtcagctagtgtccgctctgctcggccgcgggctcccggaggactgcaggcaggatgacgcaaaacacggtgattgtgaatggagttgctatggcctctaggccatcccagcccacccacgtcaacgtccacatccaccaggagtcagctttgacacaactgctgaaagctggaggttctctgaagaagtttctttttcaccctggggacactgtgccttccacagccaggattggttatgagcagctggctctaggggtgactcagatattgctgggggttgtgagttgtgttcttggagtgtgtctcagcttggggccctggactgtgctgagtgcctcaggctgtgccttctgggcggggtctgtggtgatcgcagcaggagctggggccattgtccatgagaagcacccgggcaaacttgctggctatatatccagcctgctcaccctggcaggctttgctacagctatggctgctgttgtcctctgcgtgaatagcttcatctggcaaactgaaccctttttatacatcgacactgtgtgtgatcgctcagaccctgtcttccctaccactgggtacagatggatgcggcgaagtcaagagaaccaatggcagaaggaggagtgtagagcttacatgcagatgctgaggaagttgttcacagcaatccgtgccctgttcctggctgtctgtgtcttgaaggtcattgtgtccttggtttccttgggagtaggtcttcgaaacttgtgtggccagagctcccagcccctgaatgaggaaggatcagagaagaggctactgggggagaattcagtgcccccttcgccctctagggagcagacctccactgccattgtcctgtgagctgccaaagaccccacggggtgcccgcatgtccctgtctagggcagcccagggcccccactcctggctcctcacacttgcctcccctatggccgctctccagaccctcctcctttcttctccccacatccgcacctgctgttcccactctggggttctcaagtccatgaacagatattgttgcattttccacaatgctgattaaacataataaacaatccagaaaagcagttttgcccagaaa

SEQ ID NO: 177522 - DNA, 1206 bp, Artificial Sequence
  derived and/or modified sequence
cccacctcagcctcccaaagcactgggattacaggcgtgagctattgtgcccagctgggatcttgacaaagacactatttctctcctttcacctgtgctgtgtatttttccctcgcctagttcccagacctcactgctatatgtcttctccctggcaggcaggatgacgcaaaacacggtgattgtgaatggagttgctatggcctctaggccatcccagcccacccacgtcaacgtccacatccaccaggagtcagctttgacacaactgctgaaagctggaggttctctgaagaagtttctttttcaccctggggacactgtgccttccacagccaggattggttatgagcagctggctctaggggtgactcagatattgctgggggttgtgagttgtgttcttggagtgtgtctcagcttggggccctggactgtgctgagtgcctcaggctgtgccttctgggcggggtctgtggtgatcgcagcaggagctggggccattgtccatgagaagcacccgggcaaacttgctggctatatatccagcctgctcaccctggcaggctttgctacagctatggctgctgttgtcctctgcgtgaatagcttcatctggcaaactgaaccctttttatacatcgacactgtgtgtgatcgctcagaccctgtcttccctaccactgggtacagatggatgcggcgaagtcaagagaaccaatggcagaaggaggagtgtagagcttacatgcagatgctgaggaagttgttcacagcaatccgtgccctgttcctggctgtctgtgtcttgaaggtcattgtgtccttggtttccttgggagtaggtcttcgaaacttgtgtggccagagctcccagcccctgaatgaggaaggatcagagaagaggctactgggggagaattcagtgcccccttcgccctctagggagcagacctccactgccattgtcctgtgagctgccaaagaccccacggggtgcccgcatgtccctgtctagggcagcccagggcccccactcctggctcctcacacttgcctcccctatggccgctctccagaccctcctcctttcttctccccacatccgcacctgctgttcccactctggggttctcaagtccatgaacagatattgttgcattttccacaatgctgattaaacataataaacaatccagaaaagca

SEQ ID NO: 177523 - DNA, 1303 bp, Artificial Sequence
  derived and/or modified sequence
cgagtgggagcgcagggggcgcgcgggggctcggtcttctcccgcccggtccgctcctccgggcggaaccccctttgccgggcccccgggccgcagctggtttcgggaaaccgcgcagcctgggcggggccgcagcccccacccgtgcatctgccgtctccgccctcccgtcgctcccctgctcggggtcagctagtgtccgctctgctcggccgcgggctcccggaggactgcaggtgaggccaggcaggatgacgcaaaacacggtgattgtgaatggagttgctatggcctctaggccatcccagcccacccacgtcaacgtccacatccaccaggagtcagctttgacacaactgctgaaagctggaggttctctgaagaagtttctttttcaccctggggacactgtgccttccacagccaggattggttatgagcagctggctctaggggtgactcagatattgctgggggttgtgagttgtgttcttggagtgtgtctcagcttggggccctggactgtgctgagtgcctcaggctgtgccttctgggcggggtctgtggtgatcgcagcaggagctggggccattgtccatgagaagcacccgggcaaacttgctggctatatatccagcctgctcaccctggcaggctttgctacagctatggctgctgttgtcctctgcgtgaatagcttcatctggcaaactgaaccctttttatacatcgacactgtgtgtgatcgctcagaccctgtcttccctaccactgggtacagatggatgcggcgaagtcaagagaaccaatggcagaaggaggagtgtagagcttacatgcagatgctgaggaagttgttcacagcaatccgtgccctgttcctggctgtctgtgtcttgaaggtcattgtgtccttggtttccttgggagtaggtcttcgaaacttgtgtggccagagctcccagcccctgaatgaggaaggatcagagaagaggctactgggggagaattcagtgcccccttcgccctctagggagcagacctccactgccattgtcctgtgagctgccaaagaccccacggggtgcccgcatgtccctgtctagggcagcccagggcccccactcctggctcctcacacttgcctcccctatggccgctctccagaccctcctcctttcttctccccacatccgcacctgctgttcccactctggggttctcaagtccatgaacagatattgttgcattttccacaatgctgattaaacataataaacaatccagaaaagcagttttgccc

SEQ ID NO: 177524 - DNA, 1430 bp, Artificial Sequence
  derived and/or modified sequence
gctgaccatgctggaactgcggcgactacagagcctgcgggaacctcccctttcgcccaagatctgctctgtccccctcatcctcctcccagggccctggcgtctgggtcaagcagcgccccacacctcgacccctcaccccctcctcccgggctcttcctgcggcctcccctccacagtccgcaggctctgggacaggaccgagtccttggctgcctgtggagctcctgtgccagcagctgcgccccggctgcgctccggatacccccatccccgccaccgccgacctcccgctccaccgactgctgctcacgcccgacgggttcacgccgcccctgccccgtgaaggaccgcgctgcggtgcggaggcaggatgacgcaaaacacggtgattgtgaatggagttgctatggcctctaggccatcccagcccacccacgtcaacgtccacatccaccaggagtcagctttgacacaactgctgaaagctggaggttctctgaagaagtttctttttcaccctggggacactgtgccttccacagccaggattggttatgagcagctggctctaggggtgactcagatattgctgggggttgtgagttgtgttcttggagtgtgtctcagcttggggccctggactgtgctgagtgcctcaggctgtgccttctgggcggggtctgtggtgatcgcagcaggagctggggccattgtccatgagaagcacccgggcaaacttgctggctatatatccagcctgctcaccctggcaggctttgctacagctatggctgctgttgtcctctgcgtgaatagcttcatctggcaaactgaaccctttttatacatcgacactgtgtgtgatcgctcagaccctgtcttccctaccactgggtacagatggatgcggcgaagtcaagagaaccaatggcagaaggaggagtgtagagcttacatgcagatgctgaggaagttgttcacagcaatccgtgccctgttcctggctgtctgtgtcttgaaggtcattgtgtccttggtttccttgggagtaggtcttcgaaacttgtgtggccagagctcccagcccctgaatgaggaaggatcagagaagaggctactgggggagaattcagtgcccccttcgccctctagggagcagacctccactgccattgtcctgtgagctgccaaagaccccacggggtgcccgcatgtccctgtctagggcagcccagggcccccactcctggctcctcacacttgcctcccctatggccgctctccagaccctcctcctttcttctccccacatccgcacctgctgttcccactctggggttctcaagtccatgaacagatattgttgcattttccacaatgctgattaaacataataaacaatccagaaaagcagttttgcccagaaa

SEQ ID NO: 177525 - DNA, 1265 bp, Artificial Sequence
  derived and/or modified sequence
ctcggggtcagctagtgtccgctctgctcggccgcgggctcccggaggactgcaggaggactcacgtaggagggagggacagctgggtgcaggtgtttctccccagaaaaacggctggagagcgggaggagaggcctggggctggcgcgtcccgtccaccttctgccgcctgcacgcctggaccctggctggagccctacggcaggatgacgcaaaacacggtgattgtgaatggagttgctatggcctctaggccatcccagcccacccacgtcaacgtccacatccaccaggagtcagctttgacacaactgctgaaagctggaggttctctgaagaagtttctttttcaccctggggacactgtgccttccacagccaggattggttatgagcagctggctctaggggtgactcagatattgctgggggttgtgagttgtgttcttggagtgtgtctcagcttggggccctggactgtgctgagtgcctcaggctgtgccttctgggcggggtctgtggtgatcgcagcaggagctggggccattgtccatgagaagcacccgggcaaacttgctggctatatatccagcctgctcaccctggcaggctttgctacagctatggctgctgttgtcctctgcgtgaatagcttcatctggcaaactgaaccctttttatacatcgacactgtgtgtgatcgctcagaccctgtcttccctaccactgggtacagatggatgcggcgaagtcaagagaaccaatggcagaaggaggagtgtagagcttacatgcagatgctgaggaagttgttcacagcaatccgtgccctgttcctggctgtctgtgtcttgaaggtcattgtgtccttggtttccttgggagtaggtcttcgaaacttgtgtggccagagctcccagcccctgaatgaggaaggatcagagaagaggctactgggggagaattcagtgcccccttcgccctctagggagcagacctccactgccattgtcctgtgagctgccaaagaccccacggggtgcccgcatgtccctgtctagggcagcccagggcccccactcctggctcctcacacttgcctcccctatggccgctctccagaccctcctcctttcttctccccacatccgcacctgctgttcccactctggggttctcaagtccatgaacagatattgttgcattttccacaatgctgattaaacataataaacaatccagaaaagcagttttgcccagaaaga

SEQ ID NO: 177526 - DNA, 2252 bp, Artificial Sequence
  derived and/or modified sequence
gtgctgaccatgctggaactgcggcgactacagagcctgcgggaacctcccctttcgcccaagatctgctctgtccccctcatcctcctcccagggccctggcgtctgggtcaagcagcgccccacacctcgacccctcaccccctcctcccgggctcttcctgcggcctcccctccacagtccgcaggctctgggacaggaccgagtccttggctgcctgacgctttccccagccccggggcacgggaagagctggacagaggaaagtgttcggggcagccgggaagagcccaccacctaccaggcgtcgggcggcccgcaggggaatctccgtggtgccggcctggttcagatccgactcttcaggcgggggcgaggcagatctaggggttggcgtggggcgggggaagcggtggtcctgggggcccggaggtagctggaacccgaggtgccctcagggcgaggcctgggccgtcaagggaaggtctggctggaatctggggctgggctggaagcagtctgaagctcctttgtacgtgtgcggaattgtctaactcctgtcctttctaaccccaaggaggccaggtgggtgaaagagtgaaactgctttgaaaagtaggtagagtacgaatgggaggtgttattagaattgttaataatatttgatttaaactgtgatacttagccaggatgtccattagaattgcctatgcaggatttattttagagccaggcaagctgattctaaagtgcatgtgaagaagtagtctagcaaaaatggccatgacaattctgaaagaaaaaccacacgaggggatcatgaaacagcccaattagcattaagctccatgttaaaattgtggtaatgatgcctagcccatgagacatgccaatgggcagaatataaggactagaataggcctacattcctaggggaacttcatttctgctcaggagagaattttaaatcactgagaaaaagaggatgtattttccgcaaatggaacgtatctttcagaagttaaacatctgaatgacagcaacagaacttggatccgtgtctcccaacggcgaaggttggtcacccagctcccaaattccagatggtcggcatttaaaagtgaaaactgaaagcataaaggcacttagaagaaaatgtggaagattattttataatctcgaaacggggaagtcctttaaaagtgcaggatgacgcaaaacacggtgattgtgaatggagttgctatggcctctaggccatcccagcccacccacgtcaacgtccacatccaccaggagtcagctttgacacaactgctgaaagctggaggttctctgaagaagtttctttttcaccctggggacactgtgccttccacagccaggattggttatgagcagctggctctaggggtgactcagatattgctgggggttgtgagttgtgttcttggagtgtgtctcagcttggggccctggactgtgctgagtgcctcaggctgtgccttctgggcggggtctgtggtgatcgcagcaggagctggggccattgtccatgagaagcacccgggcaaacttgctggctatatatccagcctgctcaccctggcaggctttgctacagctatggctgctgttgtcctctgcgtgaatagcttcatctggcaaactgaaccctttttatacatcgacactgtgtgtgatcgctcagaccctgtcttccctaccactgggtacagatggatgcggcgaagtcaagagaaccaatggcagaaggaggagtgtagagcttacatgcagatgctgaggaagttgttcacagcaatccgtgccctgttcctggctgtctgtgtcttgaaggtcattgtgtccttggtttccttgggagtaggtcttcgaaacttgtgtggccagagctcccagcccctgaatgaggaaggatcagagaagaggctactgggggagaattcagtgcccccttcgccctctagggagcagacctccactgccattgtcctgtgagctgccaaagaccccacggggtgcccgcatgtccctgtctagggcagcccagggcccccactcctggctcctcacacttgcctcccctatggccgctctccagaccctcctcctttcttctccccacatccgcacctgctgttcccactctggggttctcaagtccatgaacagatattgttgcattttccacaatgctgattaaacataataaacaatccagaaaagc

SEQ ID NO: 177527 - protein, 494 aa, Artificial Sequence
  derived and/or modified sequence
MPTESASCSTARQTKQKRKSHSLSIRRTNSSEQERTGLPRDMLEGQDSKLPSSVRSTLLELFGQIEREFENLYIENLELRREIDTLNERLAAEGQAIDGAELSKGQLKTKASHSTSQLSQKLKTTYKASTSKIVSSFKTTTSRAACQLVKEYIGHRDGIWDVSVAKTQPVVLGTASADHTALLWSIETGKCLVKYAGHVGSVNSIKFHPSEQLALTASGDQTAHIWRYAVQLPTPQPVADTSISGEDEVECSDKDEPDLDGDVSSDCPTIRVPLTSLKSHQGVVIASDWLVGGKQAVTASWDRTANLYDVETSELVHSLTGHDQELTHCCTHPTQRLVVTSSRDTTFRLWDFRDPSIHSVNVFQGHTDTVTSAVFTVGDNVVSGSDDRTVKVWDLKNMRSPIATIRTDSAINRINVCVGQKIIALPHDNRQVRLFDMSGVRLARLPRSSRQGHRRMVCCSAWSEDHPVCNLFTCGFDRQAIGWNINIPALLQEK

SEQ ID NO: 177528 - protein, 249 aa, Artificial Sequence
  derived and/or modified sequence
MPTESASCSTARQTKQKRKSHSLSIRRTNSSEQERTGLPRDMLEGQDSKLPSSVRSTLLELFGQIEREFENLYIENLELRREIDTLNERLAAEGQAIDGAELSKGQLKTKASHSTSQLSQKLKTTYKASTSKIVSSFKTTTSRAACQLVKEYIGHRDGIWDVSVAKTQPVVLGTASADHTALLWSIETGKCLVKYAGHVGSVNSIKFHPSEQLALTASGDQTAHIWRYAVQLPTPQPVADTSVSTFPYL

SEQ ID NO: 177529 - protein, 209 aa, Artificial Sequence
  derived and/or modified sequence
MSSDSEWDRSACSDSKLPSSVRSTLLELFGQIEREFENLYIENLELRREIDTLNERLAAEGQAIDGAELSKGQLKTKASHSTSQLSQKLKTTYKASTSKIVSSFKTTTSRAACQLVKEYIGHRDGIWDVSVAKTQPVVLGTASADHTALLWSIETGKCLVKYAGHVGSVNSIKFHPSEQLALTASGDQTAHIWRYAVQLPTPQPVADTS

SEQ ID NO: 177530 - DNA, 1485 bp, Artificial Sequence
  derived and/or modified sequence
atgcccaccgagagcgccagctgcagcaccgccagacagaccaagcagaagagaaagagccacagcctgagcatcagaagaaccaacagcagcgagcaggagagaaccggcctgcccagagacatgctggagggccaggacagcaagctgcccagcagcgtgagaagcaccctgctggagctgttcggccagatcgagagagagttcgagaacctgtacatcgagaacctggagctgagaagagagatcgacaccctgaacgagagactggccgccgagggccaggccatcgacggcgccgagctgagcaagggccagctgaagaccaaggccagccacagcaccagccagctgagccagaagctgaagaccacctacaaggccagcaccagcaagatcgtgagcagcttcaagaccaccaccagcagagccgcctgccagctggtgaaggagtacatcggccacagagacggcatctgggacgtgagcgtggccaagacccagcccgtggtgctgggcaccgccagcgccgaccacaccgccctgctgtggagcatcgagaccggcaagtgcctggtgaagtacgccggccacgtgggcagcgtgaacagcatcaagttccaccccagcgagcagctggccctgaccgccagcggcgaccagaccgcccacatctggagatacgccgtgcagctgcccaccccccagcccgtggccgacaccagcatcagcggcgaggacgaggtggagtgcagcgacaaggacgagcccgacctggacggcgacgtgagcagcgactgccccaccatcagagtgcccctgaccagcctgaagagccaccagggcgtggtgatcgccagcgactggctggtgggcggcaagcaggccgtgaccgccagctgggacagaaccgccaacctgtacgacgtggagaccagcgagctggtgcacagcctgaccggccacgaccaggagctgacccactgctgcacccaccccacccagagactggtggtgaccagcagcagagacaccaccttcagactgtgggacttcagagaccccagcatccacagcgtgaacgtgttccagggccacaccgacaccgtgaccagcgccgtgttcaccgtgggcgacaacgtggtgagcggcagcgacgacagaaccgtgaaggtgtgggacctgaagaacatgagaagccccatcgccaccatcagaaccgacagcgccatcaacagaatcaacgtgtgcgtgggccagaagatcatcgccctgccccacgacaacagacaggtgagactgttcgacatgagcggcgtgagactggccagactgcccagaagcagcagacagggccacagaagaatggtgtgctgcagcgcctggagcgaggaccaccccgtgtgcaacctgttcacctgcggcttcgacagacaggccatcggctggaacatcaacatccccgccctgctgcaggagaagtag

SEQ ID NO: 177531 - DNA, 750 bp, Artificial Sequence
  derived and/or modified sequence
atgcccaccgagagcgccagctgcagcaccgccagacagaccaagcagaagagaaagagccacagcctgagcatcagaagaaccaacagcagcgagcaggagagaaccggcctgcccagagacatgctggagggccaggacagcaagctgcccagcagcgtgagaagcaccctgctggagctgttcggccagatcgagagagagttcgagaacctgtacatcgagaacctggagctgagaagagagatcgacaccctgaacgagagactggccgccgagggccaggccatcgacggcgccgagctgagcaagggccagctgaagaccaaggccagccacagcaccagccagctgagccagaagctgaagaccacctacaaggccagcaccagcaagatcgtgagcagcttcaagaccaccaccagcagagccgcctgccagctggtgaaggagtacatcggccacagagacggcatctgggacgtgagcgtggccaagacccagcccgtggtgctgggcaccgccagcgccgaccacaccgccctgctgtggagcatcgagaccggcaagtgcctggtgaagtacgccggccacgtgggcagcgtgaacagcatcaagttccaccccagcgagcagctggccctgaccgccagcggcgaccagaccgcccacatctggagatacgccgtgcagctgcccaccccccagcccgtggccgacaccagcgtgagcaccttcccctacctgtag

SEQ ID NO: 177532 - DNA, 630 bp, Artificial Sequence
  derived and/or modified sequence
atgagcagcgacagcgagtgggacagaagcgcctgcagcgacagcaagctgcccagcagcgtgagaagcaccctgctggagctgttcggccagatcgagagagagttcgagaacctgtacatcgagaacctggagctgagaagagagatcgacaccctgaacgagagactggccgccgagggccaggccatcgacggcgccgagctgagcaagggccagctgaagaccaaggccagccacagcaccagccagctgagccagaagctgaagaccacctacaaggccagcaccagcaagatcgtgagcagcttcaagaccaccaccagcagagccgcctgccagctggtgaaggagtacatcggccacagagacggcatctgggacgtgagcgtggccaagacccagcccgtggtgctgggcaccgccagcgccgaccacaccgccctgctgtggagcatcgagaccggcaagtgcctggtgaagtacgccggccacgtgggcagcgtgaacagcatcaagttccaccccagcgagcagctggccctgaccgccagcggcgaccagaccgcccacatctggagatacgccgtgcagctgcccaccccccagcccgtggccgacaccagctag

SEQ ID NO: 177533 - DNA, 1485 bp, Artificial Sequence
  derived and/or modified sequence
atgcccaccgagagcgcaagctgttccaccgcccgccagaccaagcaaaaaaggaagtctcactccctgtcaataaggcgcactaactcttccgagcaggaaaggacaggactgcctagagacatgctcgaggggcaagattccaagcttccctcatccgtgaggtcaaccttgcttgagctcttcgggcagatcgaacgggaattcgaaaacctgtatattgaaaacctggagcttagacgcgaaatcgacacactgaacgagcggctcgctgctgaaggacaagccattgatggagctgaactttccaaaggccagctcaaaactaaagcatctcatagcactagccagctcagccagaaactcaaaacaacctacaaggctagcacctccaagatagtaagctcttttaagaccaccaccagccgcgctgcttgccagctggtcaaggaatatatcggccacagagacggaatttgggatgtctctgttgcaaagacccaacctgtggtcttaggaacagcctctgctgatcacaccgcactgctgtggtccatcgagacaggcaagtgcctggtgaagtacgccggtcatgtcgggtctgttaacagcattaagtttcaccccagcgaacaactcgctttgacagcctcaggggatcaaaccgcacatatttggagatatgctgtacagctccctacgcctcagcctgtcgctgacacatctattagcggggaagatgaggtggaatgttctgacaaagacgaacctgatctggacggggatgtgagctccgactgtcctacgatcagggttcctcttacatctctcaaaagccatcagggagtcgtcatcgcatctgactggctcgttggaggaaaacaagccgtcacagcctcttgggaccgtaccgcaaatctctacgatgtagagacctctgaacttgtccactccctgacaggccacgaccaagagctcacacattgttgtacgcaccccacacagcggctggtcgtcacctcttctagagataccactttccgcctttgggacttccgcgatccatctattcattccgtgaatgtgtttcagggccacacagatacggtgacctccgcggtgtttacagtcggagacaacgtggtgtctggcagtgacgatagaaccgtgaaagtgtgggatctgaaaaatatgcgcagtcctatcgctaccataagaactgactctgctatcaaccgcatcaatgtgtgcgtggggcagaagatcattgcactgccccatgataacaggcaggtgaggttgttcgacatgtcaggagtgagactcgctagacttccacgctcctccagacagggacatagacgtatggtttgctgtagcgcttggtccgaagaccatccggtctgtaacctctttacctgtggctttgaccggcaggctatagggtggaatatcaatattccagccctgctacaagagaagtag

SEQ ID NO: 177534 - DNA, 1485 bp, Artificial Sequence
  derived and/or modified sequence
atgccaacagaatccgcaagctgctccactgcaaggcagacaaaacagaagagaaagtctcatagtctctcaatcagaaggactaattcttcggaacaggagcggactgggctgcctcgtgatatgctggagggccaggactccaaacttccttcctccgtgcggagcaccctgttggagttattcggtcagatcgaaagagagttcgagaacctgtacatcgaaaaccttgagcttagacgcgagattgacactctcaacgagcgcctggcagccgagggccaagccattgacggcgctgagctgagcaaggggcagctgaaaacaaaggcctctcatagcacaagccaactatctcagaaactgaaaacaacttataaagcctcaacatcaaagattgtcagctcctttaagacaacaacttctagggctgcgtgccagctggtgaaagaatacatcggtcaccgcgacggaatctgggatgtgtccgttgctaagactcagcccgtggttctcggaacggcctccgcagaccataccgccttgctctggtccatcgaaaccggaaaatgcctggtgaaatacgccggacacgtaggtagtgtgaatagcattaaattccacccctcggaacaattagccttgaccgcgagcggggatcagacagctcacatttggaggtacgctgtccaactacccaccccacagcccgtcgccgacaccagtatctcaggcgaggacgaggtggaatgcagcgataaagacgaacctgacctcgatggtgatgttagcagtgactgtcccaccatccgcgtcccccttacctcacttaaatcccaccagggcgtcgtgattgcgtccgattggctcgtcggcggcaaacaggccgtaaccgcttcttgggaccgaactgctaacttatacgacgtcgagacgtcagagttggtacacagcctcaccggacatgatcaggagctgacccattgttgcactcatcctacgcagcgactcgttgtaacatcatccagggataccacgtttcgtctgtgggactttcgggatcctagtattcacagcgtgaacgtattccaggggcacactgatacggtgacctccgccgtgtttacagtgggtgataacgtcgtctctgggagcgacgacagaactgtgaaggtgtgggacctgaagaacatgagatccccaattgctaccattaggacagactccgccatcaatagaataaacgtgtgtgttggacagaagataatcgccttaccccatgacaatcggcaggtgaggctgtttgacatgagcggtgttcgcctggccagactgccgcgcagcagtagacaggggcatcgccgcatggtatgttgcagcgcctggtccgaggaccatccagtctgcaatctgttcacctgtggtttcgacagacaagccatcggatggaatatcaatatccctgccctgctacaagaaaagtag

SEQ ID NO: 177535 - DNA, 750 bp, Artificial Sequence
  derived and/or modified sequence
atgccaactgaaagcgccagttgcagtacagcaaggcagacaaagcagaagcgtaagagccactcactgagtatacgccgcaccaatagctctgaacaggaaagaactggcctccctagagatatgctggaagggcaggactccaaacttccaagctcggttcgatcaacacttcttgagctttttggacaaatcgagcgggaattcgagaacttgtacattgaaaacttggaacttcgacgagagatcgatactttgaacgaaagacttgcggcagaagggcaggccattgatggggcagagctgagcaagggacagctaaagactaaggcctctcactccacaagccaactaagccaaaagctcaagaccacatacaaggcctctacgagtaaaattgtgagtagcttcaagacaaccacctctcgtgcagcctgtcagttggtgaaggagtacatcggccatagagacggcatctgggacgtgtcagtcgctaagacacagccagtggtgctgggcacagcttccgccgaccacaccgcgctgctctggagtatcgagacagggaaatgcctggtcaagtacgccggacacgtgggttctgtcaactccatcaaattccatccaagcgaacaactggcattgacagcttctggagaccaaactgctcatatctggaggtatgccgtgcagttgcccaccccccaaccggtagccgatacctccgtgtctacttttccttatctgtag

SEQ ID NO: 177536 - DNA, 630 bp, Artificial Sequence
  derived and/or modified sequence
atgtcttcggactcagaatgggacagatcagcatgtagtgactccaagctgcctagttccgtgaggagcaccctcttagagttatttggccagatagaacgagagttcgaaaatctctacatcgagaaccttgaattacggcgggaaatagacacccttaacgaacgactggcggctgaaggacaggccatagacggcgccgagctgagtaaaggccagctgaaaacaaaggcttctcactccaccagccaactgtctcagaaactcaaaaccacctataaggccagcaccagtaagattgtgagttctttcaaaactaccacctcacgcgccgcttgccaactcgtaaaagagtacatcggccatagagacggaatttgggacgtatcagttgcaaaaacccagcctgtcgtgttaggaacggccagtgccgatcatacggcccttctgtggagtattgaaactggcaaatgtctcgtgaaatacgccggacacgtaggcagcgtgaactccataaagtttcatccttccgagcagttggcgctgactgcaagcggcgatcagaccgctcatatctggcgctacgccgttcagcttcctacaccccagcccgtcgccgatacatcctag

SEQ ID NO: 177537 - DNA, 1485 bp, Artificial Sequence
  derived and/or modified sequence
atgcccacagaaagtgccagctgcagcacagcccggcagaccaagcagaagaggaagagccacagcctgagcatccggaggaccaacagcagcgagcaggagaggacaggcctgccccgggacatgctggagggccaggacagcaagctgcccagctctgtgcgcagcaccctgctggagctgtttggccagatcgagcgggagtttgagaacctgtacatcgagaacctggagctgcggcgggagattgacaccctgaatgaaaggctggccgctgagggccaggccattgatggagctgagctgagcaagggccagctgaagaccaaggccagccacagcaccagccagctgagccagaagctgaagaccacctacaaggccagcaccagcaagatcgtgagcagcttcaagaccaccaccagccgggccgcctgccagctggtgaaggagtacatcggccacagagatggcatctgggatgtgtctgtggccaagacccagcctgtggtgctgggcacagccagcgctgaccacacagccctgctgtggagcattgagaccgggaagtgcctggtgaagtatgccggccacgtgggctctgtgaacagcatcaagttccaccccagcgagcagctggccctgacagccagcggggaccagacagcccacatctggaggtatgctgtgcagctgcccaccccccagcctgtggccgacaccagcatcagcggggaggatgaggtggagtgcagcgacaaggatgagccagacctggatggagatgtgtccagtgactgccccaccatccgggtgcccctgaccagcctgaagagccaccagggcgtggtgattgccagtgactggctggtgggcggcaagcaggccgtgacagcctcctgggacagaacagccaacctgtatgatgtggagaccagcgagctggtgcacagcctgaccggccatgaccaggagctgacccactgctgcacccaccccacccagaggctggtggtgaccagcagccgggacaccaccttccggctgtgggacttccgggaccccagcatccacagcgtgaatgtgttccagggccacacagacacagtgaccagcgctgtgttcaccgtgggggacaacgtggtgtctggcagtgatgacagaacagtgaaggtgtgggacctgaagaacatgaggagccccatcgccaccatcagaacagattctgccatcaaccgcatcaacgtgtgtgtgggccagaagatcatcgccctgccccatgacaaccggcaggtgcggctgtttgacatgtctggagtgcggctggcccggctgcccaggagcagccggcagggccacaggaggatggtgtgctgcagcgcctggagcgaggaccaccctgtgtgcaacctcttcacctgtggctttgaccggcaggccatcggctggaacatcaacatcccagccctgctgcaggagaagtag

SEQ ID NO: 177538 - DNA, 750 bp, Artificial Sequence
  derived and/or modified sequence
atgcccacagaaagtgccagctgcagcacagcccggcagaccaagcagaagaggaagagccacagcctgagcatccggaggaccaacagcagcgagcaggagaggacaggcctgccccgggacatgctggagggccaggacagcaagctgcccagctctgtgcgcagcaccctgctggagctgtttggccagatcgagcgggagtttgagaacctgtacatcgagaacctggagctgcggcgggagattgacaccctgaatgaaaggctggccgctgagggccaggccattgatggagctgagctgagcaagggccagctgaagaccaaggccagccacagcaccagccagctgagccagaagctgaagaccacctacaaggccagcaccagcaagatcgtgagcagcttcaagaccaccaccagccgggccgcctgccagctggtgaaggagtacatcggccacagagatggcatctgggatgtgtctgtggccaagacccagcctgtggtgctgggcacagccagcgctgaccacacagccctgctgtggagcattgagaccgggaagtgcctggtgaagtatgccggccacgtgggctctgtgaacagcatcaagttccaccccagcgagcagctggccctgacagccagcggggaccagacagcccacatctggaggtatgctgtgcagctgcccaccccccagcctgtggccgacacctctgtgtccaccttcccctacctgtag

SEQ ID NO: 177539 - DNA, 630 bp, Artificial Sequence
  derived and/or modified sequence
atgagcagtgacagcgagtgggacagaagtgcctgcagcgacagcaagctgcccagctctgtgcgcagcaccctgctggagctgtttggccagatcgagcgggagtttgaaaatctctacatcgagaacctggagctgcggcgggagattgacaccctgaatgaaaggctggccgctgagggccaggccattgatggagctgagctgagcaagggccagctgaagaccaaggccagccacagcaccagccagctgagccagaagctgaagaccacctacaaggccagcaccagcaagatcgtgtcctccttcaagaccaccaccagcagagctgcctgccagctggtgaaggagtacatcggccacagagatggcatctgggatgtgtctgtggccaagacccagcctgtggtgctgggcacagccagcgctgaccacacagccctgctgtggagcattgaaacaggcaagtgcctggtgaagtatgccggccacgtgggctctgtgaacagcatcaagttccaccccagcgagcagctggccctgacagccagcggggaccagacagcccacatctggaggtatgctgtgcagctgcccaccccccagcctgtggccgacaccagctag

SEQ ID NO: 177540 - DNA, 1485 bp, Artificial Sequence
  derived and/or modified sequence
atgcccaccgagagcgccagctgcagcaccgcccggcagaccaagcagaagcgcaaatcccactcactgtcaatccggagaacaaactccagtgagcaggagcgcaccggattgcccagggacatgctggaaggccaggactcgaaactgcccagctccgtgcgctccacgctgttagaactttttggccagattgaaagggagtttgaaaacctgtatatcgagaatctcgaactgcgcagagagatcgacacgctcaacgaacgtctggcagcagagggccaggctattgatggggcagaactgtccaagggtcagctgaagacaaaggcatcccactccactagccaactcagccagaagctcaaaactacgtataaggcgtcaacctccaagattgtgtcttctttcaagaccacgactagccgtgcagcttgtcaactcgtgaaagagtacatagggcatagagacgggatttgggacgtgtctgtggcaaagacgcagcctgtggtactggggactgcatcagccgaccataccgcactgctgtggtccatagagactggaaaatgtttagtgaaatatgctggtcatgtggggtcagtgaattccattaagtttcacccgagcgaacagctcgcattaacagcctctggagaccagacagcacacatttggagatacgctgtgcagttacctaccccccagcctgttgcagatacaagcatttccggagaagatgaagtggaatgctcggataaggatgagcccgacctcgatggggacgtgagctcagattgtccaaccatccgagtgccactgacttcgctcaagagccatcaaggtgtcgtgatcgctagtgattggcttgttggcggcaagcaggctgttaccgcaagttgggacaggaccgctaatctgtatgatgtggagacaagtgaacttgttcattctctgactgggcacgatcaggagcttacacattgctgcacacatcccacacagagactagttgtgacatccagtagggatacaacatttcggctgtgggacttcagagacccaagcatccactccgttaatgttttccagggtcatactgacacagttacatcagccgtgtttaccgtcggcgataacgtggtgtcaggatccgacgatcggaccgtgaaggtgtgggatctgaaaaacatgcgttcacccattgctacaattcgaaccgacagtgccataaatagaataaacgtgtgcgtgggccagaagatcatcgcactccctcacgacaataggcaggttaggttgttcgacatgtctggcgtcaggttggcacggttaccgagatcctcacgacaggggcatcgcagaatggtctgttgctccgcctggtcggaagatcatcccgtgtgcaatcttttcacctgcgggttcgatcgccaggccatcggctggaatatcaatatcccagcactgttgcaggagaagtag

SEQ ID NO: 177541 - DNA, 1485 bp, Artificial Sequence
  derived and/or modified sequence
atgcccaccgagagcgccagctgcagcaccgcccggcagaccaagcagaaaagaaagagtcactctctcagtatcaggagaacaaacagcagcgagcaggaaagaactggtttgccccgggatatgttagagggacaggattccaaattaccgtccagcgtccgctctacattactggaactcttcggccagatcgagcgcgaattcgagaatctgtacattgaaaatctcgaactccggagggagatcgacacactaaacgaaaggttggcggccgaaggacaagccatagacggggccgaactgtccaagggccaactgaaaaccaaggccagccactccactagccagcttagtcagaagctcaagactacttataaggcttctacaagtaaaatcgtgagctcttttaagacaaccacctcacgagccgcatgtcagttggtgaaggagtatatcggccatcgggacgggatctgggatgttagcgtcgcgaaaactcagccagtggtccttggtacagcttcagctgaccacaccgcactgctttggtcaattgagactgggaaatgcctggtgaagtacgctggccacgtgggctcagtaaactccattaagtttcaccctagcgagcagctggccctgaccgccagtggcgaccagaccgcccacatttggcggtatgccgtacagctccccacaccccagccggtggcggatacatcaatctctggcgaagatgaggtagaatgcagcgataaagacgaacctgacctggacggcgacgtgtctagcgactgccctaccattagagtgcccctgacttcactgaaatcccatcagggggttgtcatcgccagtgactggctggtcgggggcaagcaggcagtgactgcgtcttgggatcgtacagctaatctctacgatgtcgagacaagcgaactggtgcacagcttgacaggtcatgaccaggaattgactcattgttgcacacatccaacccaaaggctcgtcgtcacaagtagcagggacacgacctttagactctgggattttcgcgacccaagtatacattcagtgaatgtctttcaggggcacactgatacagtgacgtcggccgtgttcaccgtgggtgataatgtggtctctggctccgacgacagaactgttaaggtttgggacctgaaaaatatgcgttctcccatcgctacaatccgaactgattccgcaatcaacaggataaatgtgtgtgtgggacaaaagatcatcgcgctgcctcacgacaaccgacaagtgaggctgtttgatatgagcggcgtccggttggcaaggctcccgagaagtagcagacagggccatcgacgaatggtgtgctgctctgcatggagcgaagaccacccagtctgtaatctcttcacctgcggctttgataggcaagcgatcggttggaatattaacatcccggccctactccaggagaaatag

SEQ ID NO: 177542 - DNA, 750 bp, Artificial Sequence
  derived and/or modified sequence
atgcccaccgagagcgccagctgcagcaccgcccggcagaccaagcagaagcgcaagtcacactctttaagtattcggaggacaaactccagcgaacaggaacggactggcttaccccgggacatgctagaggggcaggattcaaaattaccatcatccgtccgtagtaccctgttagagctctttggccagattgagcgcgagttcgaaaacctctatattgaaaatcttgagttacggcgtgaaattgatacacttaatgaacggctcgctgcagagggccaggctattgatggagccgagctcagtaagggccaacttaagactaaggcctctcattctaccagccagctgagccagaagttgaagaccacatataaagccagcacatccaagatcgtttcatcctttaaaacaacaacctccagagccgcttgtcaactggtcaaagagtatattgggcatcgcgacgggatttgggatgtgtccgtcgcaaaaacccaacctgtggtgttaggaacagccagcgcagaccacactgctcttctgtggagcattgaaacaggaaagtgcctagtcaaatatgccgggcatgtcggctctgtcaacagcattaagttccacccttctgagcagctcgccctgacagcaagtggcgaccaaacagctcacatttggcggtacgctgtccaactgccaacaccgcagcctgttgccgacacctccgtgtccacttttccatacctatag

SEQ ID NO: 177543 - DNA, 630 bp, Artificial Sequence
  derived and/or modified sequence
atgagcagcgacagcgagtgggaccggagcgcctgcagcgacagcaaacttccttccagtgtccgtagtactttactggagttatttggtcaaattgaacgcgaatttgagaatctctacatcgagaacttggaactgagacgggaaattgataccttaaacgagcgtctagcagccgagggtcaagcaatcgacggtgcagaattgagtaagggacagcttaagacaaaggccagccactcgactagtcagttgagccagaagctcaaaaccacatataaggcctcaacatccaaaattgtcagctcattcaagactacaacatccagagcggcctgtcaactagttaaggaatacattggccaccgtgacggaatatgggacgtcagtgtagccaaaacccagccagtcgtgctaggaaccgcaagtgctgaccatacggcactattgtggagcattgaaacggggaaatgcctagtgaagtatgctgggcacgtcggatccgtgaactcgattaaattccatcctagtgagcaattggcactgaccgcctccggagaccagacagcccatatctggcggtatgcagtacaactgcccactccccaacccgttgcagataccagctag

SEQ ID NO: 177544 - DNA, 1485 bp, Artificial Sequence
  derived and/or modified sequence
atgcccacagaaagtgcatcctgctccacagcgcgtcagacgaagcagaaacgaaaatctcactctttaagcatacgcaggaccaactccagtgaacaggagcgtaccggcctccctcgcgacatgctggaggggcaggatagcaaactacccagctcggtgcggtccacactgctcgaactgtttggccaaatcgagagggagtttgagaacctgtacattgaaaacctggagctgaggagagagatcgatactctgaatgaacgtctggcagcggaaggccaggccatagacggcgctgagctgtcaaagggacagctaaagacaaaggccagtcactcaactagccagttgtctcagaaactgaagacgacgtacaaagcatcaactagtaaaattgtgtcctcgttcaaaacaactacaagccgggctgcctgccagttggtgaaagagtacatcggtcatagggacggcatttgggacgtctccgtggccaaaacccagccagtagtcctaggaacggcaagcgcagatcacactgccctcctgtggtcaatagagactggaaagtgtctggttaaatatgccggacacgtcggaagcgtcaatagtatcaaatttcatccatctgaacagctggccctgacggcttctggtgaccagacagcccacatttggcgctatgctgtccagctgccgaccccccagcctgtcgccgatactagcatcagcggggaagacgaggtggagtgctctgacaaggatgagcctgatctagacggcgacgttagtagtgactgtcctacaatcagagtgcctctgacgtcgctgaagagccaccagggcgtggtgatcgcctctgactggctcgtgggtgggaaacaggcggtcaccgcctcgtgggatcgcactgcaaacctgtacgacgtggagacatcagagcttgtccactcactcacagggcacgatcaagaactgactcactgctgtacgcaccctacccagaggctggtcgtcaccagcagcagggatactacattcaggctttgggacttccgcgaccccagtatccacagcgtaaatgtgttccagggacacaccgatacagtgacttccgcggtttttacggtaggggacaatgtcgtgtcaggatctgacgacaggaccgtgaaggtgtgggatctgaagaatatgcgcagccccatcgccacgattcggacagatagcgctatcaaccgcatcaatgtctgtgtgggccagaagatcatagccctgccccatgacaaccggcaggtacggctgttcgatatgtcaggtgttcgactggccaggttgccccgaagctcgcgacaggggcaccggagaatggtgtgttgtagtgcgtggtctgaggatcaccccgtgtgcaatttatttacatgtggattcgataggcaggccatcgggtggaatattaacattcctgctctgcttcaggagaaatag

SEQ ID NO: 177545 - DNA, 1485 bp, Artificial Sequence
  derived and/or modified sequence
atgccaaccgaatccgcttcctgtagcacagctcggcagaccaagcagaagagaaagagccactccttgagcattaggagaacaaattccagtgaacaggaacggactggtctcccaagagatatgctcgaaggccaggatagcaaactgccctcttccgtgagatcaaccctgttggagttgtttgggcaaattgaacgggagtttgaaaacctgtatatagagaacctggagttgcgccgagagattgacactcttaatgagcgtctggccgctgaaggccaagctatcgacggtgctgagctgtcaaaagggcagctgaagacaaaagcatctcattccacctcacaattgtcacaaaagctgaagaccacctataaagctagtacttccaagattgttagctccttcaagaccacaacgtcacgggctgcttgccagctcgtgaaagaatacatcgggcatagggacggcatctgggatgtcagtgtcgccaagactcagcctgtggtgttagggacagcgtctgccgatcatacagcactgctctggtcaatcgaaactggaaaatgtttggtcaaatatgcgggtcatgtgggcagcgtgaattcaatcaaatttcatccttccgagcagctcgccctgaccgcttctggcgaccagacagctcacatttggcgctacgccgtacaactaccgacgccccagcccgttgccgacacttccatctctggagaagatgaggtggagtgctctgataaggacgaaccagatctggatggcgatgtgtcttctgactgccccactattagggtgcctttgacctctctaaagtcccatcaaggcgttgtgatcgcatctgactggctcgtgggcggaaagcaggccgttaccgcaagctgggacagaaccgctaacttatacgatgtcgagacctccgaacttgtacacagccttacaggccatgaccaagagctgacccactgctgcacacaccctacgcagcgcctggtcgtgacttcatcacgtgacaccacattcaggttgtgggatttccgggaccctagtatccactccgtgaacgttttccaggggcacaccgacaccgtgacgagcgctgttttcaccgtgggcgataacgtcgtgagcggcagtgatgatagaacagtgaaggtatgggatctgaagaatatgagatctccgatagccactatccggaccgacagcgcaatcaaccgtataaacgtttgtgttggccagaagattatcgcactgcctcatgacaaccggcaggtccgcctgttcgatatgtctggggtcagattggcacgacttcctagaagttccagacagggccataggcggatggtctgttgctcagcctggagtgaggatcacccagtgtgcaatttgtttacgtgtggcttcgatcggcaggctatcggttggaacatcaacattcctgcactcctgcaagagaaatag

SEQ ID NO: 177546 - DNA, 750 bp, Artificial Sequence
  derived and/or modified sequence
atgcctactgaaagcgcttcctgcagcacggcgaggcagactaagcagaagcgcaaatcacactcattgagcattaggaggaccaattcctccgaacaggagcgaaccggtctgcctcgagacatgctcgaggggcaagactccaagctaccttcttccgtgcgttcgactttattagagctgttcggacagatcgaacgcgagttcgagaacctttatatcgaaaacctcgaactccggagagaaatcgatacattgaacgagcgcctggctgctgaagggcaggcgattgacggggcagagctgtcaaagggtcagctaaaaaccaaagcctcacacagcacatcgcaactgagtcagaaactcaagactacatataaagcctccacctctaaaatcgtctcttcgttcaagaccaccacttcccgtgccgcttgccagcttgtgaaagaatatattggtcacagagacgggatttgggacgtgtccgtggccaagactcagcccgtggtgctcggcaccgccagcgctgaccacaccgcacttctctggagcatcgaaaccggcaagtgcctggtgaagtatgccggtcacgtaggcagtgttaactctataaagtttcacccgagtgagcagctggcgctgaccgctagcggcgaccagacagctcatatttggagatacgcggtgcaactgcccaccccacagccagtggctgacacaagcgtatcaacattcccctatttgtag

SEQ ID NO: 177547 - DNA, 630 bp, Artificial Sequence
  derived and/or modified sequence
atgtcgagtgacagcgagtgggacaggtcagcatgctccgacagtaaactcccttctagcgtgagatccacactgctggaactcttcggccagatagaaagagaattcgagaacttatacattgaaaatttagaactgcgtagagaaatcgacacactgaacgaaaggctggcagctgagggacaggccatcgatggggcagagctctctaagggtcaactaaagaccaaggccagccattctactagccagctgagtcagaaactgaagaccacttacaaggccagtacgagtaaaattgtgtccagctttaaaaccactacaagccgtgcagcttgtcagctagtcaaagaatatattggacatcgtgacggcatttgggatgtgtcagtggccaaaactcaacccgtagtgcttgggaccgctagtgcagatcataccgcccttctgtggtccattgagacggggaaatgcctcgtcaagtacgccggtcatgttggatctgttaatagtattaaattccatccctctgagcagttagccctgactgccagcggtgaccagacggcgcacatctggcgctatgccgtgcagcttccaactcctcagcccgtggccgatacctcctag

SEQ ID NO: 177548 - DNA, 4462 bp, Artificial Sequence
  derived and/or modified sequence
gcggtgtcctgcgcgtcttcgggtcagtacggggggccgcgtcgtagggactcactggcggtgcgcgacctgggctggctccgggggtggcgggcgcagctgctgtgacagcttattgcaggagtgaccaggacactacctcctagaagtaatgcccacagaaagcgcaagttgttcgactgctcgccaaacaaaacagaagcgcaaatcccatagcctttctatacgaagaactaacagctcggagcaggagaggacgggactgccaagagacatgttagaaggacaagattctaaactgccttcctcggttcgcagtacacttctggaactgtttggtcaaatagaaagagaatttgaaaacctttatatcgaaaacttagaattacgtagagaaatcgacactcttaatgaacgtttagctgctgaaggacaagcgattgatggagcagagctgagtaagggccaactcaaaacaaaagccagtcacagcaccagccagctctcccagaaactgaagaccacttacaaggcttccaccagcaagattgtctccagctttaagaccacgacatcgagagctgcctgccagctcgtgaaggagtacatcggccaccgggacggcatctgggatgtcagcgtggccaagacacagccagtggtgctcgggactgcatcagccgatcacacggctttgctgtggagcatagagacagggaagtgcctagtcaagtacgcaggccacgtgggctcagtaaattctatcaaatttcatccctcagagcagttggctctcactgcttctggagatcagactgctcatatctggagatacgcggtgcagctgccgacaccccagcctgttgctgacactagtatatctggggaagatgaagtagagtgctctgacaaggacgagcccgacctcgatggggatgtgtccagcgactgccccaccatccgcgtcccactgacatccctcaagagccaccagggcgtggtcatcgcctccgactggctggttggggggaagcaggctgtgactgcctcctgggaccggacggcaaacctgtacgacgtggagacgtccgagctcgttcactctctgacagggcacgaccaggagttgacgcactgctgcacacaccccacccagcggctcgtggtgacctcctcccgtgacacgactttccgcctctgggatttcagggacccctccatccactcggtgaatgttttccagggacacacggacactgtgacttctgccgtgttcaccgtgggagacaacgtggtttcaggcagcgatgaccgcacggtgaaagtctgggacttgaaaaatatgagatcccccattgcaactattcgcacggactctgccattaacaggatcaatgtatgtgtcggccaaaaaatcatagccctcccccatgacaaccgacaagtgagactgtttgatatgtcaggagtgcgcctggcgcggcttccccggagcagccgacagggccacaggagaatggtatgctgctcggcatggagtgaagaccaccccgtgtgcaatctgttcacctgtgggtttgaccggcaagccattggttggaacatcaacatccctgcattgctacaagaaaaataaggacaccggcagcccttagtttcactgtttgccagcacagacctttgatgggtgcaggcttttctgcgtattaatcagccatttttgtgagagtttgaccctggaaagggtgctttgtatatgttcttttcacatagtgcccagcttgcatgaaatgtacagagaaatgtgtggtcgtattttttacttttgtcttgtatatgtatgtatattgggtcctctgggcagtagaggcaaagctcacctcccatgtagcacatgaaatgcttgtgagttgttgacattggacaggtgaacagtagggcattacatttgtgtgaattaaatgtgaacttctgtattacgttgcggcgtcggcagtcctgcgttccctggagtaactgtacgtatctgcctttgctgggaagactgtggggctgcctgtgttggctggcgaccagcaggattgctccaggattttgtgtttacctcgcgtgaagttcagcacgtgctgtcgtgtagtcagcttctactctaatttctgttacagttctgcaaaggtaacctggagtttagaagttaaaaaaaagcatgggatgttggatttgcaccatttggagtttctttaggaaagaaaagttttctgcttttttatagaaaatcatttcagtctcccgaggtctcatgctagcaaattttgaaataggattctaatcactgatttcaaatattaagcaaaatgtaaagcactttaatttatagctatggttataaacaggttttagatgtttcaaatgacttgtccactgaatgtcacttgaccttgataagaggccgcctgcacacagagcccagttaattctccgcacctcggttgtgtgcttccgaatgggctcactcccgtggtggtgtttgagagccaacaacactacctcagagacgggtctttgggaaactttgggtctcactgttgcctggctggagcactttggtttatagctggaatactgagttcagttcagaaggcaggaaagacagtcacaccgacgtgtcctgaaggtgtaggctctccacttaggcgcacaagctgacggctgcagccagcaggccccggtgacgagacacttccaggtcttgtggtggggacgcctctcagtgccagtcccgccactgctgagtgagcctggtgttcttgccttcttggaaattactgctcacctggtatctgtacgttaatgtttcttgctgagttacagttttgataaagaggctctcatttcctgtgtcttgtatattcagtcctttcaatacgtccacctggaggctcaccacttggagagacacaggaaggtaatatttacagctgtcatgtgacatccccaggtctttgtgttttgccctgttttacggtgaggtaggagggaacccatctggggaccggtaggtgcaggtgcagtaggacgtgggacttttggacccgtcctttggtgcagctcgccagggatgagaggcacctccctacttgggtcttcaggagctggtccaaggagcttcgaatctaagtcatctagaatgaccctgaaatgactgacagccccgggcccaagaaaaacccataaccacctcagatggatctgacgtggctaagggacaaacagcaaatatttcagtcattttgattttacaaataaaaaatgtgttgtgtttttgtccgacattatttcctgactgcactgttctgagaatggagtccacctggtccctctggttgattagaatctcaggtttcagctcctgctgtcctgagcgaacttgcctgatgcagggctgtgctgtgtccagatgttgctggggcctcactttttctcttggctggaggtccaattgccagagcctcccacactgcacatacaaaggtctgagcccagggcagcttctggggccactgcacaggccacctgcttgggttcctcggagtttaatttgaaagtctgggtgtcttaggatgatggttaggaacattgaaaaatggctgcaaatagccaaatcaaacttaagaaccagatctctgccagattaaacatttttgaagcttttaaaagtcaatattcctagtggccactgagttccaggcacactggtgccctttactgccacagctgctcaccttgtctggcaaactggagggacctcagaaactggactcctgcatgtccttgggggcgcagccctgtggtgctcaggcagagctctcaggagccggggcaccttgctgttcgctgctgtgtcgtcttctaatgtgagctcatccactgctgctgcagcgtggtgatcaggagtcacagacaagatcggggatggtgtgtgtgtgtgtgtgtgtgtgtgtgtgcacgtgtgtgtggctaaattaagtcatactgtcaaccacacgtgatctcgtctgaaacagtgtttggaagtgggaacagttttgtcctgtatgctgatgtgtccagaatttcatttaatgatagacggaaaatgtgtggttactgaaaactgtatatgatacagaatttcataagagccatgctgttgggcaaagcaactctttttcaaccactgctcatcagtttctgtagagacaaaaactctgtacatattttggaatctgaagaatcctatgtaaatcatttgttacttaagtctgtgaaaaacatatttctttggaggaaaatgtatgcatttataagtgttccatggaatcagtttttattgtatcgatataattgtctctaagtgttgactgtcttcattgcaatatgaaattcattaaaatgtccatgttccataattactattataaaa

SEQ ID NO: 177549 - DNA, 4582 bp, Artificial Sequence
  derived and/or modified sequence
agaacgatggcctttctgcggtgtctgcgaccgggaccaaggcggagcaaagtcgccgggggtgtggggtgttccacgctatgttgggagtgttcgctttcgagcttattgcaggagtgaccaggacactacctcctagaagtaatgcccacagaaagcgcaagttgttcgactgctcgccaaacaaaacagaagcgcaaatcccatagcctttctatacgaagaactaacagctcggagcaggagaggacgggactgccaagagacatgttagaaggacaagattctaaactgccttcctcggttcgcagtacacttctggaactgtttggtcaaatagaaagagaatttgaaaacctttatatcgaaaacttagaattacgtagagaaatcgacactcttaatgaacgtttagctgctgaaggacaagcgattgatggagcagagctgagtaagggccaactcaaaacaaaagccagtcacagcaccagccagctctcccagaaactgaagaccacttacaaggcttccaccagcaagattgtctccagctttaagaccacgacatcgagagctgcctgccagctcgtgaaggagtacatcggccaccgggacggcatctgggatgtcagcgtggccaagacacagccagtggtgctcgggactgcatcagccgatcacacggctttgctgtggagcatagagacagggaagtgcctagtcaagtacgcaggccacgtgggctcagtaaattctatcaaatttcatccctcagagcagttggctctcactgcttctggagatcagactgctcatatctggagatacgcggtgcagctgccgacaccccagcctgttgctgacactagtatatctggggaagatgaagtagagtgctctgacaaggacgagcccgacctcgatggggatgtgtccagcgactgccccaccatccgcgtcccactgacatccctcaagagccaccagggcgtggtcatcgcctccgactggctggttggggggaagcaggctgtgactgcctcctgggaccggacggcaaacctgtacgacgtggagacgtccgagctcgttcactctctgacagggcacgaccaggagttgacgcactgctgcacacaccccacccagcggctcgtggtgacctcctcccgtgacacgactttccgcctctgggatttcagggacccctccatccactcggtgaatgttttccagggacacacggacactgtgacttctgccgtgttcaccgtgggagacaacgtggtttcaggcagcgatgaccgcacggtgaaagtctgggacttgaaaaatatgagatcccccattgcaactattcgcacggactctgccattaacaggatcaatgtatgtgtcggccaaaaaatcatagccctcccccatgacaaccgacaagtgagactgtttgatatgtcaggagtgcgcctggcgcggcttccccggagcagccgacagggccacaggagaatggtatgctgctcggcatggagtgaagaccaccccgtgtgcaatctgttcacctgtgggtttgaccggcaagccattggttggaacatcaacatccctgcattgctacaagaaaaataaggacaccggcagcccttagtttcactgtttgccagcacagacctttgatgggtgcaggcttttctgcgtattaatcagccatttttgtgagagtttgaccctggaaagggtgctttgtatatgttcttttcacatagtgcccagcttgcatgaaatgtacagagaaatgtgtggtcgtattttttacttttgtcttgtatatgtatgtatattgggtcctctgggcagtagaggcaaagctcacctcccatgtagcacatgaaatgcttgtgagttgttgacattggacaggtgaacagtagggcattacatttgtgtgaattaaatgtgaacttctgtattacgttgcggcgtcggcagtcctgcgttccctggagtaactgtacgtatctgcctttgctgggaagactgtggggctgcctgtgttggctggcgaccagcaggattgctccaggattttgtgtttacctcgcgtgaagttcagcacgtgctgtcgtgtagtcagcttctactctaatttctgttacagttctgcaaaggtaacctggagtttagaagttaaaaaaaagcatgggatgttggatttgcaccatttggagtttctttaggaaagaaaagttttctgcttttttatagaaaatcatttcagtctcccgaggtctcatgctagcaaattttgaaataggattctaatcactgatttcaaatattaagcaaaatgtaaagcactttaatttatagctatggttataaacaggttttagatgtttcaaatgacttgtccactgaatgtcacttgaccttgataagaggccgcctgcacacagagcccagttaattctccgcacctcggttgtgtgcttccgaatgggctcactcccgtggtggtgtttgagagccaacaacactacctcagagacgggtctttgggaaactttgggtctcactgttgcctggctggagcactttggtttatagctggaatactgagttcagttcagaaggcaggaaagacagtcacaccgacgtgtcctgaaggtgtaggctctccacttaggcgcacaagctgacggctgcagccagcaggccccggtgacgagacacttccaggtcttgtggtggggacgcctctcagtgccagtcccgccactgctgagtgagcctggtgttcttgccttcttggaaattactgctcacctggtatctgtacgttaatgtttcttgctgagttacagttttgataaagaggctctcatttcctgtgtcttgtatattcagtcctttcaatacgtccacctggaggctcaccacttggagagacacaggaaggtaatatttacagctgtcatgtgacatccccaggtctttgtgttttgccctgttttacggtgaggtaggagggaacccatctggggaccggtaggtgcaggtgcagtaggacgtgggacttttggacccgtcctttggtgcagctcgccagggatgagaggcacctccctacttgggtcttcaggagctggtccaaggagcttcgaatctaagtcatctagaatgaccctgaaatgactgacagccccgggcccaagaaaaacccataaccacctcagatggatctgacgtggctaagggacaaacagcaaatatttcagtcattttgattttacaaataaaaaatgtgttgtgtttttgtccgacattatttcctgactgcactgttctgagaatggagtccacctggtccctctggttgattagaatctcaggtttcagctcctgctgtcctgagcgaacttgcctgatgcagggctgtgctgtgtccagatgttgctggggcctcactttttctcttggctggaggtccaattgccagagcctcccacactgcacatacaaaggtctgagcccagggcagcttctggggccactgcacaggccacctgcttgggttcctcggagtttaatttgaaagtctgggtgtcttaggatgatggttaggaacattgaaaaatggctgcaaatagccaaatcaaacttaagaaccagatctctgccagattaaacatttttgaagcttttaaaagtcaatattcctagtggccactgagttccaggcacactggtgccctttactgccacagctgctcaccttgtctggcaaactggagggacctcagaaactggactcctgcatgtccttgggggcgcagccctgtggtgctcaggcagagctctcaggagccggggcaccttgctgttcgctgctgtgtcgtcttctaatgtgagctcatccactgctgctgcagcgtggtgatcaggagtcacagacaagatcggggatggtgtgtgtgtgtgtgtgtgtgtgtgtgtgcacgtgtgtgtggctaaattaagtcatactgtcaaccacacgtgatctcgtctgaaacagtgtttggaagtgggaacagttttgtcctgtatgctgatgtgtccagaatttcatttaatgatagacggaaaatgtgtggttactgaaaactgtatatgatacagaatttcataagagccatgctgttgggcaaagcaactctttttcaaccactgctcatcagtttctgtagagacaaaaactctgtacatattttggaatctgaagaatcctatgtaaatcatttgttacttaagtctgtgaaaaacatatttctttggaggaaaatgtatgcatttataagtgttccatggaatcagtttttattgtatcgatataattgtctctaagtgttgactgtcttcattgcaatatgaaattcattaaaatgtccatgttccataattactattataaaagctttgtgttattgggagtcttattatttttatagtttttcatgttttgctttggtgaaacattgtgaatgactatataaacatcacgatgagctagaaattgaacaaatataatactggtcactcg

SEQ ID NO: 177550 - DNA, 1307 bp, Artificial Sequence
  derived and/or modified sequence
ctgaccgcgccgtccccgccaggctcccgcgcggccggcaccgcggccctgagcgcaggcggccccgggtctcaggcctcaggcggaccgcgccccgggctcgcagccctcccgccccggctgccgggctacggggcagatggactcggagcgccccgccgcttattgcaggagtgaccaggacactacctcctagaagtaatgcccacagaaagcgcaagttgttcgactgctcgccaaacaaaacagaagcgcaaatcccatagcctttctatacgaagaactaacagctcggagcaggagaggacgggactgccaagagacatgttagaaggacaagattctaaactgccttcctcggttcgcagtacacttctggaactgtttggtcaaatagaaagagaatttgaaaacctttatatcgaaaacttagaattacgtagagaaatcgacactcttaatgaacgtttagctgctgaaggacaagcgattgatggagcagagctgagtaagggccaactcaaaacaaaagccagtcacagcaccagccagctctcccagaaactgaagaccacttacaaggcttccaccagcaagattgtctccagctttaagaccacgacatcgagagctgcctgccagctcgtgaaggagtacatcggccaccgggacggcatctgggatgtcagcgtggccaagacacagccagtggtgctcgggactgcatcagccgatcacacggctttgctgtggagcatagagacagggaagtgcctagtcaagtacgcaggccacgtgggctcagtaaattctatcaaatttcatccctcagagcagttggctctcactgcttctggagatcagactgctcatatctggagatacgcggtgcagctgccgacaccccagcctgttgctgacactagtgtaagcacctttccttacctgtgaatgtgtaggatgctgatgtctgcgaatctgagaatccatttatgatatctgtcatggacggaatgtttgtgtccccccaagttcagtgttgaaggcctcacccccggtatggttgaatttggagattgggcctctaaggtagtagttaaggttcagtgaggttgcgtgaggtcctcataagaggagacagtggagagctcacctgtgttctcaatctctctgtcactctccgtgtcacgtaagagcagagccagagggcggccgtctttaaggatgagcccgcaccagaacctgaattggcttgatcttggacttccagcctccagcactgtgagaaaataaatgtctgtttttta

SEQ ID NO: 177551 - DNA, 714 bp, Artificial Sequence
  derived and/or modified sequence
ggtctccaagccgcacggcctcgtcctctgctccacctttggcctgtgtctcccacgctcgctccctagacggagctcatttgttcaatgagcagtgattcggagtgggaccggtcagcatgttctgattctaaactgccttcctcggttcgcagtacacttctggaactgtttggtcaaatagaaagagaatttgaaaacctttatatcgaaaacttagaattacgtagagaaatcgacactcttaatgaacgtttagctgctgaaggacaagcgattgatggagcagagctgagtaagggccaactcaaaacaaaagccagtcacagcaccagccagctctcccagaaactgaagaccacttacaaggcttccaccagcaagattgtctccagctttaagaccacgacatcgagagctgcctgccagctcgtgaaggagtacatcggccaccgggacggcatctgggatgtcagcgtggccaagacacagccagtggtgctcgggactgcatcagccgatcacacggctttgctgtggagcatagagacagggaagtgcctagtcaagtacgcaggccacgtgggctcagtaaattctatcaaatttcatccctcagagcagttggctctcactgcttctggagatcagactgctcatatctggagatacgcggtgcagctgccgacaccccagcctgttgctgacactagt

SEQ ID NO: 177552 - protein, 337 aa, Artificial Sequence
  derived and/or modified sequence
MADAAPQLGKRKRELDVEEAHAASTEEKEAGVGNGTCAPVRLPFSGFRLQKVLRESARDKIIFLHGKVNEASGDGDGEDAVVILEKTPFQVEQVAQLLTGSPELQLQFSNDIYSTYHLFPPRQLNDVKTTVVYPATEKHLQKYLRQDLRLIRETGDDYRNITLPHLESQSLSIQWVYNILDKKAEADRIVFENPDPSDGFVLIPDLKWNQQQLDDLYLIAICHRRGIRSLRDLTPEHLPLLRNILHQGQEAILQRYRMKGDHLRVYLHYLPSYYHLHVHFTALGFEAPGSGVERAHLLAEVIENLECDPRHYQQRTLTFALRADDPLLKLLQEAQQS

SEQ ID NO: 177553 - DNA, 1014 bp, Artificial Sequence
  derived and/or modified sequence
atggccgacgccgcgccacagcttggaaagcggaagcgcgagctcgatgtcgaagaggctcatgcggcttccaccgaggagaaggaagctggcgtcggcaacggtacttgcgctccagtcaggctgccttttagcggttttaggctgcagaaagtcctaagagagagtgccagggataaaattatctttctgcacggaaaggtaaacgaggctagtggagacggcgatggggaggacgccgtggtcattctggagaagactccatttcaggttgaacaggttgcccagctcctgacggggagcccagaacttcaactgcaattctctaatgacatatactcgacctatcacttgtttcctcctagacagctgaacgatgtgaaaacgaccgtggtgtaccctgccaccgagaagcacctccagaaatacctgcggcaggatttaagattgatcagagagacgggggacgactatagaaatatcaccctgccacatctggaaagccaatcactctccattcagtgggtgtataatatcctagataaaaaggccgaggccgaccgcattgtcttcgaaaacccagacccaagtgacggattcgtgctcattcccgatctcaagtggaaccaacagcagctggacgatctatacctgattgccatctgccacagacgcgggatacgaagcctccgtgacctcaccccagagcatcttcctttactgcggaacattttacatcaggggcaggaggctatactgcagcggtacagaatgaaaggggatcatctgcgcgtctatctgcactaccttccaagctattaccacctacatgtccatttcaccgccttgggatttgaagcacctggttcaggtgtggaaagggcacatctgttagctgaggtaatagagaacttggaatgtgacccccgtcattaccaacaacgcacactcactttcgctctgcgcgcagatgatccactgttgaagctcctgcaggaggcccagcaatcatag

SEQ ID NO: 177554 - DNA, 1014 bp, Artificial Sequence
  derived and/or modified sequence
atggctgatgctgccccccagctgggcaagaggaagcgggagctggatgtggaggaggcccacgccgccagcacagaggagaaggaggccggcgtgggcaatggcacctgtgcccctgtgcggctgcccttcagcggcttccggctgcagaaggtgctgcgggagagcgcccgggacaagatcatcttcctgcacggcaaggtgaatgaggccagcggagatggagatggagaagatgctgtggtgatcctggagaagacccccttccaggtggagcaggtggcccagctgctgaccggcagccctgagctgcagctgcagttcagcaatgacatctacagcacctaccacctgttccccccccggcagctgaatgatgtgaagaccaccgtggtgtacccagccacagagaagcacctgcagaagtacctgcggcaggacctgcggctcatccgggagactggagatgactacagaaacatcaccctgccccacctggagagccagagcctgagcatccagtgggtgtacaacatcctggacaagaaggccgaggccgacagaattgtgtttgagaacccagaccccagtgatggctttgtgctgatcccagacctgaagtggaaccagcagcagctggatgacctgtacctgattgccatctgccaccggcggggcatccgcagcctgcgggacctgaccccagagcacctgcccctgctgaggaacatcctgcaccagggccaggaggccatcctgcagcgctacaggatgaagggggaccacctgcgggtgtacctgcactacctgcccagctactaccacctgcacgtgcacttcaccgccctgggctttgaggcccctggcagcggcgtggagcgggcccacctgctggccgaggtgattgagaacctggagtgtgaccccaggcactaccagcagaggaccctgacctttgccctgcgggcagatgaccccctgctgaagctgctgcaggaggcccagcagagctag

SEQ ID NO: 177555 - DNA, 1014 bp, Artificial Sequence
  derived and/or modified sequence
atggccgacgccgccccccagctgggcaagcggaagcgggagctggacgtggaagaggcacatgccgcgagtactgaagaaaaggaggctggggtgggcaacgggacatgcgcccctgtgagactcccgttctctggttttcggctccaaaaggtgctgagggagagcgcccgggataagattatattcttgcacggtaaagttaacgaggcaagcggagacggagatggcgaagacgccgtcgtaatcctggaaaagactccattccaagtggagcaggtggctcaacttctgaccggatcccctgagctccagctgcagttttcgaacgatatttactcaacttaccatttgtttccaccccgccagttgaatgacgtaaagacaactgtcgtgtatcctgctacagaaaagcacttacagaaatacctccggcaggatctcagactgatccgcgaaaccggggacgattaccggaacatcacactcccacacctggagagtcaaagcctctctatacagtgggtgtataatattctggataagaaagccgaagctgacagaatcgtttttgaaaatcccgacccgagcgatggattcgtccttattccggacctcaagtggaaccaacaacagcttgatgacctgtatcttattgccatctgccatcgtaggggcatcagatccctgcgagacctgacacccgaacacttgccattattgagaaatattttacatcagggtcaggaagcaatcctgcagcggtacaggatgaaaggagatcaccttcgggtctatctgcattatctgccatcttactaccatctccacgtccactttactgccctggggtttgaagcccctgggtcgggggttgaacgagcacatctgcttgctgaagtgatagagaaccttgaatgcgatccccggcactatcaacagaggactctcacctttgcccttagggcagacgatccactcctgaaactgctacaggaagcacagcagtcttag

SEQ ID NO: 177556 - DNA, 1014 bp, Artificial Sequence
  derived and/or modified sequence
atggctgatgccgctcctcagttgggcaaacgcaaacgcgaactggatgtcgaagaggctcatgcagcttccacagaagaaaaggaggcgggagtgggtaatgggacctgtgcacccgtgagactgcccttctctggcttccgtcttcagaaggtactgagggagagcgctcgtgataaaatcatatttctgcacggtaaagtcaacgaggcctctggggacggcgacggcgaagatgccgtggtgattctagagaaaactcctttccaggtggagcaagtggcccagttgctgaccggcagtcctgaactgcaactgcagtttagtaacgacatctactctacgtaccacctgttccctcccagacagctgaacgacgtgaaaacaaccgtggtctatcctgctacagagaagcacctgcagaagtatcttagacaggatctgaggttgattcgggaaacgggggacgactacaggaacattaccttgccgcatctggagtctcagtcactatcgatccagtgggtgtacaatatactcgacaaaaaagctgaggctgacaggattgtgtttgaaaaccctgaccctagtgatgggtttgtattgattcctgatctgaagtggaatcaacagcagttggatgatctgtatctgatcgcgatctgtcataggcgcggtattcggtctctgagagatcttacacctgagcatctgccactgttgcgcaacattttacaccagggacaggaggccattttacagcgctaccggatgaagggggatcacctcagagtgtaccttcactacctgccttcctactaccatctgcacgtgcatttcaccgcactgggcttcgaagcgcctggtagcggcgtcgagagggctcatctacttgccgaggttatcgagaacctggaatgcgaccctcgccattaccaacagagaacactcacctttgcactgcgggcagatgatcctctgctgaagttacttcaggaagcacaacagagctag

SEQ ID NO: 177557 - DNA, 1479 bp, Artificial Sequence
  derived and/or modified sequence
gggcgtcttcggctcccaccccggggcgtgggcctgggggtccctcttcactgcgcagccacctctagcccgccgctttcgggactctcagccttcttttcccttccctgagggccggccggcaccacaacggggccaaaggcagtaactcggttgaaaggcgcgccctgggacaggtcagcgggctccgccatgcgcggcacgcatcccgcaggagcgggtgccagagcagggtaggccgggagttagcagcccagccaggccgctggactcgggctaggggcggggccagcgcagggggcgcaggcgcacaccgcctccgcggcagcatggcggacgcagctcctcaactaggcaagaggaagcgcgaattggacgtggaggaggcccacgccgccagcacagaggaaaaggaggcaggagttggaaatggtacctgtgctcctgtccgcttaccgttctccggcttcagactgcagaaggtgctgagggagtctgcgcgggacaaaatcattttcctacacgggaaggtgaatgaggcctctggggatggggatggagaggatgccgttgtgatcctggagaagacgccatttcaggtggaacaggtggctcagctcctgacgggcagccctgagctccagttgcagttctccaatgatatctacagcacctatcacttgttccctccaagacaactgaatgatgtaaagacgaccgtggtttaccctgccacagagaaacacctgcagaagtacctgcgccaggacctccgcctgatccgagagacgggagatgactacaggaatattactttaccccacctggagtcccagagcctcagcatccagtgggtgtataacattctcgacaagaaggctgaagcggaccggattgttttcgagaacccagatccctctgatggttttgtcctcatccctgacctcaagtggaaccaacagcagctcgatgacttgtacttgatcgccatctgccatcgccggggcatcagatccctacgcgaccttactccggagcacttgccgctgctcaggaacatcctccaccaggggcaggaggccatcctgcagcgctaccggatgaagggagaccatctgcgagtatacctgcactacctgccctcctactaccacctgcatgtgcacttcaccgccctgggcttcgaggcccccggctcaggcgtggagcgggcccacctgctggctgaggtgatcgagaacttggagtgtgaccctaggcactaccagcagcgcacgctcaccttcgccctcagggctgacgaccccctgctcaagctcttgcaggaggctcagcaaagctgaattaactcaggcagaagagcacagatgtgtgggattgggggaggagtggggacaagattttttatctccaagtgaattttctaaaaatgtattttataccggcttattcctagtattgaataaactagcgggctca

SEQ ID NO: 177558 - DNA, 1014 bp, Artificial Sequence
  derived and/or modified sequence
atggccgacgccgccccccagctgggcaagagaaagagagagctggacgtggaggaggcccacgccgccagcaccgaggagaaggaggccggcgtgggcaacggcacctgcgcccccgtgagactgcccttcagcggcttcagactgcagaaggtgctgagagagagcgccagagacaagatcatcttcctgcacggcaaggtgaacgaggccagcggcgacggcgacggcgaggacgccgtggtgatcctggagaagacccccttccaggtggagcaggtggcccagctgctgaccggcagccccgagctgcagctgcagttcagcaacgacatctacagcacctaccacctgttcccccccagacagctgaacgacgtgaagaccaccgtggtgtaccccgccaccgagaagcacctgcagaagtacctgagacaggacctgagactgatcagagagaccggcgacgactacagaaacatcaccctgccccacctggagagccagagcctgagcatccagtgggtgtacaacatcctggacaagaaggccgaggccgacagaatcgtgttcgagaaccccgaccccagcgacggcttcgtgctgatccccgacctgaagtggaaccagcagcagctggacgacctgtacctgatcgccatctgccacagaagaggcatcagaagcctgagagacctgacccccgagcacctgcccctgctgagaaacatcctgcaccagggccaggaggccatcctgcagagatacagaatgaagggcgaccacctgagagtgtacctgcactacctgcccagctactaccacctgcacgtgcacttcaccgccctgggcttcgaggcccccggcagcggcgtggagagagcccacctgctggccgaggtgatcgagaacctggagtgcgaccccagacactaccagcagagaaccctgaccttcgccctgagagccgacgaccccctgctgaagctgctgcaggaggcccagcagagctag

SEQ ID NO: 177559 - protein, 334 aa, Artificial Sequence
  derived and/or modified sequence
MEPGPTAAQRRCSLPPWLPLGLLLWSGLALGALPFGSSPHRVFHDLLSEQQLLEVEDLSLSLLQGGGLGPLSLPPDLPDLDPECRELLLDFANSSAELTGCLVRSARPVRLCQTCYPLFQQVVSKMDNISRAAGNTSESQSCARSLLMADRMQIVVILSEFFNTTWQEANCANCLTNNSEELSNSTVYFLNLFNHTLTCFEHNLQGNAHSLLQTKNYSEVCKNCREAYKTLSSLYSEMQKMNELENKAEPGTHLCIDVEDAMNITRKLWSRTFNCSVPCSDTVPVIAVSVFILFLPVVFYLSSFLHSEQKKRKLILPKRLKSSTSFANIQENSN

SEQ ID NO: 177560 - protein, 173 aa, Artificial Sequence
  derived and/or modified sequence
MADRMQIVVILSEFFNTTWQEANCANCLTNNSEELSNSTVYFLNLFNHTLTCFEHNLQGNAHSLLQTKNYSEVCKNCREAYKTLSSLYSEMQKMNELENKAEPGTHLCIDVEDAMNITRKLWSRTFNCSVPCSDTVPVIAVSVFILFLPVVFYLSSFLHSEQKKRKLILPKRL

SEQ ID NO: 177561 - DNA, 522 bp, Artificial Sequence
  derived and/or modified sequence
atggccgacagaatgcagatcgtggtgatcctgagcgagttcttcaacaccacctggcaggaggccaactgcgccaactgcctgaccaacaacagcgaggagctgagcaacagcaccgtgtacttcctgaacctgttcaaccacaccctgacctgcttcgagcacaacctgcagggcaacgcccacagcctgctgcagaccaagaactacagcgaggtgtgcaagaactgcagagaggcctacaagaccctgagcagcctgtacagcgagatgcagaagatgaacgagctggagaacaaggccgagcccggcacccacctgtgcatcgacgtggaggacgccatgaacatcaccagaaagctgtggagcagaaccttcaactgcagcgtgccctgcagcgacaccgtgcccgtgatcgccgtgagcgtgttcatcctgttcctgcccgtggtgttctacctgagcagcttcctgcacagcgagcagaagaagagaaagctgatcctgcccaagagactgtag

SEQ ID NO: 177562 - DNA, 1005 bp, Artificial Sequence
  derived and/or modified sequence
atggaacctggacccactgcagctcagcggagatgctcgctccctccgtggttgcctctgggtctactgttgtggtctgggctcgccttaggcgcccttccgttcggctctagcccacacagagtcttccacgatctgctttctgaacagcaactgctggaggtcgaggacctctctttgagcctacttcaggggggtgggcttgggcctttgtcgttgccccccgatctgccggacttggacccagagtgccgggaactactgctggattttgctaacagttccgcagagctgacagggtgcctcgtgcgctcagctcgccccgtcaggctatgccagacctgttatcctctgttccaacaggtggtgagtaaaatggacaacatttcgcgcgccgcagggaataccagcgaaagccagagctgcgcgcgcagcctgcttatggccgatcggatgcagattgttgtgatactaagcgaattcttcaataccacttggcaggaagccaactgtgccaactgtttgaccaacaacagcgaggaattatccaacagcactgtgtatttcctgaatttattcaatcatacactcacttgcttcgaacataacctacaaggtaatgctcactctctgctacagaccaagaactactctgaggtatgcaagaactgccgcgaggcatataagaccctgagctccctgtacagcgagatgcaaaagatgaacgagctcgagaataaagccgaaccgggaactcacctgtgcattgatgtggaggacgctatgaacattaccaggaagttgtggagtcggacctttaattgttctgtgccctgctccgatacagtccctgtgatcgcagtgagtgtctttatcctgtttttacccgtggtcttttacctctcctcttttctgcactctgaacagaaaaagaggaagttgatcctgcccaaacggctcaagtccagcacatcatttgcaaatatccaagaaaatagcaactag

SEQ ID NO: 177563 - DNA, 522 bp, Artificial Sequence
  derived and/or modified sequence
atggctgaccgaatgcagattgtggttatactgtcagagttcttcaacaccacctggcaagaggcaaattgtgcaaattgcctcacaaataatagtgaggagctgtcgaactctactgtgtattttctaaatctgttcaaccacaccttaacgtgctttgagcataatctgcagggcaacgcccattctctgctacaaactaagaactacagcgaggtgtgtaagaattgccgggaggcctataaaaccttgtcctctctctactccgagatgcagaagatgaacgagctggaaaataaggccgagcccggcacccatctctgcatcgacgtggaagatgctatgaacattaccaggaagctctggtcccgcacctttaattgttccgtcccttgtagtgacaccgtgcctgttatagcagtgtcagtgttcatactgttcctccccgtggtgttctacttgagctcatttttgcacagcgaacagaaaaaacggaagttaattctgcccaaacgactttag

SEQ ID NO: 177564 - DNA, 4467 bp, Artificial Sequence
  derived and/or modified sequence
gcggaaaccggaagcggcggctgtccgcggtgccggctgggggcggagaggcggcggtgggctccctggggtgtgtgagcccggtgatggagccgggcccgacagccgcgcagcggaggtgttcgttgccgccgtggctgccgctggggctgctgctgtggtcggggctggccctgggcgcgctccccttcggcagcagtccgcacagggtcttccacgacctcctgtcggagcagcagttgctggaggtggaggacttgtccctgtccctcctgcagggtggagggctggggcctctgtcgctgcccccggacctgccggatctggatcctgagtgccgggagctcctgctggacttcgccaacagcagcgcagagctgacagggtgtctggtgcgcagcgcccggcccgtgcgcctctgtcagacctgctaccccctcttccaacaggtcgtcagcaagatggacaacatcagccgagccgcggggaatacttcagagagtcagagttgtgccagaagtctcttaatggcagatagaatgcaaatagttgtgattctctcagaattttttaataccacatggcaggaggcaaattgtgcaaattgtttaacaaacaacagtgaagaattatcaaacagcacagtatatttccttaatctatttaatcacaccctgacctgctttgaacataaccttcaggggaatgcacatagtcttttacagacaaaaaattattcagaagtatgcaaaaactgccgtgaagcatacaaaactctgagtagtctgtacagtgaaatgcaaaaaatgaatgaacttgagaataaggctgaacctggaacacatttatgcattgatgtggaagatgcaatgaacatcactcgaaaactatggagtcgaactttcaactgttcagtcccttgcagtgacacagtgcctgtaattgctgtttctgtgttcattctctttctacctgttgtcttctaccttagtagctttcttcactcagagcaaaagaaacgcaaactcattctgcccaaacgtctcaagtccagtaccagttttgcaaatattcaggaaaattcaaactgagacctacaaaatggagaattgacatatcacgtgaatgaatggtggaagacacaacttggtttcagaaagaagataaactgtgatttgacaagtcaagctcttaagaaatacaaggacttcagatccatttttaaataagaattttcgatttttctttccttttccacttctttctaacagatttggatatttttaatttccaggcatagcaatgttatctattttaatgtgtatttgtcacaataacagaacatgcaagaacaatcattattttattttataggcatttgattactattctagacttctggtatcttcttactaacataaatatctcaagtagaaaagtttttgaaaactaacatttaaaaattaatcagttacagtaaagactttgaaaaagaaatgtacttgttaggaagtagcttaattaccccccattgcagtattattgttatatatatagttaatatgttgtacatcacaataatatataattcagtctctagtttccctagagtcatttttgaaaccactgattgcaaacctccctgacaatttttaaaagtagtaagccacattacatttatctttgtaaaaagatttatggtaactggtttcttacttgacttttataaatagtattttacatcttatttttgcctttatttcataagtaatttaaaaatcactggattgctttattatattcagggcaatatggattatttttataccaaggatttgcatcgtgaattacattaagttatttggcaatttataatttattactactttaaatcaaatgtagcattatcacactgtatttaaattgtcattttttaaaggaatattttcttcttaagatatatagaggattttggagaagagagacaggaggggtaaaaccagcttaaggttcagcgagcagaaagggacctgagaggatgctcactgtaagactgttggacagtggtgtgtattgaggggatgaatcggaacgatagtctcatgcagaaaatagtgagattaagatcatccttattgtttctaaattatttcaatcagatgaaagtgatacgattgaaatgaaatcacatagttcgtgctcagaaattctattttggtatgtttgtattagcctttagaaaaaacactccgtttcagaattgttcacagttttatttcttaggtttttagagttcaggatttcatttattaatttcttcttgcttttttggtggaaataggctttgttgtaaacattaagaatataaaatctcctctatatagaaacaagaattttgttaaaaagagaatttgaatcccttcctatactataaaatgctctatagggagacaaagtgtttcttttttcttttatgtttactgtttatgtggagtgaaatataaggctcttggatgtataacatactcaaaagctgttacactttctctgatctgctgtgatccactgaaaatgtgctggggtttgttctgctgtcactgtttatgctgctggaacttagcactgtcttgatttgaagcatatgattgagagccatttgaagcaatcttcattaatgcagataaaacaagtttacatgtgcagagttagaaaatgacatgttcaattctgtaagtggtgactttttgagcacctttcagtattatgtatttgtaaaaaccattgtttttggatataaagctaataagcactttaaaaaggaaaaggcagcctttactattttttctggttgagtcattgctctttagacctagcatcagcaatagatttcaaagataagtattaagcgctaccctaaagtgtgtaagtttttcattttgtcatattgaaaaatgatttgcatagtactgaatgttgacacacagcttatatgtatttacaagaatatctttaagtgtttttttgacacattaaaataaaggaaataaggaaattgtaagctttatttggatttttaaatacatttttaaaatttcagatgtaatttaacatcacatttgtttttcaggtattgagtttagatgcctacttttatgagtaccatcagctggacacagtgtctcatacctgtatttgcagcactttgggaggctgaagcagatcgctggagcttatgagttcgagaccagcctggacaacatagtgaaacactgtctctgcaaaaaatacaaaaattagctgggtatggtggtaagtgcctgtagtcctagctacttgggaggctgagatgggaggatgtcttgagcccgggaggtggaggttgcaatgagccaagattgtaccactgcattccaacctgggcgacagagccagaccttgtctcaaaaaaaaaaaaaaaaaaagaaaaaagaaagtactgtctgtcttaaattttgctgcaaataaaaatgtactttggattatttattgttgaacttgagagatagaaataacatcagatatattttttcttttttttttataattaattttttttttttttttttttgtagagacagtgtctcactatgttgcccaagctggtcttgaactcctgagttcaagagatcctcctgccttagcctcccaaagtgctgggattacaagcataagcaccacacctggctgaacatcagatattttaaagtgtagcccagagtctagttggtaaatgttacttatattgggactagtattttctaatgtttctgggatatgctccctataaaatgaaatgttttcctggaacaatgctaattaggattgcattcctggccaaagacatgacatcaaataagtaatagacatcaccagcaatgaattttgaaaagcaaaaaatactattaacctatataaccatttaaaatttaaaaaattatgttccaagtacctctattttctgagctagaagaaaccttagaggccatctgatgatagattcccagagctggatggatccctagggactacctaatctgactttctgtccactgcatggattcttctaaaaagtatgtcacttatttccctaccttattaagactaaataagtggaacatcatagagctctttatttataacagtcattctttgatagtcaactcttaaatggagacttgagatgcttaaatattgtactactgtgcttatcttgtaaagatttcataaaatgatagtattggttattttaaaaaggctttggcttatgctgaattatacatgtagcaccaaaatgttacaactctactaaatttccttgttctaaactattatattagctataataaatattagtcatacatgtaacatgtttaatgacaaataactttctttatctccttggaattaaagagggcttttaaaagataa

SEQ ID NO: 177565 - DNA, 1005 bp, Artificial Sequence
  derived and/or modified sequence
atggagcccggccccacagctgcccagaggcgctgcagcctgcccccctggctgcccctgggcctgctgctgtggagcggcctggccctgggcgccctgcccttcggcagcagcccccacagggtcttccatgacctgctgtctgagcagcagctgctggaggtggaggacctgagcctgagcctgctgcagggcggcggcctgggccccctgagcctgcccccagacctgcctgacctggaccctgaatgtcgggagctgctgctggactttgccaacagcagcgctgagctgaccggctgcctggtgcgcagcgcccggcctgtgcggctgtgccagacctgctaccccctcttccagcaggtggtgtccaagatggacaacatcagcagagctgctggcaacaccagcgagagccagagctgtgcccggagcctgctgatggctgacaggatgcagatcgtggtgatcctgtctgagttcttcaacaccacctggcaggaggccaactgtgccaactgcctgaccaacaacagcgaggagctgagcaacagcacagtgtacttcctgaacctcttcaaccacaccctgacctgctttgagcacaacctgcagggcaatgcccacagcctgctgcagaccaagaactacagcgaggtgtgcaagaactgccgggaggcctacaagaccctgagcagcctgtacagcgagatgcagaagatgaatgagctggagaacaaggccgagcccggcacccacctgtgcattgatgtggaggatgccatgaacatcaccaggaagctgtggagcaggaccttcaactgcagcgtgccctgcagcgacacagtgcctgtgattgctgtgtctgtgttcatcctcttcctgcctgtggtgttctacctgagcagcttcctgcacagcgagcagaagaagaggaagctgatcctgcccaagaggctgaagagcagcaccagctttgccaacatccaggagaacagcaactag

SEQ ID NO: 177566 - DNA, 522 bp, Artificial Sequence
  derived and/or modified sequence
atggctgacaggatgcagatcgtggtgatcctgtctgagttcttcaacaccacctggcaggaggccaactgtgccaactgcctgaccaacaacagcgaggagctgagcaacagcacagtgtacttcctgaacctcttcaaccacaccctgacctgctttgagcacaacctgcagggcaatgcccacagcctgctgcagaccaagaactacagcgaggtgtgcaagaactgccgggaggcctacaagaccctgagcagcctgtacagcgagatgcagaagatgaatgagctggagaacaaggccgagcccggcacccacctgtgcattgatgtggaggatgccatgaacatcaccaggaagctgtggagcaggaccttcaactgcagcgtgccctgcagcgacacagtgcctgtgattgctgtgtctgtgttcatcctcttcctgcctgtggtgttctacctgagcagcttcctgcacagcgagcagaagaagaggaagctgatcctgcccaagaggctgtag

SEQ ID NO: 177567 - DNA, 1005 bp, Artificial Sequence
  derived and/or modified sequence
atggagcccggccccaccgccgcccagcggcggtgcagcctgcccccatggctgcctttggggcttctgctttggtcggggttggcccttggagcgttgcccttcggttcctcaccccatagggttttccatgatttgctctctgagcaacagttgctggaagtggaggatctaagcctcagcctcctccaggggggaggcctgggtccactaagtttgccacctgatctgccagacctggaccccgaatgtcgcgagttgctactggactttgcgaactcatctgcggagcttacaggctgtcttgttcggtccgcaaggccagtacgtctgtgtcagacttgctatcccttatttcagcaagtcgtcagtaaaatggacaatatctctcgggctgctgggaatacatccgagagccagtcctgtgcccggtcactgttgatggccgatcgtatgcaaattgttgtgattttgtccgagttttttaacactacgtggcaggaggcaaattgcgctaactgtctgactaacaatagtgaagagctctctaacagtaccgtatattttttgaatttgtttaatcatacattgacgtgtttcgagcacaaccttcagggaaatgctcatagcctgctgcagacaaaaaattatagcgaggtgtgcaaaaactgtcgggaagcttacaagaccctgagcagcttatactctgagatgcagaaaatgaacgaactggagaacaaagcagagccaggcacacacctttgcatagacgtggaagacgcaatgaacatcactcgcaaactctggtcacgtacctttaactgttccgtgccgtgctctgacacggtgcccgttatagccgtctccgtgttcatcctcttcctgcccgtagtgttctatctcagttcattcctgcactcagaacagaagaagcgcaaactcattctgcctaaacgtctgaaaagtagtacttcatttgctaacatacaagagaacagtaactag

SEQ ID NO: 177568 - DNA, 522 bp, Artificial Sequence
  derived and/or modified sequence
atggccgaccggatgcagatcgtggtgatcctgagcgagttcttcaacaccacctggcaggaagccaattgtgcaaactgtctgaccaacaactcagaggaactcagcaactctacagtttacttcctgaacctgttcaatcacacactaacctgttttgagcacaacctacaggggaacgctcactcccttctgcagaccaaaaactacagtgaagtctgcaaaaattgtagggaagcctacaagacactgtcttctctctattctgaaatgcagaaaatgaatgagctggaaaacaaggcagagccggggactcacctctgtatcgatgtcgaggatgcgatgaacatcacccgaaaattgtggtctcggacattcaactgtagcgtgccatgctccgacaccgtacccgttatcgctgtgtccgtgtttatcctgttcctgccagttgtcttctacctcagctcctttcttcactctgagcagaaaaaaagaaagctgatcttgccaaagcgcctgtag

SEQ ID NO: 177569 - DNA, 1005 bp, Artificial Sequence
  derived and/or modified sequence
atggagcctggacctacagctgcacaaagacggtgtagtttgccaccttggctccccctggggctgttgttgtggtctggactggcactcggcgctttgccctttggatcaagcccacacagggtctttcacgacctgctcagcgagcaacagctgctcgaggtggaggacctcagtttgagcctcctccaagggggaggtttaggccctctttctttacctcccgacctgcccgatctcgacccagagtgccgggaactgctactggactttgccaacagtagtgcggagctcaccggctgtctggtccgatctgcccgaccagtgcggctgtgtcagacctgttatcccctgtttcagcaggtggtgtcaaaaatggataatatatcacgcgcagccggaaataccagcgagtcgcagagttgtgcaagatccctgctgatggcagaccgaatgcagattgttgtgattctgtctgagttcttcaacactacgtggcaagaggccaattgcgcgaactgtcttacgaacaacagtgaggagcttagtaacagtaccgtttatttcttgaatcttttcaatcatacacttacatgctttgagcacaaccttcagggcaatgctcactctcttctgcagaccaaaaactattcagaggtttgtaagaactgccgcgaggcttataaaaccttgagttctctgtatagcgagatgcaaaaaatgaatgaacttgagaataaagccgagcccggaactcatctgtgcattgacgttgaggacgccatgaatataacaaggaaactgtggtcccgaacatttaattgttcagttccttgttcagataccgttcctgtgatcgccgtgtctgtgttcatcctgttcctgccagtggtattttacttatctagcttcctgcattccgagcaaaaaaagcgaaagttgatcctgccgaaaagactcaagtcctctaccagctttgctaacattcaagaaaactccaactag

SEQ ID NO: 177570 - DNA, 522 bp, Artificial Sequence
  derived and/or modified sequence
atggcggatcgcatgcagattgtcgttattctgtcagagttttttaatactacttggcaggaagctaattgcgcgaactgcctgacaaataatagtgaggagttgtcaaacagcacagtatatttcctgaatcttttcaatcacaccctaacatgctttgaacataatcttcagggcaatgcccactcactgctgcaaacaaaaaactactcagaagtctgcaaaaattgccgggaggcttacaagacactgtcctccctttattccgagatgcagaagatgaatgagctcgagaacaaagcagaacccggtactcacctctgcatcgacgtcgaagatgccatgaacattacaaggaagctgtggagccgcactttcaactgttccgtcccttgctccgacacagtgcccgttatagccgtcagcgtgttcatcctcttcttaccagttgtgttttatctgtcttccttcttacatagcgagcaaaaaaaacgaaagctgatcctgcccaagcgcctttag

SEQ ID NO: 177571 - DNA, 724 bp, Artificial Sequence
  derived and/or modified sequence
tgggagtgtggctctgtgcgtgcgtgatgagtgccagatagattcgcggaagaaattgggtggctgtgtgctggcgtgtgattgtgcgcgccggacatggccatgtgagttggttcattcttggtccggtgccccttctgttgggtaaaacttggatctggcccgagaatacttcagagagtcagagttgtgccagaagtctcttaatggcagatagaatgcaaatagttgtgattctctcagaattttttaataccacatggcaggaggcaaattgtgcaaattgtttaacaaacaacagtgaagaattatcaaacagcacagtatatttccttaatctatttaatcacaccctgacctgctttgaacataaccttcaggggaatgcacatagtcttttacagacaaaaaattattcagaagtatgcaaaaactgccgtgaagcatacaaaactctgagtagtctgtacagtgaaatgcaaaaaatgaatgaacttgagaataaggctgaacctggaacacatttatgcattgatgtggaagatgcaatgaacatcactcgaaaactatggagtcgaactttcaactgttcagtcccttgcagtgacacagtgcctgtaattgctgtttctgtgttcattctctttctacctgttgtcttctaccttagtagctttcttcactcagagcaaaagaaacgcaaactcattctgcccaaacgtct

SEQ ID NO: 177572 - DNA, 1005 bp, Artificial Sequence
  derived and/or modified sequence
atggagcccggccccaccgccgcccagagaagatgcagcctgcccccctggctgcccctgggcctgctgctgtggagcggcctggccctgggcgccctgcccttcggcagcagcccccacagagtgttccacgacctgctgagcgagcagcagctgctggaggtggaggacctgagcctgagcctgctgcagggcggcggcctgggccccctgagcctgccccccgacctgcccgacctggaccccgagtgcagagagctgctgctggacttcgccaacagcagcgccgagctgaccggctgcctggtgagaagcgccagacccgtgagactgtgccagacctgctaccccctgttccagcaggtggtgagcaagatggacaacatcagcagagccgccggcaacaccagcgagagccagagctgcgccagaagcctgctgatggccgacagaatgcagatcgtggtgatcctgagcgagttcttcaacaccacctggcaggaggccaactgcgccaactgcctgaccaacaacagcgaggagctgagcaacagcaccgtgtacttcctgaacctgttcaaccacaccctgacctgcttcgagcacaacctgcagggcaacgcccacagcctgctgcagaccaagaactacagcgaggtgtgcaagaactgcagagaggcctacaagaccctgagcagcctgtacagcgagatgcagaagatgaacgagctggagaacaaggccgagcccggcacccacctgtgcatcgacgtggaggacgccatgaacatcaccagaaagctgtggagcagaaccttcaactgcagcgtgccctgcagcgacaccgtgcccgtgatcgccgtgagcgtgttcatcctgttcctgcccgtggtgttctacctgagcagcttcctgcacagcgagcagaagaagagaaagctgatcctgcccaagagactgaagagcagcaccagcttcgccaacatccaggagaacagcaactag

SEQ ID NO: 177573 - protein, 761 aa, Artificial Sequence
  derived and/or modified sequence
MSRKGPRAEVCADCSAPDPGWASISRGVLVCDECCSVHRSLGRHISIVKHLRHSAWPPTLLQMVHTLASNGANSIWEHSLLDPAQVQSGRRKANPQDKVHPIKSEFIRAKYQMLAFVHKLPCRDDDGVTAKDLSKQLHSSVRTGNLETCLRLLSLGAQANFFHPEKGTTPLHVAAKAGQTLQAELLVVYGADPGSPDVNGRTPIDYARQAGHHELAERLVECQYELTDRLAFYLCGRKPDHKNGHYIIPQMADSLDLSELAKAAKKKLQALSNRLFEELAMDVYDEVDRRENDAVWLATQNHSTLVTERSAVPFLPVNPEYSATRNQGRQKLARFNAREFATLIIDILSEAKRRQQGKSLSSPTDNLELSLRSQSDLDDQHDYDSVASDEDTDQEPLRSTGATRSNRARSMDSSDLSDGAVTLQEYLELKKALATSEAKVQQLMKVNSSLSDELRRLQREIHKLQAENLQLRQPPGPVPTPPLPSERAEHTPMAPGGSTHRRDRQAFSMYEPGSALKPFGGPPGDELTTRLQPFHSTELEDDAIYSVHVPAGLYRIRKGVSASAVPFTPSSPLLSCSQEGSRHTSKLSRHGSGADSDYENTQSGDPLLGLEGKRFLELGKEEDFHPELESLDGDLDPGLPSTEDVILKTEQVTKNIQELLRAAQEFKHDSFVPCSEKIHLAVTEMASLFPKRPALEPVRSSLRLLNASAYRLQSECRKTVPPEPGAPVDFQLLTQQVIQCAYDIAKAAKQLVTITTREKKQ

SEQ ID NO: 177574 - DNA, 2286 bp, Artificial Sequence
  derived and/or modified sequence
atgtctcggaaaggaccaagggctgaggtgtgcgcagattgcagcgcccctgatcccggatgggcctccattagccggggcgtcttggtttgcgacgaatgctgcagcgtccaccggtcactcggaaggcacataagcatcgttaaacacctacggcatagcgcatggccgcctactctactgcagatggtccatacactggcatctaatggagctaattctatatgggagcacagcttgctggaccccgcgcaggtacagagcggtaggcggaaagccaatcctcaggacaaggtgcaccccatcaagtctgagtttatcagggcaaaataccagatgctggctttcgttcacaagttgccatgtagagacgatgatggcgtgacagctaaggatctcagtaaacaacttcatagtagcgtacgcacaggcaatctcgaaacctgtttgagactgctttctctcggagcacaagctaacttctttcatcctgaaaagggaaccaccccgctccacgtggctgctaaggccggccagaccttgcaggcggagctgctggtggtttacggggcggatcccggctcaccggatgtcaatggaaggacacctattgattacgcgagacaggccggtcatcacgaactggccgaaagactagtggaatgccagtacgagctgactgaccgtctcgcgttctacctttgtggcaggaagccagatcacaagaacggacactacattatacctcaaatggctgacagtcttgatttgagtgagctggcaaaggccgccaagaagaagctgcaggctctgagcaaccgactgttcgaggaactggctatggatgtctacgatgaagtggatagaagagagaatgatgctgtatggctggctacccagaatcacagtaccttggtcacagagcgtagtgcagttccctttctgcctgtcaaccctgagtactccgctacaagaaaccagggacgccagaaactcgctagattcaatgcacgagagttcgctacattgattatagatatccttagcgaggcaaaaaggcgccagcaggggaaaagtctgagttcacccactgataacttggaactgtcattgcgttctcagtccgacctagatgaccagcatgactatgattctgtcgcctccgacgaagacactgaccaagagccgctgagatcgaccggcgcaacccgctcgaatagagcgcgttcaatggactcctctgacctctctgatggcgctgtgactcttcaggagtacctagagctgaagaaagccctcgcaacatctgaggccaaggtgcagcagcttatgaaagtcaacagcagtctgtcagatgagttaagacgcttgcagcgcgaaatacataagctgcaagctgaaaatctccagcttcgtcagccaccgggtcccgtacccacacctcctctcccgtccgagcgcgctgagcacactcctatggcccctgggggcagcacacaccgacgggaccgccaggctttcagcatgtatgagcccggttctgcgctcaagccctttggtggacctccgggtgatgaactcacaactcgcctccagccgtttcacagcacagaattagaggacgatgctatctacagcgtgcatgtgcctgcaggcctgtataggattcgcaagggggtttccgcatctgccgtgcctttcacgccatcttcacccctcctgagctgctcacaagagggcagtcgacataccagtaagttgtccagacacggctcaggggcggatagcgactacgaaaatacccaatccggcgatcccttactcggtctggagggaaagcggtttctcgagttgggtaaagaggaggatttccacccagagcttgagagccttgatggagatctcgaccctggtctcccctctacggaggatgtgatattaaagacggagcaggtaactaagaacatccaagagctccttcgtgccgctcaagagtttaaacatgatagcttcgttccatgcagcgagaagattcacctagcagtgaccgaaatggcatcccttttccccaagcggcccgccctggaacctgtccgaagttctctgcgcctgttaaatgcctccgcgtaccgcctgcagagcgagtgccgcaagacagttccacctgaacctggggcgcctgtggatttccaactcctcacccagcaggtcatccagtgcgcctatgacatcgcaaaggccgctaagcaattggtgaccatcacaacacgtgaaaaaaaacagtag

SEQ ID NO: 177575 - DNA, 2286 bp, Artificial Sequence
  derived and/or modified sequence
atgagcaggaagggccccagggctgaggtgtgtgccgactgcagcgccccagaccccggctgggccagcatcagcagaggagtgctggtgtgtgatgagtgctgcagcgtgcacaggagcctgggccgccacatcagcatcgtgaagcacctgcggcacagcgcctggccacccaccctgctgcagatggtgcacaccctggccagcaatggagccaacagcatctgggagcacagcctgctggaccctgcccaggtgcagagcggccgcaggaaggccaacccccaggacaaggtgcaccccatcaagtctgagttcatccgggccaagtaccagatgctggcctttgtgcacaagctgccctgcagagatgatgatggagtgacagccaaggacctgagcaagcagctgcacagctctgtgaggactggaaacctggagacctgcctgcggctgctgagcctgggcgcccaggccaacttcttccaccctgagaagggcaccacccccctgcacgtggccgccaaggccggccagaccctgcaggccgagctgctggtggtgtatggagctgaccccggcagcccagatgtgaatggaagaacacccatcgactatgcccggcaggccggccaccacgagctggccgagcggctggtggagtgccagtatgagctgacagaccggctggccttctacctgtgtggcaggaagccagaccacaagaatggccactacatcatcccccagatggctgacagcctggacctgtctgagctggccaaggccgccaagaagaagctgcaggccctgagcaacagactctttgaggagctggccatggatgtgtatgatgaggtggacagaagagaaaatgatgctgtgtggctggccacccagaaccacagcaccctggtgacagagaggtctgctgtgcccttcctgcctgtgaaccctgagtacagcgccaccaggaaccagggccggcagaagctggcccgcttcaatgcccgggagtttgccaccctcatcatcgacatcctgtctgaggccaagaggcggcagcagggcaagagcctgagcagccccacagacaacctggagctgagcctgcggagccagagcgacctggatgaccagcacgactatgattctgtggccagtgatgaggacacagaccaggagcccctgcggagcactggagccaccaggagcaacagagcccgctccatggacagcagtgacctgagtgatggagctgtgaccctgcaggagtacctggagctgaagaaggccctggccaccagcgaggccaaggtgcagcagctgatgaaggtgaacagcagcctgagtgatgagctgcggcggctgcagcgggagatccacaagctgcaggccgagaacctgcagctgcggcagcccccaggccctgtgcccaccccacccctgcccagcgagcgggcagagcacacccccatggcccctgggggcagcacccacagaagagaccggcaggccttctccatgtatgagcccggcagcgccctgaagccctttggaggccccccaggagatgagctgaccacccggctgcagcccttccacagcacagagctggaggatgatgccatctacagcgtgcacgtgcctgctggcctgtaccgcatcaggaagggcgtgtctgccagcgctgtgcccttcacccccagcagccccctgctgagctgcagccaggagggcagccgccacaccagcaagctgagccgccacggcagcggggctgacagcgactatgagaacacccagagcggggaccccctgctgggcctggagggcaagcgcttcctggagctgggcaaggaggaggacttccaccctgagctggagagcctggatggagacctggaccccggcctgcccagcacagaagatgtgatcctgaagacagagcaggtgaccaagaacatccaggagctgctgcgggccgcccaggagttcaagcatgacagctttgtgccctgcagcgagaagatccacctggccgtgacagagatggccagcctcttccccaagaggcctgccctggagcctgtgcgcagcagcctgcggctgctgaatgccagcgcctaccgcctgcagagtgaatgtaggaagacagtgcccccagagcccggggcccctgtggacttccagctgctgacccagcaggtgatccagtgtgcctatgacatcgccaaggccgccaagcagctggtgaccatcaccacccgggagaagaagcagtag

SEQ ID NO: 177576 - DNA, 2286 bp, Artificial Sequence
  derived and/or modified sequence
atgagccggaagggcccccgggccgaggtgtgcgccgactgcagcgcgcctgatcctggatgggctagcatttcccgcggtgttctggtgtgcgatgaatgttgctcggttcaccggtccctaggcagacacatttccatcgtgaagcacctgaggcattcagcttggccacctaccctgcttcaaatggtgcataccctggcatctaacggtgcaaattccatttgggaacatagcctcttggatccagcccaggtccagagcggacggcgcaaggcaaatccccaggacaaagtgcatcctataaagtcagagttcatcagagccaagtaccagatgctagcattcgtccacaaactaccctgcagggacgatgacggggtgaccgccaaggatctgagcaagcagctgcatagttccgtccggaccggtaacttagagacctgcctaaggctgctcagcctcggcgcccaggcaaatttctttcatcccgaaaagggcacaactcccttgcatgtggccgcaaaggctggccagactttgcaggcagagctgctggtcgtctacggcgctgatccaggctctccggatgtcaacggacgcacccccatcgactacgcccggcaagccggacatcatgaactggcagagcgactggtggaatgtcagtatgagcttactgaccggctcgctttctacctgtgtggcaggaaacccgaccacaaaaatgggcattatattatcccacagatggcagacagtctcgacctctccgaattagctaaggcagcaaagaagaagcttcaagcattgagcaatcggctatttgaggaattggctatggacgtatacgacgaggtggataggagggagaatgacgccgtgtggcttgccacccagaaccacagtactctggtgactgagagatcagcagtccccttcctccctgtcaatcctgaatattcagcaacaaggaatcaggggaggcagaaactggctagatttaacgcccgtgagttcgctactctgatcattgacatcttatcagaggctaagcgccgacagcaaggtaagtcactgagctcccccacagacaatctggaactgagtttgaggagccagtccgatctcgacgatcaacatgactacgattctgtggcctccgacgaagataccgatcaggagcctctgcgctctacaggcgcgactcgcagtaatcgtgccaggtcaatggacagttccgacctctctgatggtgccgtgactttgcaggaatatctggaactgaaaaaagcccttgccacctccgaagccaaggtgcagcaactgatgaaagtcaatagctcactctcagacgagctgcgccggcttcagcgcgagattcacaaacttcaggccgagaatttgcagctgcggcaacctcctggtccggtacctaccccccctctaccaagcgagcgggctgagcacacaccgatggccccgggtggcagcacacacaggcgcgatcgccaagccttctcgatgtatgaacccggtagcgctctcaaaccctttggagggcctcctggcgacgaacttacgacacggcttcagccattccacagcacagaacttgaggacgacgccatatacagtgttcatgtgcctgcaggactttataggatcagaaagggggtgtctgcaagtgccgtgccatttacaccttcttcacctttactgagctgctcacaggaagggtctcgccacacgagcaagttgtcgcgccacggttccggcgccgatagtgattatgagaatacacagtcgggggatcccctccttggtctggaggggaaacgtttcctggagcttggcaaggaagaggacttccatcccgagcttgagagcctcgatggggatctggaccccgggctgccaagcacagaggacgtgatattgaaaactgagcaggtcaccaagaacatccaagagcttctacgcgctgcccaggagtttaagcacgatagcttcgtgccatgctcggaaaagatacacctcgccgtgacagaaatggcctctctttttcccaagcggcctgccctggaacccgtgaggtcatccttgaggttgcttaacgcatcagcctataggctccagtccgagtgcagaaaaaccgtgccccctgaacccggagcccctgtagacttccagctgctcacccaacaggtaatccagtgcgcgtacgacatagcgaaggcagccaaacagctggtcactatcaccaccagggagaagaaacagtag

SEQ ID NO: 177577 - DNA, 2286 bp, Artificial Sequence
  derived and/or modified sequence
atgagcagaaaaggtccaagggcggaagtctgcgccgactgttctgcccctgatccaggctgggctagcatttcaagaggagtccttgtgtgtgacgagtgctgctcagtccatagaagcttaggcaggcatatctccatcgttaaacatctgcggcacagcgcctggcctcccaccttgttgcagatggttcacactctggcatccaatggggcaaatagcatatgggagcactcgctgctggaccctgcacaagtgcagtctggtaggagaaaagcgaacccacaagataaggtgcaccctattaagtccgagtttatccgcgctaaatatcagatgctagcctttgtacataagcttccctgtcgtgatgatgacggagtcacagccaaagacctgagcaagcagctgcactcctccgtgcgtactgggaatctggaaacctgtttacgtctgctgtccctgggcgctcaggcaaatttttttcacccagagaaagggactactcccctgcatgttgctgctaaagccggacagacgttgcaggccgaactcctggtggtgtacggggcagaccccggaagtcccgatgtaaatgggagaacaccaatcgattatgcccgacaggccggacatcacgagctggccgaaagactggttgaatgccagtatgagctcacggataggctcgcattctatctttgcggacggaagcccgaccacaagaatggacactacattataccacagatggctgactctctcgatcttagcgaactggctaaggctgccaagaagaagctgcaggcactgagcaataggttgttcgaagagctcgctatggacgtttacgatgaggtcgatcgacgtgaaaacgatgcagtttggctagcaacccagaatcactccacactcgtgacagagcgcagcgcagttcctttcctaccagtgaatcctgaatactctgctacacgcaaccagggtcggcaaaaactggcaagattcaatgcccgtgaattcgcgactctgataatcgatatacttagtgaggcaaaacgccgtcaacaggggaagtccttgtccagtcccaccgacaatctggagctgtccttacgctcacagagcgacctggacgaccagcacgattatgatagtgtcgccagcgatgaggacaccgatcaggaacctttgaggtccacgggagctacaagatctaatagagccagaagcatggactcaagtgacctttcagatggagctgtgaccctgcaggagtacctcgaactgaagaaagctcttgctacatcagaggcaaaggtgcagcagctcatgaaagtaaattcttccctatccgacgagttacgaagactccaacgcgagatacacaaactgcaggcggagaacctacagctcaggcagcctccaggccctgtacctacccctcctctcccatctgagagagcagagcatactcccatggcccctggcggttccacgcacaggcgcgacaggcaagcgttctctatgtacgaaccaggctctgccttgaagccctttggaggaccccctggtgacgagctgaccaccaggttacagcccttccatagcacagagctggaggacgatgctatatatagcgtccacgtcccagccggtctgtaccgaatccggaagggagtaagtgccagcgcagtgccttttacaccttcaagccctctgcttagctgttcacaagagggcagtcggcataccagtaaactgagcagacatggatctggcgcagatagtgattatgagaatacacagtctggagatcctctcttgggacttgagggaaagcgattcctggagcttgggaaggaagaggattttcaccccgaactggagtcactggacggtgatctggacccaggtctgccgtctacagaggacgtcattcttaagacagagcaggttaccaaaaatatccaagagcttctcagagcagcccaggagttcaaacacgattccttcgtgccctgctcagaaaagatccaccttgccgtgaccgaaatggcaagtctgtttccgaagaggcccgctcttgagccggtgaggtccagtcttaggctgctcaatgcatccgcttaccggctccagagcgaatgccgcaaaacagttcctccagaacccggtgcacctgtggattttcagctccttacccaacaagtcattcagtgtgcgtacgatattgcaaaggccgctaagcagctggtgaccatcactacccgggaaaagaagcagtag

SEQ ID NO: 177578 - DNA, 2286 bp, Artificial Sequence
  derived and/or modified sequence
atgagcagaaagggccccagagccgaggtgtgcgccgactgcagcgcccccgaccccggctgggccagcatcagcagaggcgtgctggtgtgcgacgagtgctgcagcgtgcacagaagcctgggcagacacatcagcatcgtgaagcacctgagacacagcgcctggccccccaccctgctgcagatggtgcacaccctggccagcaacggcgccaacagcatctgggagcacagcctgctggaccccgcccaggtgcagagcggcagaagaaaggccaacccccaggacaaggtgcaccccatcaagagcgagttcatcagagccaagtaccagatgctggccttcgtgcacaagctgccctgcagagacgacgacggcgtgaccgccaaggacctgagcaagcagctgcacagcagcgtgagaaccggcaacctggagacctgcctgagactgctgagcctgggcgcccaggccaacttcttccaccccgagaagggcaccacccccctgcacgtggccgccaaggccggccagaccctgcaggccgagctgctggtggtgtacggcgccgaccccggcagccccgacgtgaacggcagaacccccatcgactacgccagacaggccggccaccacgagctggccgagagactggtggagtgccagtacgagctgaccgacagactggccttctacctgtgcggcagaaagcccgaccacaagaacggccactacatcatcccccagatggccgacagcctggacctgagcgagctggccaaggccgccaagaagaagctgcaggccctgagcaacagactgttcgaggagctggccatggacgtgtacgacgaggtggacagaagagagaacgacgccgtgtggctggccacccagaaccacagcaccctggtgaccgagagaagcgccgtgcccttcctgcccgtgaaccccgagtacagcgccaccagaaaccagggcagacagaagctggccagattcaacgccagagagttcgccaccctgatcatcgacatcctgagcgaggccaagagaagacagcagggcaagagcctgagcagccccaccgacaacctggagctgagcctgagaagccagagcgacctggacgaccagcacgactacgacagcgtggccagcgacgaggacaccgaccaggagcccctgagaagcaccggcgccaccagaagcaacagagccagaagcatggacagcagcgacctgagcgacggcgccgtgaccctgcaggagtacctggagctgaagaaggccctggccaccagcgaggccaaggtgcagcagctgatgaaggtgaacagcagcctgagcgacgagctgagaagactgcagagagagatccacaagctgcaggccgagaacctgcagctgagacagccccccggccccgtgcccaccccccccctgcccagcgagagagccgagcacacccccatggcccccggcggcagcacccacagaagagacagacaggccttcagcatgtacgagcccggcagcgccctgaagcccttcggcggcccccccggcgacgagctgaccaccagactgcagcccttccacagcaccgagctggaggacgacgccatctacagcgtgcacgtgcccgccggcctgtacagaatcagaaagggcgtgagcgccagcgccgtgcccttcacccccagcagccccctgctgagctgcagccaggagggcagcagacacaccagcaagctgagcagacacggcagcggcgccgacagcgactacgagaacacccagagcggcgaccccctgctgggcctggagggcaagagattcctggagctgggcaaggaggaggacttccaccccgagctggagagcctggacggcgacctggaccccggcctgcccagcaccgaggacgtgatcctgaagaccgagcaggtgaccaagaacatccaggagctgctgagagccgcccaggagttcaagcacgacagcttcgtgccctgcagcgagaagatccacctggccgtgaccgagatggccagcctgttccccaagagacccgccctggagcccgtgagaagcagcctgagactgctgaacgccagcgcctacagactgcagagcgagtgcagaaagaccgtgccccccgagcccggcgcccccgtggacttccagctgctgacccagcaggtgatccagtgcgcctacgacatcgccaaggccgccaagcagctggtgaccatcaccaccagagagaagaagcagtag

SEQ ID NO: 177579 - DNA, 3768 bp, Artificial Sequence
  derived and/or modified sequence
agggggcggagagaggagccgcgagcggcggcggggcggcgcggggcggagggcgcccgagggcgagcgggcaggcgggcacggcgggttccgggccagccccggggcggacggttggccgggcgcgcggagcctcgccggggcctcgccggagccgggccgggcagcaggggccgccgccgccgcccgggcccgccgcccgcgccccccacgctggcccagagggctgcggccgcgtcgccgctgaggatgtcccgaaaggggccgcgagcggaggtgtgtgcggactgcagcgccccggaccctggctgggcatccatcagcaggggtgtgctggtgtgtgacgagtgctgcagcgtgcaccggagcctgggacgccacatctccattgtcaagcaccttcgccacagcgcctggcctcccacgctgctgcagatggtgcacacgcttgccagcaacggggccaactccatctgggagcactccctgctggaccccgcacaagtgcagagcggccggcgtaaagccaacccccaagacaaagtccaccccatcaagtcagagttcatcagggccaagtaccagatgctggcatttgtgcacaagcttccctgccgggacgatgatggagtcaccgccaaagacctcagcaagcaactacactcgagcgtgcggacaggcaacctggagacatgtctgcgcctgctctccctgggtgcccaggccaacttcttccacccagagaagggcaccacacctctgcacgtggctgccaaggcaggacagacactgcaggccgagctgcttgtagtgtatggggctgaccctggctcccctgatgttaatggccgcacacccattgactatgccaggcaggcggggcaccatgagctggcggaaaggctggttgagtgccaatatgagctcactgaccggctggccttctacctctgtggacgcaagccggatcacaagaatgggcattacatcatcccacagatggctgacagccttgacttatccgaattggccaaagctgctaagaagaagctgcaggcgctcagcaaccggctttttgaggaactcgccatggacgtgtatgacgaggtggatcgaagagaaaatgatgcagtgtggctggctacccaaaaccacagcactctggtgacagagcgcagtgccgtgcccttcctgcctgttaacccggaatactcagccacgcggaatcaggggcgacaaaagctggcccgctttaatgcccgagagtttgccaccttgatcatcgacattctcagtgaggccaagcggagacagcagggcaagagcctgagcagccccacagacaacctcgagctgtctctgcggagccagagtgacctcgacgaccaacacgactacgacagcgtggcctctgacgaggacacagaccaggagcccctgcgcagcaccggcgccactcggagcaaccgggcccggagcatggactcctcggacttgtctgacggggctgtgacgctgcaggagtacctggagctgaagaaggccctggctacatcggaggcaaaggtgcagcagctcatgaaggtcaacagtagcctgagcgacgagctccggaggctgcagcgagagatccacaagctgcaggcggagaacctgcagctccggcagcctccagggccggtgcccacacctccactccccagtgaacgggcggaacacacacccatggcgccaggcgggagcacacaccgcagggatcgccaggccttttccatgtatgaacctggctctgccctgaagccctttgggggcccccctggggacgagctcactacgcggctgcagcctttccacagcactgagctagaggacgacgccatctattcagtgcacgtccctgctggcctttaccggatccggaaaggggtgtctgcctcagctgtgcccttcactccctcctccccgctgctgtcctgctcccaggagggaagccgccacacgagcaagctttcccgccacggcagtggagccgacagtgactatgagaacacgcaaagtggggacccactgctggggctggaagggaagaggtttctagagctgggcaaagaggaagacttccacccagagctggaaagcctggatggagacctagatcctgggcttcccagcacagaggatgtcatcttgaagacagagcaggtcaccaagaacattcaggaactgttgcgggcagcccaggagttcaagcatgacagcttcgtgccctgctcagagaagatccatttggctgtgaccgagatggcctccctcttcccaaagaggccagccctggagccagtgcggagctcactgcggctgctcaacgccagcgcctaccggctgcagagtgagtgccggaagacagtgcccccagagcccggcgccccagtggacttccagctgctgactcagcaggtgatccagtgcgcctatgacatcgccaaggctgccaagcagctggtcaccatcaccacccgagagaagaagcagtgacctctctccccacaccctcacctgcaccctaggacctcactggccataggagctgggccactccagacattaatccccaccccaacagagccactggcacaagtgcccttagtgctgccacactccctggcagccaggtgccctggtgcccacccctgtcgagcccctaaggatggggaggtgggggggcaggagcttctgtcccccacattccatgcacctcccctctgtatatagcatctcccccctcctagtgagcaggggcctgcaaggcatcactcccagcccctcgccttctagggcaccctcagcaaaggggcaggtggggacactccaagtggggcagctctccgtacatgcgccccacccccatgagccagttcagccctactgggggctgagcgggggcatcccctcctttgtacatagtctccatggatgtccctgccctgtagccaccagccccttgctgctctccctttaatgccatatggcccctgcctagggcacaggccccaacctgtgtgctggggtccccagcagcaaacactggaaagtctgttttttttttttctttcttcttccccaccccttaattttaactttgtggtaactgagtgcccccgcgtgcctgcgtgttgagtgtgtgggcggcagtgccgttccggaggcctggtccatctggagttttgaggggtgaggggaccagagcagtgggaccagcatggggatcagcttcccttccccacctggagccagggactgtccgggtagccagttttggtcctgccagctgcctccctgatccctccccactctcgccccttctctatgaacttaaatcaaaaaccacttccctccatctcctcctgctcctgcgtggagggggaatgtgtgctggctagggtggaggactgagcacctgagcctggggctggctccccggggtccccgactcagctggtggctgtggagctgagtcccctccccgtaacctctgcaaggccagcacccaccatcactacctgcacctgctgtggtcccaccctctggaggcctgggaacctggctgcagcctgggaaggctggagaggcagacggtgggacccaccagctctctccccatcccgcttcttccctgggggccaggccctacctgtgtggtggtgggtgggctgtcaagacgtgtcatgtacatttgtatcaaaaataaagaagtgaccatgagctgtt

SEQ ID NO: 177580 - DNA, 748 bp, Artificial Sequence
  derived and/or modified sequence
gcggcgcggggcggagggcgcccgagggcgagcgggcaggcgggcacggcgggttccgggccagccccggggcggacggttggccgggcgcgcggagcctcgccggggcctcgccggagccgggccgggcagcaggggccgccgccgccgcccgggcccgccgcccgcgccccccacgctggcccagagggctgcggccgcgtcgccgctgaggatgtcccgaaaggggccgcgagcggaggtgtgtgcggactgcagcgccccggaccctggctgggcatccatcagcaggggtgtgctggtgtgtgacgagtgctgcagcgtgcaccggagcctgggacgccacatctccattgtcaagcaccttcgccacagcgcctggcctcccacgctgctgcagatggtgcacacgcttgccagcaacggggccaactccatctgggagcactccctgctggaccccgcacaagtgcagagcggccggcgtaaagccaacccccaagacaaagtccaccccatcaagtcagagttcatcagggccaagtaccagatgctggcatttgtgcacaagcttccctgccgggacgatgatggagtcaccgccaaagacgacctcactggccataggagctgggccactccagacattaatccccaccccaacagagccactggcacaagtgcccttagtgctgccacactccctggcagccaggtgccctggtgcccacccctgtcgagcccctaa

SEQ ID NO: 177581 - DNA, 534 bp, Artificial Sequence
  derived and/or modified sequence
atgtctcgcaaagggccaagagctgaggtgtgtgccgattgctccgcccctgatcccgggtgggccagtatctctagaggggtcttagtgtgcgacgagtgctgttccgtacacagatctctgggccggcatatatccatagtgaaacacctgaggcatagcgcatggcctcctaccctactgcagatggtgcacacactcgcaagcaacggcgccaactctatttgggagcacagcttgctcgatccagctcaggtacagagtggcagacgcaaagcgaatccgcaagacaaggtccatccaatcaagagcgagtttatcagagcaaaataccagatgttagcctttgttcacaaactgccctgtcgcgacgacgacggtgtcacagccaaggacgatctcacaggacacagaagctgggcaactcctgacatcaacccgcatcccaacagagctaccggtacaagtgctctctctgcagccacactgcccgggtcccaggtgccctggtgccccccattgtcatcgccctag

SEQ ID NO: 177582 - DNA, 534 bp, Artificial Sequence
  derived and/or modified sequence
atgagcaggaagggccccagggctgaggtgtgtgccgactgcagcgccccagaccccggctgggccagcatcagcagaggagtgctggtgtgtgatgagtgctgcagcgtgcacaggagcctgggccgccacatcagcatcgtgaagcacctgcggcacagcgcctggccacccaccctgctgcagatggtgcacaccctggccagcaatggagccaacagcatctgggagcacagcctgctggaccctgcccaggtgcagagcggccgcaggaaggccaacccccaggacaaggtgcaccccatcaagtctgagttcatccgggccaagtaccagatgctggcctttgtgcacaagctgccctgcagagatgatgatggagtgacagccaaggatgacctgaccggccaccgctcctgggccaccccagacatcaacccccaccccaacagagccaccggcaccagcgccctgtctgctgccaccctgcccggcagccaggtgccctggtgcccccccctgagcagcccctag

SEQ ID NO: 177583 - DNA, 534 bp, Artificial Sequence
  derived and/or modified sequence
atgagccggaagggcccccgggccgaggtgtgcgccgactgcagcgctcctgatcccggctgggccagcatcagccgcggagtgctggtatgtgacgagtgttgctcggttcatcggtctctaggtagacatatcagcatcgtgaaacatctgcggcactcagcctggcctccaacccttcttcagatggtacacacccttgccagcaacggcgctaattctatctgggagcattccttgctcgatccagcacaggtccagagcggtagaagaaaagccaatccacaagataaagttcacccgataaagagcgaattcatccgcgccaaatatcagatgctggcatttgtgcacaaacttccatgtagggatgatgacggcgtcacagccaaagatgacctaacaggacacaggtcttgggccacacctgacattaaccctcacccgaaccgagccactgggacttcagctttgtccgcggcaacacttccgggttcgcaggtcccctggtgcccgccactgagttccccctag

SEQ ID NO: 177584 - DNA, 534 bp, Artificial Sequence
  derived and/or modified sequence
atgtcgcgaaagggtccccgtgccgaggtgtgtgctgattgttcagctccagaccccggttgggcctctatctcaagaggtgtgcttgtctgcgacgagtgttgctccgtccataggtcactgggcaggcatatcagcatcgtcaagcacctcagacactcggcttggcccccaacgcttttacagatggttcatacacttgcctcaaatggcgctaatagtatttgggagcactctttactggatcctgcacaggtccagtcagggaggaggaaggcgaacccccaggataaggtacatcctatcaagtctgagtttatccgggcaaaataccagatgttagctttcgtccacaagcttccctgcagagacgatgacggcgtaactgccaaagacgatctgaccggtcaccggagctgggctacacccgatattaatccacatccaaatcgggctaccggcacgtcagcactatccgccgctaccctccccggttcacaggttccttggtgtccgcctctaagcagtccctag

SEQ ID NO: 177585 - DNA, 534 bp, Artificial Sequence
  derived and/or modified sequence
atgagcagaaagggccccagagccgaggtgtgcgccgactgcagcgcccccgaccccggctgggccagcatcagcagaggcgtgctggtgtgcgacgagtgctgcagcgtgcacagaagcctgggcagacacatcagcatcgtgaagcacctgagacacagcgcctggccccccaccctgctgcagatggtgcacaccctggccagcaacggcgccaacagcatctgggagcacagcctgctggaccccgcccaggtgcagagcggcagaagaaaggccaacccccaggacaaggtgcaccccatcaagagcgagttcatcagagccaagtaccagatgctggccttcgtgcacaagctgccctgcagagacgacgacggcgtgaccgccaaggacgacctgaccggccacagaagctgggccacccccgacatcaacccccaccccaacagagccaccggcaccagcgccctgagcgccgccaccctgcccggcagccaggtgccctggtgcccccccctgagcagcccctag

SEQ ID NO: 177586 - protein, 244 aa, Artificial Sequence
  derived and/or modified sequence
MELTIFILRLAIYILTFPLYLLNFLGLWSWICKKWFPYFLVRFTVIYNEQMASKKRELFSNLQEFAGPSGKLSLLEVGCGTGANFKFYPPGCRVTCIDPNPNFEKFLIKSIAENRHLQFERFVVAAGENMHQVADGSVDVVVCTLVLCSVKNQERILREVCRVLRPGGAFYFMEHVAAECSTWNYFWQQVLDPAWHLLFDGCNLTRESWKALERASFSKLKLQHIQAPLSWELVRPHIYGYAVK

SEQ ID NO: 177587 - protein, 175 aa, Artificial Sequence
  derived and/or modified sequence
MELTIFILRLAIYILTFPLYLLNFLGLWSWICKKWFPYFLVRFTVIYNEQMASKKRELFSNLQEFAGPSGKLSLLEVGCGTGANFKFYPPGCRVLRPGGAFYFMEHVAAECSTWNYFWQQVLDPAWHLLFDGCNLTRESWKALERASFSKLKLQHIQAPLSWELVRPHIYGYAVK

SEQ ID NO: 177588 - protein, 180 aa, Artificial Sequence
  derived and/or modified sequence
MELTIFILRLAIYILTFPLYLLNFLGLWSWICKKWFPYFLVRFTVIYNEQMASKKRELFSNLQEFAGPSGKLSLLEVGCGTGANFKFYPPGCRVTCIDPNPNFEKFLIKSIAENRHLQFERFVVAAGENMHQVADGSVDVVVCTLVLCSVKNQERILREVCRVLRPGGAFYFMEHVAAEC

SEQ ID NO: 177589 - DNA, 735 bp, Artificial Sequence
  derived and/or modified sequence
atggagctgaccatcttcatcctgagactggccatctacatcctgaccttccccctgtacctgctgaacttcctgggcctgtggagctggatctgcaagaagtggttcccctacttcctggtgagattcaccgtgatctacaacgagcagatggccagcaagaagagagagctgttcagcaacctgcaggagttcgccggccccagcggcaagctgagcctgctggaggtgggctgcggcaccggcgccaacttcaagttctacccccccggctgcagagtgacctgcatcgaccccaaccccaacttcgagaagttcctgatcaagagcatcgccgagaacagacacctgcagttcgagagattcgtggtggccgccggcgagaacatgcaccaggtggccgacggcagcgtggacgtggtggtgtgcaccctggtgctgtgcagcgtgaagaaccaggagagaatcctgagagaggtgtgcagagtgctgagacccggcggcgccttctacttcatggagcacgtggccgccgagtgcagcacctggaactacttctggcagcaggtgctggaccccgcctggcacctgctgttcgacggctgcaacctgaccagagagagctggaaggccctggagagagccagcttcagcaagctgaagctgcagcacatccaggcccccctgagctgggagctggtgagaccccacatctacggctacgccgtgaagtag

SEQ ID NO: 177590 - DNA, 3390 bp, Artificial Sequence
  derived and/or modified sequence
agaaggggaaacaggaatcgattaggaataaaggattataatccactttccttctgaggaaaagctgggaaccttctcattttgccttatgaaaactaagctgaatcgactgctgccaaacatctattaggcaaaattggcctcttgcccatgatttgactttccagcacagccagttctttttctcctctgcagctgattggctctggagtgtggccagaagcctctctcctgcaattaaaggagtcgggtctctaactgttgatctgtttttttcccttctgagcaatggagcttaccatctttatcctgagactggccatttacatcctgacatttcccttgtacctgctgaactttctgggcttgtggagctggatatgcaaaaaatggttcccctacttcttggtgaggttcactgtgatatacaacgaacagatggcaagcaagaagcgggagctcttcagtaacctgcaggagtttgcgggcccctccgggaaactctccctgctggaagtgggctgtggcacgggggccaacttcaagttctacccacctgggtgcagggtgacctgtattgaccccaaccccaactttgagaagtttttgatcaagagcattgcagagaaccgacacctgcagtttgagcgctttgtggtagctgccggggagaacatgcaccaggtggctgatggctctgtggatgtggtggtctgcaccctggtgctgtgctctgtgaagaaccaggagcggattctccgcgaggtgtgcagagtgctgagaccgggaggggctttctatttcatggagcatgtggcagctgagtgttcgacttggaattacttctggcaacaagtcctggatcctgcctggcaccttctgtttgatgggtgcaacctgaccagagagagctggaaggccctggagcgggccagcttctctaagctgaagctgcagcacatccaggccccactgtcctgggagttggtgcgccctcatatctatggatatgctgtgaaatagtgtgagctggcagttaagagctgaatggctcaaagaatttaaagcttcagttttacatttaaaatgctaagtgggagaagagaaaccttttttttggggggcggtttttttggtttgttgttggttttttttttttttttggcgggaagaaagagttttgctcttgttgcccaggctggagtgcaatgacgtgatctccgctcactgcaacctccacctcgcgggtttaagcgattcttctgcctcagcctccctagtagctgggattacaggtgcccaccaccatgcccagctaatttgtatttttagttgagacagggtttcactacgttggccaggctggtcttgaactcctgatctcaggcaatccacccacctcagcctcccaaagtgctgggatgacaggcgtgagcaaccgcacccagcttaaggtttttttgttttgttttgagacggagttttcgctcttgttgcccaggctggagtgcaatgctgtgatctcagcttaccacaacctccacctcccgggttcaagtgattcacctgcctcagcctcctgagtagctggtattacaggcatgcgtcaccacgccggctaattttgtacttttagtagagatggtgtttccccacgttggtcagtctggtctcaaattcctgacctcaggtgatctgcctgcctcggcctcccaaagtgctgtgattacagacgtcagccaccatgcctggcctgaaaccttttttaggtaaagttgaattccatccttaaaagtttctgttatatcctatttagccattttctattgtctcccaaagaattcacatcaaaaaaacagctttgaactcccccttcaaaggaaacagtcgactttcataattagcatctaccattatccccaaatcttattttattcattgacttgaaattttttccaattgcttttttttttttttttttaaggttaagagcagaggtttactaggccaaagaaagagaatagctctctgttgcagagaggggtcctggagaaatgggttaccccagttgtcttatttaaatggttacccatcagattttaattttatcttctctttgagagcttggtaataagaagcacttaaatcactccaaagaagactttaaaaagggagcagtgaaaaggtcttaataatttattgattgaattaagaaatactagctaattaagaatctgagtctaaacagcacagattttttctttctgcttttaaattgtgttttaaaaaaagagacagggggctgggcgtggtggctcacgcctgtaatcctagcactttgggaggccgaggcgggtggatcacgaggtaggagttaaagaccagcctggccaacatggcaaaaccctactaaagatacaaaaaaaaaaaaaaattagccaggcgtggtggtgggtgcctgtaatcccaggtacttggaaggctgaggcaggagaatctcttgaacccagaaggcgaaggttgcagtgaaccgagatcatgccattgtactctagcctgggtgacaagagcaagactccgtctcaaaaaaaaaaaaaaaaaaaaaaagaagtagagacagggagacagggtctcactgtgttgcctaggccggtcttgaactcctgggctcaagtgattctcccaccttgacctcctaaattgttgggattacaggtgtgagacagtgcacctggccgaaatagctcaagtttctgaaaaacaaatctgaatctatttgttattcttagcgtcactggtctggctttcagaattaacatacaaggttgccacacctagttctgcccagctttatgtcttttattccagtattccaccaaagtttgttttcctgcattccagttctcaagtcttaagataaagattgtacttgacagtttagtatatccataaaactatttgaggtggttaaggttcttgggttcattttccttaatactttgctgaatattgtagattgtaggcaatgaaaaagtctactaaattaggaaaaccttgaataattaggtatcctaggtaagagcccctaaacatcaagcaatctgtgagtctgtaaagaaataaatattttttggattattcttatctaattccacccctgttggaagatgatttctttgttctttgcaactatggaagctgtgaaaatcatcacaagtgcctctgaaagcgagtgttaggttggttagagggtttaatattttctgcaatggtttgtaggaattttaataaatgtagtatattttctgagatgattttgtaaaagtactattttaaatatcaaatcaaccaataaattcacatttgtgttaggaacagaaatatggttta

SEQ ID NO: 177591 - DNA, 528 bp, Artificial Sequence
  derived and/or modified sequence
atggagctgaccatcttcatcctgagactggccatctacatcctgaccttccccctgtacctgctgaacttcctgggcctgtggagctggatctgcaagaagtggttcccctacttcctggtgagattcaccgtgatctacaacgagcagatggccagcaagaagagagagctgttcagcaacctgcaggagttcgccggccccagcggcaagctgagcctgctggaggtgggctgcggcaccggcgccaacttcaagttctacccccccggctgcagagtgctgagacccggcggcgccttctacttcatggagcacgtggccgccgagtgcagcacctggaactacttctggcagcaggtgctggaccccgcctggcacctgctgttcgacggctgcaacctgaccagagagagctggaaggccctggagagagccagcttcagcaagctgaagctgcagcacatccaggcccccctgagctgggagctggtgagaccccacatctacggctacgccgtgaagtag

SEQ ID NO: 177592 - DNA, 543 bp, Artificial Sequence
  derived and/or modified sequence
atggagctgaccatcttcatcctgagactggccatctacatcctgaccttccccctgtacctgctgaacttcctgggcctgtggagctggatctgcaagaagtggttcccctacttcctggtgagattcaccgtgatctacaacgagcagatggccagcaagaagagagagctgttcagcaacctgcaggagttcgccggccccagcggcaagctgagcctgctggaggtgggctgcggcaccggcgccaacttcaagttctacccccccggctgcagagtgacctgcatcgaccccaaccccaacttcgagaagttcctgatcaagagcatcgccgagaacagacacctgcagttcgagagattcgtggtggccgccggcgagaacatgcaccaggtggccgacggcagcgtggacgtggtggtgtgcaccctggtgctgtgcagcgtgaagaaccaggagagaatcctgagagaggtgtgcagagtgctgagacccggcggcgccttctacttcatggagcacgtggccgccgagtgctag

SEQ ID NO: 177593 - DNA, 735 bp, Artificial Sequence
  derived and/or modified sequence
atggaacttactatcttcatcctcagattggctatttacattctgacattccctttatacctgctgaatttccttgggttgtggtcatggatatgcaagaagtggtttccgtactttctggtgcggttcaccgttatttacaacgagcaaatggcatcaaaaaagagagaactgttttctaacctccaggagtttgccgggccctccggtaaactttcactcctggaggtggggtgtggaacgggtgctaattttaagttttaccccccagggtgccgggtgacttgtatcgacccaaacccaaatttcgaaaagttcctgattaagtcgatagctgagaacaggcatttgcagtttgagcgatttgtggtggccgctggagagaatatgcatcaggttgctgacggttccgttgatgtcgtggtgtgcaccttggtactttgttctgttaaaaaccaggaacggatcctgcgggaagtgtgcagagtgctccgcccaggtggggcgttctacttcatggaacatgtagctgcagaatgctctacatggaactatttctggcagcaggttctcgatccagcatggcacctgctttttgacgggtgcaacttgacaagggaatcctggaaagccctggaaagagcatctttcagcaaactgaagctgcagcatatacaggcacctctctcttgggaattggtacgcccccacatatacggctacgctgttaagtag

SEQ ID NO: 177594 - DNA, 528 bp, Artificial Sequence
  derived and/or modified sequence
atggagttaaccatcttcattcttcgactggcaatatacatactcacgttccccctgtatcttttgaacttcctgggcctgtggtcttggatctgcaagaagtggtttccctacttcctagtgaggttcaccgtgatctataacgagcagatggccagcaaaaaacgtgaactcttcagcaaccttcaggagtttgctggccctagcggcaaactgagcctgctggaagtcggatgcggaaccggagctaattttaaattctaccctcccggctgcagagtgctgcgtcccggaggagcattctacttcatggagcatgtcgcagccgagtgtagcacttggaactatttttggcagcaggtcctggaccctgcttggcatctgttgtttgatggttgtaacctgacaagagagtcctggaaggccctggaacgggcctcgtttagcaaattgaaacttcagcatatacaggctcccctctcctgggagctggttcgaccccacatctatggttacgccgtgaaatag

SEQ ID NO: 177595 - DNA, 735 bp, Artificial Sequence
  derived and/or modified sequence
atggaactgaccatcttcatactcaggctcgctatatatatactgactttcccgctatacctgctaaacttcctgggactctggtcatggatttgtaagaagtggttcccctacttcctcgttcggttcacggtcatttataatgagcagatggcctcaaagaaacgagaactgttttcgaacctgcaagagtttgccggtccatccgggaagctgagtctacttgaagttggttgcggaaccggagcaaactttaaattttatccaccgggttgccgagttacttgtattgacccaaacccaaattttgaaaagttcctgattaaatctattgctgaaaaccggcacttgcagtttgagcggttcgtcgttgccgctggggagaatatgcaccaggtcgccgacggaagcgtggatgtggtggtttgcacacttgtcctgtgctctgtgaagaatcaggagcgaatccttcgggaggtctgtagggtgctcaggcctggcggcgcgttttactttatggagcatgttgcggccgagtgcagcacatggaactacttttggcaacaggtgttagaccctgcctggcatcttttgtttgatgggtgcaacctaaccagggaaagttggaaagccctagagcgggctagcttttcaaagcttaaactgcagcatattcaggcgcctcttagctgggaactggtgcgcccacatatttacgggtatgctgtcaagtag

SEQ ID NO: 177596 - DNA, 735 bp, Artificial Sequence
  derived and/or modified sequence
atggaactcaccatctttatcctgaggttggccatctacatcctcaccttcccactgtatctcctaaactttctcgggttgtggtcttggatctgcaagaagtggttcccatatttccttgtacgctttaccgtcatctataacgaacagatggcctctaaaaaaagggagctcttttctaatctgcaagagttcgctggaccatctggcaaactgtcgcttctcgaagtgggatgcggtaccggcgccaacttcaagttttaccctccaggttgtagggtgacatgtattgacccgaaccctaactttgagaagtttctgatcaaaagcattgcagaaaataggcacctccagttcgaacggtttgtggtcgcggctggggagaatatgcaccaggtggcggacggatcagtcgacgttgtggtctgcaccctggtgttatgttccgtgaagaaccaggagaggattctgagggaggtgtgccgtgtgttgcgtcctggcggagcgttctatttcatggaacacgttgccgcagaatgtagtacttggaactatttctggcagcaggtgctggatcctgcttggcacctcctttttgacggctgtaacttgacgcgggagagctggaaggccctggagagggcatcattctccaaattgaagttgcaacatatacaggctcctctgtcctgggaacttgtacgcccccatatttacggttatgcagtcaagtag

SEQ ID NO: 177597 - DNA, 735 bp, Artificial Sequence
  derived and/or modified sequence
atggagctgaccatcttcatcctgcggttggctatttacatcctgacatttcccctctatctgctaaattttttaggcctctggtcctggatttgcaaaaagtggtttccttactttctggtcaggtttaccgtcatctataacgagcagatggcctctaagaagcgggagttgttctccaatctgcaagagtttgcaggacccagcggaaaactctccttgctggaggtcggctgcggcaccggagcaaacttcaaattctacccccccggctgccgagttacttgcatcgaccctaatcctaattttgaaaagttcctgatcaagtccattgcagaaaataggcacctccagtttgaaaggtttgtcgtggcagcaggcgaaaacatgcaccaagtagccgatggatcagtggacgttgtcgtttgtactctcgtgctgtgtagtgtaaagaaccaggagagaatcctaagggaggtgtgtcgagtgctcagacccggcggggctttttacttcatggaacacgtggccgccgaatgctcgacatggaactatttctggcaacaggtgctagatcctgcctggcatctactttttgacggttgtaatttaacccgggaatcttggaaggctctcgaaagggcatcctttagcaaactgaagctgcagcatattcaggcaccattatcctgggagctggtgcgaccacatatttacggctacgccgtcaaatag

SEQ ID NO: 177598 - DNA, 543 bp, Artificial Sequence
  derived and/or modified sequence
atggaattgaccatctttatcttgcggctagcgatttatatcctgacttttcctttgtacctgctgaattttctcggactttggagctggatctgcaagaaatggtttccctatttcttggtccgattcacagtgatttacaacgaacagatggcttccaagaagagagagctgttcagcaacctgcaagaattcgccggcccgagtgggaagctaagcctgttggaggtgggttgcggtaccggcgcaaattttaagttctatcccccaggatgccgagtcacatgtatcgacccaaatccaaatttcgaaaagttcctgattaaatctattgctgaaaacaggcatctccagttcgaacgctttgttgtagctgcgggcgagaatatgcaccaggtagcggacggctcggtggatgtggtcgtttgcactctggttctgtgtagcgtgaagaatcaggaacgcatactacgcgaagtgtgccgggtcctccgtcccggaggggccttttattttatggagcacgtggctgctgaatgttag

SEQ ID NO: 177599 - DNA, 735 bp, Artificial Sequence
  derived and/or modified sequence
atggagctgaccatcttcatcctgcggctggccatctacatcctgaccttccccctgtacctgctgaacttcctgggcctgtggagctggatctgcaagaagtggttcccctacttcctggtgcgcttcaccgtcatctacaatgagcagatggccagcaagaagcgggagctgttcagcaacctgcaggagtttgctggccccagcggcaagctgagcctgctggaggtgggctgcggcactggagccaacttcaagttctacccacctggctgccgggtgacctgcatcgaccccaaccccaactttgagaagttcctgatcaagagcattgctgaaaatagacacctgcagtttgaaagatttgtggtggccgccggggagaacatgcaccaggtggctgatggctctgtggatgtggtggtgtgcaccctggtgctgtgcagcgtgaagaaccaggagcgcatcctgcgggaggtgtgccgggtgctgcggcctgggggcgccttctacttcatggagcacgtggccgcagaatgttccacctggaactacttctggcagcaggtgctggaccctgcctggcacctgctgtttgatggctgcaacctgacccgggagagctggaaggccctggagcgggccagcttcagcaagctgaagctgcagcacatccaggcccccctgtcctgggagctggtgcggccccacatctacggctatgctgtgaagtag

SEQ ID NO: 177600 - DNA, 528 bp, Artificial Sequence
  derived and/or modified sequence
atggagctgaccatcttcatcctgcggctggccatctacatcctgaccttccccctgtacctgctgaacttcctgggcctgtggagctggatctgcaagaagtggttcccctacttcctggtgcgcttcaccgtcatctacaatgagcagatggccagcaagaagcgggagctgttcagcaacctgcaggagtttgctggccccagcggcaagctgagcctgctggaggtgggctgcggcactggagccaacttcaagttctacccacctggctgccgggtgctgcggcctggaggagccttctacttcatggagcacgtggccgctgagtgcagcacctggaactacttctggcagcaggtgctggaccctgcctggcacctgctgtttgatggctgcaacctgacccgggagagctggaaggccctggagcgggccagcttcagcaagctgaagctgcagcacatccaggcccccctgtcctgggagctggtgcggccccacatctacggctatgctgtgaagtag

SEQ ID NO: 177601 - DNA, 543 bp, Artificial Sequence
  derived and/or modified sequence
atggagctgaccatcttcatcctgcggctggccatctacatcctgaccttccccctgtacctgctgaacttcctgggcctgtggagctggatctgcaagaagtggttcccctacttcctggtgcgcttcaccgtcatctacaatgagcagatggccagcaagaagcgggagctgttcagcaacctgcaggagtttgctggccccagcggcaagctgagcctgctggaggtgggctgcggcactggagccaacttcaagttctacccacctggctgccgggtgacctgcatcgaccccaaccccaactttgagaagttcctgatcaagagcattgctgaaaatagacacctgcagtttgaaagatttgtggtggccgccggggagaacatgcaccaggtggctgatggctctgtggatgtggtggtgtgcaccctggtgctgtgcagcgtgaagaaccaggagcgcatcctgcgggaggtgtgccgggtgctgcggcctgggggcgccttctacttcatggagcacgtggccgcagaatgttag

SEQ ID NO: 177602 - DNA, 735 bp, Artificial Sequence
  derived and/or modified sequence
atggagctgaccatcttcatcctgcggctggccatctacatcctgacctttcccctgtacctgctaaattttctcggactgtggtcttggatttgcaagaaatggttcccttatttcttagtcagattcacagtcatctacaacgaacaaatggcctccaaaaagcgggagcttttctcaaacctccaggaattcgctgggccttcggggaagctgtctctactggaagtcggttgcggtacaggcgctaacttcaaattttacccgcccggttgcagagtcacttgtatcgatccaaacccgaatttcgagaaattcttgattaagtctattgccgaaaatagacacctacagttcgagaggttcgttgtggcggcgggtgaaaatatgcatcaggttgccgatggctcagtagacgtggttgtctgtacactggtgctttgtagcgttaagaaccaggaacgcatcttacgagaggtgtgcagggtgttgaggccaggaggtgccttctacttcatggaacacgtggcggccgaatgctctacatggaattacttttggcaacaggtgttggaccccgcctggcacctgttgttcgacggttgcaacctcaccagggaatcctggaaagctctggagcgggccagcttctccaaactaaagttgcagcacatccaggcaccactcagctgggagcttgtacgacctcatatatacgggtacgcagtgaagtag

SEQ ID NO: 177603 - DNA, 528 bp, Artificial Sequence
  derived and/or modified sequence
atggagctgaccatcttcatcctgcggctggccatctacatcctgacatttcccctgtacctcctgaattttcttggattgtggtcatggatctgtaagaagtggtttccttacttcctcgtgcgctttacagtgatctataacgaacagatggccagtaagaagagagaactgttttccaacctgcaggagtttgccggacccagcggcaagctgagtctgctggaggttgggtgcgggaccggggcaaatttcaaattttatcctcccggatgcagagtgctgcggccgggaggcgccttctactttatggagcacgttgccgccgagtgctctacttggaactacttttggcagcaggtcttagaccccgcttggcaccttcttttcgacggctgtaacctgacaagagagtcctggaaagccctggaacgagcgtccttctccaagctgaaattacagcatattcaggccccgctcagttgggaattggtacggcctcacatttatggctatgcagtgaagtag

SEQ ID NO: 177604 - DNA, 735 bp, Artificial Sequence
  derived and/or modified sequence
atggagctgaccatcttcatcctgcggctggccatctacatcctgaccttccccttatacctgctgaacttcttaggactctggtcctggatttgtaagaagtggtttccttatttcctcgtgcggttcacggttatttataatgaacagatggcaagtaagaaacgggaactcttcagtaacctccaggaatttgccgggccttccggaaaattgtccttgttggaagtgggttgcggaaccggcgcaaactttaaattctacccccccggctgcagggtgacctgtatcgatcctaatcccaacttcgaaaagttccttatcaagagtattgccgagaaccgccacctgcagttcgaacgtttcgtagtggccgcaggcgaaaacatgcaccaggtcgccgacggttctgtggacgtagtggtttgtacattggtactctgtagtgtgaaaaaccaggaacgtatcctgagggaggtttgccgcgtgcttaggcctggcggcgccttttatttcatggagcacgtcgctgctgaatgcagtacctggaattacttctggcaacaggtcctggatcctgcttggcacctgttatttgacggatgcaatcttacacgtgagagctggaaggccttagagagggcttcattctctaaactcaagctgcagcacattcaggccccactgagctgggagctggtcaggccccatatttatggatacgcggtaaagtag

SEQ ID NO: 177605 - DNA, 735 bp, Artificial Sequence
  derived and/or modified sequence
atggagctgaccatcttcatcctgcggctggccatctacatcctgacgttccctctgtacttgttaaacttcctgggtctctggtcatggatttgcaagaagtggttcccatattttcttgtccgttttactgtcatttataacgagcaaatggctagtaagaagcgggaactgttcagcaatcttcaggaatttgccggacctagcgggaaactgtccctactcgaggtcggttgtgggactggcgcgaattttaaattctacccacccggctgtagggtgacttgcatcgacccgaaccctaatttcgaaaagtttctaatcaagtctattgctgagaatagacaccttcagtttgagagatttgtggtggctgccggcgagaacatgcaccaggtggccgacgggtccgtggatgtggttgtgtgcacgctcgtgttgtgcagcgtgaaaaaccaagaaagaatccttcgggaagtctgccgcgttttaagaccgggtggcgcattttatttcatggagcatgtggccgcagagtgtagcacctggaattatttctggcagcaggtactagatcctgcctggcacctcctgttcgacggatgtaatctgacccgcgagtcctggaaagcgttagagcgggcttctttctccaagctgaaattgcagcatatacaggcccctctttcctgggagctcgtgcgtccgcatatctacgggtacgcagtgaagtag

SEQ ID NO: 177606 - DNA, 735 bp, Artificial Sequence
  derived and/or modified sequence
atggagctgaccatcttcatcctgcggctggccatctacatcctgaccttcccgttgtatctcctgaatttcctggggttatggtcctggatatgtaagaagtggttcccatattttcttgtgaggttcaccgtgatctacaatgagcagatggcttccaaaaagagagagctgttcagtaacctgcaagaatttgccggcccatctggtaaactttccctgttggaggtcggctgtggcaccggagccaacttcaagttctaccctcccggatgcagagtcacgtgcatcgacccaaaccccaattttgagaaattcttgattaagtctatcgcggagaaccgacatcttcaatttgagaggttcgtcgtcgctgctggagagaatatgcaccaggtggccgacgggagtgtagatgtggtcgtgtgcaccctggtgctctgctccgtgaagaaccaggagaggatcctgcgggaggtctgccgagtactgcgacccggcggcgccttctactttatggaacatgtcgccgccgaatgcagcacctggaactacttctggcagcaggttctggaccctgcatggcacctcctgtttgacggatgtaatttgactagggaatcctggaaggcccttgaaagagccagtttttctaagctgaagctgcaacatattcaagctcccctatcatgggagttagttcgaccccatatctacgggtacgctgtgaagtag

SEQ ID NO: 177607 - DNA, 543 bp, Artificial Sequence
  derived and/or modified sequence
atggagctgaccatcttcatcctgcggctggccatctacatcctgacgttcccgctgtacctcctgaatttcctgggactgtggtcatggatatgcaagaagtggttcccctattttctggttaggtttacagttatctacaatgagcagatggcaagtaagaaaagggaactgtttagtaacctgcaggaattcgccggtcctagcggcaagctgtccctcctcgaggtgggatgcgggaccggagccaatttcaagttctaccctcccggctgccgggtgacttgtattgaccctaaccctaacttcgagaagtttctgatcaagtccattgcggagaatcgccacctacaattcgaacgatttgtcgttgctgccggggaaaatatgcaccaggttgctgacggctccgtggacgtggtcgtttgcactctggttctgtgctccgttaagaatcaagaaaggatcctaagagaggtatgtagggtgttgcgacctgggggagccttctactttatggagcacgtggctgccgagtgttag

SEQ ID NO: 177608 - DNA, 735 bp, Artificial Sequence
  derived and/or modified sequence
atggaactgacaatctttatcctccggctggctatttatatcctcacattccctctttatctgctgaattttctaggcctttggagctggatatgcaagaaatggtttccctacttcctggtgcgcttcacagttatttataacgagcagatggcgtctaaaaaacgcgagttgttctccaaccttcaagagtttgcaggccctagcggtaagttatccctgctggaagtaggctgtggtaccggagctaatttcaaattctacccccctggatgtcgtgtcacttgcatcgatccgaatccaaattttgagaagtttctgatcaaatccatcgctgaaaacaggcacctccagtttgagcgatttgtggtggccgctggcgaaaacatgcatcaagtcgccgacggcagtgtagacgtggttgtgtgcactctggtgctgtgttccgtcaagaaccaagagcgtatcttgcgggaagtgtgccgtgtgctgaggccaggcggagctttttactttatggagcacgtagctgccgaatgcagtacctggaattatttttggcagcaggttctggaccccgcttggcacctgctttttgatgggtgtaatctcacccgtgagtcctggaaggccttagagagggcttcgtttagcaaactcaaactgcaacatatccaggctcctctcagctgggagcttgtgcgccctcacatctacggctacgctgtgaagtag

SEQ ID NO: 177609 - DNA, 528 bp, Artificial Sequence
  derived and/or modified sequence
atggaattgaccatctttatattgcggctggccatttacatcctcactttcccactgtacctccttaactttctaggattgtggtcatggatctgcaagaagtggtttccctattttttagttagatttactgtgatctacaatgaacagatggctagcaagaaacgggagctcttctcaaacctgcaggagtttgcaggtccatctggtaaacttagcctcttggaagtgggttgtggaaccggtgccaattttaaattttatcccccaggttgtcgcgttctgagacccggaggggctttttatttcatggagcatgtggccgctgagtgctccacctggaattacttttggcagcaggttctggaccccgcatggcatctcctatttgacggctgtaacctaacgcgcgaaagttggaaagccctcgagcgggcatctttcagcaaacttaagctacagcacattcaagccccactgtcctgggagttggtccggcctcacatttacggatatgccgtcaagtag

SEQ ID NO: 177610 - DNA, 713 bp, Artificial Sequence
  derived and/or modified sequence
cccttctgagcaatggagcttaccatctttatcctgagactggccatttacatcctgacatttcccttgtacctgctgaactttctgggcttgtggagctggatatgcaaaaaatggttcccctacttcttggtgaggttcactgtgatatacaacgaacagatggcaagcaagaagcgggagctcttcagtaacctgcaggagtttgcgggcccctccgggaaactctccctgctggaagtgggctgtggcacgggggccaacttcaagttctacccacctgggtgcagagtgctgagaccgggaggggctttctatttcatggagcatgtggcagctgagtgttcgacttggaattacttctggcaacaagtcctggatcctgcctggcaccttctgtttgatgggtgcaacctgaccagagagagctggaaggccctggagcgggccagcttctctaagctgaagctgcagcacatccaggccccactgtcctgggagttggtgcgccctcatatctatggatatgctgtgaaatagtgtgagctggcagttaagagctgaatggctcaaagaatttaaagcttcagttttacatttaaaatgctaagtgggagaagagaaaccttttttttggggggcggtttttttggtttgttgttggttttttttttttttttggcgggaagaaagagttttgctcttgttgccca

SEQ ID NO: 177611 - DNA, 735 bp, Artificial Sequence
  derived and/or modified sequence
atggaactgaccatattcatactgagacttgctatctacattctgaccttccccttgtatctgctgaatttccttggattgtggtcatggatatgcaagaagtggtttccgtatttcctcgtccggtttactgtcatttacaatgaacagatggcaagcaaaaaacgcgaattattttctaatctgcaggaattcgcaggtccatcgggcaaattatctctgttggaggtgggctgtggaaccggagccaatttcaagttttacccccctggatgtagagtcacctgtatcgacccaaaccccaatttcgagaagttcctgataaaaagcattgccgaaaatagacatctccagtttgaaaggttcgttgtcgcagctggagagaacatgcatcaggtagctgatgggtctgtggacgtcgtcgtgtgcaccctggttctgtgcagcgtgaaaaaccaggagcgaatcctgagagaagtctgtcgtgttctacgcccagggggtgccttctattttatggagcacgttgcggcagagtgcagcacgtggaattacttctggcagcaagtgctggaccctgcctggcatcttttatttgatggctgcaatctgaccagagagagttggaaggccctggagcgggctagcttttctaagctgaagttacagcacatccaagcacccctgagctgggaactggtgaggccacacatctacgggtacgctgtgaagtag

SEQ ID NO: 177612 - DNA, 735 bp, Artificial Sequence
  derived and/or modified sequence
atggagttgactatcttcatcctgagactcgccatctatatcctcacattccccctttatcttctcaacttcctgggactctggtcctggatttgtaagaaatggttcccgtactttctcgttcgcttcacggtgatttacaacgagcagatggcttcaaaaaaacgtgaactcttctctaatttacaagaattcgctggaccttccggcaaactcagcttgttggaggtcggatgtggaaccggggctaattttaagttttatccccctgggtgtagggttacctgtattgatccaaatcccaattttgagaagttcctgatcaagtctatcgctgagaaccggcatctgcagtttgagagattcgttgtggccgctggcgagaatatgcaccaagttgctgatggcagtgtggatgtagttgtgtgtacactggttctgtgtagcgtcaaaaatcaagagcgtatcctgcgcgaggtgtgcagagtattacgccctggaggggctttctacttcatggaacacgttgccgctgaatgctccacttggaactacttctggcagcaagtgctagacccggcttggcatttgttgttcgacggttgtaatctgaccagggagtcatggaaggctctggaaagggcatcgtttagcaaacttaaactccagcacatacaagcacctctctcatgggagttagtacgaccccacatctatggctacgccgtcaagtag

SEQ ID NO: 177613 - DNA, 735 bp, Artificial Sequence
  derived and/or modified sequence
atggaactcacaattttcatcttgcgactggcgatctacatcttgacattccccctctatctgctcaatttcttaggactgtggtcctggatttgtaaaaaatggttcccatacttcttagtccgctttacagttatatataacgagcagatggcttccaagaaacgagagcttttcagtaaccttcaggagttcgccggacccagcggtaaattgtctttacttgaagtagggtgcggaacaggagctaactttaaattttatccgccagggtgcagagtcacttgcattgaccctaaccccaatttcgagaaatttctgatcaagtctatcgctgagaaccggcatctgcaattcgagcggtttgtagtcgcagctggagaaaacatgcaccaggtggcggatggttctgtggatgtcgtcgtgtgcaccttggtgctatgctccgtcaagaatcaggaaagaatactgcgggaagtgtgccgggtcctaagacccggaggagcattttatttcatggagcatgtggccgcagagtgtagcacatggaattacttttggcaacaggtgctggacccagcttggcatctactgtttgatggctgcaacttgacacgagaatcctggaaagccctcgagagagcttctttctcgaagctcaagctccaacacatacaagctcccctgagctgggagctggtacggccacacatctacggatatgcagtcaagtag

SEQ ID NO: 177614 - DNA, 543 bp, Artificial Sequence
  derived and/or modified sequence
atggaactaacaatcttcatccttaggctggcgatatacattttaacttttccgctgtatctcctgaacttcctcgggctctggtcctggatatgcaagaaatggttcccgtattttctcgtgaggttcacagtaatctacaatgaacagatggccagcaagaagagagagctctttagcaacttgcaggagtttgccggtccctcaggaaagctttctcttttggaggtgggctgcggcacaggcgctaattttaaattttatcctcctggttgccgtgtcacctgtatagacccaaatcctaattttgagaagtttcttatcaaatctatcgctgagaaccggcatctccaatttgaaagatttgtcgtggcggctggtgagaacatgcaccaggtggccgacgggtcagtcgacgttgttgtgtgcactttggttctttgctccgttaagaatcaggagagaattctgagagaggtttgccgggtgctcaggcctgggggagccttctattttatggaacatgtggctgctgagtgctag

SEQ ID NO: 177615 - DNA, 2423 bp, Artificial Sequence
  derived and/or modified sequence
aattaaaggagtcgggtctctaactgttgatctgtttttttcccttctgagcaatggagcttaccatctttatcctgagactggccatttacatcctgacatttcccttgtacctgctgaactttctgggcttgtggagctggatatgcaaaaaatggttcccctacttcttggtgaggttcactgtgatatacaacgaacagatggcaagcaagaagcgggagctcttcagtaacctgcaggagtttgcgggcccctccgggaaactctccctgctggaagtgggctgtggcacgggggccaacttcaagttctacccacctgggtgcagggtgacctgtattgaccccaaccccaactttgagaagtttttgatcaagagcattgcagagaaccgacacctgcagtttgagcgctttgtggtagctgccggggagaacatgcaccaggtggctgatggctctgtggatgtggtggtctgcaccctggtgctgtgctctgtgaagaaccaggagcggattctccgcgaggtgtgcagagtgctgagaccgggaggggctttctatttcatggagcatgtggcagctgagtgttcgacttggaattacttctggcaacaagtcctggatcctgcctggcaccttctgtttgatgggtgcaacctgaccagagagagctggaaggccctggagcgggccagcttctctaagctgaagctgcagcacatccaggccccactgtcctgggagttggtgcgccctcatatctatggatatgctgtgaaatagtgtgagctggcagttaagagctgaatggctcaaagaatttaaagcttcagttttacatttaaaatgctaagtgggagaagagaaaccttttttttggggggcggtttttttggtttgttgttggttttttttttttttttggcgggaagaaagagttttgctcttgttgcccaggctggagtgcaatgacgtgatctccgctcactgcaacctccacctcgcgggtttaagcgattcttctgcctcagcctccctagtagctgggattacaggtgcccaccaccatgcccagctaatttgtatttttagttgagacagggtttcactacgttggccaggctggtcttgaactcctgatctcaggcaatccacccacctcagcctcccaaagtgctgggatgacaggcgtgagcaaccgcacccagcttaaggtttttttgttttgttttgagacggagttttcgctcttgttgcccaggctggagtgcaatgctgtgatctcagcttaccacaacctccacctcccgggttcaagtgattcacctgcctcagcctcctgagtagctggtattacaggcatgcgtcaccacgccggctaattttgtacttttagtagagatggtgtttccccacgttggtcagcctggccaacatggcaaaaccctactaaagatacaaaaaaaaaaaaaaattagccaggcgtggtggtgggtgcctgtaatcccaggtacttggaaggctgaggcaggagaatctcttgaacccagaaggcgaaggttgcagtgaaccgagatcatgccattgtactctagcctgggtgacaagagcaagactccgtctcaaaaaaaaaaaaaaaaaaaaaaagaagtagagacagggagacagggtctcactgtgttgcctaggccggtcttgaactcctgggctcaagtgattctcccaccttgacctcctaaattgttgggattacaggtgtgagacagtgcacctggccgaaatagctcaagtttctgaaaaacaaatctgaatctatttgttattcttagcgtcactggtctggctttcagaattaacatacaaggttgccacacctagttctgcccagctttatgtcttttattccagtattccaccaaagtttgttttcctgcattccagttctcaagtcttaagataaagattgtacttgacagtttagtatatccataaaactatttgaggtggttaaggttcttgggttcattttccttaatactttgctgaatattgtagattgtaggcaatgaaaaagtctactaaattaggaaaaccttgaataattaggtatcctaggtaagagcccctaaacatcaagcaatctgtgagtctgtaaagaaataaatattttttggattattcttatctaattccacccctgttggaagatgatttctttgttctttgcaactatggaagctgtgaaaatcatcacaagtgcctctgaaagcgagtgttaggttggttagagggtttaatattttctgcaatggtttgtaggaattttaataaatgtagtatattttctgagatgattttgtaaaagtactattttaaatatcaaatcaaccaataaattcacatttgtgttaggaacag

SEQ ID NO: 177616 - DNA, 1825 bp, Artificial Sequence
  derived and/or modified sequence
tgcaattaaaggagtcgggtctctaactgttgatctgtttttttcccttctgagcaatggagcttaccatctttatcctgagactggccatttacatcctgacatttcccttgtacctgctgaactttctgggcttgtggagctggatatgcaaaaaatggttcccctacttcttggtgaggttcactgtgatatacaacgaacagatggcaagcaagaagcgggagctcttcagtaacctgcaggagtttgcgggcccctccgggaaactctccctgctggaagtgggctgtggcacgggggccaacttcaagttctacccacctgggtgcagggtgacctgtattgaccccaaccccaactttgagaagtttttgatcaagagcattgcagagaaccgacacctgcagtttgagcgctttgtggtagctgccggggagaacatgcaccaggtggctgatggctctgtggatgtggtggtctgcaccctggtgctgtgctctgtgaagaaccaggagcggattctccgcgaggtgtgcagagtgctgagaccgggaggggctttctatttcatggagcatgtggcagctgagtgttcgacttggaattacttctggcaacaagtcctggatcctgcctggcaccttctgtttgatgggtgcaacctgaccagagagagctggaaggccctggagcgggccagcttctctaagctgaagctgcagcacatccaggccccactgtcctgggagttggtgcgccctcatatctatggatatgctgtgaaatagtgtgagctggcagttaagagctgaatggctcaaagaatttaaagcttcagttttacatttaaaatgctaagtgggagaagagaaaccttttttttggggggcggtttttttggtttgttgttggttttttttttttttttggcaggagaatctcttgaacccagaaggcgaaggttgcagtgaaccgagatcatgccattgtactctagcctgggtgacaagagcaagactccgtctcaaaaaaaaaaaaaaaaaaaaaaagaagtagagacagggagacagggtctcactgtgttgcctaggccggtcttgaactcctgggctcaagtgattctcccaccttgacctcctaaattgttgggattacaggtgtgagacagtgcacctggccgaaatagctcaagtttctgaaaaacaaatctgaatctatttgttattcttagcgtcactggtctggctttcagaattaacatacaaggttgccacacctagttctgcccagctttatgtcttttattccagtattccaccaaagtttgttttcctgcattccagttctcaagtcttaagataaagattgtacttgacagtttagtatatccataaaactatttgaggtggttaaggttcttgggttcattttccttaatactttgctgaatattgtagattgtaggcaatgaaaaagtctactaaattaggaaaaccttgaataattaggtatcctaggtaagagcccctaaacatcaagcaatctgtgagtctgtaaagaaataaatattttttggattattcttatctaattccacccctgttggaagatgatttctttgttctttgcaactatggaagctgtgaaaatcatcacaagtgcctctgaaagcgagtgttaggttggttagagggtttaatattttctgcaatggtttgtaggaattttaataaatgtagtatattttctgagatgattttgtaaaagtactattttaaatatcaaatcaaccaataaattcacatttgtgttaggaacagaa

SEQ ID NO: 177617 - DNA, 4076 bp, Artificial Sequence
  derived and/or modified sequence
taaagagatagagtctcactatgttgcccagacaggatttgaattcctgggctcaaggtatgcttctgtcttagctcctcagtagctgagaccatgggcacccaccactgtgcccagattcgggctttcttgtaaaaagcggatggatgcttgaaactattttctgaatccctttggctcccaaatgtgaatattctgggaaatatttttatccaaattagctgagtaatcgagtagttaggcacattttgaagactgaggcttgtcctttaaaagaagggcagcccacaaactgacttccttgagccaaaaattgttttaaaaggggaagtacagcccaaaacagtgattttaaaatatcaacaaaaagagtcaaattctgtaaaatatttaaagagatttattctgagccaaatatgagtgaccatgtcctgtgacacagccctcgggaaatcctgagaacatgtgcccaaggtggtcagggtacagcttggttttctacattttagggagacatgaggcttcaatcaaatacatttaagaaatacattggttcagtccagaaaggcaggacaacccgacgcgaggcagggagcttccaggttatagaggtcactggagagcccggtggggtgtaagtacactgcgcttataaaactctagcaggaagctagcagctgtctccaaacccagagaaggggaaacaggaatcgattaggaataaaggattataatccactttccttctgaggaaaagctgggaaccttctcattttgccttatgaaaactaagctgaatcgactgctgccaaacatctattaggcaaaattggcctcttgcccatgatttgactttccagcacagccagttctttttctcctctgcagctgattggctctggagtgtggccagaagcctctctcctgcaattaaaggagtcgggtctctaactgttgatctgtttttttcccttctgagcaatggagcttaccatctttatcctgagactggccatttacatcctgacatttcccttgtacctgctgaactttctgggcttgtggagctggatatgcaaaaaatggttcccctacttcttggtgaggttcactgtgatatacaacgaacagatggcaagcaagaagcgggagctcttcagtaacctgcaggagtttgcgggcccctccgggaaactctccctgctggaagtgggctgtggcacgggggccaacttcaagttctacccacctgggtgcagggtgacctgtattgaccccaaccccaactttgagaagtttttgatcaagagcattgcagagaaccgacacctgcagtttgagcgctttgtggtagctgccggggagaacatgcaccaggtggctgatggctctgtggatgtggtggtctgcaccctggtgctgtgctctgtgaagaaccaggagcggattctccgcgaggtgtgcagagtgctgagaccgggaggggctttctatttcatggagcatgtggcagctgagtgttcgacttggaattacttctggcaacaagtcctggatcctgcctggcaccttctgtttgatgggtgcaacctgaccagagagagctggaaggccctggagcgggccagcttctctaagctgaagctgcagcacatccaggccccactgtcctgggagttggtgcgccctcatatctatggatatgctgtgaaatagtgtgagctggcagttaagagctgaatggctcaaagaatttaaagcttcagttttacatttaaaatgctaagtgggagaagagaaaccttttttttggggggcggtttttttggtttgttgttggttttttttttttttttggcgggaagaaagagttttgctcttgttgcccaggctggagtgcaatgacgtgatctccgctcactgcaacctccacctcgcgggtttaagcgattcttctgcctcagcctccctagtagctgggattacaggtgcccaccaccatgcccagctaatttgtatttttagttgagacagggtttcactacgttggccaggctggtcttgaactcctgatctcaggcaatccacccacctcagcctcccaaagtgctgggatgacaggcgtgagcaaccgcacccagcttaaggtttttttgttttgttttgagacggagttttcgctcttgttgcccaggctggagtgcaatgctgtgatctcagcttaccacaacctccacctcccgggttcaagtgattcacctgcctcagcctcctgagtagctggtattacaggcatgcgtcaccacgccggctaattttgtacttttagtagagatggtgtttccccacgttggtcagtctggtctcaaattcctgacctcaggtgatctgcctgcctcggcctcccaaagtgctgtgattacagacgtcagccaccatgcctggcctgaaaccttttttaggtaaagttgaattccatccttaaaagtttctgttatatcctatttagccattttctattgtctcccaaagaattcacatcaaaaaaacagctttgaactcccccttcaaaggaaacagtcgactttcataattagcatctaccattatccccaaatcttattttattcattgacttgaaattttttccaattgcttttttttttttttttttaaggttaagagcagaggtttactaggccaaagaaagagaatagctctctgttgcagagaggggtcctggagaaatgggttaccccagttgtcttatttaaatggttacccatcagattttaattttatcttctctttgagagcttggtaataagaagcacttaaatcactccaaagaagactttaaaaagggagcagtgaaaaggtcttaataatttattgattgaattaagaaatactagctaattaagaatctgagtctaaacagcacagattttttctttctgcttttaaattgtgttttaaaaaaagagacagggggctgggcgtggtggctcacgcctgtaatcctagcactttgggaggccgaggcgggtggatcacgaggtaggagttaaagaccagcctggccaacatggcaaaaccctactaaagatacaaaaaaaaaaaaaaattagccaggcgtggtggtgggtgcctgtaatcccaggtacttggaaggctgaggcaggagaatctcttgaacccagaaggcgaaggttgcagtgaaccgagatcatgccattgtactctagcctgggtgacaagagcaagactccgtctcaaaaaaaaaaaaaaaaaaaaaaagaagtagagacagggagacagggtctcactgtgttgcctaggccggtcttgaactcctgggctcaagtgattctcccaccttgacctcctaaattgttgggattacaggtgtgagacagtgcacctggccgaaatagctcaagtttctgaaaaacaaatctgaatctatttgttattcttagcgtcactggtctggctttcagaattaacatacaaggttgccacacctagttctgcccagctttatgtcttttattccagtattccaccaaagtttgttttcctgcattccagttctcaagtcttaagataaagattgtacttgacagtttagtatatccataaaactatttgaggtggttaaggttcttgggttcattttccttaatactttgctgaatattgtagattgtaggcaatgaaaaagtctactaaattaggaaaaccttgaataattaggtatcctaggtaagagcccctaaacatcaagcaatctgtgagtctgtaaagaaataaatattttttggattattcttatctaattccacccctgttggaagatgatttctttgttctttgcaactatggaagctgtgaaaatcatcacaagtgcctctgaaagcgagtgttaggttggttagagggtttaatattttctgcaatggtttgtaggaattttaataaatgtagtatattttctgagatgattttgtaaaagtactattttaaatatcaaatcaaccaataaattcacatttgtgttaggaacagaaata

SEQ ID NO: 177618 - DNA, 618 bp, Artificial Sequence
  derived and/or modified sequence
acatttaagaaatacattggttcagtccagaaaggcaggacaacccgacgcgaggcagggagcttccaggttatagcaatggagcttaccatctttatcctgagactggccatttacatcctgacatttcccttgtacctgctgaactttctgggcttgtggagctggatatgcaaaaaatggttcccctacttcttggtgaggttcactgtgatatacaacgaacagatggcaagcaagaagcgggagctcttcagtaacctgcaggagtttgcgggcccctccgggaaactctccctgctggaagtgggctgtggcacgggggccaacttcaagttctacccacctgggtgcagggtgacctgtattgaccccaaccccaactttgagaagtttttgatcaagagcattgcagagaaccgacacctgcagtttgagcgctttgtggtagctgccggggagaacatgcaccaggtggctgatggctctgtggatgtggtggtctgcaccctggtgctgtgctctgtgaagaaccaggagcggattctccgcgaggtgtgcagagtgctgagaccgggaggggctttctatttcatggagcatgtggcagctgagtgt

SEQ ID NO: 177619 - protein, 204 aa, Artificial Sequence
  derived and/or modified sequence
MAKVQVNNVVVLDNPSPFYNPFQFEITFECIEDLSEDLEWKIIYVGSAESEEYDQVLDSVLVGPVPAGRHMFVFQADAPNPGLIPDADAVGVTVVLITCTYRGQEFIRVGYYVNNEYTETELRENPPVKPDFSKLQRNILASNPRVTRFHINWEDNTEKLEDAESSNPNLQSLLSTDALPSASKGWSTSENSLNVMLESHMDCM

SEQ ID NO: 177620 - DNA, 615 bp, Artificial Sequence
  derived and/or modified sequence
atggctaaagtacaagtgaacaacgtggtggtgctggacaacccgtctcccttctacaatcctttccaattcgagatcaccttcgaatgcatcgaggacctaagcgaagacctggagtggaagatcatctacgttgggtctgcagagagtgaagagtacgaccaggtgctcgacagcgttttagtcggtcccgtgccggccggccgccacatgttcgtgtttcaggctgacgctcccaatcctgggctgatccccgacgctgacgctgtgggggtgaccgtagtgctcattacctgcacttaccgggggcaggaattcattcgcgtggggtattacgtcaataatgagtacaccgaaactgaactacgcgagaaccccccagttaaacctgacttttctaaattacagcgaaacattttagcaagtaatcccagagttaccaggtttcacatcaattgggaagataacactgaaaagttggaggacgcagaaagtagcaatcccaacctgcagtccctgctttccacggacgccttgccgagcgcttcaaaaggatggtccacttctgagaactcccttaacgttatgctggagagtcacatggattgtatgtag

SEQ ID NO: 177621 - DNA, 615 bp, Artificial Sequence
  derived and/or modified sequence
atggccaaggtgcaggtgaacaacgtggtggtgctggacaaccccagccccttctacaaccccttccagtttgagatcacctttgaatgtattgaggacctgtctgaggacctggagtggaagatcatctacgtgggcagcgctgagagcgaggagtatgaccaggtgctggacagcgtgctggtgggccctgtgcctgctggccgccacatgtttgtgttccaggctgatgcccccaaccctggcctcatcccagatgctgatgctgtgggcgtgacagtggtgctgatcacctgcacctaccggggccaggagttcatccgggtgggctactacgtgaacaatgagtacacagaaacagagctgcgggagaacccccctgtgaagccagacttcagcaagctgcagaggaacatcctggccagcaacccccgggtgacccgcttccacatcaactgggaggacaacacagagaagctggaggatgctgagagcagcaaccccaacctgcagagcctgctgagcacagatgccctgcccagcgccagcaagggctggagcaccagcgagaacagcctgaatgtgatgctggagagccacatggactgcatgtag

SEQ ID NO: 177622 - DNA, 615 bp, Artificial Sequence
  derived and/or modified sequence
atggccaaggtgcaggtgaacaacgtggtggtgctggacaacccctcacccttctacaaccctttccagttcgaaatcaccttcgaatgtatcgaggacctctctgaagacctggagtggaagataatatatgtcggctctgccgagagcgaggagtatgatcaggtgctcgacagtgtcctggtgggccccgtgcctgccggaagacatatgttcgtatttcaagctgatgcacccaaccccggcttgatcccagacgccgacgctgtgggggtcactgtcgttttaatcacttgtacctaccgcggccaggagtttattagagtcggctattacgtgaacaatgagtatacagagaccgagctgagagagaaccccccagtgaagcccgactttagcaagcttcagagaaacattctggccagcaacccccgcgtgacacgttttcacataaattgggaggacaacaccgaaaaattagaggacgccgagagcagtaaccccaacctccaatcactgctctccacagacgcactgccttctgcctctaagggctggtccacttccgagaactccctgaatgtgatgcttgagtcccacatggattgcatgtag

SEQ ID NO: 177623 - DNA, 615 bp, Artificial Sequence
  derived and/or modified sequence
atggcgaaagttcaggtcaacaatgtggtggtccttgataacccatcaccattttataacccgttccagttcgagattaccttcgagtgtatcgaggacctgagtgaagacctggagtggaagataatctacgtaggatcagccgagagcgaggaatatgatcaggtactggacagcgtcttggtaggacctgtccccgctggacggcatatgttcgtcttccaggcagacgctccgaacccaggtctgattcctgacgctgatgcagtgggggttactgtcgttctgattacctgcacgtacagaggccaggagtttatcagagtaggatactacgtgaataatgaatacacggaaacggagctgcgagaaaatcccccagtgaagccagatttctctaaacttcaaagaaacatcctagcgtccaatcccagagtaactcggttccacattaactgggaagataataccgagaagctggaggacgcagaatctagcaatccaaacttacagtccctgctgtctacggacgctttgccctctgcatccaaagggtggagtactagcgagaactctctcaacgttatgctggagtctcacatggactgtatgtag

SEQ ID NO: 177624 - DNA, 2362 bp, Artificial Sequence
  derived and/or modified sequence
gaaataggaaagctgcaaaacactgtggagtgctcccgtgtaaataaaaagaggaaaaaagtttctcaagtcgccgctgcacgacgtctggccggcgctggagcgggggtctgcgctctcccgagcggccgcgcgctggactttattgtgccgcaaccagccccagttcccattgtttgtgtttttttcaaaatatggcaaaggttcaggtgaacaatgtagtggtgctggataacccttctcctttctacaacccgttccagttcgagatcaccttcgagtgcatcgaggacctgtctgaagacttggaatggaaaattatctatgtgggctctgcagaaagtgaagaatacgatcaagttttagactctgttttagtgggtcctgttcccgcaggaaggcatatgtttgtatttcaggctgatgcacctaatccaggactcattccagatgcagatgcagtaggcgtaactgttgtgctaattacttgtacctatcgaggacaagaatttattagagttggctattatgtaaataatgaatatactgagacagaattaagggaaaatccaccagtaaaaccagacttttctaagcttcaaaggaatattttggcatctaatcccagggtcacaagattccacattaattgggaagataacacagaaaaactggaagatgcagagagcagtaatccaaatctacagtcacttctttcaacagatgcattaccttcagcatcaaagggatggtccacatcagaaaactcactaaatgtcatgttagaatcccacatggactgcatgtgaccacctaccatccctttagtacaaattaagctattaaaaatacacagaactatttccctgaaattccgtaagtacatagtcaaaacacaatgtgaagaatttgtttaaaaacatcctgtagaaagtttataagaaaaccagtatttgaacaaattgtggaatataaatacaactatttttaagtaatttttttctctaatgtgttattttatttgttctgaaactaatctgattaaagcatatatattattttcttctcctttatatgtaatgaaagcacttataaagaaacaggaatcattagaccaggttgtaaagatgtcttggcctcccagacagtctttggaccactattttactggcctttgaaagaacaaagtttacttcaactaaaatgtttcttcctgtgaagacatatggtatcattttaatttaaggggcagatttccattcttttttggcatgtccttaaaaagaggatttgaaatcaactatatgctaccaagaactttaggatccaattttccaagccaccgtgaagcctcttatggctactattatagttcatgagatgttggacagcatttggtttgtttggtaagagaagaacaaatatggctaattgttaataaggtcccctggctatggtttttgttcttataacagagtttagaatatcagagcatttcttgaatcatacatcattattgtccagtgaattcaagaccaaatacaatatcgggagaaaatacaaactccctgtgtttaagaataggggattacaatggctcaaattggttcatttgatttctaaaaataccatgacctttaaaaattcttttaatagatcatgttattggcagtatttatataaaaaccatggatttagaaaggtatatttagctttattataatagatacgttactattttggaaatatatatattttcacacctgtagtactcttccccatttcctctgacactcatgcagaatgagatcaggcatatttgtggttgacatactctagatagcttttccaacaaatctttgaaaagcaatcttggaaaggaattcattaactaaatggggtaaaaggtttctttttctttgagagttaagtccttcctcaaaaaattttcttatgctccataaaattgaggtagaatattttcattattcttgcagctaagcaagacagccatatgatgcaggttatgcagtgccttcatatctaaaacttttatactgcactttttaaagcttttatgttgaggaaaggaaaagggcatttgtctaaacatggattctgagttgtatatatttcctatcattctaaaaaagtgaatttgtgaagcaaagttttgccagatgttaaactttgaatttaatataccagattattaaaatattgtccattaactagttcatagattttaaaagtaaaatacttctgactgttaaaactatataaagaaaatctcatttgtctaattgcaattaaaagaaaaatgttaaaatattaaaatgaaaataaaagcattactttccaa

SEQ ID NO: 177625 - DNA, 615 bp, Artificial Sequence
  derived and/or modified sequence
atggccaaggtgcaggtgaacaacgtggtggtgctggacaaccccagccccttctacaaccccttccagttcgagatcaccttcgagtgcatcgaggacctgagcgaggacctggagtggaagatcatctacgtgggcagcgccgagagcgaggagtacgaccaggtgctggacagcgtgctggtgggccccgtgcccgccggcagacacatgttcgtgttccaggccgacgcccccaaccccggcctgatccccgacgccgacgccgtgggcgtgaccgtggtgctgatcacctgcacctacagaggccaggagttcatcagagtgggctactacgtgaacaacgagtacaccgagaccgagctgagagagaacccccccgtgaagcccgacttcagcaagctgcagagaaacatcctggccagcaaccccagagtgaccagattccacatcaactgggaggacaacaccgagaagctggaggacgccgagagcagcaaccccaacctgcagagcctgctgagcaccgacgccctgcccagcgccagcaagggctggagcaccagcgagaacagcctgaacgtgatgctggagagccacatggactgcatgtag

SEQ ID NO: 177626 - DNA, 510 bp, Artificial Sequence
  derived and/or modified sequence
atggaggtgtacatccccagcttcagatacgaggagagcgacctggagagaggctacaccgtgttcaagatcgaggtgctgatgaacggcagaaagcacttcgtggagaagagatacagcgagttccacgccctgcacaagaagctgaagaagtgcatcaagacccccgagatccccagcaagcacgtgagaaactgggtgcccaaggtgctggagcagagaagacagggcctggagacctacctgcaggccgtgatcctggagaacgaggagctgcccaagctgttcctggacttcctgaacgtgagacacctgcccagcctgcccaaggccgagagctgcggcagcttcgacgagaccgagagcgaggagagcagcaagctgagccaccagcccgtgctgctgttcctgagagacccctacgtgctgcccgccgccagcgacttccccaacgtggtgatcgagggcgtgctgcacggcatcttctacccccacctgcagcccagatag

SEQ ID NO: 177627 - DNA, 510 bp, Artificial Sequence
  derived and/or modified sequence
atggaagtttatatcccttcgttccggtacgaggagtctgatctggagcgtggctacacagtgtttaaaattgaagtactaatgaacgggagaaagcattttgtagaaaaacgctatagtgagtttcacgctctgcataagaagttgaaaaagtgcattaagacaccagagattccgagtaagcatgtaaggaactgggtgccgaaagtgctagagcagagaaggcagggattagagacatacttacaggctgttatcctagaaaacgaggagttaccgaaactgtttctggacttcctgaatgtgcgacatctgccatctctgcccaaggctgaatcctgcggctccttcgatgagaccgagtccgaggagtctagtaagctttcacaccaacccgtgttgctgttccttagggacccctatgtacttcccgcagccagtgacttcccaaacgtggtgatagagggagtgcttcacggtatcttctaccctcacctgcagccccggtag

SEQ ID NO: 177628 - DNA, 510 bp, Artificial Sequence
  derived and/or modified sequence
atggaggtgtacatccccagcttccgctatgaggagagtgacctggagcggggctacaccgtcttcaagattgaggtgctgatgaatggaaggaagcactttgtggagaagcgctacagcgagttccacgccctgcacaagaagctgaagaagtgcatcaagaccccagagatccccagcaagcacgtgaggaactgggtgcccaaggtgctggagcagaggcggcagggcctggagacctacctgcaggccgtcatcctggagaatgaggagctgcccaagctgttcctggacttcctgaatgtgcgccacctgcccagcctgcccaaggccgagagctgtggcagctttgatgaaacagagagcgaggagagcagcaagctgagccaccagcctgtgctgctcttcctgcgggacccctacgtgctgcctgctgccagtgacttccccaacgtggtgattgagggcgtgctgcacggcatcttctacccccacctgcagcccaggtag

SEQ ID NO: 177629 - DNA, 510 bp, Artificial Sequence
  derived and/or modified sequence
atggaggtgtacatccccagcttccggtacgaggagagcgacctggaacgcggctataccgtttttaaaattgaggtgctaatgaatgggaggaagcattttgttgagaagaggtatagcgaatttcacgctttgcataaaaaactgaaaaagtgcattaaaacccctgaaatcccatcaaagcacgtgaggaactgggtgcctaaagtcctggagcaaagaagacagggcctggagacataccttcaggcagtcatcctcgagaatgaggaactgcctaagctgtttctcgactttcttaatgtgaggcaccttccttctctgcctaaggctgaatcgtgcgggtcgttcgatgaaacagagtctgaggagtctagtaagctgagccaccaacccgttctgctgttcttgagggacccctacgtcttgccagcggccagtgactttccaaatgtggtgatcgagggggtgctgcacggaattttctaccctcacctgcaaccaaggtag

SEQ ID NO: 177630 - DNA, 510 bp, Artificial Sequence
  derived and/or modified sequence
atggaggtatatataccatccttcagatatgaagaaagtgatctggagcgcggatacacggttttcaagattgaggttctgatgaatgggcgtaaacacttcgtggagaagcgctattcggagtttcatgcattgcataaaaagctaaaaaaatgtattaaaactccggagatcccgagtaagcacgtacgcaattgggtccctaaggtcttagaacagcggaggcaggggctcgagacttacttacaggcggtaatactggagaacgaagaattgcccaagctctttcttgacttcctcaacgtacgccatctgcccagtctccctaaagctgagagctgcggttcatttgacgagactgaatctgaggagtcttctaaactgtcacatcagcctgtattgctgtttctgagggacccttacgtgctacctgccgcaagtgactttcccaacgttgtgattgagggcgtccttcacggcatcttctatccacacttgcaacctcggtag

SEQ ID NO: 177631 - DNA, 2158 bp, Artificial Sequence
  derived and/or modified sequence
ggcccccggcacgcccagggcgcgggagcggccgggtcagcccgcagacctgagtccggcccgcagcctcggggccccgcgggcgcagcggggcgggaggcggggcggcccggccgtgggcggagcggcggccgcggccgtgagcctgcccccaactcgccctcagccggctggccggcgcggccatggaggtctacatcccgtcctttcgctatgaagagagcgacctggagcggggatacacggtgtttaagatagaagtgctaatgaatggaagaaaacattttgttgaaaagagatacagcgaatttcatgctttgcacaaaaagcttaagaaatgtataaaaactccagaaatcccttctaaacatgttaggaactgggtccccaaagtcttggaacagcgacgacaaggcttggaaacatacttacaggctgtcattttagaaaatgaagaacttcccaaactgtttcttgatttcctaaatgtgcgacacttgccctctctaccaaaggcagaaagttgtggatcttttgatgaaacagagtctgaagagtcaagcaaactgtcccaccagcctgtgctgctgttcctcagggatccatatgtcttgcctgcagccagcgattttccaaatgtggttattgaaggagtcctccatgggatattttaccctcatctacagcccaggtagaaatcctacatggctaaaagaagcagaagcaagtttcgaagtcacagtcaaggaaatcaatacctaccaatttaacctaaacgctatgatatataacagctctagctagtggtaaagtgcacagtcccagcttaattcagggcagggacatttccattagaatggtgctcttaaaaatagaaactgaaccggggcggtggtcaggctaaggccaagtgtttaagaagtagagtgtagctgccagcgtagaaacccatgaaaaggaggccacaggagattcctgggagcactgggtgtagcaaaacaaagccactctctgcttcagtcgcaccatttgctaattgaaaatcatatcctgaatcatactgagactgatcaactttggtagcttttttgttcagatcttatgacacactactcttctcaccgtgagattttctcagccagtgatagtacattctgaaatgctggcaccaggagacggccacagacacacactgctaaatgtgaagatggaactaaactggaaattaaattatactgacaatattatggcatttttaagatcatggcattttaatttacattagagtggagttgcatcatactcaggggttagcttccaaggtcagtacataggtaaaatgggctattaggatgatccttgaaagccctttagaagggtgccatgttggaaacctgtacatccacaacaagtagcttttcctcctatgttggaaaaaaagactgtttctttgtttgaagaccaagtgaagttgttggtgtttgtttaggggccattttgttaaaaaaaaaaaaaaaaaagcacataacttttaacactagaatcagcccgcaagatgcttgccccgctagtggcagatgtgaactgacaaggagtgaagcgcccacccagcggatggacagcacccacctgggtttactcaagggtgtgcattcattttaggtgggatcgccacaggatttcatgttattttccttacggcttccttttcactgacctcatttgttgagttaatgtaagttaaatgtgtttatgatataactccactgtacatcatcctttgagtagtaaaggataaaagcatatatactacctatatgtatgtgctgtatgtgggcatttcattgagatctaattaatagctagcctatttatggttattcgttttagtaagttctgtgggagcaaggtatttaaaatcaaaactaataactacatcatggtttttgattaggatctaaatattcaggttttaagcctgctgcaaacttttaaaatattatgatagattctgtactacatgtgggaaacaagcaagaactaaataatcaaatgttgtcaaccaaaagtaatagttgggtattggagatttttttaaaatgtttttatgttattagctatttggagttaaataaaaacagaacaaggaaacatttga

SEQ ID NO: 177632 - protein, 213 aa, Artificial Sequence
  derived and/or modified sequence
MASLFKKKTVDDVIKEQNRELRGTQRAIIRDRAALEKQEKQLELEIKKMAKIGNKEACKVLAKQLVHLRKQKTRTFAVSSKVTSMSTQTKVMNSQMKMAGAMSTTAKTMQAVNKKMDPQKTLQTMQNFQKENMKMEMTEEMINDTLDDIFDGSDDEEESQDIVNQVLDEIGIEISGKMAKAPSAARSLPSASTSKATISDEEIERQLKALGVD

SEQ ID NO: 177633 - DNA, 642 bp, Artificial Sequence
  derived and/or modified sequence
atggcttccctgttcaaaaagaagaccgtcgacgatgtgataaaagaacagaaccgtgagttgagagggacacagagggccatcattcgggatcgcgccgcccttgaaaaacaggaaaagcaactggaactcgagattaaaaaaatggccaagatcggtaacaaggaagcctgtaaagtgcttgccaagcagctagtgcacctcaggaaacagaaaacccgcacgtttgctgtctcaagtaaggtgacctctatgtccactcagactaaagtgatgaactctcagatgaagatggcgggcgcaatgtccacaacggccaaaacaatgcaggctgtgaacaaaaaaatggaccctcagaagactctgcagactatgcagaattttcaaaaagagaacatgaaaatggaaatgacagaggagatgatcaatgacaccctggacgatattttcgatggaagcgatgacgaagaggagtctcaggacatcgtcaaccaggtgttggatgagataggaatagaaatctccggcaaaatggccaaggccccatccgccgccagatccttgcctagcgcctcgacatccaaagccaccatctctgacgaggagatcgagaggcaactcaaagcactcggagttgattag

SEQ ID NO: 177634 - DNA, 642 bp, Artificial Sequence
  derived and/or modified sequence
atggccagcctcttcaagaagaagacagtggatgatgtgatcaaggagcagaaccgggagctgcggggcacccagagggccatcatccgggacagagctgccctggagaagcaggagaagcagctggagctggagatcaagaagatggccaagattggcaacaaggaggcctgcaaggtgctggccaagcagctggtgcacctgaggaagcagaagaccaggacctttgctgtgagcagcaaggtgacctccatgagcacccagaccaaggtgatgaacagccagatgaagatggccggggccatgagcaccacagccaagaccatgcaggccgtgaacaagaagatggacccccagaagaccctgcagaccatgcagaacttccagaaggagaacatgaagatggagatgacagaggagatgatcaatgacaccctggatgacatctttgatggcagtgatgatgaggaggagagccaggacatcgtgaaccaggtgctggatgagatcggcatcgagatcagcggcaagatggccaaggcccccagcgctgcccggagcctgcccagcgccagcaccagcaaggccaccatcagtgatgaggagattgagcggcagctgaaggccctgggcgtggactag

SEQ ID NO: 177635 - DNA, 642 bp, Artificial Sequence
  derived and/or modified sequence
atggccagcctgttcaagaagaagaccgtggacgacgtgatcaaggagcaaaaccgcgaactacgcggcacacagcgcgccatcattcgagatagggctgctctcgagaagcaggagaaacagctagaactcgagataaaaaaaatggccaagatcgggaataaagaagcatgtaaagtgcttgccaaacaacttgtccacttgagaaagcagaaaactagaaccttcgccgtttctagtaaggtgacctccatgagcacacagactaaagtgatgaattcccaaatgaagatggccggcgcaatgtccactaccgccaaaactatgcaggctgtaaacaagaaaatggacccgcaaaagaccctgcagactatgcagaattttcagaaggagaatatgaaaatggagatgacagaggaaatgataaacgacacattggacgacatctttgacggctccgatgacgaggaggaaagtcaggacatagttaaccaggtgctcgacgagataggcatcgagatctctggaaagatggccaaggcaccaagcgcagctaggagcctgccctcagcatcgacctccaaagctaccatcagcgacgaggagattgagagacaactgaaggctctgggtgtggattag

SEQ ID NO: 177636 - DNA, 642 bp, Artificial Sequence
  derived and/or modified sequence
atggccagcctgttcaaaaaaaagacggtggacgacgtgatcaaagaacagaaccgggaactgcgtggcactcaacgcgctattatcagggatcgcgctgcactagaaaagcaagagaagcagttagaactggagatcaaaaaaatggccaaaatcggcaacaaagaggcctgtaaagttttagccaagcagttggtgcatttgagaaaacagaaaacacggacgtttgcagtcagctccaaggtgaccagtatgagtacccagacgaaggtgatgaatagtcagatgaaaatggctggggctatgtctacaaccgcaaaaaccatgcaggctgtcaacaagaagatggacccacagaagacattgcaaactatgcagaattttcaaaaagaaaatatgaaaatggagatgactgaggagatgattaacgatactctagacgacatattcgacggtagtgatgacgaggaagagagtcaggatattgtgaaccaggtcctggatgaaattggaattgagatctcagggaaaatggccaaagcgccaagtgccgctagaagtctgccaagcgcaagcacttcaaaagcgacgatctccgatgaggaaattgagagacagttgaaggccctgggtgtcgactag

SEQ ID NO: 177637 - DNA, 2606 bp, Artificial Sequence
  derived and/or modified sequence
agaagtgacttctccaaaaagtgtgttagttcccggtcacctgagctccgggtgacgcggctgcggtagctgcggatacaagccttccgcgggtcctgcctggcgaccccgacctcctcctgctgtctctccgctccgccaccccgaacccgccaaggtcctgtccttttcctcctgtcctttgccagcgttgggccggaccgggccgagccgggccgcccgggcgcagtctttaaccatggcgtccctcttcaagaagaaaaccgtggatgatgtaataaaggaacagaatcgagagttacgaggtacacagagggctataatcagagatcgagcagctttagagaaacaagaaaaacagctggaattagaaattaagaaaatggccaagattggtaataaggaagcttgcaaagttttagccaaacaacttgtgcatctacggaaacagaagacgagaacttttgctgtaagttcaaaagttacttctatgtctacacaaacaaaagtgatgaattcccaaatgaagatggctggagcaatgtctactacagcaaaaacaatgcaggcagttaacaagaagatggatccacaaaagacattacaaacaatgcagaatttccagaaggaaaacatgaaaatggaaatgactgaagaaatgatcaatgatacacttgatgacatctttgacggttctgatgacgaagaagaaagccaggatattgtgaatcaagttcttgatgaaattggaattgaaatttctggaaagatggccaaagctccatcagctgctcgaagcttaccatctgcctctacttcaaaggctacaatctcagatgaagagattgaacggcaactcaaggctttaggagtagattagtcaaaagaagtcatactattttgcttacttataattatgtagtataaaccaagcacagtgcagatttcttttacaaaacacatgtattttgcaaaaaaaaaaaaaatgaagaccatgagtgaacagttgtttcctaacccatggctatttagaatcttttgccaaagaatgacaatgatgcaaaaatgggaacagtttggattttaattagaactgtttaggagtgatgatgtgtaaaaagttgacttctcttttgcatggcacagagaaattatattccttacttcatgtcagtttatgttctaaatctttttcactgaatataaaaatcttgttaaatgccattaggcaccaacttaaagagggttgtaaaaatattaaaagtatatcgttaattctgtatctgttgcttgtcttttgtaagtgattatgtgttatgaccataggtggttacagctgccaaattatttttaaatggtcaaaaagaagagtgctatttaaacatctgtcttaaacaaaaactgtcataacttttcttttttctttttccattaggagaacattctagttggtaaatttcaaaatgtgcttgacacctgccttaaatagcacagacctattgtgcacatctttaaattatttcagctggcagaaaagaattacatttaaaactgaaatcaaggcctcaatacaaagattatcctggctcttttctatctctgtgggcctaattgaaatatgtactcttattttagacacgcctctgttaaaacagaccaggttttcctggtctcagacctatgatgacttgtccctttgatgtcactactgtgaattgaatataattagtaaaaatagacgatgaataaataacactttatagtaagaaaacaatatattttggccatctaaaaatgagaattataattatatgaattataatttaaactgtttaattttgtttaatgtgtatattgaatcttccaaattgaagccattattctcaattaagtactacaactatgacaatgcttgacctacatttctaaaataaaaattcacattttttgataaataaactacagttttaccagaaattactatctaaatgtgtattagcagtattttttaaggtgaaattgccttggtatctaatgaatgtgtagacagggagataaaatgaaggattgccagactagttagaatagaatttaggattaggttagttttgaaaaatgatgttgtaatatatgggttctaacacatcctaccataaaaactggaggagatatgtgtaacctggttaatttgggatggtggacattttgggctaatactgacaaaatacatcttaggactagtatacatgtgacacggattgctaggaggaatgaaaaactaaactgtatagtttatattccgtaaaccattttataatgttcaaagattaggttttgttattgatagtattaaatacacagtttctcttaacagtgatgggtgaaaacattttaccggattatggaatgtttaccagaacatgttttgattcttgaatgtacataataatgccatctaacttatttacgttcttgtttacatgtgggagcttttgttttcaaaaattattttgttaaaaaatctcaataaagatttattattgttgttcttttcttaccttttttgctctttttggttcctgctaaaattaaaaattttatgcata

SEQ ID NO: 177638 - DNA, 642 bp, Artificial Sequence
  derived and/or modified sequence
atggccagcctgttcaagaagaagaccgtggacgacgtgatcaaggagcagaacagagagctgagaggcacccagagagccatcatcagagacagagccgccctggagaagcaggagaagcagctggagctggagatcaagaagatggccaagatcggcaacaaggaggcctgcaaggtgctggccaagcagctggtgcacctgagaaagcagaagaccagaaccttcgccgtgagcagcaaggtgaccagcatgagcacccagaccaaggtgatgaacagccagatgaagatggccggcgccatgagcaccaccgccaagaccatgcaggccgtgaacaagaagatggacccccagaagaccctgcagaccatgcagaacttccagaaggagaacatgaagatggagatgaccgaggagatgatcaacgacaccctggacgacatcttcgacggcagcgacgacgaggaggagagccaggacatcgtgaaccaggtgctggacgagatcggcatcgagatcagcggcaagatggccaaggcccccagcgccgccagaagcctgcccagcgccagcaccagcaaggccaccatcagcgacgaggagatcgagagacagctgaaggccctgggcgtggactag

SEQ ID NO: 177639 - protein, 713 aa, Artificial Sequence
  derived and/or modified sequence
MLLATLLLLLLGGALAHPDRIIFPNHACEDPPAVLLEVQGTLQRPLVRDSRTSPANCTWLILGSKEQTVTIRFQKLHLACGSERLTLRSPLQPLISLCEAPPSPLQLPGGNVTITYSYAGARAPMGQGFLLSYSQDWLMCLQEEFQCLNHRCVSAVQRCDGVDACGDGSDEAGCSSDPFPGLTPRPVPSLPCNVTLEDFYGVFSSPGYTHLASVSHPQSCHWLLDPHDGRRLAVRFTALDLGFGDAVHVYDGPGPPESSRLLRSLTHFSNGKAVTVETLSGQAVVSYHTVAWSNGRGFNATYHVRGYCLPWDRPCGLGSGLGAGEGLGERCYSEAQRCDGSWDCADGTDEEDCPGCPPGHFPCGAAGTSGATACYLPADRCNYQTFCADGADERRCRHCQPGNFRCRDEKCVYETWVCDGQPDCADGSDEWDCSYVLPRKVITAAVIGSLVCGLLLVIALGCTCKLYAIRTQEYSIFAPLSRMEAEIVQQQAPPSYGQLIAQGAIPPVEDFPTENPNDNSVLGNLRSLLQILRQDMTPGGGPGARRRQRGRLMRRLVRRLRRWGLLPRTNTPARASEARSQVTPSAAPLEALDGGTGPAREGGAVGGQDGEQAPPLPIKAPLPSASTSPAPTTVPEAPGPLPSLPLEPSLLSGVVQALRGRLLPSLGPPGPTRSPPGPHTAVLALEDEDDVLLVPLAEPGVWVAEAEDEPLLT

SEQ ID NO: 177640 - protein, 556 aa, Artificial Sequence
  derived and/or modified sequence
MLLATLLLLLLGGALAHPDRIIFPNHACEDPPAVLLEVQGTLQRPLVRDSRTSPANCTWLILGSKEQTVTIRFQKLHLACGSERLTLRSPLQPLISLCEAPPSPLQLPGGNVTITYSYAGARAPMGQGFLLSYSQDWLMCLQEEFQCLNHRCVSAVQRCDGVDACGDGSDEAGCSSDPFPGLTPRPVPSLPCNVTLEDFYGVFSSPGYTHLASVSHPQSCHWLLDPHDGRRLAVRFTALDLGFGDAVHVYDGPGPPESSRLLRSLTHFSNGKAVTVETLSGQAVVSYHTVAWSNGRGFNATYHVRGYCLPWDRPCGLGSGLGAGEGLGERCYSEAQRCDGSWDCADGTDEEDCPGCPPGHFPCGAAGTSGATACYLPADRCNYQTFCADGADERRCRHCQPGNFRCRDEKCVYETWVCDGQPDCADGSDEWDCSYVLPRKVITAAVIGSLVCGLLLVIALGCTCKLYAIRTQEYSIFAPLSRMEAEIVQQQAPPSYGQLIAQGAIPPVEDFPTENPNDNSVLGNLRSLLQILRQDMTPGGGPGARRRQRGRLMRRL

SEQ ID NO: 177641 - DNA, 2142 bp, Artificial Sequence
  derived and/or modified sequence
atgctcttagctactttgctgctactccttctgggaggcgctctggctcaccctgatcgaatcatattccccaatcacgcgtgcgaggaccccccagctgtgctcctggaggtgcaaggcactttgcaaaggcccttagtccgtgactctcgcacttcacctgcgaattgtacctggctgattctggggtcaaaagaacagactgtgactatccggttccaaaaactgcatttggcctgcgggtcagaacgacttactctgagaagccctctgcaaccccttatttctctgtgcgaggctcctccaagccctctgcagttgcccggcggaaacgtgacaataacgtactcctacgctggcgcaagagctcccatgggtcagggctttttactcagctactcccaagattggctcatgtgtctgcaggaagagttccagtgcctgaatcacaggtgcgtttctgcggtacaacggtgcgacggcgttgatgcctgcggagacggatcagatgaggctggttgcagcagtgaccctttccccgggctgactccccgccccgtgccgtctctcccttgcaacgtgaccctggaagacttctatggagtcttcagcagcccaggatatactcacctggcctcggtcagtcatcctcagtcctgccactggctcctggatccgcatgacggtcgtcgcctcgctgtccgttttacagccttagacctaggcttcggagatgcggtgcatgtgtatgatggccccgggccccccgaaagcagccgactgcttcggagcctgacccacttctcgaacgggaaggctgttactgtcgagactctatctggacaggctgtggtgtcttaccacaccgtggcttggagcaatggaaggggctttaatgccacctatcatgtgaggggatattgcctgccttgggaccggccctgtgggctaggcagcggtttaggagccggtgagggcctgggtgaaagatgttactcagaggcccagcgctgtgacggctcgtgggactgcgcagacggtacggatgaggaggattgccccgggtgtcccccgggccactttccatgtggagccgccggcacatcaggcgccacagcctgctatcttcccgccgaccggtgtaattaccagaccttttgtgctgacggcgcagacgaaagaagatgccgccattgtcaaccaggaaattttcgatgtagggacgaaaaatgcgtgtacgagacatgggtctgcgatggccagccggattgtgccgatggctctgacgaatgggattgctcttatgtcctgccaagaaaagtaattaccgccgcagtgattggatcactcgtctgtggactcctgctggtcattgctctcggttgtacgtgcaagctgtacgccatccggacccaggagtattcaattttcgcaccactctcaagaatggaggcagaaatcgttcagcaacaagcacctccatcctacgggcaactgattgcccaaggcgccatcccgcctgtggaggattttcctaccgagaatcccaatgataacagcgtgctgggaaacctcagatcactcctgcagattctccgccaggatatgacacctggtggaggacccggcgcccgacggaggcagaggggccggttgatgagacggctggtacgtcgcctgaggagatggggtcttctgcctcggactaatactcccgcgagggcttcagaggcaaggtcacaagttacaccatctgccgccccactggaagccctggacggaggcacaggaccagcgcgcgaaggaggcgcagtgggcggacaagacggagagcaggccccccccctccctatcaaggccccgctgccaagcgcatcaacttctccagccccgaccacggttccagaggcccctgggccactcccctctcttcctctggaacccagcctgttaagtggtgtggtgcaggcattgagagggcggttgcttccctctctgggtccacctggccccactcgcagcccacccggcccccacaccgctgtgcttgccctggaggacgaggatgacgtgctgctcgtacccctggctgagccgggagtgtgggtggctgaggctgaagatgaaccgttgctcacttag

SEQ ID NO: 177642 - DNA, 1671 bp, Artificial Sequence
  derived and/or modified sequence
atgctactcgctacactgttgctgcttctcctcgggggagctttggctcaccccgatcggatcattttccctaatcatgcttgtgaagacccccccgcggtcctcctcgaggtccaaggtaccctgcaacgacctctggtcagagactcccggacctcacctgccaactgcacatggctgatcctgggatctaaggagcagaccgttacaatccgcttccagaagcttcacctggcctgcgggtccgaacggctcaccctgcgttcgcctctgcagcctctgatcagcctgtgcgaagcgccaccttcccccttgcagctcccgggcgggaacgtcacaatcacatacagttacgcaggggccagggccccgatgggtcagggttttctgctgagctacagccaagactggctgatgtgcctgcaggaggagttccagtgtctaaaccaccggtgcgtgtcagccgtccagagatgcgacggggttgacgcatgtggagacggaagcgatgaggcagggtgctcttctgaccccttccctgggctgacacccaggccagttcccagccttccgtgtaatgtgacccttgaggacttctatggcgtgttttccagcccaggatacacacatcttgctagcgttagtcatccccaatcctgccattggctgttggatccccatgatgggcgcaggctggcagtacggttcacagccctggatctgggcttcggtgacgctgtgcacgtgtacgatggccctgggccccctgagtcgagccgcctgctacggtcactcacccacttctccaatggaaaggccgttacggtggagacacttagcgggcaggccgttgtgtcgtaccacactgtggcctggtccaacggtcgggggttcaacgccacctatcatgttcgggggtactgtcttccgtgggatcgcccgtgtggcttgggttcaggacttggggccggggagggacttggagagaggtgttattccgaggctcagcgatgtgacgggtcctgggattgcgctgatgggacagatgaagaggattgccctggctgtccaccaggtcactttccttgcggagcggccgggacctccggagccaccgcctgttatctgccagccgatcggtgtaactaccagaccttctgcgcggacggggccgatgaacgaagatgtagacactgtcagcctgggaactttaggtgccgcgacgaaaaatgtgtctatgaaacctgggtctgtgacggacagcccgattgtgctgacgggtccgacgagtgggactgctcatatgtcctcccacggaaggtgattaccgccgcagtgatcggatcgctggtttgcggcctgttgcttgtcatcgcactgggttgtacttgcaaactgtacgccatacgaacacaggagtacagtatctttgcgcccctcagtaggatggaggctgaaatagtccaacagcaggccccaccatcgtatggtcaacttatcgcccagggcgctattccaccagtcgaagacttccctacagagaaccctaatgataacagcgtgctgggcaatctgagatcactgcttcagattcttcgacaggacatgacaccaggcggaggacctggcgcacggcgcaggcagcgcgggcgcctaatgcgaagattgtag

SEQ ID NO: 177643 - DNA, 2142 bp, Artificial Sequence
  derived and/or modified sequence
atgctgctggccaccctgctgctgctgctgctgggcggggccctggcccacccagaccgcatcatcttccccaaccacgcctgtgaagatcctcctgctgtgctgctggaggtgcagggcaccctgcagaggcccctggtgcgggacagcaggaccagccctgccaactgcacctggctgatcctgggcagcaaggagcagacagtgaccatccgcttccagaagctgcacctggcctgtggcagcgagcggctgaccctgcggagccccctgcagcccctcatcagcctgtgtgaggccccacccagccccctgcagctgcccggcggcaatgtgaccatcacctacagctatgctggggcccgggcccccatgggccagggcttcctgctgagctacagccaggactggctgatgtgcctgcaggaggagttccagtgcctgaaccaccgctgtgtgtctgctgtgcagagatgtgatggagtggatgcctgtggagatggcagtgatgaggccggctgcagcagtgaccccttccctggcctgacccccaggcctgtgcccagcctgccctgcaatgtgaccctggaggacttctacggcgtcttcagcagccctggctacacccacctggcctctgtgagccacccccagagctgccactggctgctggacccccatgatggccggcggctggccgtgcgcttcaccgccctggacctgggctttggagatgctgtgcacgtgtatgatggccctggccccccagagagcagccggctgctgcggagcctgacccacttcagcaatggcaaggctgtgacagtggagaccctgagcggccaggccgtggtgtcctaccacacagtggcctggagcaatggccggggcttcaatgccacctaccacgtgcggggctactgcctgccctgggaccggccctgtggcctgggcagcggcctgggcgctggggagggcctgggggagcgctgctacagcgaggcccagagatgtgatggctcctgggactgtgctgatggaacagatgaggaggactgccccggctgccccccaggccacttcccctgtggggccgccggcaccagcggggccacagcctgctacctgcctgctgaccgctgcaactaccagaccttctgtgctgatggagcagatgagcggcgctgccgccactgccagcccggcaacttccgctgcagagatgagaagtgtgtgtatgagacctgggtgtgtgatggccagcctgactgtgctgatggcagtgatgagtgggactgcagctatgtgctgcccaggaaggtgatcacagctgctgtgattggcagcctggtgtgtggcctgctgctggtgattgccctgggctgcacctgcaagctgtatgccatccgcacccaggagtacagcatctttgcccccctgagcaggatggaggccgagatcgtgcagcagcaggcccctccttcctatggccagctgattgcccagggcgccatcccccctgtggaggacttccccacagagaaccccaatgacaacagcgtgctgggcaacctgcggagcctgctgcagatcctgcggcaggacatgacccctgggggcggccctggggcccggcggcggcagaggggccgcctgatgaggcggctggtgcggcggctgcggcgctggggcctgctgcccaggaccaacaccccagcccgggccagcgaggcccggagccaggtgaccccatctgctgcccccctggaggccctggatggcggcaccggccctgcccgggagggcggcgctgtgggcggccaggatggagagcaggccccacccctgcccatcaaggcccccctgcccagcgccagcaccagccctgcccccaccaccgtgcctgaggcccctggccccctgcccagcctgcccctggagcccagcctgctgagcggcgtggtgcaggccctgcggggccgcctgctgcccagcctgggccccccaggccccaccaggagccccccaggcccccacacagctgtgctggccctggaggatgaagatgatgtgctgctggtgcccctggccgagcccggggtgtgggtggccgaggctgaagatgagcccctgctgacctag

SEQ ID NO: 177644 - DNA, 1671 bp, Artificial Sequence
  derived and/or modified sequence
atgctgctggccaccctgctgctgctgctgctgggcggggccctggcccacccagaccgcatcatcttccccaaccacgcctgtgaagatcctcctgctgtgctgctggaggtgcagggcaccctgcagaggcccctggtgcgggacagcaggaccagccctgccaactgcacctggctgatcctgggcagcaaggagcagacagtgaccatccgcttccagaagctgcacctggcctgtggcagcgagcggctgaccctgcggagccccctgcagcccctcatcagcctgtgtgaggccccacccagccccctgcagctgcccggcggcaatgtgaccatcacctacagctatgctggggcccgggcccccatgggccagggcttcctgctgagctacagccaggactggctgatgtgcctgcaggaggagttccagtgcctgaaccaccgctgtgtgtctgctgtgcagagatgtgatggagtggatgcctgtggagatggcagtgatgaggccggctgcagcagtgaccccttccctggcctgacccccaggcctgtgcccagcctgccctgcaatgtgaccctggaggacttctacggcgtcttcagcagccctggctacacccacctggcctctgtgagccacccccagagctgccactggctgctggacccccatgatggccggcggctggccgtgcgcttcaccgccctggacctgggctttggagatgctgtgcacgtgtatgatggccctggccccccagagagcagccggctgctgcggagcctgacccacttcagcaatggcaaggctgtgacagtggagaccctgagcggccaggccgtggtgtcctaccacacagtggcctggagcaatggccggggcttcaatgccacctaccacgtgcggggctactgcctgccctgggaccggccctgtggcctgggcagcggcctgggcgctggggagggcctgggggagcgctgctacagcgaggcccagagatgtgatggctcctgggactgtgctgatggaacagatgaggaggactgccccggctgccccccaggccacttcccctgtggggccgccggcaccagcggggccacagcctgctacctgcctgctgaccgctgcaactaccagaccttctgtgctgatggagcagatgagcggcgctgccgccactgccagcccggcaacttccgctgcagagatgagaagtgtgtgtatgagacctgggtgtgtgatggccagcctgactgtgctgatggcagtgatgagtgggactgcagctatgtgctgcccaggaaggtgatcacagctgctgtgattggcagcctggtgtgtggcctgctgctggtgattgccctgggctgcacctgcaagctgtatgccatccgcacccaggagtacagcatctttgcccccctgagcaggatggaggccgagatcgtgcagcagcaggcccctccttcctatggccagctgattgcccagggcgccatcccccctgtggaggacttccccacagagaaccccaatgacaacagcgtgctgggcaacctgcggagcctgctgcagatcctgcggcaggacatgacccctgggggcggccctggggcccggcggcggcagaggggccgcctgatgaggcggctgtag

SEQ ID NO: 177645 - DNA, 6886 bp, Artificial Sequence
  derived and/or modified sequence
aaatgtggaagctgaagctgcaagtcaagggcccgtctgacaagtccggcagggccgggaaaggggttaaggcgagcaagtgggtgtggcccgtgcgttgattggcaggggtgggaccgggcttgtcacccgccccggctactccaacccctgggcgggcgggggtaccgcctgggcaagggccggggcgccgggccgagccacctcttcccctcccccgcttccctgtcgcgctccgctggctggacgcgctggaggagtggagcagcacccggccggccctgggggctgacagtcggcaaagtttggcccgaagaggaagtggtctcaaaccccggcaggtggcgaccaggccagaccaggggcgctcgctgcctgcgggcgggctgtaggcgagggcgcgccccagtgccgagacccggggcttcaggagccggccccgggagagaagagtgcggcggcggacggagaaaacaactccaaagttggcgaaaggcaccgcccctactcccgggctgccgccgcctccccgcccccagccctggcatccagagtacgggtcgagcccgggccatggagcccccctggggaggcggcaccagggagcctgggcgcccggggctccgccgcgaccccatcgggtagaccacagaagctccgggacccttccggcacctctggacagcccaggatgctgttggccaccctcctcctcctcctccttggaggcgctctggcccatccagaccggattatttttccaaatcatgcttgtgaggaccccccagcagtgctcttagaagtgcagggcaccttacagaggcccctggtccgggacagccgcacctcccctgccaactgcacctggctcatcctgggcagcaaggaacagactgtcaccatcaggttccagaagctacacctggcctgtggctcagagcgcttaaccctacgctcccctctccagccactgatctccctgtgtgaggcacctcccagccctctgcagctgcccgggggcaacgtcaccatcacttacagctatgctggggccagagcacccatgggccagggcttcctgctctcctacagccaagattggctgatgtgcctgcaggaagagtttcagtgcctgaaccaccgctgtgtatctgctgtccagcgctgtgatggggttgatgcctgtggcgatggctctgatgaagcaggttgcagctcagaccccttccctggcctgaccccaagacccgtcccctccctgccttgcaatgtcaccttggaggacttctatggggtcttctcctctcctggatatacacacctagcctcagtctcccacccccagtcctgccattggctgctggacccccatgatggccggcggctggccgtgcgcttcacagccctggacttgggctttggagatgcagtgcatgtgtatgacggccctgggccccctgagagctcccgactactgcgtagtctcacccacttcagcaatggcaaggctgtcactgtggagacactgtctggccaggctgttgtgtcctaccacacagttgcttggagcaatggtcgtggcttcaatgccacctaccatgtgcggggctattgcttgccttgggacagaccctgtggcttaggctctggcctgggagctggcgaaggcctaggtgagcgctgctacagtgaggcacagcgctgtgacggctcatgggactgtgctgacggcacagatgaggaggactgcccaggctgcccacctggacacttcccctgtggggctgctggcacctctggtgccacagcctgctacctgcctgctgaccgctgcaactaccagactttctgtgctgatggagcagatgagagacgctgtcggcattgccagcctggcaatttccgatgccgggacgagaagtgcgtgtatgagacgtgggtgtgcgatgggcagccagactgtgcggacggcagtgatgagtgggactgctcctatgttctgccccgcaaggtcattacagctgcagtcattggcagcctagtgtgcggcctgctcctggtcatcgccctgggctgcacctgcaagctctatgccattcgcacccaggagtacagcatctttgcccccctctcccggatggaggctgagattgtgcagcagcaggcacccccttcctacgggcagctcattgcccagggtgccatcccacctgtagaagactttcctacagagaatcctaatgataactcagtgctgggcaacctgcgttctctgctacagatcttacgccaggatatgactccaggaggtggcccaggtgcccgccgtcgtcagcggggccgcttgatgcgacgcctggtacgccgtctccgccgctggggcttgctccctcgaaccaacaccccggctcgggcctctgaggccagatcccaggtcacaccttctgctgctccccttgaggccctagatggtggcacaggtccagcccgtgagggcggggcagtgggtgggcaagatggggagcaggcacccccactgcccatcaaggctcccctcccatctgctagcacgtctccagcccccactactgtccctgaagccccagggccactgccctcactgcccctagagccatcactattgtctggagtggtgcaggccctgcgaggccgcctgttgcccagcctggggcccccaggaccaacccggagcccccctggaccccacacagcagtcctggccctggaagatgaggacgatgtgctactggtgccactggctgagccgggggtgtgggtagctgaggcagaggatgagccactgcttacctgaggggacctgggggctctactgaggcctctcccctgggggctctactcatagtggcacaaccttttagaggtgggtcagcctcccctccaccacttccttccctgtccctggatttcagggacttggtgggcctcccgttgaccctatgtagctgctataaagttaagtgtccctcaggcagggagagggctcacagagtctcctctgtacgtggccatggccagacaccccagtcccttcaccaccacctgctccccacgccaccaccatttgggtggctgtttttaaaaagtaaagttcttagaggatcataggtctggacactccatccttgccaaacctctacccaaaagtggccttaagcaccggaatgccaattaactagagaccctccagcccccaaggggaggatttgggcagaacctgaggttttgccatccacaatccctcctacagggcctggctcacaaaaagagtgcaacaaatgcttctattccatagctacggcattgctcagtaagttgaggtcaaaaataaaggaatcatacatctcaaaattttgcaaattagctgcgagcctgagccccgcctctgcccatctcagtctatgctcacctcatcccactcctccctgtggagccctttgcttggccctctacctcctgccctcttcctgttcatctcccaaccactgcactcttgatttttataccacacagaaggtaagaaaattctaggaaccctaaggatcaatcctctccattttcactcaaatgcctggggcccagctctgcaatgactgactccagggcctctttcctcactgccagcatagaagtcaggggagccagctgggccctgcggtcaggaaggttctcatttttggagcataccctgagcccagatcataggagcagctgtccctggtgggacacaggagtcatgactcctaccctccaccctccacacccaccaggcatttagcagtctgtcctatgcaagacagatgaattctcagccaggatacctcaaggcaggcaaaggtgagtggagggagaattcacaaacattcagggtgtgtggtgctggcatcaccatggccaaatccaagaggtcttcctggaagagggcccaaactggaaccaaaagaatgctgtcagcagttggaatagagctgtgaattctagacagggggagtgtccccagaacaagcaaacggaggagacaagagggcaagggttataggaaagaccctgggcctgagagcacaagcagcggccagagctgcagcgctggggtgggtgatggagggaatgattcgcaagcagtgttggaacccagcccctagtgagcaaagtgacagaagctgccccagagtttggaaggaagatcgaggcagaagatgtagaaggaagctgtgggggtgggagtgatgcctcaggaacaaaactgaggaattccctaacggacccagtccctggggaaagaggctcccctcaggctctccttgtctagccccacacctggcagagcctgtcacccagcctagccccacgcctggcagagcccatcacccagcctagccccacacctggtggagaggccctgttgattacaccctgtcagcctcctcaaacccagcactaattgcacaattttcctctcttctagtgagcaagagcctgaggaagtagcagagaggggtgtgggcccatgtgcagttctgggaccctggcaccttggctcagggaagacccgagctcctttcactgcagaccctctccagagactggggagagggctctggagaacctggttcttgcttactgttctccctttgggccctccttcccaaacgcaaacaatccaggatccactcagcgtcaggcccaatggaaatagtgaagcagtgattttccctcccctgcctctccatagcctggtcttttgccctctcctttgctcttctcttcccccatagccacctcaaatacctgcagcctgatatcttcatcccttcatccagaccttttctctcctagtggtattgcaaactgaaagtggacaaagacttaaggtaaacctgctcctcatggtggaatgcttccaaatgctggaaggaggactttagggcagagttcactaaggaggcttgtgcttatagatcagtgggcctgaaagaagtttctctaggttctggttgtgtgctgtacgaggtgtaggtagtaataatactcttgtcagccacagtgaagccccaagctagccgggataggggactgaccttgtacaggcagcatggagaaactaagacagagtgtcctgcccaagtgatggcactggggagcagtcactcaggtttatttccaccagggcccaagaaaaaaagaaatgaggcaacctaaaattccatcaagatagataccaatatccaaggtgcttggtcttagcggtgtgggacccacgttaaggctcttggtgggaaggtgggaggtgttttcagcatgagatagggttcaggctgtgaatcagagtctagagcctaagataaaagaagataccagggctgggccacggtggctttcgcctgtaatcctagcactttgggaggccaaggcaggcagactgcctgagctcaggagttcgagactagcctgagcaacacggtgaaaccctgtctctactaaaatacaaaaaagtagccaggtgtggcggcatgcacctgtagtcccagctactcgagaggctgaggcaggagaattgcttgaacccgggaggcggaggttgcagtgagtggagatcgcgccactgcactctagcctgggtgacagagcgagactccttctccaaaaaaaaagaaaagaagataccagaactcagtccttaagaaacaaaattctgccaggcgcagtagctcacacctgtaatcccagcactttggaggggccaaggcaggcggatcgcttgaggccaagagttcaagaacagcctgggcaacatgatgaaaccctgtctctaccaaaaatactaaaaattagccagtctcacaacctggtctcaaaataaataaatagatttaaaaaaaaaatcatgggcctgaaccaagctccagacctcactaggaggggagaaggaccccccagccacacagcccaaggctgcagaagcacctaggtggttagagagtgagtgcctggatggggcgcagtggctcacacctgtaatcccagcactttgggaggccgaggcaggcggatcacgaggtcaagagatcaagaccatcctggccaacatggtgacaccgtgtctctactaaaaatacaaaaataagctgggcatggtggtgcgtgcctgtagtcccatctactcgggaggctgaagcaggagaatcacttgaacctgggaggcaaaggttgcagtgagctgagatcgcgccactgcactccagcctggcaacagagcgagacaagactccatctcaaaaaaaaaagtgagtgcccgatgatgccagattcttcatcacctgaagtgaacccacacaacagggctgggccatgggcatcataaaccccattttgcaagctcaggaggagctttagggaaatcagaagactggcccagtctctaccaagtggtggatttagagccggcatggcttcgttccaaatctcacccttgtcccaccattccatgggacctcccattcctgagggagcctggatacgggcaagtgcacaacccgggaggttgaggttacagtgagccatgatcgcaccactgcagtccagcccgagcaatagggtgagaccctccctctgaaaaaaataaaaatactcattttggaaggaagtcattctaaaatgttacacttgtcttcagcatatctgcaatataataattttctgcataactgaggatcattcacagaaaccaatggcttttctccagcagtgtcttctgaagttgtaacagtaggggcacggggagctatttgcttttatgctaaatgaccttagaccacttataaaatgcatatgagtgctttaaatgtta

SEQ ID NO: 177646 - DNA, 1780 bp, Artificial Sequence
  derived and/or modified sequence
atgctgttggccaccctcctcctcctcctccttggaggcgctctggcccatccagaccggattatttttccaaatcatgcttgtgaggaccccccagcagtgctcttagaagtgcagggcaccttacagaggcccctggtccgggacagccgcacctcccctgccaactgcacctggctcatcctgggcagcaaggaacagactgtcaccatcaggttccagaagctacacctggcctgtggctcagagcgcttaaccctacgctcccctctccagccactgatctccctgtgtgaggcacctcccagccctctgcagctgcccgggggcaacgtcaccatcacttacagctatgctggggccagagcacccatgggccagggcttcctgctctcctacagccaagattggctgatgtgcctgcaggaagagtttcagtgcctgaaccaccgctgtgtatctgctgtccagcgctgtgatggggttgatgcctgtggcgatggctctgatgaagcaggttgcagctcagaccccttccctggcctgaccccaagacccgtcccctccctgccttgcaatgtcaccttggaggacttctatggggtcttctcctctcctggatatacacacctagcctcagtctcccacccccagtcctgccattggctgctggacccccatgatggccggcggctggccgtgcgcttcacagccctggacttgggctttggagatgcagtgcatgtgtatgacggccctgggccccctgagagctcccgactactgcgtagtctcacccacttcagcaatggcaaggctgtcactgtggagacactgtctggccaggctgttgtgtcctaccacacagttgcttggagcaatggtcgtggcttcaatgccacctaccatgtgcggggctattgcttgccttgggacagaccctgtggcttaggctctggcctgggagctggcgaaggcctaggtgagcgctgctacagtgaggcacagcgctgtgacggctcatgggactgtgctgacggcacagatgaggaggactgcccaggctgcccacctggacacttcccctgtggggctgctggcacctctggtgccacagcctgctacctgcctgctgaccgctgcaactaccagactttctgtgctgatggagcagatgagagacgctgtcggcattgccagcctggcaatttccgatgccgggacgagaagtgcgtgtatgagacgtgggtgtgcgatgggcagccagactgtgcggacggcagtgatgagtgggactgctcctatgttctgccccgcaaggtcattacagctgcagtcattggcagcctagtgtgcggcctgctcctggtcatcgccctgggctgcacctgcaagctctatgccattcgcacccaggagtacagcatctttgcccccctctcccggatggaggctgagattgtgcagcagcaggcacccccttcctacgggcagctcattgcccagggtgccatcccacctgtagaagactttcctacagagaatcctaatgataactcagtgctgggcaacctgcgttctctgctacagatcttacgccaggatatgactccaggaggtggcccaggtgcccgccgtcgtcagcggggccgcttgatgcgacgcctgtgagcaagagcctgaggaagtagcagagaggggtgtgggcccatgtgcagttctgggaccctggcaccttggctcagggaagacccgagctcctttcactgcagaccctctc

SEQ ID NO: 177647 - DNA, 2142 bp, Artificial Sequence
  derived and/or modified sequence
atgctgctggccaccctgctgctgctgctgctgggcggcgccctggcccaccctgatagaatcatctttcccaaccatgcctgtgaagatccccccgcagttctgctggaggtccaaggaaccttgcagagacccctcgtgcgtgattcccggacaagccctgccaactgcacttggctaattctgggaagcaaggagcaaacagtgacaattaggttccagaagttacacctggcctgtggcagtgagcggttgacattgcgatcacctcttcagcccttaatatctctctgcgaagcaccaccctcccctttgcaattgcctggcggaaatgtaactatcacctactcatacgctggagcccgcgctccaatgggtcaaggctttcttctgagctactcccaggactggttgatgtgccttcaggaagaatttcagtgccttaaccacaggtgtgtctctgctgtccagaggtgcgacggagtggatgcctgcggagatgggagcgatgaggccggatgttctagtgacccctttccgggcctgacccctcgaccagtgccctctttgccatgtaacgttacgcttgaggacttctatggagttttttccagtcccgggtatactcatctcgcaagtgtcagccacccacagagctgtcactggcttctggacccgcatgacgggcgccgtctggccgtgagatttactgcccttgacttgggctttggtgacgctgtgcacgtttatgatggtcccggaccaccagagtcaagtcggcttctaaggtctcttacccatttcagcaacggaaaggcagtgactgtggaaacactgtcaggccaggccgtcgtgagctatcataccgtcgcctggtccaacggccgcggattcaacgccacataccatgtgcggggctactgtctaccttgggaccggccttgcgggttgggatcggggttgggcgccggagagggtctgggggaacgatgctatagtgaagctcagagatgtgacggatcctgggattgcgccgacgggacagacgaggaagattgccccggctgtcctccggggcattttccctgtggggctgctggcacgtctggagctaccgcttgctacttgcctgctgacaggtgcaattatcagactttttgtgcggatggcgctgacgagcgtcgctgccggcattgtcagccgggaaattttcggtgtagagacgaaaagtgcgtctatgaaacttgggtttgcgacggccagcccgactgtgctgacgggtcagatgagtgggactgcagttatgtgctcccccgcaaagtgattacagcagcagtcattggctccctggtgtgcggactgcttctcgtgattgctctggggtgcacctgtaagctgtacgctattcggacacaggagtatagcatcttcgctccactctctagaatggaagccgaaatcgtccaacaacaggcccctccaagctacggacagcttatcgcccagggcgctataccaccggtcgaggacttccccacagaaaatcctaatgacaactctgtgcttgggaatctgaggtccctgttgcaaatccttcgccaggacatgacaccaggtggaggcccgggagcacgtcgacgccagagaggtagactgatgcgacgcctcgtgcggaggctgcggcgatggggactgctgccacgaactaatacccccgcccgggctagtgaagcccgatcacaggttacaccttccgccgcacccctggaggctctggacggcggtaccgggcccgctcgtgaaggcggtgccgtcggcggacaagacggagaacaggcacccccactccccattaaggctcctctccccagtgcatcaacaagccctgccccgaccactgtgcctgaagcacctggtcctcttccatcactacccctcgagccttccctcctcagcggagttgtgcaagccctccgcggccgcctgcttccatccctaggcccccctggtcccacaagaagcccacctggccctcacacggctgtactcgccttggaggatgaggacgacgtgttgctcgtgccgctggcagagcctggggtgtgggtcgcagaggccgaggacgaacctctactgacctag

SEQ ID NO: 177648 - DNA, 1671 bp, Artificial Sequence
  derived and/or modified sequence
atgctgctggccaccctgctgctgctgctgctgggcggcgccctggcccaccctgaccggatcatatttccaaaccatgcctgtgaggatccccccgccgtgctcctggaagtgcaggggacactccagcggcccttggtgcgcgattccaggaccagccccgcgaattgtacatggctgattcttggctccaaggagcagactgtgacgatcaggtttcagaaattacatctggcttgcggctccgagagactcacgcttagaagtccacttcagccactgatctcactgtgtgaagcaccacccagtcctctgcagctgccaggtggtaacgtgacaatcacctactcttacgcaggagctcgggcaccaatgggccaggggttcctgctgagttatagtcaggattggctgatgtgtctgcaggaggagttccaatgcctcaatcatagatgcgtttcagcggtccagcggtgcgatggcgtggacgcgtgtggggatgggtcagacgaggccggctgctccagcgaccctttcccagggctcaccccccggccagtgccgagcctcccttgtaatgtgacacttgaagatttctatggggtgttcagctccccaggctacactcacttagcgagcgtttcacaccctcaatcttgccattggttactcgacccccacgatggtaggcgcctcgccgtaagatttactgcgttggacctgggcttcggagacgccgtgcacgtatatgacggtccaggcccgccggagtcatcacgccttttgaggtccttgacacatttttccaacgggaaggcggtaactgttgagacactgtctggccaggcggtggtttcttatcataccgtggcttggtctaacggaaggggattcaatgcaacctatcacgtgagggggtactgtctgccatgggaccgtccatgtggtctcggaagcggactgggcgctggggagggccttggtgaacgatgttattctgaggctcagcgatgtgacggaagctgggactgcgccgatggcactgacgaggaggattgtcctggatgcccccctggccactttccgtgtggcgcagccggcacctccggagctactgcatgctaccttcctgctgacaggtgtaattaccagaccttctgtgcagatggggcagatgaaaggagatgcagacactgtcagcccggcaactttagatgtcgagacgagaaatgtgtctacgagacctgggtctgcgatgggcaacccgattgcgccgatgggtccgacgaatgggattgttcctacgttctgccaaggaaagtgattacagctgcagtgataggatctctggtatgtggcctactgctggtcatcgcgctgggctgcacatgcaagctatacgccataaggacgcaggagtactcaatttttgcgccactatcaagaatggaagctgagatagtacagcaacaggcacccccctcatatggacaattaatcgcacagggagccatacctccagtcgaggactttccgaccgagaaccccaatgacaactcggtgcttgggaacctaagatctctgctgcagatcttgaggcaggatatgactcctgggggtggccccggggctagacggaggcagcgcggaagacttatgcggcgactctag

SEQ ID NO: 177649 - DNA, 2142 bp, Artificial Sequence
  derived and/or modified sequence
atgctcctggctactcttctgctactcctgctgggcggagcgctggcccatcccgatcgcatcattttccccaatcacgcttgcgaggacccccctgcagttttgctggaagtgcaaggaaccctccaacgaccattggtaagagactcccgcacttctcctgcgaactgtacatggctgatcctcggcagcaaggagcagacagtaactattcgctttcagaagctccaccttgcctgtggtagtgagcggttgactctccgcagccctctgcagccccttatcagtctttgcgaagcaccgccatcgccgctgcagttgccaggtggaaacgtgaccatcacatactcctatgctggagcaagagctcctatgggacaaggcttcctgctctcatattcccaagattggctcatgtgtctgcaggaggaatttcagtgcttgaatcataggtgcgtgagcgctgttcagcgatgcgacggcgtcgacgcgtgtggcgacggctcagacgaagctgggtgttcttccgaccctttccccggtctcactccacgcccagtgccatccctcccgtgtaacgttactttagaagacttttatggagtgttctcctctcctggatacactcaccttgcaagtgtgagtcatccacagagttgccactggctgctggacccccacgacggaagaaggttggcggttagatttactgctctcgatttgggattcggtgatgcagtgcacgtctatgatggcccaggccctcccgagagctcccgactccttcgctcactaacgcattttagtaacggcaaggcagtgaccgttgagactctgtctggtcaggccgttgtctcttatcacactgtggcttggtctaacggaagaggcttcaacgcaacctatcacgtgcggggttactgcctgccatgggataggccgtgtggtttggggtctggtcttggcgctggcgaaggcctcggtgagcgctgttattcagaagcccagcggtgtgacggatcttgggactgcgcggacggcactgacgaggaagactgccccggatgcccgccagggcattttccctgtggcgctgccggaacaagtggggcaacggcgtgttacctgcctgctgatagatgcaattaccagactttctgtgcagatggggcagacgagcggagatgccgccactgtcagcctggaaatttcaggtgtcgcgacgaaaagtgcgtttatgagacctgggtttgcgatggacagcccgactgtgccgacgggtcagacgagtgggactgctcctacgtgctgccaaggaaggtcattacggccgcagtgatcggaagcctggtgtgcggtctcctgttggtaatcgcgcttggttgtacgtgtaagctgtatgccatcagaactcaggagtatagcatctttgcccctctatcccgcatggaagcggaaatcgtgcaacagcaagcacctccgtcgtatgggcagctaatagcccagggcgctattcctcccgtggaggatttccccaccgaaaaccccaacgacaatagtgtgttggggaacctgagatcgctactacaaatcctgaggcaggatatgacccctggcggagggccaggagcaagaaggcgtcagcggggtcgactgatgcgtaggttggttcgcagacttcgtagatggggcttactgcctcgtacaaatacacccgctagggcctccgaggcaagaagtcaggtgactccatcagccgctccgctggaggccttagacggcggtactggcccagcacgggagggaggtgcggtgggtggacaggatggggagcaggcgccacccctccctatcaaggctcctctgccttcagcatccacttcgcccgctccgaccacagttccggaggcacccggacccctgccctcgcttcccttagagcccagcctcctttctggcgtcgtacaggccttaaggggcaggctgcttcccagtcttggccctccaggtccgactcgatcacctcccggaccgcacacggccgtgctcgctctggaggacgaggatgatgtgctgctggtgcccctggcagagcctggcgtctgggtggccgaggcagaggacgaaccgctgctcacctag

SEQ ID NO: 177650 - DNA, 1671 bp, Artificial Sequence
  derived and/or modified sequence
atgctgttggccacactgctgttgctgctgctgggaggtgccctcgcacaccctgaccgtatcatctttccgaatcatgcttgtgaagacccccctgctgtattgctggaggtgcagggaaccctgcagagaccactggtgcgtgattcccggactagccccgctaactgcacctggctgatactgggatccaaagaacaaaccgtgacaatcagatttcaaaagctgcatctcgcatgcggctccgaacgtctgacactgagatcccccctgcagcccctgatcagtctttgtgaggcacccccatcccctctgcagttgcccggaggtaacgtgactattacttacagttatgcgggtgctagagctcccatgggccaaggttttctgctgagttactcccaggactggctgatgtgtctccaagaggagttccaatgtctcaaccaccgatgtgtgtccgcagtgcaacgctgcgatggagtggacgcctgtggcgatggctcggacgaggcaggttgcagttcagatcccttcccaggcctcacccctaggccggttccctcactgccatgcaatgttactctagaggatttctatggtgtgttttcctccccaggctacacgcacctagccagtgtctcccacccacaatcatgccattggttgcttgatcctcacgatggccgaaggctggcagtgaggttcaccgccctcgaccttggcttcggggacgccgtgcatgtgtacgatgggccagggccaccagaatccagcaggctcctccggtcccttacccatttcagcaatggcaaggccgtcaccgtggaaacactctcaggccaggctgttgtaagttaccacaccgtggcttggtctaacggaagaggatttaacgccacttatcacgtgaggggatactgcctcccgtgggacaggccttgcggcctgggctctggtctaggggcaggcgagggcttaggagagagatgctattccgaagcccagcggtgtgacggttcttgggactgtgcggatggtaccgacgaggaagactgccccggatgtccacccggacatttcccctgcggcgctgccggtacctccggggcaacagcatgttatctgccggcagatagatgcaattatcaaacgttctgtgccgacggtgccgatgagaggagatgtagacactgtcagcccggtaatttccgatgcagggatgagaagtgcgtgtacgagacttgggtttgtgacgggcaacccgactgcgctgacggctcggacgaatgggattgctcgtacgtgcttcccaggaaggtgatcaccgccgctgtaattggctccctggtttgcgggctgctgctcgtgatagctttagggtgcacttgtaagctctacgccatccggactcaagagtactctatctttgctcccctgtcacggatggaagccgagatcgtgcagcaacaggcacccccttcctacggacaactaatcgcacagggggcaattcccccagttgaggacttccctaccgaaaatcccaatgataactccgtgcttggtaatctgcggtctctgctgcagattcttagacaggacatgacccccggagggggtccgggagcacgtagaagacaaaggggtcggctgatgagaagactgtag

SEQ ID NO: 177651 - DNA, 2142 bp, Artificial Sequence
  derived and/or modified sequence
atgctgctggccaccctgctgctgctgctgctgggcggcgccctggcccaccccgacagaatcatcttccccaaccacgcctgcgaggacccccccgccgtgctgctggaggtgcagggcaccctgcagagacccctggtgagagacagcagaaccagccccgccaactgcacctggctgatcctgggcagcaaggagcagaccgtgaccatcagattccagaagctgcacctggcctgcggcagcgagagactgaccctgagaagccccctgcagcccctgatcagcctgtgcgaggccccccccagccccctgcagctgcccggcggcaacgtgaccatcacctacagctacgccggcgccagagcccccatgggccagggcttcctgctgagctacagccaggactggctgatgtgcctgcaggaggagttccagtgcctgaaccacagatgcgtgagcgccgtgcagagatgcgacggcgtggacgcctgcggcgacggcagcgacgaggccggctgcagcagcgaccccttccccggcctgacccccagacccgtgcccagcctgccctgcaacgtgaccctggaggacttctacggcgtgttcagcagccccggctacacccacctggccagcgtgagccacccccagagctgccactggctgctggacccccacgacggcagaagactggccgtgagattcaccgccctggacctgggcttcggcgacgccgtgcacgtgtacgacggccccggcccccccgagagcagcagactgctgagaagcctgacccacttcagcaacggcaaggccgtgaccgtggagaccctgagcggccaggccgtggtgagctaccacaccgtggcctggagcaacggcagaggcttcaacgccacctaccacgtgagaggctactgcctgccctgggacagaccctgcggcctgggcagcggcctgggcgccggcgagggcctgggcgagagatgctacagcgaggcccagagatgcgacggcagctgggactgcgccgacggcaccgacgaggaggactgccccggctgcccccccggccacttcccctgcggcgccgccggcaccagcggcgccaccgcctgctacctgcccgccgacagatgcaactaccagaccttctgcgccgacggcgccgacgagagaagatgcagacactgccagcccggcaacttcagatgcagagacgagaagtgcgtgtacgagacctgggtgtgcgacggccagcccgactgcgccgacggcagcgacgagtgggactgcagctacgtgctgcccagaaaggtgatcaccgccgccgtgatcggcagcctggtgtgcggcctgctgctggtgatcgccctgggctgcacctgcaagctgtacgccatcagaacccaggagtacagcatcttcgcccccctgagcagaatggaggccgagatcgtgcagcagcaggccccccccagctacggccagctgatcgcccagggcgccatcccccccgtggaggacttccccaccgagaaccccaacgacaacagcgtgctgggcaacctgagaagcctgctgcagatcctgagacaggacatgacccccggcggcggccccggcgccagaagaagacagagaggcagactgatgagaagactggtgagaagactgagaagatggggcctgctgcccagaaccaacacccccgccagagccagcgaggccagaagccaggtgacccccagcgccgcccccctggaggccctggacggcggcaccggccccgccagagagggcggcgccgtgggcggccaggacggcgagcaggccccccccctgcccatcaaggcccccctgcccagcgccagcaccagccccgcccccaccaccgtgcccgaggcccccggccccctgcccagcctgcccctggagcccagcctgctgagcggcgtggtgcaggccctgagaggcagactgctgcccagcctgggcccccccggccccaccagaagcccccccggcccccacaccgccgtgctggccctggaggacgaggacgacgtgctgctggtgcccctggccgagcccggcgtgtgggtggccgaggccgaggacgagcccctgctgacctag

SEQ ID NO: 177652 - DNA, 1671 bp, Artificial Sequence
  derived and/or modified sequence
atgctgctggccaccctgctgctgctgctgctgggcggcgccctggcccaccccgacagaatcatcttccccaaccacgcctgcgaggacccccccgccgtgctgctggaggtgcagggcaccctgcagagacccctggtgagagacagcagaaccagccccgccaactgcacctggctgatcctgggcagcaaggagcagaccgtgaccatcagattccagaagctgcacctggcctgcggcagcgagagactgaccctgagaagccccctgcagcccctgatcagcctgtgcgaggccccccccagccccctgcagctgcccggcggcaacgtgaccatcacctacagctacgccggcgccagagcccccatgggccagggcttcctgctgagctacagccaggactggctgatgtgcctgcaggaggagttccagtgcctgaaccacagatgcgtgagcgccgtgcagagatgcgacggcgtggacgcctgcggcgacggcagcgacgaggccggctgcagcagcgaccccttccccggcctgacccccagacccgtgcccagcctgccctgcaacgtgaccctggaggacttctacggcgtgttcagcagccccggctacacccacctggccagcgtgagccacccccagagctgccactggctgctggacccccacgacggcagaagactggccgtgagattcaccgccctggacctgggcttcggcgacgccgtgcacgtgtacgacggccccggcccccccgagagcagcagactgctgagaagcctgacccacttcagcaacggcaaggccgtgaccgtggagaccctgagcggccaggccgtggtgagctaccacaccgtggcctggagcaacggcagaggcttcaacgccacctaccacgtgagaggctactgcctgccctgggacagaccctgcggcctgggcagcggcctgggcgccggcgagggcctgggcgagagatgctacagcgaggcccagagatgcgacggcagctgggactgcgccgacggcaccgacgaggaggactgccccggctgcccccccggccacttcccctgcggcgccgccggcaccagcggcgccaccgcctgctacctgcccgccgacagatgcaactaccagaccttctgcgccgacggcgccgacgagagaagatgcagacactgccagcccggcaacttcagatgcagagacgagaagtgcgtgtacgagacctgggtgtgcgacggccagcccgactgcgccgacggcagcgacgagtgggactgcagctacgtgctgcccagaaaggtgatcaccgccgccgtgatcggcagcctggtgtgcggcctgctgctggtgatcgccctgggctgcacctgcaagctgtacgccatcagaacccaggagtacagcatcttcgcccccctgagcagaatggaggccgagatcgtgcagcagcaggccccccccagctacggccagctgatcgcccagggcgccatcccccccgtggaggacttccccaccgagaaccccaacgacaacagcgtgctgggcaacctgagaagcctgctgcagatcctgagacaggacatgacccccggcggcggccccggcgccagaagaagacagagaggcagactgatgagaagactgtag

SEQ ID NO: 177653 - protein, 258 aa, Artificial Sequence
  derived and/or modified sequence
MAASVLNTVLRRLPMLSLFRGSHRVQVPLQTLCTKAPSEEDSLSSVPISPYKDEPWKYLESEEYQERYGSRPVWADYRRNHKGGVPPQRTRKTCIRRNKVVGNPCPICRDHKLHVDFRNVKLLEQFVCAHTGIIFYAPYTGVCVKQHKRLTQAIQKARDHGLLIYHIPQVEPRDLDFSTSHGAVSATPPAPTLVSGDPWYPWYNWKQPPERELSRLRRLYQGHLQEESGPPPESMPKMPPRTPAEASSTGQTGPQSAL

SEQ ID NO: 177654 - protein, 215 aa, Artificial Sequence
  derived and/or modified sequence
MAASVLNTVLRRLPMLSLFRGSHRVQVPLQTLCTKAPSEEDSLSSVPISPYKDEPWKYLESEEYQERYGSRPVWADYRRNHKGGVPPQRTRKTCINVKLLEQFVCAHTGIIFYAPYTGLLIYHIPQVEPRDLDFSTSHGAVSATPPAPTLVSGDPWYPWYNWKQPPERELSRLRRLYQGHLQEESGPPPESMPKMPPRTPAEASSTGQTGPQSAL

SEQ ID NO: 177655 - DNA, 777 bp, Artificial Sequence
  derived and/or modified sequence
atggccgctagtgtgctgaacacagtgctccgaaggctacctatgctgagtttatttcgtggaagccatcgggttcaggtgccactacagacgctgtgtacaaaagctccgagcgaggaggatagcctgtcatccgtccccatcagtccctataaggacgaaccctggaagtacctcgaatcagaggagtaccaggagaggtatggcagtcggcctgtatgggccgactatagacggaatcataagggcggcgtccctcctcagagaacccgcaaaacgtgcataagaaggaataaggtggttggaaatccgtgccctatttgcagagatcataaattacacgtggactttcgcaacgttaagttgctggagcagttcgtgtgtgcccacacaggcatcatcttttatgctccttataccggagtctgtgtgaaacaacataaaagactaacgcaggccatacagaaggcgagagatcacggccttttgatatatcatattcctcaggtggaaccccgcgatctggactttagcacaagccatggagctgtctccgccactccccccgcccctacactagtatcgggggatccctggtacccatggtacaactggaagcagcctccagaaagagaactgtctcgcttgcgccgcctgtatcagggacacctgcaggaggagagtggaccacctcccgagagtatgcctaagatgccaccccgcacccctgcagaagcaagtagcactggccagaccgggccccaaagtgccctttag

SEQ ID NO: 177656 - DNA, 777 bp, Artificial Sequence
  derived and/or modified sequence
atggccgcaagcgtgctcaacaccgtgctcaggcggctaccaatgctatctctgtttagagggtcccaccgtgtccaggtcccactgcaaacactgtgcactaaggccccgtcggaagaggatagtctttccagcgtaccaatttccccgtacaaagacgagccctggaaatatcttgaaagcgaagaataccaggaacgctacggttctcgaccagtttgggcagattataggcgaaatcacaagggcggtgtccctccacagaggacacgtaaaacatgcatccgcagaaacaaagtggtaggcaacccatgcccaatctgcagggatcacaaactccatgtggattttcgcaacgttaaactcctcgaacagtttgtgtgtgctcacacggggattatcttctacgcgccctacaccggtgtgtgcgtaaagcaacacaagagactgacacaggccatccaaaaggctcgcgaccatggcctgctcatctaccacatcccgcaggtggaaccaagagatcttgatttctccacaagccacggggccgtgtcagccacccccccggctccaactctagtgtccggtgacccctggtatccctggtataactggaaacagccgcccgagagagagttatcccgacttagacggctgtatcagggtcatcttcaagaagagtccgggccccctccagagtcaatgcctaaaatgccgccaaggactccagctgaggcatctagtacaggacagactggccctcagagtgcactgtag

SEQ ID NO: 177657 - DNA, 648 bp, Artificial Sequence
  derived and/or modified sequence
atggccgctagcgttcttaacaccgtcttacgaaggctccccatgctgtcccttttccgtggatcccatagagtacaagtgccactgcagaccttatgcaccaaggccccgagtgaagaggactctctctccagcgtgccaatttccccctacaaggatgagccgtggaagtacctggaatccgaggagtaccaggagcgctacgggagtcggcctgtctgggccgactatcgtcgaaatcacaaaggaggggttcccccacagcgaactagaaagacatgtatcaacgtgaaactgctagaacagttcgtttgtgcgcacaccgggatcattttctatgccccttatactggtctcctaatttatcacattccccaagttgaaccaagggatttggacttttctacgtcccatggcgctgtcagtgctacgccacccgcacctacattagtctccggcgatccatggtacccatggtataactggaagcaacctcccgagagggagctgagtagactgcgccggttgtaccagggtcacctgcaagaagagagtggcccaccccccgagagtatgcctaagatgccaccacgtacccctgcggaggccagcagtaccgggcaaaccggtccacagtctgctctttag

SEQ ID NO: 177658 - DNA, 648 bp, Artificial Sequence
  derived and/or modified sequence
atggcggctagcgtgctcaacacggtactgcggaggctccccatgctatcactgttccgcggcagtcaccgtgtgcaggtgccactacagacgctgtgcaccaaggccccgtctgaggaggatagtctgtccagtgtccctatcagcccatataaggacgagccgtggaaatacctggaatccgaagaataccaagagcgctacggttctaggcccgtgtgggcggattatcgacgcaaccacaaagggggagtgcctccccagcgcacccgtaagacttgtataaacgtaaagctcctcgagcaatttgtatgtgcacataccgggatcatcttctatgctccctatacaggactgctgatctatcacattccacaggtggaacccagggatctggacttcagcacttcccatggcgctgttagcgccactccccctgcgccaacccttgtgagcggcgacccatggtatccatggtacaactggaaacagcctcccgagagggagctctcccggctcagacgcctctaccagggccaccttcaggaggaaagcggaccccctcccgagagtatgccaaaaatgcctccacggactccagcggaggcgagttcaactggccagactggcccgcaaagcgctctctag

SEQ ID NO: 177659 - DNA, 777 bp, Artificial Sequence
  derived and/or modified sequence
atggccgctagtgtattaaatactgttctgcgtcgcctacctatgctatccctctttagagggagccaccgggttcaggtccctttgcagaccctgtgtacaaaggccccgtctgaagaagattcattaagttcagtgcccatttccccatacaaagacgagccctggaagtatttggagtccgaggaataccaggagcggtatggctcacggcccgtctgggccgactatagaaggaaccataaagggggtgtgccacctcagcggactaggaagacctgtattaggcggaacaaggtggtcgggaatccatgtcccatctgtcgcgaccacaaactgcacgtggactttaggaatgtgaagctgcttgagcagttcgtctgtgctcacaccggaatcatcttctacgctccttacactggggtgtgtgtgaaacaacataaacggttaacccaggctattcagaaggctagggaccacgggttgctgatctaccacatcccccaggtggaaccccgtgacctggatttctccaccagccatggggcagttagtgctacacctccagcacctacactggtcagcggcgacccatggtacccctggtataattggaaacaaccccccgagcgcgaactgagccggctgagacgtctttaccagggccacctacaggaagagagcggtcctcctccggagtctatgcctaaaatgcctccgagaaccccggcggaggcctcttcgacaggacagactggcccgcagtctgcactgtag

SEQ ID NO: 177660 - DNA, 648 bp, Artificial Sequence
  derived and/or modified sequence
atggccgcatccgtgttgaacaccgtgttaagacgtctgccaatgctgtccctgtttagaggttcgcatcgcgtacaagtgcctctgcaaacgttgtgcaccaaagcaccctcagaggaagacagcctctcgagtgttcctatctccccctataaggacgagccttggaagtaccttgagagcgaagaataccaggagaggtatggcagtagaccagtttgggctgactataggcgcaaccataagggtggcgtgccacctcagaggactcggaaaacttgcatcaatgtgaagctgctagaacaatttgtatgcgcccacaccgggatcatcttttatgccccatatacgggactgctcatttatcacattccacaagtggagcctagagatttggatttttcaacaagccacggcgccgtctccgctactccccctgcacccaccctcgtctccggagatccgtggtatccctggtataattggaaacagccacctgaaagagagctttcacgtctcagaagactataccagggacacctccaggaggaaagcggtccaccccctgaatccatgccgaagatgccccctaggactccagcagaagcttcctcaaccgggcaaactgggccacaaagtgcgctctag

SEQ ID NO: 177661 - DNA, 648 bp, Artificial Sequence
  derived and/or modified sequence
atggctgcctccgttcttaatactgtcctgagacgcctgcctatgctgtctttgttccgtggatctcaccgggtccaagtcccgctgcagacactctgcaccaaagccccttcagaggaggatagtcttagctctgtgcccatatccccttataaggatgagccctggaaatacctggagtctgaggaataccaggaacggtatggatccaggccagtgtgggctgattaccgacggaaccataaagggggggtacctcctcagagaacacgcaagacctgcattaatgttaaattactggagcagtttgtgtgcgcacacacaggcatcatcttttacgcaccgtataccgggctcctcatatatcatatcccgcaggtggaacccagggatctcgattttagcaccagccacggggccgtgtccgctacgccgccagcccctaccctcgtctcaggagacccgtggtatccttggtacaattggaagcagccccccgaacgagagctgtccaggttgcgacgtttataccaaggtcatctgcaggaagagagcggcccaccaccagagtccatgcctaaaatgccacccaggacacccgccgaagcgtcatctaccggccaaacaggccctcaatcagccctgtag

SEQ ID NO: 177662 - DNA, 777 bp, Artificial Sequence
  derived and/or modified sequence
atggcagcttccgtcctcaacacggtcctgcgacgccttccaatgctgagcctcttcagagggtcgcatagggtgcaggtgcctttgcagacactgtgtactaaagcaccctctgaggaggattctctcagttcagtccccatcagcccgtacaaagatgagccctggaagtacttggaaagcgaggagtaccaggagcgttatggaagtcggcccgtgtgggctgattatagacgaaaccacaagggtggagtgccccctcagcggactaggaaaacgtgtatccgcagaaacaaggtagtcggaaatccgtgccccatctgtagagatcacaagctgcatgttgactttcgaaatgtgaagctcttggagcagtttgtctgcgcgcatacggggatcattttttatgccccctacaccggtgtgtgcgtgaagcagcacaagaggctcacacaggccatccagaaggcacgggaccacggactcttgatctatcacatcccgcaagtagagccccgggacctggacttttctacctcacacggcgctgtttccgcaactccacccgcaccaactctcgtgagtggtgacccatggtatccctggtataattggaaacagccacctgagcgggagctatctcggcttagaaggctgtaccaagggcatctgcaggaggagagtggaccaccacccgagagtatgccaaagatgccaccccgcactccagccgaggcttcttcaactgggcagactggaccccaatccgccctgtag

SEQ ID NO: 177663 - DNA, 648 bp, Artificial Sequence
  derived and/or modified sequence
atggcggcaagtgtgctgaacaccgtgttaagaagactccctatgttatctttattccgcggctctcacagggtccaggtaccacttcaaactctgtgcacaaaggctccatctgaagaggatagcctgtctagcgtgcccatttcgccttacaaggatgaaccttggaaatacctggagtccgaggagtaccaagaacggtatggatcgcggcccgtgtgggcagactataggcgaaaccacaagggtggcgtgccgcctcagcgcactaggaaaacatgcatcaacgtgaagctgctagagcagtttgtgtgtgcacataccgggattattttctatgccccatataccgggctgcttatttaccacattccacaggttgaaccgcgcgatttggatttctccacttcccacggagcggtgtctgccacccctcctgcacctaccttggtctccggcgatccttggtacccgtggtacaattggaaacagccgccagagagggagctaagtcggcttcgcagactgtatcagggccatctccaggaggagtcaggccctccgcccgaaagtatgccaaaaatgcctcccagaactccagccgaagcgtcctctacgggacagaccggcccacagtctgcactgtag

SEQ ID NO: 177664 - DNA, 777 bp, Artificial Sequence
  derived and/or modified sequence
atggccgcctccgtgctgaataccgtgctgcgtcggttgccaatgctgagcttgtttcgcggctcacaccgcgtgcaggtccccctgcagaccctctgcaccaaagctcctagtgaggaggacagcctgtcctctgtacccatttctccctataaagatgaaccctggaaatatctggaaagcgaggaataccaagagaggtacggaagtagacctgtctgggcggactaccgcagaaaccataaggggggtgtgcccccacagcgaacccggaagacttgcattcggcgaaacaaggtggtgggtaatccgtgtccaatttgcagggaccacaaactccacgtcgactttcggaacgtaaagttactggaacaattcgtgtgcgcacacaccggcattatcttctatgctccctacacaggcgtgtgtgtgaaacagcacaagcgtctgactcaagcaatccaaaaggccagagatcacggtcttctcatttatcacattcctcaagtcgaacctagagatttggacttttctacaagccatggggccgttagcgccaccccgcccgctcctacccttgtgagcggtgatccttggtacccttggtacaattggaagcagccaccagagagggaattatcaaggcttcggagactgtatcagggccacctgcaagaggaatccgggccaccacctgaaagtatgccaaaaatgcctcctaggactcctgccgaagcctcatctaccggccagactggacctcagtctgcgctttag

SEQ ID NO: 177665 - DNA, 648 bp, Artificial Sequence
  derived and/or modified sequence
atggctgcctccgtgctcaacaccgtgctgaggcggctgcctatgttgagcctatttcggggctcacatcgcgttcaagtaccgctccagacgctgtgcacgaaagcgccaagtgaggaggactctctttctagcgtccccatttcaccctataaggatgagccttggaaatatctggagtccgaagagtaccaggaaagatatggatctagacctgtgtgggcagattacagacgcaatcacaaaggaggtgtccctcctcagcgcactagaaagacatgcattaacgttaaactcctggagcagttcgtgtgtgctcacaccggcatcattttctacgcgccctatactggccttctgatctaccatataccccaagtggagccaagagatttagatttcagcacatcacacggcgcagtgtcagccacccccccggctccaactctcgtgtccggggacccctggtatccttggtacaactggaagcagccaccagagcgggagctcagtagactccggagattgtatcaaggtcacttgcaggaagagtccggtcccccgcccgaaagcatgcctaagatgcccccacgaactcctgccgaggctagtagcactggccagaccgggccccagtccgccctctag

SEQ ID NO: 177666 - DNA, 648 bp, Artificial Sequence
  derived and/or modified sequence
atggccgcttcggtgttaaacactgtgctccgccggctgcccatgttgtctcttttccgcggtagtcatagagttcaggttccattgcaaactctctgtaccaaagcaccttccgaggaggattcattgagctcagtgccaatctctccatataaagatgagccttggaagtacctcgagtctgaggagtaccaggagcggtatggcagtcgccccgtgtgggctgactatcgcagaaatcacaaagggggcgtgccgccacagcggacgcggaagacctgtatcaacgtcaagctgctcgaacagttcgtctgcgcacataccggcattatattttacgcgccttatactggactgcttatttatcatattccacaggttgaaccacgggatctcgattttagcacgtcacatggagccgtgtcggccacccctcctgcccctaccctggtgtcgggagatccctggtatccgtggtataactggaagcagccccccgagcgggagttgtccagactccgacggctctatcaaggacatctgcaggaggagtctggccccccccccgaatccatgccaaagatgccaccaaggacaccagcagaggccagctctacaggccagacggggcctcagtctgctttatag

SEQ ID NO: 177667 - DNA, 777 bp, Artificial Sequence
  derived and/or modified sequence
atggccgcgagcgttctcaacacggtcctgagacgccttcctatgctgtccttgttccggggctcacatcgggtccaggtgcccttacagactctgtgtactaaagcgccttctgaggaagattcactcagctccgtgccaatctcgccatacaaggacgaaccgtggaaatacctggaaagcgaagagtaccaagaaaggtacggctcgcgaccagtgtgggcggactaccgtcggaatcacaaggggggtgtgcccccgcaaagaaccaggaaaacctgcattaggagaaacaaggtggtaggaaatccatgtcctatctgtcgtgaccataagcttcatgtggatttccgcaacgtcaagcttctggagcagttcgtatgcgcccatacaggaatcatcttctatgcaccctacaccggggtgtgcgtaaagcaacacaaacgccttactcaggccatacagaaagcccgggatcacggcttgctaatataccacatcccgcaggtggagccaagagatcttgacttttcaacttcgcacggcgctgtcagtgcgacgccccccgcacctactcttgtgtccggcgacccgtggtacccatggtacaattggaaacagccccctgagagagaactctctcggctaagacgactgtatcagggccatctccaagaggaaagcggaccccccccggagtctatgcccaaaatgcctcctcgaacaccggccgaggctagcagcaccgggcagacaggtccgcagagcgctctgtag

SEQ ID NO: 177668 - DNA, 777 bp, Artificial Sequence
  derived and/or modified sequence
atggcggcgagtgttcttaacactgttctgagacggctgcctatgctatctctcttcaggggcagccacagggtgcaggtgcctctccagaccctgtgtaccaaggctcctagtgaggaagactcactcagttcagtgcctatttcaccgtacaaagacgagccgtggaagtatctggaatctgaagagtaccaagaaagatacggctctcggcctgtgtgggcagactatcggcgtaaccataaaggtggtgtcccaccacagcgtacccgcaaaacatgcattaggcggaacaaagtcgtgggcaacccttgcccgatctgcagagaccacaagttgcatgtagactttcggaatgtcaaactgttggaacagttcgtttgtgcacacacaggtatcattttttacgcaccatatactggcgtgtgtgtgaagcagcataaaaggttgactcaggctatccagaaagctcgcgatcatggattacttatttaccatatcccccaggtagaaccccgggatctggatttttctacatctcacggggccgtctcggccactcctccagcacctacactcgtgagtggggacccttggtacccttggtataattggaaacaaccgcctgaaagagagctcagccggctacgcaggctctaccagggccacttacaggaggagagtgggccacctccggagagcatgccaaaaatgcctccccggacgcccgcagaggctagtagcacgggccagactggcccccaaagcgccctgtag

SEQ ID NO: 177669 - DNA, 777 bp, Artificial Sequence
  derived and/or modified sequence
atggccgcctctgtgctgaacacagtgctgcggcggctgcccatgctgagcctcttccggggcagccaccgggtgcaggtgcccctgcagaccctgtgcaccaaggcccccagcgaggaggacagcctgagctctgtgcccatcagcccctacaaggatgagccctggaagtacctggagagcgaggagtaccaggagagatatggcagcaggcctgtgtgggccgactacagaagaaaccacaagggcggcgtgcccccccagaggaccaggaagacctgcatcagaagaaacaaggtggtgggcaacccctgccccatctgccgggaccacaagctgcacgtggacttcagaaatgtgaagctgctggagcagtttgtgtgtgcccacacaggcatcatcttctacgccccctacacaggagtgtgtgtgaagcagcacaagaggctgacccaggccatccagaaggcccgggaccacggcctgctgatctaccacatcccccaggtggagccccgggacctggacttcagcaccagccatggagctgtgtctgccaccccaccagcccccaccctggtgtctggggacccctggtacccctggtacaactggaagcagcccccagagcgggagctgagccggctgcggcggctgtaccagggccacctgcaggaggagagcggccccccacctgagagcatgcccaagatgccacccaggaccccagctgaggccagcagcacaggccagacaggcccccagagcgccctgtag

SEQ ID NO: 177670 - DNA, 648 bp, Artificial Sequence
  derived and/or modified sequence
atggccgcctctgtgctgaacacagtgctgcggcggctgcccatgctgagcctcttccggggcagccaccgggtgcaggtgcccctgcagaccctgtgcaccaaggcccccagcgaggaggacagcctgagctctgtgcccatcagcccctacaaggatgagccctggaagtacctggagagcgaggagtaccaggagagatatggcagcaggcctgtgtgggccgactacagaagaaaccacaagggcggcgtgcccccccagaggaccaggaagacctgcatcaacgtgaagctgctggagcagtttgtgtgtgcccacacaggcatcatcttctacgccccctacacaggcctgctgatctaccacatcccccaggtggagccccgggacctggacttcagcaccagccacggggctgtgtctgccaccccaccagcccccaccctggtgtctggggacccctggtacccctggtacaactggaagcagcccccagagcgggagctgagccggctgcggcggctgtaccagggccacctgcaggaggagagcggccccccacctgagagcatgcccaagatgccacccaggaccccagctgaggccagcagcacaggccagacaggcccccagagcgccctgtag

SEQ ID NO: 177671 - DNA, 1532 bp, Artificial Sequence
  derived and/or modified sequence
agcttctcccccatgccttccctttcacgcttccgtcctgacgcaaacgtggggccgccttccgcactgcgggcttgtccttggccctgccctactcagtttcctgaagcatgcgcagttgcctttccgtcaattcctgtcctgggcgtacgtcaagatggcggcgtctgtattaaacaccgtgctgaggcggcttcctatgctatctctcttccgaggttctcacagagttcaggttcccctccagactctttgcaccaaagctccctctgaggaagattctttgtcctcagttcccatttctccttataaggatgagccctggaaatatctggaatcagaagaataccaggagcgatatggttctcgccccgtctgggctgactaccgccgcaaccacaagggtggtgtacccccacagcggactcggaagacatgtattcgtcggaataaagttgttgggaatccctgccccatctgtcgagatcacaagttgcatgttgactttaggaacgtgaagctcttggagcaatttgtctgcgcccacacgggtatcatcttctatgctccatacacaggagtctgtgtgaagcagcacaagcggttgacccaggccatccagaaagccagggatcatggtctcctcatttaccacatcccccaggttgaaccacgggaccttgacttcagtacctctcatggggctgtgagtgctactccgccagcccccaccctggtctcaggtgacccctggtacccatggtacaactggaaacagccaccggagagagaactgtctcgccttcgccggctttaccagggtcatctccaagaagagagtggccccccacctgagtcaatgcccaagatgccccctagaacaccagcggaagcctcctccactgggcagacaggccctcagagtgctctgtaggagctgtagactgggaagagaggccaggcgtggtggctcactcctgtaatcccagcactttgggaagccaaggtgggctgatcacttgatcccaggagtttgagaccagcctgggcaccatggtgaaacctcgtctttaccaaaaaatacaaaaattagctgggtgtggtggtgcacacctgtagtctcaactattggggaggctaaggtaggatcacttgatcccaggaggcggaggttgcagtgagttgcagtcacacccctgcactccagcctgggtgacagctagaccctgtctcaaaaaaaaaaaaaaagactgggaagagagctagagggactaggagataatgtgtatgtaggtttatgtgatgggatatcaccctgaagagttgtgtcttttgtggccagtgacaaatccaggaaatgaatgttgctgatagggataaatcttgaggctgagggcgggtggtacagatgtgtatgggaaaccccaacccctatatattgtaaatagatgggctgggctaaacattgttgccgtttcatacttctaccaactcagcttttacacaataaagctctactgtctctggtttgc

SEQ ID NO: 177672 - DNA, 1252 bp, Artificial Sequence
  derived and/or modified sequence
gtcaagatggcggcgtctgtattaaacaccgtgctgaggcggcttcctatgctatctctcttccgaggttctcacagagttcaggttcccctccagactctttgcaccaaagctccctctgaggaagattctttgtcctcagttcccatttctccttataaggatgagccctggaaatatctggaatcagaagaataccaggagcgatatggttctcgccccgtctgggctgactaccgccgcaaccacaagggtggtgtacccccacagcggactcggaagacatgtattaacgtgaagctcttggagcaatttgtctgcgcccacacgggtatcatcttctatgctccatacacaggtctcctcatttaccacatcccccaggttgaaccacgggaccttgacttcagtacctctcatggggctgtgagtgctactccgccagcccccaccctggtctcaggtgacccctggtacccatggtacaactggaaacagccaccggagagagaactgtctcgccttcgccggctttaccagggtcatctccaagaagagagtggccccccacctgagtcaatgcccaagatgccccctagaacaccagcggaagcctcctccactgggcagacaggccctcagagtgctctgtaggagctgtagactgggaagagaggccaggcgtggtggctcactcctgtaatcccagcactttgggaagccaaggtgggctgatcacttgatcccaggagtttgagaccagcctgggcaccatggtgaaacctcgtctttaccaaaaaatacaaaaattagctgggtgtggtggtgcacacctgtagtctcaactattggggaggctaaggtaggatcacttgatcccaggaggcggaggttgcagtgagttgcagtcacacccctgcactccagcctgggtgacagctagaccctgtctcaaaaaaaaaaaaaaagactgggaagagagctagagggactaggagataatgtgtatgtaggtttatgtgatgggatatcaccctgaagagttgtgtcttttgtggccagtgacaaatccaggaaatgaatgttgctgatagggataaatcttgaggctgagggcgggtggtacagatgtgtatgggaaaccccaacccctatatattgtaaatagatgggctgggctaaacattgttgccgtttcatacttctaccaactcagcttttacacaataaagctctactgtctctggtttgc

SEQ ID NO: 177673 - DNA, 1213 bp, Artificial Sequence
  derived and/or modified sequence
gtcctgggcgtacgtcaagatggcggcgtctgtattaaacaccgtgctgaggcggcttcctatgctatctctcttccgaggttctcacagagttcaggttcccctccagactctttgcaccaaagctccctctgaggaagattctttgtcctcagttcccatttctccttataaggatgagccctggaaatatctggaatcagaagaataccaggagcgatatggttctcgccccgtctgggctgactaccgccgcaaccacaagggtggtgtacccccacagcggactcggaagacatgtattcgtcggaataaagttgttgggaatccctgccccatctgtcgagatcacaagttgcatgttgactttagggagtctgtgtgaagcagcacaagcggttgacccaggccatccagaaagccagggatcatggtctcctcatttaccacatcccccaggttgaaccacgggaccttgacttcagtacctctcatggggctgtgagtgctactccgccagcccccaccctggtctcaggtgacccctggtacccatggtacaactggaaacagccaccggagagagaactgtctcgccttcgccggctttaccagggtcatctccaagaagagagtggccccccacctgagtcaatgcccaagatgccccctagaacaccagcggaagcctcctccactgggcagacaggccctcagagtgctctgtaggagctgtagactgggaagagaggccaggcgtggtggctcactcctgtaatcccagcactttgggaagccaaggtgggctgatcacttgatcccaggagtttgagaccagcctgggcaccatggtgaaacctcgtctttaccaaaaaatacaaaaattagctgggtgtggtggtgcacacctgtagtctcaactattggggaggctaaggtaggatcacttgatcccaggaggcggaggttgcagtgagttgcagtcacacccctgcactccagcctgggtgacagctagaccctgtctcaaaaaaaaaaaaaaagactgggaagagagctagagggactaggagataatgtgtatgtaggtttatgtgatgggatatcaccctgaagagttgtgtcttttgtggccagtgacaaatccaggaaatgaatgttgctgatagggataaatcttgaggctgagggcgggtggtacagatgtgtatgg

SEQ ID NO: 177674 - DNA, 777 bp, Artificial Sequence
  derived and/or modified sequence
atggccgccagcgtgctgaacaccgtgctgcggcggctgcccatgctctcactatttagaggctctcacagggtacaggtgccccttcagactttatgcactaaggccccctctgaagaggatagtttgtccagtgtacccatctcgccttataaagatgagccctggaagtatctggaatctgaagaataccaagaaaggtatgggtcccggcccgtgtgggccgattatcgacggaatcacaagggaggtgtccccccacagcggacaagaaagacttgtattagacgtaacaaagtggtcgggaatccttgtccaatatgccgggaccacaaactgcacgttgactttcgcaacgtgaaattattggaacagttcgtgtgtgcccatacaggtataatcttctacgccccatatacgggtgtgtgcgtgaagcagcacaagcgtcttacacaagctatacagaaggcacgagatcacgggctactaatttatcatattccgcaagtcgaaccccgtgatctggacttttccacaagccacggtgccgtaagcgccacgcccccagctccgaccctcgtgtctggcgacccgtggtacccatggtacaactggaagcaaccacctgagagggagctgtcgagactgcggaggctgtaccagggtcacttgcaggaggaatccggccctccgcccgagagtatgccaaaaatgcctccacgcaccccagctgaggccagttccactggacaaaccggtccacagagcgcactctag

SEQ ID NO: 177675 - DNA, 777 bp, Artificial Sequence
  derived and/or modified sequence
atggccgccagcgtgctgaacaccgtgctgcggcggctgcccatgttgagccttttcagagggagccatcgcgtgcaggtaccgctgcagacgctctgcaccaaagcaccgagtgaggaagattcactctccagcgttccaatctccccttacaaagacgaaccctggaagtatttggaatctgaggagtaccaggagcggtatggcagtcggcccgtgtgggcggactaccggcgcaaccacaagggcggggttccacctcaacgcactcgaaagacttgtattaggcggaataaggttgtgggaaatccctgccctatttgccgggatcacaagctgcatgtggatttccggaacgtgaagctgctagagcagttcgtatgcgctcacactggcataatcttctatgctccttacacaggggtctgcgtgaaacagcataaaagactgacacaggctatccaaaaagctcgcgaccatgggctactgatctaccacatcccgcaggtcgagcctagggacctggattttagcacatcccacggagccgtgtctgctactccccccgctccaacactggtctcaggcgacccatggtacccctggtacaattggaagcagccacctgagagggagctgagtaggctgcgcagattgtaccagggacacttgcaggaggagtcagggcccccaccagagtccatgcccaagatgccgccacgcaccccagccgaagcgagttccacaggtcagaccggtcctcagtctgcactctag

SEQ ID NO: 177676 - DNA, 648 bp, Artificial Sequence
  derived and/or modified sequence
atggccgccagcgtgctgaacaccgtgctgcggcggctgcccatgctctccctgtttcggggctcacaccgggtgcaggtgcccctgcaaaccctgtgtactaaagcccctagcgaggaggattcgctgtcttccgtgcccatatctccttacaaagacgaaccatggaaatatctagaatcggaggagtaccaggagaggtatggctccagacctgtgtgggccgactacaggcgaaatcataaaggaggcgtccctcctcagcgaacccggaagacttgtatcaacgtcaagcttctggagcagttcgtgtgcgctcatacggggatcatcttctacgctccctacaccggcctgctcatatatcacatcccacaggtcgagccccgagatctggacttctcaacttcccacggggccgtgtccgctactccccccgctcccacattagtgtccggcgacccttggtacccatggtataattggaaacagcctcccgagagagaactgagcagacttaggaggctgtaccaaggccatctccaagaggagtccgggccgcccccagagtctatgcctaaaatgcctccacgaactcctgccgaggcatcctctacaggtcagaccggcccacagagtgccctgtag

SEQ ID NO: 177677 - DNA, 648 bp, Artificial Sequence
  derived and/or modified sequence
atggccgccagcgtgctgaacaccgtgctgcggcggctgcccatgctcagcctttttagggggtcccacagagtgcaggtcccactgcagacactttgcaccaaggcgccgagtgaagaggatagcttgtcctctgtacccatttctccatacaaggacgaaccctggaagtaccttgaaagtgaagagtatcaggaacggtatggatcccgcccggtttgggccgactatcgtcgtaatcataagggaggcgtaccaccgcagcggactagaaagacatgtatcaatgtgaagctgctggagcagttcgtctgcgcgcatacaggcatcatcttctacgcaccctacacaggacttctcatctaccatattccgcaggtcgaacctcgcgacctggacttctccacatctcacggagcagtgtctgccaccccccccgctcccaccctggtcagtggagatccctggtatccatggtacaactggaaacagccacctgagagggaactgtcacggctacgcagactgtatcagggccatttgcaggaggagagcgggcctcccccagagagcatgccaaagatgcccccacgcacccctgctgaagcttcttcaacgggacaaacaggcccacagtcagccctctag

SEQ ID NO: 177678 - DNA, 777 bp, Artificial Sequence
  derived and/or modified sequence
atggccgccagcgtgctgaacaccgtgctgcggcggctgcccatgctttccctgtttcgcggtagtcatcgcgtacaggtgcccctccagacactgtgtacaaaggcaccatcggaagaggattccctgagcagtgtgccgatttcgccttacaaagacgagccttggaaatacttggagagcgaggagtaccaggagcgctacggctctcgacctgtgtgggcagattaccggaggaaccacaaaggaggggtccccccacagcggaccagaaaaacatgtatccggcgcaataaggtcgtgggcaacccttgtccaatttgcagggaccacaaactccacgttgactttcggaatgtcaagctcctggagcagtttgtctgcgcccacacagggatcatattctacgcaccttatacgggcgtctgcgtgaaacagcataaacgcctgacccaggccatccagaaggcgagggaccacggtctgctcatataccatattccccaagtggagccccgcgatttagactttagtacctcccacggcgccgtgtccgcgacaccccccgcccccacactggtgtcaggagacccttggtatccatggtacaattggaagcagcctcccgaacgcgagttgagcagattgagaaggttataccagggacatcttcaagaggaatcgggtccacccccggagagcatgccaaaaatgccccccagaacacccgccgaggcctcctcaacaggacagaccgggcctcagtccgctctttag

SEQ ID NO: 177679 - DNA, 648 bp, Artificial Sequence
  derived and/or modified sequence
atggccgccagcgtgctgaacaccgtgctgcggcggctgcccatgttgtctctgttcaggggcagtcaccgcgtccaggtaccactacagacactctgcaccaaggcgccatccgaggaggattcactctccagcgttccaatctccccctacaaggacgagccttggaagtatctggagagcgaggagtaccaggagagatatgggagtcgaccggtgtgggccgattataggcggaaccacaaaggcggggtccccccacaaagaacacgtaagacctgcataaacgtaaagctgctagagcaattcgtctgtgcccacactggcataatcttttacgcgccgtatactggtcttctgatttaccatattccacaggtcgagccgagggaccttgacttttccacaagccacggggccgtctctgccactccgccagctcccactctggtgagcggtgacccctggtatccatggtataactggaaacagcccccggaaagagagctctcccgactgcgacggctctatcaaggacacctgcaggaagagtcgggccccccccccgaatccatgcctaagatgccacccaggacccctgctgaagcaagctccaccggtcagactggacctcagagtgccctgtag

SEQ ID NO: 177680 - DNA, 648 bp, Artificial Sequence
  derived and/or modified sequence
atggccgccagcgtgctgaacaccgtgctgcggcggctgcccatgttgtctctattccgcggctcccacagagtgcaggtaccattgcagactctgtgcaccaaggccccctccgaggaagattcattatcctcggtgcccatctcaccatacaaggacgaaccttggaaatacctcgaatccgaggaataccaggaacggtacggttctcgccctgtctgggctgactatagaaggaaccacaagggcggcgttcctccccagcggacccgaaagacttgtatcaatgttaagcttctggaacaattcgtgtgcgctcatactggcattatcttttacgccccgtataccggtctgctgatttaccatattccccaagttgaacctagggacctggacttttcaacctcacacggagcagtgtcagcaacccctccggcacccaccctggtctccggggatccttggtacccttggtataactggaagcagccgcccgaaagagaactgagtcgtctccggaggctctatcagggacatttacaggaggagagtgggcctccaccagaatccatgcccaagatgccccctaggacgcctgctgaggcctcatctaccgggcagactggcccacagtctgccctatag

SEQ ID NO: 177681 - DNA, 777 bp, Artificial Sequence
  derived and/or modified sequence
atggccgccagcgtgctgaacaccgtgctgcggcggctgcccatgctgagcttattccgggggagtcaccgggtgcaggtgccactccagactttatgcacgaaggctccctccgaagaggatagtctgagtagtgtcccaatctcgccatacaaggatgaaccctggaagtacctggaaagcgaagaataccaggagcgatatgggtcccgccccgtctgggccgattatcgacgtaatcataagggcggcgtgcccccacaaaggaccaggaagacctgcatccgccgcaacaaggtcgttggcaacccctgcccaatatgccgggaccataagctccatgtagacttccgcaatgttaaattattggaacaatttgtttgcgctcacacaggcatcatattctatgcaccctacaccggcgtttgtgtgaagcaacacaagcgtctgacccaagccatccagaaggcccgagatcatggactgctgatctatcacatccctcaggtggaaccccgcgacctggacttttccactagtcacggcgctgtgagtgcaaccccgccagcccccacccttgtctcaggtgacccttggtacccctggtataattggaaacagccacccgaacgtgagttatcacgccttcgtaggctgtaccagggtcacctacaagaagaatctggtccaccaccagaatccatgccaaagatgccaccacggacaccagctgaggccagctcgacggggcagactggcccccagtccgcactatag

SEQ ID NO: 177682 - DNA, 648 bp, Artificial Sequence
  derived and/or modified sequence
atggccgccagcgtgctgaacaccgtgctgcggcggctgcccatgcttagtttgttccgaggtagccaccgggtgcaagtgcctcttcagacgctctgcactaaagctccttcagaagaggattccctttcctcagtacccatttccccctataaagacgaaccttggaagtaccttgaaagtgaagagtatcaggagcgttacggctctaggccggtctgggccgattatagacgaaaccacaagggaggcgtgcctccccagaggaccaggaagacttgtatcaacgtgaaactgctcgagcagttcgtttgcgcacacaccggaattatattttatgccccgtacacaggcctgctgatttaccacatccctcaggtagagccaagagatctcgacttttccacatcccacggtgccgtttctgcaactccacccgccccaactctcgtgtctggcgatccttggtacccttggtacaattggaaacagccccccgagcgagaactgtctcggctccgcagactttaccagggccacctgcaggaggaatccggcccccccccagagagtatgccaaaaatgccccccaggacgccagctgaagcatcctctaccggtcagaccggtccacagtctgccttatag

SEQ ID NO: 177683 - DNA, 777 bp, Artificial Sequence
  derived and/or modified sequence
atggccgccagcgtgctgaacaccgtgctgcggcggctgcccatgctctcactttttcggggttcacaccgagtgcaggtgcccctccagaccctttgtactaaggcaccttctgaagaagattctttgtcatcggtgcccataagcccctataaggatgagccttggaaatacctggagtcagaggagtatcaagagaggtatggttcccgccccgtgtgggccgactaccggaggaatcataaagggggtgttccacctcagagaacacgcaagacatgtattcgacggaacaaggtggttggcaacccttgtccaatttgcagagatcacaaactccacgtggacttcaggaatgttaagttgctggagcagttcgtttgtgcacatacaggcatcattttttatgccccttacaccggtgtctgcgtcaagcagcataagcgcctgacccaggctattcaaaaggccagagaccatgggctgctcatatatcacattcctcaggtggagcctcgcgatttggatttttcaacctcacatggtgcagtgtccgccactccaccagcacctacactcgtatccggcgacccttggtacccttggtataattggaaacagcctccagagagagaactgagccggctacggcggctgtatcagggccacttacaggaagaaagcgggccacctcccgagtcaatgcctaagatgccaccaaggacacctgcggaagcaagcagcaccggccagactggtccccagtccgccttatag

SEQ ID NO: 177684 - DNA, 648 bp, Artificial Sequence
  derived and/or modified sequence
atggccgccagcgtgctgaacaccgtgctgcggcggctgcccatgctttcactgtttaggggctctcatcgggtccaggtgcctttgcagacactctgtacaaaggcaccatccgaagaggactccctgagttccgttccaatttcaccttacaaagatgaaccctggaagtatctggaatccgaagagtaccaggaaaggtacggttccaggcccgtctgggccgactaccgaaggaaccataaagggggggtcccccctcagcggactcgcaagacttgtattaacgtgaagctgctggaacagttcgtgtgcgcacatacaggcattatcttctatgccccatatactggtctactcatatatcacattccacaagtcgagcccagagacctggatttctccacttcccacggagcagtctcagccactccccctgcaccaacactggtaagcggtgacccttggtatccatggtacaactggaaacagccacccgaaagagaattgtcacgattaaggcgcctataccagggacacctacaagaggaatcaggccccccaccagagtctatgcctaaaatgcccccacgaactccagcagaggcctcaagcacaggacagacgggcccacagagcgcactctag

SEQ ID NO: 177685 - DNA, 648 bp, Artificial Sequence
  derived and/or modified sequence
atggccgccagcgtgctgaacaccgtgctgcggcggctgcccatgctgtccctatttagagggtcccacagggtgcaggtgcctctccagacgctctgcacaaaggcgccctccgaggaggactcattatctagcgtgcctatatctccctataaggatgagccctggaagtacttagagtccgaagaataccaggaaaggtacggcagtcgaccagtttgggccgactataggagaaatcacaaagggggtgtgcctcctcagagaacacgaaagacttgcattaatgtgaagctcctggagcagtttgtttgtgcccatacaggtatcatcttctacgccccatacacaggcctgctgatttaccacatccctcaggtcgaaccaagagatcttgacttttctacctctcacggcgctgtatctgctactccccctgccccaaccctggtgtccggcgatccctggtacccttggtacaactggaagcagcctcccgaacgcgagttgtcgcgcctccgccgtctgtaccagggccatcttcaggaggagtccgggccccccccagaatcaatgcctaagatgccacctcgcactccggccgaagcaagtagtaccggacagacaggaccacagtcagctctctag

SEQ ID NO: 177686 - DNA, 777 bp, Artificial Sequence
  derived and/or modified sequence
atggccgccagcgtgctgaacaccgtgctgcggcggctgcccatgctctctctattcagggggtctcaccgcgtccaggttccccttcagacactctgtaccaaggctccctccgaggaagatagcctgtcctctgtcccaatttctccatacaaggatgagccctggaagtacctggagtccgaggagtatcaggagagatacggaagccggcccgtttgggctgactatcggcggaatcacaagggaggagtgccaccccagcgtacacgcaaaacttgtattcggcgcaataaagtggtgggcaacccctgtccgatctgccgcgatcataaactgcatgtagatttccgcaatgtgaaactcctggagcagttcgtgtgcgcccacactgggattatcttctacgctccatatacgggggtttgtgttaaacaacacaaaaggttgacccaggcaatccagaaggcccgtgatcacggactgctgatttaccacatccctcaagtagaaccaagggacctggatttcagcacctcacacggtgcagtgagcgcaacaccgcctgctccaactctcgtgtccggcgacccttggtatccttggtataactggaaacagcctccagagagagagctttctagactgcggaggctctaccaagggcatctacaagaagagtctggacccccccccgagtccatgccgaagatgcctccaagaaccccggccgaggccagctccactggccagactggccctcagagcgccctttag

SEQ ID NO: 177687 - DNA, 777 bp, Artificial Sequence
  derived and/or modified sequence
atggccgccagcgtgctgaacaccgtgctgcggcggctgcccatgttgagcctttttcgaggctctcatcgagtgcaagtaccgcttcaaacgctgtgcaccaaagccccctctgaggaagattccctctcatccgttcctataagcccttataaagacgagccgtggaagtatctggagtctgaggaataccaggagcgatacgggagccggcctgtgtgggccgactatcggagaaaccataagggcggtgtacctcctcaacgcacacgaaagacatgcatccgccgtaacaaggtcgtaggaaatccctgtccaatttgtcgtgaccacaaactgcatgtggacttcaggaacgtcaagctactggaacagttcgtgtgcgctcacacaggtatcatattctacgcaccatacacaggtgtatgcgtgaaacagcataagcgattaactcaggccatacaaaaggcccgagaccatggcctgctcatttaccacatccctcaggtggagccacgggacctggatttcagcacatctcacggagctgtgtcggcgacgccacctgcccctacgctcgtgtctggagacccctggtatccttggtacaattggaaacagccccctgaaagagaactttctcgcctgcgaaggctataccagggccatctccaagaggagtctgggccaccccccgagagcatgcctaaaatgcctcctaggactcccgccgaggcttcctcgacagggcaaacaggaccacagagtgccctgtag

SEQ ID NO: 177688 - DNA, 777 bp, Artificial Sequence
  derived and/or modified sequence
atggccgcttccgtgctgaacacggttttaagacggttgccaatgctttccctttttcggggatcacaccgggtgcaggtgcctttacagaccctgtgtacaaaggcgccatctgaagaagactctttatcgtcagttccgatttcaccctataaggatgagccctggaagtatctcgagagtgaggaataccaggaaagatacggctcacgcccagtgtgggcagactatcggaggaatcacaagggcggagtgcccccacagcgaacaagaaaaacatgcattaggcgaaacaaagtggtggggaatccctgcccaatatgcagagaccacaaactgcacgtggactttcgaaacgtgaagctgttggaacagttcgtatgtgcgcatacgggcatcattttttacgcaccctacacgggtgtgtgtgttaagcagcataaaagactgacccaggcaattcagaaggccagggatcatggattgttgatctaccacatcccacaagtggaaccacgggatctggacttctcgacgtcccatggagccgtctcagccacgcctccagcaccaaccttagtcagtggagatccctggtacccatggtacaattggaagcaacctcccgagcgggaactgagcagacttaggcgcctgtaccaagggcaccttcaggaggaaagtggcccaccacccgagagcatgcctaaaatgccgcctcgcacacccgctgaagcttcgtctactggtcaaactggcccacagtcggccctctag

SEQ ID NO: 177689 - DNA, 777 bp, Artificial Sequence
  derived and/or modified sequence
atggctgcatcagtgctcaataccgtgctgaggcgtctgcctatgctgtccctgttccgagggagtcatagagtgcaagtccccttacagactttgtgcacaaaggcgccaagcgaggaggattccctgtcttcagtgcctatcagcccatacaaagatgagccctggaaatacctggagtccgaagagtatcaagagaggtacggatctcgccctgtgtgggcagactaccgaagaaaccataaaggaggggtaccaccacagaggacaaggaagacctgtattagacgaaacaaggtcgttgggaacccatgccctatctgtagggatcacaaactccacgtagatttccgcaacgtgaaactactcgagcagttcgtgtgcgcccacactggtatcatattctatgccccttatactggagtgtgcgtgaagcagcacaaacgcttgactcaggcgatacagaaggcccgtgatcacggactgctaatctaccatattccacaggtggagccccgtgacttagatttcagcacaagccatggcgcagttagcgccacacctccagccccaacattggtttccggcgacccgtggtatccgtggtacaattggaaacaacctcctgaacgtgagttatctcgcctcagacggctttaccagggccacctacaggaagagagcggccctccacctgagagcatgccaaaaatgccaccgcgaacacctgccgaagctagctccacgggacagactggccctcagagcgccctgtag

SEQ ID NO: 177690 - DNA, 648 bp, Artificial Sequence
  derived and/or modified sequence
atggcggcatccgtgctcaacaccgtgctgagaaggctgcccatgttatctctcttcaggggcagccatagggtccaggtcccactgcaaacattgtgcaccaaagcgcctagcgaggaggatagtttgtcctctgtgcccatttcaccctacaaagacgagccttggaaatacctggagtcagaggaatatcaggaacgttacggaagtcggcctgtctgggctgactacaggcgaaatcacaaaggcggtgtgccccctcagcggacccgaaagacgtgcattaatgtaaagctgcttgagcagtttgtctgcgcacacaccgggattattttctacgcgccttataccgggctgttgatctatcacatccctcaggttgagcccagggacctagacttttctacgtcacatggcgcagtgagcgctaccccacctgcacctaccctcgtgagcggagacccatggtatccttggtacaattggaaacaaccccctgaacgggaactgtcgaggctgcgccgtctttaccaaggacatctgcaggaggaatcggggcctccaccggagagcatgccaaaaatgccccctcgaactcccgcagaagcctcatccacagggcagaccgggcctcaaagcgccctgtag

SEQ ID NO: 177691 - DNA, 648 bp, Artificial Sequence
  derived and/or modified sequence
atggctgcgtcagttcttaacacagtcctgcgtcgcctgccaatgctgagccttttccggggatcacacagggtacaggttcctttgcagacgctgtgtactaaagctcctagcgaggaagacagcctaagcagcgtgcccatctctccgtataaagacgaaccttggaagtacttagaatccgaagagtatcaagaacgctacggctcccgcccagtgtgggctgattatagaaggaaccacaaaggaggagtccccccacagaggaccagaaagacctgcattaatgtgaagttattggagcaatttgtatgtgcccacacaggtatcatcttttacgcaccatacaccgggctgctgatttatcacatcccacaggtggaaccacgggacctcgatttctcaactagccacggggctgtgtctgccacccctccagcacccactctcgtctctggtgacccctggtatccctggtataattggaagcaacctcccgagcgcgaattatctagactgcgcaggttataccagggccaccttcaggaggaatccgggcctcctccggagagcatgcccaagatgccccctcgaaccccagccgaggcgtcctccactggtcagactggaccgcagagcgctctgtag

SEQ ID NO: 177692 - DNA, 777 bp, Artificial Sequence
  derived and/or modified sequence
atggcagcttcggtgttaaataccgtcctccggagactccctatgctgtctctctttcggggatcccacagagttcaagtgcctctgcagaccttgtgcacaaaggcaccaagtgaggaagactcactgtcatcagtgccaatctctccctacaaagacgagccgtggaaatacttagagagcgaggaataccaggaacggtatggttctaggccggtatgggctgattaccggcgtaaccataaaggaggtgtgcctcctcagagaacacgcaagacctgtattagacgcaataaggtggtgggaaatccctgcccaatctgtcgagatcacaagcttcacgtagactttaggaacgtgaaactgctagaacagtttgtgtgtgctcacaccggaataatcttttacgcaccgtacaccggcgtttgtgttaagcagcacaagagactgactcaggccattcagaaagccagagatcatggtctgctcatctaccacattcctcaggtggagcccagggatctggacttcagcacgtcccacggggctgtcagtgccactccacccgcacccaccttagtatccggcgacccttggtacccttggtataactggaagcaaccacccgagagggagcttagcagattgagacggctctaccagggccacctgcaggaagaaagcggcccacccccagaatccatgccaaagatgcccccacggacacccgcagaagcaagtagcacggggcagaccggccctcagagcgcgctgtag

SEQ ID NO: 177693 - DNA, 648 bp, Artificial Sequence
  derived and/or modified sequence
atggctgcaagtgtcctcaacacagtgttgcgcagactgcccatgctgagcttattccgaggcagtcacagggtgcaagtgccacttcagactctctgtaccaaagccccatccgaagaagacagcctgagctcagtccccatatcaccctacaaggacgagccatggaaatatctggaatccgaggagtaccaggagaggtacggatcccgcccagtgtgggctgattacagacgcaatcacaaaggcggtgtcccaccccagcgaacccggaagacgtgtatcaacgttaagctgttggagcaattcgtttgcgcacacactggaatcatcttctacgcaccgtacaccggactgttaatctaccatatcccccaggtagagccccgagacttggacttttccacttcacatggcgcagtgagcgctacaccgcctgctcctactctcgtgtctggagacccgtggtacccttggtacaattggaagcagcctcccgagagagaattatcccgtctgcggagactctatcaggggcacctccaggaggaaagtggtcccccacctgagtctatgcccaagatgccgcctcggactcccgctgaggcttcgtcaacaggccagactgggccacagtcagccctgtag

SEQ ID NO: 177694 - DNA, 648 bp, Artificial Sequence
  derived and/or modified sequence
atggctgcgagtgtactgaataccgtcttgcggagactgccgatgctttctctcttccggggtagtcaccgcgtgcaggtgccactgcagactttatgtacaaaagctccatctgaagaggatagtttaagtagcgttcctatcagtccctacaaggatgagccctggaagtatctggaatcagaagaataccaggaaagatatggatcacgacccgtttgggcggattaccgacggaaccataaagggggagtgcccccacaacgaacccgcaaaacctgcataaacgtgaaactgttggagcagtttgtgtgcgctcataccgggatcatcttttacgccccttataccggactgctcatataccacatcccccaggttgagccacgggacctcgacttcagcactagccacggagccgtgagtgccacacctccagcaccaacactggtgagcggtgacccatggtatccttggtacaattggaaacagcctccagaaagggagctttctagacttcgaaggttataccaggggcacctccaggaagagtctgggcctcctcccgaaagtatgcccaaaatgcctccacgtaccccggctgaagcctcctccaccggacagacagggcctcagtcagcactgtag

SEQ ID NO: 177695 - DNA, 777 bp, Artificial Sequence
  derived and/or modified sequence
atggcagccagcgtgctgaatacagttttacggaggctgccgatgctctcgctttttcgcggatcacacagggtccaagtgccactacaaactttgtgcaccaaggcacccagtgaagaagattctctctcttccgtcccaattagtccttataaagatgaaccatggaaatacctggaaagtgaggagtaccaggaacggtatggaagtcggccagtctgggcagattaccgaaggaaccacaagggtggtgtgcctcctcaacgtacccgcaaaacatgtataaggcgcaacaaagttgtgggaaacccttgccctatttgtcgcgaccataagctgcacgtggacttccgcaacgtgaaactgttagagcagttcgtctgcgcgcacaccggcattattttttacgccccttacaccggcgtctgcgtaaagcagcataagcgcctgacccaggccatccagaaagccagagatcacggactcctcatttaccatatcccccaagtagagccgagggatctcgacttcagcacttctcacggagcggtgtccgctactccgccagccccaactcttgtctctggggatccctggtacccatggtataattggaagcaacccccagagagagaactctctcgactaaggagactctatcaggggcatttacaggaggaatcggggccaccgcctgagtcaatgccaaaaatgcccccacggacccccgctgaggcctctagtactgggcaaacaggtcctcagtccgcactgtag

SEQ ID NO: 177696 - DNA, 648 bp, Artificial Sequence
  derived and/or modified sequence
atggcagcctccgtgttgaacaccgtgctgcgacggttgcctatgctgtctctcttccggggaagccatagggtgcaggtgccgctgcaaaccctttgcactaaggcaccctccgaggaggattccctgtcctcggtgccaattagcccgtataaggatgagccgtggaagtatctcgaatccgaggagtatcaggagcgctatggtagccgccctgtgtgggcggactatcggaggaaccataaaggcggagtgccccctcaacggacgcgaaaaacatgcatcaacgtcaagctccttgagcaattcgtttgcgctcacaccggcattatcttctatgctccatacacaggccttcttatataccacatcccccaggttgaacctagagatctggatttctctacgagtcacggcgctgtatccgctactcctccggcacctactctggtatccggtgatccctggtacccttggtacaactggaaacagcccccagaacgcgaattatcgcgcctgcgacgtttgtatcaaggacacttacaggaagaaagtggccctccccctgagagcatgccgaaaatgccaccccgtactccggctgaggctagttccactgggcaaacaggccctcagtctgctctgtag

SEQ ID NO: 177697 - DNA, 777 bp, Artificial Sequence
  derived and/or modified sequence
atggccgcttctgtcttgaataccgtgctgcgtcgactgcctatgctctcattgttcagaggtagtcaccgcgtccaggtgcccctgcagactctgtgtacaaaggccccatccgaagaggattccctgtcaagtgtgcctattagtccatacaaggatgagccctggaagtacctcgagagcgaggaatatcaggagagatacggatccaggcccgtctgggccgactacagaaggaaccataaaggtggggtgcctccccagagaacccgaaaaacctgcatacgtaggaacaaggtggttggaaacccctgtcctatttgcagagatcacaagctccacgtggattttaggaatgtcaagctgttggagcagtttgtgtgcgcccacaccgggatcatattttacgctccttacacaggggtgtgtgtgaagcagcacaagcggttgactcaagctatccagaaagcccgagatcacggcctgctgatctatcatattccacaagtggaaccacgcgacttggacttctcgacttcccatggcgcagtctcagcaactcctcctgctccaaccctggtgagcggcgatccctggtatccatggtacaactggaagcagcctccagaaagagagctgtctagactcaggagattatatcaagggcatttgcaggaagaaagcggccctcccccagaatccatgcccaagatgccaccaagaactccggcagaggcatcatccacgggtcagactggacctcagtcagccttgtag

SEQ ID NO: 177698 - DNA, 648 bp, Artificial Sequence
  derived and/or modified sequence
atggccgcaagtgtgctgaataccgtgctgaggaggttgccaatgctgtccctgttccgcggtagccaccgggtgcaagttcctttgcaaacactgtgcactaaagcaccaagcgaagaagatagtctctcctccgtcccgattagtccctacaaggacgaaccctggaagtacctagagagtgaggagtatcaggagaggtatggaagccgtccagtctgggccgattacaggaggaatcataaggggggagtgcccccacaaaggactaggaaaacttgtatcaatgtgaaactgctggaacagttcgtctgtgcccacaccggcattatattctacgccccttatactggcctgctgatttaccacataccccaggttgaaccgagagatcttgacttctccaccagccacggcgctgtttctgctaccccaccagcaccaacacttgtgtctggtgatccttggtacccgtggtataattggaaacagcctcctgagcgcgagctttcaaggctcagaagactttatcagggtcatctgcaagaggaaagcgggcctccccctgagtctatgcctaaaatgcctccacgtacgccggctgaagcctcatcaacaggccagacgggtccacaatctgcgctgtag

SEQ ID NO: 177699 - DNA, 648 bp, Artificial Sequence
  derived and/or modified sequence
atggcagcctcagtgttgaacaccgtcttgcgtcgcctacctatgttatcgctgttcagagggtcccaccgggtgcaggtgcctctccaaactctgtgcaccaaggctccatccgaggaggattccttaagcagcgtgccaatttccccttacaaggacgagccttggaagtatttggaatcagaggagtaccaggagcgttatgggagtcggcctgtttgggctgactacaggcgcaaccacaaagggggagtacccccacaaagaacccgcaagacgtgcatcaacgttaagctcctcgagcaattcgtttgcgcacataccggcataatattttacgctccctacacgggccttctcatatatcatataccacaggtggagccaagagacctggatttcagcacatcgcacggtgcagtaagcgctacgccacccgcacccacactggtcagcggtgacccctggtacccctggtacaattggaaacaaccacctgagcgagaactgtctaggttgagacgtttgtatcaggggcatctacaagaagaaagcggaccacctcctgagagcatgcctaagatgccccctagaacaccagcagaagcgagtagtaccggacagactgggccacagagtgctctgtag

SEQ ID NO: 177700 - DNA, 777 bp, Artificial Sequence
  derived and/or modified sequence
atggcagcctcagtgctgaatactgtgctccggaggcttccaatgctgtctttattcagaggatcacacagggtgcaggtgccactgcaaacactttgcaccaaggcgcctagtgaagaggactccctcagctccgtgccgatttcaccttacaaagacgagccatggaagtacttggagtccgaggagtatcaggagaggtatggatctcgtcccgtctgggcagactatcgtcggaaccataagggcggtgttcctccacaaagaacccgcaaaacctgcatcaggcgtaataaggttgtgggcaatccttgccccatatgccgagaccacaaacttcacgtggatttccgaaatgtgaaactacttgagcagtttgtgtgtgctcacactgggatcatcttctacgctccctatacaggagtgtgcgttaaacagcacaaaagactgactcaggccattcagaaggctagagaccacggactgctgatttaccatatcccacaggtagaaccacgagacctggatttcagtacctcacacggcgcagtcagtgctacacctcccgctcccaccctagtttctggcgatccatggtacccctggtacaattggaagcagcctccagagagagagctcagccgcctccgaaggttgtaccagggacatttacaggaagagtcgggacccccaccagagagcatgcctaagatgccgccacggaccccggcagaagcttcttctacagggcagacaggccctcaatctgcgctgtag

SEQ ID NO: 177701 - DNA, 777 bp, Artificial Sequence
  derived and/or modified sequence
atggcggcaagcgtgctgaataccgtgcttagaagactgccgatgctaagcctctttcgcggttcccacagggtccaagttcctctccagactctctgcaccaaggccccatcagaggaggacagtctaagcagcgtgcccatctctccctacaaagacgaaccatggaagtacctcgagagtgaggaatatcaagagagatacggatctcgtccggtgtgggccgactatagaaggaaccataagggcggtgtccctccgcagcgcactcggaaaacttgtattcgacggaacaaagtggtgggtaacccatgtcccatctgccgggaccataagctacacgtggactttcggaatgtcaagctgctggagcaattcgtatgtgcccatacaggaatcatattctacgccccttacacaggggtctgcgttaaacagcacaaaagactgacgcaagcaattcagaaggctagggatcacggactgctaatttaccacatcccacaagtcgaaccacgggatttagatttcagtaccagccacggcgcagtctctgctactccacccgcacccacactggtttccggcgacccatggtatccatggtacaattggaaacagccccctgaacgtgagctcagccgactccgtagactataccagggtcaccttcaagaggagtctggcccacccccagagtctatgccaaagatgcctccgcgaacgcccgctgaagcctccagcacaggtcagaccggcccacagtccgccctgtag

SEQ ID NO: 177702 - DNA, 777 bp, Artificial Sequence
  derived and/or modified sequence
atggccgccagcgtgctgaacaccgtgctgagaagactgcccatgctgagcctgttcagaggcagccacagagtgcaggtgcccctgcagaccctgtgcaccaaggcccccagcgaggaggacagcctgagcagcgtgcccatcagcccctacaaggacgagccctggaagtacctggagagcgaggagtaccaggagagatacggcagcagacccgtgtgggccgactacagaagaaaccacaagggcggcgtgcccccccagagaaccagaaagacctgcatcagaagaaacaaggtggtgggcaacccctgccccatctgcagagaccacaagctgcacgtggacttcagaaacgtgaagctgctggagcagttcgtgtgcgcccacaccggcatcatcttctacgccccctacaccggcgtgtgcgtgaagcagcacaagagactgacccaggccatccagaaggccagagaccacggcctgctgatctaccacatcccccaggtggagcccagagacctggacttcagcaccagccacggcgccgtgagcgccaccccccccgcccccaccctggtgagcggcgacccctggtacccctggtacaactggaagcagccccccgagagagagctgagcagactgagaagactgtaccagggccacctgcaggaggagagcggccccccccccgagagcatgcccaagatgccccccagaacccccgccgaggccagcagcaccggccagaccggcccccagagcgccctgtag

SEQ ID NO: 177703 - DNA, 648 bp, Artificial Sequence
  derived and/or modified sequence
atggccgccagcgtgctgaacaccgtgctgagaagactgcccatgctgagcctgttcagaggcagccacagagtgcaggtgcccctgcagaccctgtgcaccaaggcccccagcgaggaggacagcctgagcagcgtgcccatcagcccctacaaggacgagccctggaagtacctggagagcgaggagtaccaggagagatacggcagcagacccgtgtgggccgactacagaagaaaccacaagggcggcgtgcccccccagagaaccagaaagacctgcatcaacgtgaagctgctggagcagttcgtgtgcgcccacaccggcatcatcttctacgccccctacaccggcctgctgatctaccacatcccccaggtggagcccagagacctggacttcagcaccagccacggcgccgtgagcgccaccccccccgcccccaccctggtgagcggcgacccctggtacccctggtacaactggaagcagccccccgagagagagctgagcagactgagaagactgtaccagggccacctgcaggaggagagcggccccccccccgagagcatgcccaagatgccccccagaacccccgccgaggccagcagcaccggccagaccggcccccagagcgccctgtag

SEQ ID NO: 177704 - protein, 1049 aa, Artificial Sequence
  derived and/or modified sequence
MDHTGAIDTEDEVGPLAHLAPSPQSEAVAHEFQELSLQSSQNLPPLNERKNVLQLRLQQRRTREQLVDQGIMPPLKSPAAFHEQIKSLERARTENFLKHKIRSRPDRSELVRMHILEETFAEPSLQATQMKLKRARLADDLNEKIAQRPGPMELVEKNILPVDSSVKEAIIGVGKEDYPHTQGDFSFDEDSSDALSPDQPASQESQGSAASPSEPKVSESPSPVTTNTPAQFASVSPTVPEFLKTPPTADQPPPRPAAPVLPTNTVSSAKPGPALVKQSHPKNPNDKHRSKKCKDPKPRVKKLKYHQYIPPDQKGEKNEPQMDSNYARLLQQQQLFLQLQILSQQKQHYNYQTILPAPFKPLNDKNSNSGNSALNNATPNTPRQNTSTPVRKPGPLPSSLDDLKVSELKTELKLRGLPVSGTKPDLIERLKPYQEVNSSGLAAGGIVAVSSSAIVTSNPEVTVALPVTTLHNTVTSSVSTLKAELPPTGTSNATRVENVHSPLPISPSPSEQSSLSTDDTNMADTFTEIMTMMSPSQFLSSSPLRMTNNEDSLSPTSSTLSNLELDAAEKDRKLQEKEKQIEELKRKLEQEQKLVEVLKMQLEVEKRGQQQRPLEAQPSAPGHSVKSDQKHGSLGSSIKDEASLPDCSSSRQPIPVASHAVGQPVSTGGQTLVAKKAVVIKQEVPVGQAEQQSVVSQFYTSPQAGMQTQPQIATAAQIPTAALASGLAPTVPQTQDTFPQHVLSQPQQVRKVFTNSASSNTVLPYQRHPAPAVQQPFINKASNSVLQSRNAPLPSLQNGPNTPNKPSSPPPPQQFVVQHSLFGSPVAKTKDPPRYEEAIKQTRSTQAPLPEISNAHSQQMDDLFDILIKSGEISLPIKEEPSPISKMRPVTASITTMPVNTVVSRPPPQVQMAPPVSLEPMGSLSASLENQLEAFLDGTLPSANEIPPLQSSSEDREPFSLIEDLQNDLLSHSGMLDHSHSPMETSETQFAAGTPCLSLDLSDSNLDNMEWLDITMPNSSSGLTPLSTTAPSMFSADFLDPQDLPLPWD

SEQ ID NO: 177705 - DNA, 3150 bp, Artificial Sequence
  derived and/or modified sequence
atggaccacaccggagctatcgacactgaagatgaagtcggccccctcgcccacttggccccaagcccccagagtgaggcagtggcccacgaattccaggagttatctttgcagtccagccaaaaccttcctcccctgaatgagaggaaaaatgttctgcagctgagactgcagcagaggagaacgcgagaacagctggtggatcaggggattatgccacccctgaagtctcccgctgctttccatgaacaaatcaagagcttggaacgggcacggacagagaacttcttaaaacacaagatcaggtcccgccctgacagatctgaacttgtgcgcatgcatatcctggaggagacattcgcggaaccgtctcttcaggccacgcaaatgaaactgaagcgggctcggttagcagatgacctgaatgagaaaatcgcacagagaccaggcccaatggaactcgttgaaaaaaacattctgcccgtggatagctcagtgaaagaagccatcatcggagttgggaaggaagattacccccatacacaaggagacttctcttttgatgaagattcttcagacgccctgagcccagaccagcctgcttcacaggaaagtcagggcagtgcagcttcaccctccgagccaaaggtctctgagtccccttcgccggtgacaactaacacaccagcccaattcgcctctgtgtcccctactgtgccggaattcctgaagactccccccacagctgaccaacccccgcccagacccgccgcccccgttctgcctaccaatactgtcagcagcgcaaagcctgggccggctctggtgaaacagagccaccctaaaaatccaaatgataagcaccggtctaaaaagtgtaaagatccaaagccaagggttaagaagctgaagtaccaccagtatataccccccgaccagaaaggagaaaaaaatgaaccccagatggacagcaactatgcacgcctcctacagcagcaacagctattcctgcaattgcagatcttgtctcagcagaagcaacattacaattaccaaacaattctgcccgccccttttaagccactgaacgacaagaacagcaacagcggaaacagcgccctgaataacgcaacccccaatactccacggcagaatacatctactcccgtccgaaaaccgggacccctcccatcttctctggatgacctaaaagtgtcggagttaaagaccgaacttaagctccggggcctgccggtcagcggtaccaaaccagatctaattgagcggctcaagccctaccaggaggtcaactcctctggcttggctgccggtgggatagtggcggtctcatcttccgctattgttacgtctaaccctgaagtaaccgtcgcgcttccagtgacaaccttgcataacactgtaaccagtagcgtctccacccttaaggcggagctgcccccaaccggtacctccaacgctactcgagtggaaaatgtgcactctccccttcctatctccccttctccaagtgagcagtcttccctgtcgaccgatgacaccaacatggccgacacatttacagagatcatgaccatgatgtccccctcgcagtttctatccagtagcccactccgcatgaccaacaacgaggacagtctatcccctacaagcagtaccctgagtaacttagaactggacgccgccgaaaaggataggaaactacaggagaaggaaaagcagattgaggagctcaaaaggaaactggagcaggagcagaaactggtggaagtgctcaaaatgcagctggaagtcgagaaacgtggtcagcaacagagacccctggaggcccaaccttctgcaccgggtcatagtgtaaaatccgaccagaaacacgggtcccttggcagttcgattaaggacgaagcctctttgcctgactgttcaagttccaggcagcctatccctgtggcttcccatgcagttggccagcctgtctctactggcggacagaccctagtagctaagaaagccgtggttatcaagcaagaggtgcccgtgggccaggcggaacaacagtcagtggtgagtcagttctacacttccccacaggccggcatgcagacacagccacaaatagccacagcagcgcagatccccacagctgccctcgcatcgggacttgcccccacggtgccccagacgcaggacacttttcctcagcacgtcctgtcccagccacaacaggtgagaaaagtgttcacaaattctgcttccagtaatacggttcttccctatcagaggcacccggctcccgccgtgcaacagccatttatcaacaaggcctctaatagcgtgctccaatcacgtaacgcaccattgccgtccctgcagaatgggccgaacactccaaacaagccaagctcacccccccctccacagcaattcgttgtgcagcacagtcttttcgggtcgcccgtagcaaagactaaggatcctcctcgatacgaagaggctatcaaacagaccaggagcacgcaagctcccctgcctgaaataagtaacgcccactcgcagcaaatggacgacctgttcgatattcttattaagagtggggagatttccctgccaatcaaagaagagccatcaccaatctctaagatgcgacctgtaacagcaagcatcacgaccatgccagttaacactgttgtgtctaggcctccgcctcaggtgcagatggctcccccagtgagcctagagccaatgggatcactctctgcgagcctggagaatcagttagaggccttcctcgacggcacactgccttcagcaaacgagatccccccattgcagtcatctagcgaagaccgcgaacctttttccttgatagaagatctgcagaacgatctgctctcccatagcgggatgctggaccattcccactccccaatggaaactagcgagacgcagttcgccgctgggacgccttgcctgagtctcgatctctctgactcgaatcttgacaacatggagtggctggatatcacgatgcctaacagcagtagcggtctgacgccgctttctactacggcaccaagcatgtttagcgccgattttctcgacccacaggatctgcctctgccgtgggattag

SEQ ID NO: 177706 - DNA, 8608 bp, Artificial Sequence
  derived and/or modified sequence
aggttcacaataaaggtgctaagaaagagaatgtaagacaggaaaataattaaatattcttaccgagtgtcttcaataggccgtgtttaagaggcgtcttacactccctgttgccagtggctggaacacaatggatcacacaggggcgatagacaccgaggatgaagtgggacctttagcccatcttgctccaagtcctcagagtgaagctgtggctcatgaattccaggaactctccttgcagtccagtcaaaacttaccccctctgaacgaaaggaaaaatgtgctccagctgaggctgcaacaaaggaggacgagagaacaactagtggaccagggcatcatgccacctttgaagagcccagcggcattccatgaacagataaaaagcttggaacgagccagaactgaaaactttttgaaacacaagattcggagtcgaccagatcgttctgaacttgtcaggatgcacattttagaagaaacatttgcagagccatccctgcaggctactcagatgaagttgaaaagagctcgactagcagatgatctgaatgaaaagattgctcaaagacctggtcctatggagctggtagagaaaaacatccttcctgtggactccagtgttaaagaagcaattataggcgttgggaaggaggactatccccacactcagggcgatttctcatttgatgaagacagcagtgacgctttgtctccggaccagcctgcgagtcaggagtcacaggggtcagccgcgtccccaagtgagccaaaagttagtgaatcgccatctcctgtgactacaaacactccagcgcagtttgcttcagtgtccccaacagttcctgaattcttgaaaactcctccaactgcagatcagcctcccccacggcctgcagctcctgtcctccccacaaacactgtgtcctcagcaaagcctggcccagcactggtgaagcaaagccatcccaagaatccaaatgacaaacaccgtagcaaaaagtgcaaagatcccaaaccacgggtaaagaagttaaagtaccaccaatacattccaccagatcagaagggtgagaagaatgagccgcagatggactctaactacgcccgcctgctccagcagcagcagctgttcctgcaactgcagatcctgagtcagcagaagcagcactacaactaccagaccatcctgcctgcaccattcaagccactcaatgacaaaaatagtaacagtgggaattcagctttgaacaatgccacacctaacacaccaagacagaatacatctactcctgtgagaaagccaggacctctgccttctagcctggatgacttaaaggtatcagaactgaagacagaactgaagttaaggggtctgccagtgtcaggcaccaaaccggacctcattgagcgcctaaaaccctaccaggaagtgaacagcagcggccttgctgctgggggcatcgtggcagtgtcatcatcagccattgtcaccagtaacccagaagtcactgtggccttgccggttacaacactacacaacactgtgactagctcagtctctactctcaaggcagaattgccacctacaggaaccagcaacgcaacccgtgtggaaaatgttcattcccctctgcccatttcaccatctccctccgaacagtccagtctcagtactgatgacacaaacatggcagacactttcaccgagattatgaccatgatgtcgccttcacagttcttgagttcatctcctttgagaatgacaaataatgaagacagtctgagtcccaccagcagcactctgtcaaacctggaactggatgcagccgaaaaggatcgcaagcttcaggagaaagagaagcaaatcgaagagctgaagaggaaactggaacaagagcagaagctcgtggaagtgctgaaaatgcaacttgaggttgaaaaacgagggcagcagcagcggcccctggaagcccagcccagtgccccaggtcattctgtcaagtcagatcagaagcacggcagccttggctcctccatcaaagatgaggcctcactccctgactgctccagctccaggcagcccatcccagtagccagccacgctgtaggccagcccgtctctacaggtggccagacccttgttgccaaaaaggctgtagttatcaagcaagaggtccctgtgggccaggcagagcagcagagtgtcgtctcgcagttttatacttcaccacaagcaggaatgcagactcagcctcagatagcaactgctgcacaaataccaactgctgccttggcctcaggcttggccccaactgtacctcagacacaagacacgttcccgcagcatgtgctcagtcagcctcaacaagtcagaaaggttttcacaaactcagcatcatcaaatacagttcttccatatcagagacatcctgccccagctgtccagcagccctttatcaataaggcctccaacagtgttcttcaatccagaaatgctccgcttccatccctgcaaaatggacctaacacacccaacaagcctagttcacccccgccaccccagcaatttgtcgtccagcactctctatttgggagtccagtcgccaagacaaaagatcccccccgctatgaggaggccatcaagcagacacgcagcacacaggcccctctgccagagatttccaacgctcacagtcagcagatggatgacctctttgatatcctcattaagagtggagagatctccctccccataaaagaagaaccttctcctatttccaaaatgagaccagtgacagccagcatcaccacaatgccagtgaatacagtggtgtcccggccaccaccccaagtccaaatggcaccacctgtatctttagaacctatgggcagtttatctgccagcttagagaaccaactagaagctttcttggatggaactttaccctcagccaatgaaattcctccactacaaagcagcagtgaagacagagagcccttctctctgatcgaggacctccagaatgatctgctgagtcactcaggtatgctggaccattcacactcacccatggagacttccgagacccagtttgctgcaggtactccctgtctgtctctcgacctgtcagactcaaacttggacaacatggagtggttggacattaccatgcccaactcctcttcaggactcactcctctcagcaccaccgcgccgagcatgttctctgctgactttctagacccacaggacctaccgctgccatgggactaacgtcacagatttcttttctgagagttgatgaggtttaagaacatgaagattctaaaaggtcagtttttagagatagatctatagttgcattgttgcaatcaaaatatgttgtcacagaaagaataggtggaaggtcatagcctggaacccaagtttgaaaacatttcattgtgttcagtagtgaatttctacagtttaacatagcacagggccttctgaaaatcgcacttgtcaaagacgactcatctatttctccagacttcagtaaagaatgaaaagtacctttagataaaaacaaagaagagtaatatatgcagcacagtgacgttaggattctggtaattaactacatttaaatctctggtcactttaagaccctaaataaaaggcagacagctccactcaaaaactaaggctgatgtgagggaggtgagaggtcactgcacttggtacttcctagagacggccggagccaggcccaagacacagcagaggtcaaaggcagtggagagccttggccagttcagtgacagcttctggctgaagacttttggttctattcagaaacctgtgtcgtttttttggtgttgtagtttattttgtgattttttggaatcgtactttatatttccaaatttaaatttaaatgcaagatctttcaacataaacagaagatacctacaaaatactgtcagaagtccaggtatactgataacactgaaaattctattagcaaccttctgggttggttagattgattttaatgtatatattagacatttgtatgtatgctctgacattgtgatttgtacagcctacgctggggtaaggaaatgggtatccaaggtcctacttttttaatagctcgaatatttctagagtacttgagccacatgtatttctgtatttaaagaattgctgactaactttcaggtaaccagacccatctcaaagaaccaagaaaaggctttagcatgaaatatctttctgagctggcgagttagaagaatggaaggtaaggggaaggtctgtcatctacccaggacattcccatgatgagtacaggtcagattgtgccacaaggtgggcctccacgtccctgccctggccctctttcttctgtcactaaccctggttatcattttacaggcttgtaactggatattctaccagagctctcactatattgtcaagcctaagattgaaaaactggaggctttattagtgtttttatatagaaaacagttattacatatgtgttaagtcatttcttaagaattttctaaaatgccaactatcacaggattatttcaagctagtcattgaggtatatgacaaaatgtaaataacaaaaaactgaaatctaccaaaagagcatggagatttttcttaaataataatattgtgctctccacctcacccttgtgtaaaccctcaggtcaggttggttcccctgggtcacaaaatggtaaatgttccatactgacatgccggaggcagcctgacccgttatttggaaagaatttgtgaattatttctgggtttgtgttttgcctaagagctgatcttatttctgatttgtgtgtgtgtggtttataaattttactacgtgtaacaaaagtctgcttttccagcatgagcacactggagccctctgctcactggcacttcctgactcaaaggcactaacagtgctcatgtgccttccagacggttcaaggcagaggccactgtgctcagtgtagtctgtgatgaatagtttaagtgttcagaaattggtaaaccaacacacgggatacaataactctctgttaaccagaacaccgtcatttgaccaagccctacaagagtttaccacactagatgttctgtgaatcctcgagtcagttccattgagaggggcctgtctccagggccaggctatttacttgggaaagtatttttcttacagttcttggccacagtttttttgctgagggtttctgtctgggcctatcaggtccatacttagaccctgagcatcttcttcattcagatttgaatggcttattaaattagcaccaaatatcagtgggactgtagaaggtaaccgaacactagtaccattgactctcgttgaataactttatatttccataatcctgaattgtgtagatagttttctagctctcgggtccctttattgctttttaaaatagggtttgaaacatgccacaggaaggttgctctccaaaaatacacagtgcagtgcaagaaaatgctatctcattggcctactctcctatgaattgctaaagtgcccacttcacatatgtgtttaaacctttataaaccagtatttcacttttaaaaagacaaggcatctctacccattaactctgcaagccactccacttgcaccattccgcttgaccctcctctctcctggcttgggtcaccagccaggcacctgtgacacgagtgctgctctccaggatctccactacatgttccaggttggagtgaggacgcgctatgtgctcacactcatgtgacatgaccaaagatgatactctgtaaacaaggcccttctgaccggactcagtgcgtgtgatggtgagtgcaatgaggaagggtggatattgactaaagactggttgttgttgttgtttaggttagtgtcacagccattacagcacaagtcaaagtcgccagttgaattttcattatgcacgtgtgtggtttaagcagtggtactgttgtatatcatattgtaaagtatcatactgccaagaaaataactcctagaaaggcattatctcacatccccatcttactttcctacatgttctcaaaacacagtagtaccagccttacctttctgctgtatgtagatagtcagatcatcctactgggggtgggatgaatttaaaagttataccaaaatttctgtaaagtctttgaaagtctaggagtaggtggtcatcttgtacatttcagcaaagcatccactaggaaacctcataggacagtgttagtggttcacgttctagtgtttttcctgaaatgtgcaatctactgtatagtattgccacataattgtacatagatgtattctgaatttgtggaatttcttgcttagatactattgtgtttgtttcatatgaatatttttgtaattctaaaagagatcttatttaaatttcctttttaaaagccgcatggttctgtgatccatgtaactgacactttttggctttcagtgctgtttagaaacagtggcaaaggcagggtggtgctgcctgcaagctgctgcctatggaaggcaaagtcatagtaatgagatagcacctctgaactgtgcagtcagcataccctgagtgatggctcaggggcgcactacctattttgtcaccagagctgactcaggcttcctggaccctcaaccccagatcattccaggcagcatagctttcttcacagtcctttcagaattcccaggctgaaatcagccatagcagttgacaaaacagctatccccacaagtgatgagatagtccctttactgtcctcaaatggacttggccttagagacgtggtaaagcactttggcagggtttaaaatatttgtgagaagcccacatttcagtatacatcctcactggcttccatgcacccacctgacggtagcctcacagaagtcctggctgtcactcaggtggggagctcatggtgccgctggggactttttagagaaatgtaaagagaatagctattcagtgtctactagcagagcaacatgtgtcaatttaaccaaattcacaaataaccctccatttttcaatatctgctactgtaaacatgaatattgaatactgacaagagaatacccatacaaatcgtcccaccgccctagaggccacagaattagcccaaaattatcaaagaacattaactggaaggtcaggtttttcaaggaacatagcttacaaatgcatcagtgtgtatctggagagcatcctaactgcatttcaactcatcttttaagtgatttcagtcaaaactggaaaacaactaagatgtagtaatttttttttcctggttcaaaccttcaataacttgctcattcagcagtctctctgagctacatttttatttgtaaagtgactctgtctgcatggcaatgagcaggtgcgtgttttttccacattcgccctttcttgcagtatccagggaaacacatcattacaaagggtttctacctgaaatctttcatggaaggcctacaattcgaaaagctgcacatgtttacagaagagctcttaccctccatgcaaacactttgctctgtggtgtcacagctttgtgacaataagatggcaatctcggatctacaaggtgctgtcgggaatcaaataaaatatgttatcagagatatcatcacatctatagtgtttaacagagctttatgccaactactaagacaaagctttaacaaagtttatagaatactgaaactcgtaacaattacctctctacgtgatgctgtaaggaatcttgctaatttggtaggaagaggaagcatttaggaaagggtttagtatctaccaaaagtacttgacctcaagtaaccaatagtaatgcaaacttgctttaaaggaaccaaaggcattgccaagtatttgccaaaaggaggcactttttatttaaaatttgagactaatgagatctcaaaaatcagccccaaaaaggtattatccatttaaggttataattttcactaagatgtagatatttctcttattgttttcatgtaaaatagtatagagttgttttgttggtttaagagtaacattcagtagtaatacaaagttttttttctatgtagaaattagttttcttttcttgcttgcaatagaaatgcaatgtgataggtgtttctcttcttattttcattgtcacattatgtcttagcatctcactttatgaaaaaaaggagaaagataccaatctacagagccctgcttgttgaagcactagtttaatcaacaaaaaattatggcaatcgggggtccattcatctattgcctttatgttgttttttaaaagaaaaaccatgatgcctttgtatttgctgtttgcacccctgaaatcaattccatatcatgtttgaatgccatacattttgcacatgtactgtacataagtaatgcatactgtatttttatatgtgtgcacatttatcatcagatcttttgtacatagtggcagtattgtagctgatcgggaaatgtttgatatctcagcaattttgcatttttgtgtctcaaataaaagacattttgatgt

SEQ ID NO: 177707 - DNA, 3150 bp, Artificial Sequence
  derived and/or modified sequence
atggaccacactggagccatcgacacagaagatgaggtgggccccctggcccacctggcccccagcccccagagcgaggccgtggcccacgagttccaggagctgagcctgcagagcagccagaacctgccccccctgaatgaaaggaagaatgtgctgcagctgcggctgcagcagaggaggacccgggagcagctggtggaccagggcatcatgccacccctgaagagccctgctgccttccacgagcagatcaagagcctggagcgggccaggacagagaacttcctgaagcacaagatccgcagcaggccagacagaagtgagctggtgaggatgcacatcctggaggagacctttgctgagcccagcctgcaggccacccagatgaagctgaagagggcccggctggctgatgacctgaatgagaagatcgcccagaggcctggccccatggagctggtggagaagaacatcctgcctgtggacagctctgtgaaggaggccatcattggagtgggcaaggaggactacccccacacccagggcgacttctcctttgatgaggacagcagtgatgccctgagcccagaccagcctgccagccaggagagccagggcagcgctgccagccccagcgagcccaaggtgtctgagagccccagccctgtgaccaccaacaccccagcccagtttgcctctgtgagccccaccgtgcctgagttcctgaagaccccacccacagctgaccagcccccacccaggcctgctgcccctgtgctgcccaccaacacagtgagcagcgccaagccaggccctgccctggtgaagcagagccaccccaagaaccccaatgacaagcacaggagcaagaagtgcaaggaccccaagccccgggtgaagaagctgaagtaccaccagtacatccccccagaccagaagggggagaagaatgagccccagatggacagcaactatgcccggctgctgcagcagcagcagctgttcctgcagctgcagatcctgagccagcagaagcagcactacaactaccagaccatcctgcctgcccccttcaagcccctgaatgacaagaacagcaacagcggcaacagcgccctgaacaatgccacccccaacaccccccggcagaacaccagcacccctgtgaggaagccaggccccctgcccagcagcctggatgacctgaaggtgtctgagctgaagacagagctgaagctgcggggcctgcctgtgtctggcaccaagccagacctgattgagcggctgaagccctaccaggaggtgaacagcagcggcctggccgccggcggcatcgtggccgtgagcagcagcgccatcgtgaccagcaaccctgaggtgacagtggccctgcctgtgaccaccctgcacaacacagtgaccagctctgtgtccaccctgaaggccgagctgccccccaccggcaccagcaatgccaccagggtggagaatgtgcacagccccctgcccatcagccccagccccagcgagcagagcagcctgagcacagatgacaccaacatggctgacaccttcacagagatcatgaccatgatgagccccagccagttcctgagcagcagccccctgaggatgaccaacaatgaagacagcctgagccccaccagcagcaccctgagcaacctggagctggatgctgctgagaaggacaggaagctgcaggagaaggagaagcagatcgaggagctgaagaggaagctggagcaggagcagaagctggtggaggtgctgaagatgcagctggaggtggagaagaggggccagcagcagaggcccctggaggcccagcccagcgcccctggccacagcgtgaagagtgaccagaagcacggcagcctgggcagcagcatcaaggatgaggccagcctgcctgactgcagcagcagccggcagcccatccctgtggccagccatgctgtgggccagcctgtgtccactggaggccagaccctggtggccaagaaggctgtggtgatcaagcaggaggtgcctgtgggccaggccgagcagcagagcgtggtgtcccagttctacaccagcccccaggccggcatgcagacccagccccagatcgccacagctgcccagatccccacagctgccctggccagcggcctggcccccaccgtgccccagacccaggacaccttcccccagcacgtgctgagccagccccagcaggtgaggaaggtgttcaccaacagcgccagcagcaacacagtgctgccctaccagaggcacccagccccagctgtgcagcagcccttcatcaacaaggccagcaacagcgtgctgcagagcagaaatgcccccctgcccagcctgcagaatggccccaacacccccaacaagcccagcagccccccaccaccccagcagtttgtggtgcagcacagcctgtttggcagccctgtggccaagaccaaggacccccccaggtatgaggaggccatcaagcagaccaggagcacccaggcccccctgcctgagatcagcaatgcccacagccagcagatggatgacctgtttgacatcctgatcaagagcggggagatcagcctgcccatcaaggaggagcccagccccatcagcaagatgaggcctgtgacagccagcatcaccaccatgcctgtgaacacagtggtgtcccggcccccaccccaggtgcagatggcccctcctgtgtccctggagcccatgggcagcctgagcgccagcctggagaaccagctggaggccttcctggatggcaccctgcccagcgccaatgagatcccccccctgcagagcagcagcgaggaccgggagcccttcagcctgattgaggacctgcagaatgacctgctgagccacagcggcatgctggaccacagccacagccccatggagaccagcgagacccagtttgctgctggcaccccctgcctgagcctggacctgagtgacagcaacctggacaacatggagtggctggacatcaccatgcccaacagcagcagcggcctgacccccctgagcaccacagcccccagcatgttttctgctgacttcctggacccccaggacctgcccctgccctgggactag

SEQ ID NO: 177708 - DNA, 3150 bp, Artificial Sequence
  derived and/or modified sequence
atggaccacaccggcgccatcgacaccgaggacgaggtgggccccctggctcacttagccccatctccccagagtgaggccgtcgctcatgagttccaggagctgtccctgcagagttctcagaacctgcctcctcttaatgagaggaagaatgtgctacaactcaggctgcagcagcgccggactcgggagcaactcgtggatcaagggataatgccacctctcaagagtcccgccgcatttcatgaacagattaagagcctcgaacgagccagaaccgaaaacttccttaagcataagatacgctcacgccctgacagatcagagctcgtgcgcatgcatattctagaggagacattcgcggagccatcgctacaggctacgcagatgaagttgaagcgcgcacgcctcgccgatgatctcaacgagaaaatcgctcagcgacccggcccaatggaactggtggaaaagaacatcttgcccgttgactcttcagtcaaggaggcaataattggcgtgggcaaggaagactatccccacacccagggggattttagttttgacgaagactcatccgacgcattgagccccgatcagcctgcctctcaggagtcacaaggatccgccgcctcacctagcgaacccaaagttagcgagtcaccaagtccagttaccactaatacccccgcacagttcgctagcgtgtcacccacggtgccagaatttctcaagacacctccgacagccgatcagcctcctcccaggcccgctgcccctgtcctgcccaccaacaccgtgtcttccgctaagcctgggcccgctctcgtcaagcaatcgcatcctaagaacccaaacgataagcaccggtccaagaagtgtaaggatcctaagccacgcgtgaaaaaactcaaataccaccagtatattccacccgaccagaagggtgagaaaaacgagccacagatggactcaaattacgcgagattattgcaacagcagcagttgtttctccagctccaaattttatctcagcagaaacagcactacaattaccagactatcctgcccgcaccttttaagccgctaaacgacaaaaactctaatagtggcaactcagcactgaataacgctacacctaatacacctagacagaatacaagcacaccagtgaggaagcccgggccgctcccaagttccctcgacgatctgaaggtgagcgagctgaaaaccgaacttaaactgaggggattgcctgtcagtgggacaaaaccggatctcatagaacgcctgaagccgtaccaagaagttaactctagtggcctggcggcgggcggtatagtcgctgtttcaagttctgctatcgtcactagtaaccccgaagtgactgtggcccttcctgttacaacactgcataacactgttacctctagcgtgtctacactgaaggctgagctgcctcccacaggaacatctaatgcaacgagagtggagaacgttcactccccgttacctatctcacccagcccctctgaacagtcatccctctctacagatgatactaacatggctgacacatttacagagataatgactatgatgtctccaagccagtttctctctagttcgccattgagaatgactaataacgaggacagtctgtctcctacctccagcactctcagtaacctcgaactggacgctgccgagaaagaccgcaagctgcaggaaaaagagaaacagattgaagaactgaagcggaaactggagcaggagcagaagctggtggaagtgcttaagatgcagctggaggttgagaaaagaggacagcaacagcgcccgttagaagctcagcccagcgcccctggccattctgttaagtctgaccagaagcacgggtctctaggttcttccatcaaagatgaagccagtttgccagattgttccagttctcggcagcccatcccagtggcctctcacgcagtggggcaacccgtttctacaggaggccaaaccttggttgctaagaaagcggtggtgatcaaacaagaagtgcctgtaggacaggcagaacagcaatccgtggtgtcccaattctatacaagcccccaggcagggatgcaaacgcagccacagattgcaaccgccgctcagatcccaacagcggctctggcgtcaggtctggctccaaccgtgccacagacccaggacacctttccccagcacgtgctcagtcagccacagcaggttcgaaaagtttttaccaatagcgcctcgtccaacacagtgttgccataccaaaggcaccccgcacccgccgtgcagcagcccttcatcaataaggcgtccaattcagtcttacagagccggaatgccccgctcccatcacttcaaaacgggcccaacacaccaaataagccgagcagccctccaccaccccagcagttcgtggtacagcacagtctgttcggaagtccggttgctaaaacgaaggaccctcccaggtacgaagaggctatcaaacagactcggagcacacaggctcccctcccagaaatcagtaacgctcatagtcagcagatggatgacttgtttgacatcttgattaagtccggcgagatatctctccccataaaagaggagccatcccccatctccaagatgagacccgtgaccgcttctattacgacaatgcccgtgaataccgtcgtaagccgcccaccacctcaagtacagatggccccaccagtgagcttggagccaatgggaagccttagtgcatctctcgagaaccagctcgaggcattccttgacggcaccctgccctcagctaatgaaattccaccattgcagagctcctccgaggatagagaacccttttccctgatcgaggacctccagaacgatttactgtcacacagtggaatgctcgatcacagccacagccccatggagacaagtgagacacagttcgccgccggaacaccatgcctttccctcgacctgagtgattccaacttggataatatggagtggttagatatcactatgccaaattctagctctggcctgaccccactgtctactactgcgccttctatgttctccgccgatttcctggacccgcaggaccttccacttccctgggattag

SEQ ID NO: 177709 - DNA, 3150 bp, Artificial Sequence
  derived and/or modified sequence
atggatcatacaggcgcaatagatacagaagacgaggtgggtccgctggcacatctggccccatctcctcagtcagaagctgtggctcacgagtttcaggaactgtcacttcagagcagccagaatcttccccctctgaatgagagaaagaatgtcctgcaactgaggcttcaacagaggaggacccgggagcaactcgtggatcaggggattatgccccctctgaaatctcctgccgcttttcacgagcagattaaaagcttggagcgtgccaggaccgagaacttccttaaacacaagataaggagcagaccggatagatctgagctggtgaggatgcacattctggaggagacatttgctgaaccaagtcttcaggctacacaaatgaagctaaagcgcgcaaggctggccgacgacctcaatgaaaaaattgcgcaacgccctggtccaatggagctggtggagaagaacattctgccagtcgattcctccgtgaaagaagcaatcatcggagtcggcaaagaggactatccccacacacagggcgacttttcattcgacgaggactctagcgacgccctgagccctgaccagcctgcctcccaggagtcccaagggtctgccgcatcaccctcagaacctaaagtgagcgaatccccatcgcccgtcaccacaaatacgcctgcacagtttgcaagcgttagtcccaccgtgccagagttcctcaagacccctcccaccgcagaccagcctcccccacggccagcagcccctgtgctcccaaccaataccgtctcttccgcgaagccgggacccgctctggtgaaacagtcacacccgaaaaatcccaacgacaaacaccgctcaaaaaagtgcaaggaccccaaaccgagagttaagaagttgaaataccaccaatatattccccctgatcaaaagggcgaaaagaacgaacctcaaatggattccaattatgcacggttgctgcaacagcagcagttgtttctgcagctgcagatcctgtctcagcagaaacagcactataattatcaaaccatcctcccagcaccttttaagcccctaaacgacaaaaactctaattcaggtaactccgcccttaataatgccactccgaatacacctcgccaaaataccagtactcccgtccgcaagcccggtccattgccttcgtcactggacgacctcaaggtcagtgaactgaaaacagagctgaaacttcggggtctccccgtctcaggcaccaagcccgatctgattgaaagactcaaaccttaccaagaagtcaatagctcaggcctagctgctggcggtattgtcgccgtgtcatccagcgccatcgtgacatctaaccccgaggttactgtggccctgccagttacaacgttacacaacaccgtgacgtcttccgtctctacgctcaaagctgaactgcctccaactggaacttcaaacgcgacgcgggttgagaatgtgcactctcccttgccgattagccccagtccatcggagcagagctccctttctacagacgataccaacatggccgacacgttcacagaaatcatgacaatgatgtccccgagccagtttttgagttcctcacccctccgcatgacaaacaatgaagactcgctgagcccaacttcttccacactatcaaacctggagctggatgccgctgagaaggatcggaaattacaagagaaggaaaaacagattgaggaactcaaaagaaaactggaacaggagcagaagctggtcgaggttctgaaaatgcagctggaggtggaaaagcgaggccagcagcagcggcctctggaggctcaaccttcagccccaggccactccgtgaaatctgatcagaaacacggctcactgggcagcagcatcaaagatgaggcatcattaccggattgctcatcctctaggcagcccattccagtagcatctcacgcagtcggtcagcccgtgagcacagggggacagacccttgtggctaagaaagccgtcgtgatcaaacaggaagttcccgtcggacaggcagagcaacagtctgtagtctcacaattctatacttcgcctcaagctgggatgcagacccagccgcagattgcaactgctgctcagatccccaccgctgcgttagcgagcggactggccccaaccgtgccacagacccaggacacctttccccagcatgtcctgtcgcagccgcagcaagtgaggaaagtatttaccaacagcgcttcgagcaataccgtgcttccataccaaaggcatcccgcacctgccgttcagcagcctttcattaacaaggcctcaaattcagtattgcagagtaggaatgctccactcccatcccttcagaatgggcctaacaccccgaataagccatcttctccaccccctccgcagcaattcgtggtgcagcattccttgttcggctctcccgtcgccaagaccaaggatccccctcgttacgaagaggccatcaaacagacacgcagtactcaggcaccattgccggaaatatccaatgcccactcccagcagatggacgatctcttcgacatcctgattaagtctggggagattagcttaccaataaaagaggagccctcgcccatttccaagatgcgcccagtgacggccagcatcactactatgcctgtaaacaccgtcgttagtcgacctccccctcaggtgcagatggcccctccggtgagccttgagcccatgggaagtctgtctgcttccctggagaatcagctcgaagcattccttgacgggaccctcccgtccgcaaatgaaatacctcccctccagagtagcagtgaggatcgtgaacctttcagtctgatcgaggacctccagaacgacctgctgtcccattcagggatgctggaccactctcactccccaatggagactagcgaaactcagttcgccgcaggcacaccatgcctgtccctagacctgagtgactctaacctagataatatggaatggctggatattacgatgcccaactccagttctggcctgactccattatccacaacggcccctagcatgttcagcgctgacttcttagacccacaggatcttccactgccatgggattag

SEQ ID NO: 177710 - DNA, 3150 bp, Artificial Sequence
  derived and/or modified sequence
atggaccacaccggcgccatcgacaccgaggacgaggtgggccccctggcccacctggcccccagcccccagagcgaggccgtggcccacgagttccaggagctgagcctgcagagcagccagaacctgccccccctgaacgagagaaagaacgtgctgcagctgagactgcagcagagaagaaccagagagcagctggtggaccagggcatcatgccccccctgaagagccccgccgccttccacgagcagatcaagagcctggagagagccagaaccgagaacttcctgaagcacaagatcagaagcagacccgacagaagcgagctggtgagaatgcacatcctggaggagaccttcgccgagcccagcctgcaggccacccagatgaagctgaagagagccagactggccgacgacctgaacgagaagatcgcccagagacccggccccatggagctggtggagaagaacatcctgcccgtggacagcagcgtgaaggaggccatcatcggcgtgggcaaggaggactacccccacacccagggcgacttcagcttcgacgaggacagcagcgacgccctgagccccgaccagcccgccagccaggagagccagggcagcgccgccagccccagcgagcccaaggtgagcgagagccccagccccgtgaccaccaacacccccgcccagttcgccagcgtgagccccaccgtgcccgagttcctgaagaccccccccaccgccgaccagcccccccccagacccgccgcccccgtgctgcccaccaacaccgtgagcagcgccaagcccggccccgccctggtgaagcagagccaccccaagaaccccaacgacaagcacagaagcaagaagtgcaaggaccccaagcccagagtgaagaagctgaagtaccaccagtacatcccccccgaccagaagggcgagaagaacgagccccagatggacagcaactacgccagactgctgcagcagcagcagctgttcctgcagctgcagatcctgagccagcagaagcagcactacaactaccagaccatcctgcccgcccccttcaagcccctgaacgacaagaacagcaacagcggcaacagcgccctgaacaacgccacccccaacacccccagacagaacaccagcacccccgtgagaaagcccggccccctgcccagcagcctggacgacctgaaggtgagcgagctgaagaccgagctgaagctgagaggcctgcccgtgagcggcaccaagcccgacctgatcgagagactgaagccctaccaggaggtgaacagcagcggcctggccgccggcggcatcgtggccgtgagcagcagcgccatcgtgaccagcaaccccgaggtgaccgtggccctgcccgtgaccaccctgcacaacaccgtgaccagcagcgtgagcaccctgaaggccgagctgccccccaccggcaccagcaacgccaccagagtggagaacgtgcacagccccctgcccatcagccccagccccagcgagcagagcagcctgagcaccgacgacaccaacatggccgacaccttcaccgagatcatgaccatgatgagccccagccagttcctgagcagcagccccctgagaatgaccaacaacgaggacagcctgagccccaccagcagcaccctgagcaacctggagctggacgccgccgagaaggacagaaagctgcaggagaaggagaagcagatcgaggagctgaagagaaagctggagcaggagcagaagctggtggaggtgctgaagatgcagctggaggtggagaagagaggccagcagcagagacccctggaggcccagcccagcgcccccggccacagcgtgaagagcgaccagaagcacggcagcctgggcagcagcatcaaggacgaggccagcctgcccgactgcagcagcagcagacagcccatccccgtggccagccacgccgtgggccagcccgtgagcaccggcggccagaccctggtggccaagaaggccgtggtgatcaagcaggaggtgcccgtgggccaggccgagcagcagagcgtggtgagccagttctacaccagcccccaggccggcatgcagacccagccccagatcgccaccgccgcccagatccccaccgccgccctggccagcggcctggcccccaccgtgccccagacccaggacaccttcccccagcacgtgctgagccagccccagcaggtgagaaaggtgttcaccaacagcgccagcagcaacaccgtgctgccctaccagagacaccccgcccccgccgtgcagcagcccttcatcaacaaggccagcaacagcgtgctgcagagcagaaacgcccccctgcccagcctgcagaacggccccaacacccccaacaagcccagcagccccccccccccccagcagttcgtggtgcagcacagcctgttcggcagccccgtggccaagaccaaggacccccccagatacgaggaggccatcaagcagaccagaagcacccaggcccccctgcccgagatcagcaacgcccacagccagcagatggacgacctgttcgacatcctgatcaagagcggcgagatcagcctgcccatcaaggaggagcccagccccatcagcaagatgagacccgtgaccgccagcatcaccaccatgcccgtgaacaccgtggtgagcagaccccccccccaggtgcagatggccccccccgtgagcctggagcccatgggcagcctgagcgccagcctggagaaccagctggaggccttcctggacggcaccctgcccagcgccaacgagatcccccccctgcagagcagcagcgaggacagagagcccttcagcctgatcgaggacctgcagaacgacctgctgagccacagcggcatgctggaccacagccacagccccatggagaccagcgagacccagttcgccgccggcaccccctgcctgagcctggacctgagcgacagcaacctggacaacatggagtggctggacatcaccatgcccaacagcagcagcggcctgacccccctgagcaccaccgcccccagcatgttcagcgccgacttcctggacccccaggacctgcccctgccctgggactag

SEQ ID NO: 177711 - protein, 621 aa, Artificial Sequence
  derived and/or modified sequence
MSGCGLFLRTTAAARACRGLVVSTANRRLLRTSPPVRAFAKELFLGKIKKKEVFPFPEVSQDELNEINQFLGPVEKFFTEEVDSRKIDQEGKIPDETLEKLKSLGLFGLQVPEEYGGLGFSNTMYSRLGEIISMDGSITVTLAAHQAIGLKGIILAGTEEQKAKYLPKLASGEHIAAFCLTEPASGSDAASIRSRATLSEDKKHYILNGSKVWITNGGLANIFTVFAKTEVVDSDGSVKDKITAFIVERDFGGVTNGKPEDKLGIRGSNTCEVHFENTKIPVENILGEVGDGFKVAMNILNSGRFSMGSVVAGLLKRLIEMTAEYACTRKQFNKRLSEFGLIQEKFALMAQKAYVMESMTYLTAGMLDQPGFPDCSIEAAMVKVFSSEAAWQCVSEALQILGGLGYTRDYPYERILRDTRILLIFEGTNEILRMYIALTGLQHAGRILTTRIHELKQAKVSTVMDTVGRRLRDSLGRTVDLGLTGNHGVVHPSLADSANKFEENTYCFGRTVETLLLRFGKTIMEEQLVLKRVANILINLYGMTAVLSRASRSIRIGLRNHDHEVLLANTFCVEAYLQNLFSLSQLDKYAPENLDEQIKKVSQQILEKRAYICAHPLDRTC

SEQ ID NO: 177712 - DNA, 1866 bp, Artificial Sequence
  derived and/or modified sequence
atgtctggatgtgggctgttcctgagaaccactgctgctgctcgagcctgtcgggggctagtggtaagcactgccaatagacgcctattgagaaccagccccccagtaagggccttcgccaaggaactgttccttggtaaaataaaaaagaaagaagtctttcccttcccagaagtgtcccaggatgaattgaacgaaatcaaccagtttttaggaccagtcgagaagttcttcactgaagaagtcgatagccggaaaattgaccaggagggtaagatcccagacgagacactggagaagctgaagagcttgggcttattcggtctgcaggtgcccgaggagtacggcgggctgggattttcaaacaccatgtactcccggctgggtgagatcatcagtatggatggctccatcactgtcacgctggccgcccatcaggcaataggcctgaagggcattatcctggcggggaccgaggagcagaaggccaagtacctgcctaagctcgccagtggggagcatatagcagcattctgcttgacagagcccgcctcaggctccgacgcagcctccattaggagtcgagccactctttccgaagataaaaagcactatatcctcaatggaagcaaggtgtggataacaaacggggggttggcgaacattttcactgttttcgctaagactgaagtggtggattccgacggatccgttaaggacaaaataactgcattcatagttgaaagggatttcgggggtgtgaccaatggcaaaccagaggataagctaggaattcgaggatcaaatacttgtgaagtccactttgagaacacgaagattcctgtggaaaacatactgggggaagttggcgacggctttaaggtcgcaatgaacatcctgaactctgggaggttcagcatgggcagtgtagtggccgggttactgaaacggttaattgaaatgacagctgagtatgcatgcacacgaaagcagtttaataaacgcctgtcagaatttggacttatccaggagaaatttgccctgatggcccaaaaagcttatgtgatggaaagtatgacctatctgacggcggggatgctggaccagcccggcttcccagattgctctatagaagcagccatggtgaaagtgttctcaagcgaagctgcctggcagtgcgtgtccgaggctctccagatcttaggcggcctgggatacacaagagattacccctatgagcgcattctgagggacacacggatcctcctcatttttgaaggcactaacgaaatactgaggatgtacatagctcttacaggactgcagcatgcgggcaggatactcaccactcgcatccacgagcttaaacaggctaaggtgtccactgtgatggacaccgtgggccgacggttgcgcgactccctcgggaggactgtggaccttgggttgacggggaaccacggcgtcgtccacccctctctggcggactccgctaataaatttgaagagaacacttactgctttgggcgcacagtagaaacattgcttttgcgattcggcaagacaatcatggaagaacagctcgtccttaagagagttgccaacatcctgattaacctttacgggatgaccgccgtgctttctagagccagtcgctccataagaatcggcctgagaaaccacgaccatgaagtcctgctagctaatactttctgcgtggaggcctacctgcagaatttgtttagcttatcacagctagacaagtacgctcccgaaaatctggatgagcagataaagaaggtctctcagcagattctggagaagcgggcatatatatgcgctcaccctctggacaggacctgctag

SEQ ID NO: 177713 - DNA, 1467 bp, Artificial Sequence
  derived and/or modified sequence
atggatggctctatcaccgtcaccctcgcagcgcatcaggcaattggactgaaggggataattttggccggtaccgaggagcagaaagccaagtatctccctaaattagccagcggcgaacacatcgccgccttttgtctgacggagcccgcaagcgggtcggatgctgcttccattcgaagtagagccacactgtcagaggacaagaagcactatatactgaacggcagcaaggtgtggattacaaacggcgggctggctaatatctttaccgtcttcgccaagaccgaggtcgtggattctgacggatccgtcaaggacaagatcacagcatttattgttgagagggacttcgggggcgtgaccaacggaaagcctgaggacaaactgggcatcagaggtagtaacacctgcgaggtgcacttcgagaacaccaagatccccgtggagaatatccttggggaagtgggcgatggattcaaggtcgccatgaatattctcaactctggacgcttctcaatggggtccgtcgtcgcagggctactcaagcgcctgatcgagatgacagccgaatatgcctgtacacgaaagcagttcaacaaacgtctgtccgaattcggccttatccaggagaagtttgccctgatggcacagaaggcttatgtaatggagtcaatgacctatcttaccgccggcatgttggatcaaccgggcttcccagattgcagcattgaagcagccatggtgaaagtgttctcttccgaggccgcttggcagtgtgtttccgaggccctgcagattctaggaggcttgggctacaccagggattacccttacgagagaattctgcgagatacacggatcctcctcatttttgagggtaccaacgagattctgcgcatgtatattgccttaactgggctgcagcatgctggaaggatactgacaacccgaatccacgagctcaagcaagcgaaagtgagtacagttatggacacagtagggcggcggctgcgggattctctgggtagaactgtcgatcttggcctcactgggaatcatggcgttgtccatccttcattagccgacagcgctaataaattcgaggagaatacttattgcttcgggcgtacagttgagacactcctgctgcgcttcggcaagacaattatggaagagcagctagtccttaagcgtgtggctaacatactgatcaatctgtacggaatgaccgcagtactcagccgcgcctcccgcagtattcgtattggcttacgaaatcatgaccacgaggtgttgctggccaataccttctgtgtcgaggcatatctgcagaatttgtttagcctgtcccaattggacaaatatgccccggaaaacctcgatgagcagatcaagaaagtgtcccagcagatcttggagaagcgcgcttatatctgcgcccatccactggacagaacttgttag

SEQ ID NO: 177714 - DNA, 1866 bp, Artificial Sequence
  derived and/or modified sequence
atgagcggctgcggcctcttcctgcggaccacagctgctgcccgggcctgccggggcctggtggtgtccacagccaacagaaggctgctgcggaccagcccccctgtgcgggcctttgccaaggagctgttcctgggcaagatcaagaagaaggaggtgttccccttccctgaggtgtcccaggatgagctgaatgagatcaaccagttcctgggccctgtggagaagttcttcacagaggaggtggacagcaggaagattgaccaggagggcaagatcccagatgagaccctggagaagctgaagagcctgggcctgtttggcctgcaggtgcctgaggagtatggaggcctgggcttcagcaacaccatgtacagccggctgggggagatcatctccatggatggcagcatcaccgtgaccctggccgcccaccaggccatcggcctgaagggcatcatcctggccggcacagaggagcagaaggccaagtacctgcccaagctggccagcggggagcacatcgccgccttctgcctgacagagcccgccagcggcagtgatgctgccagcatccgcagccgggccaccctgtctgaggacaagaagcactacatcctgaatggcagcaaggtgtggatcaccaacggcggcctggccaacatcttcaccgtgtttgccaagacagaggtggtggacagtgatggctctgtgaaggacaagatcacagccttcatcgtggagcgggactttggaggagtgaccaacgggaagccagaggacaagctgggcatccggggcagcaacacctgtgaggtgcactttgagaacaccaagatccctgtggagaacatcctgggggaggtgggagatggcttcaaggtggccatgaacatcctgaacagcggccgcttctccatgggctctgtggtggccggcctgctgaagaggctgattgagatgacagcagaatatgcctgcaccaggaagcagttcaacaagaggctgtctgaatttggcctcatccaggagaagtttgccctgatggcccagaaggcctacgtgatggagagcatgacctacctgacagctggcatgctggaccagcccggcttcccagactgcagcattgaagctgccatggtgaaggtgttcagcagcgaggccgcctggcagtgtgtgtctgaggccctgcagatcctgggcggcctgggctacacccgggactacccctatgaaagaatcctgcgggacacccgcatcctgctgatctttgagggcaccaatgagatcctgaggatgtacatcgccctgaccggcctgcagcacgccggccgcatcctgaccacccgcatccacgagctgaagcaggccaaggtgtccacagtgatggacacagtgggccgccgcctgcgggacagcctgggccgcacagtggacctgggcctgaccggcaaccacggcgtggtgcaccccagcctggccgacagcgccaacaagtttgaggagaacacctactgcttcggccgcacagtggagaccctgctgctgcgctttgggaagaccatcatggaggagcagctggtgctgaagagggtggccaacatcctgatcaacctgtatggcatgacagctgtgctgagccgggccagccgcagcatccgcatcggcctgagaaatcatgaccacgaggtgctgctggccaacaccttctgtgtggaggcctacctgcagaacctcttcagcctgagccagctggacaagtatgcccctgagaacctggatgagcagatcaagaaggtgtcccagcagatcctggagaagagggcctacatctgtgcccaccccctggacaggacctgctag

SEQ ID NO: 177715 - DNA, 1467 bp, Artificial Sequence
  derived and/or modified sequence
atggatggcagcatcaccgtgaccctggccgcccaccaggccatcggcctgaagggcatcatcctggccggcacagaggagcagaaggccaagtacctgcccaagctggccagcggggagcacatcgccgccttctgcctgacagagcccgccagcggcagtgatgctgccagcatccgcagccgggccaccctgtctgaggacaagaagcactacatcctgaatggcagcaaggtgtggatcaccaatggaggcctggccaacatcttcaccgtgtttgccaagacagaggtggtggacagtgatggctctgtgaaggacaagatcacagccttcatcgtggagcgggactttggaggagtgaccaacgggaagccagaggacaagctgggcatccggggcagcaacacctgtgaggtgcactttgagaacaccaagatccctgtggagaacatcctgggggaggtgggagatggcttcaaggtggccatgaacatcctgaacagcggccgcttctccatgggctctgtggtggccggcctgctgaagaggctcatcgagatgacagcagaatatgcctgcaccaggaagcagttcaacaagaggctgtctgaatttggcctcatccaggagaagtttgccctgatggcccagaaggcctacgtgatggagagcatgacctacctgacagctggcatgctggaccagcccggcttcccagactgcagcattgaggccgccatggtgaaggtgttcagcagcgaggccgcctggcagtgtgtgtctgaggccctgcagatcctgggcggcctgggctacacccgggactacccctatgagcgcatcctgcgggacacccgcatcctgctgatctttgagggcaccaatgagatcctgaggatgtacatcgccctgaccggcctgcagcacgccggccgcatcctgaccacccgcatccacgagctgaagcaggccaaggtgtccacagtgatggacacagtgggccggcggctgcgggacagcctgggccgcacagtggacctgggcctgactggaaaccacggcgtggtgcaccccagcctggccgacagcgccaacaagtttgaggagaacacctactgctttggaagaacagtggagaccctgctgctgcgctttgggaagaccatcatggaggagcagctggtgctgaagagggtggccaacatcctgatcaacctgtatggcatgacagctgtgctgagccgggccagccgcagcatcagaattggcctgaggaaccacgaccacgaggtgctgctggccaacaccttctgtgtggaggcctacctgcagaacctcttcagcctgagccagctggacaagtatgcccctgagaacctggatgagcagatcaagaaggtgtcccagcagatcctggagaagagggcctacatctgtgcccaccccctggacaggacctgctag

SEQ ID NO: 177716 - DNA, 1866 bp, Artificial Sequence
  derived and/or modified sequence
atgagcggctgcggcctgttcctgcggaccaccgccgccgcccgggcttgcagggggctggtggtaagcacagctaaccgtagattgcttcgcacgtcaccacctgtgagggcatttgccaaggagctctttctcggaaagatcaagaaaaaagaagtgttccccttcccagaggtatctcaagacgagctcaacgaaattaaccaatttttaggccctgtagaaaagttcttcactgaggaggtggacagcagaaagatcgatcaagaagggaaaatacccgacgagaccttagaaaagctcaaaagcctgggcctcttcggcctacaggtgcctgaagaatacggaggtttagggttctccaacaccatgtacagcaggctgggcgaaatcatctcaatggacggatcaataactgtaaccttggcagctcaccaggcaattggtctcaagggcatcatcttggctggtaccgaggagcagaaagccaagtatttaccaaaattggccagtggagagcatatcgctgcattttgtctcacagagcccgcttcagggtcggacgccgcgtcgattcgcagtagagccactctgtcagaggacaagaagcactatattcttaatggctctaaagtgtggataacaaacggcggtctggccaatatctttacagtgtttgctaagactgaagttgttgactccgatggaagcgtcaaagacaagattacagctttcattgtggaacgagatttcgggggcgtgacgaatggcaagcccgaggacaagctcggtatcagaggatccaatacatgtgaagtccacttcgaaaacactaagatccctgtagagaatatcctgggagaagttggtgacgggtttaaggtagccatgaacatcctgaacagcggacgatttagtatggggagtgtggttgctggcctcctcaaacggttgattgagatgactgcggagtacgcttgcactcggaaacaattcaacaagaggctgtcagagttcggcctaatacaggagaaattcgccctgatggcgcaaaaagcctatgtcatggagtcaatgacctacctcaccgctggtatgctggaccaaccaggatttcccgattgtagcatagaggccgcaatggtcaaagtattcagttccgaagctgcttggcagtgcgtctcagaggctctgcaaatcttaggagggcttgggtacacaagagattacccatacgaacggattttacgagatacccggattcttctgatttttgagggcacaaatgaaattttacgcatgtatatagcgttaactgggctgcagcacgccggtaggattctgacaactaggattcacgagctcaagcaggctaaggtgtcgaccgtcatggacaccgtgggacgacggctgcgagacagcctagggagaactgtggatctgggactgacgggaaatcacggggtcgttcacccatcactggcagactctgccaacaagttcgaggaaaatacatactgttttgggaggaccgttgagacactcctgcttcgcttcggcaaaactatcatggaggagcagctggtcttgaagagggtcgccaacattctgattaacttatatggtatgactgcggttctttcacgcgcatctcgctcaatacgcattggtttgcgaaaccacgaccatgaggtgctgctcgctaacactttttgcgtagaagcctacctgcaaaacctctttagcctgagccagttggataagtatgcccctgagaacttggatgaacagatcaagaaagtgtcacagcagatccttgaaaagcgtgcctacatttgtgcccaccctctagacaggacctgctag

SEQ ID NO: 177717 - DNA, 1467 bp, Artificial Sequence
  derived and/or modified sequence
atggacggcagcatcaccgtgaccctggccgcccaccaggccatcggcctcaaaggcatcattcttgcgggcacagaagagcagaaggccaagtatttacccaagttggcctccggcgagcacatagcggccttctgcctcactgagcccgcaagcggctctgatgccgcatccattaggagtcgagcgacactgtctgaggacaagaagcactatatccttaacggcagcaaggtatggataactaacggaggcttagccaacatatttactgtttttgccaaaactgaagtggtggacagcgatggatccgtcaaggacaagattactgcattcatcgtggaacgggactttggcggagtgacaaatggtaagcctgaggataagctggggattcgcggatcaaacacctgcgaagtccactttgagaataccaaaatccccgtggagaacattctcggtgaggtgggggatggcttcaaagtggcaatgaacatcttgaattccggaaggtttagtatgggctccgtggtggccggactccttaaacggctaatagaaatgacagctgaatatgcgtgcacacggaaacaattcaacaaacgtctgtcagaattcggactgatccaggagaaatttgcgctgatggcacaaaaggcctatgtcatggaatcaatgacctacctaacggccggcatgctggatcagccggggtttcctgattgctcgatagaggcggcaatggtcaaagtgttctctagtgaggcagcttggcagtgcgtgagcgaggcgctgcagattctcggcggcctgggctacactcgcgactacccatatgaacggatcctgagggatacaaggatcctcctgatattcgagggcaccaacgagattctcagaatgtatatcgcgcttacagggctccagcatgctgggagaattctgacgacacgtattcacgagctgaagcaggcaaaggtgagcaccgtgatggacactgtgggcagacgattaagggattctcttggtcgcacagtggatttgggcctgactggcaatcatggcgttgtccacccctcgctggcagacagtgcaaacaaattcgaggagaacacatattgcttcggcagaacagtggagactctacttttgagattcgggaagacaatcatggaagagcaactggttctgaagcgtgtcgctaatatcttaattaatctttatggaatgaccgccgttttgtctcgcgcctcgcgtagcatccgcatcgggctaagaaaccacgatcatgaagtgctcctggccaacacattttgcgtagaggcctatctccaaaatctctttagccttagccagctggataagtatgctcccgaaaatttggatgagcaaattaaaaaagtgagccagcagattttggaaaagagggcctacatctgcgcccatcctttggatcggacatgttag

SEQ ID NO: 177718 - DNA, 1866 bp, Artificial Sequence
  derived and/or modified sequence
atgagcgggtgcggcctctttctgaggaccacagccgcagctcgggcttgcaggggactcgtagtgagtacggcaaaccggaggctcctccgcacctccccaccagttcgcgcatttgccaaagagctttttcttggcaaaataaagaaaaaggaggtgttcccctttccagaggtgagtcaggacgagctgaacgagatcaaccagtttctgggaccagtggagaaatttttcacagaggaggtcgacagtagaaagattgatcaggagggaaagatcccagacgagactctggagaagctgaaatcgctgggtctgtttggtctgcaggtccccgaggaatacggcggtctgggtttttcaaatacaatgtactccaggctgggcgagattattagcatggacggcagtattaccgtgaccctggcagcacaccaggccattggcttaaagggcattattctcgctgggaccgaagaacagaaggcaaagtacctgcctaaattggcttcaggggaacacatcgcagccttctgcctgaccgaacctgcctcaggttccgatgcggcttccatcagaagtcgcgcaactcttagtgaggataagaagcattatatcctaaatggttctaaagtttggataacaaacggcggtctggctaacattttcaccgtgtttgccaaaactgaagtagtcgatagcgatggaagcgtgaaggataagatcactgcattcatcgtggaacgggattttggcggagtgaccaacggtaagccagaggataaactgggtatacgtggcagcaacacatgtgaagtgcacttcgaaaatacaaaaatccctgtggaaaacatcctgggtgaggtcggggatggctttaaagtcgccatgaatatccttaacagcgggagattctcaatggggtccgtcgtggccggacttcttaagaggttgatcgagatgaccgctgagtacgcgtgtacccggaagcagtttaataagagattgtctgagttcggactgattcaggaaaaattcgcactgatggcccagaaggcttacgtgatggagtctatgacttacctcacagctggcatgttggatcagcccggattccctgattgttccattgaggctgcaatggtgaaggtgttttcctccgaagccgcttggcagtgcgtgagtgaggctctgcaaattctcggtggtcttggatatactagggactatccttacgagaggatccttagagacaccaggatactgctcatcttcgagggcaccaatgaaatcttacgtatgtatatagcactcactggcctgcagcacgccggaagaatcttgaccacgaggatccacgagctgaaacaagccaaggtaagtacagtgatggacacagtcggcaggcgactgcgcgacagccttggacggactgtggatctcggtctaactggcaatcacggtgtagtgcacccctctctggccgatagtgccaataagttcgaagagaatacctattgctttggcaggacagtggagacactactgctgcgatttggaaaaactattatggaggagcagctcgtacttaaaagagtggctaatatcctgatcaatctctacggcatgacagctgtgctcagtagggcttcacgaagcataagaatagggctgagaaaccacgatcacgaggtcctgcttgctaataccttctgcgttgaagcctacctccagaatctgtttagcctcagccagctggacaagtatgcaccggagaatcttgacgagcagattaaaaaggttagccagcagattcttgagaaaagagcttatatttgcgcccatcccctggaccggacgtgctag

SEQ ID NO: 177719 - DNA, 1467 bp, Artificial Sequence
  derived and/or modified sequence
atggatggatccatcacggtcacgctggctgctcaccaagctataggcttgaagggcattatcctagcgggtactgaggaacagaaggcaaaatatctcccgaagctggcctctggcgaacacatcgccgcattctgcctgacagaacccgcatccggaagtgatgcggctagcattaggagtcgggcaacactttccgaggataagaaacactacattctcaatgggagtaaagtctggataacgaatggcggtctggctaatatatttaccgttttcgccaaaacagaggtggtggactccgatgggtcagtgaaggataaaatcaccgccttcatcgtcgaacgcgacttcggcggtgtaacgaacgggaaaccagaagacaaactgggcattcgaggctccaatacctgtgaggtgcatttcgagaacacgaaaattcccgtcgaaaacatccttggggaggttggggatggcttcaaagtcgcaatgaatattctgaactcagggcgtttttccatgggatctgttgtggcgggactgcttaaaaggttgatcgaaatgaccgccgaatacgcgtgcacaaggaaacagtttaacaaaaggttgtcagagtttggcctgattcaggagaaattcgcccttatggcccagaaggcctacgtaatggaatccatgacctatttgacggcgggaatgctcgaccaaccagggttcccagactgttctatcgaggctgcaatggtcaaagtgttttcttcagaagccgcatggcagtgcgtctcagaggccctgcagatcctcgggggtctcggctatacaagagattacccatacgagcgtatccttcgcgacacacgaatcctgctgatattcgaaggaacgaacgagatattgcggatgtacatagcccttaccggtctacaacatgcagggagaatcctcaccacgcggatccatgagttgaagcaggccaaagtgtctacagttatggacaccgtcggtagacggttgcgagatagcctgggaagaactgtggatttaggacttacagggaaccatggagtagtgcatccatccctcgccgactcagcaaacaagtttgaggagaacacttactgcttcgggagaacggtggagacccttctactgcggttcgggaagacaatcatggaggagcagctggtactgaagagagtggcaaacatcctgattaatctatacggcatgacagctgtgctctctagggcttcacgctctatcaggattggcctgaggaatcacgatcacgaggtactgctggcgaataccttctgtgtagaagcatatctgcagaacctgttctctctttcccagctggacaagtatgcccctgagaacttggacgaacagatcaaaaaggttagccagcagattctggagaaacgcgcttatatttgtgcccacccattagaccgaacatgttag

SEQ ID NO: 177720 - DNA, 1866 bp, Artificial Sequence
  derived and/or modified sequence
atgagcggctgcggcctgttcctgagaaccaccgccgccgccagagcctgcagaggcctggtggtgagcaccgccaacagaagactgctgagaaccagcccccccgtgagagccttcgccaaggagctgttcctgggcaagatcaagaagaaggaggtgttccccttccccgaggtgagccaggacgagctgaacgagatcaaccagttcctgggccccgtggagaagttcttcaccgaggaggtggacagcagaaagatcgaccaggagggcaagatccccgacgagaccctggagaagctgaagagcctgggcctgttcggcctgcaggtgcccgaggagtacggcggcctgggcttcagcaacaccatgtacagcagactgggcgagatcatcagcatggacggcagcatcaccgtgaccctggccgcccaccaggccatcggcctgaagggcatcatcctggccggcaccgaggagcagaaggccaagtacctgcccaagctggccagcggcgagcacatcgccgccttctgcctgaccgagcccgccagcggcagcgacgccgccagcatcagaagcagagccaccctgagcgaggacaagaagcactacatcctgaacggcagcaaggtgtggatcaccaacggcggcctggccaacatcttcaccgtgttcgccaagaccgaggtggtggacagcgacggcagcgtgaaggacaagatcaccgccttcatcgtggagagagacttcggcggcgtgaccaacggcaagcccgaggacaagctgggcatcagaggcagcaacacctgcgaggtgcacttcgagaacaccaagatccccgtggagaacatcctgggcgaggtgggcgacggcttcaaggtggccatgaacatcctgaacagcggcagattcagcatgggcagcgtggtggccggcctgctgaagagactgatcgagatgaccgccgagtacgcctgcaccagaaagcagttcaacaagagactgagcgagttcggcctgatccaggagaagttcgccctgatggcccagaaggcctacgtgatggagagcatgacctacctgaccgccggcatgctggaccagcccggcttccccgactgcagcatcgaggccgccatggtgaaggtgttcagcagcgaggccgcctggcagtgcgtgagcgaggccctgcagatcctgggcggcctgggctacaccagagactacccctacgagagaatcctgagagacaccagaatcctgctgatcttcgagggcaccaacgagatcctgagaatgtacatcgccctgaccggcctgcagcacgccggcagaatcctgaccaccagaatccacgagctgaagcaggccaaggtgagcaccgtgatggacaccgtgggcagaagactgagagacagcctgggcagaaccgtggacctgggcctgaccggcaaccacggcgtggtgcaccccagcctggccgacagcgccaacaagttcgaggagaacacctactgcttcggcagaaccgtggagaccctgctgctgagattcggcaagaccatcatggaggagcagctggtgctgaagagagtggccaacatcctgatcaacctgtacggcatgaccgccgtgctgagcagagccagcagaagcatcagaatcggcctgagaaaccacgaccacgaggtgctgctggccaacaccttctgcgtggaggcctacctgcagaacctgttcagcctgagccagctggacaagtacgcccccgagaacctggacgagcagatcaagaaggtgagccagcagatcctggagaagagagcctacatctgcgcccaccccctggacagaacctgctag

SEQ ID NO: 177721 - DNA, 1467 bp, Artificial Sequence
  derived and/or modified sequence
atggacggcagcatcaccgtgaccctggccgcccaccaggccatcggcctgaagggcatcatcctggccggcaccgaggagcagaaggccaagtacctgcccaagctggccagcggcgagcacatcgccgccttctgcctgaccgagcccgccagcggcagcgacgccgccagcatcagaagcagagccaccctgagcgaggacaagaagcactacatcctgaacggcagcaaggtgtggatcaccaacggcggcctggccaacatcttcaccgtgttcgccaagaccgaggtggtggacagcgacggcagcgtgaaggacaagatcaccgccttcatcgtggagagagacttcggcggcgtgaccaacggcaagcccgaggacaagctgggcatcagaggcagcaacacctgcgaggtgcacttcgagaacaccaagatccccgtggagaacatcctgggcgaggtgggcgacggcttcaaggtggccatgaacatcctgaacagcggcagattcagcatgggcagcgtggtggccggcctgctgaagagactgatcgagatgaccgccgagtacgcctgcaccagaaagcagttcaacaagagactgagcgagttcggcctgatccaggagaagttcgccctgatggcccagaaggcctacgtgatggagagcatgacctacctgaccgccggcatgctggaccagcccggcttccccgactgcagcatcgaggccgccatggtgaaggtgttcagcagcgaggccgcctggcagtgcgtgagcgaggccctgcagatcctgggcggcctgggctacaccagagactacccctacgagagaatcctgagagacaccagaatcctgctgatcttcgagggcaccaacgagatcctgagaatgtacatcgccctgaccggcctgcagcacgccggcagaatcctgaccaccagaatccacgagctgaagcaggccaaggtgagcaccgtgatggacaccgtgggcagaagactgagagacagcctgggcagaaccgtggacctgggcctgaccggcaaccacggcgtggtgcaccccagcctggccgacagcgccaacaagttcgaggagaacacctactgcttcggcagaaccgtggagaccctgctgctgagattcggcaagaccatcatggaggagcagctggtgctgaagagagtggccaacatcctgatcaacctgtacggcatgaccgccgtgctgagcagagccagcagaagcatcagaatcggcctgagaaaccacgaccacgaggtgctgctggccaacaccttctgcgtggaggcctacctgcagaacctgttcagcctgagccagctggacaagtacgcccccgagaacctggacgagcagatcaagaaggtgagccagcagatcctggagaagagagcctacatctgcgcccaccccctggacagaacctgctag

SEQ ID NO: 177722 - DNA, 2454 bp, Artificial Sequence
  derived and/or modified sequence
agtaacgtcatcagacgtgtgtgtgtccctgcggcgctaagaaggggagactgaggctgaggctggggaacatcgggcagcatgagcggctgcgggctcttcctgcgcaccacggctgcggctcgtgcctgccggggtctggtggtctctaccgcgaaccggcggctactgcgcaccagcccgcctgtacgagctttcgccaaagagcttttcctaggcaaaatcaagaagaaagaagttttcccatttccagaagttagccaagatgaacttaatgaaatcaatcagttcttgggacccgtggaaaaattcttcactgaagaggtggactcccgaaaaattgaccaggaagggaaaatcccagatgaaactttggagaaattgaagagcctagggctttttgggctgcaagtcccagaagaatatggtggcctgggcttctccaacaccatgtactcaagactaggggagatcatcagcatggatgggtccatcactgtgaccctggcagcgcaccaggctattggcctcaaggggatcatcttggctggcactgaggagcagaaagccaaatacttgcctaaactggcgtccggggagcacattgcagccttctgcctcacggagccagccagtgggagcgatgcagcctcaatccggagcagagccacactaagtgaagacaagaagcactacatcctcaatggctccaaggtctggattactaatggaggactggccaatatttttactgtgtttgcaaagactgaggtcgttgattctgatggatcagtgaaagacaaaatcacagcattcatagtagaaagagactttggtggagtcactaatgggaaacccgaagataaattaggcattcggggctccaacacttgtgaagtccattttgaaaacaccaagatacctgtggaaaacatccttggagaggtcggagatgggtttaaggtggccatgaacatcctcaacagcggccggttcagcatgggcagcgtcgtggctgggctgctcaagagattgattgaaatgactgctgagtacgcctgcacaaggaaacagtttaacaagaggctcagtgaatttggattgattcaggagaaatttgcactgatggctcagaaggcttacgtcatggagagtatgacctacctcacagcagggatgctggaccaacctggctttcccgactgctccatcgaggcagccatggtgaaggtgttcagctccgaggccgcctggcagtgtgtgagtgaggcgctgcagatcctcgggggcttgggctacacaagggactatccgtacgagcgcatactgcgtgacacccgcatcctcctcatcttcgagggaaccaatgagattctccggatgtacatcgccctgacgggtctgcagcatgccggccgcatcctgactaccaggatccatgagcttaaacaggccaaagtgagcacagtcatggataccgttggccggaggcttcgggactccctgggccgaactgtggacctggggctgacaggcaaccatggagttgtgcaccccagtcttgcggacagtgccaacaagtttgaggagaacacctactgcttcggccggaccgtggagacactgctgctccgctttggcaagaccatcatggaggagcagctggtactgaagcgggtggccaacatcctcatcaacctgtatggcatgacggccgtgctgtcgcgggccagccgctccatccgcattgggctccgcaaccacgaccacgaggttctcttggccaacaccttctgcgtggaagcttacttgcagaatctcttcagcctctctcagctggacaagtatgctccagaaaacctagatgagcagattaagaaagtgtcccagcagatccttgagaagcgagcctatatctgtgcccaccctctggacaggacatgctgaggcaggggacagtgtcccctgctaccgcccgcccctacccatggcccgttgctggatgactgttactcttttttcagaaggtgttgggattatcacaggttaagccttttgttccccgtctgcacctgaagggttgtcgcctggcctgggagagcctcttccaggttttgacctgcaggcagtgctctctaacaggaccatcacagcttctgaactgagccggagagagagaatggaattgctgacccctggaactggcgggtattctggtcattgaggagacaccatagtggaaactggggcttatgctgctgcctccagggtgtgaggtgggtggggacctgtgtcaggtgtggatagccatttctgctcaaccacacattctctaagaaacagcttgaaagctctgtctgggtcattcatttaaactagaagcagaggcacttaaaacatgtaccaggaaccatttaacaaagaatataaaatgtcacaatctgtgtactgtta

SEQ ID NO: 177723 - DNA, 2401 bp, Artificial Sequence
  derived and/or modified sequence
gctaagaaggggagactgaggctgaggctggggaacatcgggcagcatgagcggctgcgggctcttcctgcgcaccacggctgcggctcgtgcctgccggggtctggtggtctctaccgcgaaccggcggctactgcgcaccagcccgcctgtacgagctttcgccaaagagcttttcctaggcaaaatcaagaaggtaacgcgagccctgggcgaacccttgctgtctggctcccgcttttcaccctcagctgcaagactggtgttgaactttgtgagattccccaaacctgccagagagatacaccctgcggccgaggcgtgttaacactccggattcctgagttccaggaaaaccttcccagagaaaggtggactcccgaaaaattgaccaggaagggaaaatcccagatgaaactttggagaaattgaagagcctagggctttttgggctgcaagtcccagaagaatatggtggcctgggcttctccaacaccatgtactcaagactaggggagatcatcagcatggatgggtccatcactgtgaccctggcagcgcaccaggctattggcctcaaggggatcatcttggctggcactgaggagcagaaagccaaatacttgcctaaactggcgtccggggagcacattgcagccttctgcctcacggagccagccagtgggagcgatgcagcctcaatccggagcagagccacactaagtgaagacaagaagcactacatcctcaatggctccaaggtctggattactaatggaggactggccaatatttttactgtgtttgcaaagactgaggtcgttgattctgatggatcagtgaaagacaaaatcacagcattcatagtagaaagagactttggtggagtcactaatgggaaacccgaagataaattaggcattcggggctccaacacttgtgaagtccattttgaaaacaccaagatacctgtggaaaacatccttggagaggtcggagatgggtttaaggtggccatgaacatcctcaacagcggccggttcagcatgggcagcgtcgtggctgggctgctcaagagattgattgaaatgactgctgagtacgcctgcacaaggaaacagtttaacaagaggctcagtgaatttggattgattcaggagaaatttgcactgatggctcagaaggcttacgtcatggagagtatgacctacctcacagcagggatgctggaccaacctggctttcccgactgctccatcgaggcagccatggtgaaggtgttcagctccgaggccgcctggcagtgtgtgagtgaggcgctgcagatcctcgggggcttgggctacacaagggactatccgtacgagcgcatactgcgtgacacccgcatcctcctcatcttcgagggaaccaatgagattctccggatgtacatcgccctgacgggtctgcagcatgccggccgcatcctgactaccaggatccatgagcttaaacaggccaaagtgagcacagtcatggataccgttggccggaggcttcgggactccctgggccgaactgtggacctggggctgacaggcaaccatggagttgtgcaccccagtcttgcggacagtgccaacaagtttgaggagaacacctactgcttcggccggaccgtggagacactgctgctccgctttggcaagaccatcatggaggagcagctggtactgaagcgggtggccaacatcctcatcaacctgtatggcatgacggccgtgctgtcgcgggccagccgctccatccgcattgggctccgcaaccacgaccacgaggttctcttggccaacaccttctgcgtggaagcttacttgcagaatctcttcagcctctctcagctggacaagtatgctccagaaaacctagatgagcagattaagaaagtgtcccagcagatccttgagaagcgagcctatatctgtgcccaccctctggacaggacatgctgaggcaggggacagtgtcccctgctaccgcccgcccctacccatggcccgttgctggatgactgttactcttttttcagaaggtgttgggattatcacaggttaagccttttgttccccgtctgcacctgaagggttgtcgcctggcctgggagagcctcttccaggttttgacctgcaggcagtgctctctaacaggaccatcacagcttctgaactgagccggagagagagaatggaattgctgacccctggaactggcgggtattctggtcattgaggagacaccatagtggaaactggggcttatgctgctgcctccagggtgtgaggtgggtggggacctgtgtcaggtgtggatagccatttctgctcaaccacacattctctaagaaacagcttgaaagctc

SEQ ID NO: 177724 - DNA, 2393 bp, Artificial Sequence
  derived and/or modified sequence
gctaagaaggggagactgaggctgaggctggggaacatcgggcagcatgagcggctgcgggctcttcctgcgcaccacggctgcggctcgtgcctgccggggtctggtggtctctaccgcgaaccggcggctactgcgcaccagcccgcctgtacgagctttcgccaaagagcttttcctaggcaaaatcaagaaggtaacgcgagccctgggcgaacccttgctgtctggctcccgcttttcaccctcagctgcaagactggtgttgaactttgtgagattccccaaacctgccagagagatacaccctgcggccgaggcgtgttaacactccggattcctgagttccaggaaaaccttcccagagaaaggtggactcccgaaaaattgaccaggaagggaaaatcccagatgaaactttggagaaattgaagagcctagggctttttgggctgcaagtcccagaagaatatggtggcctgggcttctccaacaccatgtactcaagactaggggagatcatcagcatggatgggtccatcactgtgaccctggcagcgcaccaggctattggcctcaaggggatcatcttggctggcactgaggagcagaaagccaaatacttgcctaaactggcgtccggggagcacattgcagccttctgcctcacggagccagccagtgggagcgatgcagcctcaatccggagcagagccacactaagtgaagacaagaagcactacatcctcaatggctccaaggtctggattactaatggaggactggccaatatttttactgtgtttgcaaagactgaggtcgttgattctgatggatcagtgaaagacaaaatcacagcattcatagtagaaagagactttggtggagtcactaatgggaaacccgaagataaattaggcattcggggctccaacacttgtgaagtccattttgaaaacaccaagatacctgtggaaaacatccttggagaggtcggagatgggtttaaggtggccatgaacatcctcaacagcggccggttcagcatgggcagcgtcgtggctgggctgctcaagagattgattgaaatgactgctgagtacgcctgcacaaggaaacagtttaacaagaggctcagtgaatttggattgattcaggagaaatttgcactgatggctcagaaggcttacgtcatggagagtatgacctacctcacagcagggatgctggaccaacctggctttcccgactgctccatcgaggcagccatggtgaaggtgttcagctccgaggccgcctggcagtgtgtgagtgaggcgctgcagatcctcgggggcttgggctacacaagggactatccgtacgagcgcatactgcgtgacacccgcatcctcctcatcttcgagggaaccaatgagattctccggatgtacatcgccctgacgggtctgcagcatgccggccgcatcctgactaccaggatccatgagcttaaacaggccaaagtgagcacagtcatggataccgttggccggaggcttcgggactccctgggccgaactgtggacctggggctgacaggcaaccatggagttgtgcaccccagtcttgcggacagtgccaacaagtttgaggagaacacctactgcttcggccggaccgtggagacactgctgctccgctttggcaagaccatcatggaggagcagctggtactgaagggtggccaacatcctcatcaacctgtatggcatgacggccgtgctgtcgcgggccagccgctccatccgcattgggctccgcaaccacgaccacgaggttctcttggccaacaccttctgcgtggaagcttacttgcagaatctcttcagcctctctcagctggacaagtatgctccagaaaacctagaagcagattaagaaagtgtcccagcagatccttgagaagcgagcctatatctgtgcccaccctctggacaggacatgctgagaggggacagtgtcccctgctaccgcccgcccctacccatggcccgttgctggatgactgttactcttttttcagaaggttgggattatcacaggttaagccttttgttccccgtctgcacctgaagggttgtcgcctggcctgggagagcctcttccaggttttgacctgcaggcagtgctctctaacaggaccatcacagcttctgaactgagccggagagagagaatggaattgctgacccctggaactggcgggtattctggtcattgaggagacaccatagtggaaactggggcttatgctgctgcctccagggtgtgaggtgggtggggacctgtgtcaggtgtggatagccatttctgctcaaccacacattctctaagaaacagcttgaaagctc

SEQ ID NO: 177725 - protein, 555 aa, Artificial Sequence
  derived and/or modified sequence
MARPDDEEGAAVAPGHPLAKGYLPLPRGAPVGKESVELQNGPKAGTFPVNGAPRDSLAAASGVLGGPQTPLAPEEETQARLLPAGAGAETPGAESSPLPLTALSPRRFVVLLIFSLYSLVNAFQWIQYSIISNVFEGFYGVTLLHIDWLSMVYMLAYVPLIFPATWLLDTRGLRLTALLGSGLNCLGAWIKCGSVQQHLFWVTMLGQCLCSVAQVFILGLPSRIASVWFGPKEVSTACATAVLGNQLGTAVGFLLPPVLVPNTQNDTNLLACNISTMFYGTSAVATLLFILTAIAFKEKPRYPPSQAQAALQDSPPEEYSYKKSIRNLFKNIPFVLLLITYGIMTGAFYSVSTLLNQMILTYYEGEEVNAGRIGLTLVVAGMVGSILCGLWLDYTKTYKQTTLIVYILSFIGMVIFTFTLDLRYIIIVFVTGGVLGFFMTGYLPLGFEFAVEITYPESEGTSSGLLNASAQIFGILFTLAQGKLTSDYGPKAGNIFLCVWMFIGIILTALIKSDLRRHNINIGITNVDVKAIPADSPTDQEPKTVMLSKQSESAI

SEQ ID NO: 177726 - DNA, 5939 bp, Artificial Sequence
  derived and/or modified sequence
gccgcgcggcgcgggggaggagaccttcatctgttcacgcggtagcgcggattgcggttcgcggcgcgcgccaccggggaaggagcggtgggccgaggggttggaggtggggccccaggaggacctcgggctgtgggccgggagagcggagtcggggagtggggcgggggagcgaggtggcgccggggagcctgggatatggcgcggccagacgatgaggagggggcggcggtggcgcccggacacccgctcgcgaaaggatacctcccgttgccgaggggcgcgcccgttgggaaggagagcgtggagctgcagaacgggcccaaagcgggcaccttcccggtgaatggggccccccgggacagcctcgctgccgcctcgggagttctgggcgggcctcagactccactggccccagaagaggagacccaggcccggctgctgcctgcgggcgcgggagctgagaccccgggggccgagagcagcccgctgccccttacggcgctctccccgcggcgcttcgtggtgctcctgatcttcagcctgtactcgctggtcaacgcctttcagtggatccagtacagcatcattagcaacgtcttcgagggcttctacggtgtcaccttgctgcacatcgactggctgtccatggtgtacatgctggcctacgtgcccctcatcttcccggccacctggctgctggacaccagaggcctgcggctcaccgccctgctgggctccggcctcaactgcctgggtgcctggatcaagtgcggcagtgtgcagcagcatctcttctgggtcaccatgttgggccagtgcttgtgctcggtggcccaggtgttcatcctgggcttgccctcccgcatcgcctcagtgtggtttgggcccaaagaggtgtccacagcttgtgccaccgccgtgctgggcaatcagcttggaactgcagttggctttttgctaccaccagttttagtacccaacacacagaatgacacaaatctcctggcttgtaatatcagcaccatgttttatggaacatcagctgttgccacacttttatttattttaacagcaattgccttcaaagaaaaacctcggtatccaccaagtcaggctcaagcagctcttcaagacagtccccctgaagagtactcctataagaaatcaataagaaacctgtttaaaaacattccttttgtccttctgttgatcacttatggtatcatgactggtgccttttattcagtctcaacgttattaaatcaaatgatattgacatattatgagggagaagaagtcaatgctggaaggattgggctaacgctagtagtagctggaatggtgggctctattctttgtggcttatggctggattatactaaaacatacaaacagactactctgatagtttatattttgtcttttattggaatggttatctttactttcacattggaccttagatatattatcatcgtgtttgttactggaggggtgcttggcttcttcatgactggttacctccctttgggttttgaatttgctgttgaaatcacttaccctgaatctgaaggtacttcatctggtcttcttaatgcttctgcacagatatttggaattttgttcacattggctcaaggaaagctcacatcagactatggtcctaaggcagggaacatttttctctgtgtctggatgtttataggcatcatattaacagcattaatcaagtctgatctgcgaagacacaacataaatataggaattacaaatgttgatgttaaagctataccagctgacagtcccacagaccaagaaccaaaaacggttatgttgtccaagcagtcagaatcagcaatttgaagagaaaggcaaagttactgtcctgtagtaattggggacaatgtgatcatccttggagagagatgtgagcaccaaggctgggtttgtatgtggtgggggaataaacacacttacttgaaaattaccatatgaactctaaatgcataattattattttgcttaattgttaaattaagggaaattttcttaaaattcttctgtttacatcatgttaacactactgtttatctaattagtatccggtttttagtctcatattgtatctgaaagtaagcttcttgacgtttactttttaaaagtcgatgtttttcttttttgtagaaaatggaagcttagaatactttttaaagtgataatatggggtgttcagtccccataagatataatagttcatgcagtttatatattaaagtatccagtggaactaaatgtacaatatattcctaattggctgcctttttcactgtgctgaccagctgttcaagccacttcagtttgagtacaacataccaacatgacactactcacccacaaaggacagcattgggatcaggctttcagatgacctctaagatttttcccatttattgtactcttgttacaaagtactttttaacacatgcagtcaatggctataaaaactattctgtgtacagattctacccagactttggtcttagaattatgttctaattaaggagcctggttacaggttcattctgtcttgagttcttttctgtgctgcctttctatcatggataaatgctaacgctgtattttttcactccaacttgagatagagtagttttgtacccattgccttttttttcttttaaactctctttttttttttttcctgatgtgtaactttctagtaagataatttcatcatgtatgttactggctatttcatgatttcatgtatcacatcgtatattttgccttgaagattcctgaaataaggaaatctataataacttcagatagcctacatgtccccatttagtggagacctcttgaatgctatttgaattctgcagtatcatttttatgaccattctcctttgaggaatactatgcccaggtacatgctctatcagtgtgccgggagagtggattcttttcttcactgcagagtcatcacactgttagaatagtctgctcttttacatgctcaggtagggaaaataggaccaaatatatttccacagtgcctaccactgtgtcatgtttacagtgagagtttaaatattgttgatgtcctgactctgtgagctcatagggagtatcttcatagtaatgacatttgatcagccataaaatttacattatgttcatatgcacccaaaaaagctagtcaggtaatgaatacccttgaagtgaatagcaattttgatttaggcagtgtgttaggccatccttgcattgctataaagaaatatttaggctgggcgtggtggctcacgcctgtaatcccagcactttgggaggctgaagcgtgtggatcacctgaggtcaggagttcaagaccagcctggccaacatggtaaaaccccatctctactaaaaaaaaaaaaaaaaaaaaaaaaaaaaaaaaaggccaggcgcagtgctgtggctcatgcctgtaatctcagcactttgggaggccaaggcaggtggatcacaaagtcaggagttcaaaaccagcctggccaagatggtgaaaccccatctctactaaaaatacaaaaattagcgcagtggcaggcgcctgtaatcccagctactcaggaggctgaggcaggagaatcgcttgaatgcgaatggcagaggttgcagtgagcgaaaatcacactactgcactccagcctgggagataaagtgagactgtctcaaataaataaataaataaataaataaataaataaataaataaataaaacctgaggttgagcacgatggctcacacctatagtcccagcactttgggaggctgaggtgggtggatcatttgaggccaggagttgaagaccagtctggccaacatggcaaaaccccatctctactaaaaatacatacacacacacacacacacacaaattagccgggcatggtggcacacgcctgtagtcccagcttcttgggaagctgaggcatgagaattgcctgaacctggaaggcggaggctacagtgagctgagattgcgccactgcactccagcctgggtgacagagcgagactctgtttcaggaaaaaaagaacagaaatacctgagactgggtaatttataaataaaagaggtttaagtggctcacagttctgcaggctgtgtaagcatggcaccagtgtctgctcggcttctggggagccctcagggagctttactcatggtgaaaggctaagtgggagcagagatgtcacatggcgaagcaggagcaagagagcagggaggtgccacacaccttcaaacaaccagattttgtgaaaactcactcattactgcaaggacagcaccaagccatgagggatccacccgcaggacccaaacaccttctattagggccaaccttcaacattggggattacatttcaatgtgagattggagggacaagtatcccaactatatcaggcagaatatatgcattgatatatattgaaattataacattctctataatcaagtgactgtaaattatgtcgaatctgaccctggggaatgtgttatctaaagaatttgactaagaatcaggaactctgtgtccatgtcctggatgtatttctgtatgttcctataactctggacaaatcattaaacctctctgggcagcgttttcctcatccatgaaatgaatgtgttcaatttgatctcaaagatctttccaaaatattaaatgccattaatcatggaatagaccaaattattgtatcacaggaacttgaatccagccagagaaaaattccctggacaattggataaacaaatgtgattgctaccttatggatacaacggacttttacatttctttttagcctttttagtcagttgagggtaactcaagcagagtatgtccaatcattagcttcctttgatatttacattacaggtaaaaacggccaaaaatatattttaaggtctctccccaaatgtttttatttttaaactatcaatgttgtttaaaataatcatgtacttgttgagttcctgaggtttggaacaaattacacataaaatttagaatactttatttctgaaaagcatatacatatatgttatgtttatttttccttgttgattagaaaggtgatggaatatgtgacaatgcaaaatgaattgataatttttctgtattttgagtgaaagttgtctgtaatatgtcaagcaagaatgttataattctacagtaatgtgtgacttcatgacagagctacattctgagaaatttgtcattaggtgatttcatcattgtgtgaacatcatgaagtgtacttacacaaacctaggtggtagagcctactgcacacctgggctagatggcaaagtctgtcgcttctgggctacagacctgtacagcatggtactgtattgaatactgtaggcaactgtaacacaatggtatctgtgtaatctaaacatagaacagataatacattgtgctacaatgtaacaatggctgtggcatcactaggtgataggaatttttcagttccattataatcttataggatctctgtcatatgtggtcaattgttgatcgaaacatgactgtatgtcgtattttcagaaaatggaataggtaatcatcacttgtgtgaattttaatcaaatgacttaggaaagaaactggatgtttcaaaagctgttgcatttattacaaatgtcacaaatacagctcttgccttttgagaatgttggagagatgtctttaaaaaatatgtttgtgtgtaaaaatgtgtctgtatgcaatagctagaaaaatgcctgtgtcttaagtcattactcatgttctaatttttgttctttgtactatttatctgtatgcttgttcttcagtatttcagactcaaaataaatttatttttttatgttaa

SEQ ID NO: 177727 - DNA, 1668 bp, Artificial Sequence
  derived and/or modified sequence
atggcccggcctgacgacgaagagggtgccgctgtcgcccctgggcatcctctggctaaaggatacttaccgctccctcgcggagctcctgtgggcaaagagagcgtcgagctacagaacggaccaaaggctgggacattccccgtgaatggcgcacctcgcgactccctggcggccgcttctggggtcctaggcgggccacagactcccctggcgcccgaggaagaaacccaggccagactgctgccagctggtgccggcgctgaaacccctggggccgaatctagcccccttcccctgaccgcgttgtcaccccgtcggttcgtcgtcctcctgatcttttctctctacagcttggtgaatgcttttcagtggattcaatactcaatcatctctaatgtgttcgaaggattttatggggtcacactgctgcacatcgattggttgagtatggtttacatgctggcttatgtccccctcattttcccggcgacttggctcctggacaccagaggtttgagacttaccgctctgcttggcagtggcctgaattgcttaggcgcttggataaagtgcggttctgttcagcagcacctgttctgggtgaccatgcttggacagtgtctatgttctgtcgcccaggtctttattctcgggctaccctcacgcatagcatcagtttggttcggaccgaaagaggtatcaactgcctgtgccaccgcggtgctagggaaccaactggggacagcagtgggctttctgctgccacccgtactcgtgccaaacacccagaacgataccaatttactggcctgcaatatctccactatgttctacggcacttcagctgtagccacacttttgttcattctgacagccattgcattcaaagaaaagccccggtacccaccgtcccaagcacaggctgccctacaagacagtcccccagaggaatattcctataaaaaaagcattagaaacttgtttaagaatatcccctttgttctgctgctcattacgtatggcatcatgaccggagccttctactcggtgtctacgctgttgaaccagatgatcctcacctactacgagggagaagaggtgaatgcaggccgcataggactgacgttggtcgtcgcaggaatggtggggtctattctgtgcggtttgtggctggactacactaagacatataagcaaactacacttatcgtgtatattctatcatttattggtatggtgatcttcacatttacactggacctgaggtacatcattattgtctttgttacgggtggagtgcttggtttctttatgacaggctatcttccattaggctttgagttcgcagtcgaaataacctaccccgaatccgaagggacctcatctggacttcttaatgcctcagcccagatttttgggattctctttacgctagctcaggggaaactgaccagcgattacgggccaaaagcaggtaacatattcctgtgtgtgtggatgtttattggtattattctgactgctttgatcaaatctgacctacggcgtcacaatattaatatcggaatcacaaatgttgacgttaaagcaatccctgcggatagtccgacagatcaagaacccaaaacggttatgttgtccaagcagtctgagtccgctatatag

SEQ ID NO: 177728 - DNA, 1668 bp, Artificial Sequence
  derived and/or modified sequence
atggcccggccagatgatgaggagggcgctgctgtggcccctggccaccccctggccaagggctacctgcccctgcccaggggggcccctgtgggcaaggagagcgtggagctgcagaatggccccaaggccggcaccttccctgtgaatggagccccccgggacagcctggccgccgccagcggcgtgctgggcggcccccagacccccctggcccctgaggaggagacccaggcccggctgctgcctgctggggccggggctgagaccccaggagctgagagcagccccctgcccctgacagccctgagccccaggagatttgtggtgctgctgatcttcagcctgtacagcctggtgaatgccttccagtggatccagtacagcatcatcagcaatgtgtttgagggcttctatggagtgaccctgctgcacatcgactggctgtccatggtgtacatgctggcctacgtgcccctcatcttccctgccacctggctgctggacacccggggcctgcggctgacagccctgctgggcagcggcctgaactgcctgggcgcctggatcaagtgtggctctgtgcagcagcacctgttctgggtgaccatgctgggccagtgcctgtgcagcgtggcccaggtgttcatcctgggcctgcccagccgcatcgcctctgtgtggtttggccccaaggaggtgtccacagcctgtgccacagctgtgctgggcaaccagctgggcacagctgtgggcttcctgctgccccctgtgctggtgcccaacacccagaatgacaccaacctgctggcctgcaacatcagcaccatgttttatggcaccagcgctgtggccaccctgctcttcatcctgacagccatcgccttcaaggagaagccccgctacccacccagccaggcccaggccgccctgcaggacagccccccagaggagtacagctacaagaagagcatccggaacctcttcaagaacatcccctttgtgctgctgctgatcacctacggcatcatgactggagccttctacagcgtgtccaccctgctgaaccagatgatcctgacctactatgaaggagaggaggtgaatgccggcagaattggcctgaccctggtggtggccggcatggtgggcagcatcctgtgtggcctgtggctggactacaccaagacctacaagcagaccaccctcatcgtgtacatcctgtccttcatcggcatggtgatcttcaccttcaccctggacctgcgctacatcatcatcgtgtttgtgactggaggagtgctgggcttcttcatgacaggctacctgcccctgggctttgaatttgctgtggagatcacctacccagagagcgagggcaccagcagcggcctgctgaatgccagcgcccagatcttcggcatcctcttcaccctggcccagggcaagctgaccagtgactatggccccaaggccggcaacatcttcctgtgtgtgtggatgtttattggcatcatcctgacagccctgatcaagagtgacctgcggcggcacaacatcaacatcggcatcaccaacgtggatgtgaaggccatcccagctgacagccccacagaccaggagcccaagacagtgatgctgagcaagcagagcgagagcgccatctag

SEQ ID NO: 177729 - DNA, 1668 bp, Artificial Sequence
  derived and/or modified sequence
atggcccggcccgacgacgaggagggcgccgccgtggcccccggccatccactggctaagggatacctgcctctgccgaggggggcccctgtagggaaagaatcggtggaattacaaaatgggcctaaagctggcacgttcccggttaatggtgccccccgtgatagcctggcagctgcaagcggcgtcctcgggggcccacagactccactggctcccgaggaagagacccaggccaggctcctgccagcgggagctggtgctgagacccccggggccgaaagctcccccctgccgctaacagccctttctccgcgccgctttgtggtgttgcttattttttcactttattcactggtcaatgcattccagtggatccagtatagcattatatcaaacgtgtttgagggcttttacggcgtcactctgctgcacattgactggttgagcatggtttacatgctggcctacgtgccgttgatctttcctgcaacttggctgttggatacccgtgggctccgcctcacagcccttctggggagcggactgaattgcctgggtgcctggatcaaatgtggttcagtacagcagcatttgttctgggtaaccatgttggggcagtgcctttgctctgtggcacaggtttttatacttggactcccctctcgaattgccagtgtctggttcggccctaaggaagtgagcacagcctgtgctacagctgtcttgggcaatcagctcggaaccgcagtgggctttctgcttcctccagttctggtgcctaatacgcagaacgacacaaatctgctggcctgtaatataagcactatgttctacggtacgtctgctgtagccactttactcttcatcctcactgctatagcatttaaggagaaaccacggtatcctcccagtcaggcccaagcagccctccaggattcaccaccagaggaatactcttataagaagagcatcaggaacctgttcaagaacatcccctttgtgctgcttcttattacctacgggatcatgacgggtgccttctattccgtgtccactctgctgaaccagatgatccttacctactatgagggagaggaggtcaatgctggacgaatcggcttgaccctagtggtcgcgggcatggtcgggtccattctgtgtggcctatggctggattacacaaagacctacaagcagacaactttgatcgtctacatattgagttttatcgggatggtgatcttcacgttcacactggatctgaggtacatcataatagtttttgttacaggtggtgtcctgggatttttcatgaccggttatttgcctttagggttcgagtttgcagtagagattacgtatcccgaaagcgaggggactagttctggactgctgaacgccagtgcacagatcttcggcatactgtttacactggcccagggaaagctgacttccgattacgggcctaaggctggaaacattttcctgtgcgtatggatgttcattggcattattctgacagcattgattaaatctgatctgcgccgccacaatatcaacatagggatcaccaatgttgacgtgaaagctattcccgcggattcccccactgaccaggagcctaagactgtgatgctcagcaaacagtcagagagtgcgatatag

SEQ ID NO: 177730 - DNA, 1668 bp, Artificial Sequence
  derived and/or modified sequence
atggctcgccctgacgacgaggagggagccgctgtcgctccgggacaccccttggccaaaggttatttgcccttgcctcgcggagcacctgtgggcaaagaatccgtggagttgcagaatggacctaaggcaggaacctttcccgttaatggcgcaccccgagactccctcgcagctgcctccggcgtcctcggaggccctcagaccccccttgccccagaggaagagacccaggcgagactcctccccgctggggctggcgctgaaactcccggtgctgaatcctctccgttgccgctgaccgctctctcccctaggcgctttgtggttttgctgattttttctctatactccctcgtaaatgcattccagtggattcagtactccatcatttccaatgtcttcgaaggcttctatggcgtgacacttctgcacatcgactggttatctatggtgtacatgttggcttatgttcctctgattttccccgctacttggcttctggatactcgaggtcttaggctcaccgcgctcctgggctccggcctcaactgcctgggagcctggatcaaatgtgggtccgtgcagcaacatctgttctgggtgacaatgctgggacaatgcctgtgtagcgttgcacaggtgttcatcctcggcctgccaagccgcatcgctagcgtctggtttggacctaaagaagtgagcactgcatgcgctacagccgtattgggcaaccaactgggcaccgctgttggttttcttctgccccctgtgctggtgccaaacacccagaatgatacaaatctattggcctgtaatatctccactatgttctatggcaccagtgccgtcgcaaccctgctcttcattctgactgccatcgctttcaaggagaaaccacgttatcctccttcgcaggctcaggccgctctgcaggattccccccctgaggagtatagctacaaaaaaagcatccggaacctcttcaagaacataccatttgtgctgctcttgatcacatacgggataatgactggtgctttctactccgttagtaccctattaaaccaaatgatcctcacgtactatgagggagaggaagtgaatgcgggacggatcggtttaacattagtcgtcgccggtatggtcggaagcattctttgtggcctgtggctcgactatactaagacatataagcagacgaccctgattgtgtatatattgagctttatcggcatggtcatatttacatttaccctggatctgaggtacatcatcattgtgttcgttactggcggtgtgctcggcttttttatgacgggatacttgcctctgggctttgaattcgcagtggagattacctaccctgagagcgagggaacttctagcggacttctcaatgcctctgcgcaaatcttcggcatactttttactttagctcaaggcaagctgacctccgattatgggccaaaagctggaaacatttttctatgtgtgtggatgttcatcggcattatcttgaccgccctgatcaaaagcgacctccgtaggcataatattaacattggaataacaaatgtagacgtgaaagcgattcctgcggactcccctacagaccaggaacccaagaccgtgatgctgtctaaacagtccgagagtgcaatctag

SEQ ID NO: 177731 - DNA, 1668 bp, Artificial Sequence
  derived and/or modified sequence
atggccagacccgacgacgaggagggcgccgccgtggcccccggccaccccctggccaagggctacctgcccctgcccagaggcgcccccgtgggcaaggagagcgtggagctgcagaacggccccaaggccggcaccttccccgtgaacggcgcccccagagacagcctggccgccgccagcggcgtgctgggcggcccccagacccccctggcccccgaggaggagacccaggccagactgctgcccgccggcgccggcgccgagacccccggcgccgagagcagccccctgcccctgaccgccctgagccccagaagattcgtggtgctgctgatcttcagcctgtacagcctggtgaacgccttccagtggatccagtacagcatcatcagcaacgtgttcgagggcttctacggcgtgaccctgctgcacatcgactggctgagcatggtgtacatgctggcctacgtgcccctgatcttccccgccacctggctgctggacaccagaggcctgagactgaccgccctgctgggcagcggcctgaactgcctgggcgcctggatcaagtgcggcagcgtgcagcagcacctgttctgggtgaccatgctgggccagtgcctgtgcagcgtggcccaggtgttcatcctgggcctgcccagcagaatcgccagcgtgtggttcggccccaaggaggtgagcaccgcctgcgccaccgccgtgctgggcaaccagctgggcaccgccgtgggcttcctgctgccccccgtgctggtgcccaacacccagaacgacaccaacctgctggcctgcaacatcagcaccatgttctacggcaccagcgccgtggccaccctgctgttcatcctgaccgccatcgccttcaaggagaagcccagatacccccccagccaggcccaggccgccctgcaggacagcccccccgaggagtacagctacaagaagagcatcagaaacctgttcaagaacatccccttcgtgctgctgctgatcacctacggcatcatgaccggcgccttctacagcgtgagcaccctgctgaaccagatgatcctgacctactacgagggcgaggaggtgaacgccggcagaatcggcctgaccctggtggtggccggcatggtgggcagcatcctgtgcggcctgtggctggactacaccaagacctacaagcagaccaccctgatcgtgtacatcctgagcttcatcggcatggtgatcttcaccttcaccctggacctgagatacatcatcatcgtgttcgtgaccggcggcgtgctgggcttcttcatgaccggctacctgcccctgggcttcgagttcgccgtggagatcacctaccccgagagcgagggcaccagcagcggcctgctgaacgccagcgcccagatcttcggcatcctgttcaccctggcccagggcaagctgaccagcgactacggccccaaggccggcaacatcttcctgtgcgtgtggatgttcatcggcatcatcctgaccgccctgatcaagagcgacctgagaagacacaacatcaacatcggcatcaccaacgtggacgtgaaggccatccccgccgacagccccaccgaccaggagcccaagaccgtgatgctgagcaagcagagcgagagcgccatctag

SEQ ID NO: 177732 - protein, 298 aa, Artificial Sequence
  derived and/or modified sequence
MKTLQSTLLLLLLVPLIKPAPPTQQDSRIIYDYGTDNFEESIFSQDYEDKYLDGKNIKEKETVIIPNEKSLQLQKDEAITPLPPKKENDEMPTCLLCVCLSGSVYCEEVDIDAVPPLPKESAYLYARFNKIKKLTAKDFADIPNLRRLDFTGNLIEDIEDGTFSKLSLLEELSLAENQLLKLPVLPPKLTLFNAKYNKIKSRGIKANAFKKLNNLTFLYLDHNALESVPLNLPESLRVIHLQFNNIASITDDTFCKANDTSYIRDRIEEIRLEGNPIVLGKHPNSFICLKRLPIGSYF

SEQ ID NO: 177733 - protein, 268 aa, Artificial Sequence
  derived and/or modified sequence
MLAKISTTWKLFLKLLGPEILLSSLKSRHSFSHSPSHLGLMHRHEHLLRKTTKNFKTATTTLQSTLLLLLLVPLIKPAPPTQQDSRIIYDYGTDNFEESIFSQDYEDKYLDGKNIKEKETVIIPNEKSLQLQKDEAITPLPPKKENDEMPTCLLCVCLSGSVYCEEVDIDAVPPLPKESAYLYARFNKIKKLTAKDFADIPNLRRLDFTGNLIEDIEDGTFSKLSLLEELSLAENQLLKLPVLPPKLTLFNAKYNKIKSRGIKANAFK

SEQ ID NO: 177734 - DNA, 897 bp, Artificial Sequence
  derived and/or modified sequence
atgaagacattgcagtctaccctgctgctgctgctcctggtgccactcattaaacctgctccaccgacacaacaggattctaggattatctatgattacggtaccgacaacttcgaagaaagcatcttctcacaagactatgaggacaaatatctggatgggaaaaacattaaggaaaaggagacggtcattatccctaatgaaaaatctcttcagttgcagaaggatgaagctataacaccactccctccgaagaaggaaaacgatgaaatgccaacctgcctgttgtgtgtgtgtttatcaggtagcgtgtactgtgaagaagtcgacatcgacgcggtgccgccactgcccaaggagagcgcctatctctacgctcgtttcaacaaaatcaaaaaactgaccgccaaagacttcgccgacataccaaatctccggagattagattttactggcaatctgatagaggatattgaggacggcaccttcagtaaactgagtctgcttgaggaacttagcctggccgaaaatcaactcctgaaattgcctgtgctgccaccaaagctgacccttttcaacgccaagtataacaagataaagtccagaggcattaaggccaacgcctttaagaaactgaataacctgacttttttgtacttggaccataatgctttagagtctgttccattgaatctgcctgaaagccttcgtgtgattcacctgcagttcaacaatattgcctccatcacggacgatactttttgcaaggccaacgacacgtcctatatccgggatcggatcgaagagataaggttggagggaaatcccatcgtactgggcaaacacccaaacagtttcatctgtttaaagagactccccatcgggagttacttttag

SEQ ID NO: 177735 - DNA, 897 bp, Artificial Sequence
  derived and/or modified sequence
atgaaaacgttgcagtccactctgttgttacttttactcgtgcccctgataaagcccgccccaccaactcagcaggactccagaatcatctacgactacgggacagataacttcgaagagtccatcttcagccaagactacgaagataaatatctggacggcaaaaacattaaggaaaaagagaccgtgataattccaaacgagaagtcactgcagttgcagaaggatgaagcgataacacccttacctccaaaaaaagaaaacgacgagatgccaacctgtttgctgtgcgtgtgcttgagtggcagcgtgtactgcgaggaggtcgacatcgacgccgtgcctccattaccaaaagagagcgcatatctgtatgccagattcaacaagatcaaaaaattgactgccaaagactttgccgatataccaaacctcagacggctggatttcactggaaatctgatagaggatatcgaggatggtaccttcagtaagctatcattactggaggagttgtccctggctgagaatcaattgcttaagctcccagttttacctcccaaattgaccctgttcaatgcgaaatacaacaaaattaagtcaagaggaatcaaagcaaacgcctttaagaaactgaataatctgacttttttgtacctagaccataatgcactcgaaagtgttccactgaatttgccagagagtctgagagtaattcatctgcagttcaacaacattgcttccattaccgacgacaccttttgtaaagcaaacgacaccagttatattagggaccggatcgaagaaattcggctggaagggaaccctatcgttctcgggaagcatccaaattcatttatctgcttgaagagactgcctatcggttcttatttttag

SEQ ID NO: 177736 - DNA, 807 bp, Artificial Sequence
  derived and/or modified sequence
atgctggcaaaaattagtactacttggaagctcttcttgaaactccttggcccagagatacttttgagtagccttaagagccgacactctttctcacactccccgtctcacctcgggttaatgcatcggcacgaacacctcttgcgaaagactactaagaacttcaagaccgctactacaactttacagtcaactctactcttgttactccttgtccctctaattaagcctgctcctcccacacaacaggattctaggatcatttacgactatggcaccgacaactttgaggagtcgatcttcagccaggactacgaggataagtatctagatggcaaaaacattaaggagaaggagaccgttattatccctaatgagaagagcctgcaactgcaaaaggatgaggctattacgcccctgccaccaaagaaggaaaacgacgagatgcctacttgcttgttatgcgtttgtctttcaggctcggtatactgtgaagaggttgatatcgatgccgtcccccccttgcccaaagagtctgcatacctgtacgcccgattcaacaagattaagaagttgaccgctaaggactttgctgatatccctaacttgcgccgcctggacttcacaggaaatctcatcgaggatatcgaggatggaaccttttccaaattaagtctcttggaggagttgtctctcgccgagaatcagctcttgaaactgcccgtccttccccccaagctgactctgttcaacgcgaagtataacaagatcaaaagccgtggcatcaaggccaatgcttttaaatag

SEQ ID NO: 177737 - DNA, 897 bp, Artificial Sequence
  derived and/or modified sequence
atgaagaccctgcagagcaccctgctgctgctgctgctggtgcccctcatcaagccagccccacccacccagcaggacagccgcatcatctatgactatggaacagacaactttgaggagagcatcttcagccaggactatgaggacaagtacctggatggcaagaacatcaaggagaaggagaccgtcatcatccccaatgagaagagcctgcagctgcagaaggatgaggccatcacccccctgccccccaagaaggaaaatgatgagatgcccacctgcctgctgtgtgtgtgcctgagcggctctgtgtactgtgaggaggtggacattgatgctgtgccccccctgcccaaggagagcgcctacctgtatgcccgcttcaacaagatcaagaagctgacagccaaggactttgctgacatccccaacctgcggcggctggacttcaccggcaacctgattgaggacattgaagatggcaccttcagcaagctgagcctgctggaggagctgagcctggccgagaaccagctgctgaagctgcctgtgctgccccccaagctgaccctcttcaatgccaagtacaacaagatcaagagccggggcatcaaggccaatgccttcaagaagctgaacaacctgaccttcctgtacctggaccacaatgccctggagagcgtgcccctgaacctgcctgagagcctgcgggtcatccacctgcagttcaacaacatcgccagcatcacagatgacaccttctgcaaggccaatgacaccagctacatccgggacagaattgaggagatccggctggagggcaaccccatcgtgctgggcaagcaccccaacagcttcatctgcctgaagaggctgcccatcggcagctacttctag

SEQ ID NO: 177738 - DNA, 807 bp, Artificial Sequence
  derived and/or modified sequence
atgctggccaagatcagcaccacctggaagctgttcctgaagctgctgggccctgagatcctgctgagcagcctgaagagccgccacagcttcagccacagccccagccacctgggcctgatgcacagacatgagcacctgctgaggaagaccaccaagaacttcaagacagccaccaccaccctgcagagcaccctgctgctgctgctgctggtgcccctcatcaagccagccccacccacccagcaggacagccgcatcatctatgactatggaacagacaactttgaggagagcatcttcagccaggactatgaggacaagtacctggatggcaagaacatcaaggagaaggagaccgtcatcatccccaatgagaagagcctgcagctgcagaaggatgaggccatcacccccctgccccccaagaaggaaaatgatgagatgcccacctgcctgctgtgtgtgtgcctgagcggctctgtgtactgtgaggaggtggacattgatgctgtgccccccctgcccaaggagagcgcctacctgtatgcccgcttcaacaagatcaagaagctgacagccaaggactttgctgacatccccaacctgcggcggctggacttcaccggcaacctgattgaggacattgaagatggcaccttcagcaagctgagcctgctggaggagctgagcctggccgagaaccagctgctgaagctgcctgtgctgccccccaagctgaccctcttcaatgccaagtacaacaagatcaagagccggggcatcaaggccaatgccttcaagtag

SEQ ID NO: 177739 - DNA, 897 bp, Artificial Sequence
  derived and/or modified sequence
atgaagaccctgcagagcaccctgctgctgctgctgctggtgcccctcataaagcccgcacctccaactcagcaggattcccgtattatctacgactacggtactgataatttcgaggaatccatcttctcgcaagattacgaagacaagtacctggacggaaaaaatatcaaagaaaaagaaacagtcataatcccgaacgagaaaagtctccaactacaaaaagacgaggctatcacccccttgccgcccaagaaggaaaacgacgagatgccaacctgtctgctgtgcgtctgtttatccggcagtgtgtattgtgaggaagttgatatagatgcagtgccacctctgccaaaagaaagtgcctacctgtatgcgagattcaataagatcaagaaactgaccgccaaagatttcgccgacattccaaatctgagaaggctggactttaccggtaaccttattgaagacattgaggatggcactttcagcaagctttccctgctcgaggaactgtcattagcagagaatcagctcttaaaacttccggtgctgccccctaagctgaccctgtttaacgccaaatacaacaaaatcaaatcacgaggaatcaaagccaacgccttcaagaagcttaacaatctgactttcttatatctcgatcataacgctctggaatccgtgccattgaatctgcccgagagtcttagggtcattcatttacaattcaataacatagcctccatcacagatgacacattttgtaaggcaaacgatacatcttatattagggaccggatagaggaaatccggttagagggcaaccccatagtcttaggaaaacacccaaattcctttatctgtctgaagagacttccgatcggtagctatttttag

SEQ ID NO: 177740 - DNA, 897 bp, Artificial Sequence
  derived and/or modified sequence
atgaagaccctgcagagcaccctgctgctgctgctgctggtgcccttaattaaaccagcccccccgacccagcaagatagcaggatcatctatgactacggtaccgataatttcgaagagagtatattctcccaggattatgaagacaagtatctggacggaaagaatataaaagagaaagagactgtgattattcctaatgaaaaatctttgcagctgcagaaggacgaagctataaccccgctgcctcctaaaaaagaaaacgacgaaatgccaacttgtttactttgtgtttgcctttccggttcggtttactgcgaggaagtggacatcgacgccgttccgcctctgccaaaggagtctgcctatctgtacgcccgctttaacaagattaaaaaactcaccgccaaggatttcgcggacattccgaatctccggcggctcgattttactggcaaccttattgaggatattgaagacggtacatttagcaaactaagtctgctggaagagctgtcactggcagagaatcagctgctgaagctgcctgtgctgccccctaaattaacactgttcaacgccaaatacaataagatcaagtcgaggggaattaaggccaacgcgtttaaaaagctgaacaacttaaccttcctgtatctggatcacaatgccctggagagcgtgcctctgaacctgcccgagtctctcagagtgattcaccttcagtttaacaatatcgctagcatcaccgacgatacattttgcaaggccaatgataccagttacatcagagaccgcattgaggagattagactggaaggcaaccctatagtgctggggaagcaccctaattcattcatctgtctaaaacggcttccaatcggctcgtacttttag

SEQ ID NO: 177741 - DNA, 807 bp, Artificial Sequence
  derived and/or modified sequence
atgctggccaagatcagcaccacctggaagctgttcctgaagctgctgggccctgagattctgctgagttcgctcaagtcacgccattcgttttcacactcgccaagtcatttaggcctcatgcaccggcacgaacatctgctccgcaagactactaagaatttcaagaccgctaccacaaccctgcagagcacattgttactactgctgcttgttccactgattaaaccagctccacccacccagcaagactcccgaatcatctacgactacgggacagataacttcgaagaaagcattttcagtcaggactatgaggataaatatctggacggcaaaaatattaaggagaaagagacagttattatccctaatgagaaatctttgcagctgcagaaggatgaggcaataacgcctcttccgcctaagaaagagaatgacgaaatgcctacctgtctgttgtgtgtatgtctgtccggctcggtgtattgcgaagaggtcgatatcgacgccgtcccgccgctgcctaaagaaagtgcgtacttatacgcacgcttcaataagatcaaaaagctgacagcaaaagactttgctgatatccctaacctgaggagactggattttacagggaatctaatcgaggatattgaggatgggacattcagcaaactgtccctcctcgaagagctgagcttggccgaaaaccaactgctcaagctgcccgtgctcccaccgaagctgacccttttcaacgcaaagtataataagataaaatctcggggcatcaaggcgaacgcttttaagtag

SEQ ID NO: 177742 - DNA, 2971 bp, Artificial Sequence
  derived and/or modified sequence
gctaatgcacagacatgaacatctattgaggaaaaccacaaaaaacttcaaaacagctacaacggtatcctaagaatatttcaattaaatattagtatgtctgctgaaggcacttaattattaagaaacttaaaattatcaatctttcttgaatttctgatagagaagtaaaactattttccaaaactatttttcagaatgttcactgatacataaaaactgctagcatctaattaaagatcactaagggttaaatactgttctctggcccttactgcgcacaccctgccaaaacatcctctaagcttttaaatattgcttcgatggtctgaatttttatttccagggaaaaagagagttttgtcccacagtcagcaggccactagtttattaacttccagtcaccttgatttttgctaaaatgaagactctgcagtctacacttctcctgttactgcttgtgcctctgataaagccagcaccaccaacccagcaggactcacgcattatctatgattatggaacagataattttgaagaatccatatttagccaagattatgaggataaatacctggatggaaaaaatattaaggaaaaagaaactgtgataatacccaatgagaaaagtcttcaattacaaaaagatgaggcaataacaccattacctcccaagaaagaaaatgatgaaatgcccacgtgtctgctgtgtgtttgtttaagtggctctgtatactgtgaagaagttgacattgatgctgtaccacccttaccaaaggaatcagcctatctttacgcacgattcaacaaaattaaaaagctgactgccaaagattttgcagacatacctaacttaagaagactcgattttacaggaaatttgatagaagatatagaagatggtactttttcaaaactttctctgttagaagaactttcacttgctgaaaatcaactactaaaacttccagttcttcctcccaagctcactttatttaatgcaaaatacaacaaaatcaagagtaggggaatcaaagcaaatgcattcaaaaaactgaataacctcaccttcctctacttggaccataatgccctggaatccgtgcctcttaatttaccagaaagtctacgtgtaattcatcttcagttcaacaacatagcttcaattacagatgacacattctgcaaggctaatgacaccagttacatccgggaccgcattgaagagatacgcctggagggcaatccaatcgtcctgggaaagcatccaaacagttttatttgcttaaaaagattaccgatagggtcatacttttaacctctattggtacaacatataaatgaaagtacacctacactaatagtctgtctcaacaatgagtaaaggaacttaagtattggtttaatattaaccttgtatctcattttgaaggaatttaatattttaagcaaggatgttcaaaatcttacatataataagtaaaaagtaagactgaatgtctacgttcgaaacaaagtaatatgaaaatatttaaacagcattacaaaatcctagtttatactagactaccatttaaaaatcatgtttttatataaatgcccaaatttgagatgcattattcctattactaatgatgtaagtacgaggataaatccaagaaactttcaactctttgcctttcctggcctttactggatcccaaaagcatttaaggtacatgttccaaaaactttgaaaagctaaatgtttcccatgatcgctcattcttcttttatgattcatacgttattccttataaagtaagaactttgttttcctcctatcaaggcagctattttattaaatttttcacttagtctgagaaatagcagatagtctcatatttaggaaaactttccaaataaaataaatgttattctctgataaagagctaatacagaaatgttcaagttattttactttctggtaatgtcttcagtaaaatattttctttatctaaatattaacattctaagtctaccaaaaaaagttttaaactcaagcaggccaaaaccaatatgcttataagaaataatgaaaagttcatccatttctgataaagttctctatggcaaagtctttcaaatacgagataactgcaaaatattttccttttatactacagaaatgagaatctcatcaataaattagttcaagcataagatgaaaacagaatattctgtggtgccagtgcacactaccttcccacccatacacatccatgttcactgtaacaaactgaatattcacaataaagcttctgagtaacactttctgattactcatgataaactgacatggctaactgcaagaattaaatcttctatctgagagtaataatttatgatgactcagtggtgccagagtaaagtttctaaaataacattcctctcacttgtaccccactaaaagtattagactacacattacattgaagttaaacacaaaattatcagtgttttagaaacatgagtccggactgtgtaagtaaaagtacaaacattatttccaccataaagtatgtattgaaatcaagttgtctctgtgtacagaatacatacttattcccatttttaagcatttgcttctgttttccctacctagaatgtcagatgtttttcagttatctccccatttgtcaaagttgacctcaagataacatttttcattaaagcatctgagatctaagaacacaattattattctaacaatgattattagctcattcacttattttgataactaatgatcacagctattatactactttctcgttattttgtgtgcatgcctcatttccctgacttaaacctcactgagagcgcaaaatgcagctttatactttttactttcaattgcctagcacaatagtgagtacatttgaattgaatatataataaatattgcaaaataaaatccatctaaatagaa

SEQ ID NO: 177743 - DNA, 2743 bp, Artificial Sequence
  derived and/or modified sequence
actcagcagtttgaaatcaagacatagcttttctcattcaccctcccacttggggctaatgcacagacatgaacatctattgaggaaaaccacaaaaaacttcaaaacagctacaacgggaaaaagagagttttgtcccacagtcagcaggccactagtttattaacttccagtcaccttgatttttgctaaaatgaagactctgcagtctacacttctcctgttactgcttgtgcctctgataaagccagcaccaccaacccagcaggactcacgcattatctatgattatggaacagataattttgaagaatccatatttagccaagattatgaggataaatacctggatggaaaaaatattaaggaaaaagaaactgtgataatacccaatgagaaaagtcttcaattacaaaaagatgaggcaataacaccattacctcccaagaaagaaaatgatgaaatgcccacgtgtctgctgtgtgtttgtttaagtggctctgtatactgtgaagaagttgacattgatgctgtaccacccttaccaaaggaatcagcctatctttacgcacgattcaacaaaattaaaaagctgactgccaaagattttgcagacatacctaacttaagaagactcgattttacaggaaatttgatagaagatatagaagatggtactttttcaaaactttctctgttagaagaactttcacttgctgaaaatcaactactaaaacttccagttcttcctcccaagctcactttatttaatgcaaaatacaacaaaatcaagagtaggggaatcaaagcaaatgcattcaaaaaactgaataacctcaccttcctctacttggaccataatgccctggaatccgtgcctcttaatttaccagaaagtctacgtgtaattcatcttcagttcaacaacatagcttcaattacagatgacacattctgcaaggctaatgacaccagttacatccgggaccgcattgaagagatacgcctggagggcaatccaatcgtcctgggaaagcatccaaacagttttatttgcttaaaaagattaccgatagggtcatacttttaacctctattggtacaacatataaatgaaagtacacctacactaatagtctgtctcaacaatgagtaaaggaacttaagtattggtttaatattaaccttgtatctcattttgaaggaatttaatattttaagcaaggatgttcaaaatcttacatataataagtaaaaagtaagactgaatgtctacgttcgaaacaaagtaatatgaaaatatttaaacagcattacaaaatcctagtttatactagactaccatttaaaaatcatgtttttatataaatgcccaaatttgagatgcattattcctattactaatgatgtaagtacgaggataaatccaagaaactttcaactctttgcctttcctggcctttactggatcccaaaagcatttaaggtacatgttccaaaaactttgaaaagctaaatgtttcccatgatcgctcattcttcttttatgattcatacgttattccttataaagtaagaactttgttttcctcctatcaaggcagctattttattaaatttttcacttagtctgagaaatagcagatagtctcatatttaggaaaactttccaaataaaataaatgttattctctgataaagagctaatacagaaatgttcaagttattttactttctggtaatgtcttcagtaaaatattttctttatctaaatattaacattctaagtctaccaaaaaaagttttaaactcaagcaggccaaaaccaatatgcttataagaaataatgaaaagttcatccatttctgataaagttctctatggcaaagtctttcaaatacgagataactgcaaaatattttccttttatactacagaaatgagaatctcatcaataaattagttcaagcataagatgaaaacagaatattctgtggtgccagtgcacactaccttcccacccatacacatccatgttcactgtaacaaactgaatattcacaataaagcttctgagtaacactttctgattactcatgataaactgacatggctaactgcaagaattaaatcttctatctgagagtaataatttatgatgactcagtggtgccagagtaaagtttctaaaataacattcctctcacttgtaccccactaaaagtattagactacacattacattgaagttaaacacaaaattatcagtgttttagaaacatgagtccggactgtgtaagtaaaagtacaaacattatttccaccataaagtatgtattgaaatcaagttgtctctgtgtacagaatacatacttattcccatttttaagcatttgcttctgttttccctacctagaatgtcagatgtttttcagttatctccccatttgtcaaagttgacctcaagataacatttttcattaaagcatctgagatctaagaacacaattattattctaacaatgattattagctcattcacttattttgataactaatgatcacagctattatactactttctcgttattttgtgtgcatgcctcatttccctgacttaaacctcactgagagcgcaaaatgcagctttatactttttactttcaattgcctagcacaatagtgagtacatttgaattgaatatataataaatattgcaaaataaaatccatctaaatagaa

SEQ ID NO: 177744 - DNA, 825 bp, Artificial Sequence
  derived and/or modified sequence
gcatttcaccctagagaaagaatgctggcaaagatctctaccacatggaaactgttcttaaagctgctgggccctgaaattttactcagcagtttgaaatcaagacatagcttttctcattcaccctcccacttggggctaatgcacagacatgaacatctattgaggaaaaccacaaaaaacttcaaaacagctacaacgactctgcagtctacacttctcctgttactgcttgtgcctctgataaagccagcaccaccaacccagcaggactcacgcattatctatgattatggaacagataattttgaagaatccatatttagccaagattatgaggataaatacctggatggaaaaaatattaaggaaaaagaaactgtgataatacccaatgagaaaagtcttcaattacaaaaagatgaggcaataacaccattacctcccaagaaagaaaatgatgaaatgcccacgtgtctgctgtgtgtttgtttaagtggctctgtatactgtgaagaagttgacattgatgctgtaccacccttaccaaaggaatcagcctatctttacgcacgattcaacaaaattaaaaagctgactgccaaagattttgcagacatacctaacttaagaagactcgattttacaggaaatttgatagaagatatagaagatggtactttttcaaaactttctctgttagaagaactttcacttgctgaaaatcaactactaaaacttccagttcttcctcccaagctcactttatttaatgcaaaatacaacaaaatcaagagtaggggaatcaaagcaaatgcattcaaa

SEQ ID NO: 177745 - DNA, 897 bp, Artificial Sequence
  derived and/or modified sequence
atgaaaacccttcagtcaacacttctgttgttactgctggttcctttaatcaagcccgctccaccaacgcagcaggactctcgcattatttatgactatggaactgacaatttcgaagaatcaattttttcccaggactatgaggataaatatctggacggtaaaaatataaaagaaaaagagactgtaatcataccaaacgaaaagagcctgcagctgcagaaggacgaggcaatcacacctctgccaccaaaaaaggagaatgacgaaatgccaacctgtctcctctgcgtatgtctcagtggcagtgtatattgcgaggaggtggatatagacgcggtccctcccctgccaaaagaatccgcttacctgtatgcacgatttaataagattaaaaagctgacggctaaggactttgcagacatcccgaatcttcggaggctggacttcaccggtaatctgatagaggacattgaagacggaaccttttcgaagctgagcctcctcgaggaactgtcactagcagagaatcaactcctgaaattgcctgtgctgcccccaaagctcaccctttttaatgcaaaatataataaaatcaagagccgaggtatcaaagctaatgctttcaaaaaactaaacaatctgacattcctgtatctcgaccacaatgccctggaatctgtgcctctgaatcttccggagagcttgcgggtcatccaccttcagtttaataatatcgcaagcattacagatgatacattctgcaaggcaaacgacactagttacatccgggatcgcattgaggaaatccgactcgaaggcaaccccatcgttctgggcaaacatcctaactcatttatttgcctgaaacggctgcctatcgggtcatacttttag

SEQ ID NO: 177746 - DNA, 897 bp, Artificial Sequence
  derived and/or modified sequence
atgaaaactcttcagtccaccttgttactgcttttactggtgcccttgatcaaacccgcacctcctactcagcaggactccagaattatttatgattacggcacagataacttcgaagaatcaatctttagtcaagactatgaggacaagtacttggacggcaagaatataaaggagaaagagactgtcataatcccaaatgaaaaaagtctgcaactccaaaaggacgaggccatcacccctctgcctccaaaaaaggaaaacgacgagatgccaacttgtttgctttgcgtgtgtctgtctgggtcagtgtactgtgaggaagtggacatcgacgcagtcccgccacttccgaaagaaagtgcttatttatatgcgaggttcaataagattaaaaagcttactgctaaggattttgccgacatacccaacctccggaggcttgatttcacgggcaacctgattgaagatatagaggacgggacatttagtaagctgagtctgctggaggaattaagtctcgccgagaatcagctcctgaagctgcccgtgctgccaccaaagttgacgcttttcaacgctaagtataacaagatcaagagtcgcggaatcaaggcaaacgcttttaagaagttaaataatctcacgtttctatatctggaccacaacgctctggaatctgttcccttgaatcttcccgaatctctgcgagttatacacctacagttcaataacatcgcaagtatcacagatgatacattttgtaaggctaatgatacctcctacatccgtgataggatcgaggaaattcgcctggagggcaaccctattgtcctaggaaaacatcccaattctttcatctgcttgaagaggctgccaattggttcatatttttag

SEQ ID NO: 177747 - DNA, 807 bp, Artificial Sequence
  derived and/or modified sequence
atgcttgctaaaatctccacaacatggaaactctttctgaagctgttgggcccagaaatcctgctttcatcattgaagtccagacatagttttagccatagtcccagtcacctggggttaatgcaccggcatgaacatctcctgcggaaaaccactaaaaacttcaagactgccactaccaccctccaatctaccctgctcctgctgcttttagtgcccctgatcaaaccagccccaccgactcagcaggactcccgcataatttacgactatggcactgacaacttcgaggagtcgatcttctcccaggactacgaggataagtacctcgatggcaagaacataaaggagaaggaaacggtgatcattcctaatgagaagtccctccagctgcagaaagacgaggccattacccccctccccccaaagaaggagaatgatgagatgcccacgtgtttgctgtgcgtgtgcttgagcgggtcggtgtattgtgaagaagtagatatagacgcggtgccacccttacccaaggagagcgcatacctgtacgctcgatttaacaagatcaagaaattgactgcgaaggacttcgctgatatccctaacttgcgcagactggatttcacagggaaccttatagaggacatcgaggacgggacgttctctaagctcagtctgctggaggagctcagtcttgcagagaaccagctgctgaaattgcctgtgctcccgccaaaactgacattattcaacgctaagtacaataagatcaagtctaggggcattaaggctaacgcctttaaatag

SEQ ID NO: 177748 - DNA, 897 bp, Artificial Sequence
  derived and/or modified sequence
atgaagaccctgcagagcaccctgctgctgctgctgctggtgcccctgatcaagcccgccccccccacccagcaggacagcagaatcatctacgactacggcaccgacaacttcgaggagagcatcttcagccaggactacgaggacaagtacctggacggcaagaacatcaaggagaaggagaccgtgatcatccccaacgagaagagcctgcagctgcagaaggacgaggccatcacccccctgccccccaagaaggagaacgacgagatgcccacctgcctgctgtgcgtgtgcctgagcggcagcgtgtactgcgaggaggtggacatcgacgccgtgccccccctgcccaaggagagcgcctacctgtacgccagattcaacaagatcaagaagctgaccgccaaggacttcgccgacatccccaacctgagaagactggacttcaccggcaacctgatcgaggacatcgaggacggcaccttcagcaagctgagcctgctggaggagctgagcctggccgagaaccagctgctgaagctgcccgtgctgccccccaagctgaccctgttcaacgccaagtacaacaagatcaagagcagaggcatcaaggccaacgccttcaagaagctgaacaacctgaccttcctgtacctggaccacaacgccctggagagcgtgcccctgaacctgcccgagagcctgagagtgatccacctgcagttcaacaacatcgccagcatcaccgacgacaccttctgcaaggccaacgacaccagctacatcagagacagaatcgaggagatcagactggagggcaaccccatcgtgctgggcaagcaccccaacagcttcatctgcctgaagagactgcccatcggcagctacttctag

SEQ ID NO: 177749 - DNA, 807 bp, Artificial Sequence
  derived and/or modified sequence
atgctggccaagatcagcaccacctggaagctgttcctgaagctgctgggccccgagatcctgctgagcagcctgaagagcagacacagcttcagccacagccccagccacctgggcctgatgcacagacacgagcacctgctgagaaagaccaccaagaacttcaagaccgccaccaccaccctgcagagcaccctgctgctgctgctgctggtgcccctgatcaagcccgccccccccacccagcaggacagcagaatcatctacgactacggcaccgacaacttcgaggagagcatcttcagccaggactacgaggacaagtacctggacggcaagaacatcaaggagaaggagaccgtgatcatccccaacgagaagagcctgcagctgcagaaggacgaggccatcacccccctgccccccaagaaggagaacgacgagatgcccacctgcctgctgtgcgtgtgcctgagcggcagcgtgtactgcgaggaggtggacatcgacgccgtgccccccctgcccaaggagagcgcctacctgtacgccagattcaacaagatcaagaagctgaccgccaaggacttcgccgacatccccaacctgagaagactggacttcaccggcaacctgatcgaggacatcgaggacggcaccttcagcaagctgagcctgctggaggagctgagcctggccgagaaccagctgctgaagctgcccgtgctgccccccaagctgaccctgttcaacgccaagtacaacaagatcaagagcagaggcatcaaggccaacgccttcaagtag

SEQ ID NO: 177750 - protein, 423 aa, Artificial Sequence
  derived and/or modified sequence
MMYRPDVVRARKRVCWEPWVIGLVIFISLIVLAVCIGLTVHYVRYNQKKTYNYYSTLSFTTDKLYAEFGREASNNFTEMSQRLESMVKNAFYKSPLREEFVKSQVIKFSQQKHGVLAHMLLICRFHSTEDPETVDKIVQLVLHEKLQDAVGPPKVDPHSVKIKKINKTETDSYLNHCCGTRRSKTLGQSLRIVGGTEVEEGEWPWQASLQWDGSHRCGATLINATWLVSAAHCFTTYKNPARWTASFGVTIKPSKMKRGLRRIIVHEKYKHPSHDYDISLAELSSPVPYTNAVHRVCLPDASYEFQPGDVMFVTGFGALKNDGYSQNHLRQAQVTLIDATTCNEPQAYNDAITPRMLCAGSLEGKTDACQGDSGGPLVSSDARDIWYLAGIVSWGDECAKPNKPGVYTRVTALRDWITSKTGI

SEQ ID NO: 177751 - protein, 423 aa, Artificial Sequence
  derived and/or modified sequence
MMYRPDVVRARKRVCWEPWVIGLVIFISLIVLAVCIGLTVHYVRYNQKKTYNYYSTLSFTTDKLYAEFGREASNNFTEMSQRLESMVKNAFYKSPLREEFVKSQVIKFSQQKHGVLAHMLLICRFHSTEDPETVDKIVQLVLHEKLQDAVGPPKVDPQSVKIKKINKTETDSYLNHCCGTRRSKTLGQSLRIVGGTEVEEGEWPWQASLQWDGSHRCGATLINATWLVSAAHCFTTYKNPARWTASFGVTIKPSKMKRGLRRIIVHEKYKHPSHDYDISLAELSSPVPYTNAVHRVCLPDASYEFQPGDVMFVTGFGALKNDGYSQNHLRQAQVTLIDATTCNEPQAYNDAITPRMLCAGSLEGKTDACQGDSGGPLVSSDARDIWYLAGIVSWGDECAKPNKPGVYTRVTALRDWITSKTGI

SEQ ID NO: 177752 - DNA, 1272 bp, Artificial Sequence
  derived and/or modified sequence
atgatgtaccgaccggatgtggtgcgggcacgcaaacgcgtatgctgggaaccttgggtcattggcctggtaatttttattagcctaattgtcctggctgtgtgtatcggacttacagttcactacgttcgctacaaccaaaaaaagacttacaattactacagtaccctcagctttacaactgataagttatacgctgagttcgggcgagaggcatcgaacaatttcacagaaatgtcccagaggcttgagtccatggtcaagaatgcattttacaaaagccctttgcgcgaggagttcgttaagagtcaggttatcaaattttctcagcagaagcatggggtcctcgcccacatgctgttgatatgtagatttcactccactgaggatcccgagaccgtagataagatagtgcaactggtccttcatgagaaattgcaggatgccgtgggaccgcctaaggtcgaccctcacagcgtcaagataaagaaaataaataaaactgagaccgattcatacctgaatcattgctgcggcacaagaagatccaagacattgggacagtcacttagaatagtggggggaaccgaagtggaagagggagagtggccctggcaagcatctctgcagtgggatggatcccatcgctgcggtgctaccctaataaatgcaacttggctggtgagcgctgcacactgtttcactacctacaagaacccagccaggtggacagcctcattcggagtcaccatcaaaccctccaaaatgaagcggggtttgagaagaatcattgtgcacgagaaatacaaacaccctagccacgactatgacatctctctagctgaattatcgtctcccgtgccctacaccaacgcggtccatcgggtgtgcctacctgacgcttcatacgagttccaaccaggtgatgtaatgtttgtcacaggctttggggctcttaagaatgatggatactcacagaatcacctacggcaggctcaggtgaccctgatcgacgccacgacgtgcaatgaacctcaggcgtataacgacgccataaccccccgaatgctgtgcgcaggaagccttgagggcaaaactgacgcatgtcagggagactcagggggaccacttgttagcagtgatgcccgtgacatatggtacctagctgggattgtgtcatggggggacgagtgtgccaaaccgaataagcccggtgtctatactcgtgtaactgcattaagagactggattactagcaagacaggtatttag

SEQ ID NO: 177753 - DNA, 1272 bp, Artificial Sequence
  derived and/or modified sequence
atgatgtacagacccgacgtggtacgagcaagaaagcgcgtttgctgggagccatgggtgattggactggtcatattcatttctttgatcgtgctcgccgtgtgcatcggattgaccgtacactacgtcaggtataatcaaaaaaaaacctataactattattcgactctgagcttcacaactgataaactttatgctgagttcggccgggaagcctcaaacaattttactgagatgagccaacggttggaatccatggtgaagaatgcattttacaaatcacccctacgcgaagagttcgtgaagtcacaggtcatcaaattctctcaacaaaaacacggagtcctggcacacatgctgctgatctgcaggtttcactccaccgaggaccccgaaaccgttgataagatcgtccagctagtcttgcatgagaaacttcaggacgcggtagggccccccaaggtcgacccacactctgtaaaaataaaaaagattaataagactgaaactgactcatacctgaatcactgctgtggtacacgccggtcaaaaactctaggtcagtcactaagaattgtcggggggacggaggtagaggaaggggaatggccctggcaggcttcacttcagtgggatgggagtcaccggtgcggagccacactgattaatgctacctggctggtgtctgccgcacactgctttacaacctacaaaaacccagctcggtggactgcttcctttggggttacaatcaaacctagcaagatgaaacgggggcttcgtcgcataatcgttcacgaaaagtacaaacatccatcccacgattacgatatatccctggctgaattaagctcccccgtgccatacacaaacgcggtgcaccgggtgtgtctgccagacgcatcctacgagtttcaaccaggtgacgtaatgtttgtaactggcttcggcgctttgaagaacgacggttactctcagaaccatctccgccaggctcaggtaacactcatagacgccactacttgcaacgagcctcaggcatacaacgacgctatcacaccaagaatgctgtgtgcaggtagtttggaaggcaagacggatgcctgtcagggagacagtgggggccctctcgtttctagtgacgcgagagacatttggtatctcgccggcatagttagctggggcgacgagtgcgccaagccaaacaagcctggcgtatacacacgcgtgaccgccctgagggactggatcacctctaaaaccggtatttag

SEQ ID NO: 177754 - DNA, 1272 bp, Artificial Sequence
  derived and/or modified sequence
atgatgtatcgcccggatgtcgttagggcacgaaaacgggtatgttgggagccctgggtgattggactggttattttcatttctttgattgttctggccgtttgcattgggcttactgtgcattacgtgaggtataatcagaaaaagacatataactactacagtactttatcatttactacagacaagctgtatgccgaatttggcagagaggcaagtaataattttacagagatgagccaacgattggaatcaatggtcaagaacgcattctacaagtcgccactcagagaagaatttgtgaagtcacaggtcatcaaattctctcaacaaaaacacggagtcctggcacacatgctgctgatctgcaggtttcactccaccgaggaccccgaaaccgttgataagatcgtccagctagtcttgcatgagaaacttcaggacgcggtagggccccccaaggtcgacccacactctgtaaaaataaaaaagattaataagactgaaactgactcatacctgaatcactgctgtggtacacgccggtcaaaaactctaggtcagtcactaagaattgtcggggggacggaggtagaggaaggagaatggccctggcaggcatcattgcagtgggacggaagtcacagatgcggcgcaacactaataaacgcaacttggcttgtgtcagcagcgcactgttttaccacctacaagaaccctgcacgttggactgcttcattcggagtaacaattaaaccaagtaagatgaagagaggcctgcgccggatcattgtccatgagaagtataaacacccatcccatgactatgatatctcactagccgaactctcctccccagtgccgtacaccaatgccgtgcaccgtgtgtgtcttccagacgctagctacgagtttcagcccggagacgttatgtttgtgactgggttcggcgctcttaagaacgatgggtattctcagaatcacctccgacaggcacaggtcacactgatcgacgctaccacctgtaatgagcctcaggcctataacgacgctattacaccaagaatgctttgcgctggctcgctcgagggaaagactgatgcctgccagggggatagtggtggcccgctagtcagcagcgacgcccgggacatttggtatctggccggtattgtgagctggggagatgagtgcgctaaaccaaataaaccaggcgtatatacacgagtgaccgccctccgcgattggattacaagtaagaccggcatctag
